United States Patent Application Publication US 2014/0057251 A1 - sequence listing, part 109

SEQ ID NO: 197439 - DNA, 2072 bp, Cannabis indica
gctatctgtctcgacgatggcctaagttttattaagtcttattatatggtattgtattatattaaattagattatatactttatttttatataatatcatgttaaattttaatttatactaaaatattatatatttaggtacctataaaaatcaataccacatataattttacataaaaatattgcataaaataaaatttaatataatattatacaatacaatacgatgtaatacgacacaccaaacgaaccataagagcaaaaaaaaaaaactagcgtatatatttgtcaaaagactttttaaatttatcagtacagtattaaaattataatatgaattgttttattacctttatttatattgtttatttttttttattaaaatgtgctaacaaaatattatttttctgtaggttaattttgtggagggcctactattatgagattttgccaataaatttattttgaatataatttgtttgagagttgttatcgtttaactattgagaatttcttttattagtgtttaatatcattgttaagggttaattcacttttctttatcttattttattttttaaatgttttgtggaccattcttgatatgttaataagttggcgtgtaattttttcaatgttataagttgaagctctagttcttttagtatgctatttgaggacgttatacttttattgacctctctctctgtcaatgggatttgcccagagcaaaccccaaactccggcgactaattgttgaaacgaaacacaaaatcaaaatcttcttccctcaaaacctctatattcgtccctatctctctttttctgtcagagatgcactcacagagaagtcgtcggtggtgatggagaagcactcgggcgatgcgtttggaccacgaaatcaagactacgccccccaaaactcaagtccccccgaaactcgtctcttttgttttccttctctctctctctctctctctctctctctctgtattttcttgtgcaagtttgacgaggatgacgatggtgttcgtggctcgaaggggatggggacatgttcgtgggttcgtggttcaacagggatggtctgggttcgtgggttcattattcgatgacaaggatggtattcttggttcgacaggatggatgaattcgttggttcatgtggagatctcgtaagtggatagctggggttgggctttgcaatgaaagtagagatctcaaatctggttcaaagttgaagatctgaaatttgtgtgtatataagtgtgtgtgtttgtttgtttgatctaattttgtttaaatttagtttaagttttgtttaatttttttctatgtgtgatttggatataaacagtagggtgaagtggtagtgtttgttgcactggtggtgggtgatcatgagttctggaggagggtggtggttgttaatcttggggtggtgatggtatatgtgaaagtgaactgaaaaaataaattagaaaagaaaattgaagaagaaaaataaaggatttttttaaataattttaatttttttaatttataattttatttttaaatatttatttacatgaatcaataaaattatgtcatgtgtacattgtgtctacataaatgtacacatggacagtccaacatgacacttaacacttaaaatgaatgaaaactgtaaagtgctaacaatttcctagcttttgtggttttgtcgcaaataaccctttgttgcttaaactttcagggacatttttgttctatgttgctcgcttattttagtagttcataatttgacaaaatatgtattttagttaaacgatgagctattctaattcaatgaagttcttgtttgtttgtagatatctgcaaatttatgaaatattctaaattactacctcaaaaataaaaaaataaaaaactctatcaagtgagacaaatttagtggtacccaaaaattatagctaaacaaaaaggatggtaatgagattagcatgaagatcaactttttcttttcttagttggcgggaaaaaaaacgtgttgtgatgttttaacacaaattaaagtaaaacaatctttg

SEQ ID NO: 197440 - DNA, 2313 bp, Cannabis indica
gaataaaacaaaattgattttcaagtggatttgtactacataaaacactaaattaccaaattaccaattaactaacattggtaattaatgaaccctagaaatggttacttagttacttacttccataacttaaaaaaaagttgatttaatgtattaatatgtatgattctattaatctttgataagagatcctaataataataataaaatataataaaaatatattgatgaaaataagtataaatagttttggttagataattttctaagacaagttttttttaaaaagaaatacttgaaaattttacactctaaggcaagacaattgatcacttgtaaaattaaatttgattttgaggctcttttaataaaaatgttaaaaaataatggcaatttaaaaaggaataatttcataaatacacaaaaataacaaaaaaaattacaaaaatataattttatagaattttacatattttacggtttttaatattttatttatagaaaatataatttgttgatatatttttatgttatattcttgttattttggtgttgatttttgctatttattttttatttttaatattattttgttgttgttttcctgctagtttcatattattttcttattattctatagaataatgtgaatatatatataaaaactttaaagataaaaatgtaaaaaatttaggtatttttttcccttaggcaaaaaagaccatatgagtcctagccctaaaactagggctaggctggcttctttgaatataactatgtataataagggaaatcatttggtgcctccaatgttcgtagtcttatattcccgtcacactaatatttgtggtggcgatattatgctgaggaaattacattctatactttttttatattgttctcttttatttttaccttctattttaaagtctatcattttttttaaacattgtaccaattttgcccctgtcacttcaagatactctccatgcgattctcttatgtgagggtattttgggtacaatacatataaaaagaggtatgtttcaattaaatataaaattagaagtaaatttgaccaattaattaataaaagtagtatttttcaacttactcctattatgctctctctcattattgtgaagagatcaacactcattatttttaaaatattattttggtgtaagtttggaaacaattattgacatattttgtgttattaaattatatattgttgatgtaacttttaatataaaatgattaaaaaagaaaaaactaaggcaagactaaagacatgataagatccttcatttcattattaccaatattattgaataaagcttatttagacatatgatacttttatttgtttattttgattagatttgaaactctaatgaataaagcacacattagtcaaatgttcttgacattatgatttagatcatcaatatttatcttaccaagtttcataatttcatttataatgtcaacttggaaaattgaaataaagaagtttagatttaacattattattaatgtatattccttttattttaagattttcttaatttttttttgttgaattttttatattttttaatgtatgagttgaagttgaatgtcaaaaatctaatgacttttgatagtgggccttgataatttattaaaggcccattatttttttcatttctattcattatgttgctacatgcaattatttctaagagattttctaaaatagcatttcttttatatcttgtttcttttctttacagtctttaaagtcttgctgtttcaaatatacaatattttctaaaaaatattgactttcaaccttaaatatgcttaccttttattttctttaattgattagtttattaatattttaattaaaaagataagaaagcatccaatgacattagtataagccaattaatgtggcatttacagtaaaagttcttgcaaaatttgtcttgttcactcacaatatgaaccgaaaaaattaactctctattcgtttaagatttgtgtagattacttttttcatttataaatgttgtattcaaataatgtgtctcttaaataactgaggtagtctcagtctacaatatctttccatttttgaatattaaagctcattttttttccatgcagaagtggtgaaaaacccaatatgtcttgtggtcttattccttaaacccttaattaagattcggttagttagttagttgtttattaactgatttaactgtcaaatatgacaacttgcatattgagtcttttagcttatataaagaggactactcatct

SEQ ID NO: 197441 - DNA, 709 bp, Cannabis indica
tttttttaaaataatgtgtaattatagcaaacactccactcatttttgaaaatatttaaaatcaatttagtatagtacaacttaatgttaaactcttttttatatcgcaaaatattttaaataataaattgattttagtaacttattcaaatgtcgaaaacatgagtgtcctactgtaaaattaaaaatagtgaccctactatagttgtagcctaaaattataatatacaaacaaataggtaagcccttcaaaaacttagctagaatccattttcatgatttcccaactccacactttctctcaactcacccaccaagactcccaccaacttcccaatccatctcctaccatctttcgaagcttctcttcaacttcgaaaacctttcccaaaactcctcacaaagatcaaaatgatagtcgaaagagttgttgttgcaaaatttaatagctattcaagtgctcacaatcacaatttataataaatcatagtaaaaatatcgtcccacaatgactgattatcaattatcagtgaactaatcttttatttctatttgattaaataatttttttagaatttttagcaaagaaaataataaaataacaataaagatttaagaaatagcaatgagaatttaattaggacatttatgatcatcaactaatctctcttttacttcttaatgcagattactcaatttctatttttta

SEQ ID NO: 197442 - DNA, 550 bp, Cannabis indica
acttgaaaataaagttaccttttgtctatcactcatcacacaccaaggaagaccattatatgtttctccaatttcacgtcaaagtagatgaatgaaccacttccatgaatctgtattttcagcctcaacaatggcatatgcaattggataaaaatgaaggtttgcatctaatcctatggcagaaagtaagatccccttataagggcctttcaaatgacaaccatccaatccaaaaaaaggtcgacatccaaccaaaaatccttgttttaccccattataacatataaatattctttgaaactgaggtctccaaattggcactcgagatttaggtggaacttcctcttctacctcctcagatggtttatttatgtccacaagctgactttgaataattgcagcactacctggattagtttgcatcaccataaatgcatatctcctaagttttccataggactgaacatgattaccctcaacttcccccctagcaattgctctagctctccagagccttttattattcacctcaattccccaagtatccttc

SEQ ID NO: 197443 - DNA, 802 bp, Cannabis indica
gcacaaaattagcacgagcatgactaaacacaaaaaaaaatataagtttagacacgatatgatgctacaaattggtatgatactgaacgaaaaatgtgtttaagcacgatacaatatgagaaacacgaatgacacaacatgagcaaaaatagattaatttgaaagcacgacacacgacaagcttgatatattaataaaccctaaaatttaataataataataataatagatatgtatttatcaattataaataataaaacttaaaaataatattgaatattgtagttctataattaaaacaattaaaatatctaacattaaaattatatatcaatttatttagaggataatataaaaatttgagtatttattactaaatattcaaattttaatgctaataatttttgtatatgattacatataaaatattattgagaagttatataaacataattaaattataaaatatgaatatagtttagtaattttttttcttttacgcacgaattcaagctgggaaatgaaaatagactaacctatttaacaaatacaagttagcacaagcaaaatataatacaaatcttaacacagacacgaaaatactaagctgttgggtgtactttaaaaatattggtactacaacaccgcaacactaaaattgtaattagcaagtcgaattgaaatcattgacaagtttcaaacctaatcagtaagaaataaatatatacaacacaactcaaaatctgaaaaagagtactttcaaatccaatcggggtttctaattaattaagaagaaaaaaac

SEQ ID NO: 197444 - DNA, 800 bp, Cannabis indica
aatttggtttttatatttagttggttggattcttgagatttttggcatgtagttatatagaaatggatctgtgaattggatacaagaaaaaataatgaatctgaaaatttggatttactgtttttttttgtttttatatgaatcactttgcaggtcagttagtgagtcagaaaaattggggttttcgatcatgaatacgtaatgattcttggtttgtttgttattaatattccaaaataggtcatattatcgtcaaatttgtctatatagcaacagcagcagttgtgtttttgtagctataggatttcgtttctgattttgaccaaggaaaaaagagctgctgggcaatctgggaatccatacaataataacatgggttatcttaattcggttctttcttcttcaagccaagttcatgctgatgatgcacctgtgagcggcggtggtctcaggttaatttctttttattttctttatctttttcctcatttttttttatggatttggacctgtttttgtacgtagctttgtttgattttatcatttgaatcaagattcctacctattattttgttatatttctttaaattgaagtccaaattaggaagcttcagaaaaacccaatggaagtgttgattctttatgatgactagttaggatttgtttcacaattcacgaaatttgatttaaaatttggggtttctttggtttggactgcttgtaatttgtttatggttttaaagaccttgataaacacactcactcctaatgtttaggatcaaaattaaaattcctttatt

SEQ ID NO: 197445 - DNA, 871 bp, Cannabis indica
tttaggttcaaaatcccgttattagcaatggaaaaaaatcaaagaatgatatagatatttcttccatgtgatgtaaaggatactctggtactttgattttgttattgggttttatatgtttatctggtgatcttgttgttttgattttgaaattaagggtcttcaatctgaactagttttgctactgcttaactaaatgctaataatgatgtatataatattttaataatgggtctactgggaaagagtgtgacattgttgtgatgttttatgtcaaacagtcagaatggaaaattcagttatggatatgctagctctcctgggaaaaggtcttcaatggaagatttctacgagacaagaattgatggtgtggagggggaaattgttggtctctttggtgtttttgatggtatatctctttctctcgcactttataaaataatgcaaatctgaatccattatactgtactcaacacaggatatatacaacgttttatggagattgtgaatgctaaccatacttattttcaccttgaactcaccttctagtcacatatcaatatcactgtgcatgtatagtgttattgtactcttttaaatggtgtaaatttatctttatctgaggaacccattggggctgcttttattctagcggcataacaatgctataggtacaaagttattattatgactttttggcttgctttattttgcatctgttttgactgtccatgtactaattctctcgtgggcaaaagttatttggtagttcacaaaccggctataattattcctagttagtatggtttatgtgctattggatgggtatatgataatatgcatgtatataactatgtcagtcacagttttc

SEQ ID NO: 197446 - DNA, 902 bp, Cannabis indica
aaagaaaaaaacaaacaaaaccatatatatttctattagtcattagtagtctctagtattttcgagacgtgttgtcttttaattaattaataatattttttaaaagttattatattaaattatatggatataattgcacttataacaattttaacacgtaaaaagatgttaaatattactagtaccacttaacattcctcatttaaaaaaaatataatttaaagatgcttttaataaaaaaaatataaaaattatattattattattttgctggaaattattattattattatttgggagcaacattaaggtatcactattttgaattcagcactagatgcatgtatatattttcagtatttgaaaaaacaataattttattcatatgatagtctaatattattgacattttttcattagtttttttttttttttttgctaagaaattttttcataagattattaccattgacatttgggagcaattaattccctcttatccaaaaaaagacatatttgattatttgacccaatagccataaatagaaaataaatggcttctgtaaggctgtgtgtatggtggggtaggggtattaaaaagtggcaaaaatataaaaaaaaagaaataataataaaaaataaaaagtggccttttcattctctgttccattagagactttttgtggaaaaagcaaaagtgttaacctgaagtgaaagcaagcaaaagcaatgtcactctctcaatctcagctcacagatcccgccattaagctcttcggaaccaatattcccttaccgccttccaactcttcttctgagacctcccactccgacgactctccgctttctcaatctcaattcatggtaccaatcacctcttcagtattttttttttcccttac

SEQ ID NO: 197447 - DNA, 1037 bp, Cannabis indica
ttttcttgggtggctggttcttggtcccttgattttctggtttagagttggctttgttgttttgaaaagcgaaagccatgcttgaagatgagtcggctgtagcagcagtaactcctttctggttttcttcttgtgtaacaagatgaaagactcgattaacttcggggaaggggatccatgagaagaatactaccacgcacttgagaaaaatggtcagataaacccatgagaaaagaaataacatactccatatgatagtgttcttgtaatttctttacacccccacatgtgcaaccattacaagtgcaagtaggcctgtaattagatagttcttcccaaatggttttgagtttggtaaagtatatactaatactttgattttcctgccttagattcataagattctttctaagattgtatatatgaggtccatttctttgatgaaatctgacctttaagtcagcccaaatggctgaagcagattcgtcatagagtatactagatgaaatatccttagaaaccgaattcaaaatccatgatatcacaatgttattatttctaatccaagcattgtaaagaatgtaatcagaaggagaaggtttagggatactaccatcaagaaatcccaatttgttcttgactgaaatagagagctgcatagctctgctccaagaaatatagttatcttggccagttaaaggttgggatacaagaacattacctgggttatctccatggtggagataataagggttcgacggatcttcaagaggactctttacattcccaatttgcacattcggattcgtctgtacaaggaatatgtgttgcagaaggagtcgagtctccgatctctgtctgtgattgcgattgatcttcgctcgacatgttgaagactcatacaagagagattgttgaattagcaagacaaattgcgccgagaggtgatctcggggagaacaaggcgtcgccggagataagaacacggcgagtgcagcggaagaatttggatcgatcagggggaagcattcattccc

SEQ ID NO: 197448 - DNA, 536 bp, Cannabis indica
tattgattaatcttctcatacttttcttctccaatcataatattcattattctactttttctttccctacaactttggaataattgtcatcaatttcataaaatatttaatacagagagcattcagttaaaatccttttagtgatgatgcagttttagactatatatccttatgtccatattccatgatcttgtgtaggatttttttcccactcatttacatcattatttaatattatattacaggcctaatatatatatatatacatagatttatatataacaaaaagtgaatgtggttttagttttacattacataagtggcttacaacatatgcaaagggaaggaggaagagccaggtgggtgcttgttgttcactcttattattttagttcattgcatatactctcttcctgcctcctctttcgctctcttacctttccttgtgaccaaatcacttattgctataattattatttattctttcaaaatttaaaccctcaaattaccattacgatttatacattattgtgttc

SEQ ID NO: 197449 - DNA, 1212 bp, Cannabis indica
tccatagctaaaagcttataaaagtaccttagggactaaggctcaataatgcccgaaccatataaaaatacatgtattctttatcttttattcaatttttctttagctttatttttctaaataattaatttttgaaattctcgataaacaccatgactaccaaacaaaattgaagtaatagagggaaaaatttcttcaactattacaataactaaattcaagctaatattgaccttatttgatcgagtaaaataacatattacaaaagaaattagagaaacagtattatgaagtataactacatattaaaaataaataactatgtaaatatgacttttgaggaagctcaacactctaacatggtgagatgtcaatttagaaaattttcaagtccttatatattaagaaatataagattcgatcttatcgaatgtgtgtattatgtgatacttaaacatatcaataatacttagctaaatgaattgatgattacaagagaataagcatctttatataaaggagaagaactaaataaaccatctaataatattttaactcactaatacaaaaataagacgaatataagaaagcgtaattaacacaacctctaactcctaatattacaaaatgttatatgttaattgcagtgtttatgatcatatgtacctgctatttatgtattctattatattctatttgactaaggaatgtagaatgcactgtttatctaattaatgtcaagttttgaagaattttacaaaaatcgtatgaaaaaaagacaagaaaccatgctctcatagaggaccagccctgaaaattaatagaactaagatttttttaataaaattaagaaaaaaatccttttaatatataaattttatattttaatttattattttttaaaacaagttacatgggctgatgaggaaaagcacagataataacacagttccctttgcaattcttgtatgggcttaggtgggttaattcacaaaattttacataacaatttttttttgtctataggtcttataaatgtttggggtcctggtttgagtgggccttaggcatgggcctagcccgccttagcccagggttgcccttggtctcataaccattagtcacataataaaattagggaaacttacaaaaatactgtaaaatgggagaaagtttataaaaatattgagacacaaagatttttacattttt

SEQ ID NO: 197450 - DNA, 672 bp, Cannabis indica
tataataaataagattttttacctcaaattataattattgtaccttcatcttctattaaataaaaagaatatataaaactcattaaaattatttattgaaacatatatattaataatcttgacgaagaaaaaaatatataaaaaatatatgaatgttccccgttaagaaaatatagtcatatatgattgtgtacaaacgaaaaaaaattattagtaatttttttatgatgtattgtaatggactttgtcaaaataccaacaaatttagaataaaatatttagaaagtgagaaataaatgatattgaacttaagtaacaatagtccttattggctaaaacatattattatataatagattaatattgttacttactgatcaaaattacaaaagtattttcttcatcatatttttctgtagttccatttaaaagatcatatttttctatcatcaagattggttatattagaagaaaattactcaagaataaaaatattaaataataaagtatggacaaaaataaatttgattaagaatatacggatccaaaaaaaaaatatcttgagttgcatataaaattgtgttgtatatttgaatatttctgtattaatagggtcaaggaagaaaaataaagaagaaacaaccctaaattattaataaaaagtaaataaaa

SEQ ID NO: 197451 - DNA, 754 bp, Cannabis indica
tcataatattattaggcaccctggtgcctcatagcatagctcatttttaataccctaatttttttttgtaggtttgaccgtttgagcactctatcaattctctaatccattatttaaaatacattgttaaaacttaactttttaagtcaatagatcacccttggtcaaggtcattcattgcttctttgtaagtcaatggatcgtctttgtctatgtcagaaacaagaacataaatttatgttcatagtggataggttgtctcacaatctacgatgatgtattaggattttattttcaggaacgtagtaattactatatcaatcattcaactaatagtgttaaaattgttggtttaaaaatctcatttttgaattccccaataactaattgattgtgtgacttatgactttttatattgtcatgttcaaaaaaaaatataaaacaataaaaaataaccagaaaaaaaaaattcaagataaatataaaaaaattgatttcatgtgtttagtgaaaatatattttgtaaataaaattattcgaaatataaaaataattttttcttacgtatttttttaatttttttgtttgaagttttaatttattatgtaaaaatttcataaagataattgaaagataattgttaaaggagcattagtaggagacccagtatgagaatcctgtaaaattgtaaatgaaatacaaggtgaccaaacacgtacaaaaactaaaaggaccaatcacacaatccgcaacc

SEQ ID NO: 197452 - DNA, 614 bp, Cannabis indica
cctgcactggtatagaaagaatttatattgaattcttttgcgttgtcagttctaatggctttaatttttgctgaaaactgagtaagtatggaggagtaaaaagcagggatgggtgtttgcacttcccctttggttttcatcatgtatgtccaggtgtatctggatttatcctcaacaatggtgaggaagtacttgaagccttcaaggctaggtaaatgaaagggaccccaaacattcatgtgtaacaaatcaaagcaacttttagagaagttgttatgagaaatgaatggtagtttttttttatggcaagtaagacaatgtaacatagactgtttattaaaagaaaaagcattctctttagtcattcctgtcgaaattgttaagatggatgaccaaggtaattgtgccataggtcattcttttgaattacagtgttgacagtacatttatgatatgataaatgaggttttgaaccagttgagattggtgtttgcttcagaatgtagagctttccaatctttctaggcatcccaaccttcgaagtcactaagggtgcctgaacgaaactgtgagcattagtgaaaaataccaaattgttgtggttttcaaggtag

SEQ ID NO: 197453 - DNA, 1104 bp, Cannabis indica
actagaacacatatagtttgtcaacttcctttgtggtgggtagctgtgcaattagcattggagttttgttccctttgagttttctcaattgaataatattaaaatttttgaaatagaaatttcactatcaccaagtatgaggccatttttattcccctcgcccgatattctccaagaactaccagttgcgaatcactaaagcatcttatggatttagcttgcagtcctcatgcaagtattagaccaacaaacaaggtttcatattcagcttcattatttagggcctcgaacccaaatttcatggcttagtggaattgatagccatcaggtatgaccaatatatatcctgcccccaagcccttttgatcagacaatttgtcaacaaacaatatccatgtaacttgactttgcttttgaatttcttcttcttcgagcaacctagtgcatttatctatgaagtcgccaagagcttgtgcctttatggtagttcatggatgttaggtaatttcaaacagttctagcttgacattccatttaagtaatcgtctaaaagcttctggtttcattaatacttgtcaaaggggttgatttgtgagtatatttatggggtgtgcttgaaaatatggatggtgctttcttgatgcatgaaccaagaaaaatgagaatttctccatgattagatatcttgactctgatcccaagatatgcttgctaacatagtacattggcttctgaacctttttgtcttctcgtaccaaggtggcacttagggatgtttcagttacagccagatcaaaatataacactttgcttgtgatttgtttaaacaaaatgggaggctcccccggatgctttttaagtgcctagaatgtctgcttgcattcttccgttcattccacattattacttccactaagaaaattgaagaaatgtaggcagtttttttgtttgttttttttttttgattacaaaccgatttagtgtcacgatgcgacaagtaagacattgtacatatttctttatttgaggtgaaggaatttctatgagagcttttatcttctctgagttcgcttcaatatctcttgagttgataataaaaccaaa

SEQ ID NO: 197454 - DNA, 588 bp, Cannabis indica
aaaaatagtatttttattaatgggaactatagcccaattaacacaagtgggtccgtccctaaagattagtgaacaattttttatataaaatatatatagaacttaatattaaattactcaccatatataacatattttggtaatatcaaacaccatatttaagtaatatcaaacaccattaagtaatatttttcatatgcgttaatattgaatttatttttcgagtttcttctttggaaaaaaaaagtgtactttgattgtgttttgatgaggaaaagagacacatatagtgcgataaaactaagtgtggcggtcgaaatgtagtcaaacttggtcggcggtttgttttcttgataaaaaaaaatgtgaagtcttcctccaatttggcaagtcaatttgcccaacggctaaaggtatttattttaatatgaaacgcttccttttcggcctaaaaattaaatcttttactttttcgtgtaaaaataaaataataataataataataaaagtagaattaatgagaggaagtgaaggtaggtgtacttgatgtgagtgtggactttataaaaatatataaagtaacagctt

SEQ ID NO: 197455 - DNA, 1900 bp, Cannabis indica
aaaattagaaaataaaaatattatcaaatggcgccttaatatatctttcgagatgttcttatactttattgagacgatcccatcaattctgtttctgtccctagtaaggaaacgtttagcataacatttgttataatttgttctaatttttgtactctttaattcgtaaacatcactcactataaacgattccacaattggcagacatcgttcccattattaattttaagaaaaacgagttgggacgtaacgagagtgttgtttaattttttttcattttcattttcattttcatttttcttaacaaaaacgtgtttatcgttgcaattattatcccaagattatctccacagtccacacaatttgcatacgtacacacatttccgtccactcattttttttatgtaagtactatatagggaattcattcatttatttattggccaaatatgagggatgcaaaaccacaaacattctgagttgttggattgataaagagtgtttttttagtatcctaagactattatatgtctatttaaaagtaagggtatacatttagttaaaattggttactgctcaaaatttatctctattgtactaccatctacattaaaataatcaataaaattggtatagtgtatttttttttctttattttttaattaactagaataagaaagttgagtgcttataataacgcgtgtagaaagtcaccgtataattttatttgtatgtaattgaaggtaattacataatttaacatgtttgtctaaccatacaattacagtaactgtgtaattgaagatgattgtgtaattgaaggtagttgatggattccaattacacttcaattctcatggtcccccgtgagaattaagtctaattacaatgtgtaattacaaaaacttttcatttaaaacatgaactactcaaaaatattatttttcccgtgtaattactaactattttgtcaaataaaatattaagaattcatatgtaattaccatctcatttccaaacacactttatattttaaaatatagtgtgactagactgtgttattaccagcctaattacacaattactttcaaacacactttgaagttaagttgtaattaaatttttgatttagtttgtttattagtgtatctaagcaattatgagaaaattcactaattcattttttaagtgtatctaagcaattatgagaaaaaaaaaattaaataaaaagaagacagtgacaaactttgcataattatgtagcacactctttaaataagtacttcgttagacacctctatctgttttggtattcatgaaagtttttttaatttttttttatgattgtgtacgttgtaattagttaaaactacatgtaaatcttttagaaaattttgaatagttaacattgctgaaaattaggagtgttcaccaaactactcacactgcacaaactgtctgcaccacgccacatcgcataaaaaatacggtttaaaaccaattacagtacgattgtggtttttatttttaccaaatataaggtgtagtgcgatttataattttgaatttaataaccaaaccataatgtattgaatcaattttctaaatttatctaagtcaatatatgtgcaagtctagccaaaagaatcaccttttatttttttttttctttattattatacttctaattagtactcttcttctttgtcaaatataaataaaaatttacacaaagtacttacaatttgaattttttttttttacatttttatgaaatctatttttgacaagtttttcacttttattttttcgaaagaaaaaaaaatattgttttcacattgctttcctatagcggcaacgtgaaatagaaaaataatccaaataataataattgagaaaa

SEQ ID NO: 197456 - DNA, 1707 bp, Cannabis indica
tttttttttttgagataaaatgcatattatgttgaatcaagaatttataatacaacaagcatttagaggtggcggtagaacctccagccaagtacaaatagagtccaccaagagagcatactttgctataagtgagtagcagtattagcatatctatatacatgagaaatctgcactccagaaaagttggacactaagagagaaatattagctaacagataatgaaattcagagttggaagcgtgagaggattgtaatcctttaaccaccaaaagagagttggtctcaataaagtgagttggtaaatgaagatctttaagccattgcaagccatacattagagccattgcttccataacttccagtttaaaggtacctgggaaaggcatcgacatagcagcaacaatattgccactgctgttacgaagaactgcaccaaaaccagaggagttattcatgctgttaaccgcatcatcaatgttcaatttcattcagccagcctacctgatggtggattcatccaaggtgaatctttgttgacaacatgtattgaggaagaggaaccagctgtgttcagtttcatggattgcctggctgattggaactcttcaagatatgcaaaagcgaagtagagaagaacatcatgcggccttggtttttgttatgtttttctttattcctctcactccaaatactccatagtattgttgcaaattgctcaaggtaaaggagagtccatgatgcagagacatgttgtagctgtttgttaagagtcatatgccaagttatgtgattactgagatcaaaatcagagtctttccaaagacgtttgggacggatacaaaaaaatagagcgtgtggaatcgtttctttatcacggtggcacaaagaatagataggggaatccgcaatgtgtcttatatgtaaaatatcagccacaggcaagcagtcatgaatggctctctaaagaaaaattttgacttttgatgggatattcagcgcccaaaatttcttccaccacctaaacttctacttaatattttatttatatttatatatataccattgaatataagattcaccttcgccacatacataaatggaccaatacctaacaaaaaagaaaaagaaataataaagctttgtgagtccaataaataaccagtacgttgtgagtccaataaataataaagcttggcagcattatatattcaactttcatcaccaaaaaagaaaagaaagtttttacaattaagcacaacaatgaataagtttctgatctccccagcagcaaactctgctccttctgtttgtattgggttgatcaaagtatttttctttgttattatttccatactatatggtcataacaataacaataataataataatatgggcgttattggtgcaacaaaagtaatgaccttgaaccaaacagtagttcctgcattgtttgcttttggagattccattatagatccaggcaacaataactacctcaaaaccattgttaaatgcaatttcccaccttatgggagaaacttcattggaggcatccctactggaaggtttagcaatggaaggattcccacagatattttaggtacatatatacatataaaattgtgtactaattatctaatttacagctaaatgtacatacccttctctttgtaatacatatctagcttagattgcatgtccatc

SEQ ID NO: 197457 - DNA, 1506 bp, Cannabis indica
gaaattttgaatagggattttatgactattagcttgtctgtagctggaaaggaatatgaggatctttgaatattgggggtgggttgtggttcagtttggggcaaggctttaatatatagacttatttctcttaagaattataaatagtgattgttttcagaactagtttggagttctcttttgaacatatgatgatattttaccatcttttggttctttctctatcaataaatagctcttgattcttatgtatattaaaaaatgtgtcgaattcttcattcctgtcataggagcaaacagacaacattctcattgatcttgtcattgtcataggctgaagaatttggtgatgcatttggaattacattgtttcaatttcgtactcatctctattatagtgttcagtacatcctcatttgcaattcaataagaactttcatttcatatcctagtttggttagagatgcctggttttttttggttagattagataaaagactgcatcttatctttctttgatagagttgtcaagcaatctacggggtttcttttttcattgttgttgttgtaaaacatgaattttctgttgatacattgccaggttgagagatcttcaccaaaaatgcacaaaagagatggatgagtatgttgggtgcatgtattacaatacaaacgaatttgatttatgtcgcaaagagcaggaagcatttgaaaaagcatgccctttggaatgagatcttagtcctcatgtttcaattgttttgcaataatttggacagttttgcagtgctgttgttttcaatcagttctgatatggttctttaagatttatcttatcttctttgtatgtgaaaaagatcttttttctgaggaataatgcataagcatggaaatgttaaaaccataatttgcagatatctgtttttttttttttttgcataacaaccattcgtattgatggaaacacaaatggttgaagcaagttattgattacggatagattgctctaattttagcatcttattaacttttgctaaaaagaatagaaatagatttgttaacattttatgtgaaatttagtacaaattagtttgttttagaaagtggaaactacacagtatgctaatttaaaaaactttttacttaagtatggcaaatttaactttagatgggatgcttcaagatgttgctggtgagacaatattctttgtctctctttattcttcttggtcaacacactcatctctatagtctatttctcattgctcttatgaaaaaatgacatttgttaattttgtattgttattttgttgcttgaatatctttttattttagaaatatggagaacaatgtaaacgaacatgataacaacgtgaaaatagtatagtaatgtattgaaattttaacacttattgactttagtggttttccttcaagattttttgaaaattatcaaaaacacacaaaatatataaacaaagtctatcaatatatgtgaataaaaat

SEQ ID NO: 197458 - DNA, 1611 bp, Cannabis indica
gtatttataccgcaaattactaaaacaaatacaagaataatagccattaatgaccgcactattagtaacaatccaaagtcctcactttaaagtgagagtaccaatgacgacatttaaggatcgtcactgataaaaactatttttcttttgtaaaataaaagatcagtggcgacataaatgattattgacgacaatattattgttgaaaaatttatcaacaataattttatcgtcagtaattatttttttcttttcgaaaaagaactgttggattgagcaagaattttccttccaaacgaatcaacgacgacaaagttgccagggatggactgacacattatcgttgattagtccatcaatgacaactttgtcatcgttgatggtcgtctttgatgtttgggcttttaaaaaataaaacatcaaacatttcatctcctcttcattccatttctttcatctcatctaaaccctctctatgtctctttctctctctgaaaaataaccactgcctgaagcctctcctccgtttgaagcctcgctagaacacctagctggagacctttttggatcgcgaaccactatagtcaactaccaccactcccacagtggctacaggcagtgaaacccccaaacccacttgctctctttctttctctccctctcagtccattgtgcggcacctcagccatggcctagcctggccttgtccgtcatcgacaactcaaacgaggaccgccatggtcctctccaacctccaaaactcaaaagccccaaccctctcgccagatccatctttttctctttattctacaagatatctcatctacttttttttgttgcttccttttttagatcttccatcgacgacggcggttggagtttgaatcgggcttgcattgtcagagttcgtagtggacacttggagagacagtctgagctcgcggattagagatttaatttttctttttgattgtatttttggtttaggttttattttttgtaatctttatatttggtttcttttttattttagtttgggtttgctttggattgcttatctatgtaatattattatttcttgtttttctataaaaaatgtttatacctattaatattctttggtattttggattaatggtgtgaaaaaaggaaacttgttaaaaaaatgattcattcttaggcttctcatttatctttttttattaattttttttttgaaggaaagcatgtatcaaattaaatcaaatcagttattacaggagcactaataaatctaggacaaacatctgtccacaaatcaacccctataaaactagtaacagactttactagtgcgtgggccacaccattcgcaacacgggaaatggcacaacaagaaccaccaccaacaacagctagaagagaaataatctctgcaacaattggtttaaacataataatagaatctagacaattaatctaagaattaatcacagaagaatccgtctccactctcaccaacttgtaccctaacatggacgcccactgaagacccactcgcatagcaagaagctccgtcaccgccacctgaaactccccgataccaccaactgcccaggccgcccacacctc

SEQ ID NO: 197459 - DNA, 1369 bp, Cannabis indica
catattcctatgccatttacaaatcacaaggtaagacttcatgttggcaagctccgaagtaagaagattggcttgaagccgttgtggttccagctccattcttgggtaagggaaaatacctggagcctgtagcacttatggagatcacttccgaaacccaacttcacgggaataaaagagctcaggaggtatatgaaaagtggaaactcccccttccacgagaaaaaccatctctgagctagcgttccatgggcagcattccgaaatgggtaatcaactgctaagggtacgcaaaaaatacaaagatcctgatccgagaatgagaaatgggagtctgcggatgccccccaaatcaactgctaagggtacgcagaaaataccaagatcccgatccgggaatgagaaatgagaaatggcgaagatatgaagtgttggttattggaaccatacacttcgaataatctaacatagacaactcttaaagaagcctagcaaaataaaagtaaaagctccaaaagaaaatggtaaaagactactattattacaaccagcccctacggcagtcagggtaaagttagttgtctccgcaaatcaaaagaagtagaaagggggaggaatgtaaaaaaccaacaacaacaaaagaataattgttgcatatcctggatggtcaatgatgggtacttctagacgggttggaagactctaccccaggcatccgctccacagtctccctaaagaggttgtggacgacactcccgtatgaggcgagtctgctgggcataatttgcttccaacaattggttttccttcttcaagccctcgacttgaagcttggccttaacaagttcagcaaaaaggatgccattggcattgcgcaggtcgcgattgtccttcttgacctactccagctccgtgactagtgcaccagcttctctagcagccctttctggcaacaaagccacctgctgcaatatgcaaataaagaaaaaagttgaatacaatgatagagatcagaatgaagagattcagaactttaccccaactgcctcttgcttagcggcatgggctaaggcaaaggcatcgacaatactgcatgttgcccaagtttccaggggcaactcggaagcattaccagttacccagtctaagagtttgactgtaaatggtgcagcttcactccccacctttggagccaaacagttctccaaagcctccacttcaactgttgtcctagttggggttaaggcatgaaggccttccgagatttcggccttcctcacagccgaaagcacgttggcccgcctgtgtaaaaatcccttctctacttccagacgctccccccaaagctttttttttgtattcattaata

SEQ ID NO: 197460 - DNA, 633 bp, Cannabis indica
catgacattaaggaagatgttaaaaaccagtaatacattttagcagttcttttaatcaatataccatgacttctagattagtgaacactatcatataatgatcattgcttttgagcactagtagtatttaatacctctaaatatgtagtattgtgattggttaatgatacttattaaaatttattatattaaattatataagacccgatacttaattgaagagcattgctattaggcaccagtggtgcctagcacctttgcgacatgtcacgttgcgattgactagcgatactccctaaaagctattatattaaattatataagacccgatacttagttggactaatgcgatactgacacataagagggtgctaggcaccactggtgcccatttctctaaattgaactaataacagtatgagcattgctataaggcaccagtggtgcctagcaccttctcgacatgtcgcgttgcgattggctagcgatactccctaaaaactattatattaaattatatgggactcgatacttagttggaccaataacaatattcacacatacataagagggtactaaacaccaataatactcttcagcatttctctaataatattaacacataagataata

SEQ ID NO: 197461 - DNA, 3620 bp, Cannabis indica
aatgaagccaagaattgagaagattattaccagcatcaggtcgtggaagagatccatcgatgaaggcaattttgttcttcacagccaatgccatagagatgttgcgcttccatgattgatagttggtaccattaaggacgattgagataagaactaagccaggatgatcacgtgaactgagaaagaaaagtctggatacatcttcattggcattacgatcgagatgagatcgtcaaggttgagttgcgataagttcgcaattcttggagattgatgatcgacatcgtcaaaggcattctgagatcatgttctagaagtggtgttttgttgagcagttgccaaagtattagccattagagcggaagtagcatcaggatgaacttctaatgagagattctcatttgtagaggaggaacaccatcttgagatcgtgtgaaaagtattgccatagaagttgtgggcaagttttcttctgatatcatatgagagaaagagactaagatatttgaaagaatggtatctcattcaatgaatcaaggtctgaatacaagagccatatatataggcaatacatgaattatttaaaaggactaaccatcgtaacaacctaaccaaaaagtagaaatcccaacaaaaaaaataaaatagactattaaataatccttataaaaggcaattaaaacataaggatctagagcaacgatggaagaatatatgcttggatgatgaggaagaaaatgaggttgtttatgaagatgaggaggtcgaagatatagagtttgatgataaatggagcctcgtaggtcgactgttgacagggaaagtctccgattttgcgatatttcaaaacataatggcggatttgtggaaacccggaaaaggtatgtatgtcaagattctagagcaaaatcggtttttatttcaatttttttcacgaaatcgatattcagcgagttcttacggggagtccatggacatacgatcggaaacaattgatcttagagaggctgaagaaaggtggcaatccaagaacaattgctctcaatagtcttgatttatgggtgcaaattcatgacttacaagctggtttcaagacaaccaaggcagtccaacaagcagccaattatattggccaatttattgaaaccgatccgaataatttccaaggcgtttggcgtgagtatttacgggttcgagttcggcttactgtggatgttcctctcaaaagacgaataaagttccgaaagaagggcggtgatgctttctatgacaatttcaagtatgagaaactccctacattttgctttatttgtggtattatgggacactcgaaacgtttttgtgctcgcctatacgataccccgattgaggaaattgaaaaatcatacagtttggagatgaaagcacctacacggaggcaaaatttcttgactgcttctccatggctgagaacgcgattaccagacagcaacatagctccggttgcacctcaatccgatccacaatcacctccatctgcatttactgctgctccaacagacacagctggcacggggggatcgactggaccaagaatcacgcaacagagaggggctgttatacagccggtcatatcccactattataggaaagtttctaaccaattagaatcttccttaaatgaccccactattattttgcaagataatacaaccacttttatgtcagatttgcaattggaattagttgacttaaaaagaaagagattggaaattaattcccaatcagccactaatattaataattccaaggaagtgatttttgaagatgagcccaatgatgagcccaatgattttcttgatgaagatgttgttggcctcccaaaaaacgctggtatggtgggtcctggtttccaggcccaccaattgaaatgagtaccatcagttggaattgccgtgggcttgggaacccacaggccttacaattccttcaagacatttgtgttgaaaagaagttttttatttctttgtgagatcttatgtaagaaagaagtggtggaccgtgtgaaagctaagttgggctttgatagttgtttcactgttgaagcccaaggaaggaaaggtggtctagcttttttctggaaaaatattgatgaagcccgatcgcttagtttctccaacaaccatattgacttggaaatttctcttcccggtaaacttccatggcgcatgactggtttttatggtgaaccacaacgtgctcttcgtcaaacaacttgggatttactccgatctatagctgatgagtcgcctcttccatggtgcatccttggcaattttaataatgtcacaacacagaatgatgtacaaggtggccgaccctaccctgataacttgatcaacggcttcaatcgtgctcttcacgactgccaacttggagagcttgagttacatgggtacgattttacctgggaaagaggacgtgggactgctgctcacattgagatcaggttagacaaagcctttgcaaactatgattggttttctctatttcctgatgctaaattatcaaattttgattactcatcatctgatcacacaccattatttcttgagctggaaaccgtgtctaatatccatgcaattcgtttgtttcgctacgaaaatgcttggtctcgtgagcctctttgtgccgagcttgttaaaagctgttggaatgaaaatagtcattttactcttgctgaaaaattgaagcattgtagccttatgttatctgaatgggggtttgagattactggtaattttaaaaaaaggctgaagcaaagtaagaggaagatggcaaagctgaaagtggatagcagtagctcccatgatcatgatttttctgctgagcaatgtaattatttcgagatcttagctcaacaggaaatctattggaagcaacggtctaaacaattttggcttcatgcgggtgacaaaaacagcaagtattttcatgcaaccgctagttcccgtcaacgaagcaaccaaatagtccaactgaaaaactctgacgatacgtgggtcaattggtcttcgggtcttgattaggttattactgattattttcttgctctttatactactgatgatattgactgtaattctgtggtgcatggcatatctccctcggtcactgatgatcacaatgaagctcttttacaaccggttacgcctgaagaaataagacaagcagtgtttcaaatgcatccggataaagctcctggtctcgatgtcatgggtccaggcttttaccagcaccatgggatgttgttggccctgatatgtgaagcttgttaccaattttttcgagactaaaattttgcctctggaccttaatgaaaccaaccttgtgctgattctgaaaaagaaaaatttctccacaatgggtgatctgcgtcctatcgctctatgcaatgtctcttacaagattgtggctaaagtccttgcaaatagaatgagaaacatgattgatcagattatctctaccactcagagtgcgttcattcctggtaggcttatctctgacaatattatggtggcgtttgaaatcatgcattatcttaagcagaaaagaagagggcagaaaggcttcatggcttt

SEQ ID NO: 197462 - DNA, 673 bp, Cannabis indica
gccggagaatcaaagttaaaggtgaataattgctgaccagtctgaacattccatagcatagccgactgatccgcacttccagtaatcaacaacatcgaatcccctaaaccataaaccctccaagtcattaaacacaagaaattaaaaaccaaaaacccaaaaaaggtaaaattttgaaagaagggagatttacttgatacgtcgcaggaccaaacggcaccgttgtgacctcgataggttccgagacgctctccattgtcggcgaaccagacggtgggagtgtggtccttggcgcatgagaagagaaggtccccatctctgttgtacttgagaaaggtgaggggcctctcgtgccctttcatcaaaattggcctcatcttgagttaggttttttgatttggaccctcgaaacgatcgaggatctcagggcacaggtgggttcttcttcttcttcggttgaacaagagagacggaggttctttgaaagagaaagacgagcgttgtgtgctctgttgttattaattagggtttgggttcagtgagagcggtagaaaaatgggctcttgggcttttctttggtttgggcttttagcttaacccaacaaaatattaaatgttttttacaccacataatcgaatttctcatttgaggatttttttttgggaaatttac

SEQ ID NO: 197463 - DNA, 980 bp, Cannabis indica
cggagatacaagatcaaactcttatgaacttttttatggcattgaagaggatatacaaaaagcttaatgtgtttttgccatgtagtcctggtgtgaatgttcaaccgtgccagcgagagcagatggctatcatgagctttttggcaacactcatccaaatttgactctgtatagtcacaagttctttgcacgaaaactactccatatgtttctcttagtagtgctttggttagtcataataatcatgcaccattgaaaatctctactccaagtggttacaaaggaggcgattcacaagggcctgacaatcgaacaccggaatctagaagcattatgtgcaactattgtaagtagtgttgtaaattcgtgtgcgtcgtgctaacacgattcatttttttgtgcttttcaaaatatggatcgtgccttaaaaaaatatgggccatgtcatgtcgtgtcaatattttcaaagggtaggctcgacacggctcgtaggctcgatattttcacaccggcccgttttcatatccagactcgaattcgtgcattatttttcaatatttgttttttacaattaatgagttgattactaaactatattgtatatttaataatcctaattatatttatgtaatttttcaataatattttactgataattatttaaaaaaatattaagattattagaatttgaatatttacttataaatactcaattttttatcactctatagataaattaatatatagttttagttttacattattttaataattttaattaaagaattaaaatatttagtgttattattatttttacttatttacaattgacaaatacatatattattattattattattattataattattaaattatagggttttttgttgttctgtgtcgtgttttttgggtttgtcgcgtgatgtgtcttttgggtttgtttattcttgcttatgtgtcgtgcctttcgtgcttct

SEQ ID NO: 197464 - DNA, 1595 bp, Cannabis indica
actgccaagaaagccgtggacttcaccacaaagaacattgaatgtcgatatggtttgcctcacaagatagtctcagagaatggaaaacaattcgattatgatgagttcacagacttcggcaaccaacacgaagtcatcaagagtttctccgcgcttgcgaggccacagacaaatggacaagaggaagctgtcaataagatacttagcgttaccctaaagaaaaaattcttggcctgtaaaaacaattagcctgaagagttgccatgcatattatgggcctaccagaccactgcaagaactacaactgggcactccccattctcaatggtgtatgggtgtgaagccatggtcccggtagaggctataatcccctcccacggaagaaccacttacgatccaacaacgaaccaagccttgctacaagaagcactaaacttagtagatgagctttgggaggaatctcaaatacgcatggcagcgtaccaaaataaagtagcaaaatattttaaatccaaagtcgaaattaggaaatttgccattggtgacttggtcctaagaagggtatttctggccacccaggaactaggagttagggtacccagacaaaattaggaaggcccatatgaagttgaagatgaaataggcttcgagacctataaactaaagtaaatggacggatccatagtgcctcgagcttggagtgctaaccatctccaaaaatactaccaatagttaggagctcagtattcaaattcatgtttactctgtaagttaacctgtggcggacaaagtatatgcattatcccacataaatttaagttaagtgacccaaaaaatattttttaagtcacttacacacacgcagacaggaaaaacaaaaaagcaaatagataaagaacttgaaatataagttgtctaagacataataataaaaagcccaagtagggccataaagatgtctcccctaacagaataaagataataaaaactaaaaattaaaatattgtcttgagggggcagaagtaagcaaaatgacaaaaaaggcaggacataatcaatcgattcatggtggaagatggggaccccttcgctcggccaagactgcctccagcttcttgttcttttcccaaaattgggccgcggtagcctcaagatcaggcagaaagtggagatgaggtttgaactattttgatttctagcacataaaaactccttccttaaagcgcttctcgtagtgcttgcaggtcactggagctaataaagcctccctcacagccttggcgacttccttttgggtctgctcccataactcacacagctccttgagctcaacagacatgttggcggtagtttccaagtcagtctgatgtaattcttcaagagacttgagcttcatggagagttcctcgatatactctcgagcgtcccggaggtccttcctgcctgaggcgataatatcatctttagcctttagcgcctcttggtggtcccgctccatgagagtcttctctgccagagcatcattgcatagggtctccatctgatcctctgaatccctgagcttcctcatggccctgtccatgccacccaactcc

SEQ ID NO: 197465 - DNA, 794 bp, Cannabis indica
ttatttctcagccttgtgtgtcgaccccctctctctctcccttaagcatcatcttttcaacttcaaaattggaaaattcctttggaaggaagcttggatttttgtggtatttatgctaggatttggaaaggatttgaggtagctctttctactgtttttaatttgaaattgttgttgaaattgaagatgggaatcatgtttatttgtaaattgtgttcatatatgcatgtaggtgaatttgaattaagtgtggtgtttgaaatatggatgagttgttgaattgttgtgtaatgttctttgtatgtgttatatgagattctagggttgagatttgggattttgattactaaaattgatttaagtttgttggaaaagcatgttgagttttgaagttttttttgtgaccttgatgtgcaattactttggatgagaatatgatgattttgctcaagtgttgagcttagtgttgcatagagatttaggtctgaaatatggtccttgtatgctatgattttgagccttaaatgtatgtttcaactctatgtatgaatattgataattttattatatgctttgtgagtttgattaagttttgggcaggaattggtatgttttggcatgatttttcgagctggaaaaatggggtttcttgggtttggaacccaagggctgcagccctgctccttgggcgctgcggcccacccctattttgtggcctgggattcaaacccaggtgtcgcgggcccatgtgggagtgtcgcggcccaccctttatttttgggcagattcgaacg

SEQ ID NO: 197466 - DNA, 624 bp, Cannabis indica
aggaagagatggaatcgagttcgagcgcaattggtaatgtatagctccaaatttattaatattagccaaatgatttgatcatgatattacagtgttaaggtgaaagagatactcatatctggaccaatacaaaattgaacaccaagaactgtaaaagctctcttgagattcttaagcagaacctttcatttatataggcaatcgagaattacaaaaggctgaaagccagctctaacaacctctaactaactcatatttatcatcttctcaagcgaaagggtgaggagcacacttggagcttcgttttgagatagagaaatcaatctgttgtaagaacttttgtgtgagaatgtctgctggtgtatggtaaggtttattgtacatgtaacaatgagagagggaatagaatagaagtgaggaaccgaagtgaagaagaagaagaacaagttgtcttcaaggtgtttatcttcaattggatcatgtacaagggagattgatcaccattgattaagttaaagttatcttgatctcaatattgtaacatttctattgtcccatatgacaattataattaataacaattctcatctcaaaataatcagactaagtcaaatcacacctttc

SEQ ID NO: 197467 - DNA, 697 bp, Cannabis indica
ccataactatatgaaggacgactcatggcctatcaattatggctcgcctttagattatctcaaccaaagtgaagctctaatattctatgtaggtcacttatccctttatttatacatgaaaaatttcttccctttttctttgtattaacccttctctttttctatgttttttattcaggcggctctgatggtaaaccttggcttcaaatctcaccagtagaataccactcttcttaccctcgaacttaatgaggctcttaagacatgtgaagatttatcatctaaaaaatgatctacaattggggagaaggataaattcaaaactcaagtcaacaatctccagactaaaatccatgaggaaaactcaaggatcaaagctttggaacagagcttgaaggatgttactgagaaagccaagaaagacctatcatataaagatgatgatgccaagaggagggttaaagaaatggcccaacaatctcttttaaaagtttggcaaagaaataaaggcattagccttagcttcctaaagccaaatgtggcgaagagtgtggccattttgtagaagatggaagaagaaaaaattgccatggagaagattcgataagctggatagggggttggagagattgaaaatgaatctgaacaggtggtggctgaggctaacaaggaagtttaagaagaagaagaaaaagaa

SEQ ID NO: 197468 - DNA, 2302 bp, Cannabis indica
tgtcgtaccctgttaagtgctgactggaccaacacctaacagaagcttaatagaattattgttgttttattaattttaagtaatttttttttccacttaaaaaaattactaaggtaactgctgatttcaaaaataaaatatttactaattaatgtttgtttgtaacttgatcatcaccacccattgcagtgatgtcttctagcataaatgaacacttagcaaaggaagcattggacaaaggggcaagccttttcttaatgaagccactttcaatggcagtattaaagcaactatggcaaagtgtttgttggaagaacacaaaactaattgtagaaaataaaaataacaacaatattaatggaaagaaacttcatttatcatcatcatcatcatcatctcaagttaataataataataataataagcaaaaaagacctactactagtcttaatagtgacaacaatgatattgagcaacaagaagaagggtcaaaatcaaagagatcttgtcttgtgtggactcctcaactccataacaagtttacaaaagccctcagcttgttgggagatgaaagtaaatacaatacacctttctttgatgtattttcatttgatgtcttattttgttgagttagttactaatgtatttctcttttgtatgcagaagctcaaccgaaaatgattcgagaagagatgggagttccacatttaacaagacaccaaatcgctagccatctgcaggttcattcctttttttttctttcttgcagttaacaattgcttaaagtacaagaatttgactaagtgtaaaaattggctagtacaattgttagttgtttttggttcgccgagagaagttgaagaataccttttttttttattacattgattaaatttatctctaaataaaatttaactcaaatatactttttttattgagtattactcaaattatcctcacacactcacataattaagacgtaatttcaaacataatagatttgtattctttgatgaaaatgtagatttgtgggaaatttggaacaaaattctaattagagaataatgaaaattattgtgaagtaatagaagtaaaattggtagaatgattaaaaaaaagggtaaccataatagattttaatagagagtaaaaattaaaaatatcaaattaaaagaagtatatagtgtaattttctcacttattttgtaacttttgaaaatgctcttagataatgtattgttactcctttatgatcatttcatctaagatcttttatccttttctttttagaaatataaagccggagtgaaacgattacaagacaacgacacaagtctactcttgggcaaatcaagttctcattctactacttctacactagagaggatgcagagttcaatgacttacaagcttccaacagaagactcaaacatgcaaccacgttcaccgactcatccaaatttagattttagcttcaactccaatcataaaaataagccattattatcagagtattttgatcatgatatactgaaaattcttgaagaagaagatgttgaggagactaaaaattatggttttggaccaaatattgaagatgttaatagatattgtgaatggttaaaaaaatctatatagataaagggagttataaatctcactatacaacctacaagctgtatagagtgtccaaatgaaaatataataagcaaaatttacacgaacatatgatatgtaagacaaaagttggtgaatatataaaagaaaaagacaattcaaaatctttgatttgattaataattataaataagtatatatatgtatgtaagatgtaatttactgatccatagaattgtttattatccctttttttttttgttcttcaattttcttttaattttttttttattttaattagttttaaataaatatttaatttagtatttttatattagttttgattaatttttgtaatgttttacttaacaaattaaattagttaattcatttcaacaaaaagaatatatttaattcaaattttaaagaaaaatatttaaattgtgaaatgcacatgtttaaaatatatttatgtatattatatacatgtgtattgtaaaatagggatgcacacggggcagaaaattagcggggagtgcttccctgtctccataaattttaaaatacaaaaatataactacataaaataaatattacacattgcttatattcaataaactattatatctaaaacacaacttaaaaatcaatagaaaaaaaatactaataatactaaaaaaatgac

SEQ ID NO: 197469 - DNA, 1930 bp, Cannabis indica
ttgacactgtatgctatttaaggtctggtgatggtaagatattgcagggcaccaaccatagatctgtacagcttgggatcttcaacaggatcactaccatatgcagaaagtttgaggccacttgtcattggtgtggaaatagactttgctccctgcattttggccttgcacagtaggtctttagcatacttagtctgacatagatgcattcctttatcagtgtgagaaacttcaattccaagaaagtaacttagcttgcctaagtctttgagagagaattgattgttgagatcaacaatgatatgagaaatgtgatcttggttactgtcagtgatgatgatatcatctacatacactagaataagtgttgtagatgttgtggtatgctgaataaacaaagaatgatcagcctttgaaggagtgaaaccaagagtgagaaggcagtgttgaagtttctcaaaccaggctctaggagcttttagtccatacagagctttgtgaagcttacagaccaagtgtggggcagactcatcttcaaaaccaagaggttgaatcatgtagacttcctcttgcaagtctccatttagaaatgcattgtccacctccaattgcctcatagtccaatcttgagtaagagccaaaataagaacaacctgaattgttacaagcttcactacaggactgaaggtctctgtaaaatcaaaaccaggttgttggtggaaacctttggcaaccaacctggctttgagtttattaacagagccatatgcattctccttgattctgtacacccatttgcatcccactggtgttctccctgcaagtaatggaatcaaagtgtaggtaccatttcttttagagccactatttctgtacccataacattgttccaatgcttgttttgcaatgcttctttcaaggtgagaggttctctgcacaccatgtaggtttttggtttggaaataccagatttagatctggttttcatgggatgagtgttacttgggcaaggatctgatatagtggagttactggttggtgcaacaggttgagattcaggaagaatctctggtgatggaacaggcccatgagattcagactgagacacattctcagctgagacacaaggggattcagtagtgacttcattaccctgttctgtcatgatgttaggaaaagagtgtgggacagatgcaacaggtctgggaggagggtgatttgtgagatcaaaagcagtgctatgaaagttaggtatgtgaccagatgtgagacaagtatctggtgtggaaacaggtacgatgggaacagggtgttgagcatgaaggaagttgtgttcatcaaacacaacatcccttgagatgtataatctcccagaggcatcaaggcatttatagcctttgtggttcagactgtaaccaacaaaggtacaaggagtggatctaaactctagtttgtgcttattgtagggtcggatgttgggaaaacaggtgcaaccaaaggttttgagacttagatagtctggttttatgttgaatatgacctctatgggagatttgttgtcctgaacaggagtaggtaacctgttgtgaatgtacacagcagttcgaaaagcctcatcccagaatttcagtggcatagatgcatgagcaagaagtgtcaagccattttccattatatgtccatgctttcttctaggtagaacattttgctcatgtgtggtagggcaaggatgtctatgaatgactcctagttggttgagaaagggtgtgaaggacctgtactcttcccctcaatccgtttgtagagatttaagtttagtaccaagctgaagttcagcttcagctttgaaaatttgaaacattttcaaggcttcagatttactttttaacagataaagccaggtgaaacgagagtacacatccatgaaatg

SEQ ID NO: 197470 - DNA, 872 bp, Cannabis indica
accttggaagaaaaaaaactctacaccaaggggaggggacaagcttgtattcattcattagttgcattatataaaataaaagactgaatacaaataggatggtcgggccaccaaactttaaactttattaacagtagtcgacaaagcatacttagctaaagtgtgagccgtcatattaacaaatttgtatcatttttacatatttaaatagtttgaaagatgaaccaaaatcattcaaaaccaatcctaagactacaacaaaacataattattaaatttagataccaaactaagacaatcagactcaaaaataaaatttgaaaaaccaagtaaaaggcattaattgcaagcaaatctaagagccaaagcttcaaccatttatggcaaaaagcctccttcaaagaaccaagaggcaaatgcaaatgcttctcctttttcatttctagcaatcgcccaaaccgcaacaatctaaggataagtccaaagcatcatcggtgttaccttaacgaaccttgacggaggcaacaacaattgaggaaccttcttgtggcgagtcgaagagatggtcaaagaggtgctttgtaacgccctaactcctaaggatgccacgtgtatacttttagaacatagtttagtattaatagattaactatttgattaaatctatgataatattaaaaacttcactaaaattaaatcacaacaatgaacaaaataacatcgctaaaaatatttatttcgagaatcccttgttacaaaagttttacaaaaagggctatatataacagtaagtcaaaatatacatcaggtacaacccaaaacaactcctaacaacttgaccatacaagctggataagtcgatatgtacattt

SEQ ID NO: 197471 - DNA, 1194 bp, Cannabis indica
taaagaaatcgactaagtctttgacaacaagagtgtcagtaagaagatgactcccggagaagatgtgagagggctccacgtactctcggagtccaagagtatgctagggcatctccgggaggtactgggctctatttgaacaatcccctcgcatttaatgccgcatgggagaaaacgtatttgagctgacataagcaatatgtctgacggcgtaaccctttgcaactattacgctgtgattaataaagctagtgacgaatactttatgagggatcacatcaatcaaaaagggataaaatattatatccacttaactcctaagatacctacggtataggtcgtgtatttcctattttgcatctactaggaatatgtgcccctgttgaactcgcacaaaaagacaagtgactcagttctagagatccccccagaaaaacattataaataccccctaaacacactaagataggggtcgagacttctgggctcataagaattaaagagagcaaataagaggaatatctactaagaacattttttgtaataaatactctcataaataaaaaagactcgtggactaaggctcgtcaatgccccaaccatgtaaaaatcccatgcattaaacttcttacagctttcttacatatattattaaatcggttgctgaaaatctcggtcaacaacatatattgcataattctaaataatttgagatgttattaattttttaaaattttcctaaagacatttaatatgtgtatcttgtatatatatacatatataaattgacacaatttttttttgtcctagctaaaaattaaaaataaaaaattatttacaatgtaaataactgaatacttaagtttaataaatatgaaatttaattgtttgttatagtttaattttttattggtatatttaaataaaaataaaaatttaattacaaggactaatcaaaaattgccatgtgaatgttgagttgacacgacttattgcctatcccaattttaaaaatataacttaaatattaatatcaaaaactaaaattaaatatttatttatatattatatcacaaattattcaaaaataaaaatatataaataattaagttttcaaaaaataagataaaaatagagaataagattttagtttcctccaatcagcagcattggcacaagtaatgaagtaatact

SEQ ID NO: 197472 - DNA, 777 bp, Cannabis indica
aattaagtactataatgtatataaaaaaaaaaaaatcccctataaaatttggtatttgagtggtgttttcattttggaacatttgatagggtatttataggtgctcaccccttatactttgtggttagaaatatttctttacattcttcttttattagaaggaattgtattcatacatctaaaggcacgtttcttacatagtatttagaatcaaaataatttaatggaaaaacgtaacacaataaatgaagaaaaatcgaaatcaataattgtaatatattatttactaaaattatttataaatagaataatattgatttattttgtttactttatcaaaaaacgtaatcaaaatgtttaaattgactaaatttttcttttgagttaagaacaaaaagataattctgttatgttgtactgaaattacaattgtaatgtttatataccaaacaaatcaagaaaggagaaagtggtttttgttacactccagctcaacagcttattataacatcgtaacagaaaactaattatggaattaaaactaactaattgtctagttatctctaataaacacgtcttgtttattacacaagttagactagtcaatttaaacacgatccaaatccatttaaggcgaatttaaattcactaactttagcgtgattttcaaatcttgttatcgtatcttgcccgtttggtcagtactatctgagattttaattaaacatgtttgggaggtgaaaaaaaatgagaagaagttgaatgtttttttttttt

SEQ ID NO: 197473 - DNA, 1905 bp, Cannabis indica
aattcaaatcagataagaaatcacgagcttaaaatttttaacagaggagaaccaaactctaaccataagagaaatcagaagcttaatatatctggacaaccttcaaatttcacagcaaaaaaacaataaaaaattatctgaacaaaagccaaactctaatcataagagaaatcataagcttaataatatatctgggcaacctttaaacttgaagcttgtttttttaacaggggaaaagcataaaaagacatttaagaggttttgggactaagttcaaaagattgtttaggtaatatttcatcagcacaaaacaaattacttaaaaggaacaaacttttgatttgggcaagagccaaactctaatcataagagaaatcataaccttaatacatccgggcaaccttcaaatttcacagcaaacacattctaatcagacaaaaaaatcatgagcttaattatttaacagaagaaagcaaagtttaaaaaaaaaagttaggtaaacattttatcaaacacttaaagtgcacaaaccaaaatacttgaaaagatcaaacttttaatctgagcaagacccaaactcaaattcaatccacacttcaaatttctcagtaaacaataaaatcaaatacttacctagaagaagagacatcatagatctgacccttgatagagataagaagaggcttattagggtcagaaccattataagcgctaagttcttgatgagtaatctctcccaattgaacagaaggcttagttggggtttgatccaaaaccccattgagaaaactggagttgttgttagggctagggtttagggaaacggcggcggcaactggaggtttgttgaaatcttcgggagagacgaacatggcggagacggttctgaagacgacgaggactagagctgcgatggtgaagaaggcggtgggtgaaagacctgtgtggtgtgttatctcttccatcacgatagagtaaatcgccatggattggattggattgaaggtctgaagattttgagttgttgttatgtgaaatgggtttggtgagtcaaatgtgttgacttttttacctaacttaactgacttaactaacaagttaatctacctaccaccaaagctaaaataaataaatgtacataaattaaaaaattaaaaaaaaaatgagtagatgattttatatatgtttgtagttaatgttaataattttaaattttaattataagttttattaatattttataacttcagcaaaatatttataagaaagagtctcgaatcttttcatgataaaatacaaaaataaaaatatttacagagaacaaaatgaaaaagggaaatacttgtatgtgcatatatgtttactataattttacctaacttaactaactactaactaaccattgaccaacatcaaagctaaaataatttaaataaaaaaatgtattgattctaactcttattagtttgggtttacttttagtaaaaaaaattcttttaaataatttagaatcattattagaggatacactaagtatgttattcaaattttcaagaatgttcataatttatatatggaatgatcaatgtaactggatatggattagatatacatgttttttagaaagatgaacaacttctttagctaaataataataaataaataaataaataaataaatctacaaaatatatgtatatgtttatagttaatgtgaataattttaaattttgattataatttttattaactgaacaaaaatagaaatactaccacattttaaggagaacaaaactaagcacattccttggttgaatcttcaaacttactcccaactcatttttacatgaatagaaaaaaaattcaagcaaaattcaatattttaaccattttccataatcaaaac

SEQ ID NO: 197474 - DNA, 626 bp, Cannabis indica
tgaaagattaatttctcttaacattattgactttgatatgttatggttcaactcaactcaaattgctaataatcaacttttcatggaagtttaggccttccctttatcctaaagtttgattctttgatgtcgtcttttgttattttcaggatttgaagaatttgagatcactgttatactcagttgctaagcattttgaactttcttattcaagtgatgaccaaacacagatgtgagcaattttgttcatggtactatttttattttcaataattttttccttattccttggttgttatttaagtattcacatatagtaaaagaaattattgcctctatgtgtagaaactttaaaagattatgccattaaagcattggaaattacgacataacaccgacactaatatattctgtatgaattattagtataaaattatatatatatatgtacaacttgacgatggtacctaaatactagatgttgtgatgttcgcagatgttgcagaaaatatattgtcatttactacagttcaattaaaatcgaattcgaataaggtatactttcatatttaaatatatatatatataatatattcgcagttcaataatgaatcttatcttaataa

SEQ ID NO: 197475 - DNA, 1570 bp, Cannabis indica
gtaaatgggtatacaaaatcaagtataatgctgatggaagcattgagagacacaaagatagactagttgccaagggttacaatcaacaagaaggggttgactactatgaaacttctgctgtagctaccaaattggtatcagtcaaacttatccttgctttggctgccatcaaaggatggtttctttaccaacttgatgtcaacaatgaattcttgcatggtgacttgcatgaggaactctatatgactatacctcaagggtatagtcctaagggggagcttccacctaatgctgtttgtaaactttaaaataattgtatgggcttaaacaagacctcaagacaatggtttgagaagttttctacagctcttaatgaagaaggttttcagcattctatttcagatcattctctcttcataagacagcatggagcaagcattatcatcctacttgtctatgtggatgatgtcattcttgctaggaatgatcttacagcaatgaatgaattgaaaaccagacttaacaacagatttaaactcaaggatcttggtgacttgaagtattttcttgggataaaattgcagaacctaaacaaggaatatttttgtcacaaagaccttatgcattacagttgctagaagattttagttttctaggaagcaaacctgtcaacacattcaaggaaaccaatctaaaactaagttaagaaggtgaagaaaaactggcagaccctaagttgtataggagaatgattgggaaactccaatatttaacaataacaaggcctgacttagcctatcctgtgaataaacttagtcagtttttgtcctctccaagagtcaactacctttatgttgcacaaagaagtctgcagtatgtgaaaagcagcctagaacaaggattgttctatcctccagaattagaaatcaagttcgaggcctacactgatgctgactgggcagcatgtgtagccactaggaggtcgacaactggtttttgtgcatttcttagcaagtctcttgtgtcctggaagagcaagaaataacacacggtgtctagatcctctactgaagcagagtacagagccatgtcgaatacaacatgtgaagttatttggctaatttctctactaaaagaactgaatattgagcaccatggacaacctatactacactgtgccaacaaggaaacttaacaaattgcagccaatcctgtgtttcacgagaaaacaaagcatattgagatatattgtcaccttattagacaaaaggttcaagagggtttcataaaaacaactcacacatcagcaaagatcaaattgtagatatgtgtactaaggccttacttcctgctcaatttcatgttttaaaataaaaaatggggctttgtaacatatacactccaccttaagggggagtattaaagatgttaaagtgttgtgtacttaggcttggcagttagttagttaagtgagctgtattgagctgttattttttggttatgagttagttatgtagctaactctctagttccggtgtattctactagtttgagctgtataaataccctg

SEQ ID NO: 197476 - DNA, 1354 bp, Cannabis indica
ctatatgttgttactccaaataacaagtatagattttatgtgacttttgtttatggctatatataatgaagaagttggaagataagttttgtggaaagacttacaagatttagcaaaatatgatccctggattgcactaggtgattttattgcaattctgaatatgttgaaagagtggaggacaaagtaaggcataatacttctactgcctttctagactgtactgactactgtcatttggagaatataaaatacagtgaaaattattatacatggagcaataaggctcatgatagaatctattctaaactagatagaattcttgtcaatcaagcatggttggatatgttcccaacttcagaagctatcttcttgaatgaaggtttgtttgaccatacacgagttaatcctaatattccgagtgaaaaaaaactttttaaatacttcaggatgtggtctatgaatcctcagtattattaggaaatattaaaagtatggaaggaggacatcaatggaactaaaatgtatcaagtggtatcgaaactcaagatactaaaacttatccttaaggatctgaataagcagggcttctcaaaaattcaagtaacatattttagagctagagagagactcaagagttgtcaagataatttgcaaggtgatccattgaataaattgttttggaggccatggattcactatgtagtagatattaatagggcttactgctcatttatacacacaaaaatctaagctaaaatgggtcaaagaaggagatcaaaatactgctttattccatttttgtaacatagaaagaagacttcaaaatataatttaatccattactgatgggaatggtaatagagtagaagaccctgatggtattactgctgcatttttatcttattaattatcaatcccttttagggactaaaatgaaggagaatctttctgtaaatgtcaagattgtgtctcaatgagctgtcattaccaagtaacatgaagaaatactgggagcatcttttacaatggaggtggtaaagcaagctattttttgtatccctggaattaaagctcctgggctagatagctacagtagcttctttttccaagataactgggatctggtggcatatgatgtttttaaagttgttacatccttcctgcatacatgcaattacttaaagagataaattctacagtgattactccctaaaaataaataccccaaaactgtaagtgattatcgacttacaacttgttgtaatgtactttataaagttgttaccaaactcatttgtaataggcttaaacatgttctacctgacttggtggtacagaatcaatgtggttt

SEQ ID NO: 197477 - DNA, 621 bp, Cannabis indica
tcacctggattatctgccctgaacctgatagcagtccatccagcagttggtactccaatagtgttcctctcaaccgggtcaacaagattaaacagtttcggatcctttaccgggtcaaaattccccaatccacttccaatcacgtagaaattgaatccatgcaaatgggtcgggtggctctcaggagctatcacacccgtaccctgcaaaacgatctgtacactcgaattgtaactcaacctgtaaagcctcgtcccattcatggtctggatattcgccggagaaggccccgtgtaattgaaaacaaccggcggtttggccggaaagtcatcggtgaaaacgcccttgatgttgtgataatgtgcttcaagaagagcaacagacggcatgtcaaaggtaacgttgtttatatttcccacaagtttggatccactggcacaagtgtcacacgggttgagcccaactcctatagtgaagaggagagagtggtcaacggtcaacgggacttttgttgggtactggatggagttcaggcttttgagggagtcaatgaaattttttgttattggggttgcgttgtggggtggaatgttggttaagaataatgttggagcaatttgg

SEQ ID NO: 197478 - DNA, 1377 bp, Cannabis indica
tccagttgttgttgagcacaagtaagtaatagcgggcaatgatcggagttgattcgttcaagatgaaaaacttttgcagcaggaaacatgtcaaaccagtcagaatttccacaagctctatctaatctctcaaagataaggttatcttgtctcccattacaccaagtaaacaaattcccttcaaactccacttcccgaagataacaatcatctagagcttttctgaaattgtttatgagatatctcggtttttgttgtcctccctttttctctttttgccttaaaatctcattaaaatctcccccaatcagccacggtcccgtatacattctgccgactctattgagaactgtccaagaatcgcctcgtttacttggatctgggtctccatagaagcatgtgaaccgccacccttggtcctcctctttccgaatgaaagaatcaatatggaaagaggagaatgaaagaatattgcaagttatcttatcggaccacattagcacaagcccgccacttttacctttagcctccaccacaaagcaaccaacaaaacccaaagcaacacgcaaattttctgctcgcatcttattgagtctagattccgatatgaaaaccaactccggacaccaatgctgcactagggacttcaaggtacggaccgtccaagggttccccatcccttgaacgttccacaataaggcattcatggctgcaggcgaccctggctcgcagggtttgcctcttccacattttgagcgattgtcaaatctccattctgagaaaattcaatcggtttgtcatctttccccctttcttttctttgcatctttcttcaccgccactttccttctttgctctttggggattgaatttttccaatcggaacatcaattagagtttggctttcattcatcaccattggattatttgctgtcctttgaagtttaccagcccccactacctctcgatcctccaccaatcttcgtttcccacgcccatcttgtgccatatcatgtatttccaccccggtttcctcctgctgaagcttctccgatgttgtattttgcagctttctgatctccttgttacctgggtgtggttctttcccttttgttacttcactcctcacttgtacatgctcttcctctttattcaataatagttcaaaggaattacccatatggagattgagactttgtctactgccactttgtatgttctgttcttgtaaaattacattctcattattgcctcctttcccccttgaaatccatctctaatcccgttatcaactttcagccatgtcccatacgccattgccgtcgttccattctcccctatgatttcctttatttcaagagaacaatctttttgact

SEQ ID NO: 197479 - DNA, 2176 bp, Cannabis indica
gtatccaatttaactgctctattcgtaattcttaatattgccacatgtcaaaattttattggccaccatcataagaaaatgattaaaaactttataacttttttatattttcttttattaaagattaaaaaaatattatatttaaataaaataaaatacaaacttctataattttccacccacccttcttggtggtaaaggcttactgccgaccaatagcatcctttacaatataccctaaaatattttttaaaaaataacctaatctaattaaaagaaaagtattaacctatatagacttttcatttttatttttatttgttgattttatttaagtcgggatcgggatcagggtccaagtttagggtcgcggtctggggttggggtcaggtccaaggtctggttctgggtcgggtttggggtttgggttgggggggcgtggttacaaatccgaagctggggtccgagtttgggtttggagtcggggtctaggtttagggtcgaggtcttgggctggggctagggtccgggtttgtggtttgggtctggggtccggggtttgggtccaggtcaggtcggtctggggtctgggttcgagtctgatctaggtctgaggttcaggtcaaggtcaaggtctgagtctgggttggagtcgaggtttgggattcaggttcaggttcgaggttcgggtcgtggtctgggtccgggtccaatcgaggttcgggtttaggtcggggtctgggtccaaagtttgggttggggtcaaggttgggtttgggtttgggtcggggtctaggtccaggattgttgttcgggacccgagttcggagtttaaaatattgataaataaaaaaatgtttaaaaaatgaccttgttttgtttttaaaattttaattttgaattaaaaaattgaaaaataaaaataattttattattagatcattttggaaagtattttttaaaaaacaaacaactaattgaaaaagtgttactaaaaacactttaaatttagaaatacaataaaataaataaaatctataaaaagcagaaagaaattatttgaaagagtagtcctccccgttaactattaaaattagggttgaacatcaggcaagttgaccgggtttcgggttcaaaaaattgtactcggatccgacccgtgaaatggttcgggcttgcgggttcaggttgaccggattggctaggtcaacgtcgtttttttttttaaaaaaaaaatcaaatttgatgtgattgtttctatatattaaattaagcatataagttataaacttataacaccataatttatattcgttagttcaaaataaaataaaaaatacattaattaaaaataaaaaaaaattaaaaaataaaaagttacctggttggcaggcgagttcaagttcaacccgaaacccgacggccataaaaaactaacccgcgaacccgcgcgatggggtaccgggttggaccccccgcccgaagagaaggggttttttaaaattttctgattgaattggttgggtccgagcggttggtcgggtccgtgtcaaaccctgtcaaaaatgttcagtcctagttaaaatgaggaagtgcactgcagcgttgtcgtaatggcgcaaaaactcaatttagagcaacgtgttctgttatctgtttatgatatgttgtcctgtgttttctgagagagagagagagagagagagagagagagagagagaaggcataatcacaggagacaggcgacgttgcagaaagcaataatgggaacagtgaaagcaccatggaagcagcttcttctcgacgcattacaagccaattcccatcttaaacactcttctttctttcagctcgtaagtcaagcttctctcttttcatttcttctcattttattctaaggcttgtcatatgatgacatttcatggaattttaggctaccattggttgtaatggaagaccttcaaatcgcactgtcgttttcagggggtttcacgaggattctgataagattcaaatcaacacagattacagaagccacaaggttctcaatctcatatatttatgtatgatttataattttactaaacctacaattttatcttatgattaagtgagttatttgtttcatttaagttttcttgtggaagctgaactttttatatagtttatatagcaa

SEQ ID NO: 197480 - DNA, 785 bp, Cannabis indica
ggagtagttgcggtaccgaaaagttaccagcagtagaaaagtcatcagtaccgaaaaaagttaccagaaaaataaaagtcgtcagaaaaatcaccagaaataggcctcatatataaattaaaatacaaccgattctataacataatgaataaaacaagtaccacacaataattcgaactggttataattaaaaatagaattagttttataacataatgaataaaaacaaataacacacaataattcaaactagttataattaaaaaaacaaagaaaaaatcagcttctaaaacattgaaatataactttaaaacataattagtttcacaacaaaattagtaaaaatgtcgattgtatttttttaaaagaaaaatgtggggatcaattccaaaaatactgaagcataaatataaataaaactggttctataacaaaataaataaaaacacacaataactcaaaatataatataaataacctgattatatttttttttggaaaatcagcagtatttttcattactcaaataaactttatacaacctattcagcaccttttatgaaaataaggtctgatttttcctattctttacaactcactaaaccaaaatgtatcttctatggacactttgctaggccatacactttgtatcctaattttacatacatttttatcatttgtacaatagtcttcggttcttctaggggaggagccagaatataaagttaagggggggtccggaacgtattttctaaatttaggtgagaatattttaaatatttatt

SEQ ID NO: 197481 - DNA, 1192 bp, Cannabis indica
aaaaaactatttgaagcggcagggcaggccaaaattgagtcgacatacactgattattttcgtccaattaatacccatcagtcaatatattatataagatactataattaaaccaattaacactatattatatttatatatgtattactacaagacaaatgaacaaaataattactagttaattatataatataacatccatatattataattagaaaaatacaattaaacgcgtttgctaacgttgctgtaatcgtatatgtatacttgagttgagtcttttgactatatattgattttgtaatatctatgatctcatcaaccatgaattatgatgttgatgcatgctgcatgcatgcatgtatgttacataaaacgatatttttgtgacattttttaaaattaacttattggatggatagtgatggggcctaacaaaaaaggaaaatcatgcacatataaatctttgggaaaggagtcatattagatcgacctatttggatatttaaaattcacattaatgtaagattaaaagaatgatttccaatctgtaactaaaatgtatttaaaatattatattgtatagataatatacttgctgtagtcattgtaagaccgcatagcgcagtggattagcgcgtttgacttcggatcaaaaggtcgtgggttcgactcccactgtggtcgactgttttatgttttcttccttttttttactgatttaatttaatgtgtatttatttacttgttggctactcatgaacatttgattccattcaatcgaatctcactcttctatatataaaatataaatataaacaaaatcatttatgggaaatgtgttgattgataaaagagtaaaataggaaaagtaattaccttcaataagaattttttggtgaaatattttattacgaatgggaaattattttgttaatcgacaagttaataaagagataaaattagtataatgctcaaaaggttatatgtaaggtaggttaaatgtttagctcttataaaaagaaaattgagggaacagacaacatacataaaaagtgtagaagagtctctctcttataactctaattttatcagtgctcgctattcttctctcatacacacaactatcccttctcatcacttcccttttatatacaaccatcccattcttaatagtctctttaattaatca

SEQ ID NO: 197482 - DNA, 1612 bp, Cannabis indica
caaaattggatgaaggtgacaagccttcgtaactcccgagtcacaacagtaacacctgactcgttaatgggcccaagacaagaagatcactcagctcaactaggtgaagcaaatgaagcctgaaccacgattcagatcaaatctcatttaacacgatagaatctgtatcaaagcacccagaggatgatgttacacttatctgggaatggaatacgaaaaggcgtttgggaacatacactatttgggacgcaaggctatgtggcactcctctgaaatgatctagaaaaatctagcggcatgtcccctctgttaggcctcgtaaaggcgcatagtaaaataaaatcacttttttgggccaacgaccactactttgcaatttcctctcacaaacgacggctcatgctcacctatcactgaacagtacaatagtgtacgaataacgggtatttgcaacttggacctcacctattcaacccaatagcctattttatattctgtttaccccatcagtgggctttcgacactttaaagaaccataacgagtgtggatcaactgatttgactaatactttgcctataaatgtggcattattcccttatgcaaatggttcgattttttaagttcaaaactagaaatacattataaatttccatagccaaaaagcttaatgacattggctcgttgactaagactctttaacaccctaaccgcatcaaaaatatcatcttatttatttcttaaccatactttctttagcttaatctttatttaatttggtttctgaaaatctcactaagcaaaaactattacagtgtacttattgtatgcatatgcatgttttgtattttttaaactgacaaacatctttgtagagccaataatgaagacggtgatgatgaaaatgagtgagaaccctcagaagttgacgtgccatgaaacaaatctgacaagtagtttcccaaatcatcaggagaaaactttaccaacaactccaaattactctcctcactcaataaagttaagtttgcttcataaaactctcgatactttggtactagtttgtttgatatagagattttcaactcctctctcatttttgtatcttgtactatccatgaaatttgctttttgtatgcttcttcaaaagctacattgaacctcctaaaagtctccttggccatgtcacttgacaatggtgaggattcattatcaggtaaagatgagaacacatttgtccaagccatggattcaatgtgtgaagcgtacaaatgaaccatcctcatatgtttcgaaatccaatcctcaccgaggagaaattttaggctgcttgtatgaactttgtctacaatgaactgaagattattggcaagaaagagatatgacaatgatacatctttgtgaagctcagctttgcaatcaagcttgcataagagaactaagattagccaagctaggtggattgaggcttcatcttgttcgcttgagctcaggctttcgagtaaagattcttgcagttttgataaacttggtgatcttggatagttagtgaggacatcacaaagagccccactatgatctgctaaggaagatatgtaatccattactgatatg

SEQ ID NO: 197483 - DNA, 920 bp, Cannabis indica
attatgtatagaaataggtggcaataaggtctatatatgttagtagtaagtggggtctctgttagtggtagtgggctacaaagatgcaactcccttcatgtgtattcctaaacttttattaacgtgtcccagctaaagtccgtcgatccacaccagtcatcatatggccatatgtatatgcaggctgtttagcctgtccgtatttttgaaaaaaaaagttttgtaattctttttttgtttaattttccttaataagataaaaaaatataaaattttggacataaaatacctattatagaataaatcccattttaatactattgatcaataaagagaatgtcataaataataaacgcatgatatatgatacggaattacttgtatgagcattgctataaggtgcctatgatgcctagcactacgatgaagcatcattctataattggttagcaattttttataatatttattaaagtaaaataagtgagactcgatattgagttgcataatagagatattacaccccataaagatgctaggcactatgtgtgtcctttagtatttctctacttgtattggtttacattattaaaatatatgagataaataaattgaaaaataaatgatgatcaagaaaattataagtctatgcaaaataatacagaggaccaaattaaattaaattaaattaaataaagtattacaattcaaagctcaaaatacaaataaataagagaatacaaaacgtagaatactagaattacaactcaaagtatgaacatacaaataaatataaatcaatatgagaatatatagaggaaatttcaatggttaaatcaaatatgtaaccacggtgattacatttattttagttattatatcattattaaacagtcataattaatttagaaattaaacaa

SEQ ID NO: 197484 - DNA, 797 bp, Cannabis indica
catttgttaccttgcctagtgtatttgctgatgctggggcaatgaccaggacatcagcccaccgactaagctcaatgtggagaacgctatcgcccaattttttccacatggtctgttcatactgatcagtgtatagcaccatattcatgggaagtgaatctttatcaatgaagcgtaaagccgctgctgtaaccactgctgctacatctgcccattctacaaagtaatggcatagagcaccaaactgcatggctgcaacacttccactcgcagccagtaaaacccgagaccttcttggaccagtaaccggcagtggctcccctactgtagcaacagatattgatgccataacctatatgaaaaatccaatatatcttaattttttgtttttgaaacagaacaaccaatcttgtattgttacatgaatcttaataaatacaagtgtggcatcaaaccaccatcatagtaagcaaaatattacaggaagaaatcaaataaaagttacataaaatagttccaatatctaatcaaattcgagaaaggaacatctttgaactcacatatatgcctaaaattattcataagaagcataagcttatttttaagaagccaataatggcttcctagttttgctagcagtcctccaaatcttacaatctttgaaatacaagaagtttttagaagcaaaggtctcatgaaaaatctataacgaacttcgttgtgggagagctatccatagtaggtacactgatagcacgttcaaatatttaaaagaatcatatacacaaacaatactt

SEQ ID NO: 197485 - DNA, 1516 bp, Cannabis indica
atatccgccgcgaagcgtgggatgtttacttgttttaaaaaaaatcatgtacacttattattattttttatttttttgttattaaaatttaaaaatattatattatttaattggaagaaaaaaacatatactaattttttaatatatatatcattctctgacaatttatatattgctattaaaaatataaattatttacgatttaaaaaaatatttataattcatgctaacaaattattagattttttatttattttttaactaataagttaaaaaaatatatttatgtatatatataccataagccatagatgtcatattgttttgttttgtcatctttattttcaaatttattttattgttttgttctcagttgttggtacagtaataataacgactttcaataaaatagtgttcaagtgagatatagtggtgatatcaattttgaaaatattagtaactataagtgagctacgataataattttgaaattataatgagttattttataacttttttttagatcttattttattatatatattatataaaaaatattaaaattaaaattttatataattttataaattaattattgctaaaaataaatacgcgaagtgcgagttgtttcttagttttaaaatataattgtattatatgcattagacttttaaataactattttttttacattaaaatattatttgtacatataattttttttttaaatatgtgtggattaaatgtttaaattatttttttagtatataattaattataagtaatcctgttaaaaaaagattaattagaattaattaaatttaagaaaagtgaatttttgcctatccctcatctattattagagacctaaaacataaagtatttgacaaaatacaatttaaaggaggaggaagcacagacactagaaaatctctcgcaaaaatcccaaccctaacccaaaccgttcttcttctctctctcgctttcttttttcaattgttctgcttttccggaaatcgcaatcggatgttctaactgagacacctgcgttgtagatctgattagggcagaaggtgcgtttacttttcttttaattttcttcttgtccattttaggttttttcctttttggcgtggtctgcctttggagaattccgggttaattgaatctggttgaggggacgatttgatgttgttggatctgatattattccgattgttatccctatcatcctatttgctcgaataggctcattttttttttttttatgtaaatttgttacagacagatgttattgtgagctgtaatgggatttttctccgtttcttttttggtcgtgtcgttttgtttttctttatatatgtatgtatatatatatatatatttatgtatatacataatatacatacaaaataatgatgcctatattgtcttttctttgtttcctaccggacgttgtatacaaattaaccgagcatatgttggttggttggttgttgttacgttaatgcaactt

SEQ ID NO: 197486 - DNA, 1162 bp, Cannabis indica
tataaatttttaatttttatgtttgaaaagcaaaaatctgaaaaaacaatattatgtaattattaattatttaaaaatagtaatattttattattacatacaacaattatctctaatttttatggagattgaataacttttctattacgttttgggtgggtacatgacattttgttttgtcttcaaactcagaatgtatttcttctgactaataataaacaaatactgatgctattgaaattgtcaccacctcttatgatatctgcccttgatttttctttttttctcccactctctgtctctgcagtgaatatatatacataacaaacaatcaattaaacttgaaacactcatatttgtcattatgttatatttatttaatttaagggtccaagactccaagctacgaaagatgccgatttgtgatggtgttacgcaagaggccattatgaaccatcgatccgcaacgtgtcattgcttcagtatgtcattttaaacgcgtgagcccgagtagaggcacgtatagcagaaagaaaagatattgcacactacaaactaactgtttctgtttgatgtaatgtttcaatcagaaaaaggggtcctaaaattgtgccaaaaacgactaccctttctatcgcaatctttaactgtacacgtatgatatgttattcactaacacaaatacactattaaacaatattgtttatttctttcaaaaaaaaaacaaaattgtttataaaatggtttttttttttgaaaaattatttataaaatgtttaaattacatatatgaatattaattgaataattaaattatatcaaataattttaagcatatttttttatgtataattaaaaataatgtatataaagaattttaaggctatgtttggaaggatttttgtgaagaaaaaataaagaaagtataggaaaaaaataataaattatcatctttggtatgaaaaggaagattgaaaaacacttaattcaacaaaaattttcatatcaagcttaaaaaattatttatttttttgttctctacacttttttttctaatattttttctttttttttttatttttatttattctaaaattaaacttcctaaacatatagcggaaagaaatactttaaaaaaaaaataaatcaatcataaattttt

SEQ ID NO: 197487 - DNA, 710 bp, Cannabis indica
ttcaatactaacaacataaatactaacacatatttcgcttaataactgtgtaagcaatcgcgtcttaaccatattgttattaggttaatgagaaaggtttgggtttgtaatattgttttatttactcgtataattaaatgtaggtaaactcttgacctaaaaaaattgctttcacatcaaaaagttttctcttgtaaattaagcaatgcttctcttgttggttttcctcaacaagtttgtttgcttctcttcttggtgactcatatatagtttgagttttattagattttgttagatgtaatagggaaaataaatttgggttttcactttgttgggtgttttgcaaaggacaaatgatcattatgatccaattagcttgtttgactattaccatagaaaaattacttttagttactaaaattttgtgtctgaaagtaaaatatttgtaactaataaaaaatatatgataccaattatgacacattactaaaaagttaagtactaattataaaaatacaatctattatgaataatatctcatccttccaaattagaatttctttcaatcttttttcataacccttttttctgttctaatatctataataggtttatttgtatattctaaatagaaatatgaataattattgaggaaattacaagttttatgagtttttatattttttgcgttaaaaaataaattttttttt

SEQ ID NO: 197488 - DNA, 1056 bp, Cannabis indica
ttgtcgattgttaacaaatcctttgtaccattaggatgatagctcaagtaccaattcagcctacaacagatatcccaataggaatgcatgtacttgagcgaaccctaggctgccttcaataagcatatatatatatgcatgggacaatttcaatactagtctctcgttattactaatatacatgaactttaggcctttcataataaatcatactttagaccatttaaaaattctcaatgaaaatcaaaacattaattacaataatagttagtgtaatatccgctttctgcgaaaggataatttttttttctacttgaatatttatggaaatgatggaatatgacattttagtgatcataataaaatatttgatctttcgaagaggaacattttatttttgcaataaaaatagaatctcagcctgtacataatgcaaaataaataattaattacatgagataatttaattatttgattaggttgtgattattattgtagtgaatataataataatatgtgtttaattttagtttacaatatggtattgtatactttgttattttattattatttaatttgattaaattgtaattattatggcaattgtgaaaaatattattatgtccctatgatttagagtaattaagagatatataaagaatattaaaatatgaagtaagtaacaattgagtttaaattagatgtggtattattaataatattattttaatattaagatttatattatataatattatttttgttgttattaatcatatatatatattaatatcctctaaggattttatgttttgaatttaatggtcaagattaatttttgatagtgacctagactatataaaggatgtttttggaagtatttagggtaaagaaattgtgctgtgaatgagcctcctatacctaatttttccttaaaaattcctttacgtaccacaatacaagaatcgggtttgagagggctggggaattttcgggttatgatgagagttttcattgagttaaataggctcttaggagttatgtaagagcaccgaa

SEQ ID NO: 197489 - DNA, 1320 bp, Cannabis indica
gttgctaactgttttattcataggtaagtagtattaattctctatttagctacaaaccacaagctcatatatgaataagaaattttttgatgtttaatataaattaattattcaaagataaattattaacaattgaacattgacacacatagattaaatatttactctttatttaataatcagaattgtctttacagacttttcaggacataaactctaataatatggtggtttatcatatatgatggtttgttttgtatttttcttaaggatgacatgaggtagcagtgacacatgatctgtttcacagatagtaaagataaattttttcttcattaaataatattttacaattgtttttccaaaatataaataaaaattttcattttaatttaatattaagataattagtgtattaatttaattttatatattttagttatgtatgtttttattttactcacttggtcattttaagatgcaaggactttaaaagaaaagttttattacaattctctttcttaaatgttttactatattattaatttatatgacataattttaaaattatttattttactgctttcttgtgaagttactaaatttatttgtttggtggtttttggtcaaggcatcaacttttagcagccattcttgttttttttttgttagattaagatgggttcaagggaatctgaaggttacttaggtggaagttttagctctaatggtgatattaaaatcgttgttagattggattttctctttttgagtctgattgtttagctttgatctcttcctttcataagagattttctttctgtaataatttaggctcttttttagatattttttttttagtttactgttaaatttttctacgatgtctcttattcatgcaaatcattcggttaatatagttaggtatgaattagttgtgcaaatacttatatagtaaatgatgtgctagtttggatagatgtatttttgatagaattagtgtaaatttatacacatattaataaactctattaaattataatcgttatatatgaagaaaaaaatcaaagtgtacacaacataacgattaagggctcgtttggtacgccatataaggattgtattgtattaaataataaatacactatgtttagataaagcaatgtatttattaattattacgacaaaattttttaatacaatgtatgatgtattatttaatacataacaaatggtccgtattagcttgtattataatatttacaaagaattcggggtcaacactaatatccaatttagacctgggacccagacccagac

SEQ ID NO: 197490 - DNA, 912 bp, Cannabis indica
gcatcttaaacgtaatatagagtgctgagtagagctgtagaaagtatagtcataactttccttgtaagaataggcagtgtagtgtgcttgtactggagttgagtccccagatattgttacgagaggtcgcattaccaaacagtaaaaagttgcacacaccaacattgattttccagtaagtttaacacagggtgatatcataatctcagtggagatatttttgacatactagtggttttcataatataatttttcattatgcaatatatggaggtgtagcatcatatttctgcaagacaatgctccaaggaaaataaaataatcaatatgtttcttcatctgtaactctttccaagagaatgtgtagtttatagtcaatgtgttatcttcatgaagttaataaggcagccctttggctatgccaggtgtggccttctaaacaagtatgcttgattcatctctgttaaaactaaagtccatagctatgtataatagtggagaatgtttccaacttctcaaagacactaaaattcttcctaaaaaattataaagtatgagtaaaaaaattacaatatgatttcagtcacaataaattttatcatttaagttgtatctgtatattatttttattgtttagttataagattttatttttgttgttactaaatgataatttgaaattctttgttgcgattttctgaggccatcttccctgctgtctattaactcaattcatgcaacatctcaagcaatacaatcacatgagaaagggtagttttcccttgatgaagctctatgagatatagagttggtaagaaaatatgtggacagtattcaatcacatagcactttcatgaatgtgaatgatttgttgttatatatcctgctgtgtcaaagtgaaaatatgtgagg

SEQ ID NO: 197491 - DNA, 1029 bp, Cannabis indica
taggtcatttttaaacatttctctcgagaatttttccgagcatattctccatttttactagtaattgagatacgagtgtttttgggaatcaaatgaagaatctagtgggtaaaactgggacccagcgcctaggttgacattttgtcaacctaggtcaattccaagtgttctctccataaaaatgatacgtgcatcttttttgttttcagaataacgaactataaattctctcgagatcaaaggagatcctttgagagtcaaaatagggcctcagtgcctagattgacacgggtgttgggcctgtgcccagattgacatacaaactagtccgtatgttttttctcctcaaacataaattttgcttcatgaattcttcttattttggttaaaagcaaggtaggagaccttgtttgtaatctagaatgttgtagaattatcaaagtgatcctgaggaaggtccctaagaagcacttagcgcccaggttgacatatggcctagtacgttgggttttgtttatccgattctggttgcatctcgagcatctgaatatttctttatagtaaacgagtggtgcggtttgtgacaagtcaaattcatactttgatatttcacattttcgacaaagtggaatatcaacaaatgagtcacaaattgggatgtttcaagtctatcaatttcgcgaaaaagcgacatctctaaacactcatgaacgaattcaccaaaacaaagaaattggaaaaaaattaatgtcaacacatcacttaggcacaaaaaaatacaactccggagcggtttttcattcacacaacgtccaggttgacatcagtatgtcaaattgggcgcttggtgctgaataaccttcagtctaacggccataactccctcaatattgatcttattgacatgattcaacttaaattttaaagctatttcaaagctctttcaactaatgtctcacaccatcacttaggtcatcaaaaaagtgatcgtctaacacactcaacttaagctatcaaaaatacaagtcc

SEQ ID NO: 197492 - DNA, 3646 bp, Cannabis indica
ccttcctcacacctccgtcaacattgatcttcacatcaccttgtcgaggaggagtccacctactctgctgaactcgctgccgctgaccctgccttccctgctccaacaccggctgcttatattctaaaagatactggccacaccattccacaacctcagccggttggggaagccttccaccatgttttgtgctattcctaagataccaaacttgccaacacaaaaccagaaaaaattcataggaatcttgattcatacctctcgccaatcgcataagaaaagcaagtacatcctcgcctcccttccgctgaatttcagctttaaaaccacttaacttccatatccctttattagccgagcaaccccacaacgcatgaaaaatattctcccttaccccattcgaacaacgatggcatgtaggattcgtcataaccttcctagtgacaagattagaatgtgttggcaaccatgaattggccaacttccaagcaaaatgcttaactttaggcggcaacttcaacttccataactttctccaccaatccttcatcaattgtccctctaatgtagcttcagatttccttatctcagcagccattcggtacccacttctcaccgtatactctccattcctactataatgccacataaccttgtcttctaaatcttcgtgaagtggcggtagccttaggatcatctctgcatcctcacggttgaaattagcccgaataaaactctcatcccacaccccactcggatgtgttagatcaaccacacaaagctgttgtggaaaaggaggcttatcatagactttaaagcttgtcggccggggcaaccaagggtcctccaatactcgtacttgctgcccattaccaacacgccaacgataccccttcaaaataatttctttgccccacaccaaactccgccaaacaaaagacgcatgggctccacacttagccgccaacacacttttatgaggaaaatagctcgcctttaacaccttagaacacaaggaccccggttggcgaagacatctccaaatttgcttagcaagtaaagcttgattaaacaactcaaggtcgcgaaagcccaacccaccttcctctttcggcctacacaaatattcccatttacaccaatgaatctttttctttttcgccgtagacccccaccaaaatcttgccgccatccgatggatactagtaatggtgctcttagtgaggcgataacagctcattgtataagccggaatggcttgaacaatggctttaataagaacctccttgacacccatagaaaacatatgacccttccatcctctcagcctattccataccctattcttaatcacatcaaaaacttgctttttattcctaccaacaagagacagtaaccccaaatacttaccatgattatccaccactttcactcctaaaaactcagccaattccaacttcgttgtcgctgccacattcttcccaaaacaaatttccgacttttggaaattaactacctgacccgaggcacaagaatacttactgagcaatgtattaaatcgttgacaagcctcccatgttgcatcaaagaagatcatactatcgtccgcaaagaaaagatgagacacggctaaaccttgccttccaaaccgaacaccaacaagttgattccctgcctcctcccgttgaagtaaacaagaaaatacttcagcacaaaaaagaaatagaaaaggggatagcggatccccttgtctaattccacgttgtggcacaacctttccttgaatctctccattaatgaggaatgagaacgtcaccgaagtaacacacgccatgatcttagcaatccactgttcatggtaacccaaccgtaacatcacctcttgaaggaaccgccattccaccctatcataggcttttgccatatccaatttcaacgccatctttgtcccattacgaaacctattctttcgcatacaatgtaagctctcatagccaaaaatcgcattatcatgaatcaaccttcctttaacaaacgcactttgggactccgaaataactccatccaatgtctgtctcaacctattagccaaacacttagaaacaattttatatataacattgcataaactaataggtcgatattcagcaacattcatcggcttctccacttttggaatcaaggcgaaaatggtctcattcaaacaccccatatccgctcccccatcaagaatattaaggcaaacacccaccacatccttattaaccttactccaaaatttttgataaaacaaagccggtaacccatcctcacccggagcctttgtcggatgcatctccttaatagcctgaaccacctcctcctccataaacggttgcaatagtgcctcattcattactaaagaaaccttcggcagaactgcttgtagcacttcctcaagcaccccccaatctatatccgaagccgagaacaagttctgaaaatatccctccaccgtatgttgcaccaaaagcttatccgtttgccacactcccatagcatccaaaattcctttaatctcattctttttccgtctcgccgaggctttatggtgaaaatacttagtatttttatccccccattttaaccatagagctctacttctttgtctccaatacttctcatctttttccatcaacacattcaacttcctttcatttttttttatctcagtccagacacccggttgttggattgaagtgagctcctgcaaagcctttttaatcttcgtaatactactagtactctccttccgttttttcctgttccacaatttcagatgccgccccactctgatggttttgccccggaaagatgtagccgaaccacttgtaccctcatcccgccactgatcttcaattataaccttacactcatcatcatcacactacgcctcctcgaaatgaaaccgacctacccgcttaatacgtccatccggctgtccctcctcggcaagaggaatgtcaacaactaaagcgcgatgatccgactcccaccaatccaacaattgaatgtcagccccttcaaattgttgaagccattccaaattacacagtccccggtctaacctttccatcacttgggacgactcatgtccattgcaccaagtaaactcacttttaacagaacaaaaatcaatcaattggcatcgatcaagagtctttttaaaagcttccatcgcagcagcccctcgcgtacgtcccccacttttctcagtcagactaacaatttcattaaaatcgcccacacaaagccacgacccattaatctgcccaccaatcttttgtaacaattcccacgaaaatttacgttgagatgcctccggatgtccataaaaacaagttaacatccatggcgaaaaaccattcccagttacctcggcaacaatatgcccaactgaactcgaatcaactctcattttaattccatctctccacatgatcaataaccccccacttaacccaattcgatcaaccgcccaaaagttatccccaaactgcaacttattacacaacccctctgcttgccttctggtgagcttagtttcagctaaaaacactacactcgggttaaattcccgaagatgggattgaagagctcttaatgt

SEQ ID NO: 197493 - DNA, 996 bp, Cannabis indica
tttttgtcaaacccattatatataatatctttttggcatccaaataattttacttttaaatttctttgtataacagtatacaattttagttatttaagacgtcttgtaattttttttaaaaattcataaatatttaatataccgaaaagaatattcaaacaatctatatcttatatacgtgccacttttattttatacgtatacacatgtaaaatagattgattgaactttgttttcatatcgtaaattattcataattttttttaaaacatttataaaatattttaaatatttatgttgtacattatcatataaaaatattataaaattaaaactatctagattaaaaagagtatattggtgcaatcttttttgggatgcacatctagaaactaatattttatttatatatatataggaggaatataatatatattatatgttacattgcttaaatacttaactaaagttacgttagtcaaaatacttgtttaaatatacctatcaaattcagtcaataaaattataactcaatttataggttatatctcatagcagctcaaatgatgactaaaatttaataattaagattataataacaattatttttcttcttttatctatcaaaataataaaattacttacaatacgatctaatacaatgtatctaataaaccctaatattatttctacgtacgtaccttgggaagctgcggtgacaacatcttcgtcagaatctctgatattgagaatcaatcttgtcttaaaaattggggtgagagccataaaaatctgatcagccaattcaatacacttaaccaaatctagcaatttgagttttcatgtccaaaacgacaccactttcactggaatagtgtcgttttgtgccatgcatgggatcatgaccatcatccatgttgaactacaagtactattattacaactaataccaaaaatataagattataaatcttcctcctcatcatgatcatctaa

SEQ ID NO: 197494 - DNA, 655 bp, Cannabis indica
ctttgatcagtttaaagaagattgtacttagtctttgtttcaacttgaagtgcttagatgaggccgcctttcagcacctcacctcccttgaggagttgacgattgaaggctgtcctaaccttcgactccagagggagacaggggaggactggccaattattgctcacatcccaaatatcattgttgataagaagaaaatataaggtgttactattttctcttcttttctgtcctaattgtttaaaagctttattcaacattgaatcaaacagtcttcgatttgtgttcgttttaggttgtgttgtgtgtacaacactttgtgtgtttatagcagatttatggaagaagcatctcatgtactgtacttgtttcacagtctggccccggcccaaaggttcgttttttatattttgtgatgttttgctctacatttctggtgttagttcagccatttaaggttgtccattctgatgtgtcaataactgttttaacagcttctacaatcgggttagttagtattcctaactgtccccatactataaatagaccttgtacatttcgcttcatttcaagtcatgttaagagatcagaaaactaagagagaaagagataaaattcagagtggcaggagagttgtaaaaggggttcaagtgtg

SEQ ID NO: 197495 - DNA, 631 bp, Cannabis indica
gaggtggtgagtattacagaggtaatcatgattagcttaaacgtattttcattgactccaacagctttacttacaccttacgtcaaagccaacacactctagaaaacaaatagtcatcatttactcctcaaaattattgatttttatttttcaaatgtatttagcaggaggattatcataacgtagttataatttataaaagagcaggtaataccagacaaagatttgggtggtcactagctcatttgatatccattgaaggaagattattatgtaaaatcaaaatagttgttgtcagaggcaaattattgttaggtcttcagtgttgattctttctttccaacaacactaaaagcaacaacaaccatataaaccatctttgccaaaggatacaaaatacagaaattttgatacagatttctttttctttgacacgttcagaaatcacaaagtttactacttctttcatgggttgtagttgtactaataatagaacatttgaatataatcttacccagttatagatgtattgaataccacttgggttcttgaatcatcaaaggacttagctttccatttgagtatgatcttatcagagcttgagttgagccgcaactgtaaacaactcaca

SEQ ID NO: 197496 - DNA, 1593 bp, Cannabis indica
ccctcttgctattgcagaaatggctaatccttcctcccaaaacggcccaaaggaaatcgaagctcatattgcccctccaaatcccccttactcaaaggaagcgaactcaacaagaggcgatggctcaacacatggtgactaagagacaaaggaagtgaacacaacaagaggcgatggctcaacacatagtgaccaccttagagatgaaggcatcgtatgaccctagtacttgggatcccaacatctcaattaaacgtccaaaccgcaatttcgagttgtccgatgtgcagggttacccctctcggtaccctcttggtgaggggatgaagatagttttggcaaagaaaggtcacagtgctggctctatcccagataattcatgtgcctagacaaaataccacattgaggctagggcgaccttgccgcacaatgattacttttgagatgtggcgaactactttgacgtttccccagttcaaattgctcctcatgggtacctggctttatctgctttgttcatcctatatcaccagaaaggatggggaagaccctctcctcacgaaattcattacctcctttccttccagactttcccatctacgaaccactcggaaacttctacttcatgaaccgagaacgggtcaaccgtatgtctctggtattagtagcacatcttgcgaagaaaaacattgatcatcctacttttttacgacccccatggacactacccaccgtgctttcaaccatacatgtacatatctcagaccaaacccaactgaggagatgatacaacatgcgacagttttgacagccatgccagcagtcgagaagtatgccctaaagattgtaactatggaaatgttcaagttggtaggattgtacccttttgagcataactcaactgctacaagtacgatcgatagacctgatactcttgagctcccattcttaaattctaaaaactcacttgagggttgaactcttggagagcataactctggagaactctcctcaagtattgagatcaacaacactccaagtggactagcctattaccgctgaaagggggtgaaccactataaaatccactataaaatttttgtgttcgtctttggtgaatttacttttgcaaaccaatttactttaattaactattacttggtgttcatcttactcgtttacaatcttcttagatccgttgacgaaaaaccgtgtcaacaactacgtaaaaaaatccatggtaaaaaaaaattctaaatatctactttaatatttaaataccataaaaattattaagtttaaactccaattacaaatagacaaactttaaatacaaataatttaatttaactacaaatacaatttatgtgatatattaaaaaataattttaataataattaccaatactatatattggtctggttgattgtgttttttaggtttgtaaaaagtttgtaacaacaccttcccttgttttgaaatcaaatttgacccatattccacacacctatatgcacaatttggatcatgccactgcatcccttctggtcatgccaaataataggggcatacgtcgatcggtttagtcgggt

SEQ ID NO: 197497 - DNA, 758 bp, Cannabis indica
aaaactcacttttgtagtagtgacgaaagggtccccttgccgaatgccaccacattgtataattggatccatctcatgcccatcatgaatgacatgataagacaaagtagaaacacaaaccataactaagtgaatccaccactcaagaaatcacattttcctcaaaatagcctcaagataagcccactcaattctatcataagcctgactcatattgatcttaagggccatatttccaccatttcctcaacgcttccttttcaaataatgcataacttcataaaggaccatgacattatcttagataaggtgccctggtataaatgcactctgagtatcagccaccacagtttccaaaaaacctttcatcctatttactaaaacctttgtaactattttcatcaaaacattacaaagagagataggacgtaagtctctaagagaaacatgactcttcttcttcggaatatggactatatttgtgttgttcaagccatcttttaaaacaccacgagcaaaaaactgtcgaaccaaactcactacatcactaccaacaaccgcccaatttttctgatagaatggtggtgccataccatctaggctcggagacttatttggatgcatctaaaacaaagcatccttgacctctttctccaagactggtttaagaagttccatattttggacaatcgtgatagaacaagggatacaattgatcacttctgcccaattggaatgagaagacctaaataactctt

SEQ ID NO: 197498 - DNA, 1511 bp, Cannabis indica
actcggcttcagcagatgaccaagagacaacttgctatttttttgatttccacgagacaagggattggccaaggaatacacaatacccggagatggagcgcctggtgtcttggcaactgccccaatcagcatcggcaaagaatgaaagctgaacattagtagccgataaacttgtttcagcatatgctgagatgtttgggaaaaagtttgcaggaaagaaaaggccttggccaggagtgctctttaagtattgcaagatcctgtttgtggcagtaaggtgaggaactcgtggttgttgcagaaattgactaagatgattaattgcatatgtgatatccggcctagtgattgtgaggtaaatcaatttaccaataaggatgcgatatgtggtggggtcagataagagggcccctttatctttgcttagtttgagattatactccattggagaggaagtcgatttagcccctaaataccatgtgtccttcagtagctgaagagtgaaagggcattgagaaacggatgtgccttgttttgtccgagcaacttcgagtccaaggaaaactgaagagggccgatgtctttaagtttcaatttgttatccaagaagactttgaaatgagctatggcattgtcattgttactagccacaatgatgtcatcgacatagatgaggacaattagaagcatggtgctggtttttttaataaaaagagagttgtccgataacgattgatgaaaacaatcttcgagaagggtggtactaagcttagaataccattgtcgagaggcttgtttcaagccataaatgatcttttttaagagacaaacagagtttgggggagctttgaaagtgttgaattttgtaacgggtgcaaaggtttgggaatagtcaattccttgtctttggttatagcctttggctactagccatgtgctttgaatctatcaacgactccttctttcgtatatttaactttgtatacccatttgcatccgatagccttttggcctggtggtaacttggttattatccaagttttatttctttccagagcttcagactcggtatccatggctttgagccaatgaataaattgagaagccttagcataattttgaggttcaatttctgaataggctgctagcacagctgcacgaaattgaggatgaagttttatgtaggaaaaaaaaggttcaatagggtgggcagtggaagtgtggcatacatatgcatcaagatgagatggtttttttgttattcgaccatgtttggtctgttttatgggcacagtaggagcaggattagaatgtatatgtgcctgtgtattctgttgggattctgcagtagagggagtgcagttaacagctctgttgaagtctgttgtagccgtgggaggcatttgtttagtctattcattgagagcagctggttgaatgacagtggacactgtttctggttgttgttctgtggaggcagtagtatgaatggtgtgatgggaaggtatcac

SEQ ID NO: 197499 - DNA, 1486 bp, Cannabis indica
catattcggtaattaaattttcactacacggggacacataatcaatatcattatcaagactaagattaataagtaagtcttcttcctctgctatttcttgaacatcctctgtcgtatcatcttcaatagttattgggagtataggctcattgttaacaatggatgcagggatgattagattgttgcacaagtaatggcccaagattcacaaacagttcaaaattagatgagtttgtgttatgtacgacatcaacatcatcaatcacatcaggagcatccatgttgtcccaaacttttcaatggtgtacatcttcaaccactttccaattcctacttctaactaaatcatcgagatagaaaatttgcttggcttgagtagcaagaatgtatggctcatctaaaagctcgtcataataattgaaacctttgtgctaggcacacacactccactatttgggtgaggcaatttttgtcttgatctgttgtaataaacctagcaccgtttattacacacccttgataagaataggttgcaagatatgatccagatgctaaagctaggaattcctcgccatgatgacctaaagatccaatcttgtacaactcgtagatctaaattgagataacaaaatattagaacaaattaatttcaaatcatactaagtaagtgattatgaatgaagataccttattataaaaccatgatgagaactcctatatgtgtaaattcttatgatctgcattaggatccattcgttttatgagatcaaggtgttccatacaccagacataaaatttttaaagcatgttctttgtaaaacaaacaacaatcatgataacatacattgatggactgatatcctaaacccaatttactgagcttttttttagcttcatagtgggttttaggaatcgtattcccttttagaaatgcaaatttcaacaaactcggtagttgatcaaaagtgttgttcaatattccaccaacaattttcaaatgcctcaacttagctaataagttgagagaggatatccaattgcaacctggatacaactctgcttcaatatctttaaacacgcatctcatctacatcattctcatcgactaccacattagctacattaacttcctcttctctgaggaaaatccactactcgtaactagtttgaaaatcccaacacaatatgtgtccacgcacatattgcgtggatattatgtcgtttgaggttgacgcatttcatacaaggacatctgattttaccgtcagagcccttgtgttgttcaaccatttctgataaggctaagatacctctctagtaagcaggatcagtgcgatcccgtaaaaatatccaactcttattgatcgtcattaatgttaaaatatcgagatggttaattttattgtgttatttttaaaaaataaaaattaaatatattatgaaaagctttaataaaaaaaatcttttacattttacattttattat

SEQ ID NO: 197500 - DNA, 1150 bp, Cannabis indica
attttgtgtgtatatgtagaattgatggatattgagataactagaacttgtgtaattaatttgttgaggcaaaattctaaatctgggttatgtagagataattaaggcatttttttggaattgtttaagccaaaaagctaaccttgattcattatcttttgttgtcctattttaagcctaatttttctaatttttattatttgttaaaaaatacgtatttatccttgattatgagccatgaacttaaataaattatcctgaccctattttccaccataaacattggttgttgtgtaccaaataaaaaatatgatgtaagtagaatggaaattttttctgagaagtatggttggagaggatgtatgtgtatcaagagttatgatccaagtatatgatgttaaaattttttcttgttatatatatataagaaaaatactacaaagaaagaaattcatgttaaaaaattataaacaagagataaaatttaaaggattaaaactttaattgtgcttaagaatgaaaatttttgaagagagataaatgaatttacaatgaagatgtgtattttttattaggttttttgtaagtttatggtgttaaatttggttaaatgacattctcatttaccattgacctaagcctagcgatatatgcctataaagtccttttgatctatataacattggtttacattagtggagatgaattgattatgcaagcttatggttatcttgaatatttgtggtgcaagaaatctttatgcacatgaattatatgtatatagagttagtataattgacatatgcacatttttttgttgataaaaatacaatattggaagttaagttttaatagattaaaattctagtcatttgttcgaaatgtgaaattctgtgttttataattaccaatttattaattaatttaattaatagcgaaataataatatttgtattgaaatagtaattatgtagctatagaacgcaactctgtaactacagaataaactagaaaacaaacagtacaaaaatataaaaatacagattttgtacgaggtatcaataatccttgcaggttgttactagtccatggggccacgccctagatagataaggctcatgagataaatctcaaaaatataaagtaattg

SEQ ID NO: 197501 - DNA, 603 bp, Cannabis indica
aaaaataaaaattaaattaaaacattactaaaacagtgaagactaaacagtgttagttgattacttaagttaagtaagtaaaataaagtagttgtattaatattaagcagcactttctctctttctctctctataaattgattttgtttttagagagagaaagaacagagtaagaagctcaccaccagtgtctgcttaacagcaaagctcttacttaatttaaattaaatatttaatataaatataaattaaataataataataataattcaagtcattactataaactattttcaaaactcactttctctctctataaccagagagaaaagaaaataccagatttaaatcacaatctagagagagaaagagaaaccaagcaacaaacaaagcattctctctctctctgattagagttgtttgttgtgagttggtatttggagttggaagtattttcgaacctactagttttgactccgagtgctattggatgtgagagactgtgaatcgttcagagtcggagatggcggtagttttccggcgaagttggaggaggagagtggaggttgggggagtaggtttattaggcggctagttggtaca

SEQ ID NO: 197502 - DNA, 539 bp, Cannabis indica
aactcaccatagccactacctctaactccccatctttatttttattctgcagcatcaacaaccaattgcagaaacttgttgaactggtgccaatatcagcattactgatgacagcatccaccattgttctgcaccaggtggctcgggcaaaggtgcaatcaaccaaggcatggtaaatggtttcatcttgtgagaggcacagagtccgaattgtcatttaataaaacaaaaggtcaaattgataacttttaaaaaacacaagatccaaaatgatatttactaaaaaaaataattctaaaatatttctttttataacatttaaataattaaattattttttctagaaaagccaataattaaattattattcattatactgcccaagatgtccaattccctaatagaatagtagtttgacaattgttaccaaaattttagattatgaattcattcattctttcttcctcttctttttctcttctttttctcttttttaacaagaatatattattaaaaataaataaatagagtgattgttg

SEQ ID NO: 197503 - DNA, 841 bp, Cannabis indica
atagtcacaatcagatattttgactcaaattgggtactaggtccaaattttatgagctatgtgcttagggcaataacatgatatatatgtgtaattatgaattatatgtgtgatatgaagtgtcaaaagtacccttggtagttatttatgtggtttataggtcttaggggcaaaatagtcttttgaccaattttacaaaggattgaactaagccatttgttggttgagttagaaaatagaacaccaatttcttggtctgaactctctcaaccgaccccctctctctttcatattccaaaattatgattttgatgagctttgaagaaaattgaagtctttttaagggaaattgattagtgttgcttgaggaacacttaaggtagcttttctcctttaatttctagtttaatttgactaaaaaggctaaaatttgaagatgttatgcatgtgtttaatttgaagaagtgatgataattcttgtttgatgttctttgataaaatcatgttggaattaggagtgtgtgtgtaatttgtttagatgaacatgaactttaaattttgggttttatttttaggttctttccttgctaattttatattatagtttttggtatattaggtaaagaatttcttaatggtctttgttgagttagtatgaatttcttttggttttcttttagaatgatggcatagttgtgtgatttgtactccattagggtgtatatgctagcttgtgtttgtggaagtgaatattacctagaaagccttattttgatgctatgaattgatctaattgagttatattgaatttttttgtgtttttagtatatgctgtaaaatg

SEQ ID NO: 197504 - DNA, 796 bp, Cannabis indica
aattgaggccctggttggtactcaattttgtcgtgatgttctcaggggaagttgcagcatcaataagttcctggacattaacttgcttggaattttgtccaaatggggcaacttcacctatacccggcagataaaccatgggcagctgggtaataaccatcgccggctcactcccgtcgtgttcttcatcggaatcagacacaatccttcgttttgaagggagttgcattctacattcacgcatctctgcctcttccccatttcggatggctttgtggaccttgatttgattgcaaagaacttgatctttccccattcttttctgcaggacccagtcttggaaccacttggctaggggagtactgaatgttgatttttctttgacgtcgtttctcagccatagtccgtataaggggtagtagttacccaggttatccttgaccacagtaggagctttgaagcatgaactttgttcatgtgagagaattccacatttgaagcaaagtttaggcagtttctcgtatttatattggatccagaggtccttcaatttctgccgtctgaggaagaacccacagaagataggtttatgaatatcaatggtggctttgaagcgtaatgtacttagaccaacttcatcttcaataccctaagggagttcatggactggagaggcctcagcagcaatctcttggagatttgagaggttccaatagaaggggggaatactttcaacgtttacccacattggtgtcttgtcaaaacgaacttctgatggtgttagccaggcgggcca

SEQ ID NO: 197505 - DNA, 3142 bp, Cannabis indica
gaaaaggaaaaaatataaattaaagaagaagaagaaacaaatgaaacacaattaaattctgttccaaaaaaatcttttgtaaaactatcttagttcaaaattacacaaacccaggacaacaaagtccaagtaaaaccaaatcagcttatcacttttctccaaaatacccatatgatagaacattaaactaaaagacatggaataataagaaaaaacacacctgcttaaaaactttaagtctgactgtctcgacccaattagagaagaactcattggacagtggtggttgtgcgattaataagaagacaaagaagagagtacgaggtcaaggttgggtcgccgcatgattaaaaagaagacgaagaagaggagaaggtcgaggggttcgtcgattttgttagagctctttctcacgattaatggttagggacgagtgtgaacagtgtggcatctgaattgggggtttagggatttcactctagtttatgtcagttacgcactctcaccatttttttcgatggtttaaaacctcatatataaattattctactgttaacaatagacgcaaaatgtaaagcaaatttttacaattgttcaccttattcgtccgtttttattttaccatcatttaagaaacgacgcaattcacatattatcagcgtcatttcaaaactgacggcccaattatctaggcactattcacgtcggtcaacgccatgaatagtagagttgaccgacgtaaaaagtgtaatttgtagtagtgttgaagctctttaaatgctctatcaagtcatgtctcacacccagacgtaattctgaagctatcatcatcaaaattcaccccgaagggagttacaaaaataagctccaaataactcgcagcagaacccgcccggcaccaaaaattgaccatcaccaccaaaagctaattttcgatgttaggtcatcatcaaaggtggaaaataacttatttgtatttttctcctatttttttgggccttcttcacttataaaatgagagctcctttagctcattttacacattcaataaactacccacaagagcttttctcgctaaactttctctctctaaagtttagaattttttatattagtctattgttgtaattaccatctcgtaagaaataaaaactcaaagtagacgtagccctattactatcgcgatataggggcgaactactataaattattgtatctttcttattaattacttaactacttttttattcttgccaatctagcgagcgggtgtggcttaaaagtctagtctaaatttttgagtcaacaactcgtattggtttgtagggctagtcgttatttgaagaaacaactaaagtgaagtactcgtgtataagagtcataagtccgtgggggaagcccaatagaggcttgaagtagggcattacaataacttactttcttattatttatatatacaaatgagttttcaatggttacattaaatatgtacactacaagaaatgtcacttttgccagcacatttttgtgctggcaaaagttggtattgtgttggtaaaatagaatttacttgtgatgtgttggcaaaaggggttggcaaatcaacgttggtattaaaacttttgccagcataaaatgaaaagcgctggcgaaaatgatttttcccagcgcgtaaatgtactggtaaaagttagattttagccactccaaatgtacactggtaaaactttgacctctttgtcagcgcagtttgtgaaatgcgctggcaaaagtaagcagtagcgaactgtgctagtaaaagtgacgtttcttgtaatggtaacaatgatgcttaacatttacttttagtcatgagatcattgttaaacggttgtgattaatttagaaattaactaaaaataataaataaattacctgtaacttgatattaatcttattttattttattttcttatatataaaaaaattttaaaaattataaatattaattgctaaaaaattcttaacgaatattataatctaaaattaaatttattttaagtatttagttcattataggaattttctactataggggtgtagaaaaagaccccatcagtagggacacttttattccaatcaactactaccatgtcatgtaatattatgaggatagttgtagaatataatattttatttatttatctatttaatggcttacacggtgatgtgtcagaaaaaaatactatttgaattaaaaagaaatatatccttctctcattaagtctcatactatatggttcttagatttctttcaaaattttgcatacatatccatgtgttcttacttctttgtattcttaattaaagcccttcccacaatgaacctttaagactagaatcacaaaaatataacatccatttaatctgatgtgaatctctaaactatagcaaaagaaaaagagagaaaaaaaaattgagattttgattagaggttgggttcattgaaggaggtggtggttgggttcaaagacggaggtgtggtgattagatttgtggatggtttataaaagggagtggtcgcataaaattttatatagaaaaaggaagaactgagagaactaaagaaaaaaaaaatcaaaaatactataaaggtaaagatacttaataatccggtatttctcacttaaataaaatacaacttcattaaatgaagtgtaatttctaataggttttgagacacccccactcatgaaaatcgttttaggaggtcctatagaagaatctttcgttattatataattaaatttaaaaataaaatatttacttattagtatttaacttaaatcatagttatatttttaatataacctcatttatatattcttttaaataatatataatttatatatagaacactttactaaaaaaaaattagggaaaattacatctacacactaaattatgatctaatttatagaaatgtcgttagtcaaaaaaatataacgtaatttcaaaaatatataactatatattacgtagtaaattaaagtattgagtttcaagttataacacacacgtgagtatattccttctctctcttaattgatctcagcttaaaggctttttgttggtcttgagttctttttgtgtaaagtgtatc

SEQ ID NO: 197506 - DNA, 1138 bp, Cannabis indica
agactctcatcgtactatcacatatagatgagaatggaaagtatagatagtaaagaaaaaaagaagtatctttgctataaatataaactgtttattttttttttaattttaataaacttatatctaaaaatttaatatccaccaaatatatgcatataaattcaaatttcccttatctaattttaattctcactcaagaatccgagattgttcattcattgaaagtttagtcaacgttatacatgagaattcatacagtggggtccgctctgtcttcaatgtgtgcctttgttttgagtggtgtgagttggatatcagtaaaagatatctatcatgataaacaaaagaaatctcaaaagattaaaaaaaatgttataattaattttattcattatacagagaatggaaaacaaagaatcaattcagataggtttgatttccattgatggataattaattgtctgtcctttaatttattatatgggatgaaactagtactacttacaattaaatatgagagtattaactcctctcaatttcagaaaactaaacaaaccaaaagtaaaattataatagatcaacatactcaatcacacaattattaataaaaagaaaaaaggagaacattatcacaagtggaaacgacatgtttttgatgagcagatcaacaatttctattgcgggaatctctacaataattttgtccggtgccagtgttaggcccagcgcatggagtataacgttgattaccgttagttcggccacaaccggcagcacccttatcaagagtttttttaactacgctggctttaagagcaaggattctccgattgatttcggaatccatctgaaactccacatctagatcttgatcgccgatgatattggtggcgttgctattgaacagctgatctgacgttgcagtggcttcacactcataatcagttgagattagtagaatcagtatcatcatcatcatcatagcaactgcaagttgttgcaggacacctttgttcagagttgctcccatggctatgagtacttctaataataataatttattctgatgaatgccatatgcaattcactaattgtgcccccttatagtactacttgctactaaagtagataagtgtgc

SEQ ID NO: 197507 - DNA, 1038 bp, Cannabis indica
actaacggtgaagtcttcaaagaacatcatttactagatgcgaactcgacattaccaccatcattacgcaccctaatccgaatacctgaggcccccacctaatctcgaacaccagcgtcaacattaatagtaaagtgatcagcactcggcagaatccacctagccatagcctgttgctcttgaagcttcttctgcggcccagcctcacggaactccttcaaatacctgtcacaccactcaagcacatcccctgatctaggagccgaacctccatgaagagcagagtttcaaatggaccacaaatgccaagacaccaacaaaaaataatcaaaaacatttgtggacaacccagcttgcatatgtcccaagaatgagacaacatccaaagttttatacactttcatatgctctcataacccactactcctccaaacatccctattaccccgacagccccataaagcatgaaaaatatcttcatcataattctcattacaccaaaaacatttcttaccaatttgcatacctcagcttgcaagccccaccttcgttggaatccaagaatggctaatcttacatacaaaatgactgaccttcggcagaatctttcttttccacatacacttccaccattcggtcatcctcctattgttcgattgtgcctctatctccaacatatcacttgccaaacgatacccactgcgcatagagtactcaccatttcggctataatgccacataattttatcgtcaatgctcgcatcattagtaggaatacccaagatcagctctgcatcatcaccgttaaaaatcgctcgtataaatgccaaatcccaagtgtcatcagctctttttaaattagtaagatacagttggctaggaagaaaaggcgtatcataaattttgaagctcatcggccgaggcaaccacggatcttcaagcacacgtacattattaccatctccaatgcaccatctatacccttgctggattatctccttaccccacaccaagcttctccacacaaaggaggcatta

SEQ ID NO: 197508 - DNA, 575 bp, Cannabis indica
atacccactgcgcacagagtactcaccattttcggctataatgccacataattttatcgttaatgctcgcatcattagtaggaatacccaagatcagctctgcatcatcaccgtttaaaaaatcgctcgtataaatgcccaaaatccccaagtgtcatcagcttctttttaaaatagtaagatacagttggctaggaagaaaaggcgtatcataaattttgaagctcatcggccgaggcaaccacggatcttcaagcacacgtacattattaccatctccaatgcaccatctatacccttgctggattatctccttaccccacaccaagcttctccacacaaaggaggcattagatccacactttgcctccagcatccccccattaggaaaataacttgctttaagtaccttagtacacaacgagtcaggaaatctaatacacctccaaatttgcttggcaagaaaagctttattaaacagtcccaaatcacgaaatcccagccccccttctccttcggcttacaaagataactccacttgcaccaatgtatcttattggctttctaagacgaac

SEQ ID NO: 197509 - DNA, 681 bp, Cannabis indica
tttacggtttaaatttctaaaatggttgcagcacaataacataaatcctgccaatattttaaaaggtaaggttagcactatccgtaaactcgcattttcatactggactttgttcaaactaactcattttttataaatggattagtctatttttttctataggctcgaatttaactctatttttctattatttttctatcattaataagttaaccactaaattatatgtatttttcataatttttcaacaatagttcacataattatataaaaaattaattaaaatgattggattttgaatatttattagtaaataatattattaaattataagaatttttaacatgttgtacttttagacaagttaattcatgcttatgtactatactttcaggcttgtcgtgtcgtacttaagttaatttttttcgtatcatagtattatactatgtcgtgcccaaacccatatctttctcctggtggtcgggtgtcaatttcatgtcatatcaaaaaaatccagctcgatatttacagcatcactcaaaactgacaaaaatgtaaatgtatgtaattttaaacgtccaactttctttttctttgtttaagagcaacgagaaattattgaaagtatatataccagttcctagcctgtttttctggagtaaatatttaaaaaaaaaaaaa

SEQ ID NO: 197510 - DNA, 638 bp, Cannabis indica
aaatattgggttattattttccgttatgttagattagctatgtcgatgtggaattagttgattgtttagaatatttatgataaatgaattaatgttagttttcaaagttaaataaattgtgatacttttataatcatgtgataattttagcatgacaaaatagtccatgacaaatatttatgaagtgagttgaagaattggatatgttggaaaattatttacgtggcctataggaatagaatttagtcttattattattattattttctttaagtgatataggttgaattacttaattaaataataatatcaatagtaacgatagcggccaaatcgagtattaaggtatagttttgtgatatgtagctatgttgagaaatttgagattagtttggacttatagcattgatagaattttagtggattttctttgaatgatattaagtatatggaagacacttgcaaatggcttacgtgtagcattaagaataaaacatggatggatggtatcttttggttagtcatcaagccaataaagacttggtcaaatggtaaggtggcacacttagagcttatggagtaaatagctaacaacatatatataaataatgcttattaatcatgttttggcaatgcat

SEQ ID NO: 197511 - DNA, 932 bp, Cannabis indica
aattaattcagaatatcggtaactatctaataattattaattgaagtttctcaattagctaggctctctaattttatggcctccaatatgagaattgggtgtgtaattttgttgaataattattacgacgtattaccagtacttttaaacaattaaatattgttatttatttattattttaatgtgttaatttttatataattactaatttgccaaacatcaaaatataagactatattttacatctaaatatatgtacattaattgtatttcaaaatagattataataaattattatgttgagtcagtactatacagttgctttcaaatctatgtaaatatatgtaaatttttaatatatatatatagtagtagttgaccttcagtttttagttaatttgtgaatgtgatctatatattaaataaacatatattctttcattatgttagatactttttcagttataaggaaattaattttggtcataactttatgggatatcatcatctccaacttgccacattaagaaaccataatatttgctggctttcttcactaatgtataaaaaaatatataaatataaatcaaataaaaaaccttatctccattgctatatatatagccttgcatatgtagctttcaattcataagaaaacattcaaactgtgatctctctctctctctatcatcgtaagtcttaattagaagtactagtattacgtactaaatatatatatttaagatgaagatgatgagaggttataagattactgttattcttcttgttgtttctttattactgctggcagttgttattgatggcgctgctgctaaaaaggtaaattacaagaaagtgaaaaataatgataagaaaaataatggaggaggaaaaggagtaggaggaggtaaaggaaaaggaaaaggaaaagg

SEQ ID NO: 197512 - DNA, 1397 bp, Cannabis indica
tctgaggcgaggttttagtgcgatgaaagaccaccgaaacaaactccattgatgatatgtttataagcttaagaaatgaacacgacaaaaaaaaagagggaatatcaaatatatctatgcatgcagacaatggataggaaggtaatactggattatcctctcgcgaggcaacacgccactaggccacgtgttttctcatatgtctaaattaaatataaatttagttaattgaaagaaattgttattagtcaccacctaaaaataagttttgtaagtgattaactattattaaattaaattatgtggcgatccttcaccactaggtgtgacttttatcatttttctattgaaaatgaatgaagtaaattaaagaaaaaattgggtgtgaatacatctatttagaattgggtggtttttggagccaattaaagtttttgtaccatatttcaattggctagttagttgtgccttgtattggtttttttttttaattttattttataatttaaaattcaatttaatttttaaggtataataaaacattttaaaataattttaagtttgatgactggctttttgcacttatttttttttaatggttttcatgcttttatggcttttgtgccatttttttttttgcttgccctaattatttaaggtagatttgtgatatgctcaatgagtacaaaaagtattttattttgtactcttgccttctacaaatgattttttagatctgacgtgtttcaagtcttcaaattataatatagattgttttatcatatttatttacgtacattagctatttttttcattaaattgtgtgctaagagttttttgtattgttattctgtcggtcaattttgaggagggccaacttttacagggccaacttttacagagactttgtcgataagtttattttaaatattatttatttgagagttgttgtattcttactattgagtttttttttattaggttttaatatcatcgcttgaggattaattttttttttatcttattttgttttgaaaatgttgtggggatcattcttaatatgttaatgagttggcgtgtagtattcaatgatacaagttaaagccctagctctttgagtgtgatgtttgaggaagttatagctttattgtttaaatttttagggacaattttgtctcatattgctcactgactttagcagttcatagtatgacaaagtatgcccttcgttagatgatgagctatccaagttcaagaatgttcatatgctttttgcgaatgtttacattataaattcataaatgaatttaatcactacgtaaaaaaaaataaatctcaaaaatctctccttcaaattaatatagaacttttttaataattatgtctgcacttatact

SEQ ID NO: 197513 - DNA, 2831 bp, Cannabis indica
agaaaagggatgtgggatggattgctcaatcttagtttcaatgctaaaccgtggattgtgataggggatttaaatgctctttttgatttggaagacaggttgggtggtattatggtaactttgaatgatatcagagatgcaactaactcgctagctcaaagccacttggaaaagctccttaagactggatcaggttgtacttggaccaacaatcaagatggagataagagaatctactcaaagatagatcacacctttgtaaatgaagactggacagataattttccctcggctaaagctcattatagctgggagactatatctgacattgcttgtgtgttatatcgatggctactaacgagaaaatcggtctcaaaccgtttaggtactacgatttctgggctgagcatcctaattttaaagaagtggttcttgaaaactggtatagaccgatgaagagagagggaatgacagctttgtacttaaagctcatgcgattgaattacaccatcaagaggtttaacagagagagaattggggatgttggtaagaagtatcaagaggccaaggagcattatttggagaccagaatgcaagctcaagagcatactcatgatttgtcctaccagcaagcagagaaagaggctgccatgaactttaatgccgaagaaaagatgtatcacaacttcttgagacagatgagcaaggttacttggttgtgtaaaggagatgagaacaatgcttatttccatgcctttctgaaaaaaagaaggatggaaagtagcatagttacttatacaaatgagcaaggagatatcatagatgactttaatgaagtggtaaaacactttattcagcatttccagggttacatgggaactagttcaatcaccactcagagcctgagaactgattgtatggagctgggaaacaaactcaatttggagcaacaattgattttgataaaaccattcacaaacaaggaaataaagaagacattctttagaattcctgattcaaaatcccctgggccagatgggtatggagcaggttttttcaagacgatgtggcctgaacttggagctgagtttaccaaagcagtagagaacttcttcaagacaggttctatgcctcaggattttcatgcaactatgataactctcgtacctaagacagaaacccccaccaaggctgtgaatttcagacctatagcctattgctcaactgtgtaaaaatgcatctcgaagttgttgtgttccagactctctcaagtgcttcatgtgttgattaatcagaatcaaggagcatttgtgcaagggagatcgatagcccataatgtcatgattcttcaagatctattgaagaattataaaaggaaaaccatatctccaagatgcacactcaaggtgggcatcagtaaagcttatgacatagttagttgggaattcttggaagccctgctaaatgactttaaatttcctaacagatttttcttgtggataatgacatgtttaaaagctacctcttactcgtttttgatgaacggaagagtgcaagggagcttcaaaggcaggaagggtttaagacagggagatcctttatctcctctcttgtttgtcatgataatggagtatttgaccaggagattacttctagcagccaaccaatccaagataaggtatcatcctttatgcaagaatcttaagataattaatctttattttgctaatgaacataattattctgcaaaggaaacttaagtttaactcaggagttaaaagaggttctggatgaatttagtgcaactttaggccttgccatcaacactaacaaatctcacctctactttggggggtgaaagaggaagacaagcaggctatgatgacataattggcccttcaagaaggatcctatcctctaaaatatctgggggtccctctaagaccaacaaaatggaaaactgaagattgtggtgataatcaagaaaataaagcaaagacttcatacctgggctacaaggtatctcttgtatgtaggtagggctcaacttattcattctattcttcttgggctaagaatatattggatgagcatatttatattgcctcatagtgttacaaaggaagtagaaaaactttgcagagggttcttatggggatggaatggaaatatacgcaaactccatgtggcttcttgggaaaaagtatgcctcccaaaatcttatggtggcttgggattcaaagacggagtcaaatggaataaagccattctagcaaaatatatttgggccatttcttcgaaaagagacaacctttgggtgaaatggatcaataatatctatctcaagaacaagtctttgtgggactatgaacttaagaatgatactaattggtattggaggaaattatttcatctaaggggaaagttcactcgggaagctattgaaaaggaaagggatggtgtgaacaagtttaaatcgacattattgtataatagttgccttccccaaactcagtttgagttcaacaaaagtatctggaattccctaaacatgccaaagcgcagattcatttttttgcaagctatcaatgttcagcttttaacttgtgacaagtttgtgcaatttccgatcactcttgacaacattagttgcccagtttgtgacacaacagttgagagcaatgctcatatgttttttggctgctatttttcacagcaggtgggggagaaggtctgtttgtggctgggagttaggagttggccgactggtttccattcctggcagcaatggctgctgcaaacaagcaaagacaagaagcaaagggtgcata

SEQ ID NO: 197514 - DNA, 504 bp, Cannabis indica
ttagcccctaatacaacaattcataagttgctgaatgaggagggtgactggaataaggaaaagattcaagcttatttccacaaagacgatattccatggatcttgggcacacccgtggacactcaagaggaagatgtgttgacttggcctttctctccaaatggtcattacttggtgaagagtggctatagagtagcccgtgagctaaatgtttgtcccactagatgttcgaacatggaccaaatcaactcttggtggaagatgtggtggcacctccaactccctccccgaataagttatttggttggaagctttgccacaattggctcccggccaaatcaaacttgatccataggggcatgcaacttgatccgctttgtcacctatgtggtaagtatatagaatcgcttccccatgcgttatggagctgtgccaaggctaaataggtatggaaattttttccttattactctcgtattcgtctattacaaagttggaactatg

SEQ ID NO: 197515 - DNA, 1628 bp, Cannabis indica
aaaatataaatcaactagaaaataatattcaagtaggcttgttaagcataatggtcaagatgccattttttttatttcatttgatatattattgacacttctcacaaaaaaattattttcatagattatatgagtgtatttcttagttttaaattataatgttgaacctattgatagatattgatttttgttatgattacatgaactaatattgagatttcattagagaaagccatctctaatggatgaaatagttaattcagccttttgatagttcagtttgctgagtacttttagctactatgtattacttaccatttgacagtatgaaatctagtggacatgttaccacattaatggtaagccaatatattgtacttaagaacataatacgctagaaaaagtcattcctaatctaacatgatccaagggcacatttcgatggatattaaataaagaactagaatgacttctttattgaacaaaaagtaggaaacaagtcatccatcaaaacactagattataataaatttcactattagaatttagacacattattttgcataaaatggacgactaatagtcaagtgaagccgccatggaaaatgcatttactttcaaaaattgaataaatgaatgttgcttataagaaaagtacctggtaagtcaatcatatgtatatattgaaagcaactaatagatacatcaaatagaacaattttaagaaaaaaaatgaggtaatcaattaatcatacaatgatcaatgaatcatggagaaaaattaattaattattaagaaaaataaatgcagaaactaaaacataattaaaatccaaaatggttgttgtgtaagaagaaattcaaatagtcctaaatttataacttcgacaagaaaaagttgatatatagagctttattcttaagggtttaccttgcttagttttaattggtttgaaatttactctgctctattgtctctcattctttaaatttaatttgttcttctttcctcaatagtcctcgtaaaatatagaagcactgtctctttgaaccatggttagtaaaaattataagtaatcattataaatattaaacttacaattttcaactaaaaagtagaacaccctaagcatacgacatacgagaaaataagaaaaagtttaaaaaccagagaagggttgaatgggagtgacctttcaacctttctaaagaagatcaccttcaattctgatgggagagtgaggatgaagctttgaaaactttcaaaagagcttaccagcagcataaagaaaaccagaggaaaccaagttctttatgcgcaggaatgggaaatttagcacgaaagaagtatgagcagttattagaatatgtacttgagtacgtgttcttaatttagttttaaaaaaatatattattattaattattactagaaaaaaaattacttaaaaatatcattagacacacttttataaaaactgttgctattttaatggtgtaaattgaaatcgcatcgcttatttagaagtgttgtacttgatatttttaataaactactaaaataaataaataaatgaaaaatctaactaaatagagatttggcaacacttttttcaaacaagtctttata

SEQ ID NO: 197516 - DNA, 1922 bp, Cannabis indica
gaaaatctcggtcaacaatactattaataaatattcaacattcaaacatatatcgaattgtttaacttctatttataataaaaaaagtctttataggattttcagggcataaaccctaacatatgaaaccaagctattaataagctgatgtgaattttaacgaatacattaactaagttatcaattcctcgtgactccactatagactcaaaatgaaactcttgagttcatagaacgctccatacaacctatatagatacactataaattatccattgtttcgatcagaacaatcaaaggtcctctatagatggtctacattgagtaaggactaaaattaccattttacccctcaatgtatcttattctctatatacttagtttcttgtaaataatatttcagtaaactaatataattactgaaatgagcactctatcattcaacgtcttcaaccaagatcaaaagaaaccttcatttcacttctaaataaagatgtccatatctattattaacactcctactcaattacagtactgagttcccaaaatgtaagtatgggctagaccttaagggtaagctggtaacgaacaagtcaaggaactcaaataatacaattagcctaaagtttaatcatcttaggattgagatcaaattgatatataataaattaagtgacattgacttagaataaatataacagtaagtttataatatctttcctactgttaatatcggtccagtccaatgtaaacactataaattcgatacaaatctactttactaatgcctgaataagacattccactcgcctaagtgtaagtagattacatcgccgattacagggctgaccctgtgttgaaatgggctatacgcaaaaaaaaaatttgggccgttactataaagataaatactatttttaaaaattatttaaaatatatatattttttaaaaggcaattttttgatttgggcccctaaaatgagtgggccctaggcgcgggcctagcccgcctatgcccagggccggccctggccgattatcacgtcatcaatgtaaattcagtgcactgataaattcgagactaaataagtttgaagtatataatcacaattatttttcactgtgatgacatcactataattgtgaataactacatgtttagaatttaatagaatttatatattaagcatataatcatgaaaataaaatatgtgaacaaagaaaataacaaggtcaaactatgatttctgatcttcattgatcataaattatattacattgaaattatatttatatttagggcataaaaccctaacatgatgattaagtgataaattttttatatattgatttttttttctttgtcttggtttttgtcaccaccgaatacccactgccttgtcactatcattttgttaattataatgttcttgttttctacaaccgaccagtcgactggtgtgagtttcgcctaaggttcagtgatgaacctcaaatttttattgtatgggggcttaattggtaaaaaaatatttgtgcctactttaaataaacgttataattactttatttatattattttggggtttaattgttataaaaatatttacctaaaaatatttatgctgaaggacattttatttgtagtcttgcaaaaaaatgaacaatgacacataaattaaactatgagttttattatgctaatctttagaatgttaagttggtgatactaatgggatatagattaatgcttagtataccaatattaacataattaaatgatgcttgagttagtagtctaatagttattcatattaatagttatgagtgttctaatcataatatctaattatgctatagcagcggtctatagcctagaggaaaccccgagccttagctcctatttatattatattgctat

SEQ ID NO: 197517 - DNA, 1016 bp, Cannabis indica
tttaataaaaattataaaaaattcactaatgaattgtgagagactgagtagtaggggtgtatatcggttggtttggtcagattatagtgtatttttatcaacctagctaatataaataggttgcaactatttaatcgtaattcgtccaataaaaaataaaaaagtaatccgtccaatgatttttgtcggtttagttgggttagcctgtttaaactgatcttaatttttctttttattattattgttagcttttggtattcaaataattgattcgaaaaaaaataaatatatagtataagcctttgaagattaaaatagttatagtttaaattaatgttaaaaaaataaatataaattgaataaacattaaagtattaaacaaatatttttcaaaaaaatagaataaaaagaatatactcataaattttaaattttaacttcaatattcaaatacaatcaaaattattaattataaattctaaatttcaaattaaacactataaaatgcaaacttttaaagtaaaatactttaattattaaacgtaaattatatattatattaaagataattttagtaaaaactatgtaaatttatttattgggtttattggcgtgttatttgagtggattagattattaatattgaacccctcttaatatatttattggacggtttgaattttccataaacacttttgaattttattttttttaatttattagatttgattgagaccattttttcaagttgaaccctttgtaaatttttttgaatagacgtcatactaacagttgtgggttcccccagttattcccttttcagagttctaatccaatttcatataacttttgataaaattttcttttttcttttataaacaacttttaataaagttgaaatataggtagctacgctggataagttaataaaagagaatcctaaatttaatagaaaaagacaaatcaacatcgagagttcttttctcttctatatggccttttttttttattattat

SEQ ID NO: 197518 - DNA, 1003 bp, Cannabis indica
tgttattaacgtcctcgcttcaaccctcaattgggtttttcctcactaattcatagctcttatacacaagtacgttactctagctgtctcctggtcaagcatgcttaactgtggacttttttcgtgatgggctactagaaaataagatgcaccttattgatataggtagtattaatcaatctatttaagctattttaaactatgtagtcctatacctacacagtctcagaatcatcacacttgaccttcctcaagtgatgtgagattgcacagcttacccgacattttttcttatagatcacaagactactgattatcacaaacattgcgatggtctggtcacgatggtcgtgagttggaaagagagtctgagatattgtgatggttgtcatttggtgagagagtctaagacatttgatgttagggattgggttggtggtaattgttcagttcgaaaagagagggagcgagaatagagaaagagagagacgggagtatgttaaaaaatggaaagaacaatttaagaaatagacaaaaataagcttagttaccaatattagttatcaaaatttcctactatgttaaataatacgtaacattaaaagaattagaaactattatgttaattaagcatagtaaaaggctaatatattatatgctagactcattgaaataaagtcaaaaagaaaaggaaaaatgaagagtaaaaacactcacttttctaatctctctgttaagactttgtcagtagtgagtgttttttacgcattagacaatgatacaaaatattgggtcaaaaagctaaataaagattaatcaagttctattctagtcctgcttttaaaggtccccactactacaaacaataacagattttgttcatataaagacagaagagaatgatatagatacacattttgttattttttgatccttttgtctcatctttcttattagtgatagaagaaaaaaaaaaagtaaaaatagaaaagaaaaataaatg

SEQ ID NO: 197519 - DNA, 600 bp, Cannabis indica
ttctgcagattcaaaatacattactcaataaattaacaaaacaaaaaagagagagagaaaaagaaaatcattgttgtgttgtattaatgtccaattatgatgaatgaaagagtgaattatgcaatacctgtaaaatcagtttggggtgaacaaactcaagtagaagcttttgaaatcttcctcttatggcaaataacctgaaaaagaccatttatatgctaaatgactgttatacttaccaacttacataaacataaagaaacaattggcaaaatagtttctctttagagtcattttccatttttggcctagttttgatattttcttaccaaatggtaaaagttcgactagatgtctaaatgttctccacttcttcacttgaattttattagttgttagtgtcaaaggtttttttgtaaggaattatccaaactaggtgaaagtgcaaaatgacttcaaaaaaagaggttatatgtactcacacagtctaagactaattagtgaaaaataaatctcctttttaaatatgaggaaattacacattttatatgtttctatacaatatgtgtaaaaaacatgtacctttttttttttttaaaa

SEQ ID NO: 197520 - DNA, 737 bp, Cannabis indica
aaaaaaaaagagagacaaataataataatagcagtgatagttaatggttggcttaatcaatgcggggcagaaggcgaggcccgctgcgctcctccagcagggcatcaagtctcttctttttctcctagaagcggacgagaaccccctaaggctttgggtagaaatcaagcttaaggttttgacttttagtctgccaagccataaagacgacatcatcaaagcgcttagtgcaatggttgcagacaacaggggctaggagctcatcccttttagccttcttcagggcctgatctttgaaatccctgagctccttcacctcaacagtcaagttggtcgtcgtctaaaaatcagcctgatgtagctcttccatggacttcagcctggcagaaaaatcttcaactgcctccttggcctccctcagctcgcgccttgcattagccacggcctcatcccaggtcttcaactcctccgccttggctgccagtgcctcctgatgcttcctctccgcctgagcctccctctgttgggcctcttcccggaatgctttcctcttagccgccaaatctctcagactcttcatggcctcgtccatgcccccgaactcagacatgacgtacccatgatcaattaaagtctttgagaggcgaccagtctttgcagcgatctggaaaaataaaaaaaaacggtaagaataagagatccgatgccagaagtaaagcagaaaagaaaagaagaaa

SEQ ID NO: 197521 - DNA, 1203 bp, Cannabis indica
gaaaagcctaaaccctaatttaccactaaaatattagatatttacatattaaattaattaaatagaaaatactaaattgcctcttgaaagtagatatttctatcatgtttgttaggctgctaagggcccaattcgcaggtaccttgtagctcacatatcaagctggatagggtgtcctgccaagcaaaactttgccggacatatactatagaatatggttcggccagccatgcaagttctgcaggttgaggtctggccaaccatgctcctgtcagaacctggtaggtcatgtgcctgccaggatcctacaggtcatgttctgtcagctttaataagaggagaccagcctttggatgtggaggccagcctttggaaagtgaaggacaactttctaaatttttcccttgtagaggtcaggttcccttggtcgaatggaacctcccttggtgtgaaagttcttcttggctagccagcttgtccctagatcttggccgaccatacaagctcagtgttgcttaataagttttccatatcttgtatggagactctgtcttgctactagcaaggttgcattctgcatgtactctgtcttggcttacatgtacatgccatgacaggtggacataatttgggagaacatttgccccaagtccctgttcaaacatctgctcgaatagggaccttgtagcttcatcttgtttatagtagtctctttcgagcagcctcgtctagccaagtgttggcattttgcatgttatacttttagatctttgatctcctctctatttacgtgttgtttctcttttttgatgcctcttctttatacctgccattaattagttttacgctttttaagcttttggaaactttttagttatcattttgtttgtagtctctttgctatattgatccttatgatagttttggaatgtacaatgtgactttttgatggaattttggccttcttgtgattcttgactctttaagtcatgaaaaatatgaggcacatattggagtttcgaaagaaaaacacacatcgggattcaaaacttaccttggaggaggtcttgcttgagacctggtcgaccctagggcttaatcatgggagttggcctggtccagagttttaccgtataaggctagctttttcatttctggggttttgtgaccctagccagttcttgacagagtttgggaccccag

SEQ ID NO: 197522 - DNA, 2268 bp, Cannabis indica
agatgttaaggttttcctcctccgaaaccaactccgaaaagagagagtcaaagtcatcatcaataaccgtatgctgagtatcgtagaccttaatgaactgattcctcatataattcccaatgtcttcacgattgtggagccaagtgccatcattattcacactttcgatcgtgtttctgcgtctcctgatcactgtagaggcgtgaaaaaaattttgtgttgccgtcacctttgcagacccaatgctcccgcgacttttgtttccaaatttgactccatttccaaaatacttagctgcacagtagcttccctctccaaatttttatttgatggcagcttattttgaatttccaccagttcctgtttgaacattctcagcttttgatcgcaaaacccaaaagagttctgattccacactttcaggtctcttttcgtcttacccagtttctttatcaggatatcatctcttctcccattaaagtcatatttccaagctaaatcaatcaccttctcgcaatcgggactcgaggtccaaacttccataaaccgcaaagggtaattaagcctttgctgtacttcactggtcgaaagtaaaataggagagtgatcagatgccaaaattggcaagttcaaaactttagcatttgggaaatgagtacaccaagttgcctccgccaaaccccgatcaagacgcttacgaacatttttcaatcccttcatagcattatgccaggtacaacggaccccatggaaacccaaatccacacttccagtttcatccataaaatcccttagaaaagccccctcccgactctggaaatcccttcccccaactttttccgatccttccaatattacgtttagatctcccagaacaacccacgactccctacatttcgacatcaactcagttgcccatttccaaaattcaactttctcctcagaataaggagtcccataaaggcaaaacaaatgccaacacacacttccttggtttgcaggaacaaaagcatggaacccagtatcaaaaacttcctttatttcaattaaaccaggttgtctccaagccaaacaaaagcctccaccaatgcccaccgaaggaatacaagccacattaggaaatcccaaacgattcaaaaccatagtcatatccccaattcctaccttggtctcggataaaaacaccacatccacattattttcctagattaaactccgaagagttctctctgtcgtgggcctacgaatcccacgacaattccacgagatgcacctcataatgatggtgggggcatgcttgaggccgcctcctcgccctttccaaaatccaattgagaagaattaacagtgcaattttccaaaacaacttccacctgcgaactcgctgatctcacattgttgcgttttagccctcttccttccacgtcgtgttttaagtccagaacctctattaagcatccgtgacccctgactggttcgacgagcgctcttgcgcctttgcttctctccaccttcttcagaaccgaggcagaatttcggggtaattgcatcttcagtatgcgacttgccattttcttcaacttccaccgtgatcgggcagcttgggagttcgaagctggtgacagcaggccacggatgataccaagtatggggctttcgtttcttagttcccaacaattgcaaaatcattatggaaagatcaggggggttacaaatcaaagaggcttgggccttatacatatcagtagcgtccgggctgtacagcttaaagaaaagttcttgggcttttgggtcatcattgggccatttaagtggggtaggctcagggaaatcatggggcctctgagatctgcaaagccatgaatgtggaatttcaaggctttgggctatagtcggcccaatatccgggatcctctcctcaccatttgggcctaatgagaagtcaggaataggaagctctaaataccccagcccattctccatattcagcacctccatctgtctatcccccacgttttccatattttgaatcccatttccatcaccaacagatattccctctgtccttttgcaaacttctcccgtacccagtaccgtaggcacaatggtgggcgtagcctcctgcacgattttttgtttgtgtccacctgtcattgtactatctccaccttgtccttatctacaccgttctcctcccccggcctggcgaaaccaccgcagactcgccagaatttctcgctttttccagccctttatcatgtcgcttct

SEQ ID NO: 197523 - DNA, 632 bp, Cannabis indica
tttgtattttggttcttctcaagtttgtgtgtggaaacaaagtcttacccaatcttcatggttcggttagtttgacaatcttacactcctttgagcaaaaattgttttgaaaaccttggtgtgttcggccaccattctcaggcttaaaatggttagtcattatgctcagttctcaacatagagaattcgatgatctttgatttcccaagtggctggaatggaatgttgattgaaaattgaaatattagctttgatatttgtttaaactatactaagcattattgtttgtgtcatacttcttccttacaaaccatgaaaatcagataataagatcactttctcataactttgatttgatgaattcaggagttgacaaagttcataaacaagtgcaatgaagtgaaggctgccaccgccgcaaacaaggaaggcggtcaattatgcattgtcaaaacaccagctgggaatgaagctgaggccaagaaatagagttagggataatcaccatatattcaacatatggagagttaaaagagaaatctgaacaaaagttgttaaatttacttctcattcaagaaaagctaacacttattttgcttatcatcttgttctctttgattgtaccatgtatt

SEQ ID NO: 197524 - DNA, 1350 bp, Cannabis indica
gacacaaaaggtgatagtaatttaatttgatctaaagtaattaatattgtttcattattatttccattttgcataaaacttacggtcaccccataacaacattctattgagtggaatgtgaacgtttctttgcttcaaatggatatgccttggccttattctcttatccaaactgaacccaaaatactgaggaaacttattcacttcctctaagcttctctccatctcccaaactaaatactcacacttgggtctcaagttatcctctatactataaccgaatattgccggaacccgagcgcaaacccgacccgattcttcctccgaaagcccaatgctaatcagaaacctcatcttttcttcgagcttctcaacgcgcgtgttgagtagatgcgcgttcagattgctgggcgagctaagcccgctcaaacccagcttcctcaggtaagttagcgtcgggcggaggcagtagtcgacgtcggagaagagaatagcgggacaccggaggataattccgcaggattcctcaggcgaggcggagacttcggcggcgaggaaatcgaagacgggttcgagttgggcggggtcgaatttgggggagaaaagttgggggcggaggaaggcgagtctggagaaatgggagtcggtgaagcctttggatttgaggaaattgagtgtggtgatgatttgatggaggtggtgaggaaggggaaggttgttgggaggtgtgtggggatggattatgccgatggttttgaggtagcggagattttcacggtgggatgtacggaacttgatgaaggggtggagggaggaagaggaagaggaacagagtatggtttggatttggatttggatttgggattgggattaagatgaaggcagcactgtgtgtgtaggtgaagcatattgcatttgcttcttctcaatcttaatttctaactcaacttggttgaatggagtgagtggttcatatttttgtcttttggataaaataattctctcaaaagcttttcttttttaattcacaaattaaataattgggatttttgacttaagaaatttataagcaatcgaaaggagaaagatagagaaagaaagaacataagcttgattgaaagtttaatattattatttattataagtgtaattgccacaaaactcctcatatttttttttttttatctctttagcaattaatctaaaaatttatttgttggtcataaaattcctaaaatttatgttctaaattttttttctctttaaagaaaatttgtaatttaatattctatttatttttgggtgttaagtgttatgtgtccacctatgtatgtatgttgactatagtgt

SEQ ID NO: 197525 - DNA, 1452 bp, Cannabis indica
tatttctgattgtaagatgatgttaaatgatttgagagatgtttctgtcaattttattagacgttctgcaaatagtgttactcacttcttagatcgagcattttatttagttgttgatcgtgttactccagattttaaccatgtaatcactatagattgcaattaataaagatgataattttattttaaaaaaaaaaaaatattttagagttgagctatatcatgtattgtacttttggattgattctaaatgttcatatgttgtttgtaagcgctcttctgtaaaactatagtccatttcctatgaaagaaaaaaaaaactgtatagccacgtatctatggtggatatgggtgattatttgtttcaaaaaacttaataaaaaagataagcacctgaaagtcgcgtaataattattacgaagcctatactaccaatttgtgttatgaatgatgaacaactgtatataaatttcaaacacttattacattgtttattaatattactgtctagaaataaaaaaaattaatgctaattaataatattatagagcattgatgagaagaccatagagaagtgggagacaatataattatgatcatattcatattaattaagcctattcatttagtattatctcttcagatctggtcctcgtcttaaccctatagctagctgtgtgatatatggtcggacccataatattcatgactaaaaaaaaattaaaaaaaataaaaaaaccggttagctagctatatatatatatgtatgcctgtactttttcatccacaaacaaaagattccaatgtacaaaatgtattgttacacaaagaccaaaacaaaataaagcaaataggaaacatacaagagatttagaattgatggttggggtccttttggagtagattatacatgttatattatttataataatataatatatagattaaatatgtgtaataaactaataatatgtaacatatgacaatgtatattagttgtcatctttttgtaacatttgggagttacttgttactatgagtaacctccaccatcatcaccaacattaagagtgtaaaaagatgttacacatcttaatttgaaattcttaatgctataggagttatggtgtgtgtaggagttacatttgagtccataacatctatggggttatgagtttgaatttcaaatggtgatgatatcctaaacactatataaagaggtctaaggtgctcattttggagatgaagttttctatcaagaaagcactttgctagaaaaccctaaaaggcttgataattcccaaagctatttcctagagagttcccttagtgcttagagatagggggaaataagcttttggacaaaggtgtaataccttgttcaagtcatggtgatccccactaatctacactcaaggttgtgagtgagtgtatatatatatattctcttgt

SEQ ID NO: 197526 - DNA, 954 bp, Cannabis indica
cattagtaataataacaaataacaatgattcatgggaataatattaattgatcaaagtacataataagaaaactaaaaaaacaagcaattaaagtgaaattttattttattttatttttcccttaaatgacaatatagttctatatggcttatactcattggtcagtagtaaaagctgaatatatacttacattatattatatataaatatatatacataaataggtgttatatatttcttctttcttgaagtgaaaattacccaaaattgatgtttcttgagttacagaaaagaaaacttaagtaataataattccaccatgtatttccactattgcaaatttggaatatatatgtatatactgtgtatatatacatatattttgtatatattattggtgaaaagttgttataattattacaacgtgtgaaactgtgtccacatgagattcgagaagcactacgaatattggacatttcgaattttttttccctccatataaaaataaaccatatatatactaattaagttttaactataaataataattattatgattattttttttcttttttcactctcatatgtcttgtttttctcaaatatgaatatatgcatgcatggtcatgatgagtctttgtcttttttatatttgatgatattactaaatgagtaagaaaaaaacaactgtaatacatatatataatatcaattatcaaacaagataaatatatatatatatatatgaatgtatatacgtatttaaataaaatacaacatcaacatatcaacatgtatgctaaaaaaatgatttattataaattttttatactttaacaatgtgagattctgtaacattcttttaaaataaaaattattctttttcactattttaggcagcttggtaacgagccactttttttttttcttttagttcactatccccaaatcat

SEQ ID NO: 197527 - DNA, 1770 bp, Cannabis indica
acaagaggttagaaagagctacactgaaggctgaaccagaaatagtcatggctgacaatgctaataatggcaatataaaaaataatgggggtgcagtagaagaccaggaaaacggtcgtaatccacctgaccgtagtctgagggactatgttctcccaacactgacgagggttcagtcttgtataagaccacccgttgtagaagttgacaattttgagataaaaccaaccatactccaaatggtgcaatcttcatgccagtttggtggactcctctctaaagatcaaaatttgcatccgtctaattttatggtgttatgtcaaacattcaaattgaacggagttagtgatgatgccatcttcctaagactatttccattcttgctgagggagcgagccaaagtttgttggtgtcctttccacccaactccattgctatatggactgacttggcgacaatattcttgtcaaagtttttttatctagctaaagctgccaagctgcgaggaaaaattaataatttttgtcaactcgacaatgaatctctctatgaggcttgcgagagattcaaggatctcataaaaaaatatctacatcatgggatcaaaaagtggatgttggttcacaaattttataatgggctgattggtaatacccaaacaattatagacgccacaactagtgggcattttatgagaaaaagtacaaacgagacttatgattcgcttgaagaaatgactatgaataaccaacaatggccaactgagagaatccaagcgaagaaggttgcaggtatgcacgaagttgatgcaataactaagttgacagcccaagtggtggccctaacaaagctgatgactaatcaggaaaaacaggctcaagttacgtgtgaactatgcagaggccctcatacatatgacacatgcccggtggatgtgaatattttgccaatggatcaagcaaaagccattgggaactatctcaaaataataactatgggtacaaccaaggagggagtcgtcggcagaattaacaagggtaatcttcaaatcagcagcaacaaggtttttacaaacaaaatttagccccaacaaaatcagccaccttctgaacaactaagttctagtggaggctcaaatattcaagctaatttattgcaccaattcatgatggagacaaaagcctcgattaaaaacttggaaactcaaatgggacagtttgctactcaagtggaaaaataagctcgagaaaatccacctagcactagtgaggtaaggggtaaggagcagtgtcaagcaattacttcgagaagtgggaagaagtgtgatgggcttagtgagaaacaacccgtggaagaagggggtcaggatcaacaggcacggacaccagaggaaaagaagattactgggggtcttacatcaaaagaacttcaccacctatcaagattgagaaccatgtcaaaattccaaatctgcagaggctctgcaagaacaacatggataagcagttttctaaatttttggaagtatgcaagaagctgcacatcaacattccatttacggaagctttggatctgatgtcgacttaccttaaatttatgaaagagattttatcaaagaaaaggaagttggaggaatatgagacaatggcaattactatggagtagtgcaattttgtagaagaaactaccgcccaagcttaaagatttgggtagttttaatattccttgctcgataaggggttcaatcgagacaagggccctatgtgactt

SEQ ID NO: 197528 - DNA, 575 bp, Cannabis indica
aaatcgcctaaatgcaaaggtaaaggtaagagaagcaagatggtggggcccgatgaaacaaatcagtcggacgccggccagtcatcccaacatgactcagctacggatgatactatcggggcgctgcttaatgtccctctagagactacattagccgtcaaaaatgctagaaaaaattctcttagtgtggtgccgacggagctctccaatcccgaggaagtctctcagcttggggatcttcctgtagttgacttgggcctgaacttaggttctttactatcttctcctactcatactccctctcttcctttaggggctccgttgacctctcagcttgctctttctccctttatggtctgtccttcatctttccctagtagccgaggttccccgtctttggtcgtccattctccttaggtttcagctgagtgggacgaaattcctactttttgaatccaaaaagatgttccttttgagaagtcagctgagaactattttaagtccttcttggaggctgttagaaagccagatgatgacttttatatttctaaagggcgagattcaattctgatgga

SEQ ID NO: 197529 - DNA, 1091 bp, Cannabis indica
caactcaaaaattacaacccagaaacattttcttatgctctatgaacatgataaacaacaattaatggaaatgatttgaaaagtgacactaaaattcatctgaatgaaaatcaagcttatgtagttatttttcaagactgaaactttcccattcaatctgatatcagaagacgaaaaaaactaataagatttgaagaaaaggtctatgctcattgctcaatcaattatgagaatgaacaaagggtttttgtaataaaattgactataatggtaaccgaaaaacttcattcccgcaactcgaaaaattacacccgaattccccaattttcttattctctatgagtctatggacatgttaaccaaataatcagaaagaagacatgcatgtatgaaaagtaacactgaaaatcatctaaatgaaaatctacctcatgtagttatttttcaaggctgaaaattttcccattcaatcaattatgagaatgagacaaagtgtttttgtaaacagaaaagttcattcctgcaactcaaaaattacacccaaaaacattttcttatgctctataagtctatggacatgttaaacaataattaatgaaaatgatttggagaagaatccaaaagaacacaggcatgtatgaaaagtgacactaaagatcatctgagtgaaaatctagctcatgtagttatttttcaaccctaataagatttgaaaaaaaaaggtctaaactcaatcaattatgagaatgaacaaagtgggaaaagcttgaattcaaatgtttttgtaaaagaaaattgacaaagttcattcctgcaactcaaaaattacaccccaaaaccattttttgtcactagttaacaaattcccctattttcttattctctttaaacatgttaaacaacaattaatggaaataatttggaaaaggaattaataagaagagattagtaaataaaatgacatgcatgtttgaaaaatgaaaatctaactaaaatacttattttcaaccctaattaaaaggcctatctaagctcaatcaattatgagaatgaacaaagtgtaaaaaccttaaacttgaaagaagaacaaa

SEQ ID NO: 197530 - DNA, 1418 bp, Cannabis indica
ctcgttcaaggtaatccttttagcttccccccatctacgaatttcgccttatttgctttgaatttgatttgggcttcggttaaattcaggtgaatttacgacgacccttttgcttgttagggtatttggttaaattcaggtgaattttgatttgggtatttacttttatttggaaaaagagaaataagaaggctttgaatttttctggaaaggggtaacgttacacattattgtttcgtaatgcttgataactactgctcatgctcatgatgaatgatagatgtgttatttttgatcaattttcctttttgatgtaccatttatgatttgatttgagctgactttggtttctttgatatttttaagcctccatgttgttaatctgattgaagagtgtgtttgcctgttaagttggaaagtgtcaagtgctcatattggtttagcatatacataattcctcagcttcaattcactttgttttagtgttaatggatatcttttgttttcaaaaaatcattggaagaatggtttcggtttacttttgaattattgtgtcaaactttcctgatgtggtgctattgtttgctttgtgcaggtgcaggctgctgttgctgaaacggagcagccaaaatggtgggaaaggaatgcaccaaacatggttgacattcattctacacaagaattcttgagtactttaggtgaagctggagatagattagttattgtagaattctatggaacttggtgtgcttcttgcagggccttattccccaaggtaactactttttgttacttatagtactctctataattatcaatctaccactccagaagtttccagttctaaaaactaacttaaagagttctatgaaaaatcatattcagggtatactttttagatagattcttgataagtggcctccgcacttgtgaatcattcgatatatttttttaaggcagtaatccatgtcttgtatttgtatgtaatatctggaactatttcacttcagtgaaggttctaaaattcaactcttttccaatgtacctttgtttatggatgtgttaatctgttctgagatgtattattttttttttttgattgcgtacatatcagctctgtagaacagctgaagaccaccctgagattttattccttaaagtcaattttgatgagaacaaacctatgtgcaaaagtttgaatgtgaaggttcttccttatttccacttttatcgcggagctgatggacagttggaatccttttcgtgctctcttgctaaggtaagtaacttcaaccttttgttttcttcgtctcatcatggacatgtatacaatcagcatcttcctcctatgtaaaacgagttattctctcttaaaaggtgacattgaagaacttctactccattagcacactagcata

SEQ ID NO: 197531 - DNA, 1167 bp, Cannabis indica
agataaacatatttatgagttggatttgttttaaaaaaataaagaataaaaaaaggcaaaaattccaagaatcagtgggggcaaagaaaatagataaacagtagcaattagcttggtcggcaaatatttatgttttatttcgtaagaattaaaaaacatttataaaaaaataataatgacgaaaattctcacatatatatagggctttcgagtggttcaattaccacaaatcaaaacgacttgactatctcagtagcctgggcttagcaggaaacgacgctatttttgcttctttttttctttctttctttgttcttttgtgtgttaacaacaatggtgaaggacgttgaagtgggaggacagcaagggtactcggccaaggactaccaggacccgccaccggcaccattattcgacgccgaagagcttggtcagtggtccttttacagggctatcattgctgagtttgtggccacgcttttgttcttgtacatcacagttttgacagtcatcggttacaaaagccagactgatccagccaaaagcgccgatgcctgtggtggcgtcggaattctgggtattgcttgggccttcggtggcatgatcttcgtgctagtttactgcacagccggaatctctggtcagtactctctaactgtgacattttatttaccttgtatttctagttcatggtgtgttcgataaaatgttccactctgctttctttataattttttttttaactcacacactgtctaaatatggttatgtttgggtacacatatattttggtttggattttgagctgatgatgtgattgattaaaatgagcaggaggacacattaacccagctgtgacttttggactgttcttggcaaggaaggtgtctttggtacgaaccattttgtacatagtggctcagtgtttgggagccatctgcggatgtgggctagtgaaggctttccagagtgcttactacgataaatacggcggaggagccaactcccttgccgatggatacagcaccggtactggacttgccgctgagataatcggcacctttgttcttgtctacactgtcttctctgctactgaccccaaaagaagcgcaagagactcccatgttcccgtaagtactactactctactacccaatccaaaactaa

SEQ ID NO: 197532 - DNA, 1194 bp, Cannabis indica
gttagtagtgtaaacaatataaatgtgcattcattcacacatatacatactttatgctaatcttacattgtttccgagttcaggtgtgctagtcaacttgagtggaatagcaactcgacgctttacaggaccctatatcacaatattcgtaaatctaatgaaagacacgctaacacactttttcaagaacttaaaatcaaaagtggaaatttccctatcgatggatatatcatggtaatactctaaatatcataaaaataaaaaaaattaggattcacaaaactgccccaaccggcagaccggttttccaactggacgaccatttttgtggggtttcctggggaccaaccagaatttcggttcctacatgtccccataaactggttgaccggttcagtacaggaaacaccaaaaatactcccaacacctcaattcaaccccaaacttctcaaaaccttccagaacacctgtatataccacaataaactcaaacacaagcagtatatctcaacaattaacccagatgttaaaaacaccattagagaaccaagtttgagttctcaaactccaatttttctcaaacatcaccacaatcaactaacttagcttaaaatagcacaaataatcccaataaaactccagaacatgaaatcaaacaaattacacaactacagaacccattcacaaatttttgcactaaaacctaacttgagcttaggaaaatcaaagagaaggatgctaaaagtttatcccttcgattgaaacactcaaactctgctagaattcactaaatgagctaagaaatccacaatcctagctggtttctttgcaaattcgagagagagttgtagagagagagaatgagtttttctaacttatctcttgaaaaagattaatagaaattatcaaacccattttaataaaatcagcttattaatgtccacaaaaaaacaaaaggtcccatagccaaaaggaccattatgcccctaaaatactccgaaagcttatttggcacttaggggtaatttggtcattccaaaacccctactattcccgacatttcccgatgtctatatggtttgtcccgctactacaaaaatactaaactatatgaaaacgtgactttctaccagcccaacgtcgtgttccactactaccgggcacaaatacaaaaaaacaagaaatttcatatat

SEQ ID NO: 197533 - DNA, 648 bp, Cannabis indica
aagcgccagtgttgagaaccacctacaataatcttgttggaaacttgttgggttttgtttgggtggtgttgatcataccagttgcgatgtttttgaagccaatctgtgtagttgaaacccaacctccaatccctgttggccatacatccgcccaacatcgaacctaataatatcaatcccaatattagtccttttgccattcttggagtagagaaataaaagacaatataattttaaatatgtatgtttataaattggtacttgtttggtgatgtgaaggctgagtgtaaatgatttcccttatatatagattgatgattaagggaggtaactcttagtgctaatcgaccaaaaattgacattgttttcaacttttggttggtataactttacttagtccaaaatatatatatatatatatatcaattatttatacactcatactacgtcgaatttaacataaattctccaaggtcaatcctacatatatacacacatgttttccaagttgagtcaacctttattttcttatgctcttttcattggattgactgagcctctgttgggaaaataacactagtacccacaaccacaactgctctctccttactattacgcaattactacgtaattattctctctctctct

SEQ ID NO: 197534 - DNA, 2035 bp, Cannabis indica
gtagtataaaatttagaaaaattataagtgtataaaacaagttccaccattttatctctattttttttcccacataaattgtttctgtggtaaaatgcaagatccaaacatagcctaaatttattttccacacgacaaaaattagaagaaaagtggatttttaggcaatgcaagaaagaaaccttgaagggtaggtgacttcgacagttgtgacctccttaggtatagacttcaaaaacatctcagatggctttaccccagctaagagacgcaaccccaatctaagtcaatgcaagttaaaagggtcaacacaatatcattgctagatccataatagtacatacatttaaataactaaagatgtttacccatgtatcttgttctttaaagtcccttgagtcgcattctccagaatcatccaagctttattcatctaaaccaaccaagaagatcaaattaatagagtgaaaaattattataaaaacataggaaagaaaacacaaagggcagaaaagaaatgaccttgttagcaacaaaatcgacaaggagttctgcattggaggctaagggcttgggagtggaaaaagaaagctttttgaagagatctttaattgtagaaggagttagggtagtagcagattctgattcggaagccaaaggctgaatagacgtggcaaaacaccaatttttacctctaactggaaacacaaccactctcgttctcattatatcaaaattttgtgctactgttgtattagttatcgtacaaccactacaaaatccacaaagctatagcttttctgcaaaccctaataaaaagagtacttgcagtcactatttcaaaaaatggggaatcgaatctttattctttgattttcctttttcgatgttaggatcgtatattaaaaaagaaatgggaatcgaaatccagagggaggggtatcttgaaatttaaaagttcaacgaagaacaagaaaaagttattatggaaagagaaaaaaaatcaatattgaaaatttggagtgttgatgggaaagaatagagtttcttagtaaagaaagattttaaaaatggacagaattgttacgagagattcagacaaagggagaaaaaagagggagagagattgagttgaagaagcggcgcgcttttcataaaccccaagtcaggacagagtcccaactgctttagtccctgactgagaattaggaacgcataaacggcgtcgttacgatatcactttttttttttttttttcattaggtaatagttaataccaccccataaaatgttaatttgaatttttattctcaaaattttaacatgtagtaattatgttttttaaattttttttaactgttaaaaatttttcctgaattattgagcttatagatttaagtacttttgtctaattttattcaattttattattttagtgattgtttatgtactgaaccatgttgctcagattttgatatctaacaaatcatgcccttcgaacttttacatgtactaaatcatgtttcctctgaacaaaagttttaaatccaacaatctcaataatagttcagacacttttaacgaccttaaaagttcaaagaacatgatttagtacatgtcaaagttcgaagggtaaaaattctaattagcctaaatatttttttctatctaaaaacaaccatatttttgtttttgtaaacttttaccaaaataatcataagattcaaaaatccttttaaaagaaaggctcgcgatacttaaaaattatttcttccaacacttcttaacttttcctctttcctttttttttttctaagcaacacttctaaaagtgatcacttgatatattagtttttacaaatttaaaaatcagttattgttattctatcaataattttgagtacaattaaatatggttttcgcttaattttttatatgctcttattttgacttttgaaagaatttaattataatttgtgataaagtctttaattgaaagttttaaatattctttaattttgaaacagtaaaatat

SEQ ID NO: 197535 - DNA, 807 bp, Cannabis indica
tttgaagtagcagattgagaaaaatgggttggctgtgtgttggaattgttgaagacagcaggatgtggggaaggagttgcagatggtggagaaggggcagaaaattggggaattttaaaggcattgctgtcaaaaatgacaggtgcattacttggtgtggaagttgaaggtgaaaaaagagtgttgtaaggaaattcactttcattgaaggtgacactccttgcaacatatatccttccacttgggtgaaggcacctgtagcctttggaggataaacaatagcccaaaaagagacatttggaggatcgaaaagagactttatggttttgataaggtctgagaagtgggaaacaagaacagccaaacacttttaacatattgtaatcgggttcatgatgaaataatttggtgtagggggtttcatagttgatgtttggggcagggagcctatttattaaataggcagcagatgtgaaggcttcccaccagaagtgaagtggcatttcagcttgggcaagaagtgtgagaccaacatcgaccacatgtcgatgttttctctcaactctcccttgctgctggtgggtatgggggcatgaattgcgtttgacaatgccaagctttgcaaacagattgtagaggggttggtattctttccctaaatccaattggacactctttattttttgttgaaagaaacgttcaacataggcattaaattgtaaaaaaatagatgcagcttcagttttggatttcatgggaaagagccatgtgaatctagtaaaatcatctacaaagctaatgtagtat

SEQ ID NO: 197536 - DNA, 2952 bp, Cannabis indica
cagtccaatacttctggtaaaagccatgcatcattccatccagacctgacgctttatctggatgcatctgaaatacgacattgtgcacctcctcctttgaaatctctcgcaaaagcccatcacttgtttcagaagtaatacacaggccaatacattggataacctcatctcccatagtgtgagaagtagaaaataagtcagcatagtaattagaaattaagtccgcccgtccactatcccaatcaacccaagcaccatttctatcttggagcttgtgaattaattttgacattttcgagagctagcagaagcatgaaagtacttatgttttggtcaccctctttaagccaaagttgctttgaatgttgcttccaaaaaacctctcgttgggtgagaatttcaaacaaatctttctcagcctctccatattttttaattgaatagtcatcatgtctttctttgagctgctttaaagtcagtttggcctctttaattcttgaattaataccaccagtgtaatccttgccccaattaatcaaagcatcaccacacctcttaattttattttggacatctagccatggctctctctcccaaacatctttgaccacttgaaagcataatggctctcgtaaccaagcattctcaaatctaaactttttcagattataaagcttcaaggaattaaagatttccagccattgtttcgaaacaagggccctctgtcaagcctaacttccacccatctaggtgttccacgacatttttccaaggtaaaagggtgtccaactaactctatatccgtcaactcacactcaaaaagtacctggttgaagccttggattaagctagctgggtaagatcttccaccatgtttgtcttcttggcttgtaacattgtttaaatctccgataattgcccacgaccaatgagtgtcttcacttaatgcttgatgagcatccatgtgttgtgccttagactcctattaggttcgccatacattcccaccagtctctaaatgggctgcccgtctacacacactttaacattaatatgtttgtttgaaaagtatataagttgcacttcttctttatttttccataatactgcaattctcccactatgaccttgggcctctacagtaatagcactatcaaaacccatatataatctggcccgctccaccacatctttaccataaagagtttcacattaaaaaaataatttttgatctcttttggattaccaaatccttaagaaattgtaaattccgttagttcccaagccccaattctaacttaaagtggtcataattctcgacgaacctggacaccagtacccgccccacttcaattttttgatgtgtcaatattgttgatattttctttttcaaaaacaccctcaggatgcatacccgacccagtactcaaagcttggccatccactatcatattaacatttggcccattcccactattatccaccctaataaacactctcttacgttttgggtcatttagtgctaatatctcattcccttctatatagcattgacttttctccattctcccataaatatcccatgattctcatatgtatcttccccattaactcctccactagtttggccggtaaatactccaccatattcgttatcaactccacgatctcctcccttaattaattggctccctcatcaatcttgcttcgacctatcagaattgtacttccatgttcaacatgtccaccggaaaactgaccccctgctacatccgactcgttactaactgccttcccagacctgagccattgtgacccaatcatatgagccttcctttgcagattcactttcatccataccccataaggctttacaagttgctcaaacggagtatcgatcgccttttcacaaaaccgctatgagttaccaataacaccacatacaaaacaaaatgttggcacatgttcatattttaaatgtgcccaaaaccaatcttcagcgctccaaataatcttcattcttcgtttaagtggtttggtaataactattgttacccaaattttcaaatattccctccacacccctgaaaaattgttgacatcagattcaacgtaggttccgatatagtttccaatccctttcagcaccatttcagatctatacccatgttgtaagtcgaagacttgtacccatagatcaagtcgaattagaaccatcgttctcggattgtctccttccttcaatcgttcaaagatcaattattttctatcaaacgtccacagactacctttgatagccctttgaatatctacctcatggtagaactggaataagtattgactgttatcaagctctttaacatacagccccttaaccggcttccatagaaatgctatcatattttgcatggcttgaaaatccataagcccagcatttagaaatctaccaactagacaccacctcacatcaaacggttcctcctctccccctacaaaactgaaaccaatctcttcatcatccaatgtaatccctgctgcttgttcctctatggcaagacttccactagacgaaaccattcaataaaacaaacacgagcacacaaatcagatcacttagaaaaaacaacgaacagagtaaaatagagcttcgaaaaagaccaaaaaaacatacaaaagacaaaaaccggactgtatcaagagatacgacttttttacaaaaaatatttaaaaatcatcttaaaatataagaaataattaaaaaataaaaaataaacatagaaaattaaaataaagtaaaaaatttacttttcttttccttttttctttttcatcttcttttttcctcaacaaatcaacatatatctgccacacaaccattatcacagccgccaccatcacacaacatccaccaccattcttttctccccttgtcttcatccaccaacccaaaaa

SEQ ID NO: 197537 - DNA, 795 bp, Cannabis indica
aaagaagcaaagatttttaatatagaatcagatgcatactgatattagtttatttggttatattttttattttattttatttttctttctttaatctaattatggggatgaagattgaagattgaagatcttcaagggacatttacacttattaaggtagaaaatcctttcatcctaactttgtttttatttttctcatttctttgtttttttttctcttaggttgagcaattgtaattgtaaagtagaaaaaacaaattacttcaacatttgttttactttggttctttttttttttttggtcctacatactgagaaggatagcttaggtatcctaaccattagttcaatatagttctcattattcattatatatgtttctactcttgtccaatattctttaagcataattttccttttgtttcttttttttagctactttaattaattttggtcacttttgagttcaattttgaaatagatttgttactttttctttttcttttgtcttttttcagttgcatttgtttaaaaggtatctcttcttggattaataattatggccattacattaattttcgtactctaaagagtattaaatgccaattcaatcctgtaggggatgtacatgtttgtaccttaagcggcccaatgggccttaacatttaaactactgaacaactgtctaaaagttcaaccagtatcgctttgtagattttgacttagggtttatcccatgtctatgctatgctaagtgcatgtagagataaaaagaaactgaaaaagtaaaatctt

SEQ ID NO: 197538 - DNA, 563 bp, Cannabis indica
caagtgcagtaaccttcccttgggttagtcgccacctagatgggggagggaatgaagcattcaacattccctaagtaacaacaattgagcaaattcttcatctttgccatggtcaccacggatggtggagagacccatcgatctcctagtgcaccttgcctcgtcaaggggatatccttattgtattcttttacagcatagtctttgctggcctacaaaacttcaccagcctcagacacgggttttccttcttcattgtagccacagaatggtagcacccgagctactccctcttcctcatctccttcagcctcaagaggagtagcaagatggacctcaccttggtcctccatctcttggacttaaacgtcccgaactttgtcctcctcttcagtagcaggtcgtgccttttctgccctaggcaaggtggcaagacaaaaaatgtgtgtgtcggacaatgaaggtttccaaatagtttgcttggttcgcgccatcattctacatttggatggagtttatttgcgtgcctagcaaaagtcacggaaaaagtggcaacatgtaat

SEQ ID NO: 197539 - DNA, 698 bp, Cannabis indica
cttctccttattcttttattttatctctccgtggaaaagggtctctatctctctttctctctttctctttcttctgattattaaataccaattacttttcccttaaaatctttctcccaaaagaaaagaaagaaagaagtgagtctgttgctttctcctttttctggcaaaactatctgctatatacatttaatgtagttcttattaaatatttattattatcaatcaatcctactctatataattaaaaaagcaaagcctaagtatagttcccgtccacgtctatcgatctcttcatctcttcctcaacaccaatgcaaataaaatcataagccactcatgatttaatcaacaccatatctctctctctctagctacttctactttcaactttctacttctacttctactttctacttttcttcttaagagtattttcatcaactaaaaagttttttcttttctagatcccaatattccatatctctttctcctgcacacagtaataatgttccctaaccacaccactaaaatgatgagaagaactagtattactactgctactacttcatcatcatcatcgtcatcatcatcatcatctatgccagacctttcgttgcagattagcccaccttcgattccagattattatcatgccatcactactactgaagctaataataataagaataatagta

SEQ ID NO: 197540 - DNA, 885 bp, Cannabis indica
gttaacttgactcgatagttaaattcaaagctaggtccatagcgttgaagatcaaggacgtaggtggcttagttctaccgaaccttgtaaaaatcaagagtttgcaatttctatccctaaagtctttacatttcaagtttattatttgtttatacttgtgattatctttgttgttcattaaacttgaatatttgcatgaattgtctttgttatttttaaggcctcccctaaagactgcttggagaggtccccgtcggacttgtcatctggaggcttagcctgaccctcacagagctatgattttggataaccaatcgagaacataagaataaacgatataaacccagatatttcatttgaagccctaaatactctgtatgaggggatttaagtttgattcaacatagacacaatttatattcaaccaatgtaggaaaacgaatcacgagcttgaatacccaaaattatacctacactgacactaaaatatctctacagtttcaaaattcccaagacattacacactcaatcctcacattcgcatgcaaacagttatccctaatcaaaagttaagcacacatttctatagaagaaagaaattatacagttcaaggaataaatgggacttacttataaaagggagtggagtggacgagtgtggtggtgactggcctgaaaattgagtgcccaactaaaaacttgatcaatgccgaccaaaacgtttaacgactccagtgactggggtggctcactattgggttcagtggtggtgcgtctggatactctcttgctctaatttttaggagacggtggataatgatgtcgaaaggatcagacattcaccgaagttaagaatggagttcactggtttctctctctctctct

SEQ ID NO: 197541 - DNA, 536 bp, Cannabis indica
ccaatttctcattctctttttctctaagaatttcaaacttcaaaagttctttaaagttttgaattttcatattttagaggaaatttctcaaaggttgaagaactttttgatttttaaatctatgaaaatgaattcttgtacaaaaggttagtatcgcttttgtaaatttatttgtatgaatgttcgcatactttctgaattttatagtgataaaaattgcatgagatcaatagaaattatacaccgtttttttttctccttgaaaaattgcatgaaatcaataggattaatcatagtgcagctcaatctcatggtaagaaaatacaaaagacaatttgagagccaattaaatttcatcaatagggggtgcacccattcgtttttttaaggcgtgcaccacatataatacctagtttttatcttttaattcattttttttaaatagtaaaataaataataagtttaaggaataaaaataaataactttaaaaatggtaaaaaaaaatgaaacttaaaaaggaagaaaaaaaaaagaa

SEQ ID NO: 197542 - DNA, 1683 bp, Cannabis indica
gagcaagtcgtccaaaggccaattaccttacccaaggttggccgaccaaagccagatgtcaggtctagggctagccagccttgaacatatcctctctcagggtatggttagccaggtcctggccaatctaaggctgcaacccaaacgagaagggccaattgaccaggctcctatagcatcagatccttctatgcaagcacagttggatcaaataagagacatgataaagggcttggatggcccaaaaccatcaaaccttgaactggataggtcaacgggctcaccattcccagcatacataaatgcacttctccttccaaagatcaagatgccatcttagaagatgtacacggggaataaagatcccctagcacacctaaaatactttgagatccaaacaaatctccaacaagtatttggagatgtgcgatgcccaatctttccggaaaccctggctgaaatagcctaacagtggtattttaagctagccccaggaagatttagttattgggaagaattctcctgagaattctatgctcagttctccacctcaagacaaatagcttcacaactggaggaccttgccgaaataaagtaaagacaagtgaatctttaaaagattacattcaaagattcatggccgaggacaccaaggttaaaggcttgacagaagaaggtcaatatacgaccatacttggagggacattgaatgaattctagaaaaatatcagaacgatctcaataagaaacatgaaagagttccttgagcgagctgatggcttcataaagttggaagaagttagtcggcaagcccagacaagagggcaggtcaatgttgaacaaacacaaggcatcatactgcccaaagtgttgtccgacatgctggccagcgtagacaatctccactaattctccaacaatgagaatattggaagcaagcgcaacaataatggctctggccaaaataaaggcaaaaaagggaaattcaactattcccttatgtcatgaagtctaagggagaaggaagagaagtgaacatgcttcactctcctaccaaaactcccaaagcaatacattcaaaccggccatggcaacaggtgcaccaaaacctgaagcacctggccgaccactcaagtgggccattaagctcggccaatataaggcctcttatcaacctagcatggccatcaaaggcgaagctctcacaaactttatggttgaatatacaagcatatctccccaaatcactcaagatgtgggagaaaagcaagggccagagaagagtgagagcaagagcgagataactcaatgtagaaggtgaattgaccacctgcttggtgcacgcatggcctcaataaaggtcagtttcaaggcttctaataattaggctgaatatgaagctccgattggtggcctcaagctagaacacaaagcacgggttgaatacatagacatacaccgcgactctcaactaatcctaggtcatatcctatgtgaatacgtagctcaaggcaaagagatgatggcttatttaagctaatttaatgacttattaagtcagctcaaaggctgtactaaaaggcaagtccccaaagatgacacaatagccgatgcacttgcttgatagccagcagcaccttgatagccaaggaaaacttgatacctattcagtacttaaaggaa

SEQ ID NO: 197543 - DNA, 1422 bp, Cannabis indica
ctcactatcaacgacaaaacctgcagaagaaatacaaaatttccagatctaaaaaagagagagtgatagagagagatcgagagagaaagggagagaggtagaactatacatttggtgcaacgtgagttcgacagtggcaaccacctaaggaacggggcaaaagagagatcctaagagagctcatggtcgagtctcacatggcctaggaggctgacagtcggagcgcatataggggttgatcatcgggattggcatccatcgcacttaggtggctgttgggggctatggtgggaaagagaaacggcaaagagagaatgaaaaagagaaagacagaatgagaagaagaagaagaagaaagagagatggatgcatgcatctgtgatagaagaaagagaaagagaataagatatatttaagtgtagggttttgttttagtgtttgtagaataggctttggcccatttacaaaacaacgaatccatttaatatggcaccattcacgtcagtcaaccgtgatgaatagcgcgttaactgatgtgaatagtgaattttttagttgtgggcattgttcgtctttaggttttgagagaccccattcgtggccatcgggctcagatctcgtagtttttggtgtaaggttggttccgtaggaagggctttgtactaggataatgagatcagtcataggggcttgtggtccgttgttcggttgtcacttttgtcagtcctcacagtgcagaactgagctgattgtcgtcaattttgtctggtcattggttaactcagccctcacgatgcggatatgggttgggagctttgaccttcatcgactgtgtttctggtggatttctagtaggtcgtggtatttcccttgagtctgtggtcttgatggttgttgtggtttaaatctcttttgtgggggtatttggtttttctttgatcttcttttgcttttctattttcctatttttaattgttgtaggtgtttattttattgttttatattgctaataatggtgatttgtcactatcccattggtctaatgggagtaatagtttttattcagtgtaaggtttctatgctcagtaattttatttgggggaccatggattggtattaacctctttctttatgaatcaatcttttattatatttgttcttggcatagtgtagtttgttattctcttttattctagtttgaataattagggtgtcttttttaaattttgttggaagatctttgtctctttatcattgataggtgttacctgtcacatgttcattcgcgataaaaatttagtattcttcatactgttttagtacttcacaattggcaccttatgggctatttagttgaagatattattaggggttttgtcctactttatttcaatggcttagttaacctattttgttgattct

SEQ ID NO: 197544 - DNA, 535 bp, Cannabis indica
ctgggaagattctaaagagtggtttgactccgaatcggagagaaagaagcgatattttgggatctgggatgggtaattacggtcatggaagtataatgcgtggtggtggtggtggttgtccggtgaaatgtgagcctggaagtccggcgaaatgtggcggcggtggtggtggagagtttatgaggagagcaatgccgaatgtggatccggaggaagtgaagagggctgggaatgaacagtacaaaaggggtcattttgctgaggctttgagtttgtatgataaggcaattgctttgtctccgggcaatgctgcttatcggagtaatcgggcggcggcattgactggtttaggacgtgttggggaggctgttaaggagtgtgaggaggctgtgaggttggatcctaactatgggagagctcatcagcgtttagcttctttgtttcttaggtgaggattgaatttttggagaaattgatgaatacatgttcagtcaaggggggggggggggggggggggggtaagggggtaatattg

SEQ ID NO: 197545 - DNA, 2093 bp, Cannabis indica
ttttttggtttatcatgtaaatttttcaactatatatattattaagatataattattcttctataaaggtttaccaataacaactaatcctgcaaaccaacaagtgttttcaacgagttttgtccttctcagaaggttaccattctaagattactcaaagtcaagcacgtttaactttggagttctcaagtgatgggccaccaaaaacaatatgcaccttgttgacataggtagttctcatcaccatttaaactctcttcaactgtgtaatctcatacctacacaatttaagaatcatcacagttgaccgtttccaggtaggggtgcataaaatatgagccaaaccattcaaccgggccaactcaacccattttttatagtaagaggttatgttaagagtaggtcatagctcgggttaaaaagtgataagccatataattatgtgttggatatgggttggacacactctaactctatataacccaacccaacccatttattgagagacattccaaatttaaaataatttttatatataaaatatattttacattcacaaaatatatacaaatatttattttacattttaataaataaattatattattatgataacgttagaaagtgaaataactaaaacacatcactaacatttaatccatagttaccctattacttctaccaaaatatcacatgagaatcaatcactatttttaactttgatagcaagacaatgataacacggccaccttagatttttttaaagcactaccactatatttacacacacacacatttatatatttacatgtatcgtttttttgtatatccactaagttaaatcattctatcatgttgtaacataaatattaaagtttaaaatattcatctcaacttaatgaaaccaacctaacccacctcctatattattatactaagtaggattgggttgtataataaaaaaatgaatggtttatagcttctccaaactgcaatcattagggtggctcattaaaacacctctaatccagccaactcagctcatgtgcacccctattttcaagcgatgtgagattattgcacaacttacctagttacacgagattgcatagcttactcaggattactgactgtcatatatacttttttaatacgagacttataaaatacataactaattacaattagagattattcttatttataattaatctaaattaatctaaattaagatttatttttttattattataaattagagattatttttaatagaatatataaaataaaggatataattaatttttgttattaacgtgtgcaaacaaggccaatgtaaatgtaattttcgtgggaagttattctaggaagtgtgtgaatgaggacaaaacacgttggaaatacttgtgttggtgtgtaaggccagtcatcagtccataaaacagctaaagtgacgtacacgttacaaatgtccctgccaagaaaaaaaaattgcttcttcatagagatcatagtgcaagtaatactagtagcatctatctatgattcaactttatcataagtaaattgttaagaaacttggttgaaattgactctaaatgattatccatctcagtaacattttggccttttacctatattataaatacataatatataaatgattggaaattaatagtttatataaattaaaatatttcaaatgcgtattatgaatttttttttttattaaagtgcttatatattacacaatacataacctggcactcgaacccaagacctccaacacacatgcaccctcctatggccacttgagctaacctcaagtggttgcatattatgaatcttaacagttaacaccatataattgaacctttttctaattatttatttatattagtttctttagaaattaatgagttggtagaagggtgaatcttctatttaaaaccaatcttttgattttgtcagtcatgttatgttagttgaatttgcaaaacattatataagcataaaataatcccatgatttcaactcattccaattaatagctggaacctttcgtcttctatttctattagtgcatggagtat

SEQ ID NO: 197546 - DNA, 536 bp, Cannabis indica
gctgacataactctttagtcattgccatgtaatttaatattttaaaaaaatcttatttaaatttcataattaaatagaaataaattaaattaatattataaaatttatatataaattaaatagatcagatcttaaaaatccaacaaaattaaattaagtattaaataattaaaaaaattacgtaatataacttaaactaacaagaataataaatcctaaatttacaaaaaaactaaaagttttaaatattttctctacatctcaagactcagaaattgataacttatatacacatcaaatttcttcaaactagtgagtgatttgtgagatatatattacacacatagacatcaaaaacagaaacttgtatcaaaaacagaaacttgtgtgtatgtatgtatatgtgattttgaagtttatcaaaaacagaaatttgtgtgtatgtatggtttgtctcacattgctcatgtgtgagtaagttatatttatattacacacatagctaccaagccttaactctatgatataattttggt

SEQ ID NO: 197547 - DNA, 1577 bp, Cannabis indica
tggtgagccatcatctaagcttcttgctactatttctggtgatgctaggaagactaagaggaagagaagtgctaatgatgatgatttagcaactgggcgaccttgaaaggtatttttggtttttctgtttattttttgttgagatgatattttgtatatctttatttattttttcatataaatgtgttattctctgtttattttttgtttatttgattatttttcggtgttttaggtttttaatttattttttattattctttgttgatttgatgctgttggtttcaatctttattttacaaatatattcgtatattctctattttatttattttttttatttgcatattttttgttatttatgatttttttttaagtttatattttgtttatttttgttcctgatattgttgtttatttaaattttagtttataacaatacaatctcaggttctgttttatattttgttgtttttcttttatttttttttgattttttttatttatttgatattgcgggtttggtctattttttaacaaataatttttatataatatgttatttttatatttttcttattttttttttctatttagagtttttgtcaatttgtgcaacaatgtaatttttttttacacttaactatgttattctctgttgattttttgtttattcgcttttttgatgtttagagtttttagtttattgtttggttattctttgttgataagatgttgtgagtttcatttttaattttacacatatatttgtatatattctgtttttttagttatttgtatattttttgctatttatgatttttttatgtaatattttatttattttttggctcttgttattgtttgtttatgtattgttttttttatatatattttatagttcttgttgttttactgttttattgaagtaaggaagattttcatacttcccgagttacttctagatgtcgttatacaattattgagactctcaattctattttgtccactgaacagaagaaaatatttggataaactacatttggattcttattaagacttccttcttatgttgcgcaacaccaactgatccacagtttattgttaagggaggtggtccagccaaatgatagtaagatgtgatttaatgttgctggtcagatgctaagatttagcattgaggaatttgctttggttttaggacttgattgttctagtcaatgtgacaagttgaggtataaacaagaaaaaaatttgttgaaggagaagagttttgctggttttaaacaaataaacaagaaggatgtggagaaagcttttgttgggaaaaggtttggcgatgatgatgagcttgaattgaaagttgttattctctactttgttcagtattttgtgttaagtgattcagacactaagaaagtttctgacttagagttgaatattattgttaatgggaggttcaatgaatatacttagggcaaatagtcttattctttattacttgattcagttagaggtgcgattgcaaataatcttattaaaattaagaaaggtgataatagagaaaaaatagtttt

SEQ ID NO: 197548 - DNA, 1218 bp, Cannabis indica
cacacacacacacacacactagtccactcgcccacacaccacaccactccactcgcgcgcgcgcgcacacacacacacacaccactcgcacacaccactccactttacttgcacacaccactccactgacacacacaccactctcccaacatctctctcactcgcaaccttcttcctcgtcattctccgttcgtggatcgtcatggggttggtctttgtggtgcttgaataagtcccaaaaattgtaagtgctgatttttgggggttagcactacggttttgtcgaatggccctaggatacatgcgccaacttattaatcattccttggccaactcttaaagtaagtgtctttcacttctcgagactaattttgagaattagccttgttaatttttgaggttaacatctgtctttatcaaatgtatcatttatgataatgacctaattaatatcgtaacgatgatcaatagtagatcgtcttgaatcctgagtaatcatgaacttctagtcatgttattagtttctttgattcactcgttaaagtttctcaaacaatatgattcttacaacttctattttgggaagctaataatatggatggctagaaacttgatttacaattatggaatcttgactttcctaagagatcgaatgttggttctctttaagtgttaattttagagctaaaaaaagttgtgcacaaatttagattggatctaaattatactttcactactgaattaacggtactaaagaatgaagaaataattagaagggtaaagcgataatttgtccaaaactaattacgaaccaacacaatgagggttaatcactaaaatttattatatcaatggacactacaataaactcattaaatataattctataattagtaagaactaaattctatattcatagtggagtaatcattaaattaataactaaaactatttggttgatgagattcaataaataatctaatttattgaaagaagctatgaaggcccgaatcgtcaccttgcaacactgtgaaggcaatggataaaataaaactgtataatgatgtttgaaagaagctattttaaattgtcaaaattgtaattatttattttgtaataaataaattgggagaaaatttgttgtcaagacaaaggcatcactattgtctggttaagacaatggcggcaacagtcagtgtgtaaggacatggtgatagg

SEQ ID NO: 197549 - DNA, 1535 bp, Cannabis indica
cataattatagtccatttagaatccctatctttttgggattgattttatacgattgagaaaattatgggatttgatttttaagtttccctaatttctcttctattaactcatgatagttgtaatgtacttgccctataagtagtgaggtcatatcactatttctggattcatttttttgcattctgaaagagcaattactttgaaaaaaatacttgtaagctttcttaagattatcaggaaactcacctggccggaccttatggtcttgataatactctaaaagcgatacaactaaaaggggagtaggatattaccactatcagaagtcaaacttctataaatcttgtgtgttcttactgctttattttattattttgatcactcattatcattgctttaaagactcagtattgttagctaaaagggaggtcaacagtatgtgttttccaaagattcagtgggggggcttggttttaggcggcttcatgatttaatattgcactaattttaatgaagctcagtcttactcaaaaaggcggtcgtatggttgtttgtttagggatgagtattgatatccttaggaacccttggcttctagttcaagatatttcatttgctgtttcggatcaccctagtgtggcaaatcgaaatgtctttagtcttataaaggttggagaaacatcttgggatgaataggttcttaaagagatcttcgtggagcgagatgttaagctcattttaagcatttatttattcccctcaatgtttgatgatatctgacaatggataggtaaaagatatggtgtttattcggttaagagtgcttatcggcttattcaagtagcttaaaggataatcgactcgattttttggaaagcgttgtgggaaatgagagttcctcctaacattaaggatttggtttgaagggttgcttctagtttcttcatacccaagtccaattaggtgtgaaacatgtccctcttccctcattgttgtgtccaaagtgcttacgagttgctgagtctatctcacattatcttgtggggtgttctttcccttttgcatgctaaaagatggttggtattttggtagtggagattggggaaaattcttttggaggatggcttcatgacatgttttagaattggaattctgaggtaaagcatagagttgttatgctttgctgggcgttatggtctgtgcgcaatggtaaagcttggaatgataagaataagactgtgaaagaggtatttctttggctaaaagaaattttgatcaatggagatgtgctcaaggtaataaacttttagttcatgtttgttctctttacaagacggcgcacttgattgcaccattaatacgatcaaaatcaatgttgatgcagctatctttagcaatctgaataggcatgggtatggttgggtggcacgagactcttctggtcagcttattttggctcagatagcaagtgagatgggtgtggctgaccatgttcttgccgaggctattacggttaaagaggttttgagttggt

SEQ ID NO: 197550 - DNA, 723 bp, Cannabis indica
ctgtaactgctgttctttccaccacttttggtgttaatggcattgtttggccctctttcttcatcactaccgctctcgttttcattttcgttatcgtttttaccttcgtcggtgacctccttggcggagctagcttcaatcctaccggaaccgccgctttttacgctgttggtgttggttctgataatattagttagaagttagttggtacataagaataaccttcattttggatatatactcatccaagtctagcatctattatttcaatccaaacaatgtagacatgagcaaatttgagctcaaatacataattcaaactattaaatccaaaaactaaagaaaaatatttgaattacttcaacttccattaataattcacacttagtcaagaaaaagaaaaaaaacaaaacttacctttatataatcaaatatcagttcgaatctatcgcagttattgctcttatctgcacgtttgtgtttcgtaatcaaagaagatagggcatccatggcttctcggtatgcagttgctttaggatcttcatctcatgtctgccaaaccaatttatagccatctgatgttggagatccaaaccattttcgagtaaccaatttcaacctctcatccttaacctcacaaaacttttggtcccaagcttttggctccacggcctcgaaccctaacccaggtgtccgatcattggaggctagattagccttctc

SEQ ID NO: 197551 - DNA, 1271 bp, Cannabis indica
aaaaaaataccattattttacaatttccaaattgctattatttaaattaaagttgatgtcattaccgtatctcacttgtaatcgctgtcatcattgtatcttatttgtaattgtcactattgatcaaaataaatttgctctgtgcataaaacaaatcatatacttgagttaagtaactactaatattttatacataactgaatgattttgttataaagagtttttggcagttaaatacttccaattattgtttcatttgcacttaacactcaaagcttagattttggcagtaaaatcttctaaactgaactgttagcaaatttaaagtgtcatccagttaattgccatcatagactacttatgtgtacactcttgtacatgtgacacgtggcagttaataaataaataataatattaggtgtactaatattaaggtactacgtgtacaagagtgtacacataaagagtccatgttgatagttaactttgaaaaatagatgacacattaaatttgctaacaattcagtagtttggaggaatttaccactaaaatttgagctgaaaaggttattaagtggaaatagaatgatagttgaaatggtttagctgcaaaaaactctattataaattccttacttgcatatttctaagtgctttggcattattgtaatgaaaaactaaatatagctcgattctcaacataatatttgaatatagccatatacaactaaaataaataaacgaacgttagaaagagaaataaaattaaagtaaacactaaattatatagtaaatatatcaaattttgtaatatacctaaatattcaaatcaaattttaagaagaaaagaaaaaaataattcaagcatcaagaaacggaataagagaacaccataaataaggtatagtagcttaacaatattacatggttcaatttggtatataaagcttaatgatctcaaaaaaaaaaattgagaaatctataaaggaaaactcattatataatttgtgatctaaaaaatacagaaaagtatgagatattgtcaaaaaaatatagggtaataaaagactaaattaaaataaaaatttataaaaataattgataaaattgaataaaattcaccataaaatttcctaattataaattgagaggactttgaagaaaatagtaccaaaacttttatagaatagtagtagtgtagtagggtagaattatgtctatgataaatcaaatcaattttagggagcaattaaatgtataagagactatat

SEQ ID NO: 197552 - DNA, 2392 bp, Cannabis indica
aaagatgcactcttggttcattaccatcgcagacgaagataaataaaaattcatatatactttaagctcatatatacattttccctaaatgttcagctagaaaaacctagatacaattacaaagcaaaataccctgactagtatccagaatctaatgaaagatacaattcaagctctgtaattagatcagatcaagagagagggcgagaggcgagatgtcaagattgcattggcatcatagaaagtgagtatggctcgtgaccgtgcatcctcaagcgataaatgcaagtatgagaagggcttccatggttggaagtgaaatcaagcctgatagtatcaacaacgttggacccaactgactccaacacattgaaggtctgtgcattgctcttctcaagctcataactgaactcagctagaagaaacatcttctctgaatcataagaccattcagtattacgctcctgcagccacccagagactctgcaattcttgggagcacttgatctgtcgaaagcaacactctatacatatatcttagccttaatacaatgtcattattttaaaaaataaaaataaaaatataccaattaatttacttttttaatttattttccacatgtaaaatttctacaaaaaaaattaagcactttttttccttgttgtggctgcaatatacaataatcttattatatatatatatatatatatatatttgttagtactttctattgtagtagggtttagatcgcacaacctatagtaccaatctttgattagtaaaactattatttcctataaataaaaaaaaattagcatgtactaacatttatacagacaaatcggaagaaccatcctaacatcaaaacatacacagaaacatcccctaaagagtacagacacatctaacagcacaacattacaaaaatctaagactggtctacaaacagcatttaaaatcatgaagtgcaattgacaaattagaaaactaatccagaaatattcaatcgaaatatatggccatagtgccaaagaaaaaaataccagcttaaaattaaaggcattatagattcatccacagactaaaaatctatttagccaaactcatcaacatgttcctatactgaatattccttgtcattgacaaacttatcaggatactcgccatatagtgctgtaatttaagcattcatatatcacaagctataagcatgagaatttctaccataattctactggagttgtattgaacatcaaatataaaacatgtccaactacgaagttttctgacacagagaaaacccaagaaaagagagagatatataaaataatcacgattccaaaacaaggttattcagtgtgtatgattgttctgtaaagaaaataataccttggcaacatgttccagagtaacagcttcaggaataattgctttcctcagcctaatctcaacaaacccactactgcctttcaatgcaaaacattgtcctggctctccaaaactcggcttcaacatctttctggcatcattgtgaatcacatttcttgcactcattagaaacaatttgcttaattttccaaccaaataaggttcggagtgcttcacaaccatggctccaccactagccaaagcataatccacccgcccaagcccgtcagctgcgtgtttctcaatctccttcaataccaaatctcttgcatacaccctgatgtcattcaaactagcctgtcctttaccagcatcatctcccataattttgttcttcagttcctcaaaaatcttatcaaactcctccttagacaaccaattagcatctttcaactcacctaatgacctctccaaagcttcaccttgggactccaattcaaccaatctattctctaatacagaccctttctcctcaatcattttcccaaattcttctctcaaccctccaacctcattctcaatcttccgatcaacgacctccacttgaacctgcatcatcttcgtcgtggacttaaaaagcttctctagttccgcaattcgtccttctaaatcagaaaacgctaaagggggaccttctccatcatctccagatcgcaaggcaaacttcctgagaatctgaacgagacccgcaatcaaaatcagaagaacgaagttcttagcaaagacactgaggacggtgacccaacggggtttcggagaaaccaccttccgaccccgccaagcggtggttgtaacagtggaggttgcagcggatttcttggtctgtacggcttccttggaggttcgctcgagagtagcctcacccctaatcgattggtgactcagatctctgccaatacggatggtgtttttatcgtcaccggccttgtgttgggcctcggcagaaaccaactcgatattttt

SEQ ID NO: 197553 - DNA, 926 bp, Cannabis indica
tttatttatttatatatatatgcaggaagaatcttatacaggtcgagtcaaagaattggagatagatgtgaaaaagatgttaattgagatggaaaattctttaattcaacttgaactcattgacacattgcaaagacttggagtatcttatcgttttgaggatgaaataaatactattttgaaagaaaaatatattaatatgatcaataaccctaattataataatttatatgtcactgctcttgaatttaggcttctacgtcaacatggctatgcagtacctcaaggtatataatatatatacacttattacatacattatagatataaaagtaagatctttgtttaaaaataatttatttaggaataatctttaatttatttattaaaaggaaaattttttaatttggactagttatatatatcatttaaattgtaattagttatatatatatattttaaattatttcagtatacataattatacaagttaattaaatatttatatctatatatatatattatacatttatttgtttatgtagaatgaagtattttttggagcactacaaaaaatcttatttttagtcacaataaaatttgtgactaattatatattattattcctatgttggaactaaaagaaatccgtggctaaaagtattagtcacaaaaattataatttgttgtgtctggatgtgtttttagtcacaatacttattgtagctaaaattaaattaatgacaatttgtgtctaaatactatgtttaatcacaaataatttttttgttgtgactaaaaagttatcactaagttatattttttttagtggattacatataatatatgtataatctacaatattgtaaatatactccatatgattttgttatatatgtgctatattataatataatataatataa

SEQ ID NO: 197554 - DNA, 697 bp, Cannabis indica
gtaacgcctatcccaatccaaattctcacgcttcgttggatctgcatattcatatgtacaagtatatgaatttgccaagcattaaactttaaatgaattgtataattatataatgtacatatttttacttatttcttgatttaattatattttggagcacactaattatcataggaatgcaaggttaccaaatatgaaatgatcaagacgtccgtttttacaaactcatagacaagaagcctttcccttgattccaagctgaaaccgagaagcctaacaagattgcggtgttgcagcttggcaactagcattacctcgttcttgaaatcaacatcacattgggctgattctcctgtcaattttttcactgctatgtcttgtccattactaaatctaccctgaaaacacattaatagcaaaattaacatttattggaatgaattgcccggatttaaaaactacttatatattatatatatacacttccattaattcttactttgtaaacaacaccaaatccaccctttccaagttccttggagaaattgcctgtagcaagtttgatagtctcataatcgtactgcaaggattccacactgacttcttccatacgttcgtttgagatcaggggatgcttattagcttgaacaacacaaattgataaaataattcaatcatacagcctacagccatgaat

SEQ ID NO: 197555 - DNA, 2297 bp, Cannabis indica
taatgagcctttgggtcacccaagggccaaagtggctcaaaccacctgtggtgagatgttgttgaatcatctctccctcttcctccttcaggacctgctccatgtgggaagcccatgatttatgaacctctagctaggagagttcaacctagagagagcccttccttctatgaatgatggtgagctttaagagcttggtgaaagtgagtcagactggctctactctgcccgactttgggatttgtctatcgtgagttgcacatctaactttgctcatttttctggcaatttttgcaggttggctagctaaagtgatgttgcatggggctggctgacaaagggtgtgtctttaagggacctggctgaccataacacccttgttgaaaggctggccagccactgttatgttttcacacttactttgactttacttggctgccaggaatttatgaaactaggctttttgcatgacaactcctgggggtcctcgaggtctcttcgagagcaggtgaagaccttggaggccgccctccaggtgaaggaccagactatctctgagatggaggctctcggcctagaggacagaagcttgatttctagtttggagactatgcttggtactagaactaagataacatcacgcaaatttctactatttttaggttagagttttagttgagagctacccttactggccaacaggccataaggagtgagtatgtcggcctatcttcagaactcatttatgagttcaagctgcacaactccaatgttgacctttcatacatgggaaataaggccttcttagagagcacattggctcaatggaagtgttgtttgagagctggttaggagcaaatcggactgtcgtccaggcagaggaatcttcttcgaggcataataatgaggatatgatcggctgacgtgctgaggaggtggtcagccaaggccttgaccaggtagctggccagcttatggaggctgtggtcggtccacactctaacgatccaaggaagggatgttggctctggctagcaaagcctacacaaggaagtttttcatggccaaccagacttgcacagggcagggtttggcccgcaattcctcagttggctaatgttatcggtgtgttaacaggaggtcgattacaccagtcgctggagtttagtggatctagatgtctgaagtgatcaatttcacttttcaaattgtcgctttgggtatttccacccactccaagtccttgttagttgaagattggcctttgagttgctcgctccactcggggagggagtgtactcctctggccgaccaggggtactcctactagtgtctggtcggtcgaaggctgattgatggaggatgttgttgagcttgagatccctagctgccccctagactgttggttgtcgggatatggttgttctcaccattagacctttgtgggaaggcctgtcctccttcatgtaagggaagtcttccttggagtggatctttgatgagatccttgcctcttccatcaattctctgatttaacctccttattagattggtggcttctctgttgcgacgatccagctctgcttggtgagattaaaagatgtactcttgggcatccatccatctcaagagttcgtgctctactgagcgaatacatcacaactagcagagtgtggtccttcagttaagtcatctttgctgacgtcttctctaagtttggctaactcgagatattctcccaagtccacatgtgcctcaccaatttctagtcctatctctccagtgtagtactggacacgagatccggctgttattcctgagggctgctccttaatggtccttccatcaatgggaggcgccaatgaagggtcctcccttggaggcaaggacctactattcagatccaccgggaggtttgtattactttggccagtcgtagtgaccaaattcgaagtacctaccatggcgtatctgctgtggcagtatgattgatcacatctacagtgttcatgggaatttcaattgtgggtagaacatggacatcaagatacgcagtctgtgggtcttgagggagacatgaagatgcagatggtgcaatcagggttcttcttatgttaaccatggcgtttgatcagatacgatatcgactcgctcttaatgaaagcaccaaactattgacctctaaaagtgctcaaccgatagcggagttgaatgaatctgatattttccacgtgttacacaattaaaactcgaatgtaaagaatactaaataggagttgcatgaatctgatatttga

SEQ ID NO: 197556 - DNA, 1669 bp, Cannabis indica
tattattgttaggttgactctacttcttggaccaccaagctcaggaaaaacaacattgcttaaggcattaagtggaaaacttgatactaatctaagggtctgactatctctgttttctcttaactcatttttagtaatgttctattccattaagtaacaaaaaataatggttttgagcaggtaactgggaaagtcacctattgtgggcatgagttttcagaatttgtccctcaaagaacatgtgcttatataagccaacatgatcttcactatggtgaaatgacagtccacgagacattggatttttcaggacgatgccttggtgttggttcgaggtatgaaacattaattgagacattaaggcgcgaaaagaatgaaggtgttcaaccagattcagatgttgatgtgttcatgaaagcaactgctttggctggtcataacacaagtttgatcacagactatgttctcaaggtatgtatgttgtccttactacattaagtcttgcctttttcttatctcaataagaaaaaatgaatgtttctttaacagatacttggattggaaatttgtgctgatattttggtgggtgatgatatgagaagaggtatctctggtgggcagaagaagcgcgtgactactggtatttgacattctttttcgatagatttaattacatcaaacataggatttacccaattaccaaaaccatatcacagggttcaggcttgatagctgctaagtgtaatataaactctacaaacacattggtatttgacacttgcatatagaacattttatattacactaagttcccatacatacaagtgtagagtttttttgtttaagttagaaaatgttatatggttttccaaatttgaagtaagaatccaaaaaattagaacaattggactcaccaccaagtagacaagattgctgttacacctatattagtctcattagtatgattgattaggattttcgaggctgagttgtcaaattcttagtggttttaactaagctatatcctatagtcctaaggtgttgaaacagttaagggagacttagtaaaaatatagggctgatcaattgtaagggggagaaattgttttacaaaacgagtaaaagagacaacaaactgtctcgaaaagtttgaaactttgtaatgcctatgctctaaacacaaactagaactgacataacaaaaagagaccgagtttcgctgtcaaagtctacaccgaagcaaagaacacatcaatcactccaaaaaatcttacttttagttacaacaaaatttgtgactaaaaataaaaaagttgtggctaattataaattatcattattgtgttgtgactaaaaacatttgttgtgactaaaactaaattagtgacaacttgtatctaaatactatgttttaatcacaagtaactttttgttgtgacaaaaaagtcatatttagtcacaaaagattaatgttgtgactaaaagtagcagttttttgtagtgaatggagatacactacgaaatcggttaatctcaatactaaactctctctgtatagatcaaagattgtgtcactctcagtcattagtagcatctcagcattaatcttgttttataatgtttgaatggatttatttaagaagtaaactaaatttcaggtgaaatgtta

SEQ ID NO: 197557 - DNA, 967 bp, Cannabis indica
atgatgatgattatagtagtctatagtaaattgatgtggtcaattgttttatttttatatgttttggtcaaattaattaattaattatatttacttcactttcatatatgatgctctatatatattagtcattaacaaaatctgtactctagcaagtgcaaaataaatagtttattaattagttttatttggaaaagatgtatgtaattgatatattgtactgaatcatatatctactgaaggagaatgattaaaatataagaaatgccgtgttgaaaaattattaataaatttggcaaaaagagatacagtttgtgtacaaataaatatgttaacttgcaggaacaaataactgcatataaaaaaatttatcgaaaaagtaaaataactgcatatatattgtaacacgggaatggtataggtagcgtttaatttttatattctctttaatgtttgtcctaaaaatatagggaaatttacatgttatactaattttttgctattttttcacaaatatattatcagtatagttttttttaactgtattttttttataagtttatattgtgttaaattttcactaatgttctactggtgttttgagttgttttgctttgtgttttactagtactgttttataaaaacacagtatttttgaaaagatttccgtgtaacagtatttttgtaaaaattaaactaaattccaatatttttgtaagtttcccaaaattgtatagtaaattgtggcataatatatattgagtccattttaaaaatctttggaggataaaactaaaggaaaatctccaatactattatgaatatataaaatagagaaggaaaaaaaaaaaagaagatttagatgcatagatcataagaaatttttaatgaggtaaacttttatttgtacaaaaatatgattaaaatataagaacttaaatttatatattaatataaaagaaagcgc

SEQ ID NO: 197558 - DNA, 907 bp, Cannabis indica
acaaaaacttggcaccaacacaaaaacccatatacataaaaccactacaacatgactacttgacttcagtttcacacaactcatttttctcttcagctacttcagagagagttcagtgtatatcactatgacaaatgacataaagtatttctactattttaatatatattccaaattttatgaaactaaaattaatgtgcaagtctcactattagattgtgtcggtcgtgctttgaacttttgtgccattgtcttacggttccatacagctggcacagacagagcacatatatgtaaaattatttatattttatgatcatatttcaaaactgtaaacacctatatatagaattatcatttcattattcccgtaaaagtaatttaaaatccttattgcctgttgtcatttcgatttcgaaagaggaactgtgaaatccgtggttttaaaaaaagcacccctcacatccttcaccttcaaggctcaagctgaggtccccctacactttcagaaccaaaaagaagaagaaaaaaaaagattttcaatgatttgacaaaatgtgctgcacacactatactatactattgtgtatacacaacataagagcaagatgggatattgggatgagatcatatttgcataaataagagtgaggagtcacaaacaaatggtcccttataatttaagacacctcataataattaatacactactaatttttggaggtaacattaatggagttcaatcattgagcttcattggcaagtgaggtgagcaatcctccactacaagatatgatatgatgtggaattaatttttagtgagaccgctacatcaatagtaaaattgaattggttattgaaaattattgtttgaatttaatctctatttattttccttttttttttt

SEQ ID NO: 197559 - DNA, 824 bp, Cannabis indica
ataacttttgtgggaactccaagcacgccgcacaattccgggaacactactctttccttatctccgcgtaaaaccctcgcccattccactttcctcttggccaattgttccgccaggcgcaccgcagcctccaaggtcttctccgcgctatcgtgcgccgactcagcgatccccattctaactgcgtcatcgcccttgatcttcgcccccttgagcatcacgtcccgccgagccgaaaccgatcctatcttcgacctcattgctgcagcgaagtagtctggaaacggaagtcctaaatcgacctcggacatgtagagaacacctttatctctccgcatcaatatgtagtcgtggcacagggagagtaaaaagcctccggcggcggcgtggccaggaagggcagcgatcgtcggcatcgggagggagattagttcggcggcgactggcttaaaggaagcgaccatctgacggaggcgagtgacggcgcctgatttggagtcggcggatcgggcccaggcgagatcgaatccatttgagaaaaacttggtgccttgggcggtcgtgatgaggacggagccaggtgtggcttgggatttaagttgggaaatagcggagaggatggagtcgatggcatcggggccaaggcggtgatcgtcgtcgccggtgagtgtaaggaagaataaattaccgcgcttctctaaagtacacatattttctccaccactttcgcttttccacaattgatttttctctcctttccttttctgtatccaaacagagtaccagttttgttggatgctattcctaccttttatcttttactc

SEQ ID NO: 197560 - DNA, 1558 bp, Cannabis indica
aaggagaatgtaatttaagagtatatttgaaaagatttgtatagtttttaccacatttttgtagcaaaaaaagtttaggtggcaaaaccaatcatatttattcttattgttattatttttttttatttacaaattatttatttattattattatttttaagaattttcttacatgaaaaatataaattgatatttcatttacaaaaatatctctataaggtgtgggtaacaattttgtctttaatgaaattttatttactaaagtaccacttatacatatccattcatttcagcccaaaccaccttctagccattattcttttgaaactcatgttcaaaacccatgaaaaccacctctcagccataactttcgtcattttcttcttccaacgacctcctttattagtttttttttatatttttcatttcgtatatataatggttattacctgtggttctgcttctcaatcttcattatcaaaaaaagcttcaaaaatgggtcataaattagttgctaacaatgttaaaggaaaacgcccagtcatcgacaataatgacttcgatttcgctccctccatggctaaaggtggtcgtcgcccaatgaagaaaaggtcgaaggtgtctttgccggctgaaaaaaaatttcaacttcgacggccaaaagggaaagaagaagtcaacttcaagacaattgtgataaaactgtaatgcaacagttatatctgttgcgagccaactaacataaaaccacaaaacaacttataattctacatatttaatacaaatgaatattacaacaatcgtgttttatctgttcatggttgcgtatttgataatttcgagccttgttagcaaaatattgatgcaactgtaatgcaactgttatgaaacattaaaattcagaacagtgtttccacatacgtaactctatctacatatctattcgtgatttaatatgaacaaattctccatttgaaatctggaaaataacacatttaactatagtattgatataagtttttttagattatacttgagttatattgtttaggaactccagttcaacttattgagatctacatttcatggatctgaaaattgaaatcaagacattagttttatgtgaattaaattgaatttctggttgaattttagttttgtagtagtttttctacactttttttttcatgaattcgaaataacccatgttttgattgatttcggccatcttttcaggtaaagtcgtcggaattaataatagttctctttctgattgtgtttcgtttcgattgtgttaggttactaagttggtcgatcaaagattgtgtgcgtgaggttgcttgtttcgttttgtgcaattgaagtagtagacgatggtactttagtaatatttaatttatagattctataaatattcatagggtagaatttaagtatttttgtaatttaattatctttttttgtatataaataaaaaaaactccaattttgaaagctgttttcacaaatatgtatttctaattggtactatcaatgtacaaattcttttttttttttt

SEQ ID NO: 197561 - DNA, 616 bp, Cannabis indica
atatatatatatatatagagtaagttgccatatggcaacatgagatttgtcgggagcctgaggtcagtttcagcctcccgatcaatcttatagtgtcacgtgacttgagatgaatcttgtagtgtcacgtgactcagagattactcttattggaaaatacattatgtttattttcagaataattatatcaatgtacacacctcttgaatcaatgattgatcaaaccatgagaaattacaccaaaccttaattaaagtgcataagaacaaaacataatataacttatttggacaagggaacgttagcatgcaaatatggtagtaccttatgtatatgtaaatgtgtgtaaatgacaatgtaatccactcatgaaatcacaacaatctgaaattgttaataataacaatcactacactgttaagaaaaagtcaaatgaaaaaaactatattgaaaaagctatatatatatacttatgatgtatatgtatagtatgatcatatttttggttttgatcattattaatttacacatcctattcgttacctgggttgcctgaaaaagataaagcacatatctgaaaagagagtactccattgtatatataataagcaataat

SEQ ID NO: 197562 - DNA, 1360 bp, Cannabis indica
ctctctctctctctctctcagatgtctctctctactgtgttgtgtttctctctcctttctattgtgttatgtttctctctcctttctttggatgaatctttttgtatcctcttatgaaatgagatgagtatagtccactttatataggttaatggactcaagaagcttgttttcatatttgacaattaagttagttaacgaacaactaactaactaattgaatcttagttagaggtttaaggaataataccacataatacgtaaaactttatcaaacaactaataaattcccaatcaataattttataccaaattatacttattttattttaacatacatattttacctttcttataaaagctcattctctctctctctcaaccaaactaaaagaactccatccccttagccagccgctctgtcactctcgtaatcgcacatccgagatcacaagacagccagtgtcgcacctccaccccattgtctaagttggggttagacctccataattaatggatgtctttttttaatttacaaaaagaaaaaaaaaacatcaatggtattgtaatttttaagtatatagtttgtttgcattatatctgcataatttttgtagtttttgtatatttttatgtataaactaagtagatttgattttgttttttgcatctttttgtcttttagctatttttttgatagtttcttgatgctttttcgattgattctcgatggtattcctaaatgtactttccgaaggtcagtgatgcatattttaatagtttcacgatagtttatcgacagtttcttgataaattattcttgatggtttctcgacatttttttgacatacatttttaatggcttttcaataattttttcgataggtttttgatagatgataacttcaaagttagcttttaattaatttaggttatcgataggatttcatgttcacaacagttttttaataatttctcaatgtttttgcgattattatcaagaaactagcagttgaaaataataattaaaaaaaattgttgcagattgtcgcccacttcgtcttctcaatggtagcgacgatggacaaggatctgtggttctcggcttttaaggctttggtttggtgagtcgtcgacgatgaggacacagaagaaccacggggcgtctgtgctttcaaaggtttgtggcttctgggggtttcgatgggagaagaagaggcggtgctagaagaacgtagggcttcgggcgaggggcttttgatggtggcgacaatgacgagaagggaacttagggcttcatgaggtttctcttcatatctaaattaagaaagagatgttttttaattaaaaggggtagaat

SEQ ID NO: 197563 - DNA, 652 bp, Cannabis indica
aaaaaaatgatcattgtaacagtacaaacagtagttttaaaatgcctcttcttgtatcacatgcctgcatgtgttggctagtacttgtgtgatcaaatactactcaatccatatgtttattatatatacaaatatatatacacctcaaatttttatatattcactgtttaatgggtgtcaagatccttatctctttcttcattaaagacctctctatatataacatattgttgtggtgagtagtaaacctgagattcatcattttattttatttttttaaagtaaaatggtataatatgatcaagattattgtactaaatgcaatattgaagagtgatgagtttttgatttaatgtaacaatattatagtggtctgctcaccagcaaacatgcttaaacaatgtttctgagacacttcaaaatcagcttatatgacagattgtgtttgtgaagaagtaatttctacaaacctttctattcaaaagtggaccatgtacttatacttgtataaatatgataaccacctataatggacatttcataattgaaagttttagttggtaggccaaccataacacaacacataccacttattacataatgctattatagtaaactcagtttttcttctattcaatctcttatctttaca

SEQ ID NO: 197564 - DNA, 599 bp, Cannabis indica
tacttctagagggaagggcaaggctgctgcttacagttcagatgattcttcctctgaggatgatggtagttgatagttgataatgccaacttttttattttccttgcattaaatacttataacttgtattctaactttcttactttctttttacaaatattgttttcgcactgagagatctagctggaaagcctttgggtggagcctctttaggttgtcctaagaccaaggcggcacagaccacccagtctaatgatgctacagggtcctcactacctccccctccttaagggcctacactagttggttagtcgatgattgttaatcctccattgaggaagactccacctccacatcagtctttgtgcaagggtgcccagaagtctgaccatggagcatgcttagccaccggatagagagttgttgagctgctcatagtcgcattggcaagactccacccatcattgatggggagcttaaggagctcaaggatgatgagttggagtgtctaacgtccagcagtatccagaacttaacttcgataagtttcattatttttttattcaaattgttgcactagtaaaggttggtcggccaag

SEQ ID NO: 197565 - DNA, 739 bp, Cannabis indica
gagccacaaataccaacaagttactacttatttttccaaaaccaacaattagcaaacaaaacacacgcataaagcgatcggaagaagtaggatcctcatgatttttaaagaaaagatcaatacttttatctgaaatcccatcaaaacttgcaaggaaaaagtattgtggcaccaaccaaaacatgctcatcgaaattagatcatcatcaacggttagatcactaactttgtttaatctgcgcctatccacgtttgcagcagcaatacaacatagtattgagaaaatcatcgacacaaccaaaccaacacaaccaacatatttggatgacacattgtttctttttagtagtttttgcattattttccaataaagttcaccgatcagctcttcagaaagatcgtaccatagttgaaacacaactggatggactttaaggtgtccaacactattatccatgctgaatgcttgttcaataaagtaagtgtctcccgctgaagatacaatacccaacacgaaaaaggccatacaaaaggggattctgcatatggcttttttagtttcttcaacatgatctcggatcaccctgttttgtagttcttgatcatcatcaacattatttggtaaatttattattgctttatctaagcacctgcacaaaattttattattctgttataatatattttgatatattataggaatactaataataatgcaaaaatcagctgttaactaact

SEQ ID NO: 197566 - DNA, 1737 bp, Cannabis indica
aattgctatgactcaggactactgatgttttcattcttgcctcatgtcaaacattaatgtctacgtcaccaaaatcaattttcagataaactatattaaatatataaattcttaatttagtaaataatacatatacgtttaaatattaacaatatattaatttaatatatataaactttattaaaaaaatatattaagatattaaaaaaataattaaataatggtaaaaaggataatttataatttagaaaagaatgagggtaaaatacctctaattttaagagattgcaaatcatattcttcaatttcaaaatggggtggaacccaacccacatttatcattttcattcattagggggcgtttggaatgttaggagaaaattagaattcggtgtaattaaaggtaattacataattttgtgtatttatttgaccacataattacattatgattgcataattggagataattgagaggtttcaattacactttttaattttcatactttatgagaattgagtataattactaaaaatattttttaaaaaaaatattaaatactaaaaattattaatttttcggtgtatttattattattttgccaaacaatacattaaaaatttataaattattatcatttcatatctaaacacattttgtattttaaaatagagtgtaaattcatcccttatttctatttcttaatctcataaataaacacactattattgaagcatatccatcatcatgaattttccacaaccgatctttatttgtagaaaaatcaattattagacccttgttctaaaagtatatggtatttttttaatatacatgttgatttttagcctcaacttgattttttttttgcttgattaggacttgtccgctattttttagcttcacagtgtgactctgatcgggtctttttgattcccacactattttaattttactacagttgttgctatcctttgtctaagtattagtttcttcttcgtcttttttctttaaagacatatctcagaaatttaagttgctcattggctctcgattgatgatattcaccgattggattttatttttatgtttatttttatttttaataatagtgttattacaccaccttactattattatagtagtagggttttattctattatttaatttttattggaagatttttagctgatatttattaataggagtgatttgtgttatatgtttatttgaattagaaatttagcattttttttgtgtttcttttatgcttcaacgctaaggatttatttgtattttagttgaagttgatattagttttcattcctatttttgtaaatgatataatttgtttattttgttgatttccctcttttaaatgatatatcattatatagtgaattatggtcaaagttgccaattctggaatttccattttcttaaaaaaaataaaataaaataataagtgaccctgccttcaattattttttgcaatgagttcttatctaatactgagatataattatacacttgtatcaattacataaaaattgattaatacaatatggtaactgaaaatattgtatataccaaatttacccgcaccgacgagaaagctttttttttttaagtcaaccccatttatctaaactaaaacctactgttttcaaaagcagtgtcacaccgctgaatgtaataatttagtgcatattaagtgcaattatcattactcttt

SEQ ID NO: 197567 - DNA, 1015 bp, Cannabis indica
acttttaaactatatatttcttataattaatgatcggaaagaatttagtcaagtttgtcataaaaagagaatattattgatttttattaattttattatatcataattaatagtatatatatacttgatcatcatgaatattcacttggctactccgatacctaatttcttcccaagcttgcaaatattcaacaaactaaccatgattagtagtcgaaatattattaatccaaatcatttcaggttcaaatttaatgttgtcaaaaacaaaggtacgtacctatacataatatatatcaattaatattgaatcttaattaatgttaattaatataatctttaatttttgcagccacaggggacgaaagaccaagtgggaaattatcagttaaagagaatagtagttgttatcataataataatgatgatgatttattcagtggaaaattggtgcaggggaagcatattttccagcaaaacttctcgattagatcatatgaggtaggccctgattctaaaatcaccattggagccttaactaatcttttacaggtaaagatatatatcatgctattgtattataagttataagaaacatgttaaattaattaatgtgaaaatgaaatgaatatatatatatatatataaggaatcagcagtgaaccatttgataaggggtggggtgatggtggaaggtttgggttggacgccggccatgtgcctcaaaaatctgatttgggttgtctacaacatccacattctcattgacacctacccttcatggtaattaatctaattaaattattataattaattacaccttcatattaaatgatctagctagataattagttgtagtactaattaacaaataattatacatgtataaattaataggagtgatgttgttgaagtagagacatggacttgtgcatcaggaagaaatggtatgcgtcgtgactggctaggccgtgattacaacacacgaaaaactctctttacagctgtcaggtta

SEQ ID NO: 197568 - DNA, 1282 bp, Cannabis indica
aattatattttaaaaaaatatacttaaataaaagcgatattcacatatatgattaaataatatattgatcaaactactataaaaagatgttcaagttctaaagttagcaattcaaaaaaattactatagtaaaatattaaagatatttgggtaagagaaagtcaagttttaaagtaaattataaaatatatatgattctacagacagtaatgtcatcgtcctcattattttgagtctcaagatgcgtgataacaatccagcaccatcaagagtggggaatggtggaagtgaaaccatagtaggtaagttgaaaccaagaacaacctgagtgagatacttaacctgatcttggaatcggttcaagtagagttgttgtgtttcatattgcttctacaaatactgagtttcctattatgcctcatgcacctgtcgttgtaaggcctaatactgttccatagtagcagtttgtgagccagaagcagaaggtgtggtaggtcctctttttgtaacgcctacttgcttagacatgctataatgattttctaattattgggcatacatttgctaatcaaaagttttctcgagaatcgtgataaattaattttttttgattaaattcaaactttattaaatcaatattttaacatagtttctgaaatcccattgaaagtttaaaacaatatacaaaatacttttttcacaaaagtgtcgcccagcgattataaatatgagcccatgtcattcaaaaaccgaacactccaactttaaccatcccgatatgtactatcatcttcaagctatggactcactggtgctcaatctttgcctttccttaacctacatatgaaaccagatttgtgagtcaacgaactcagtaagaaaagcataaaacatataacatattaccgacttacaaatagacgcccatagaactaccaacaaggcttagtaggtgaatcaagaatgtttataacaaaattacgacctctataccacatgcaataagtacttgtaccatactagagttggtagaattaatccgtacctccagtacaactgagcattgtaccacatacactccatactcttcgcgtactagtgttggtaactctgtggcataccccttaatattatactgtaccaatacactccgtactctaactgtactattattcttagtatacaaatcatagaattcaacatgtataatacatacatacacatatacatatatatatcatatacgaatcttaccttgcttctagattcaagtgtgttggtc

SEQ ID NO: 197569 - DNA, 505 bp, Cannabis indica
agaaatcaaacagaagatgggaattggctgtctgaactctagtgagaaatacttgggtaacccgttcttcttctctgctaataaaagaagagatttccaattcatcaaggagaaaataacgaatcgacttgaaggctggaaagcacgtcagttggcccaagcggggagatcggttttgatcaattcagttttacagactatcccaaactactgtatgtctacggctgttgtgcctcttactctatgtaacgaactggataggattcttgcgagattttggtggcgaggcaattcggaaaagaatagatattgtgctctgaagagctggaatgatttatgtcagcctaaggcatgtgggggattgggttttagaagattggcggatatgaatgtggctctacttgccaaattgttttggatggttttgaaagaagaggataagctatgggttcagttgctcagagacaaatattgcagaattatgtccccttggaatgtcgagaaa

SEQ ID NO: 197570 - DNA, 786 bp, Cannabis indica
gggcatggaggtatggagtatggtcgtttgagagcacttgagcctaaaagcaatggaggggcaagggatgtgaatgagctctaaaatgttatgtttaacatgtggagcagtactttagagtcgtgcaaacagactttgaagaggcaaaagcagcaacatctattatgtatttattcaaagatgccaagttgtggaggaggacaaactacgaagacattcaaagtggcaagttcaccattgaaacatgggatgaccttaagagagaattgaaagaccaatttttattagaaaatgttgcctacttggctcgatattagctaagagacctaaagcaagttgggacagtccgagaacatgtaaaaaaattctttggatcgatgcttgacataaaggacacgaacgaagtcaattgattcttctattttcttggaggacaaaagccatgggccaaacaaaatttgtagaggcagtgtgtgacaaacctagccacgactcaagctgcaaccgagtagctgattgattacaccccagagaatttgctttaaaagaagacaaatccccaaaccagctctaacaaagttgagagggagaagttcgagaatcaatggcagggtaagagtataggagtagagaagaagaaccctaaatgtatatcctcctccaagagtgatgttgataatggaaagaagaccattaagtgttggctttatctagggccacacattgcagcttctttcccccaccaatccaagctgagtgccattaaggcatccattgctcaagagg

SEQ ID NO: 197571 - DNA, 634 bp, Cannabis indica
gatttttgtcagttcatgttatgttagttgaattttagccaaacacttaatataaagcataaaataatacccatcgatttcaactcattccaattatagctggaacctttcgtcttctatttctattagtgcatggagtatgaaaacaaactgttaaacagaaaataacagaacacaaacttgtacagctaacaattcagacattagttatcatccccctcaaacgaaaagggtgggaaccactttaagtttggtttggagataatgaaagcgctctttgggaagacacttcgtgaagatgtctgccacttgatcaatggttggaacatagcgcacatcaatctctttgttcagcagctgatcacgaacgaaatgttgatcgatctcaatatgcttgcaccgagcatgaaagatggggttagcagccaacgatgctgcaccttgattgtccacccagatgacaggagcatcagctaactggacttgcagctcacttaggagagaccgaagccactttatctcagcagcagtattggcgagtgcacgaaattcagattcagtagaggaacgagccactacttgctgctttttagcagaccaagagactaaattggaaccaaggaaaatggcatat

SEQ ID NO: 197572 - DNA, 1257 bp, Cannabis indica
tgatttggtacatatcaaagtttttgagagaaaatcctatttagcctataatttatattgtaattgaagactcaatcaattgacctctttattatgctttactcatttttactctctcccactaaccattatataagtattaagtactagtgagccggatcatgttaagttgggataaaagtgatcgagagagatagagagagagagttgagttggagtagtaacacattaataatgttgatgttttacagtacaaaaagtagtaaggggggagcaatgatatcatcatcatttcgttttccttcagccaacaatgttaacgactgcggcggcggttgtgtaagtgtagtgctgatgacgaacacgattaatcactgttgtgatgcagctatgcttctgaagagcaatgtcacttatgatcggtactgcctcaacgacactgcctcattgcggaggatttggagttggaatttttgatggattcccacgtcagtcgaattttggctgatacaaagaatcatgaacagggtactggcggatcaggcgatcagaacacaccggtacatccctgtggaaaaacaaagcctggtgaacagtattgcctagatggtggaaaaaaagtgtctgttaaaaaatgttccaagtacaagagaaatcattgtaattgacacgaattgaagataaacaggaaccgttatggcatttcccctggtctgcatttgtattttatctggatttttcttttatagatagccagttgtacctacgtacgtctttgtgtgtattgtgttcttattattattattattatctgcgtattattataggtactatcgtaatgtttcagcgatgaagaacaccggatcgctgctttatatagtattaaattaattacgcttgggacgttttttttatttattcattttggcatgcataattaaatgagtattgttataatttgaaggtgcttcacactatgctatacagatatgctgtgggttgggagtggttttttttttttaatattagctgttaaaataaattgtgtgtgaaccaatattaaataatagaaattacattgtacctgtaggagaaattataagaatttacttttttacgacataaattaataatgttaagtggttaattatgaatttttttttgttttacatttatataggtttgtttatgattagagatggaaatttatacggcggggatgggtaaccgtgggaacccgcccctaatggggtgggg

SEQ ID NO: 197573 - DNA, 1833 bp, Cannabis indica
gcaagtagggatccaatgtacgtagtttgaggctatgagaacccaggctaacattgaagttttcatttttcctttgtctcaaatatacctcgatatttttttcattatttttattctgtcatatttcttcttcgtagattggcttgttggcagagaggaattgctcaatggtcattcaactggcctatgatctggaggtgctgagggcggagcatgccgatgctgagctgagaaaagaggaagcacccaatgctttagctgaggcaaatgacaagatggaagctactattaagcaaagggtgtctgactttttggacaaagccttgacccgtgaaaggaaggtgaccaagacagagagggactgtggagataggtacaggggcttgtattccacgactattaccaaaattaaagagttggaagccaacctaaaccaggccaagctggatgtgtaagagaaggacaaaaatattaccaaactatccctacagtacgataaacaggctaaaattaatcaagatagatacaatagctagagtactgtagagagaaaggtgaagaaccatcttcagttgcaacaagtaacagaggaggctgaggcaaaagctactcaaatggatgaggaggctgagactaaacttagtgcgctcgtgaaggcttatgaagaatcccaggaaagggtactgaagtggagagtgaaaaatcagatttgaagggatgtcttcaacaagcaatcttgaaaaaattggaacaagaagctcaacataccaaggctctagaattggtgcttgtttactcagtgtatactatcttctagtattacaaagttgtaatagatctcttcgatgctctagataacgaagatctgttgcccaagatcttggcactagaggaggtggataaggctaaggaagcagctcataggatacatgaggtcaaaccaaaaaataacaatcctggttgtaagaacgtggatgactctgcttttctggcccatgaagttcctatgtcgaccaactctgcgatcccggaggcctcgtctaaagttcatacctaagatgcacaatccctgaaggacaccactcagccttgatcattcttgcctatctcttttttatttttttagtttttcttttttgtttttaggggacaagggtgcccctggttatgtatgcggagacaatcttttacacccttaccacggggtttttaagtacatggtactattaaattaattccatggatatttgcatttttatctcaaaattttgctaagttttaatgcttccagccttgtgaggttctggttccaaatgcctgaacctttagatttttgattaaatgcttagacttgaatatgtttgttgtttaaaaaactaattaacctggactagttaattagttaagaatgggacctttctgaacttacttttttacttaacctaaatcaataagtttaagtagcctgaatactctggttttgttaacctgggttaagcatgaagcttgaacttctatttcaagataacatgaattaattgcttaatgtgcgagaattgattccaagtataataaggtagtggattacttccggttccctgaagttccagtttcaagtaacactccctactcttatattttgttaaatgttagataaacttcaaatataataaggtagtggcttacttcctataccttggggttccaatttcaggtagtactccctaatattatatttgagaatttgacgtaattattttcttatgaaagagggtaaaattgatattacaataacataatatgctaccccctaacgtgattgataattgagac

SEQ ID NO: 197574 - DNA, 884 bp, Cannabis indica
ctcggtttggtcggtttctttgattttttgctcacccctagaaaaattaactttattaaccttcaaaatcagctaccgaatgaggtaacacagcagttgagatattccctaagttgaacatacaatcagggtagcaaatggaagctctagcaaaactatgagctaccatattggcaaaccgttttacaaaacataacgagacatttctcaactctttcagtaaacatctacagtcacaaattacaataccaaagcaaaataacatttctacatgactgcgaattgcttttacaacagtaagacagtcggtttcaagaaagacttgctgccagtttttattcttgagccaactcaaagcctccctcatacttaaaataagttgtttattttattactgccttttaggggaagtttagcaattagcttttatcttttttttttttttttttgagagtttaattatttgtgattacaaatttttgttattttgtttagggatatttagataaaattggtaaacgtaaagctaatttatgtaaatatggtaagaaaatttaataggaaaaaatatggtatttaaaataaaaacttaacatatatgaaatataccactttgaattttcataaaaaatattaaaattctctttatatttttcttaaaaaaataaaacaaatgaaactacagtgatcgttggagttgttaatggtgccgaaaaactcgtaggagttggctgctggcgccgaaaagttgccaaagtagttgtcagcgccggaaaagttgtcggagtagctatcaacaccgaaaaagtcgtcggagttgctgccgacgctagaaaagtcgtccgaattgacattttcaaaggaaaaatcatcaagaaaccagt

SEQ ID NO: 197575 - DNA, 562 bp, Cannabis indica
atttatgctttaaatagtaataataatcatgataagatctaaaaacctacaaggaaaggaaccctagccattttctccctatagtcaatcaatccatttccacacatgtgtagatttacttcttctctatccaatgccattttatttacttcttcttcatccaatgccattttatttatatgtttttatgtttatttattgtatgatggtctttatgtttctttttttgttgcttatttgtagaaattaatgatttcatatttgatgtttttttttcataagttggtcattatatttttatttttggatattgatccctaaacttattattatagttggtataatttattttattttatttatttagtttgcagtggaattactgttggttctagtgtttttttgtgatagtattaaaattataaaataaaggttttatactttacccgaaaacatgttgagagagataggaattttagtatttatggttaaaacagatgaggtttgagatttacctggttaattagtgcttttatgtttaaataacaacaacaacaacaac

SEQ ID NO: 197576 - DNA, 1360 bp, Cannabis indica
accttcgtgcgatgcaatgaggttgacaacgatgaaaaaactccaacagacgaggaagcaccattaattctggtgacgtcgcctaagaagaagaacaaactctaatcgaaaagcaaccataactgacagagaaaaaatctacagaaaaactagtatgaatcatcaatccaaccctgatttataattcaaattccataaattaatactcttaaatttaatttacagattcataaaagtagaattgtaagaaataaatctcaactttctgcaatcaattcaaaaatcaaatataatgaccaaatatatatcactacagtaggtaatattatggttcttgtctaaccaatttttttagaattttaatactaaatttattcaattacgatcttattcattatttatctcacgtcatagatcttaaaacattatttatatatatatagttacattatagttggttgtgagtttaattaacactctgataatagacgtatcaataattaagaactgataatgctacaataattttagtcttatttgtatttcatatcgacaattcaattaaatactaataaaaaatatttataatatggtcaatatttttatattttaatattggttgagttaacgttggtttaaagtattattacagttgtttcttcactaaatatttttaatgtacacgaaaatgtttatcagtgcaataaaagtttgttaatcttttcttaatgatgtttaatcacattttccatacatagttgtccctacgtgttaatttcgctgcataatagttgtggtgcgaaaatatttacgtgtaaaaaattagggctcaaatttcgcaatacgcgactcgtatagaacaatctctattgtggtaagttttttatattatatattgggcatttatagttgtgttaatgttgtaaagcaaatgtctagcaacacatattttactttcaattaattattgtacagttgactggccataattaaattttgaaaatttcaggaaggggcccaattcaattactcatattttacaatggagagtttgattcaaaattaaattttgtaacttacgaagctagtgacgaatttatctcaaaggaatgcaaacatgaacaactagtacagaagttgaaacaagtgtcgcataatgcaaccaagaaaatacataattgcaactgaaatactatgtgaaataaggttaccaactattaggataaagaacgatccaagcctattcttctacatacaaataaaattaaaagaatctgatttcataaggtttccattttgtgtgatacggaagaccaaaaaaagaaaatttatagatgcatgagaaataaaaaaaaataaa

SEQ ID NO: 197577 - DNA, 1403 bp, Cannabis indica
acgttgtagcactccccggcctctttctgcttccctttgagtgtggcgacacccctaggcgtcaaaaacttcaaaaccagattaaaaacttaggaaactgccttcaattggttgagggagggtcgtctaatcactgcgttgaacgtatccagacagtccactaccaaaaatgttgccatcaccgtggtgtgtttgggggctttctccaacagtgagtgccaactctatcgttcccagcggttggatcgagtctctgataaacccataaatgggtgttgcacatggtttcaagtccttcagactcagacccatcttcttgagggtcgccaagtagaggatatccacggagcttccattgtccaccaatgtctgatgtacccttgtgttggcaatctggatcatgatgaccaatgggtcattgtgagggaagtgcactccccacacatcttcctccatgaatgttatcgtgttgccttctcccctagaactttttgccggcctttattccagacttcagacttggggctcctatttcgcctcatgtgcatacctctctcgtcccttgcgggtgttgcccctaactcctggtcctccgatgatgtgcggatgtctcccagcactttcggggcctcttcttgatcatctcgctagcgcatcttgtttggcctttgattttccttccaatactctcctagatacccacgttgtatgagtccttcaatttcgaccttaaggtatttgcactcttctgtgaggtgtcccacgtctttgtggaagcattagtacttgttggggtctctcctagttctgtccttctttaagggcggtagtctcttgaagggaacttgatgctcattggtgaggtagatatgttctcttgagcgagttagttctgtgtagtgggtgtattctcgaggtagtggatctaactccctcttggctttcttgtcttgtcagtcattcttatacatgaatccccactttttgtgtgactcctcagctcgggtctttctaggttgttcgtctttcccaactcccaaattttcatgtccatactctaccaagatatacctattggccctctcatagaagtcctcaaggtcatccagctctctcttgagcatgttgttccacagcttgcttcttggtctaactccggcggcgataactattttgtgctccaaaaaaaacatccttagagagtctccccactttagctgcttcggcattgaagcgatggatgtagctttttaagctttcagtttttccttgtttgatattcgccagaattttcctcaggacgacataatctcgggaagcatgatgttaggataagaactcatcggtgaactatttccatgaagttataaatccaggagccaatctcttataccacttgtagg

SEQ ID NO: 197578 - DNA, 580 bp, Cannabis indica
tggtcaccatatcatgacattgccatttcacctcacggtcggctactttgctttgatttttttaatataataaatttaatttaatatattttattttatataaattctataacattaattttaacttgtattataaatcaaacactaatggagttttttttaataaataaataaataatgctataatagagaattatgcacatatctaatgtcataaagttttaatttgaaactaattgttaaacacttatgtttcttaaatctgtcaaatttaagtgtattataaggtagttaaaattgagaatttaaaacttcattatctagttggttattttatttttatttcaaaatcccattaaacaatgatttaattagcacaaatcctcataccaattttgcctacattttggacaagaattgaaaatgaaatgcaaaattgttgtatgcctttattccaaatgcttctaagttctaactttccgtcattttataaagaagcgaaaatttcatttgtcactcatctattctttcttcaaaatgatttataccttatcaactttttaagccacttcctaatcca

SEQ ID NO: 197579 - DNA, 671 bp, Cannabis indica
gagcaaagcttgagttctcaaaccccaaaattcctcaaattcgctacaactgctattacttccaaaaataagctataaacaactaaaatcatgctttaaaatagtctctaacacaattcaacctcaaataaaactaaacctccaaattcctaaaaatcacaaaagagaaccaagcttaaaacttcaaaaataacaaagaataaagtatctagggcttacctttgatcttggattaaggttctcctcaatccttggttaaaatggcttgaaaatgaaagcataaccttagttttttctgggttcttctatttccttaatgaactagatcataccaccagaataaaataaaactgaggagtttctactaactccactacaagacaaaaatctcaataaaagggtaaattctaatttttccccttacttcgtacttaagtaacttataggtctaggggtaaagtggttcaaagctataatcccgtctaacccttgcactccaaaatcaatatatcaatatccccctagataaaaagttctaaactcacccatgtgactctaccaatcatctgtcaaattttccaccgttactgagcaaaaatcataaaaattgtaaattttacatatgacataaataatacgcttagagtttaattgtaacgcccgtactttta

SEQ ID NO: 197580 - DNA, 1264 bp, Cannabis indica
ctctctctctctctctttgttctacccttctctcctctctcactctctctgtcctcttcattggaggtccgtctgcaaaggtcaaccggtaaatttcgcctctaagtttggtatattaatatatatttatttgtatgctttatttatatatatttatctagatttattgttatatatttatttattatatatatttatatgtgtattgtatttatagtataagtatatatatatttaaaattttaaattatggcaaagaaattatttatttcatattgagatgagtacatgtaagtgtatgttgtattaggttatatgtgtatgtatttatatacatgtaaactgattattgagaagtttaagctaaagaaagtgtgtttaaaaaataaacgagacaatattttttctgtggttgggacgttaataagccttagtccacaacacaatattattagctttgaagttgtgtttcttccttccaaggcttgccaaatttttctaatcctttgcatgaagaaaaatgccatatttataggccacatattcggttcatgggttgataaggactcgttaatgtttttctgtgttaaagtaagcccactgatagtgtaaatacatttgaatattgactattagacataataggtgaagcccacattcgaggacaaccatcgtccatacacgcaggtacgactgatattgacaactagggtccaagatgtttatttgttgaggattacaaaaatgtgatcttttttacgtgccccttcccattttttgacacaggggacaaacccctgattcttttggattcttgtgatgtgccacatacgactgatctcagacggttggtgctacctaacacccttttgactaccattgttagatgatccctgagggcatccatcttctttgccttgagtacttgttgaatttcatttagtgtcaatcttctagatctatacatccgacttacccatgaaggaggaggttgattacagacccactattctggcttagttcaggggtcgaggcatcagttctctaggctcagtgaatgggcccatagggctaattaggaacacatggaattacacgtgtcatatttatagaaacacagataatatttacccccaagccgtcatggctggagagtgacggagccttgcatcattcatccatatttgttatggtgtgaagggccatgaattgcttgaaccctttgaaattatgaagagaaatagttttctccaaaaaaaaaaaa

SEQ ID NO: 197581 - DNA, 979 bp, Cannabis indica
cataaaatatgaataaaatatttttaaagtaggaatattggttctcattttctgatatgcataatataatgtacaatcatgaagactttttctattattcttttttttgttgctaaactttctattattctcaagaaaagctattttttagaggtgctattacatgtattttgtacagtggaaaaggtcttttgtttatggcttatgtggcacaatgttcatcaatggatcatttcgttttgagtaatccaacattctggaaagatatctttgtcttatcctagtttgcatatggcttttttgctcctatgtgtttagtttgcattaattcattcattcttatgtcttcttttctctacattcttgtatgtaatgtattagtcgtatcagaattgtatacgaaaaatcagatatatatatatctcattagtattagtgcttaaatgtttattgtgtattgtgatatgtgatcctagtagtgccaacaatgtgatactatatactatacctaaacttgtaataaaaacatgagttaccaattggagcagatataaattgatgtgtgcattgacattagattttcagaaaatcctcgaagcttttcagttcccaaagaaattcatttcatgttgttgggagacacttccttgatttggttctgtctgatcatccgattgttttggtgaatgagggtgtaatctctttgttttgatagtgggttatttgactaaggccattgttcccttcccttggatatatgatattatgatcaactaaattggttgaatctcaagcaaagtaaactggtattctagtactgtttttgttttcttttctgtataacttcaaaagtttttctattatcttctgcctgtgtttattgcagggtttaactcccaacaagatgcaatgaatttcttttggaattgaaaagctttgaggattttctgaaaatgcaatttgctattgattgattgaa

SEQ ID NO: 197582 - DNA, 1165 bp, Cannabis indica
gattgctatgcatttcaataatagtcccaattaataatttaggaatttctttctcatccatgatttatagtcaataatgctatatataaatatataatgaatttggaattattagtaataaaatgacaattgttttgttttcatttggtgcatatatagtgtgatatggatgagttgagaagagaggagacgatatatagatggagttggctagcaaatcttatccacaaaaataagctacacatgtgcatgaactaactaattagtaacaccttccttctttctttatttaatctttgatatttataatcttatttccatatatagggatatgattttgtttgtactttcacagaatgtattccgtgaggtacggcagccgtcagatgatggacttatttgatttaatggttgagattgatctagggataattaaggttaaaaagtagaaatgtaccttgacactcatttaatgtacccgagacccatctaatgtaccacgaaattcattccgtgagagtacataatcgtatcccttcatatatattaatataattattttacaactccatgtgatcatcgtcttgtcactgactatactgtgttgtctcacaagtcacaagaacaagatccatcaattaattataatagcaaaaaaaaaaaatcgattatataaaaacaggatggaaaagaagtctgcaattccataattctttcttatttcactgaagaaaaaatgttgaaaatgatatatttggatttatgcttgcatgaaatatagtttattttagaaaataatacaaatattaatttataatgagaagtggagaaccgaaaacgaataataagtgtaggattttataattgtcaacaattattgagattcgttgtttgggcagatcagatctcaattctcaatagttcctatgttattgttacacttggcacccatattttatgctctccaacattaggcagtgatccttattcatgtttaagagtaatttataattaattattaaattttaatatataaaacttatacttaatacatcattggtattgaccatccttggaccttggtgtctttaacatttatcacatttcatagctttttatacttcatttattaacaaatttccaagaaaaaaaatataaaattaat

SEQ ID NO: 197583 - DNA, 833 bp, Cannabis indica
aggttctcatcctaactaactcagttgcctactgcctatatatagattcagctcatgtattccttttaattatcgagtaataaagataatattcaaagtctttatcttatttttctcttataaaatcaaaacacacataactagaatagtccacattactacatgacactattacatgcaaaaataaaggattgtaaagcattttagggtcaagttgattacacaagcccagatacgtaagataaagaactcgatctttagccctagtgcgatgattcccagtatgcttgcaaaagtactggagttgattcaatgaaagaaatccaagccactatccaagaagcaagaaaagccaattgatctcctttttcttcttagaaatcacaggtacgaccccctccttgtggcagtaaatgcaggtctgtttaatctttttgacccaaatatccagggtcgggttgttcatgttgcccttctccagagcgatgaacgattccaaattcttgtactcacatattagttcataggcaattgtaaacttttgcgcagagattgtgcacatcacctctccccatatagtggtagtgccattgttggtaatacaccatgtcatggaccacgacgcgcttcgttgtggccaataaataaggcatgggtactatttctttcttcccaatctttcgagcaggcaatttttgaatgcgccggtgcagtcctgggttatgtcgaagaatattatttcgctgccgagacaaccgcagtgttgcagtctgctgccgctgctggctggagggggactacggcgatgtagtactactgatcaagatcatcat

SEQ ID NO: 197584 - DNA, 3514 bp, Cannabis indica
gatgcaagctcagtagatatcctatattacaccgctctgaaagagatgggtcgggccttgaggatctcaaaccttgcacgtcaccaatatacgggttcaccaaagaaccagtccaactacggggaatgatagaactggcactaacggtggggaggagaccccaacattccacagtgatggccaccttcttggtagtggattgtccgtcagcttacaatgttgtgctgggaagaccatcactcatccggttgaaagcggtcatctcaatgtactgcttgaccatgaaagttccaaccccttgggatgtcgccactttgaaaggggatcagaatgaagctagagagtgatataacttgtcgctctgaatcgtcacaaagcctcgagaaccaacaacgatgaccaaccatggggggcccagccaaggcaacgaagtttcatcagcgctagaccctcgagtttgtgaggaagtgcgagtggagtcaatagaagagttggaagaaatagtaatcttggagagcctgcccaaggtcctcaaaattggaaaagggctcctcgaaacccttaagagggaattgaaggagtttctagaaaataatctagacgtgtttgcttgggggatgaagatatggaaggaatagacccaaccgtaatgtgcctccatctcaacatagatccgaacgcgaagccagtaaggtagaagcggagggccttaaatgtcaagaagtacgaagctctgaaggttgaagttgaccgacttgacatgatcaaattcattcgagaagcatattaccctgaatgggtatcaaacctcgtgttggtccctaaatctaacgaaaaatgtagagtatgcatcgacttcacacatttgaacaaggcctgcccaaaagatagcttcccgttgttgtggatagactagctagtggatgtgacaacggggcatgaattgctttattttatggatgcatactcaatgtataatcaaataaccacgaaccctttcgatgaggaacacacctcattcattacggatcgagacttatgttgtttgggatcatgcctttcagactcaagaatgttggggcgacgtaccagcaacttgtcaacaagatgtttgctaaccaaattggacgcaacatggaggtatatgtcgacgatatgttagtaaagactaagaaagccaaggatctaatccaggatctaggcgagatgttcaccaccctccacaaatatcgaatgaagttgaatctgctgaaatgcgtaattggtgtgtcctccgaaaaattcctgggattcatggtcaacaagagaggcatagaaacaaaccctgaaaagataaaggcattaatagacatggagtgacccaagaataggaaggaggtgcggtgtctaactgggagagttgctgcccttaatagggttatatcaaggtccatcgataaatgtctcccattctttgatacccttaaaggaaataaacaatttgcatgggggcgaagattgcgaagaggccttcacaagcttgaaggaacatatgggaaatccacatttgttggctaaaccagaaaagggcgagaagctgtacatatatttgaaagtttccgaacacgctctaagtgttgcccatgtactacatcagtaacaacaacagcccatgtactacatcagcccatgtactacatcagtaagcattttgtggacgtcgagactcgctatccaaagattgagaagttagcttacgctcttattgtggcatcatgaaagttgaagccatactttcacgcgcatgcgattgtggtgttgaccaaccaccctttgagacaagtgttgcacaaacccgaaatctcaggatgcctactcaaatggtcgataaagttaagtcaatttgacatatcttacaccctgagagtgtctatcaatggacaagtgatggcgaatttcgtagcgaaattcacctatcgtccagacggggaagaccaagggcaagaggccaataaagggttagaaagtgatgcagaagaagagtccattgagaattgcatgtggacgaagcctcaaatgatagtggagcaggggttggggttgtaatgacaccacctgggggaattcgaatgcattgtgcaataagatttggttttaaggcctccaacaatgaggccgagtattaagcgatgctagctagattaaggctcgccaaggagttgaaggtcatgcggccatggatttttagcgactcgcagctggtgattttccaagtgaggggagaatactaagcgaaagggctgaggatggtggcatacttggccaaggttaggagttatctggaacaactgcaacatttcacgttgagaaaatcccaagggaaagcaatgccaatgtcgatgcccttgctaagctagcatccactcgagaaattgatgttctagaatccgtaccagtggaattcttagcctaaccaactatcgagtgtgacctggtttgcaagtggaagatgaagcaccttcctggatgacactattcattgagtacatccaagaggggaggttgcccgcagataataaggaggctcaaagaatccagtataaagccgctaggtatgtcttgataaatggagttctttacaagagaggatactccacgccactcctgtgctgcataaaagaaagtgaagcgcatcgagtgttagagaatgcggtaaccacgcaagaggatattcaatgtcaaggatggtattaaaacaaggatactactggcctagcttggagatagatgtgacggtgcttgcaaaaaatgtgataaatgccaatggcatgctagctacaacaagcgtcccccggttgaactcacaagcatgaccagcccgtggccttttgccatgtggggaattgacttgattggggccttgccaacaagaaaggctgggataaagtacgcagtagtggcaatagactactacaccaagtcggtagaggctgaggcactagttagcatcaccgctaagcaagtggtgtccttcatcaataaattcctgatatgtagatttaaagtgccttacaggatcatcactgacaatgggacccaatttgaaggagacttattgagttcttactgcgcagagaggggtattgagaggggattcttggcggtagtgcacccacaagctaacgggcaagttgaggcagcgaacaagattatcaagaaaaacctcaaaatgaagttggataaacttaaaggttgatgggtagatgaactatcaaatgtgctctgggtgtatagcatcacgccccgcctcaccacaggtgagacgcccttctccttggcatacagatgcaaggctatgcttcccatcgagatgaagctcaacttgttcgtgtgatgaatttcaatgagagtccaacaaaaaagccatagtgaaaaacttggacctttggaaagaaaggagggaacgtacccaaaatgaggttggcagtgtatcaacaaagggcgagtgcgggtaactgtaaattttgagtagtct

SEQ ID NO: 197585 - DNA, 1103 bp, Cannabis indica
agcaccacaactacaaataggttatggtatatattctctaatttgatcctaaagagatttgaggcgtgtgaagtaagttgtgagagtatttgatccctgtgttaaattctgcacaatcttctgagcctcaaaaatccttggggcattcctttcattgaaccgatcgtgtaactcttcccagatttcaacagcattgtcatggtacatgatgctgcctgcaatctcacctgatttagcatgaagaatccaggagatcactatgttgttacatctacaccaagcatcatactcctcttgatcttcatcaggttggcagctttccattcacgaacttcattttgttttgagcaaccaatccaatcatcaccgattccctccatgtgctgtaattctcacttcctgtgagaatctttgaaactaaaatatatagctctaggattatcaccattgcaaaggaagtaatgatttgagaggtcgttcacattcgtcgacttcgagttctcaccaaaaacagagaattgatttgaatcaccatcatctcgagaacttcaggtttatactcttcatcatcgcgccatgaataatcagaaaagtgaaagaaggagaagaatagcagagaataaatgatcaacaccacactttaatggtggcttaaataccatatcagcttgaacaccgttagagaaaaatagagaggaaagagagaaagaagaagagaatgaatcaatggcggatttttttttttcatttcttcaaacagcacaataagtgtggcttttatacaacaactgaagttagttacaatcctaagtaacttaactagcacaaagtgacagctcacactctaacagctaacaactcctaatcgtaaactaactaaccaattcactgccttgatacccttttactacctaatcggtagctgaagtatttttgaaggaagtggttcaactccatggtattttgaagtctatcatattcaataggggtacagtttaatgagttacttctcgtaagaactattcaagctctagggctctgcactccgccttagcaccgcttatcatccatagatggatggttaagcaaaagtggtgaaatgt

SEQ ID NO: 197586 - DNA, 691 bp, Cannabis indica
tattatacaccaaaccaaagagagcataattaagagccaaccattttcacagtttcagggggcggtaataatatcctatgtactgtacaattcttgtacggtacgtttgctgacgtgtcatgtttaggtgggacacacttccacgtaatactctttatttaccaattctacccctaacctttaatattattaagtgcttttccactattccatataattataatagtctctttatttctctcacataagtcccaacaaacaaacaaacaacctagagacactatacataccattctcactcctcatcttcatgcaatctgacatcatttttcacccacaacaaaaaaaaataatatcataataattaatttattatttttggggtaacatttgaatttaatggttaacactatactttaattatttgagtcaactttatataaatggaaacttctatagttcagttaattaatgattatattatcaaatccttaccaaaaaaaaatacatgttaaccaaatatgagaaaataacagtttattagcaaataatttttatacaacattattataatgtatctagaatttttattttgtggaaacttataaatttaatctttttatatgatgatgtatgtagtaattatttaagatattatattataaattttaaaaaaatcaaaataattaat

SEQ ID NO: 197587 - DNA, 1341 bp, Cannabis indica
tgtctaaacttgctaagcattcaggacagttaatgtcctcactctttttggatcagggatcaagtgagtctaatcaggtagaattattgggattaaattcacttaacccctgtcaagtcagtagattcatcttaatgcttaccagttgaatctaaagaaaattgttattagctataatagttagctttggcaccaacttaaagagagcctcatcaacacctataaatacatgtgcctcaactctctcaaatgatctccaaggctcatacttcagaattcatagtcaagtttagagaaagagtccaagatcacaatgactgtgtgtgtggaggaatgtaatgggagtgtcactcttgaagtaatttctttcagtgtaatatatttctttataattgttcactgtgctgagttgtaatcttggatatatctgattgttactactgattattcttaatcaataaagatacatgattcattcattctcgagctaagttaattctgcctagtttcatctagttccgttttgattttttgatcggttctaatctgaatttttaatcaataaaaactattttggtatatttctaaatatgcctatcaacctgatttgtttcaaggcaaacacatatttgtacttttttttatatcaaaatacaattaaggtgccacatattatcaaagggaaatattattttggaacttgtattttgcaaaaattatcgattgaatcttctgttttgttaaatgataatttggaccttatatttttcaaaataatataaataatactctactcaatttttgtcaaaataaaatttaataataattcgacttgaatgtgttatgccaaactgtgcatctgtttgtactagaatataatttcaagttgactatattaaaaaaataatgaaaactgaattaagattgactatatatttgagactaaaactaaatttaataaataaattttatcaaacatctttcaaataattaaatttaagttttgaaacttcaataactaaaagcaatttggtctatttatataattttattgattaaatatgagttaagggcactaatctatattttgataaaacaaggataccatatgaacattattaaaataaatatagtaccaagtttgtatttcaataaagttgaggctactaattggacatttacctttattttaactcttttttttagtgtatacactacctatgaaagtgattctatcgaattaaaatatctcaaattctcaagtttcttcaatcaatatatatgtggaacatttttcatttatttatatacatataggttagggtaattatatggtaggtc

SEQ ID NO: 197588 - DNA, 1999 bp, Cannabis indica
gtaatttattattaataataacattaacgttaatttattattgtgcagtttattatttatatttatagcttagtttgtactaacttttttttttatttttcttttgtcttttatttgaacataaacttttagaagtataaaataaaataaatctcttttctatcctatacccaactttctcccaaagaaaacataataaaataaatcttatccccaacttacaaaaaaaaaaaaaaaaaaatactactaattaatacggctagttatttggcttaaaaaataatactattgcaacatactttaaatatgatcattttaaaatataaagaaacataagtaagaatatttttttttaatccagtaatcaaaaataccatcattttatattcattaaaatgtaccaacttttgtgggtgagttacccaatatacattcacactccacttaagtctagcacatactttttattaacttaaggggtataatagagacatcatttattaaagtgggtatatcttaaaaaatataaaaataaaagtaaaaaattaaaatatataaagtgatgtgggtatacaatgtaatttcctctatattttctcgcctacttcaaaatcaaagcaactatttaattgcttactataccaattatatactcattagttacattttaacaatgtatacaaataattataaaaataaaaattttataaacaaataacctattagtattactttaatttaccaattaaaatatcgtcggtcaccataaaaaaaattccaacattagaacatttttattggcattttaagctactaaaaagtttttttcttcaataaagtaaggtagttaataaataaatgaatcatttttttactgtttatgagaaagtaacattgtaattgtttcattttaggtatcagaagcaactaaatagttcattttcattacagtgacgatggaaaaatatgtatatatttttacatgtcaaataaattaccacattcaaaagtaatttattttctatttagttaaccaaaaagtaacaaatttttttttacagtttaaccaaatataatatgagatcaaatttatgggttattattttgctattttatttaaaagttactatatattaactaattagtttctacattaaagtaatgttacttaaataatcacaacaaaaaagtaatggtatattacaatgtaaagatttacgttttgaaggtaattatttcaaaaagatgatctaaaaaaatttataaataaaagtcacactgatttgtattttaccatcgtataattgtaatcattttattggtatgtataaaaaaaatttctaactttcgtttatgaactggaggagaattggtatataaaactagagagtgaacaaattgtggggttaggcccgaagtagaatgtcagcttaccacatacggatataattatggtaaagactgagacaaattcctctgtgattttcaactagctgatcagaatggtgtgggagtcggaggaagcattgtcggacttttcatcgccggtatgaaacagagtgggagtcgtaagactcatcgccattggtggagaggtaagaataagcgtactcttggtccgaggcgccattttcgttgtcactagatctcatcctcttcttcttggtgatcatctgactctgactcctgtgcttcttggtgatttttcttccttttcttggtcatacccatcttcatcttggtcttctgacccatcgtccgattcatcttctacattgaccacagtgaatctaagaacatcccaggtctaattaagtttcccgctaacacctcatttttgttttgcatgctcatccacactctagtctgaaacaccccttctcgcggcaattcccttacagataattggtctgtgatgacctaataagaaagtagtcatatgagttggttgtattacaccatgatcatgcatgaaatcgcaaatacttttattggtgca

SEQ ID NO: 197589 - DNA, 563 bp, Cannabis indica
aaaaaaaatattattaaaagaagataaatgttattagtcatgaagcacaatcaatagtttttgtacttcgttgtgccgtgttatgttttatttagttaatttgtttgtgtaagttgttatattaaaggattcattgattttaggagtactcggataaattttctatttttacataattttaatttcttttattaaaagtagagtttattttcatctttgatacatttttaccaatattatttgcactgggtatttttttttttttgtaccatattattcagttaaatatggtagcattaatggagtttcaaaatcatggtactgttgaattggtactctttactctttattctatcgattctcattgtttagttttgaaaccgatttttttcaaagaattatactttttataatgaattaggatctttattaaaatatattgttagtttgttttctaattttttggaagaatccctaattcatgtttaactaagcatgaattagatatgctccacttagtgaggatagtaaactcgcttggacaaatacttaattttaatttt

SEQ ID NO: 197590 - DNA, 596 bp, Cannabis indica
taagatgaatgagctactcctccgaatgttaaacgggataaggacgggaatcatactccctgccccgacgggaactcggttaatattttatttatttctagtaatattttataatttataatttgtgtttgtattttttttagtatattagtattctttttatgaattttaagttgtgttttggataataataaatttattgaataaaaattaatgtgtaatattttaatttttatgtagtttaatattttaatatatttgaatttttattataagcttaattgttttttattaagggatttctgaccctgttcctgctcctattaggggattttccgtcccatctccaatggaaaataagcggggacgggaattaaaattcttaacggaaatggggactggaggagcactctctgccaattctccaccccgtgtgcatctctatgaatagtaatgtgaaatattaccctgtttgttttaaaggtttaattttagaatgttattctcttagtaatataactattcttgaagaggataaggttgacaccttaaaaaaggtgggcttgacttattccttccattatattaatttaaat

SEQ ID NO: 197591 - DNA, 700 bp, Cannabis indica
tttttgttatattattttttataggtaaatgagataagattatattacttccaaaacaatactatttacaaactaattagcacccaacaacaggcccaataatttaattatttacatgaaacaaaccactctacgtctctttttgtttagcctttgtttttctaacactactgaatctatttttgatattgtattttactgtttggatacatgaatcaaaagtttgtattctataattcctataacaatcatttctaatcctccaaatttgatacacaagacctattaccatcgctgcaaaaataatattatttattttttaacacaatatataatgttaaattaaaataagtgtaagatatataatatattatatattaatataaaatgtaacatgtataacatatgttatcactgatcaaaagactgaatattattaaatgagaatagtgtatttatacagagattaagaaccagagaatcattatatcaagctaaagcctaacagaaaaaaaaataaatcactattttaatcataacaaactctaacagaatgactaatctaaccatgacaaattcataagggggctctaatactctccctcaagatgaggtgtagagattgatgacactaatcttagacaaaagaaaatcgaattgagatggaaagagtgctttggtcatgatgtctgtagtacaa

SEQ ID NO: 197592 - DNA, 1851 bp, Cannabis indica
tatcataagtggaattgtcatttgatgattgatcctgcatagcactgtcattattaacatgtgggaaatcaaaatcagtaacataagtttgagagatgtgagaagagggtaacaccatgttggcaaaaggatctataccaatgttgtcattatttaatttatgaaaaggataaacattttcatggaaaacaacattcctagaaataagaaactgttttgtgttaagatcataaagtttatatccttttatgccaagagggtatccaagaaaaacacatgtatgtgctctaggatcaaatttagttctgtgcgccttgagagtggaggcaaatgcaagagaaccaaagtttcttagttgtgtatagtcaggagtagtaccaaataggatttcatatggagttttatttgtcaaattcggggtaggagtacgatttataaggaacacagcagttaatatacaatctgtccaaaatgtaattggcaagttggcttgaaaataaatggctctagcaacattcaagaggtgctggtgttttctttcagcaacggcattttgttcaggagtttccacacaagtaaattcatgcaagataccaaatttgttgaacatatcggtgacctttaattcgggagcattgtctgatctgaaacctttaaaaacacatttaaattgagtttgtatgtatgacagaaattggggaacaatgtaagaaacatcagattttgttttaagagataaacccaagtaaatctagagtggtcatcaacaagagtaagaaaatacttgtgattagaatgagatggaatatgataagggccccagatgtcacaatgtataaggtcaaaagtatgagcaataaagtgattattattagaaaaggaagcttctttgcttagccttaggacagacataacaaggtttatcagaatgtaaagactcaatgttatatcctagatctttactgagcaaagcaagacgtttcttggagggatgcccaagtcttgaatgccatgtatccacggtgacagtaagaacagcagctgaaccagaaataggatccaagacgtataggccatcagtgtttttacctttgccaatcaccctcctgtggaggttgtcctgtacatagaaattgtcagcaagacatttaacagtagcatggttattttcagttaaacaacttactgaaattatattatatttgaaatttggtacgtaaagtacattggtaagaataagttgatcatttatggcaatagtcccactttgaaaaacagataagtctcattgttaggaaggatgagtttaattttagatatatgataaatggtttgaaataacttggcattgttgcaaatatgtctagtggctccagaatctataatccaagattcatttgaaggaggcgtagaatttagagaaagaatgatacatgtagcaccattagaagtgctaggttttgagtttgtcataccggtgtgttggttggcaagtaaattcaagagttgctagtattgaacagaattcagttgaggaagaagagtggtgctgtcatcacagttctcctttgaatcttcattagtttgaacttgatttgttgctgcttctttggattgattcgacttatacccaggtggatagccatggattttatagcacctctccatagtatgtccaagaatattgcaatgtgtacagaatggcctgtttcttttaggaggatgtgtttttggactttgagggtctggttttcttgctgcattcttatcattttggaaggcaaatgccatatgagaatcagtacctcctgtagtatttcctttctgatgttcttcttgagaaacaagatg

SEQ ID NO: 197593 - DNA, 2265 bp, Cannabis indica
ctatctttacttacagcgttgccttagcaaatgacattcatagatgactaagcattggaagtttttgcaatatgagaagatgaccaagtaagggaggtgagtttcgaaaggcattgccattttgagttttcaagctcttaaaattccaaatttcaagtctagttagagtggttggaggaagagactcctttccgaattcctccatattttttataattgatcaatttgtacatttcaagtggtgaagcctgaaaccaaagaaaacaagcgtaattctattctaaaaactaacatttaagaaactagtgcctatcacgtagttatacgatgcttcaccatttctccaaatcgcatattcacgaacattcacttctcctatcacagcgtagtgattccttagttcacattttttaatcttcacaattcttagcttgttaagtctttctatcacattgtctctttcttttctttctttaattagattgaatatttttttttctcatttctttctttgaagaaacaaattgtgaaattaattcataaaataaaacagatagaaaatgaaatacattaaactttttatttttgaaatacacagtgaaaaatattgtaataccctacttgtttaaacgcactacaatattttttttaattattgtgataatcattgctatctaataggtttagtgtaaaatcttgtttaattaaaagtttttaaaataatattaacttcactaaataaacataaatattattgaaagtttacaaatcctaagatctcaaatttattttttaaatacaagaaaatacatatacaaaatttgagcccatgccatcctgaaaatctaaacactctaggtctaaccatccagatctgtacaatcttcatcgagctctagattcactgttggtcagcatttgccttgcctttacctacatatggaaaatatatttgtgagacgacaaactcagtaaaaaaaagcataacgcataaacataaaactgacttgtaattaggcgtccatatacctaattaccatgagtctaaaaacccgcatccaacgcgtacaactaaatctcggacgttcttaactaagtacaactaaccataatacctcatccactcagtactctaggtgtactagtgtcagtagcattagttcgtactttttgtaaacctagcatatatatgctggtatctcagtgcaactttaagtacacattaccaataccctaatatgttaatttgatggcaactgaaacatgcatgttaacacatgtacatatgtgcatctattatactaatcttacctcaacttcgcaatcaggtgtgccggttaatctgagtaaaacctgtcgctcgacgattagtggctctaagtcacaattacgtaaaactgttaagtgtctcgctaaaatactttcggggacttaaattcaaaactaaaagtttttctatcgataaatagcgtggcaatatcctaaatatcgagaaaatataaaaatcgaggtactcgaaaatcaccccaactggttactcaagtccccaaacggtgcactgtttcctggagtcttgtttggggaaacggtggaccgcttcatagcaaaaaaacacaaactttgagtattctctctcaattctactccaaactttactaaaccatccaaaacacctaattaagacataacaaacatcttcaactaatagtagtaccaaaaatctactgaaatgaaaatcaccagggttgagcaagctttgagttctaaaactcaagcttgctcaaaacaagctacaactactacaaatttctcaaaaccaacacgaacaatcataactcataccccaaaactcaattctaacagcctcaaatcctaatagaacagaattctcaaacttatgcatcaaaaccaagcttttcttacaaaaatcaaagagaatagagagctaggttttaccatggattagctaacacttcttcctcaaaacctagctgaaaccttgcttgaaaatggaggaattcgactcgaagtttatagttttcttggtttttttttggccaaacaagaaagagaaggagagggtttggagagagaaacagttttggcttaaaatgtaatgtttatcttgtgttattctaataatacttcagcataaaaacttatcctttttcctagaaattccactaagtggaattaaaatcaaacttatggctaactaccaaaatgcctatttacttcacctttaagtaatcttataactaggag

SEQ ID NO: 197594 - DNA, 1202 bp, Cannabis indica
agcaaaaaaaaaaaaaaattagtattaacctgcttaagactaaacccgcacaactcaacccaaccatctttctttctatttttctatgtcttctttttctccgcactgttaacaatcgaattctcacagctccgtcgctatggcggaggccttgattaagcttgtcgattctctctcgttcggcaaaaacgacaagtccttctcgtccatcgatctacttcacaagcttcgttccgaagatgactcgatcagaccaggccttgaaaagctctttctgattctcaaatgcggtgtcgaccccgccggagacgaagctaagctagggttccaatcttggaacgagtctcagattcaagaagtttgtgctctagcgtctgcgatcgcttttgcttctcgatctctttccggtactttttcttcgttttctttactctgtcaagaactgattccgaatgtttactttccttgattacgaaacagaattcgaacaggttttttttttattttcgaaactcttgagctatttctaaagctgcgacttccgagtttagaagtacttagttactagttcagttttttttttgctggaaagttacttgtttagttagtgtgtgaagtattaatactactgttctcttgatctttttatatatatattttttcattgttgaaaattaactgctatgattgtgaaattcaaaatgggcggtgatggaattgtacacttactacatttgaatgtcattttgtgaatagtggagcaagtggaaccagttgttctcgcgattgtacagacatcagtggaactagctgtttgctatttggaaagatcagaattcagcagtgatgatttaagtattcaggtttgtgacttccaaagcacctttttattcttcaaattgcatgtctgtacactttgaaatggaagattgttagaagtgcgtctttttctttagtttattattttttattattttcccaatgaataatgaatgtttgattgtgctctgtctatactgggcaagaggctttgttcgtggtcatgtttgtataaattttttattggatgtgttgaaatagctcaactcttaagctggccataaatcatgctgaaacgagacaaagccagagtctctgactcaaagtagaactgtataacctatagccacccttcatcatctctgtggttttttttttttttt

SEQ ID NO: 197595 - DNA, 1660 bp, Cannabis indica
gcggatggagaatttaaagtaattggaggtgtaatttttcttttttgtaaggaagggagtaaaaataaacttaaaaatgaaaaaaaaataatattttttataggaattgaaccattgattttatcttttatgtaatctaatttaaccaaaatattaaagctcatattatatttataaatattactttttattataaatacatatcgtaactaattaaattgtatatatatattttctttttctgattttatttttcagaagcgcctcgcctacacgtgagtccacccctaaacacaaggatgcggaaacaagttctacctcctcaaatcaaaataacacatagacacagtattttcagcaagacggtgcactgtctcgctaattgcttagcaatcccaaaaaaagaaagtctgcctctttggctaagttatgcactaagaaattgcaatgtcaaccaatttagtgaaatcccttttaagtttgaggaacctagcccaagatgcctgcaaagtaacatcaccgatcaggtcttcttttgcataaaaagaccaaaatattagtacaaaatttgactaataatgatgaaacaccaaaattttcacagcacaagttgatgctttgagtttttggcatggcatagaggagcaagccacactttgtaatgggaagtaattttttttttccttataatttgagtaattcaaaacttatatgaatttagttaaaaatctgaaattgtttcaccttatatattatttaacgtaagagactaaacattgctactagtaaatagttacccaatggaacggaggtgaccttgcaatatctttaattgagaaaaacgttacaagtcgcaaaactgaaaaagtaatttccaaatcccaaaggactgaaaggagacgtaccaatattgtggaactggaaatatgttattcaaaacagtactgtattatatctcatctcagccacactctctctcaagtctcaaacttaactttttctcactctttatcatacctttttatttttttatacccacaaaataaaaaaatttatttttgtcatggtattatttttatttttgtccctataaatttataatttatatttttttttttacatattttcatttttattctcacataataatttattcatattctcaaaaaaattatatttttatttccagtatatggtgcattgtagcacacggcatacactcttttttttttaataaatgtgtatatatatttatattattaattgtatttataaaattacaatgcatttttttaaaagtggtacactgatgtacctttactagtttcgtcatctaagagactttttagtctatttttttatagtcgtgcacattacagttatttaagacatcctataaaatttttaaaaatttgaaaaaatttaacatcgcgaaaaataatgtacctctttaaaagtggcgcactgatgtactgctacctgtttcggcattcaagatattttttagtcttttttttttcataatcgtgtatattatatagttattaagacatcttataaaatttcaaaaaaatcaaaaaaatttaacacgttgattataaagtttaaactgtaagtttcacatgtgactctttatttggaggggtgcattttagttaat

SEQ ID NO: 197596 - DNA, 1462 bp, Cannabis indica
gtgctaatacaattggttggggattactatatatcaatatacatatatttgatgtttttataaattaagcactacattaaaaatatgtattgattcactttttatctgtttcggcatttaaattaatagtttagtctaatttattttatattcgtatacgttataattatttaagaaattcctcaagatttttaaaaattgaataatttacaatataaaaaagtaatgtttaaacagtttatttcacacacgtataacagaaatagttataaactgtttgaattatatttttagagtgataaattttttcaaatttctcaacagactataacttatatttataaaaaatatatattaaaaaattctttcaaataccgaaacacatgttattgtattcgtacactcattttttttttctatatatacttatatataattaattaaaactagtaaataggaaaaaaaaagttaatggtagtgatgagagaataacggatcttagaccttaattatagaacatcttccatgtgatttggtataatatgaagttagaagattcttcattgtcaccaaagatagtgctttacttaatttgttttatttatttatttttatagtaattatattctttcatttagcaccaaacaattaatcaaagttaatataaaattttgtttcattcaaaagcaagaattcacctaggttagacctaccctacatgatccatatattccataaatttattgttaattttatgattttttttgtagctatatattatatatataatatattcttcttgattccctatttttttcccataaaaatcattataacgtgtactcttaaattaaagaaaaggagttcaaaatatactaataacttacaaaaaacgttccttgtagacatctattttaattaatatgcactcaaatatatgtaggcatttttttgttaaagaaaaataataatatgtaagcattttatttatatatataattcaattcaaatattttattattttttatttgtatttacatacaatttttgtatttttgtttattttttttcaaaaaaacggcttcaataaaatctcaagagaaaacccactaaaaaaacttggaattattttattttaggtcaatatatattttgtagtaaaaataataaaaatatatttatatacataataagttatctttaccatggtggagactttgtattgtgttgtagataaaagattcaaacccatttctatacaattttagtgcattatatctttcttttcttgttttttttttgttaatttttttttatctttttttactctatttttttagtctttgtgtatttttttacttatattttttcacctttattttagttttctttcttatttacttcttaataattaacaatacagaaaattagacaatcgcacatataatattaatctcttttg

SEQ ID NO: 197597 - DNA, 1169 bp, Cannabis indica
aaaaaaattgctaattagcctttgccttacatatacaaggaactaaactaattacactttcttacttttttttcccaaaactatgtatttagttcattttctggtactaaacgtattttcactggaatttgtgaagtattattgctccttttcttcacccactggactaatatgattttatatatttatatccatacttactatagtaaatatatatacatattttatattaacaatagttttaaattattaattttaaaaaataataaaagaaatatatattaatttacttttcctattactataaaatttatattttttaaaatagaatatatataaccttatgaacggttacatttttttataatcactataattattacatttttttacctgtaataaataaattagtaataagtaaagaaaataagattaaattaattaaaatatttaatagatattttttagtaattagtatttatttataaataattttatttttatatttaagtctctacaataattttttttttaaaagtcaaatcatttgactataatatttgcaataaaaaccttatttttaaacaaaaatgagacttttatcccttctaaaatatataattaatttttttgaaaaataattaattaaaatacaaacaaatataaatattaaaacaacaaaaaaaaaaaatattatttaaggagttgaatgatgttgcagtaaaaataaaaatacaaggatgctgctatacaaaacaaagctaatttataattactttagctaaggcggtaatctcaatcacaatctcaatcttttgaatctctacaagttatattgagcccctacatgcctagtttgctctctaacatatttttaaatttctctctttagtattaatagcggacaggtctaaaagagaaataacttcttcttcttcttcttcttcttcttcttctttgaataattagtattttttttctccttaagctttcgacactacctaatcttgcctcctaaaatatgcggcttgttaaaatttcttcctaaaatataacagttacgtaatcatgtccttcaattagattctgtttcttttaccattaaataattagtatttttacccctaactttgactaatctaaattctctcatttattagaaaaaaatt

SEQ ID NO: 197598 - DNA, 1953 bp, Cannabis indica
ggatggacccatctttctctcgatgggggcttcatcccaatcaacgcgtaagggatcagaatcttcttctgaccctattgcaaagaaggccaaatctttggtaccagagcttggggtgactggagtaccgtcaaccgatccatcattgccacaaccaccacaactgcaccagctgccacaacaacaacaacaacaacaacaccaacaacaacaacaataaccacaacaacaacatcaacctcaacaatagcaacaaccaccataacaacaacaacaacatttgccacacccgacacctgggtaatcgtccctgccacgccaacagcagaagtctctatctcctccccagttgcagatagtggcttctcaatatactccacctcaacccatctcgagaggtattgggctccttcatttggattctctttccctatgatgccacccgttggccaagagtacctgacgaaggctgccattttgaggaagagccataagcgagaataggttaccctctagaagagggccacttgactttcttccattaagacgactgagattgtagaagggactcgtcggcctttaccttaggccctctgttagattttcctatggtgagtcaatatctggaacctatattgggtgaaagatcgccccttatgcagctgaaatgataaacaacataggtcgcagtgtgagcaagctaacttcagagaaatgggctgtaagtaacagtgttgatctgtttactctgtcagtagctaccaaacaacaagctacaagggtaagctctaacttcttgatttttcctttacttgcgatatgatctttgtgtccgggatgactttggtaactcattcttatctttgtttctttagctggcattattcacagagagggccgctaaagaagcggggaatgtaaccatgtagctaggccaactccgcaccaatgtccaggacttgactactgagaacaaggctttacgtaccagagctgagtaggctaaaacccaggtagcctctggcacccacatgtctcgtgaagagtggaaagccaagttgattaccgaggaagagaaatggtatgccaagtacctgaaaaagtattcggattataaggcccaattgagcaggaggctgtaaggtcggtagaataggttgagaagaaggtacactccctctgggaggaattaaccaaagacataaaggagaaggatatcgctgaggcccgcgtggtggacaagtccaagagaattaatgctcaaatttgacagattaatagcctccaggaagacatgcgcaagaaggactctcgcatcaaggacctcgaagacgaagtgaaggaggggaagaagcaagtagttgtctgggaagtcaagtgcgacaactagctttactaaggagcccgtaacactagtaaccgtcgttaagagaccaacaacaggctgtagaagcaagttaatcgaagccccttaaacaatgtaaaggcatacattactttagtttccatgcataagatgagggagactactccaaaactagttcttgatgcggctaaggcagatgctagggtagagagcttggagatgccttatgtcatagtccttcacagattgtggtcagaggatccttccatactctaacatattgataagactgagatggaggaggttaccaggaaagtactttccatgagtcgtggcaaatacctcgaggagttcccacttatggtcgacatcgacaatgacaagggaattagtgttgtggccttgagctctcaagaatatgtagaaactgaggtatcttttgcccaggccgacgagggacctactcaagatgctgctgaggctgacctagagccagaggagcaatttgatgttccagccccaactgtgttagaagcgcctttaccctcccccagactattgaggactcttttttttatttttttttt

SEQ ID NO: 197599 - DNA, 943 bp, Cannabis indica
gtgatttcaaatcgtccttactccttcgaggcttagaactatttttgaacaattctgaggtaaaagaaaatattgggaagtcagttgtgtatggtgctagtatggaccctcttttctttgacaaaattattgatatgtctggatttcaaaaaataaattttcctttcaaatatcttagaatgacaatttgctcaaaaaagatatcgaaatctgattgtgagggtcttgttgagaagatgacagctagaatcaaaattagaagttctatgaatcattttcttatgttggagtaatggttcttatcaagtttgttttattgtccattaattcttataggtcctaaattgttatcttgcctaaatttatggtgcaaaagattattcagattttttgagcttatctttagaagggtgtggagatgtgtaatggttctgaaaatattgctgacctttgaaaacctaagaaagaaaggggtttgggtttcaaagatatagtcttatggcatcaatgtgctattggtaagcatgtgggctatttcttcaaaggataatctttaggtgaaatgggtcaattgaggtatgtatctcaaaaatcaaaattggtgggagtaccaaatctctttggaggctagttggcattggaaaagagttgttcaagttaaggaaatgatcaatttaatcttctctcaagatcagaacttctaaaaatattaatttttcataattgatttgtgttttgagatgcctcaaagagacgtttcaagatgacattatgatgacatttgggacagattttatactccagaacacaagttcataagctggttagctttgaaaagtagatttttaatatataacagactttgtaggtttggttatataccaagtcttcaatgtgtttattgtgtagaattgaggtaaagaaacattcttatctcttcttt

SEQ ID NO: 197600 - DNA, 955 bp, Cannabis indica
tggatttgttgtgttggggttgaagtttgtggtccatgataatggaacacagggaatataggaataaatgtgcacagcttcttgagaatgtataatttaggttcaaaaggaaataggaaagaaatatttgagaatcggaatacctgtctctgaattggaaaatggctgttcattattcattctgttttttgagccatttgtccattaaaataaattagaaacttaagtgtaagtaatgtgtgaatgcgaaacaatgcaagaagaattggattattaattataggttttccaaaagttaaaataggatttgccaactctcaaataaagttgtgaaggaaatatgcatcgaatcattttctcaattccctttcaacctttgcgtttgtcatttaaattatgaaaaaagaatttggattgttcaaacactttttctttttctatttccaatgtaactatacatgttcattctatgtaaatcagcaatatcataactcactccaactaatcaaaagctgcgttgatgatcctagtttttctcttggttcttaggggcttaaagcaactttaacgagcaaactcaaatttagtgttacatcaacatcaaaatagtactgttcttaatttttgtcctcgtgacgtggcatgcttacgtggacagaactagtgccacatggcagtatagctcactaaaggaaagctaagtcagcactcgagcaaacgaagaccccggcactcaaacggaaaccaagtgacagaccagctccctctcaggaactggccagccagcccagggacaacaccatggctggccagccaaggggtgctctggaggcctcactggacactcctacacgtgaccaggagcagtgggctacaaattgggccccaaaagcccaacagaatggctaaataatacctagaatcaatggcattttgatctttcgtaaatatctaa

SEQ ID NO: 197601 - DNA, 703 bp, Cannabis indica
aaattttagagggttgttattttttttgtgtttttttactctataattataattgtacaaacatcgttctatatcgtaagttatcatgaattaaatcaagatttatatcgctatacttaatttatatgtcgaaactgtattttgtacttcattttcagtaaatgtgtttttgtcgataaaatgtcacaaaaatatcaaaatacattgtgaaaataccaacataacaaattccacatacgtcgagatcaatgtcggtaaacaacgcaaaactcttactaacgagtcatgtttctatttgtagtaattcatcgcatcatatattgccaaatgtcgtaaaatgtcacaaaatatccctgattgcacactacatgtcaaacacatgtacaattcaacatttaatggtaattaatttttgacatttattatcttgccttcccaactactaatatatgtcgataacaatgtcggtaaacgtcctaaaatgtcgcgaaaagactaggaccatttgcatatcttattgtcgcaatatgtcgctgaatgtcgcataacgtcataagatgtcagctaattaatttttgacatctattatcctacattcccaaccaccattttggtctataaaggaaaatttctacttcataagttacatacttttcttatgccttaatcctggagtgttattctcttataaattctaaatgtc

SEQ ID NO: 197602 - DNA, 780 bp, Cannabis indica
aaaaaaaattcatctgatgggcacgtgactggaaatagttagatgtccaataaggtttcaacctcagtagtttaatctcagcgcacgtggtttgattattaggttacttactcttttttcgcaatgagcgcgtgcgcgtgtgaggctttatggaagagacagaaatgaaatgagagggtgatttgggttggtgccttttgttctggccccactcaaatttactgtgggctgtcgttttacttgggatcctcttctcatgacagtttaactaaatgatgtcgtttcattgtctttgtcttagaaaacgacagccataatcgtactcgttgaaaaaactatttttttgccataaccaggcgtcaatattccaattcatttaattatgttatatttgatataataattttttttctcaacagactttcaataatgatgttcttatttataattatttttattttattattaaaaattaagtgaataatagtttatgctggtgtcgttttgttagtgggttgtgtttgattttgaggcatgtggatgtggagaagaaacaaagaaaagcgtagctgtttccttagacataaataagcatttctaatctgtcaacggcgcatttgaaacaatgagttgttgtgcccttggtttatgacctaaagaaaagtcatggtttcactttcttccatattttttttagtcaaagtatttattattttcatagtataatcaactaagaaaagaataaaggggtcttatgtaatcccacactttattttgagg

SEQ ID NO: 197603 - DNA, 1404 bp, Cannabis indica
tcatatgaattcaaaagacttccaaagttttgagcctataaatacaaattcaaaaatatccaatcaatacattaaccacacacacaaagaaaacaaataaataaacaaaaaaggggaggaggtagattcaaacataatttctaactacaaataattgaattgtcaaacaaacaatatacctgctgataaatgatactcataataccagaacgtagcttcagcctaagcttggtaaggtgaaaggtatattgtgtatccaataaggatctgcaaaaaattaagtccaacaaattttaaattactctcatcaagacaatttcaaatattcactgccaatatattatggatgtcatcttacaaatagaaataaaacaaaaggcaagttgtaaagtgaacaattgagaatgatagttagaaataaagctaagagacaaaaatagatttcagaaaggaaaacaaattgtataacatgcaatgcactgctacaacttagaaaagattagcagtgcttttaatgagaagctttacttctatttctggactaattgaattagttctccacattttcaaggttaaaaacaaagaatttcctttagagccatagaaaaactgttacttaaagattgatgtgagacccaacgacagtgcaagaacatagccgtccaactgtcctgaacctgagattgaaaatagaattagaggcaaaaaagttgttggtatttttaacatataagttgataatgatctgtaggtatacaatgatatcatataaatataacaagggcacaagtctgaaagctttgttaatgccatataattgctgattgtaatgtcaagatgtgtgagagttgcagcaaaaatgcctaacaactagaccagtcaattaccaacaaaaatgcatatgtgagcacagcgcatcagaaaagaagttgctgaaaccaatagagctttaaacacttttctagaagatttaataataacaacttgatagtattaataagggttacaaaccttgttgaagaaatttaattagcttattaagaagcattggtccagcaaacccaacacaatcgttaagcacctgcaaaaccagcattatttagcatccggcaaaagttgatgggttgtgtaatattctattcccctttcttctttttcatgacaaagtttgctttattttgtgttagttttgtaaaactaattatactagacgaccatcaacctacacagaggaagcatgcaactcaaccttagtattttgagatttcatacatgtaaatggttctataacttttttggcataagacgttaggaagctaaatttggtagagtgagaaaatagagaattgcagggaatctataaaacatttacaacaagaagtgagagataggcgaaccaatata

SEQ ID NO: 197604 - DNA, 688 bp, Cannabis indica
gctagatttttttagattttttgcaatgagctagatttttcgatttttttgttaatttcctttccaattttcttgaagtatctcggtggatggtgagttagcttagattgagaattttttatctttttttattgatttgtattaaactctggttctggtcaataagagtttaatttacaaaaaaaaaaaaaaaacttctcaaaaaaattactaattaaaagattatattattcttacaaaaaaaaaattctatttatggattaactttgcgtttatttgtcgtatttttgtactaatatattcatattttttacatgttcattgtatttaaactcatatttttgatgttgtatttaaattcatattttttgtaacgtgtgaggctcaatgtcatattttctcgtaatataaaataataatttttatctttgatgaattattaaagtatatacaatatttttttttttaagaaaagtatatgtaattttggatgtttggtataattagaaatattttcatataaatattttcatagaaatattttgttaaacatgtggtttttttacgtgggttaaataattgtttgaactattatttgagtaacgtaaattattataatttttttgaaaattcacagatgattttataaaactacaatatacgcaatcatgaaaaaaaaaatagacta

SEQ ID NO: 197605 - DNA, 1959 bp, Cannabis indica
tagaaaatgtcccacgtttttgaatgggcgggaaacaccattttcagtatttgaaggtacaaattgtttagattttatgcaatttgcattcattcatcagcatcaattcttgttcttctaattcatttctctcacccatgatctcccaataccttttcaatttttttttcttttcttgattaccttcactgaaacccctttctttcttctttcttccttcgttcacattatcaatttttcaggtattcttgctttgttattacttttattagtaatttattgatggttttatcactttctcactctaagtttgtaattgattatttttttctaattgggtattatttaggaagaaaagttgagaagaaacccctccgtattgagctcatcgaacagataaatacggacccttgggatcttccaagtaagatttctttatgtatatctttcttttgtttggattaattttagcatgtataaatgtgtatataacttgtatatataatagagagtgagagagataaagctagagcgtactattactaggtcatgtgagagctaagaacaagacaaacctcttaataacctaaatattgctagactaaagaatacaaattaatatcgtaaataaaagatttatgaatagatcaaatattattatatatttggttatgattccctggaagcttggattgcagatggctatgcaggtactactgttttagattagttggctattgggttctatctcgtcctttattctggtgctctgttattgttcctctgttttgtctagtgtagggccttgtgttcgtgctgtagttgtttttgtgtgtagtattagtggatgtgttcttttagttgtcgtttgggtcctggtttttagatttgtactgcttgttgtttggtcttcagtaataaaaagaaaggatttaattatttttgaatttgtgtgttagagatattttgatgttatttctagttatgagttgttcattgtattttcatcatgttttcattcgtgcttatttatatttggcactatttatacaaatgtacagacatggattatatatattaacttatttggtagaaccattctataaaccatgtgtacatgtatacttatatcccaattagagttttgtaagccgtaggtccttattaatttcattggctccaagtaatatggtatagcaacaaactacataaacctttcttcctttttattgaaccttcttaattgttatatatgctcttgtactaatattgaaaatggcatatgtggtttataccctgctttttctaagctagaataatattctataaatttagaatagtgtggtaaactcatacttgacagtgaaaaaagtgcattaataatgacttcattcctgtgctttaatagaaaatggtatagaaaaatttatatttatttttataatattacttcaaatagtactttaatattgaagtctttgctcctagctttttttcttgtcatgtcaaactcaaaaacaaaactctccctagcaagatttgaggaaagtaactacataaactaatcaagtttctgactttcaaatcaaagtaattaaagaaagttttgattgctgtgaaggattagggaacctgcaaacattatgtattaatatattttcttgtcagaactaaaattttctggttgacacaacacattattagccttccttgattttagaaatgagaattatagaggaaagtaagaaatatagcatgtatttttgcgtacataacagtttatgacaatgtgacaaaggagctttaacctctttggaacttgtggttgtagctttgtgcttgtgaggttgcgtcaaatatataacacaagcatctctcagtttcacaaagatgttaaaactccttggatttgaatttatatcaattaaattgtaatttgaaccacctgaagaaaaaaaa

SEQ ID NO: 197606 - DNA, 1416 bp, Cannabis indica
taattgatacttacctagaacattgatattggatatagtgatacttaaaatttattagatatgttacactgattgcaattagttaaaagatatttaattgtactaatagctatattaatatgtaaaaaaaatactagatactttttaatatttctcttaccaatattatgcacaatgcaattaattatctttatattcacaaagataatgttaatttatctttatacatgttacattgattattagttaagtatttcctcgatgaatgtggtgcccagtagtagagggtaataacattattaataactaaagaaaataacgcaccacacatcaatgcacacataaatgtgtgtagactaatacattggtcaaaagtgttagttatataacttgtataatagtacgtgtattgttgctacaccgtataatataatatttattagatgttaatatatacaaagtttattatatcactctcaattataaattgtttagatttcactgtataaatatttatccacaaagagtattattatttcacatcttaagatactttaacattatatagagatatgatacattttaattaattataattgttcttcatattatttattaaatcacaatatacaagatcttatattgaaatgcataacattattattattattattttgtaatgtttggtttaaagtataataaataaatatatgtagagagaaatgaattgatggttgcattgaatttactaataatttattgacgtcaaaatagtaagtagtttgatcaaatatatttatttttgatagagatcaaatatgtcttgataattagataaatactatggtttatggttgatgtgatttataaaaaaaaaatcagttttaataaaatttattcgtttttaagaagtcagtaagtagtttgttccaaaaaaaaaaaaaagtcagcaagtaatctgttaaatttaataaaaagtggtccttactatactaactatttatcaatgcaatctactaacatactatatttattcttttttgtcgtaccaaatcggtataaaatatgaattttcccttaaaaaaactattaattattaagtttcgtccgaaaatgaaatacttataataacttaatgcacctttcaaattatttaccgtcttgtactgcaaatgcactttattgtatattaaatatgtttattaaatttgactaattagtttggtgaaactaatataagtacatcatagtttatatcttgataaatcagtgctattattagtaattaatattgtgagtaattgatttgagcagggggagcctgatctatctgaatacggagatgttagtgagctcatatacgggcttgggccagaccaaactccaaccagtgtcatcataaagcctcaatttcag

SEQ ID NO: 197607 - DNA, 1459 bp, Cannabis indica
atattaaagtgttgttgttattttttttttattttttttttatattaatcacaattgtaacttatagattgacttaatatatatacctttgattagataatgagctttcaaacttctcctatttataactcagttctagtataattttaatacatattcttgaccaaataaataatggtattggtaaccctgtgtcctttgcatttctattttagatagaagcctctaattatgccaaaaacaataaagcttatacaaaaatacaatcaaagccaaagaaaaataataaacaatattatagataaatacagcatagaatgaaacaaaaggctttttctcttgtgagctaattttaaaaaacatatcattgttgtctttttactacataatgacacaagaaaacggctattgacgcatagtaatgtatacacacaaatatatatatttaataatacccacaactacactataaatatccttgttagtaatcttccattaaagcacattcccaacccatttcacatacaattaaactcttaataataataattatgaagttaaaacaatattcttatacttatctttccactattctgtgtttttatttggtttgatgagattatagtctctgcttcaagtgcaggtactcgtgggccattccaacctccaataaccctaacaagtactcctcaaggcccaggcccaaaagtatccaaattatgaaaactcagaaagaatagatcatagatgtgggccagattttggagacattccatgtaatccaggaaggtgttgtagtgtatttcaattttgtggtgacacagctgaatattgtgaaggaagttgtaagtctcaatgttgggctccacctaattagggtttttgccctaataatatatatgataattatgttaatttatgttataattaagcaagaatataagagaataaaatatttttgtgtgttatgtaatcaagttaagggagctttatgattgcaatgtaatcttctataaacatgataaataaatgagctattttttttttcaaaagaatcttggtttgattgaagacatcaataataaagaaactaagttccaaggagaagccattaatggataatatcagtccccaaatattcaagacaagcccagcccgactcttgactaggacggattaggcctgtatctagggcctactcaatctaaaaattttaaaaaatatatacaaaatactttagtaatttttaaaaatattacatattctttgaatacggtccaataatcaattttttcttaagctcaagatcgaccctaatcaccacacaaagtacaaactttgctaaaagtaagcaacccatttgactaagcgagaacaatgatggaaagacacttaattaaaagaattattataaataagtataattaggagtagtaaaacaggttttcacatagcacac

SEQ ID NO: 197608 - DNA, 2125 bp, Cannabis indica
catataaaaaaacagttgacccaaataaaaatgagatatgccgaaagcattaattgtcatcgtctctgaaagatgatcttctttttcatttgtttaacgatttaattaaagttatatatgggcactactcactcgactctaagtctgtatcaacaacagtaataatgttaatgcattactttgggggctgacctcatgacctaacaattacacacgtggacaacatatatatataatcagtgcatgaagacagatcgaattgtatcatgtttatttcagtggaaaataacataattaatcccttaatcttatccttagtcactatacattgctctttataatatttctcatttttgtaccacaacttgttataatccctaacctcataactagtattgaattacatcatttttcccaccaaaccaaaataattaacactcattattgtatataactatataagaagaaagtgttggctttaattaaacactatatttatatattatattatttagtatagaggtaataatgcatgtggtccggattgtatatattgtacaaaggcatcttttaagtattccaaaacatttagtccatctttaaatatatgcctattaacacagacccacatagaggcaatgggcacccatgaaaaggaaataaaaaatatgtatattttaaattaaacaaaactaataacaatataatgtttgatttagtggttaacatattttcatctccatgcaggcaacagttcaagcctcattgtgacatttttcttttcaaatataagaaattttatttcaaaacaatatattaatgtgttttgtaatgggaatttaaactcccattagagtattagacaatttaacttactcatctaacctacaatattatttaatactatataactacaaataataaaatttttattgaaattatataaaaatcccattaaataaatgaaaattatcaattacattaatgagtgacaaaaaaataaataaaaaaatatttatatatttattttgcttggaaaacctccttctttgtcgccatgtcaccacactaaaggctacatcaacactcgctttgatggttaggcattagtttaattacattatgtttgtgatcgtgttgtaggtatattttatttagtacaattttatgcttgagtttctttttgttttcaggatttagtaaataaagtagaattagagctttagagaaaaatggttaaaaatagataaaaaaaatataaattttaatgtcggcatgctaaaagtagagcccttaaaagcactatagtggcccaaaagggtagatatttctttgaaggctgacacatagaccattgcatgggttatacttatatcaaaaaaaattcacaatatatgtataatcaaacatgtttagctatgccgtggcaaatttttttcccaaaattttaggcactttggtattagttttcccaatgttgtggcttgatcccctattgaaagaaaaaataggcttttaaacctattctaaaaaggaaagccataacttttggggaggcaattttttagagcaaaggaacaccatggagcttcatcaattgatcttctgagaattattttcttctctttttaattttatgtttttaattagattaatttttatgtttaagatgatgaatatgtgatctaaacttacttgtggggtttttaatgaatattatttgagattagtttaaatggtttaataaaattctattttttctcaatcatttgtgaatctttttccattagagtaattgatgtttagaattgattgatcaccaatgatatgtaatgatttctatacaaaatctaaaaaagtaagtattgattatgctttcattgaatagacatatgtttcgatacaaaacgaaactattaatttgtgtggcttgtgtagcttttaacatttaaaatataaaagacaaatattaacttgaaaaaagaattccacccctccccacctaaatcttaggtcctttcctaactaaataatgaataaataaattaaatacttcttctcatcttatattttcacttacatttaattttttttacttttaattcacaactaaattagtgtatag

SEQ ID NO: 197609 - DNA, 572 bp, Cannabis indica
atattaaattatacaaataacaatttaccatttttcatagtatttaacacctttaacatttctctaaagaaaaatctcatttgatcataatatgtattttaataatatttatttagttggtgtgatgaaatctataaaaaaaaaaaattgaacttatttgacagtgtataatttgaaatcgcatatataatgttatacaaccagaactagaaaaatattattaaaagcatatattttcataaaatatgtctagtatttaccaaattttatttcataatttaaaggtgcattaagaaagttatagtttgggcgtaattagagttaattatgcaatttaatatatttttctgatggtgtaaataattgtaggtactctcaaagtctcctagctcttattaaaattaagtttaattacactattaattattttttttttcattttatacattaattattttgcaataagtattattttaaataggagaattattctatatactattttttaattttttttctttttcaaatttaggtttgagttacttaagtatttttatgtgggttgctatgta

SEQ ID NO: 197610 - DNA, 1864 bp, Cannabis indica
aagtgatctaattacgacgtaataaagattttatatttattttggataaattattttgtattacttcaatttttctgtacatcctatgatcagtatatataggcctgttcaaatctatatctaagcataattgctaacaattaatatacttttaacacctgctttatttttttttttacagtaggatctattgtttgaagacctaaagaatttatattttaagggactgagaagaacagaatatataaatatatatatttgtactttaatatatatattttatttttattatgatggtgaaactatgaggctccattggggtgtagttggtattgaaaaaaattggtgatggctattaagataaaattaagtgaaatatggacttcaatgctttaatttatccatgaggaagttcactactgttagaaatttactctcccattgtggctgagaggggtcctcaaatctcaggatggcatggtgtgggaataggatgagtattccgaagcattgcttcatttcttggctggctgtgtggaagattacaaagaaagacagattgttcaagtatggcattacatcatatagtagtttctggttaattatgtggatagaatgatgagacccatagtactactcatattttcttcaattgttatcaccactttctttaattggcttggtataaccaccaattaagaagggagacctttggagccactttaaattggattaaaaggtgtaaacactccaaattcaagaggcaagtgtagcaactgtaaatgcttgtgtatatatgctttgtaaatagcatatataattaaaatagcattaaaatagagattagttagttgggggtttttactttttaagaatgagaaaactagtaattaagtagaccataaatggtttgctatatgcttaatttgttctgagataatttgtgtttgtattgagatttgttgagcataataaattcttactcacttaaaaaaatcaatgtgtcatatggttttgaggtggaactctccttaagtggacgctttcttcttttattaatgtactgagatacttacatatgttttgtttcagaattgcatgttctaacaccctcctcctcacatgtgaggtctctttttaatcgctcacataaatatttcatggggccgacacacttgtgataattaactgttaaatttctctaattaaacataattttttttttccaggaagtgttcataacaagaataatattctatttttgaattttttccatataaattattggaagataatatataaatcaaagggagtatatgtattaattcaatttcgatttatatatttcatcttataaaaaagatttaagcgcgtgtgctagataagccaatcaaatccctttaattcgtcgttttcatatacttattttttctttttttaagaacaagaaagaaaaagaaaaagagagagaatatataatttagtattaataaaaaataattgagttaataaaatataatttgcatctcttttgggtttttgtggtaggcggctgcgtatgggagttccatagttccaggaactacgtcatttgcttttcagttcatattttaattaattaagctttttttattattattattaggttattttattatatttgggtgctatatgtgatttagcactttcaagcttgaattaatagttttctttaaaaaaattttgacctaattagatcaaaacaaatgtgattattaaattatacaaatttgtaacaaggatgagtgcatggtagggaccttcaataggcatggtggtttgacttaactttctcatattctgaatcattatatatatagttatt

SEQ ID NO: 197611 - DNA, 707 bp, Cannabis indica
gtatagtttcttgttccagtaattggatctgggaacctgtaaaaattagccaaaagactagaagtaaataaagttattacagagaacataataagagccaaagtgcctgcaatccatcccaactgagcaactgcccaagccaaagaaagcactccagacccaataacagctgttataatatgtgcacttgcagtcatcaaagtcccttcaaaatcccaaaacaaagaagaatgagaaaaatgaaccatagaaacgacacccagaatgcaaaaacgacatgagaaaaaaaaaaaaaaaaagacaatgcataaacacataccagttcttctaactcgaccatcatcatcaaaagcattactcttgtcgcttgattcaacatcttctattgaaaagttttgatcactagtacttctactcctctcatgattattattattatctacattcatatctactaatgatactaaatagttatgttgaatcttgtatctcttgactggaagttataagaaaactgaagaatattgtgagtgtagaattggaatcttggagaagagatttataatcaggggatcatggtagggtgttagaatgttattgtctctctatttgtccacttatatgaatgtaattaaggatcacatatatttcacaacaaattggaaagagcaataaaatgcaaacccaaaatggaataaataaataaa

SEQ ID NO: 197612 - DNA, 2257 bp, Cannabis indica
attttatttgaataattttttgtaaggttgtaatacatattttttttgatctttttattttgtgcattagaaaaatttaaaattatttgattagttaaaattttcaactaaatgtgtgattgtcttctggaactacatatttggcttagtcgcgagtaggggtgtgcataaattaattcaatccaattacaaccaatgaagtttaagaatagggatgaattgaatatctttgctcaagaacgagaggcagagtaaatttcattatatagccaggggaaaaagaggagaatacaattgagccaatcactggcagacacgtatacaagtttgttacacaaaatgattgacacaatcttaacagaatttgatgaggacagctgcaagggaatattccaatgggcagaaatccacaaggcttggaaatgagaatattgcagaacagtccctgcatactatcctatattcttaactccacccctcaagcgaagtggtgaatcaaccaatctgagcttgtccaccagaacttgaatctagatggtgagagtccttttgtgaggcagtcggctgtttgatcatgagacgggatgtagcgaatctcgagtttcttttgtaggactttgtctcgcacaaagtgtacattaagttctatgtgcttggttctagcatgaaacaccagattcgatgctagtgcacaagcactcatgttgtcacaccagattattggtgttgtcgaggccttgaacttcatctcttgccatagttcttgtagccaggtcaattcggcagcaaggtgtgccaatgatctatattcagactcggtactcgatctcgccacaatattttgcttcttagatgaccatgatattagagactcaccaagaaaaacacagtagcctgccaaagatcttcgatcgtaaggacagcaggcccaatcaacgtcagagaaaccttgtaagttcagattaacacttggggctatgtgtaggccaaggtacatggtccctttaagataccgaagaattcttttggatgcactccagtgagctgttgtcggtcctttgagaaactaacttaacttgttcacaacaaaagagatgtctggtctagtgtggctgagatactgcagggctcctatgacgcttttctatactcagatggcttctctagtggctcaccatctttgattgaaagaggtgcctgctgtcatgggtgttggactcggtttgatgttagccatattgtgcttttgcaacaactcggctatgtatttcctttgagacaagtataatcctgtttcattcctaaaaacttcaattcccaagaaataatgcagctgtcccaagtcctttaaggagaagatcttgttcaatttcacaacaaatttttctatttcacccgagctgctgcccgtcactatgatatcatcaacatagatgagtaccatgataacatactttgaagtctttatcaaaaatagagaggaatcagcctttgagttttcaaaattccattcgacaagggtccttcttagttgatcataccatgatcggggtgcctgcctcagcccataaattgatttgtttagcttgcacacgtaatccggtttggctctgtcttcgaagcctggaggttgcatcataaagacatcttcttcaaggacgccattgagaaaggcgttgttcacgtccagctgcctgatttcccagttataagtgaccgcaatagtcaacacaactcgaactgtcgaagctttgataacgggactaaaagtctcaacaaagtccactcctggacgttggtgaaatcctttggcaaccaagcgagacttgagacgttggagactaccatcggcattatatttgatcttgtgaacccatttgcagccaactatgttgggtgatctgagagaggatcggggaactaatgtccaagttcgatttctgcgcaaagctgtcatctcatcttgcattaagcaattccacccctcatgtaggagagcttcttcgactgtgtgtggttcatggagagaagtgtcaaacttagcataaccaaggtaaactttaggtttgtacaccccgacctttgctctagtaatcatagggtgagatggctgaactgggacatgttgttgttgatttttcaggagatatatcttcagatgtagtggcctgagaagcaatagaaaactcacggacaggtgagacagcagtatcagtattgaattcagaactacaaacctgctgtggagatgaatcat

SEQ ID NO: 197613 - DNA, 527 bp, Cannabis indica
taactattcttgaaccaaaccaagaatgagagatttacatctttgtttatcaactctagttttcctttcacattgcgcgcgatctgtaacacttcatcaatttctttctccatacgctttttaattgctgagacatgggagtcattgaacaaattagcaaccaaaactcaattgacaaaatgttctgaaacagaacaaaattgatagatttctgaatgatagaaatagatttgttaggtaattgaaactataatcagttcttaaaggaataacatgctcaaaaacatagaaggaatgcatgtccacctaagtacaagttgacataatgcaacttgtctgaaacagcaatgtgatgtgatttcaatttatgcttacttttaaacctatagttaattacctttcattgcagatgctttcgtcacagattttgagtcctcattagcatcctgtagaaaacatgaagaccctctttggtttaatctgaagttttaactgatgtcaactatctaagaataattttaagggca

SEQ ID NO: 197614 - DNA, 2849 bp, Cannabis indica
gcgaccgtgcgaagtgctgcaatgcttttgaggacggtctaggagagaagaggcagcaaagagaatcgaggccgctgtcttgacacactcgatagggggttttcgaacgggtgatatttattcatctggaacagtgagtaattatgttcgatatttgattgttgcggttataagtttagtgaatactcgttaatcgttactatttgtttacacagaaactggttggatgcaaagaaatgggcgaagaggtattgaaatctgtagaatcgcgagttcccgctgctctatgaggcagtgaaacgagtttagcatcgagcaagttttggttacaagatcatgctaggattatctcttagttcattcatccttatttagaatatatttcaagtgagttggaaatttgactatgtaaaatttcattgtcatgagcaaaagtgagataagtgaaatgaaattcattgttgtattagacactaaatttaataatgtttattattggatttaatatgagtaaacatggattaataatctttcataatttatgtgcaacaaactaggaccacgattcaggccttggacttccgaccccaaacctctgcccccgatcttggaccttgatgtcgaattatttctaaatattataatacaagcttattatgttaaaatttatggtcgtaataattaatacaatacaaaattttatcaaaataaagtatttatttttattttaatataatatgatctttatacggcctactatacaaagttttacaagcacgatgtagaacctaagaaggacctgaatcaatagagctctgagataatcatcacataatttcaatagaggtggaggcgatgttcaatggcttgcgcgacttaaacagtgtaataaccatagttaagaatctataataagtgttgttctaataaaatcattacttgaaatttcaagcatcaaggtttgatttgagcacgaatttgcttgaggctttacaagaccacattggccatatcaccttaacaaattttctcataaacaccacaatgtagatgtttatttctcttatttcatctaagttgggaatataaaatataatatccgtttgcagagaaaatatttaataatagattactaagagaaataggtaaaaaaaaattccacccaagatttaataattagttcattcttggcctcgatgaagtccatcttgttgtgaatgaatatagttcacttaaactaagtaacacaaagaatagcaacaaatctaaagcttaattaaaaaaaaaagtcaaaacaaacgcaaaatattacactatgagcttattggtaaatttgtagtatttgcttaaccctttttttgaaataaaatagtaacttcattgaaatttagcactcaaagtataataggccttgtaaatcaggcggaacattatgaacatgaatgctacaaccagataaaaacctagagtgcctagcaacatagtgggcaactcaatttgttagtcgtctaataaaagacaagataacattagagagagaagaaagtaatagtttgcaaccattaacaaccaacccgaaaacagaggacatatgttaattgctacgaatggcctaaacagtgagcatgctatcagtttcaatctccactttatctcaattcttatttttgatccagctgagagcctccttaaatccctatggcttcaactacctcaatagcatatgaaccttcattacacacaactacagcctccaacaaggcactagaggagtccctagcaacaatcccaaactcataagagctttctttctcaaacaaagcggcatcaatattgatcttgattgtgttaagtcctgatttagtccattgctcagttattttacaaacgaattatcaattaaacgaaacaaaactaaaaattattatattgaagtttgacattgtctcaaagagtacgtcctaataattgcatcataaaataatcatcccctattttgtacataagtataaacaatatacacaaagaatatttgctatgatgttagacttagtggtcctactaagtctaaagatggattatcaattcaaacatgttttgtaaattaaattttaaccaccaaaaagtttgtatattcaaataagtccaactaaagtttaattaatatcaaagttaacctttcatattctcttaatctaaataacttctaacacttcctaaatatatttaactactaaaaagcaagatctatcttagatatgctcgcccacttactattatattactttgtcaattaattattaaacaatttagattcttaaaatagtgtaaaaaaaaatagaattcttaaataaataactctttcaacctaagcaaaccaaccatgtctttttttgggatccaagaccaattaataggaatttaaatataaaatattcatatctctacatacttgtttaatgtttaaatgtagtaataatattatatatgatttagggttaagtttcatatacgtgctatagtagatctgtcttttttatatatagaaattattaataaataataataaatatgtgatttataaattatgaagcaaagagccaagcactaccctttgttacaaagcaaaagtcccctaaaattcttttggtgcataccctaaaaataagtgtactcttctaattttctttttatatgatcacattctatttattttatttttaaaaaaatacaataatttaacacatcgaaaataaagtttaaacaatttattaacgggtgtttatcttattttatacacttgtgaaataaatagattgaacctactttctgtattataaattatttta

SEQ ID NO: 197615 - DNA, 1287 bp, Cannabis indica
tcgctacaaaaatagctaaacaatagggcgttgcgatgtaatttttaccataaaataataaaaatgtaaatataaattttattaataataataataataataataataataataataatatagttatatattatatagaaataagttatataaatgtaaaatatagtttaatttgttaaaaaattactttaatactgtgttaacttttgaatgtaaatatgttaaataacaaaaaaatgatttaaatttagatcacaatgtagcatgatgcaaaatttgtatcacaataaatattatacttttatatttaccattatattatttttaatattttattgttaaattttagttaacatgcttacattattattattattataattattatttccttatcaaaatttatatttacattattattattttatagtaaaaattgcgaaaattgtaccacactataccattttttgtagtgcgatttttgcggttttttaatttcgcgatgcatgtgcggattggtttaaaaaaatagtcaaaacttgtaccactcataccgcgaacagtagtgtataggtgttgaagatgttcgtttgtattttcaagtgtatacagtataaaagaaagaaagaaaaaaaaaaacactaaggtgtaagatagtatttttataaaagttcccgtgcgatagtaaaaatataaaactacccgcaaaatttaatatttttataaaatgccctttcttacacaaaagtgagtgggcttactgtaggaacaataataataagtgggcctatccatgaaggagagcttaattggatctgttgaaaatgaaggcccattttctgtaaagcccaatgtggaaaccgaagagatgctgttttctaatttttcagtcccaaaaacgaaaggacgctttctgatttcgttgtctccatcccatcccatcccatctcatatctcatattcatattagtcttttaaaaccctaaacaaataacgcagttgtctatatctggaccaacatcatcacctacaagatttcagaaaatgtctatttatattttccatacagcttaccatctacattcatataattaatttttaagtgttttcaatgcaacaaacaactaaaaagaaatattaaaaagaatctgtgtttagcaccatttaaaatgtgatattattattggtacaattaagtattaagtctcatacacttaaagtgtgtgatatcgttactaatataattaaataattaagtatttactcttatataatttaatttaataa

SEQ ID NO: 197616 - DNA, 635 bp, Cannabis indica
gttcaaataagcatagacatccgcagcaaaattaaagtagatacaaaacttaacgaaaagaataatgtatttgcttgaaaaggtaaacaaaataaaataaaataaatgataagagtgggtgaagaagcccaattcaaatgactagttcaataacgttgtcattaataaatctcattttggaagaaacactttgtttaacacatataattaccaagtcactactaaaccaaatttaccaagtcttttatggagaaaacaagcaagtctaggtagctatgatatgctccctggattaagagagacttgttcagaaacttccatctataaatatgagaagtaggagtccatccataattatcaaatctcactcaagcaaaagaaagcaaaacttgatatatagatttataacatagcatttatagttgcaaattgatcaacaagtactccaacatgaaaggtattcattttcttctttcacttactgtgttggctttggcagccttcatagcctctgcctctgacccaagccctctccaagatttttgcgtggctgtagatgaaccccacaaagcttgtatgtatacatttctttcattactaacttatcataacatttttctctatcgttattctat

SEQ ID NO: 197617 - DNA, 1022 bp, Cannabis indica
caggagcacttaaaaatctagaacaagtatcaatctaaacacaaactctttatcaaactagtatcagacttaattagtgaatgggtcacaccatttgcaacaagcgcaaaacccatactaagccccaaaaagctccgccaccaccacatgaaactcgccaaaatagcccaagctcccataaatctccctcagcatcacatatcacaccccaaaaccagcaaaacctctccacactgccacatcagtcgacatcacaaacagggacggacccattaagattgatgtgggggctatagcccccacgaacaaaaatattgccttttaaaaaattaaatgtaaattttttaatttaataattataggccaaaatagtggaaaagcccccacaaaattagataaatttagtaagagtgattataatgtagctataaatattttttatgataaataaacccccacaaagtaaaaataatgggtccgtcactgatcacaaacacaccaggttcagaacaacccaatggttttattattattattatgagctttattttagaattttatctttctttatttttttcttttttatgtggtatatagatgtgcaaatgataattaattattatgatcaactattaattcattaataagtatttttagtacgtatcaaactctttcttatatcatatatcatatacatatatatatttaagtatatcctgaaatttaaattttaaaaataaacaatatttgttggatttcatacattgctgaattgaaacacaattatcatttgaatcaatatatacatatataaattaattaattaattaataaagaaatagtatctcaagctcatacggtttgctttcatatatatagtccactaattaatatatttggttatctaccaacattattgcttcatctatctaatccgtacatgccacctggagaccttttttcttacaaatttaaccacataatataaataattttcaattttcttcatgaaaaaaaaaaaa

SEQ ID NO: 197618 - DNA, 1013 bp, Cannabis indica
taatatcaattaattaattaactaaccttggtattttcatttcatttactcttgtttgtgggccatacttaaataatttatacctgataaataagcactagttttatttggcattaatctttgtcatttccaattaaattattacaacctttaatgcttaatgttagtgcttagtgggcctttttttttttatatacaccatgtgtaaatgtgtagatttatttattcatttttgtcagattcatttattaatttcttgttatcctagcctacaactaatatgaccaatttaatttacagcaaaagcatgtgacacacacagttaaaaaaaaaaaataccccaatagtaaatataataaatttcattttattttaaaaaatgattattatcaccaaaatttcttaatacattttgattttatacacttaatttttttatttttggcaataatttttttttaagtttgtttttttacaaatttgtgatattagttaaatattaccgataaataccaacaaaataattagtgattcactatattaattttgaaattttattgtcatatatacacaggtatatataataatcattcgattaatatttaatagtaataattaactaatggcttaaatttaaaaaaaaataaaaaaaaatttaaaacaattttgctactaaaaattaaaaataaatatataaaaattaaaatataaaaaaaattcacaaattgacctttaaaaaactaataacatatctaatataagaaaatagaaaattatctttctatattttctaaagtttgtttttttcttttctttttcttggatagttaattatctccattataaagttcttatttttattccagctaaacaaaataaagttctgattttttacattcaaatcccatatttttttttggtttagtatctagaaataatacattgaaaaaaaaaaaccgtaaaaagtgaatttaggcaagccgtcattttccatgaaagtgtcggtgctgtaa

SEQ ID NO: 197619 - DNA, 1052 bp, Cannabis indica
ttttggcatttcaaaactacatcatgatgttgggcacaagtgttatgattccatcaatgttggtgcctgcaatgggtggaagcgatgtaagctcattctccagtaaattatcttttctcttaaacctctgaacctttcttttggttttactgggcacatgcaatttcatccagaacatacttttttcttaacaatgtttgtagttcccttggcctgccacttgtattttatccaggtgggatgtatatttgaatgcttatttgtcatggtgtcagtcaatcttctattttagttactaagagttctttcttaacatttttatgattgatgaatagggtgacaaggcacgtgtaatacagactctcctctttgtggctgggcttaacacacttctccaagcgctttttggaaccaaattgccagcagttgttggaggttccttcgcctatgtcattccaatagcttacattgtaggcgactcctcgttgcaacgcattgatgatccacaagaagtaagctgttttcttagtctggcttgtagtcacctctgttctcagtttttactttcactagtctctctctctctctctttttcattttttaatcatttacatttttttttggtaaccacatagagcaatatttgtaaagtttttcccaaatttcattatagtaacagcttaataagaacaagtagaaaaactgtctgagtttgacactatttttaaaaataatattatggaagattgcatctaaggttgcctttgtcataattcatgtcattggtaactaagtccccctagatatctgtctctacttccatttcagtcaatgtacttaagaaactctcttatttggtagggtattgaaagagatcttcccatgtcattggtttgcagagatttattcaaacaatgcgagctattcaaggagctctaattgtagcttcaagtattcaaattatcatgggctacagtcaagtttggggcctcttttcacggtatgccatcaatccagaaacagcttctaatcattaagagagtttgctgact

SEQ ID NO: 197620 - DNA, 850 bp, Cannabis indica
actcttgtgtgactagaccacaacaaaatgttattgttgaaagaaaacaccaagacatatactaaatgtagcaacaacacttgcttttcaatccaacctatctttatcatattggaattacatggtcaaaactgttgtctatcttattaatagaacaccctctgttctattaaaagataaaactccttatgaactgcttcactaaaaaccacctaactacaaccatcttagaaactttagatgcttggcctatgtttcccccattcaaaataaccataaatttgctcctcaagcaaaatcatgtgttttcataggctaccctgaccatatgaaagcctatacactcattgatacacaaacaaacaacatatttcagtcaaaagagatattatattttatgaggacatctatcctttccacaacaatactccaaatgcatccatagatcagatttttctactgattatatcactacaccagatccaaatacatcaatagaacaaacaaaaccagcaaccccaaaatatccacaaaattaggcagaaccatttccactcctgctcatctcaaggatttcaggtgcaataacagtaaccatacaagcagttctctctaccccattacaaattacatttcatataataaattgtcttctgcttttagggtagcagtcctagccacatatcacatacttgagccaacttcttatgcccaagcatgtaaagaaaaagtttggaaccaagccatggacacagaaattgatgcactagaatctaataatacttggatagttgtaccattacctcttggacaacacataataagcaacaaatgagtttatagaattaaa

SEQ ID NO: 197621 - DNA, 2248 bp, Cannabis indica
ctgactattgggtcccttagaaacaattgtgctacagctggaaattggggaccattgtacgttgtgtacacgtatcgctcaaaggtttaaccttcaaaagtagggggcacatgtcgcccaaaggtttcacctttaaagtaagaggtttagaataaccgtggcaaaaaggtggatgaggtgcacgcactactatgcctggacataggggacaagatatgatcttgtgtcagaaaaagcataactatcattgggcgattcgggttgcaccaaaggtagatgtctgcgacactcttgggcgatcgatatctgcgatagacccttcaagtactcatctgggtaccagctgggctaacttccacatttggaccactccaggtccacgagagacaatatgccttctgcgtccgggaagctaggataaggcgaagtggacttccgtgaatcttctcagtcttgacttgttcccgcatccgtgaggcttctctgcgtcaggattaaaatgagggattttattagtgggattaagaggttaatcacttcctttatatgccacatgtcacatgctcagaaacacaaataacaactaccatcgagtcaattgaatcttcactttcataattttccttgaacttctctgtaacatacatcactctctaattataaattaggaatgcaattatcaacttaaaattctagcaaaagttattgaaactttaaattagcatggataaatcatataggaggagaaaaatatattaggaggagaaaaatatacacttttagaacgagaaataacatacaaaatataagttcttcaccttttccttgttggagcttattgtaacttctatgattttcaagcctaatccttctatgtttcttaaaaatgttggttagtccaagtacatgaggatatacaagtagttttttccagcttttagtaaatatgtaatagctcaaaaataaatagttcatgacccaacattagtgtttgcatgttttgactaaaaacggacattgatttttttgatcaaatttacacaaaactttttctccctcaggttcttcctctcaaagttcaaaatgcatcctttctcttagtttcatttttttgatccctctacataaacccaccctttagtctttattgtaaattctttgcatgcatgatggtgctgtcattttttaatgctctggaagacacgagtacctatatactgttaatcttccatgattagtttttgtgggattatcttctttagtctaattttgttttatatgatttggccttatttcttactaaatggtggtaggtcttatctcagctcttacattcatcttatctcgactatatccaatttgtagtctcccttcgtggatctgagatacgagttatctcagatctttggtgtattttgccttctcctgatccaaggtacgatatacaacatgtttcgtcttgactcaattagaggtatcgtttatctcgacttgaaccgagatctgactggcttcggtcaagtttgaggttacggtgtcttagttggtgctaggttaggttttatctcagtctaagttgtatgacatcttttcttggtctaaatcgagtttaatctatcttaaccgggtccaaattaaaagtgatctcggcttaatctgagtcatggccttcctcgttctgattcaagttaaatcttatcttgaccttgtccaagttaagatttttgatatgagttattcatgtttatctttattgtcttcttccaaccgacttctaaaagttttaaaaatgggcttgcattttatcactccattgagttttttcctcccttaatgggctttgtaaaaaattattttttctcccccaagcactactcccttagttccttttatgcaatacatattaggaactgattagggttttagacatttttgtatcttctctttgtagtaggggaaactcgccattgttatatctctactttgtgtcagtaagtgtcccagctttgtttatttaaatttttttgaagtgacaatattaataataaatactttgggccttggaaatcatttttctgcaaatgatacttcaatttccacaccctatttttgttggaattttatgccctaaataaaacctaattttattgtaatattatttactttcaataaagatcagaaatcatatcttgaccttgtcaatgctctgttcacatgttttataaatgattatagatttaatatataa

SEQ ID NO: 197622 - DNA, 744 bp, Cannabis indica
ttattttaataaaaaattgaaaagtgaaagaattaagaaaagattaattaggagtgtttcacgtcatctcttctagatagatagatttaatgggctaataaataaaaatgaaaaaaaaaaattactaattttattaatattgataaataaaaagaccaaccgtacaaaccctagattagtataacatggcgcgtcatgcaacattttttcttatttaaatataaatatattaattttcatagactgtacagtatcgtcatcgtgtaacgtacaccctgtaacgatacacaaaacatgattattatttctaactaaaaaacataataaataaatataatattatattttattttatttatatattcattttatttgatctaattctctataagcagcggttgagagaaagaaatacaaaaaatgcacgtagggagttataattgagaatggaacgaacaaagaagaagaaaaagtgtacaaaaccaaaagggatatattaaaaattacatcttttatttattaattaatcaaatttatttttaattttatatttaatttaaatatacttttatatgtactatactcaaaataactttgacacaaaggagtcacatggagagtatattgaagtgacatggataaaatcggaaaagtatttaaaaaagtaaataaaaataaatagactttaaaaagtaaaataaaataaaaaaagaaacaatataaaaaaagtactaagaagtctaa

SEQ ID NO: 197623 - DNA, 1463 bp, Cannabis indica
ataaaacttattagtatcccttttactcacgtctttcttcatgggaggaggttttttgtatgacaccatagactgggtggttgcaaagattgtctctatgtcttctgttatgatagtaaatgtagtgaactttgaggcattctcctgacttgtgtcacattgagatctttttgaactggatcggggacataattatttgtattatttggctggacggtaggaggaacatcttttctgtccaatcctctttcgtgattcagattgtttttaaggtcgtgcatggtacctaatcgatcaaacactgatgtgccaagaggtttttgtgtttgaccagtttgagcgaggggttggcctgatatctctgtctgagtatgagtgttaagctgactatttcctcccaagggacagtctggtaaaatctgcccgtctaccacttagcccacagtttgaatctgtggccttggattggacggtccaccgacatgagtttggggggtatgattagctaaatattctcctgactcatctgtgaccttatgagaatactagtatcagtcgatggttgttggccggtgatttgataagctttttggatcagttttgtggcctgcctggaataattataaatagctgcgtactgggctctcaagatctccatctcacgatccctccactcttcgaactgacatctttgctcattaaaagcaagatttgtagctactcggatatcttgccggtcgtggtgaaaagtgttattgtggcctttcattagccctaatacatctatcaaattctattttttagtgtcatccctgaccggtccttaagtatataaagtggatgggattccaattccaggagtagtgtgcccagctgttgtactggtgtttccagtttcttgaatgcctggagtaaaccctgccaaagaggtagtcactccgtggccgacagtttgtgatcctgtaggtggctgagaattaacctacctagggctgtcctaggtggatctcttgggtttccaagtgtctgcacgctcagatctgtcatgattggatcaactgtatcagtctgattccccctttgagtttgcacaaccattatgtgtcttgtaaaagacttaagataaaaaaacttgggtgtctttgctctcaatgaaagtactaaaatattggccttgcttatagccaacgacagtgaatcttaattaaaacgataagaataattaaataacaatgacaataaagtaaagaaaataccagatttatagagattcagccccttatagttggtaatagcctactctctttttgttgtattgacttgtgagaaaagtgagcacgaacgctctaatctttcttcaaagctcttacaatgatctctcagtagttcactcttagatcgaggtttcactcttgagtgttttctctctaaattaattcggtgttcctgaatagtgagattaa

SEQ ID NO: 197624 - DNA, 675 bp, Cannabis indica
gtgccagacctaggacccgaagttgaacccgaacctgcctccaggaataaaactcggaccttcccttgagacccggagccaaaccccagaatcgggacataaacacagattcagaccctaaactcagccctaaacttgaacccgaaccctaacctaagacctaggacctaggaccgggttcgagtcttaggcctgcatcgaaggtggggctgggttcatgtggtggtatggtgtataatatttaagtagttttttaatggtaaaaaaaatctaaaaataatttttaaaaaatattagctaaatattgttaagtttttaaaataataaaaaactcttttccattctcaattatacacaattctaaaaattaaaacactaaaaacacataaactttttatttttactgtgtttagtaacgaaaataaaaaagaaaaaatataactaatttaaccaaaaaaattataaaacatataaaataaatacaaaattataatgtttcaaaaaaaaaaaaatacaaaattataaatgccacataaaaaataaataaataaaaattgaaaagaaagagaaaacatagtgtggctttgcctggccagttcgaaataataaaattgatacaagtatttgaccaatgctaatgttttgatttaatttggatattgttttttttttttt

SEQ ID NO: 197625 - DNA, 747 bp, Cannabis indica
aaatacactcataaatagtacagactcgtggactaaggctcattaacgccccaaaccaccgtaaaaaaaataccctactctcaatttcttacagctctttaaactcttattattttattggttgccgaaaacctcggtcaacagtagatataagtagcatattgagacaggcgacctacccgaagaagggggggctctccttcatccacttctctaagttctcagcccagcaaagttaggagaacatggctttttttggccccaatgcgtaggcctatcgtgtaaccgtgtattcttcctctcggtcacgcccgtctagaaaggtggcttctactgcggggatgctcaatgttaccttagacttggacgcagcttcgattgtagcagactcgattgcggccttgccattagcaggtcattgcttggctttgactactagcttgtaggtcaaccgtgcacatgtccaagaccttatgggaaaatgtgaccaaacactgccgagacttaacgatctctcacccatcgaggtagtggctctcgggtgccgagaaatgaccaaggtcaacttttctttattgcccgtgttgaatttgttcaataattttttttatgcttcctctaacttaaatgctatgattttttacaggcaatgttggtagtttactatggttagtctagggtcgccgcccatgagaatgagcgtgacaaggagaggatagctgctcttgagcttgagctcgacacact

SEQ ID NO: 197626 - DNA, 2319 bp, Cannabis indica
atattcttgtgtcatctcatagtcccaatctggtcatctcacctgtctcacaacccatatctcaactcattcctaatcccactcctattaatctcacataaacaaatgacagtagcccttataatccaccttcacctgatccctcacaacaacctgttataccaaaagaacaacctcctataaccccaccctctttcacacctgctcctactaccaattcaacttcaaccacatccaccaatacacacaagatgaccaccaaggccaaagtaggaattgataaacccaaaatatatctttctgagaagataccaaagacatttaaatctactctgcagtatgagaagtggagacaagctatgtcacaagaaatacttgctcttctcagaaaccacacatacactgtggttccattaccaccaggaaaagaacctacaggctgcaaatggattctaagaatagaagaaaatcctgatggctcacttaacaaatacaaggcaaggttggtagccaagggtttccaccaacaacctagttttgactacactaaaacattcagtcctatagtcaaactagtcacaataagagttgtcctaactctggctatctcacacaacttgcatgtcagacatctagatgtaaatagtgcctttctcaatggggcgctccaagaagaagtgtacatgacacaaccccctggttttgatttaaccattcaaactaatttggtgtgcaagcttcacaaagctctgtacgggttaaaataggctcccagggcatggtttgaaaggctacatcaatgtctactctcatttaaattcatatcatccaagtctgatcaatcactgtttgtacttcacaacaaatcatcaataacacttattcttgtgtatgttgatgatatattggtcactggaagtgacaaaaaggcaatgtctgatctcatctctcatctccacaataccttctctctcaaagatcttggtgaactcaaatacttccttgggatagaggtatctcatatcagtaatggtcttgttctatcacaaacaaagtatgcaaaagatttgcaactaagagcagaaatgcaagatgccaacccattacaacaccaatgataagtggccagaaactctcagcatatggaagtgaatcatatgtacatatccatagtgggagcattacagtatctcaccatcactcgaccagaattgtcatacagtgtgaacaaagtatgtcaattcatgcaaaaaccactccatactcactggttagttgtcaaaaggatactcagatatgttgcaggcactctacactatggactccatctcaaaaaacctcaacatcttgaaatcaaagcctattgtgatgctgattgggccactgatgttgatgacagacgatcaacctctggattcgccattttatttggaccaaatctcattgcttggaagtctcaaaaataacatactatttcgagatccagcacagaagctgaatatagaagcttagctaatgttgtggctgaaattgcctagcttcagtccctgttctctgagcttcacattcaactccctcatcctcccactattttgtgtgacaatcttagcacggttttgctcactgtaaatcactacatcatgctcgcaccaaacacatcgaacttgatttgtactttgtcaaaaagaaggttcaaaatcgacaaattgttgttaaacatgttccagcaactgatcaacttgcagatgggttcacaaaggcaatatcgagtcaaaacttctgtcattttcgagccaaactcaccattgttgataccactaatactgacaccaccaatgctgagtttgcggcgcagtgttaagagctgacagttgtacttttctgttatgttagttacacaactaactaactttctgttagtttgttgttagcttttagttatggcattgtcatgctttgttactgtaattcttgtataaatattatacaactgtaattaataatagatgagctgtttcatgatatatttcatcttcttcattcttctttttttctctcttttctctgttcttagttttctttactgttcgttcattctcaagcttcaatgtccaggagattcaactctccccacactttttagtattatatcgcaaatacatcacaaaatcatcgctaaacattagtaaatacgcaaacatttattatcttagtcaaacattgcaaaatatcgttaattatcgctaaacttcatctttaatcttaaattcgatctatcattacaaataaatcgctaaatatcgtaaaaaatttggaaaa

SEQ ID NO: 197627 - DNA, 563 bp, Cannabis indica
gaaaaacaacctcatgacaactaaaatacaaataaacaaaccataaaacaattaaaaaaaaggatttattctttttactgaaaaagtatttttataaatagaaaatttcaaagagtaaaaataaaaaaatttccatagtgacgtatttttgtaattttctttcaaaatttttagtctataatccatatacaccacatttatagcactctattagagatgcactaagactgccaaagatccaatgtaacaacggatttataactatctaaagggaaggagaaaaaagtttagacaataaagttataacgtcctcaatcagcaaaccaaaaaaattaaaatttcagcttgtaacactatcagttaaccccctaatataatgtcccaaattttatctacaccccaaaaaatataaatacacttccataatttttttaaagaaaacttacataaactaaccattttattacaagttcacaacttctatttctttttggtactctctttatgtgaaatttgtcaaattaataatatgaaatattcaaatttacaaaataacctcactt

SEQ ID NO: 197628 - DNA, 755 bp, Cannabis indica
caaactaacctctaattcaaatcaaggtaaagctcatggcattcatcaatttaagtctaaataaatccatacttggacggtggagcgtggtggtggttgatgtggcacggtgggagaacacgactggtggcggcctgggcgcacggctgctgagagggtttttttttttttttgagaaagctttatggttgttgctttgtgtgtttgaatagagagaaaagaaaatataataactaattagatttaaggtttctttgatttaggctgggctgggctggtgtatatatataatttttttttgcttgggcaaggctgaacggttcaatttgggttcattgggttaaaaaaaaccaagccgaaatcaacccaatagcagcgggttggatttttatcaacccatatgtatttcggcccataaaaaatgaccatgtttcggcccatttcgggttgggttggccgggttggtcggcccattttcaacccatatgctcagccctattttgggtattgagttttggttccatggcttttaaatgatttatgataatcacacatttgcttattctatttagatgtgatatactagtacattatattagcaaactgttcatagattgaattgctcgtttttgaagtgtatttgttatgtatatatttatttcaagattttcaatttaaaattcagtgagtgctattttattattttttattctcttattttttttaaaggaaggtttcatccttaaatacatatg

SEQ ID NO: 197629 - DNA, 732 bp, Cannabis indica
aaaataatttccaacaaattaatacattaaatataaacctgaaatagatcatgtgaaccatgcaacataaaatgatatctgatctttattaattagtaaatctgattatattgaaatgggttttatttagggcacaaaacccaacagtagtacagtactatcgaatataatatcagcctatactcagtacgctagtcgtactctagtcgtaccaatatgatactgtcgagtagtacataagccaacatacatttatcgatatccaatataataataaatataatgatactgttattgtaatggaatctgtgatacccaaaatttggctaaacttcagaaagtgacacgtatcaatcttagggaatatgaatcaacaaatatgatggtgattatatcattaaatgaaaaatggaataactcattcaatatagaataaatagagtatgttcgtaactcgttggctgtatagccttaagcgagacaaggatatcaaattatcaatttttgtattgacgagaaacaatcttgtctcagaatgcataatctcgcgggagccttggacagcgtatagcgaagcatcaacctcgctgcatgtaaagaagtgttgacaaggcgagacatccatctcgctaagaaagtatcgacgaggtgaattggctattgaaacactgagcatataatttgcattataatgactaagtgaaatagaatgtaggacatgattgtccagtc

SEQ ID NO: 197630 - DNA, 1311 bp, Cannabis indica
  modified_base (1213)..(1213): a, c, t, g, unknown or other
ctatatatagctaaattattaattaatcaatactcaataataatattggtttaaagcagtagaagtacaagtgtggtagctacaaattggtttattcgacgtatattatcgataaattaatataattaattaagtccaattaattgattaaattaaattaaatattattttaaaataaaaataaaattaaataaaggatatgatgatgatttggagggacaaaagctatatatctatgttctaatatgttctctgtacagacttaagtagtgagtaagtgagtggaggaagacagccttgggctaatatataatatcactacatctttttctgactcaacctagctatatatatagctatatttataacccatatctcttaaaaaaaccctataattaaagaagaaaaacctatgtgagacaagtccatgtgacccccataaatccttggttttcaaaccctaattccccatcgaaaaatggcaacacatatgggatatgggaaatcacatccaattaagtaaaacgttaatttcaaaatatataataaatgtataaaaacacaacaaaaacaaagttggaggaggaacaacttctgagcgccgccacgtgtaatcattcagaatgatattatcacaatggaccagaagaagggccttttcattttctttctttttaattataatttctacaacttcccataaaattcataagaaaaatcataacttttcctattcttttttgtctctaaaatcctgactttagatggagacatgtagattcaggcctattttcagaaagataaatattgcatatacataaatttgagacataaataatataattaagtttaacttctaattttaaataaataattaaatttaatttttgacaatataataatatttaaattatatttttaggtacttggccattaaatatgtcaagtcattatccacttgtaattttttattggtatatataaattattttttaaaaaaaaaattaaaaatttaatgacctggaccaatcacagattgccacgtggcaatttaattaacatttaaccaccaagtacttagatatataacttaggtattattaccgccaaaattaaacttaggtatttatttggatctgggagttaaactgtaaattactctactaaataaataaggttttttttatttatttttatttttacactttaaaanagtttagttttttttatttttaattttacgaaatttacacagaaactttatagcaactaacgaaataacctaattctaataaaaatctgtataaccaa

SEQ ID NO: 197631 - DNA, 722 bp, Cannabis indica
tagagacacgacgaggagcctaaatgtcaaaattaacctaaacaacacttatattcaataaaaactgttgcaattcatttttttattttatagttttatttttagtataagtgttttgactattttatttttttgggaatcatatatttggatgggattaacacattttcatttttttattcaaaaacttgcttaattgttggtattgattaaaatcttttcagaaaaaaaatggatcatagtaacaattcaatgagatttatagatttcatatttatttgttgatttattatgttgtgatttgaactggaaatgttatatatttttattaatttgttttgacgactaataaacatgtcaataaacacaatttacatggtgtagtgatagggatgtctttagtttgtctcgtaaatgttaagtttcttgggagacaaattttatgtgacaatgatatttattatgagatggtagccttctatatatatattgatgactaattaagagaaaattaggtataaaactcttatagcttatcacgtaatttatgagattgtctaggctatactaaagaaatgaaaaagtgatttgcaccgtagacataggtaaattaggcttgtatctagaacttatctagccaaaaaaaatctcctttttaaaatgacatatttttaatttattaattttaaaaaatatcacatttaattctaaataaagctcta

SEQ ID NO: 197632 - DNA, 1105 bp, Cannabis indica
  modified_base (1013)..(1013): a, c, t, g, unknown or other
ggaaagcagcttttggcatggcttccttctgctcattgtatgttgcccactcctcttctgtctcaaagtcccaccgatgaagcctgccttttgcctgttgaaaagtgatgatggttaggtcttctaaagcaaccactattatttgcttcacaatgtttatacacattcattttgcaaggacacacatagtttcatttgttacgcttaagcacaacagtacataacaataatcttaccagtcaagcatacaaatgaacccctagatatgagctacacaggtaaaatttaaagaaaatatattcaagttactctactaaataaacaacaaaaaaaaaaaagaaagaaattattaaaatttacccgtccacccatgtccatttttgataggtcatcttcatcatcactgtccacaacctcacgattatactcctgataaccagggtaacattcagaatagctctcagaaataaaattaggatccttttctcgagcgtctctttcccttaactgttgaagtctctgatcatcccgcttaaacacagatcccagaccacggtccttctcttcttgggtcataaaccgtggatcttgcagaacattgtttgctgcttctgcttgcatttcaaatgcttgcatgtttggctggatatactgatcgggataagctagttgttcagcatattggtactcttgccagtctccctgataggcaccaggcaaggcttgagtttgcattgcatcatacccattctgaagtttgacacaaagtaaagtaagaaaacagacattctacagtatatactaattcttccttgttctctaaattataaaatttaaatttttaagtcattcacaagcttctacttttatagacttgacatattatacaaataagtactgatcaacatactgcttcttgccattcttgaggtagcgcaggaggttggactggaccataaacaggttctgtaaaatatgaaactttctccttatttcgaggagattcttccatntcctctgacagagggctttggctcccatctttaccaggaatgtcatactccacaccttcaccaacaaatatgtccttctcttctactctagc

SEQ ID NO: 197633 - DNA, 2031 bp, Cannabis indica
ttggagagtcctctaggatgctcttcctatagctactttgctggtaagaaggaaaatgataacgaatctacttgctcgatctgtatgagagcttgggaatctattgaacatgcactttttggatgtaaatatgcttgttcggtatggcggcattcccaaataatgttagattgggctaaggcttcagttatgcgtaaaggagattttatagttcatctctcttcaatacttactaaagctaaaatggaacatgtcttttgtcttctctgggcaatatggaccaaaagaaacagggttgtatggatgtccaccaaaactagcctcaacagtagtcatttttggagaaaactatctgcaaattttttgaacagcttgcataaagtaccatccaacacacagtgcaaccccaaggctctccccgacagtgccagattaggttccatggaagcccccaccaattggtgcacttaaactgaatgtagatgcaactttgaatgcttgtcgaaattccgtaggagttggaaagtgatcagagatgataaaggtcaggttgttgccgatcttgcaaagccgattataggaaatttcacattttatgagattgaagctaaataatgtttcatagtttggcatggcccttgatatgcaaattgttgtttctcatattgagacagatgctttgttggttgccaatgctttgaatacaccgtcaacaacaatcttttcttttaaagatttaattgttgatatatcttgtcttttttcttttttttttttggtaataaatgttactgatgtcaaacgcacaactaatatggttgctcacactaatattttttctagaattggatgaagctagcttttggttggagacattaccccatagaataataataataataataataataataataataatataataataataataataatgcgttatatcttaaaatcattgcgtaacattctatagtgacaacatctatataatttataaataatgcatttaacacgcataaatccttcacaaccaatacaacaacataaccaaactatttctcctttcttttcccgtcgtcagtctctacaaaacaaaaacttattattaacttcagcaaccaaacaagatctcttgatcatcaacggctgagatcgacagtagaagatggtgttattatcaacaagcttatcgaagcgggtgtgcgtggtaggggcaggcccatcggggctggtggctgccagggagctaaggagagaaggccatagcacggtggtgattgagcaaaaccacgacgttggaggccaatggctgtatgaccccaatgtagatggagttgatcctatgggaaaggacattactgatggtttcttagaggttcattcaagtatgtactcttctctaaggataatgtcccctagagaaatcatggggtacactgattttcctttctccaccaaaaaaggtcgtgactctaggagatttcctggtcacacagaggtttacttgtatttgagagacttttgtgagtggtttgggttgagggatatgataaggttcaatactcgggttgagtatgttgggatgcttggtaattacgatcaaaacggtgtcgttgggaaagatcactctatcaaatgggttgtcaggagtaaagaaaattggcaaaagaataataataatattaataatgttttggttgaagaaattttcgatgctgtgattgttgctagtggtcattactcttttcccaagtttccttctatcaaaggtgattactcatattaatatcctcgtaaactatatattagttacatataatgatctctttctctcttttctcttttttctttcttctttttctcttctttttctttaaaattagtggggctcgagaaagtaaaagaaattaaagtgatttttgagccctccccacaaaaagatttatatagtttatatatgtataaaatgcgacttaataataggcatttgtacaattaatttttttttttttatttttagtaggt

SEQ ID NO: 197634 - DNA, 503 bp, Cannabis indica
tactcacacaactctcaatgatcattgctggagctgtttgtgagttgcttagatcgagaatattaattaatggaagaatgaatcaagtgccatctcaacagatgatgcatatagacaagagtagagaaaccttgtttttcaccttcagtagtagggtcaatttataatagcatgtgggttggttatatgatataagaaaggtgtttttgatcccattaggtatgttagtatgtatgactacgacaaaaaatatgcatgatattagtagattctttgtatagtgtttgttttactatgtcttatctttgtatgtactgatcttgtaagaaaaaaccagagccattattatgaattttaacttttatattattttggtccatatatacatagtactgaaaccaaaatgtgttcaaaatcttgacgattaatatgttgaacaagaaagtattagatatgtgagtgtacttaaaattgccatatttttactaactgtttttggagtt

SEQ ID NO: 197635 - DNA, 539 bp, Cannabis indica
cagagggagacgagcctttgggcttttggtggaggggcgacaggccttcgagcttctagcagagagaggatgggttgctggcagagagagagaaatagagaggagaaaaggtgttgggttttgaaatgagttagggttagataagttaggttaagtgtttctattatgttttattttttatgtaaattagtgtcggttctgcaccaatgtaaacaccgacgcaaaaaaccttgtaaactggcgctaatggtgtgtctgagcaaaactgatacaaaattcgaccctttatttttttttttggttgcgtaatttttcaaacgtcaaaactaatgataaatgtgatatttatagtagtgctcatcggagtgaaaataaataaaaaatatatatactaaaaaagcatatatggcttcaattatttgctaataaccaaagccatagggggtcttatatttgcatataatcaaaaccataggatccccttttgccttctgttttttaactccctaataatcgaagccatatgagattagatatgc

SEQ ID NO: 197636 - DNA, 575 bp, Cannabis indica
ttttattttttttaataaaaagattgactaattttcatggctgttagattttggggataagatgaatgaagttcggtctcaaaaccaattggcaatgggaagagtagctcatatatattacagtttatttctacacattagcaatgtgacactaactcttaataatggtatatggagaaattttaaattattttttattatatgatatatagtatatattatagttatattagatattttgtttattttcagaaaattaattctgaataatttataatattatcgaaaatagaatttaaatactcaattagacacgtgtctatatattttattttacatgcatttaacagattatttctgggcaccataaattatttaaattttttttgaaaaatgaacaaaatacttatatattacaactataatatacaacgtcatatgagaaaaattagacgtcttgaattacgaaaaatttaatttttgcttccacttaaaaagctcaaccatatgtaaatatagagaaatgttgaaagacatcagtggtgtttagcacgttattggtcaaattaagtatc

SEQ ID NO: 197637 - DNA, 548 bp, Cannabis indica
aaaaagtgttaggcacactaatggtgcccaataacaatgatcaggctcgaccctaagtataagtgagctaggtttaacctgtatctaaggtccacctagcccaaaagcccaaaaaatatttcccccttgtaaaattatacatatttttttttattaattttataatatcatatttttttctaaataaaagtgtaaaaataaatttttttttatgattgcactaaatttgaggaccgaccctaagaataatgctcatatgtggagtaataatccaagaggcaaaaaggaatttaatcgaaatttctgtgagattataaaccaccgaaagatgatgatgggatgccactgttatcttgatatatatatataatattaaatatatataattatagttagtgtggtagtgaatagtaaatagtgatgaaatattgacccaaaaaagaaaaaatagtgatgaaagtgaaaagtgtgtgtagtgttaacttatttgaaaaagctatggaaacatatataacaattataagcagcaatatatataatatatatat

SEQ ID NO: 197638 - DNA, 2088 bp, Cannabis indica
gagtttgaattctgggctcaatctatttgtgtactactgactattcctattcaataaagatccatcattcatccattatgagtagtttcttgtcttattcattagttcagtttggtttgtgattggtttaattttgatttgtgtttcttgaacattgttactgctataacaacttgttttgagggtgaggattcaccacagataaggaatagaattgcatcttttttttgagagtataaaagtttaattattgtaagtcaactggtgaaaaattgtaatgaaacttttatacaactgttatatatgttgcgagccaactaacataaaaattcagaaaaaaattactccgtatgtaatagaaaagaaatttattattatcgactttgctctgttcaagtcatgtattgacaattccgaaccctatatttattatacaaaatcattattgtagctcaactattatttaactgaaatacaactaagtttttgtaaatgggcatctttaagaaacattttctctgttttttttaaccatctaacaacaatgaatttttcattaatagtaatatttgaagaaacaactattaggtagatgtaaaccaactgaaattttaacaaattcaatatattcatataactaactaagttatatatctttctttaaagagatttatcttgatctgccaatatgaatctcctgcaattatgataaataccattgtaatgttatcactttctaatcaaagatatgtcaagtttcataaggtaagcaaaaccgtaatgaaactgtagcgcaactcttcagaaacttaacaaaccagaacaattttttatgtatgtgtctgtagatatatgtgaattttctatactaatcgtgatttgatatgatcaaattcacattgtaaaatttggaaaacaacgtcaatgcaatgagtgaaacatttgtttcagtatttttgcattttttcagatcatacctgatttggattgattaggaattccagatctatttataatagatctacattttataaatctgaaaatcgatattaggaggattagttttctgcgattttaatcgtaattcagggttgagttttagtttcgaacttgtttttctgcccaattttgcataaatccaaaattgtatgtgtttggatttcttacagccttcttctcatgtgaagtcgccgaaatttatggcgattctccgtctagcttagtttcttttcaattggcctggtggtttagttactcaaatgtatcgttgttgaagaaggtggtttgtgtgactaaatagttagagcaaaaggtattcttataaattaatttttcgtgtgacccaacacatatgtagaaaattaatacataacttataggttgtttttggttggaggtaatgaaataaaattgaacagaaaagaattaatttttatttcattcttatttgttaatttgcttgtattataaagtattagaatatcatttctaatggaataattttttcatcattttagtaaaattactattttattttaaaataaaaggaaaggcgattccaatgctagatgagaaaaaatgtagtgtctttatgaattttaaatgttattacattccattcatattcctatattctcattctatataaattctttttaatttaaaatatatttacaaaattaaaattaaaaaaaaatgatgaaaaaaatagtctattcatggacttatctaatttccaacactagttggattagataaataatctcagtatgtatatgggattaattggattagctagttatctagattttcagtatgcatgtccaagacttataaattatcttgtctaatccaattcttgcatgagcgcctaactagccctaagtataaaataataaaggtatgttaagcattatcccaaaccatgtgagactacgattgagcaaggtcaagatattactacaatattgaggagcatcaattttatacaatggtatatatatagtaaaatattttttcaaaataataagagacattaattggtaggataatattattttagagacactttggataagttagttaggt

SEQ ID NO: 197639 - DNA, 1058 bp, Cannabis indica
acggacgaaattaaaagcatgctgatcaaactttcacagaactcacttcactatgaatcatcatcgaaaaataataaagtggaaatgaaaagcgtgttttcagatctggctttcaacatcataatgagaatggtggctggaaaacggtattgcggggatgacatcagcaaagaagacgaagaggcttcgcggtttaggaaaattaaggatgagattatctccggaggcggagtggcgaatttggcggagtttttacctgatgggttgaaatggttgggatttggttatgagatgaagttgaaaaatgctgctaagagattggatgatttcttgcaagggcttattgatgagcgtaggagtatgaaggaagacaataccatgattgatcatatgcttgctttgcaaatttctgatcctcaatattacactgatcaaattatcaaagcctttattgtggttagtaatactaattattatatctctctctctttatatattatatttacttttgaattggttaatgtttattttggagtatatttattatatcgacactcacatgtgataatttataattagttatgaagtttttatattatttatttaattaatttttttttgaatatttgaatgcatcaataataatattataccttaacatttccttaatctttaaactaaagtttttaaataaatcaaataatataaatttcacataaaatttttaaaaaataattaaatttttattatgcggataagttaataaagattgagtttatatatttataattttaaaataaaaatatattatatgatctataatagttaattatattaagttaaaaatatgtgatatttaatattaaattacatctacattatcttataggtactattggggccttttaatttgagtattacctatgaatgagtattgttaggaaaatttgagtttctccacttaattttatctaattaattctttttatttttatattatatgatctatgattgttttatcggcgtagagtgatgttaaatattttttttatataaat

SEQ ID NO: 197640 - DNA, 641 bp, Cannabis indica
ataatgtctatatagttttctatttctacaccactaatgataatagcatattccctcctctttcactttgattctatttctagtttatcctcgaatattaaaggcttcttttggtcttccgatttaggttataaaaataaaaattgaaaggattgagtttgaggtttattgcatgacatcattagccaaaaaaaaaagagtttacatgatactaaatatcagtcaaattttggttgtacttactgggattttcaatttggtgggtacgattccgtgggatcctagtaagagatgtttttagtggcaaacatgaactttgtcatcaagaaactttgtaatgattgataaaaagaacttgctttaaaccattgatttttttttattttttttttggatattgaaatttgataagcacattcagacctgaattagacattttttttcttttatggagataagtaggaccatgaatacctatttgaaaggcttccactgagtattggtgcttcccaattttttcaatcaatatcaattgattagtctagcccactactactcatctatgcttgagtcactaaactatcatccccatacattttggtctttacatttcaaattttcaatagcagccacacatgaac

SEQ ID NO: 197641 - DNA, 1872 bp, Cannabis indica
taattggattactaatgtattaactttgaggttttacttacatatatacagatgtatacagtggtcattcagttaatatttaacagtaatatttaactgacgtattaaatttacaaagaaaaataaatttaagggagtttgtcacaaaaaaaagagggttaagtgtataaaaattaaaacataaaaaaatttcgccgcaaattgttcttaatttaaatattacactttttattctatttattgatttaaagataaaataatgataaaagatgaaaaaatgatagaagaatgaacaatgttgtttaaataaaaaaaaacgataaattataaataggacctcatttgggtgctggtcgctatagtgtctaataacaaaattaagattttgtagcctatggatgtaaatgtggcctaggtgtttatttgtttggtctgaatttgacttttttaaatcaaactaatattacgatttttaaaaatttaaaatcaaatcaaactaaatctatctattaaaaatgataaaagatgaaaaatgattgaagaatgaatagtgatgtttaaataaataaaaaaaaaacgataaactataaatagaacctcatttgggtgctcggcgctgtagtgcctaataacaaaattagggctttgtagcctaagtgtttatttgtttggtccgaatttaacttttttaatcaaacaaatattatgatttcttaaaaatttaaaatcaaatcacactaattaaatgatcaaatcaaactaaatcaatctattaaaaatgacaaaagatgaaaaaaaaatgatagaagaatgaatagtgttgtttaaataaataaaaaaaaacgataaactataaatagaacctcatttgggtgctcggcgctatagtgcctaataacaaaattagggctttttagcctaagtgtttatttgtttggtccgaattttaacttttttgatcaaactaatattatgatttcttattagtttaaaatcaaatcacactaattaaatgatcaaatcaaactaaattaatctattaaaaaacagattagtttggttcaaaatcatatttatattttgtagttattgtaatttctttttacaatgtttattttttcagtaattttatttatttttaataagttaataatatataaataacaataaaaaactattattataataatattaaatcaatattaatattttacttaaaattattctcaaatatcaatattttgtcaaaaaaacatatttttataaaataattataaaaattagtttggtttgaaccaataacaagttttgtaaaatcataaccaaattattcatactggattcatttagtaaagtctcaaatcgtttagtacaaattaattaggattggaaaccacataataaattatatgaactacgaccttataagtcttcaacaatttatcacaaaatttagaatttagaactccccaaaaaaaaaccttatttttatgtctcctcccacgtccctatttattgcagcatgttgaggatactcaagattagttatttggtctgttattggtagttaagttggttaattctgttagtttagttaagtgagttagttagtgtattatctcctcttttccttttttgtattgctctatatatagcctttctatacatacttcaatttttttttttggtgaaagagaggttgcaaagcaccaattcattgaaagaaagccaacagaaacaacaaagccaaagtcaaaggacatagaactgcatccgaaacaagaaaccaaacaagaccagcactaacagaaaaaaaaaactaacttagagaaaaaaacaaagcaagatcattttcatattctctctctctct

SEQ ID NO: 197642 - DNA, 1523 bp, Cannabis indica
ttaattttttaaaaatataatttagttactggactatagataatttttttatttatatgtctattttttatgtaaattatttaaatttaaggaatcactttatatactattttgttttatttttattatttggattgctcctatgtgaatttgtgtgagttagtgtgtgaattgaaattgtaatttatatattgggtgcttgcttctgtttgtttcgtataaatgtaaaaaaaaaaaataacttcaaaatatttaagtaaaaaaatccttataaatttataaattaactatgttaatgttataaaaaaataacatagcctaaatttataaaactctcaagaatcaaactaagtttgaggatcaaaaatcctatttattcttgcattaatacagtgtcaaaaacattcaaaaaaaaaaaaaatatacagtgtcaaaaaagtacagcaactctttattaagccaagctgttaattttaattagtatgaaaaacaaagccaaataaaataatacaaaaatatatattaatggtttccttatgtacactctcaaacaaataataataataataataataataataataaccacaatgaatcaatgaaacaaatattaataataataataataaaaacaaactcgtattaacataataacccaaaattaaaatatacaaaaaaaactagataatcttaatcgtaatcttaatcataattaacatcttaaatctttgattctcttagttttcaaaaccagattcatatcacacttcatctcactcgtctttctgttattaataatcttaatcaactcaactttaccagtgatttttgcatagctactgatcttcaaaactccattgttcaaatcactgttcagattattcgcaccctccggaagcctactcgatcgaatatccatcgttaatctcaccctcgtccttcctctcgtttccgtacggcctttcccgaaccgccgctcgccgattttctgaccgccgtaaaggatcctggctgagcttccgtcgaagctgtaaggtccgaagttaggattctcaattgaaatctccgccaccagagtagcgttaactgacggaaacggcgaggttgtgtagtggagagttttaacggtaacggatctgattttaacgtcgggagatttaggtcggagaacgattagggagaaaattagtaagattaaaccgaggaatacgattgtagcgaacacgtagatgaaacatttgttgcttcgttcttttcttatggctttgaatgctggattctcttcgtcgctacggtggtggattcgattcggagctaatggccatgctggctttcttcagtcatttttttgtttgtttggcgagaaagaaaatgaatgggaaaattagggtaagggaaagtgttttttgtttttgtcttaaaacgactgcgttttaatgtgatctgatttttttttggtttctgatttgtgtgaataaaaggggtttatatatatagtggggttttggtgagttaaaaatagc

SEQ ID NO: 197643 - DNA, 1515 bp, Cannabis indica
attagaaacaccaaaaaagaacccaaaggcataccacaatcaataatcaactaaggaggagatccttaaagagcaaagccacaaacacccacaacaccccaaaagcattgaatcccaaagccttgtctccaccgtcgacaacctcaccaagatccactactccttcaaacgagatccaagagatctcatccaccacaaagccaactgccagggccaacaatatgttattttgggccttaagtaaaaataaaaattagggcccttgtataaaaaaaatgaggttgttgagatttcaactcttaaccttcaagttattactctaaatacttaccactaacctgcaacatatattttgtaatagaaaaatttgcggcataaataccatatattaacatatggtatttatactgcaaatttccctttagtaatatgggtataatttgttattttatttcaaactatgtttattttttatttttaaaataagggccttaagcggtgggggcctaaggcggccaactcagggtcggccctgccaaccttcaggattgttgacccttgactccacactctcatagatcaaaaaaacacccacacggttgggcaacatcaacctgtaacacaggcaccagacaaaccaagtctgaggaaggagataagcaagggaacaacacctaccacgagcaaccaaagcccttcctggatagtcttctcggccaaggcaccagaactgcatagcacagttgcgggcaacgccctagtcgagagaagagaaaaagataaaccctagctagcgaaaagaaaagagaagaagacgaaattaaattgaatgtttactctcttgtattaagatctaattactccatgttattatgttatgcactcatttgatgaatttaatatagtctggtaagatggctctataatttaaaaataaagatactgagattcaactaaataaaacttttattataataaattagtaccatacatagggatagtttttactttactttcatgtaatttaggctatctttggcaggaaagaaagagagaaggatgaatggagagtaagaatgatagtaacttcatagatgatagagaggatagtgattttcctttgtgttgtttggtattaggagtaaaggtgagaggatggagaggaaattattgattaaaattactatactatccttattagtatagatacttataattttttttaaaagataattctagtatttggtgtgcataatttgttttttctctagtccttcataaaatggggggattaaattttaaaattttgaaggaaaaagtgtattttagaatttgggataagatgaatgaggtttcatctcaaaattaattgataatgggaggagtagttcattcatcttatatattctattatctttccacacattaacaatgtgagactctataacatccccctttaagatagtagctgttttattagatcaccatcttggacaactcgatcataagcagctc

SEQ ID NO: 197644 - DNA, 1088 bp, Cannabis indica
tctttttcttttgaggttggctgacaggtttggatttcttttactgttcagtctgggtagcctttcttgaagtttcacctacctttcctttccttttgtccttatgaagatcataagttttgggatttttaggattagccttcccagtggtgttattttttagagctgcatgagtagttttgcctacagtggatagtgccttggttacggcctccattctcgctattttcttgtgcatcaacaaagaaaactgctcttgcaacgataatttatcttcagatatttttaactttctagccataatgaccataagatctatctcgtctagatattcttcccttttagcatcaccatcagcaggcatgccttggtgatcatcctcaggcatatcttcgtgatcatcctttggtacatcttggtgatcatcctttggcacgtcttggtgatcatctccaacatcataagaatcattctcccctgattcatcatctttagccatatgatcttaagggataggtttcttgctaatatggtccttcttgtggcgattagtcacctcatttggatcttctgcatcacccgttttagcattgggatcgacatcaccctttttgggatcattgaaatgaaaaatagactttgtttgggcgaacaccataattactaaacataatctgggatggtatcactgctttcttcagctctcgatgaaagcaccaaaatatttaccgagaggattcaatgtgtatttatagagtaatagaggtcatacttagttaccctttcccactaatggggtgtttatagataatacattactttgggcttatcaaatgaagcccagcccatgaggcaatgactgtatgctgacttggaatgttgatcacagtcacaactattgttaccatgtcctttattatgaataattaattatatactaattacttaatcttcaattatgtagtttcatattttagcttgatattattctttgtcagagatataaggagagtagcttccttattttgcacaaaataataaatgggaaactataggtggcttctaggtacacactgaaggtttctttc

SEQ ID NO: 197645 - DNA, 2697 bp, Cannabis indica
aagtgacttatttatcattggacaaaattgacctaaagatttacacatttcatctttgagagcctatatgaacatttaatcaaatattataaggttaaaaaatatacaattttgagactttggcgcaaaaatctaaagatacacaaatttgtctctaattgtaaggaactaagccatatttgaagggccaacaagtgctcttccataggctgccggaagtgataagaatttctttgcttttccaacataagcacgctttgtgaagttatcatagtcattggcttcaatggcatccaatatctgtctatatagcaacaaagatgcccacactggccatctactcgctgagctgagatcagccacacccttctctgcctcgtcgaagaacattcttgctcgctttatctgtcctttcatgaaactccgccacttgtcagttactttcccacgaaagatgtcctcgtccgaaagaccagcacgtgcaagttcatcttgtggaagatagactctacctctcctagcactgtcaccatcaccaacattgtcactcaagtcagaaatagcaactatgtaatggaaagaaacaatgtgattagactcaaacttcaatgtgatgctaaaacaggaacaaagaggattcagtagggtcaagtaaagagtgaaaaggtgtaacaagaatcttactcttctccaacatctctgagtatgttagtgagctgattagctatcccaagagccaatgcagcattgtaaacgctctcagttgaagcctttgattcgggtgctatccccattacaggaacactcataagtccaacagtcccagcaacatagtagcagtaaaggtatagttcatcgaaattcatgtatcttgattttatcaagtctaacctcattccttctatcatgtccctaaagggctgtacaaacaaagatcaaatttgttaagtaaaagacaaattttcactagctaaaatgcaagcaaatgatgtatctttctatacctgtatgtcgacaggaaacttcgatactgtatgagaaagagcagcatcatacatatcaaacgggcgaccttcgtacagatcagtcaatcttttctcccatctgtcaagagcctttggtgtgatgtgcgaagcatttggcccgtcaacgagctcatcagtccttctgcaccacactgtagagagaagagaatacattattcaattacctcaaataaaagagagtaaagactcaacagcagcaagccaattgagatggcacatcatgtttggatcattcattcatttagttaagtagaaaaataaataaataaaatggggttctagatctgaatcaagcctaaattgtgtaaggaacatggccaaatatcaaactcaataacggtgcattgcttttctcttcatatgataaaagtacttagcttcataaaaaagcacggttagtgattgtgttattgtcatccagaaatgcaagggtgatatcaatcatacatttatatagaaaatttacacagcaaaattaatagacaaaagtcaagagcaagcaaaatgtaaggaatgaacaaatcatacgaaccataaattgcccaaacagctttcctccgttctggtgtcatgagtaaagtgcctgagaatcaagaatcaaataaatctcaattagtattttgctaattacatttctctcaccatattcaaaatattctcaactaaagaaggattaaattaaactaaaggtggtacttttctatttaattcattttttaaaagcattggaatgaataaacaaatacataaagttaaccattaatgatatactactttccgaccttaaactagaaaacaaaacccctttttatcataaacataaacaaagagataataatatgaaaacaaatcacaaccaatcaaaaacacaagaagaaagaaatgtaatgaaatgaaaaaagtacccagataaaaagtcttggcatactcagcacagacttcaccacatcgttcataagcttcattcaagagatcccaattggttgttccatcaattttaatcaagtccaaagatttctctttgggctttttacgttctctaaccaaagccgcttgcttcaacaccacttcataaactttctcctccgaagatcttgctgggtttgcgatagtacccgataaagccaaggacccacttgagaaactcagcttagaacacattttggacctcttttgtccaccatttttggctgcaaagctaaccagagagttaccattctctttaagacaaacctgtacccaaagaacagcagccatttttgaaaaacacagaaaatgtgttcagtttctcacttcagaatgaaaaagaaaaagaaaaagtgtcctttgatttggcaaaaacgagtggacactttttttttctctctctaatttttttttttttggtttattgcaaatttagtgagctttataaagaaaaggataacagctgagtctgactcaccaaaatatgtggacaagactcataatttcattattattattatttttattattcgagataacttaatttaagacttattaagttgtattggaattattatttaagctgtttattataagtattaaaaaattgactcaaaaaaattattgacaaatttaaatctgacttggagactcaatgaatatatttttttaataaaaattattt

SEQ ID NO: 197646 - DNA, 817 bp, Cannabis indica
atatatatatacattatacataatcagatccacaccaaacactggaaaatccatcactctctcactaattaattacacacatatatatatatagttatatatatagtacttgcactaatatatatatataattattataagttcataataatatgtttatatatatatattgatcagtagtactgctacatcaaaaggagcattttccctgatcatgattattaattaagttgataataattataaacgtacttaataataattaatcaccactaattaataataataatgatgattagtggcctttacgtggatcatgaatagggtttgctcctgggtcttgataatctaacattgcatcaactttcatcagtagtttcctattaattcccttcatcatcatcacctatatatattaatttaattaattaataattaacctaataattattacgtataaatattcataaaattgtttagagactatatatatatatatatacctcatcttgattatttggtgtgtaattagtgagctccataccaataatactcttggaattgtttgctcctataaataaattaatttaatgtttgtgatgatatatatttcaaaatataggaaaacaattaattaaagagttgttaattaagttttaattacctgaaaagatgagttgatgagtagaaggtacatgaggatgaagatcttgatctgttgaggaaccatattattattgattattttcttttttttttttcttttttttggttggatgaagatattgagattgaatgtatagtagatatgtagata

SEQ ID NO: 197647 - DNA, 2691 bp, Cannabis indica
ccattggagaccatagtagagagccttggcttccatttcatgaggttgcagattcccaagcataggcttagatagagcagctttaacatgaccacatgaatctctaataattgctccaagtcccattttattgctggccgaatcaatagcagcatcaacattcattttcaactttgttggaggaggagcaatccataaaagatgagtcgcagcagaggaagattgcagaccagattttgaagccttcatggtctgctgaaaattgcagacataagccagagcctttgctgcaattacctctggtttttggggatctttgccatgaataatgttgttcctatcataccaaatataccacataatgcataaaatcttttctaagtcagatttggtgtaagtttttgatagcaacaacataaaatctgcattggttaatcggctggcagcttgaaaatcaaggacaaaatctgttgaacgccagactgctttagcatgcttgcagctaaataaagcatgccccaccgattcccaagcattggaacataagctacaagccgcagatgtaatgatttttcgttgaaataaagcagcagccactggtatggattgttgatgagctctccatccaaagattttaatttttgatggaatgtttaggccccaaaaagatttccaccatgagctatgagttgctgaagtggaagtttgctgctgtgtttcaagggaacaagcaaaatggtaccccgactgtactgaatatataccagaattgtgatggttccacacccaaatgtcatctgtagcagactcagcaagaggaattgtaagaattttggctacatcaactacagagaaatccctggtaagtgaatccacatcccaaatgtagtctgaggtgatatattgtgagacacgattttgaggtaaaccagtataagaaactggtgtaaatcttgtattccctggtatccaaggatcaaatttgcacttgatattttgcccagtcccaaccttaagcctcacaccttgaagtaacaaatctcgaccccaacatataccttgccatgtcattgaagaatagctacccttaacagcagtcatgaaatcaccattcgaatagtatcgtcccttcaaaactcgggctagcaaagtatcaggattttggaaaatgcgccaagcttgcttagccaacaaagcttgattgaagtgaacataagaacgaaatcccatacctccctccatctttgttttgcataggaaattccatttcttccaatgtgtctttttcttgtcttctgttgatccccaccaaaattgtgccatcatggagtctaattgattgcagaaactcttagaaagtttgaaacaactcatagcatatgtagggattgattgtaccacagctttcaagagaatttcttttcccccaatagaaaatagtttgtcattccaagcatgaacaatttccatatcctttctttgatgtctgcaaaaagaagcttcttatcttgctcagaataagctggaagacctaagtacttttcatgacattcactaaccggcatgcccaaaacttgactaaaagaatgtcggattgaagctggtgtattcggtgaaaaagacaaaacagacttgtcttcattgagaagttgaccagatgctcgatgataaatatcaagagctcttttaatggcccccgaagatctatcattggcttggcaaaagagcaaactgtcatcagcaaacaacaagtgtgtaataggaggagatcttcttgaaatagctagtccttgtagcctaccaatagactcctcatattgcaacaaccgagagagaccttctgagcatatcaagaataaataaggtgataaaggatcaccttgacgtagaccacgctctggagtaactgaccctttaacttctccgttgacaaggaaagaaaagaagttgtgtgaaggcaagtcataacaagtgtaatccagcgaatattgaaccccattttgcccatcacagccgcaatgtaagaccattcaactcgatcaaaagctttactcatatcaagttttaaggcagcataacctttattccctcgtgttctatgcttcagactatgcaccatttcaaacgccactaaaacattatcagtaatttgtctattgggcaagaaagcactttgagtgtcagagataacatttggtaggacatgctttagacgaagtgcaatcatcttagaaaccaacttgtaaatgacattgcaaagactaattggcctgtagtcctttattgttttcggtttcttcatttttggaatgagagtaattagagtcttattgatagctgctgggttggctccatgatttaaaacattcaagacgacttgtgtaaccaaaggaccaacaacctcccagttgtgatgataaaacatagcagacataccatccaaaccaggactcttatcggctcccatagatttcaaagcagaaaaaacatcctccgtagtgaagtcatgaaggagaaagtcattatgagcctctgtaattgtggttggaatggtagagaggacatgatttagagcccaatgatcctcctctgaagccttaaaaagagagtcaaaataggttgttataacagaggtaatatcatccttagaatgccaagtctgaccatgatcatcttgtatacttctgatat

SEQ ID NO: 197648 - DNA, 1100 bp, Cannabis indica
agggatacccttcaattagacaataaatcttaaattcacgagtaattctaatcactacgtaaaaaaaaattaaaagtgatattatttgcaacatccaggggcatagagtgaaccaagtccaacatggtgttactaagcatcttcaaatagcgaactttttctcaaggtcgctagcactgtaggctgtaggtggtgatgatgatcttgagttttgtaccaaaacagagctttagacattgtgatgcagatgtaacaaaataggaccaaatcgtcatcattgagtttattagatttagtaaaagagtttcttgaactaacaatcactttgcataggtttggattccaatttgtaggcttagttcgagtctatatcgttgcttcttaatttagataaaagcctattcacaataatgcttcaaatagctatgtgtataatcaacatttacattagacgcattttgtttagagtaaattacgccaagtgaccttaatactaaataatttatagatttgtcgttgtctatttaaatgtttgaagtatcagtgtattaaaaaaatatttctctttcatttttatatttttgatgagtttaaaatatttttcttactacaattataatcgtttagtctcaaaaattatactatttcaatctactttttaagatgattattataatatgcaaaaagtatatattttttagctattattgaagatgaccaaaatcaaaagtaatataatagtttctttattatttagttaaccattaatcattttttaaaatctttaaacaaaaattcaatatatcaaacaactataaattactataaagtatttaattattttatattgagaggttacaagattgtattccaattgtatacttaatttataaataaattttgatagacttctaaaatagcttattaagaaactggaaatattttacttatgagttacacttaaaataatgatctactttaattttgctaaaagcctttataataatttgttatactttataagtttgatacatgggatgggaagggaaggataagatatttttaccgaataaaatgttaggaatcaaaagtaatcttat

SEQ ID NO: 197649 - DNA, 920 bp, Cannabis indica
cctggaatattgaattcccattacattttcaaatcaattttcttgatagcctgtccaattattgatatatttataaattgcataaacattgaactgacctctaaaattctcatagctgccatgtgtgtgtcccaaatgatatttcccatggatttcaatcacatgatatcaaaagccatagacaactattaaattgagtaacagaatttttgttttttagtatcctttgatgtaatctaatgtgaatgataacatacctagacctttatgcctaggagattctctcatcaaactagcacaaaatttgtccccatcattcaacgagtgtttatccataaattccatcagctctttgtatgcctcgggattgtaactctgtcgtttttaattaattaataaattaatcaagaaccatgtttgctaattcatccaaaaaaaaaaaaacagtgcagtatatatgtagattttttatatgaacctgaagctgagcaccgacaatcctaactgctatgtaagtgaagaaattatggaggtttttggctgcttttgcttctggtgatgcttctccaaatcctgccatttttacataacaaagcaaaagttccactctttattatatttaatttacgttagtgtatttatttgtagatgagagagagaaagaagaaagagagactgacatttaaatacccaccagggacatacatcttttggcatcgtacgggagtagttgagtagtggtgagtttgagatgttcttggtttggaggaccaaatgcaattgcaattagttttggttcttctgggttttgttgggaacagaaaatatgaaagttgatgattcagaggtaatgatactactgctgagcctgaagataccatggcgataagaaagttggaaaccaatgactcctgtttgta

SEQ ID NO: 197650 - DNA, 4020 bp, Cannabis indica
tttgtttttttcccttaattttaagataaaaagatattataataaaataaaataaataaaatctatttcagaaaccgaggataatttggttaaataaaaatggagcattaatcctaattgaagggtaataatatgaaaaaggaatgtaaatctatttacttaatttttttattttgatttaaaaaaaaggaaaggaaatttatatatacatatataatatggtaaaataaaatgaatgagattgtttctcaaaacaaaaccctctttctctctcttctctctctctattttctctcgctcttttttttgctctaattccggccggcagcaaggttcaccaaacaagatttctgagagtcgaggactcgagtcaatccattctaaggcatcgtcgcatcgcatcaggtataagatgaccagattaagtggtgtttgttaggaatgctaaaattgatcatggtatttttagggtgctttttgtgtaattggaggtaattatacaatttggcatgtttgtctgatcatgtaattacactgtaactgtgtaattggaagtaattgggggtcaattgcactctccaattctcacggcccatgaaaattgaatgtaattacactgtataattgctaaaaactttccatattaaacattagttactaaaaaatattattttctatttaattattaactattttccaaacacacccttaataaattaattgtatatgtatgtgtttgatttttttgattgaaattattgatctcatgttcttctgacgagaataaaattaactaatgatttttgtatacaaaaattgttcatatttcaattattagttcaacttcttattattatgattataaatcttttcctctctctctcggtttcaaacaaaaattgtttatagtttaattattattattattattattatttaggtgttgaagatagtgatgacaaagacaatcacaagccgatctacttacaatttaagaccaagaaccaccctcgggttttttttctttttattttttttttactaattatagagtttttaatttaattagttcctcgaaaaatcatggctctggcgggagcaaacagaagaagcagccaccagggtaatccaaatcaatttttcctttctagttatttgaaagataagattgtttcttaattaattggtgttaatgtttgtgttttattaggaggattataaaatatcgtcctacgccaaaacaacaagaatcgcgtaatcgtaagtatgaagagcagtgcaagaggtgagctgaagccgctctccaatactacaataaaaataataaggttaattagtattttaattacatttatgttcctactaaagttttaatgtttgttatgtcaaaaaatgagttattaacagatttgtgtaggtgtaattaattatttagggtatagaatatgagcttgtagatgctggaagaagccgtccttttttgcccaagaagggaccgggtgttttctttcattgtaattttcaagccaagggcaaaatcgacagctcttcttcttcttctgttgatgatgatgctccgactatgcttttttttgccgaaatatatgactttacctatttgaactctatgttagtatttgctgccctcttgcccctatcgaaagcggtacttatctacctaccttaccttatcatacatatccttattcttatattactttaggttaatgggtttatgttatgttaattctttttgttacatgtattagtttccatgggacttaatggttgtgaaaattgctttcatcggggcaatcgaataattgggatacatcatttacaacaccctcgtggtgtgaaatttgataacaagggtatagctataagcttattcatctcttttctgaattgatattttggttatatatggttagctagcttaattgctttgttttgttttaattaattgcttttttttctttgtttttcagatgttgatgcgaatggagttcgtcaatgaattatgtttacaaataatgcaattcttgttgcttttctttataacttgtcttcttttctacttttgtattggttttcttttctacttaatggtagcaggagtgggttgtgaagactgatagtaggaaagatgctcctgaggccaaggtggatggagatggttttaaagaggttataaaaggcaaaagagtgcaagggaagaaggtgtctgctgcaacaaagactagtaattctttcagtatacttgcagaagacagaagtgaacagcaacatgttattcaagagtctgagatgggatccattgagaacacaggagaggggggaggtccctctcttgataatggataagtttttgagttggaatgtccaaggagcaaacaacattcaaaagcagaggtccattaaacaatttattcaagctcagaatgttggtttggtgggctcctcgagacaagggtaaaggttcataaattgggaaccttatacctaaatgtgtttgaaggttggtgtttctcatcaaatattacttggcatcatggagggaggattgtaatagcatggaatccaatgagatatatggtggacatcattagatgcacaagtcagttgatgcatttaaaggtgactactgttgataacacatattgtagtttcatcacaataatatatgccttgaatgataaaaatggtagacagaggctatggaaagatctcagggagctggctactatggataattggctcttaatgagtgattttaatgatattctggctaaagaggagagagttgggcaaagagtcaaatattacactgacacaaactttatagagtgtgtgaattattgtcaactggaggatgtaaagtctacagggaacttttttacatggtcaaataagcagcaggggagggatagaatttcctctaaaattaataggatcatggccaatcaagcatggcttgatcattatcaaaatgcagaggcaaacttcctcaatgaggggctttttgatcactctcctgcaattctgtcattgtatcctagatggtcgaatgggaagaaacctttcaggtattttcgaatgtggaaaagtttccctgagtatgaacagaaggtcacagagatttggagaacaaagactaagggcaccaaaatgtactaagtgattagcaagctcaaagccctcaagggtgtattcaaggagatcaatagagttggttattttgacattcacacgacagtaatacaagctagagaggagctaagcaaaaaacagaatgaggtgcaccagagccctttagatgaagctgctattgttgaagaaaacaatgccagaaatagattaattcaagtgcaaaaggattacttttcttttctgcagcagaaagcaaaagcagtttggattcaaaatggagatagcaacactgctatttttcatgcgaacgtcaaatagagagtgaggcagaaccaagttttctcaattgaacatcaaaatggtgtccgaataactgaaccaaagcagatttcagatgcttttgtggactattatcagagtttgttgggttccaaaatggagaatagaaggaaagtggtgaagagcatcatagcaaggggcccggttctgagttctcttcaagctgaatcccttacaaaaaagttcaccaaagaagaagtgaagcaggctttgtttgacatacctggcaacaaggctcctggccccgatggctactctattcttttatcaggacaactgggacctggtgggagaggacttggtggaagctgtgacatccttcttgaaaaggtaaattgcttaaggagataaatactataattttgactttggtgccaaaggttaagtgtccaaatacagttaaggattttagaccaatagcttgttgcaatgttatttataagattgaaaccaaacttttgtgctctagaatcaaaaccattcttcctaatatagtctctcaaaatcaaggaggctttattaggggaa

SEQ ID NO: 197651 - DNA, 943 bp, Cannabis indica
tatatcattgtgcaatgtttaatacgtaccttttaattagcatttttcaaattttaagagattattaattacacaatgttgtgtgtaatatatagggctgattttgagttgatttgggctttaagaaaaatgaatttttgagatttttataaatactaaattaaatttttaattttcttttactgtggacagaatttttgggcgttgggaccattttatttttataataagggtccaaatcatgcactcgaactttgacgtgtagcaaatcatactccttgaattttcattcatattagactttctttaattaaaattaaataaaaatcattgaatttttaacgaccttagaagttcaggggggtatgatagtacatatcaaagttcagagggcaaaaatctatcacatgttctagttcggtcttgggcataggtgggctaggcctgtgcctagagcccaaatagtgcaggggtccatacaaaatcatctccttttaaaattacatattttttttaccaattttaaaaaataccatattttttttaaataagggcccaaaaatatttgttttcttattgaccaactaaattttagcatcggtcctacacatgtggcaaattatttttaatatataagtaagactcatcttaaataaaaataaattagttaaaattaattagcctcataaatatgtattaaatttgtgtatgaataactttatgttttattgaagttttgtcatatgattgttcttacagcttggaacttttgtacgcgcttcttagtcaaagtattcaatattttactgatgaatatgagttttagaatgattagaaaaacttgtaagttggaccattaattaattcaacttatacattttgttcatgatgaatttggatcttcttaatttggcttgtaattttgctaagaatttgagtgact

SEQ ID NO: 197652 - DNA, 944 bp, Cannabis indica
gctctcaaaaactccagttacaagctgtgagtccacaattaaacaaccttggctggactgttctgtgtcagttaaacaatgcaacttctaaatgagtaaaacattttacatgctttttatattttactgatttcccttgaccacagtccacaatttgttttacatctctttccttcatatgtattggagccatgctcctcttgatggtttttgttatttcattttcaataaaattgttttgatcgactttttgctataactgttatattatattttttctttttgagattctgttgaaaacttattgttgttcgtttttttttttggacagagcaagtattcctttgaaagtttggttttatacattccttctacattgaggcatatatcaatgtcttttctcattacagttactatactggcttgttacttatatttgaatgcatcatttcttttgtgccttattctttttatataatattgccatttttcattatgattcttacctttcttctactttatccttattatacttgggggagacatccttgattgaaaactgcaaattttaatacgtgaagttgatacggcttttagtggttgttatttttgaatcatataggtatggacgttatcgcccttgcggcaacctattatcaacaaggccagaaggctggcaaatattgtggtggcattatgcacaagaatctgttctctcagatgttcgtaagagattaaagagaacatcgtggagatactttggacagagattgtaagtcttaatatgtttatttttaccaaaatgggtacccaagtcttaatgtgaacttcaactttatacgagtttaaagccaaaacatgctctggcataaaattgaaaaggtaaaaaacaaatagttgtcttttgactttcagatttacacctcatttactctctctctctc

SEQ ID NO: 197653 - DNA, 1547 bp, Cannabis indica
gagcgaggaccgtgcaccgccgctgccgtcatctgcgaagaggcggctgtggtgaaacgatggaaaccctagaaccctaacatgatggcttttccttttttatttacgtgtataaccatgctccgatttaattaaaaagaaaaaggtaacgaaagctactacaaggagaaaaatcttagaaagccatgataaaaaaataatagaaaaaaggattagcgatccatttagtgaatggcatccgctgcaattatttcgagaaattcctcaaaatttatcttgccgtcttgatttttatcaaaagttgtgatcatggcttgacattcggcttcagaaggttccataattcccaattcaaatagaaccttcttcacttcctttgcatcaataaacccatctctgttctcatcaaacacaccaaatgcttctctcagttcttcccacttcacttcctcaccaccaccatcatcttcatcatctccttcttctgtttccccaccatcactactctctagcacttctaattcctccatcatgatccttttcacatctcctaaatacattttggtgtcttcactttttgcatcaccaaaacgaacaagtttattattatttggaagagtttttgctgctacttcttgaccattatcatcatcatcatcatcatcatcatcaccgtacatagtcgtcttattaagtagcatagcttttgttgctaccatttgatccaatatggataattgcttctcataatattccatgttattagaacaaatgaaacagcgaaatagatttagaatataccttacaattgaaacaaagtctccgaccattacgacaaagctcatcatcattaatctagtaaataggatattataatctttgagatatttggccatgaatactttcatcaccatagcgatgattagttacttggtatataagagtatagtagcaagtgtgttatataatgcatgcacgttaaatacattaattattagtggtatatataatatatataatgcattgacaaatggaccaagagtccttttgtaaaagaagtggaaagtacatagtgaaaataacaacatttcttgttactctactttatcttctagagtggacttgggttcagggggtcatgcaaaattataataatatattttgagctaataagtctttctaaataataatattattaagataatatgataatatataaataaatcaggtaccctcccactacattaataataatagtttcttgcattgattgaagttcattatcattattatttatttatgttactcaattggtaaaaataatagaaacttcgtggatatgacatggaaaaattattaggagttgtgcgtaagtggcacaaggtttggtcaatgtttatttactttagagttccttggaaatctcattgatgtgattttcgtcagaaattcaaggccgaacataaaaaaggattttcataattccttcaccattgtaatagaaagcataatactactgctcatgctcttgttaaattggttttatc

SEQ ID NO: 197654 - DNA, 1291 bp, Cannabis indica
aattctgttaatgatgtaaaaggctgtgtataactaagcttctctactcaataaagaattagttctggttttacattttttgcctcttctctgtttttctgcttcattgttcttttactatgttttctctaatctcatattctgagattctacatggtatcagtcgcctctgacgtcgtcaatggagtccacttcctcagatcctgctcctgttcccagaactccgtccaccgcgacaacaaaccagatgcattccaactggaatccgttttctcactctttaacctctgttttaactgtcaagcttgatcgaactaatttcttgtcttggaaatctcaggtgattcatacggtgatcggtcatgaattagatgagatccttcttgctggcattcctccatcgcccactcttgtcaatggcgaaccaaaccctgaattccatcagtggaaagcaaagaccagctgcttttatcatggctccgatcatcgatgacagaaggtgttcttgcttatgttgctacttgttcttcatctcatgcggtttggcgagctctagaacaaaaattctccagccaatctaaagctcggttactgcaactcaagaatcagctctccaccatccgcaaaggaggccaatccatttcagattatgttgacaaaactcaggccattgctgactcgcttgctgtagccggttcgccaattcttgatcaagatctcatcttacaattgttgaacggccttgaaccagaatatgatcctgttgtctcaggaatcactgcaagaagtgatattctaacatttgaagaggttcaagcattgttactttcccacgaaagccgtcttgagcatcacaattctgcaccgattcaaccatgaaacttcaagcaaatgttgcatttactggctcacgcaacccttcatatcgcccacctcagccaacgaagtatggtggcagaccaaactttcgaccctagaatcaacacaataagcctctctgccaactatgtcttcgctatggacacaccgcaccagtttgtcaccacagatttgacaaaacatgggtcacacctaaaccaggcaccaagggcccttcttcatctgtcaccaacaacacccctcatgcctatatggctgagcatgaattcaactatgaccctcaagcattttccacatctttcattcttaactttggtgacgatttaggctggttcgtggatacgggtgccacgaatcatgtgacaaatggacttgacaatcttgaatttgcagtgacatatccaggaactga

SEQ ID NO: 197655 - DNA, 1057 bp, Cannabis indica
cttaaagtactccatatctgaaacgacatcatcatgagcaggacttcctaaattattagaaacttgcttgtctggtgataatgtatattctgtgtagtcatcttcatccgactcggtatgtattgtagctgatttctctatgctttccttatttgtatgagtttgcttctctctaactttacgatcattgttagttgtagaagttatcaatgtgtcatttgcccacaattttgatttaactcttggctgcataacttgcagaaattcttggacctgagtgcccatattattactgtcctctttcagattatttttctctcgttctgatcccataaggatagatttttttatagcagcaactttattcccatctttagttgttttttcatcagtttttgaagaatgacgactccatgggcgagggatgtttggatcaccaactttatgagcaatctgaaagtgaataaattatctcaatcaaagttcatgctaaatagtcttggatgttagcacccatgtttagattcctaaattaaaactaatcaaacgaaataaaacaataacatataaacagccacttcctcactctgtgacagtgatattggctaataacacattccacactaaaaaaaactggtctacttaggcttatgttttgtccaaaaaattttgatagttgccaaatgtccataagaattggtgtcaacaagtaaaccaaactcacaatccaatgtgacaaaaaataataataaatcaatgaatcagtaaatttattattttctactcccaattgtaccagtgttgcatggcatgaagtccgaaacaaagatgagtaaaacataatattttctctacaccagaaaagaaacttcaatgcaaatgctagactacccaccacatggcaaacaatatgcattaatgtgaatacaatatactgtaagaataccatagcccagtgacactgtcaatccagaaattgaaaaaacaaagtagaacaatggacaaatatatattgaatcaatatgtatttcaggttcataaaagacatactgggtaa

SEQ ID NO: 197656 - DNA, 1213 bp, Cannabis indica
tttattttatcaagttagtcttatacggacaaaaactttatttattacatagagaataaaataatttaaaattgactattgtagtttaaaatttaattaattatttattcttttaatttttaattaaaaaaaaaataagacatctttttcaaattttcgcctcaagcctttttcttaccttgagacggtcctgactatggtaggatctaacaaaagttctctagcggctaaaattgtaaacaaattattttctaaactattcttttataaaattaataagatgtatttttttgttgaaaataatttaagcttttttttttttacattgcaaataatttacttgaaacttgatttcatttattttagccattcttaaaatgaaattaaaatatagcaaaaatatgaacaagtcaaatacaaagaacattaactgtacgtgggcccacatctacctattttcagctatcctatttcctaaaaatttgcatctcaggacttttaataacttaaaaaattttaatatacagatggtccattgtaattaaagaagaatttaattttttaaacttatgattggctcactttattatctcatactatagggaagaaacaagaggtcctactatagatattccctatatatatagtggtccatataaactcatccctatacatatataacttattataagagtgtcaatataataatcaaaacccatatatactattactcttaacaaaaaaatttcattacttctttctggtcacaatcttttttgtctagctataactcaccacagtccacaccaccatgctctcatcttatataataatagaaacttattatagaaaaagtttgaagaatatcctttttttttttattcattaactaaatttattttttataatatttaattcaaagtagaaaagctcatatgcatactctagggtatccaataacatctccaattaaaaaatatagaaatttatatattttttgagtttttatgcaaaaaaaatatatatataacttttttcaaaaatgtaatattatagaaaattacaaaaaaacgaaaaaaaaaaagttaaaagaaaaataataaaagaaaaaaaaacgacataaatgtaactaattactctaaactgtttttcccattctttgttaactttttttaaaaaaaataaaactatctataaataatttttatttttt

SEQ ID NO: 197657 - DNA, 995 bp, Cannabis indica
caagaaagtataagtaactctcgtagttatcaatttgaaagttactcaaggactagatccatgagtaattatgacaagagacgtcgtgaacctgacctcggtgaataattaaatcgaaggcagccaaacctacgtgagcatttaaactgtaatgcaccagattttcataacaacctcaatcaaaatgcagatcaacaacatgtggatccaataaaattgtgagtaatatagttgaaagacaagtttagaaaataccaggatggagagtatgaaaaattaccagagtatgattcagatgaagagacaaaaccattccaccttgatattctaaactcacaatttccttaaggatttaaaaatccacatgtctcgtaatatgatggtaccaccaatcttgtcggccacatgaataatttcaatacaataatgcgagcaagtaacattttgaacaagttgtggtgcatattgttcccaatttcattaacaggggcaacaagtagttggttcaacaagttcaccaaccattctataacttcataggagagattgtcaaaagatttcaaaaagcagttccaagctgcaagagatcgtcgaccagaagcatcttcactgactaatgtcaagcagaaaccagaagaatcccttaaggcgtacttaagttgttttagtacagctgcagccaaagtcagaaatttgattgagaacattcaattgaaagcccttcaggttgagattacgactgacttatctactgcgaagggagaattatgtgatgatttgcaaggacatcctgtgcgaattatcaacgagttcaatgaaagagcacatatttttgtatgaaaagaagaggcatggaataaaatcaagttgttaaagttaggctcaggagataaatccaccactagtacagcaacatcgagcaccgtgattactaaaatgaaaaatctaaatggtttaaatgccaagaggacggatgaatcaagagactcatccaa

SEQ ID NO: 197658 - DNA, 662 bp, Cannabis indica
aaataacatattgtgatagtgctagatactatgattgcatttagtattactcttaataattaatgatatgagagtctcttatgttttaattttatgcgtttaattctctgattttttttttaatttttttgtggcattacttctttaattttacttctatttacaagtttgaggtactagttaaattgttatccgacttttaaatactaactgaatcattactatgtacacttgtgtataaataacatgtttttattagcttcaaaattttagtgtcatatatatacatctgtgtataagtggcaatcctaattagtattgaaaggtgaaatttaattgatgtttcaaatttgctaacaaaattgaagggatattattaaaaaaataaaaaataaatgagttatatgaataaaagataaaacataaaaggttttttttttgctgctaactaaacaattcttagcaagagtaaaatttagcatattcatggaactaattttttgaaaagtgaataaacaaagtgtcaaattctaaggtcaaatttggtataaaaggagttaacaatttttagaaaagtgaacaaactaattgtcaaatttttaggtcaaatttgatataaaaggagtttaaaattcatagaatactaagaatagtgataaaaa

SEQ ID NO: 197659 - DNA, 777 bp, Cannabis indica
atatatttatttggtcatcccctaatccaatgtatatatttcgtgtcaacaaattttaattttaacccaacctatcatgtttttgtgttaacttatcgtattagcatgttgattatatttatgttacaatacacattgaccaacatgattatttataattatatcaattttttttggacccatttaaataatatactaaataaaaatatattaaatcaaactgtaaataaataatatttattaactaaaataatttatcacaaattatcaatcttgtattcttgtaaataattttctttctaatctatatattttttttatgaaaataaataacaaatttaactataaactaataattttaataatatattagatataaatggatcaattcgtgttgatttcttgtcacatacgttaatcttaatccaactcaaatagtaatcatgtcattcgggtttgacccaatttcaagtgacgtatactttttatgactctaactcacaataatttatatcaattttgtatggtgttatcgtgtcttgacctgaattgttactcctaattatatcattatggtttgtttttgtcatatttttgtttcattctaaatttggctttaaaagctatcaatgacaccatcaactttatctgtcaaataattttaattttaaaacacaataacgattattattgtaccaatcatctacatgtaatatatattaaattaaaagatgaaaagataaaatagtttacctcttgatgaagtgtcattgctat

SEQ ID NO: 197660 - DNA, 1320 bp, Cannabis indica
cgtgtataattaggtgacaacggaccatatagagtagagttagagaggcccgtggccggtatttgctaagctaagcccacgccatgcccatctacatcgccattaggtaatggctttagtcagcaatctttgaaattccctaatttctttttctttttctttgaaaattcaaattgcacattttccatatttctaaaattatttttggttcctgaccacacaaaacaatatatataaatatatatatacaaataataataaaaaaagtaaagtattactctgcctctgaagtttgtttagtttttttttttaaatttcttttttatgtttcctttttttttttacttaacatagttataaagctagtgcccattttattttgagtatataaacatattacattagtttcttcgtcactacttactaatatcctattttatcagtgtgtgtagctgacagtacttttacaccgatcagtttcaaccccaagatggagttgttcaactgggtctctttgattttagtcatttctcttctaggacctgctcctatagttgtagcatcttccattaactcagatggaaagccacaaattgcgtctagatttctcaatttggcgaagaaacatgacctgtttgattggatggtcggaatcaggaggaagttacacgaaaatccggaactgggttacgaagaattcgagaccagtaagctgatacgagctgaattagataatctgggcattacttataagcacccagtagtggttaccggtatcatcggctttattgggaccggaaaaccaccttttgttgcgattagagcagatatggatgctctgcctatgcaggtacgtgtgaattgtgggatcgtacttttttgtctttccttactttaagcgaaaactctgtgtagagattagttattttaaaagtcgattgatttgtgtattatttagttttgacggtaatttttaaaactggtttttaatgtccagagttagattttgccatgttgatgattgggaaatcgagaattgtgatagagaaaaagagtgacttttcctctttaacacactttatgtgaagatatgagttctttgtcaattttgagtcaacggatctcaattttgcaggaaatggtggagtggaagcacaagagcaaagtccccgggaagatgcatgcttgtggtcatgatgcccatgtggcaatgcttcttggagctgccaagatactcaaagagcttgagaaagagttgcaagtttgttctcttatttttgttctactgttgtttgattaaattcctgaccgaaacttaga

SEQ ID NO: 197661 - DNA, 2590 bp, Cannabis indica
gattcggtaacgttactctatcaaaagagatagagagagaaaaagcagaacaaacaaaggtccaaaaagcaaaagcatttaaactactgttgaaatattaaaaggagatggggaagtgatcccctactaccgagagtaccatgcaccgtcattggagagtcgtttgtagtctcacattagtttgacttgtgttgttacgattgactatggtgggtaagatctggtgaccaaactcatctcaagaactatagtcaaaatgagtcattattagtggtgatggggtaggcaaagtgtctaatattattgcttgttgggttttataattagttagtgattttttataattttcttgaaataaaattattagacttttattttactttagattaacttttatttattttatttttttttattactagcaacagccaaacaacaagcaagacaaacgaaaacaacagagaaaacaaaccatccgaaataacctacagacgaatacccagaataacaagggccagggaaaactaactactaagaaataactaaaaaaactacaaaaaggaataactactacagccgaaaatcacctacatagccatctgcaatccaagattgcagggaagggaaccatcaaaatcggacaaagcaaaagtgccaaagtggttattctgatttgcccatttggccaaagcatgggccacaccattatgtctccgggaagtccaatgagtctcccagttacataaagaaccagttgcactaaggaagcttgaaatcagctctctcgaattgtggtgtaatttcttgcaatctgaacgggcagtccgaattgcatcaattgctgccgccgaatcactgagaaagatcacatccttgtagcccaatgatattgctgtttctgctcctttgctgatagcatggagttcaccagggagaggatcacaatagttcaatagaaatgtaacaatttttacaatcctattgtcctcatcatggaatatttgtcgcacctgcagattgggaattacctatagatatgtctgaattacaaattatccaacctgggggaggagcaaaccactgtgagtcgtggagtgtagcagttaagttggaattcagcaactcaatttccttgaatcgttggttaatcccgttgatcactaagcagattggagttgagttcccttcatgacagagtttgttccttaccctccatatgtttgcaaatatgatggctgccccacccaagaaagagtctaattgttgtataccttgtctatgttgagggttgtatacaatagttgatgttctcatttgccaattgcatccaaaccagatgcccctggcgaaatcacaatcccataacaagtgtagagagttttctgatgctgcagagcatagtgggcacgttgtatcgataccagggaatatgtgtgcaagtttttcctttgtgagaagactatgagacaagatcttccaccagaaaatttttagacggttatggatcttggctccccacactattctccacttttcatctgagtctgtcctctcttgcatgttcttgactatacggtaggccgacttaacagaaaacatgccatttggttcaagcatccatagccaaccatcttccctgggcgaattaggaagggatatgttcaggatccttttagcatcttcattgcagaaccaacttcggattaaggctctattccattggttattgctgatgaagttgcttactagactgatgccatcagtggcatttcgagtgggaatcggttgagtggcttcaccagggacccaagggtaaaaccagatagaggtagagttcccatctccaattttccgacacacccccttccaaaggaggggtcttatttctagaattgctttccatagcaccgagtctgaggattttgcttccactccatgaagttctcatttttgatatactttcagtttataattcatctccagagacagtcatcttgagttaggattcttcaggcccatttcatgaggtagactttattcatagcctcagttgattggaatcccaggcctcccaccacttttgggctacagagtttttcccaagccaccgtgtgtagtctacgtctctcctccgtgtcaccccaccaaaagtctcttaggatcttatctatcttgttggccaccgacaccggtataacatcagaggaggctacataattggagagcgttgaacccactgatttcaccaggcatgttttcccaacactagatagtagtcgggccttccacccttgaactcgtttaagggtcttgtcaatgatacccttagtgtcatttgttctcttggatgacttaaagagaggtaatcctaggtaggttgcattcctccccatttgtttcatacccagcagctgcgatatggcttgtgttttccttctagacacaccttgagagaagtaaatcgctgatttttgggcactaaccgattgtcctgaccagctgcaataggtctgcagacagtctaagaaagccttggcctcccgaatagacgcttccccaaagagaattatgtcatcagcgaacatgaggt

SEQ ID NO: 197662 - DNA, 1668 bp, Cannabis indica
agaatcaatcttcagtttaactaacgaaaaagaaaaaatgggaaaattcaaattttgaactcaaagccattgatgtcagtccagaaacaaatttcacgaagttttttcccacgtttcctcagttaataagagaaaaattgattttcagacatacaaaagaagataataattttgataagtgggcatgaacagcaattaccaagttgttgcaatggagtagccgtacaagaaccctagggaaattgaagttgtctggtctagctatggaaaccggcgttgtgcagaagagaaagaatataatttgaggaaagaaccaaatttaacactcgtcttctattttcttttctgattacgataacattggtgagtttttttgcaccctaaaataaatttaaattaattttaaaaaatcaactttaatatttttttataaattatttataatttttttttttttagtaaaggatcactattattaaaattagatgtaatttacaacaacactaaaaacaacaggatggggaatttcacccatcctacacacattttcattcaactttagaacatacttaggttgtttatgagaaacaataactctagggaagaaaaataaaagacattgaacatcttaaattaaattagaaaaattagataaatcaacaaatgtggttgaaagagccaatgagactctaagaacatcagtttcaatatgactaattgggagttaaagttgatgtgcctaattgatgttgtggaaaagaactttagcttccatctcatcacttctaaaacaaccttgtataggctttgaaaaggcagctattacttgtcccaaataatctcgtactattgcccccacgcccagtatctttgtctctaaattaaccgcaacatcgacattcatttttaagccaaattgatcaggtggcctccatggaacctactgtttttcgttgatattaccaacagtggcaactgatttagttgttggtgtatgttggcaggaagtggaaatacttgcagtagtggtttgacgatgtttggttgctatgtaggactctaaatatgtgatgacgtaagtagcaatggtagagccatctcgactcttatcttcatgggagacttgattcttttcagtccaaatagtccacataatacatataattagatccaaatcttcttttaaatgtaaagatgaaagatggaaaatgtaatcacccatgttcatttgttgagcaaaatgatagtcaatggtgaactttgtgttttccacaccttcttcacatttcgacatgtaaacaaggcaatacccaattgattcccaagcatgtgcacacaaagaacaagttgttgaatctatgattttccttctacgaagagcggtagcaactggaagcgcatcttgaatgactctccaagcaaatattttaacttttggtggcagatgtaatgcccgaaaatttttccaccatgtttagtgagtgtttgatgtcgaagaatcatctacttccaccaacttatcagctaaatggaatcccgatttgaccgtataaatgtcagtagtattatcatgccaaattaatcgatcctgcgtttggaagatacttaaggggattgataaaatcttgtcaacatttatcgaagagaagtaagattataataggtttt

SEQ ID NO: 197663 - DNA, 1265 bp, Cannabis indica
gccttccatccctgcaatttagaggtaagattgtccaaaatgaagttgaaattggcatccttttgtctcgatctgaataggggaagtccaagttacttaatgacaccgtccggagaattaatacccaaaatgtccttgatacctcttttcgtaccttccagggtatttttgctgaagaagatagacgttttgagtttattaactttttggcctgaccactcacagaacttctcaaggcaactccagtaactttaagcttctctcaaattggccctccccaccagaatgaggtcgtctgcaaagaaaatgtgggatagaaccggtccacccctactcagcctaatgccttgtatattcccctttccagggtctcctctaaaagtctagataaaacttcagcagcacatatgaagagatagggggacaaagggtcaccctgccgaatcccacaagagggcacaatcttaccaacctggcccccattaagggatatgttaagagtggtagtggagatacactgagaaacccaatgtcggaacatctgtgggaatccaaagcagtcaagaacatgatcaatgaatttccaactcgatctatcataagctttgacgagatcaattttaatggcaaagtacccctccttcccttttttccagttgaaagtattagatgagcattaaatgacatattaaattttgcatcaagatttacaattatatattggagtaaaaattgatgcaaaaatatcacaaaaccatattttgtgtcaaatatagattaatttttacatctttcattggagatggtctaacaattcaaactctgtatttttaaaatagtaaaaaaaaatagatcctaaacaatttttgtcaatttaaaatttagtaataacttgatttggaagtgttatgaaaaattatttatattttttacatatgttcgtgctaaaaattggcttcaggttggttataaatacaaagtgaattgtcatttacaaaatagatagtctaatatatacattttataaaacacaaaattcaaaataataattaccagataggggagttaaaacaaaaattacaagtactgtatttcttttaaggagctttatacaatccctcgcttagaattgaggtttcacatcccttgtataaaacaattttctttatactgtagatcacgttatctttttgcttttttgacctagaagaaccggtactataacagaagtcacatcaaactaatagtattagataattgttttt

SEQ ID NO: 197664 - DNA, 1105 bp, Cannabis indica
ttatttattttaattattttttggtattaattaaatttctatacaaataaatttatttggacaaattgggtccttttgtatttatttaatcatagctcaattattttgtttgggcattaaccctttcactccctataataaccaaactttggcctatccatccagtctgaacacatattcagcacctcaaccatagacatagagtataatatatcttcgaccatctggattatatattatagtttacttgatacatttttgttaaattaaaaaaaaaaataggagtaaatttttattttttaattttgtgggtaggttgaatgttttacctactattgttggaagatgatttaatttgccgacattggaaaatttgtatcttattctgttttcaaataacaaattaatcataaccttataataaaatattttgcacactaaatataaagaagaaaagcaccaaatattgttaaaaatcaatggctctcaactttagctttccatgcacataaataaaagagaatggttttttttttcaattagtataaaaaaaattattaaaaatatatatatatataactattgaaactttttccacctatatataaataaattgtaaatactttaaatttagtattgtcaatttgagatatatacaagtactttatattaaaattattatgtaggtaattgtctccaaactcacgcactaacattgtttattttattttattttgtaaacacaagcactaatattattgttttgcatctcagtttataaagatacagagtcacaaaaagtcattattaaattttccttttccaatactgcccaatagctgtcaatgtatatgccaaatctctaattataaaccattataattaattagtaagaaaagaaaaagtaaaacaaaaagtaccttataaattcttctttctttgtcattatatattttttagagggtcccaacaccttaacaataggacagtacccaaacctttacgaaattaaaagaaaaatagtaaatagaaacaattgaaatagaaagaagaggactatactagattacatattggcctattgtttgtaggtgaatgtgacaaa

SEQ ID NO: 197665 - DNA, 2339 bp, Cannabis indica
  modified_base (2313)..(2313): a, c, t, g, unknown or other
gtttcaattatacaagcccttaagaacaatttggtgagaaagataaatggtaaataaatattgctattggacactaacagtagtacccaacaccttttataagtagataccttttataagtagatattccacgaatgatattccttatgactcgatacttaattacattaatagcggtataaccccgaaaaatgtgctaggcaccaatgttgcattttagtaattaattaatcaattaaacacttttaaccttacaaatgatacaattgatataaaattacttcaattacacaatatttatatatgtataattatagggaaaaacaaaaagggggactatatgcatcaatataaacacattcataattcatattgcttttgcttcattaagacttacaaaacactaaacaactctaccaaaaactgccataaccttactataagagagaaatagccagaaaaaaaaaagaagaaaaaaaggaatttaaacattccccttcacactgcaaaaggttttcatataccggccacccgaaaatgacaccaccacccctacctaacaaaaatttaactctacatcatcgtacaagttcacatcagtaatttaacaaggagtatttcactctcaatataattttacctttctccacacccagctttcccccggtaaccatccaatgccccggatggtcttggggtcccttgctcatctcggacatatcaacgaatttcgccaacttattaccaccggagtgttctcttgaagaatctgaacttgagtctccagaattagagttacctttcgcggttgatactttttttgatttttcatttgggatatgatcccataacgatcttcgtatggtacagcctggaagtctagaatacaacagtttcatgtacaagacatttcttgatccgaaatcccagacaccaagttgtgctccagtgactatgtagactccagagaggtcgccgatgtaggtttcagggttctcgataggtgcagtgctcacatgggagaagtttttccacttgactggctcaaaccatcggctatcttgttcctcgggtccctgccatttaggagcaccgattgccacatgggtatcccagtaaggttgaaggatctttggaagagaggctaagtgttgaacatgaatacacagccgattctgcttaactccctccagacacagccgcaagcctgttactggctttcgcccaactgatacctgcaataaaatttcaaggtctgagtcataagagcttcctttactgtgcgggaattggattatgactcaatcagattattagaatgacagatacgatactaggactcgagtaatgaattgtttttcacttgaagttttccttcgtctatttgggttttctagtttcattcaagtatatcaaggaaacattaacccattatgaccaaaaggaaaaccgagttccgaattataacaacaacacatctttttttcaagtcattttctttttacaactgacagtaactaatctagtcggcacaatacaaatgcactgcaactgctggttttccttcaaaaaaattaaaatttctattacagccatagtacctgatcctgactgacataaagcttttggcccattatgctgaattgcaaagatggacaaataggttcctttcttaagtggccaggaatcctgtcgtgtacaggagcccacagtcgaggaatctgaaactccagaaaatatctcagttcttcagcaggaggcttatctgtaaaaaaaaaattaacccccatataaatcaatatattaagcaggattacatttttaatctctactacagaacattacaggaaaatgatagtacccattttgaagcttggttgtcttacattcaagataaagattaatggcacgagtaagataatcctttccaactaccccatcaagaagagctgttatgggacaaaatgtcatctcaatgacatctggtgatgacctgatggttcttgcccatcggatgtggttttgttctagatcgtctcctccccttcttcggaaaatgactgtcacatcctgcataaaatatcagtttcaaggaattcttagtttaagcccttctggagatgcagtgaactgatttcaaactgtgacatcggtaaaaaacacaaacaacaaataaataaaaagaaagaaataaacttattagtgaacactagaaaaacttaacatcatattgaacaacaaatgaacaaaacttaacactgacattaaattatacctacttttcatccctaaactaataaatagataaaattntagaaacaacacacacacacacacac

SEQ ID NO: 197666 - DNA, 1160 bp, Cannabis indica
aaaatggtcaatatgcaagaagaatccattcaggaaagtcaagaaattgaagatgacgcacctttcacacaacctaacacacaacaagttgaaagagtggttgaaccattacagcaagttgcacctgattatgaagcaccaattgaggtatcagaagtggttggaagacaacaagatgactttgagatgcgagaggcagaatatgccggtgaaccagaaattgaaagagagaatgcaagggagccagaaacttgcaattggtggtcaggtattatagaattacacgttgatcccgatgttgatgacgatggaattgattctgcttctgatgttgcaagtgtaaatagtgatgaagacaactgcagtaaaactattttggaatataatccaaacatgaaaatggatggattcaatttcaaattaggcatggaatttgggtcagtgcaattgctaaggaatgccttgaaagaacatttcatacacgagagtaaagagtacaaattactagcaaatgatttggaaaaattcagggcagtttgtaatgcaccagggtgtccctacctactttacgcacatgtgaaaggaggtataattgattactttgctttattttttcatgccttttacttttcaattttatactaagcaagaaaaattatcatatttaaactcacttcttatatttgaggaatattatgatgccattatttttatactctaattaatttttttttcttgtgatgcacaaagttacttatcaaagttttattttaatattatatttaataaggatgttctttcttgtataacttattggtttgtaattttttattggttcttttgtccttgatgggctttatttggctacttaatatgtagttcatgagacatattctcttctcacaaaggctcaataacaaacaagttatagtttggtctgtgtgaagattgtcttaaactagttaggagatatttggcatgactaatttctgattctagatcagacaagttccaaccttttacaacatatttttgctattacttattcattatggcaatacatataatgtaatttgttgtatgtttttttttatctttatctaaacatagctcttgcttagttgattatgtaatctgatttggttgttagctcttgctgc

SEQ ID NO: 197667 - DNA, 1681 bp, Cannabis indica
caatatttattgtaaaagaaattttaaaaaataattcattgtggtacatattatctattgaaaaaatgaaattttaacaaacaaaaaatataatttaattaattttttttgtggtctgaaaaacaaacaaacaagtaaatagaatgatacatattaattattaataaataaataaattaactattagtttttaaaaaataatttaaaaaataagtaaatgagatgactcattttaagtatcattaataaaaactaaatgagagcataattgtaactatttttaaacataatttagaagcttacacatgtcactcaattaggaagagagtataaaaaagagtctctagcactcctctaattagatattaaattttacatcaaaattttacaattgtgtattcgagcacaaagttaaaatttgatgtaattaaatttaccacaaaactaatttttatattaaatataatacaatttttacatctcccattagagatgatctaaggtgatttacaagaaggtaggtcattctcgacattcggtgggactccaagaatagggtttctctcaaagaaattaacaggcttcaaatcaaagctagatgagactgtaggcattataggatagtcctcttgacatggcacatgatgaaatcccaaagtgtaccaaaccactatgtctttattttcaattatcttatccctgcaaaaaccaatgaccattataaaacacattatatactaaatatttcaacttcccacacaatggtaacactgatttaagttattagcataaaaaaaggtcttgagtactagaaatcttttttaaaacaaattacaattataaacacattttgtactaattaatgctatactacaattctgaaattaataatataaattatagtataatagaacgccatcactacaagagtgccatacaacatgaaaatagatacttcttaatatcattttgcaaaatatatagtcttgtttatataacttatatgtaaaatatagttctttagataaggtattgttgagactgattctcaacaataaaattaagattagaaaaccaaagtttaaatgtaaaatcaagcaaaacaataagagttagaaagcttggagaataaatgtcagcaacatcgatagagagaaaataagtattgcattgcttaatggtatttcttataattatttttccaccccttttacaagtgcctcaaggggctatttatacatgatctctaatttcttaatataagtggttccaaaagttagaagacactatcttggtagtacgtatagcaactgagcttggcaggtgagtagtggaggccggtagttgtggtcgagtgtcaagctgtactaatagctgttaggtggtggctccactacttgtactccttctaccctcttgtacaaccactactcgccctcaagcttggaagacacaagcttgctttaacagacttgtccttggtcgtacattcttttgttatttttctcgttgtctccctcatcttccatgtacattttgccttggagaatttgactgattagtgttaggcttatgttgttctttatccagtatcatcttgatgcattttaccaattctcttcacaaaaatcctagtagtgtggcttagggtaggaccgattccatgagtgagatggaatgg

SEQ ID NO: 197668 - DNA, 1395 bp, Cannabis indica
aataatatttcgacacgtggcaattttaaaaaaataaacatctcagttaaaattaggactaacggacaaataacaagtgtgaccttgaggactattgccgctatttttggaacttggggactaatctgcatcaacgtgaactttttggggacttttgccgcaaatttccatttttcaattttttttttttttacgtcaaatgcatgcattcaaaaaccaataaatttctcttctataaaaaaacaaccaatatatttctactggagcaaatgatatctaagaataattagtgtcgatatagatttacgggaattattagattattcgttggccaaattgaaccgtgcacaattctgtggaatgtgattgtgatttgtgaatagtagattactatgatacgggggacgttcatgaaaatatacttaaaaattcaaactcatcgctcatatagtaatcgagccaacgggtaatactcgaaaaatatgaatggctaaaattaattataaatgtatacttaccattgcttttcaattacacacatatacaatatttggaaccaacccaacaattttattttagcaccaaatctatctaaagttactaaaaccgtaatcatatcacttttaaccattaacttccattaagtagtgactagaatggctaggctacccttaactaaatccaatattcgacaagttccaagtcagccaattgggtcaaatcgaattcaatcaaagataccactcaaatgaaaagtagatagtaaaagactagaccaagaaatctcatgtaccaacattgctccactttaaacgctacaactaactttcaaggtaaatgagtttcgatcttctctttttccaccaaaattctattgagctataagttaggccactgtttgtgtttttgtgtgtgcgtgtgcaagttttggttggttttcagccctgtcagtttcggtcctggcttcccaccagtagaatattactcgggcacaaaaaatcatctttaaacagcataatgaaatctaattccaaactttaaaacaacaaaactgatacattttttttcaagttggggctcaaagcaaaccagagtttgacaagttaatactaaagtgaagagaaaaaacaacaaaatatgaactgacaattaataaaccaccagtggtttccaggaagaagggggactgagaaattgatcaagtttcagctttcctacgaccaacacgagcaacgaaaccagctttaatcggggcaactgatcggccagaaccacactacatgattacaaacatgaaatacgaataagtacgttacattccaactagataacttatgtgatccttattaggagttagcttctaaaaggaagggtaacaaagcagttctacagata

SEQ ID NO: 197669 - DNA, 2142 bp, Cannabis indica
aaataattaaattaatttgaggcttacgacgatcttacaaaattataaaaatgcccttacagtgatggagattcgttttgtaatttaattttctaattttttcaagaattgtaaaattaaaaatacccatattttactcaattcatcatcattatttatttatagtttttaaataaatgttcattaataattgattaataacatgctcatgcattagtaaataacatgatatacatagctatctcacacagttgtattatcatgcatctcatagtagaaatatgatatattaggattgtcctatgtgtttatgtgttaaccgttttttaaactggaagcatgtaaactgactaagattaatttaaaattaacttgttaatttaaaattaacctattaatttaaaagaattttaaattatgaattaaagagttaattcagatttaataatggtgacggaaaatttatttataatttgaggcttttattataaataaattaatcataattattaaagtaagtaatatgttttaattctaagaattaataaaataagcacattagcctaaaatagtgagtgggagaaggagtacattaacctacagtctccattatcggtcaacactgaatcagtatagactagcttcgagaagactttaattttgtccccttaaagaagatatttgtttatactatttttcaaggtttgatctcttgactaagataagaggaagtgaccctaggcggtgtactaagtcaagtcatgatcgacatttgtcttgcaggaggggaagtggctccacatattttctctggatgtcattgtaacgcctggagggcctattgaggccagtttggaggatccagaagtgatacttctggaggagggggaaataaatccttttatttccaagaatggcaagcaaaagagcaggcttccgctacgtcttcttcaaagcgagctatgacctaccacaactccttcctaaggcattttcagtttaggtatccattccaaagcagaccaattcccatcgtgtacctccaaatcccctttgaactcatgtccatctgaacccaaaaacacactacactctgcgtggctcgacatactgttgacgtggatgaacaagcaaagggtcttgcggaggctaaagttttaaaaaaggtggataaataaccatcaggacgtagatctttaaaagagtatgtcgagcaagggctgaatttgaatttggatcccatgacctattatttttccaactatgtcgggttttccttggccccgtttactttttgaaattgttcgtagtttagcaatcaagttggtccagctgtctgttaagcgattcgttgcttgtgcttcaattaatattgtctatcaagctcaagacttgagtttgttgctggcttcaataggttatgtttattttccttatcctaccttatcattatttgttatttttgtttactaacatacttacacatctcttttttatgctgttgttgagattgaccgactttccaagaacttgattgagcaaggttatgcggtagctagggaatcacaggggattgttgaagtttgcgcagatttggaaaaggccagtaaggaggtggacaccctgagtgatgatgtgttggctgataagaccttgagggagagacttgaagaaaatggctgacttagagaagtccctgaaggaggcctaagacttctaagtccaactattggcggccaagcatgtcggtctcagaaggatgcagatctgtccacggccaagctagagattgagacacttaaacaccaactgaagagcttagaagaacttcattaggggatctttagttcgttgccaagatgtcggtcgagctgaagaagttacgttttctctgggagtccaacaagctagtaggtgaagcctcgacaaaaagagtcatccacctgccattcctagtcacttatgaacactgcgtcaaaagttatgaagatggggttttcatgtgctagaggtctaacaagttcatgcttattcttaacttcttgcctgaccctaaggtgactatccagcgttatcgagaaaaagacaagaagttggaggtagcattgtaggtaaagatgggagatcctcggcttcctcctt

SEQ ID NO: 197670 - DNA, 549 bp, Cannabis indica
cagcttaaagttcaggttcgagtagaggctgaggccgagtttggagttttaggtctatgtcttcgtttgagtcggggatgaggttggggttcgggttcagttctgaggtcgagtttgggtctggggttccatgtctaggttcgagtccatgtatgcgttcgagtcgaggttgagcctgagcttcgagttcgggccatgggtaggtctgtggctgaggtttgggtctaagggtccgggtctgaggtcaagttcagatttttggtccaagtccgagtccgagtctaggtcaaggtttgaggctagggtccggatcaaggttcaaagccgaggttcgagtctacgtccgtgttcggggattgggtctgggtccgatattggggttcgagtcctatacccgagtttggatttgggccagggtctgagttcgggggttgggtccaggtcatcatccgacacctggttcgggttgaggcttaggcttgagtctaggtttgggtccaggttaatctgcgctggccccaggcccaggggacaacatctgggtttgtg

SEQ ID NO: 197671 - DNA, 1272 bp, Cannabis indica
ttcatcttaatcatgttttgggggcactaaatttattttttcattacaatgttaagttcttgttgaatgtttttctttttattttttacagtgttattttcaactcatacctctgcaatgctggattgatcttttttcaatatacttgatattttcattgtaatattggtcgatttagtccaatatttctaattaaaatttatttatttattcatttttaatatatattatatatatataagaagaaaaaaattggttgggttggcgggcgagttcgggttcaactcgaaaccctgtggccataaaaaaaccaacccgcgaacggttgaacccgacccgtcctaacagaacaggttttttttaaattttcgagttgagctagtcagatcagggtcaaactcgatcaaaatgttcggtcctaatgcatagtagtcattctttttcattttactaaaatataaaatgggacataattaaatagaggattgttattgggtattagtgctgtttagtacctttagatatagtcttgtgattggctaatgatacttcttaaaagttattatagtaaattatatggaactcgatacttagttagattaataacgatattgacacataagagagtactaaacatcactagtgtcgtttctcaattaaatataggagctgtgtttgaaagaaaggaaatgattgattgtctctattggcaatataatgaaatagaatgactactatacatacatatggaatgccttgtccattgattacaatagacaaccctagctaacccgatttatcaacaaggattcaagtacaccgcccactgtccattaatttaaaatattatataatcttggtgttgaattttgagaaatccccaacagccactatatatttaatggtggtggttaggatatttcgtttaggtcatttagattgtttataaagaataatatttataataattgtaagagctactctcattgttattggtctctattaatatttatataatctttattaaagaataatatttgtaagtcttactattattcgtttaatactcatggtaagagagatcacaataccatattagctcatagtttagcaaagatggccttatcttaagatagagctatgatattgtggcttgctccagctacacgtttgttccttagttattttaggctgtttatactaataatatacgattttaaatagtacaaaacattagcgatacactaacatttttctcgtgctattgaatga

SEQ ID NO: 197672 - DNA, 1397 bp, Cannabis indica
caccattcaagcagttgaaccaatggaagattaggcagaagtttacctaaaactaacatttacgtgcctcggcacgtagctcctacctagtatatatatatatatatatatatatatattgtttttcataatatgttataatagtaaccttttttggtgtttaattgtttttcctctttcttttccaataaaactctcccgaacaccctcaatctcaattgccctttcaccatcaacttcaattaacttatgatcatcaccttcttctttagacttagctactcactcatcatcagaaggcacactttccttaatcaaaggatcattttcttctttttttttttttttttttgttatttgttcatcaagaatttgtgtttcaacttttctttgtgtgcacctgattaaacatactccaattacattcacatgccgatgtcgaacaagtaagacctaaaattctcatggaaaataattttagttctggaatttcatctccaaaattctcccaccatcgaactataataattataaaaaattaaaacaaaataattaataaaatattttatataaactactatactggaaaaaaaatataagaattaaaagtaataaattaaagtattcattactcatcgttcatcgctcaccaggtgaaatgggttgagtatgaaatcaaagatgatttgtagccaaacaatccttgtttgtatttataggcatcaagttaggtatcaaccttggcatatattttgtcctccttatacaaaccagttttaatctctgaatgctcaaaaacattaagactccatctaaattgaggattcaaataatatgtagttgcatgcaagtcacgatacaattgattctctcacttttgatcaatgatattccaaatcttcttatagaaagacacatctccattctttgatatcttttgttttcctcatccatagcaccgtaaataaaatttcattgctggtgtcctctctccatcaactattcttaaaacatgcataagggacttttgtaattttaatagaataaaccatccagaaaaaaaaaaaaaaaaaattcgcatccattattattttttttacctctattccttcatgtttctttgcccatagacgacttgtccattcttttgaggcaaacatcatttgtaatggttgcttcaatctatatatactctctaaagtcaaaaaaaacagtcgcaaatcgagtggcagttggtcgaacaatatctttctttacaatttttcttgatcaattcaacacccattgatgattgtggataaaattgctaactctttttgctttcaggaaagcattcttgtgctgtggcaattcaccaatcttcccaagcatcaaatctatacaatgagcaccacatg

SEQ ID NO: 197673 - DNA, 2381 bp, Cannabis indica
ttagataatgccatatttagtggcaattacttttcatgccatatttatcataaccttaataatttttcccatattgttgaaaatagcccatatttaaatggactaggttgctagaataaaatatcccttttaatagttttatttaggtccaattagtcttagacttatttaatgaataacaattatttaaataatagttaaattcctctcatttgggccttgtgtaagagttaggggtcattagtagtgggtacgacatactgaacccagccctccctcacatgtacaacctcaattgtgaaggcccatttgccttatttaaataattgtattaagctaattttactagtttaaaccaacttaaattagaatattttcttagatattaaattataattaataatttctagatacttaattatttttattttaatgaattttattaaataaaaaattatatttaagctggaaatttttcaatttcagatcaacttaaattagaaaaaaatttagagcatattttattttattttaataattatttcccacctaatgtcaaatttcatttatttatttaaatgtagatattttgaaaattagattaaaattgaaattaatttattaataaattttagatcaacttaaatcaagtaattttcattaatgattaattaaaaataaatagactaaaatttattgttttaattagaaaataagtaattagtttatgaattatctagatagatattttttaagtagactttttggtatttttatagatatatttaattaaataaaaaaattaatatttataactagtttatttattacgttataggatcagttctattttaatttatatctgagacatctaacccccgatgatttttttgatgatgatgataactccagtgactttttcagtaatttttttggtaatttttttagcgacttttccgataacaataatttttttaactttttcagcattgataatttttccgatagactttttcagcgatattttttaataaaattttcttcagttttattttatggtcgtttgtttaatttcttacattttaaattttaattattttttacttttatattttatttattatttatttataccatataagtaaattctaaatgcttttcctaaatcccctataatctataactctataaaagagagaatgtgttttgggcttttcaaagtaaattacaaaaaagttactcatttttttgttaattactattatatccttttatttaatggcaagaataattataatttttcaaatataatttaattatataaaaaatgacaataggcatagattagagttccattttttttttatagagatacatatatttaataagtgatgaatagtattgatatttttaaattattattttgtaattttgattctttctttttttaaaattaataatttaatgaactaatttatatatttttcttatagcattttgtaatatagtttaaacttttacatataaaagctaaattattgtcttttttttttgaaatattggtagaattcaatgtatattcaaagttcatttttcttcttcattttatttaaaaaaaaacccatttataagtgataaatgtactgctatttttaaattaatatattttgtaattttgattttttttaattaataattagatgaaatattcatgtatttttcttgcagtactttatacatatagtttatattttaacatataaaaattaaattaagttatcataattttttattttaatcttaattttctatgaagattcgttttaattttatgtacaatttggagtattttgcctaatttgatattcttaggtttatttcagtatattttagttttattattttaataagtaatatgtctcgtttcaaaataattattttttaaagaaaaattaaaaatacctcacgtgcgtagcacgagtactctcactagtatatgtaaatatttaaacatatgggttttcaagtaagttgggaagctcacgtttatttgaaactattatgatgatacacatatattatatagctgcctattatgaaccactatagttgcgtttttgtgatacatcaatatctgtatattcccatgggatatatatctatataagtacaccattacgataagatagatgccaattaatgtcatgagactactttttacattcatttttttattttggtcttatatggtgtgattaaatttacttcaactacaagcgatcgacgtattgatattttatccctaatctttcattctttccctcgaatatctatctctctaattcaatcattagatattatatatattatatatgtaaact

SEQ ID NO: 197674 - DNA, 668 bp, Cannabis indica
gtctattcattaaatatgtagcatgtaaaacagcatcaccccaaaggtatttaggaacattatttgaaaaaagtaaagcacgacttatctcaagaagatgcctattttttctttcggcaatactgttttgttgaggtgtgtcattacaagaactttgttgaacaattcctttctctgcaaagaaagtacctaagactcgtgcaaaatattcacgcccattatcactccttaaaattttgatactcgtttgaaattgattttgaatcatgttataaaaatttttgaaaacacttcctacttccgatttttttttagcaaataaacccatgttaccctagtatgatcatcaataaaggtaataaaccagcgtttacccttgcatgtggagaccctggatggtacccataagtcactgtgcaccaaagcaaatggttgtgaaggtgtataaacatgtggagaatatgtacttcgatggtgtttagacaaaacacatatttcacactgaaaagaagagggatttttattgtgaaataaaatcagaaataaatactttaaataatgaaagtttgcatgtccaagtctaaaatgccataaataaatctcatcatttttaaagtcagatgcaacttgcaggcaagaactttgttgagcccctttattcatgaacg

SEQ ID NO: 197675 - DNA, 1462 bp, Cannabis indica
aatagtaaatttctttttctatatataacaaatactaccaaataattatttatccataattatatctttgaacagtaataatacaccgatataaaaatttttaattaattaataatttttttataatatttattaatttaaaatatgtaagatcggttactaaaatgtactaataatatcacatttaagtgcccttagcatttagcttttgcacttggataagtttagtttgttttggtggagcctctcgtttttattctttcattctctgtttcataataattgaggaggaaaaaaatgcacacaataacatggctataattttctacacatgtcttatcaccaacaaattaaagttctcctctgccaaagtacaagaaaataccaacaatgtccttatttctctttctaccacctaccaaagccactgctttctctttctcatattccacctaatctatttacatacataaaataagtttgttaagaattaaaattttcgtgttccaagagaaaaaagctgtacaaatttgtgggccctcctctgtaaatgttaatcagcagataactaatataaaagattaagataaaagaaaagaataaaataatcttaaatatttattaattaacattcttaactcacgatattgctgcaaaaaatattgagaatttgcttaaaagaaaaaaaaaaaataagaaatcgtatgcgagttagtaaaaaaatcagtaagctgaagaagaaactaaaaggcaaagtaatggtgcccaacttcagatggtgacaagtaaaatgtcattcgatctctatatgtttggtgcgttcataaaaaaaatgagttgtgagcaatctgaatggcaatttgattatcacaatacataagagtaggacaagagtgagtgacacccatatatgtaattaaacatctcaaccaaacaatttctttagtagtagacgccatggcaggatactcaacttttgtagaagatggagaaacaatagactgattcatgctcttctaagaaataaagaatctcccaaaaagatacgaaaaccagtggcaaatttggtctacaagatcacgaccatgatctacatcacagtaagctcacaactccagagaggaggtggaaggtagtagtagactctgaaagatggtaccccaaagatgtcgtaaaatgcaaagattaacagcccagtgaacagtagtagaacaagcaacaaatagacgagtaatagtgagataaattaaactgccaacaacggtgagatacaaggtatatgatcttccaaaggagagccatcagaaggagaattataaacattcaactcagagagagtgtcaacaactctagtatcagtaaggtaagcacactcaaatatgtcaataatgtactttgattaagaaagagataaccttttggagacaagccaactttaatacctagaaaaaagcgcagagaa

SEQ ID NO: 197676 - DNA, 1596 bp, Cannabis indica
aaatccaatgaactgacaaattagggaattaaacttttgaacatatattcatgattatatgccactgtgctgacaacactataatcacgaacaaatacatatgttctggacttaatagaatttatacattaaaaataatgttgaaataaataatgtgtaccatgcaacataaaatgagatttctcatctttattaattagtaaatctgattatattgaaatgcattttatttatggcaaaaagccaacaactttgagtagatggttgttgagtttggatagaaggggcaaggagaatcgggcagtggtccgaggtagaaacttcaagattggtgagctttgcacttggaaacttatctagccaacttagagtgacaagagctcgatcaagcttgatctctaccaaattttcagtaccctttcctctctccaaagtgaacttgtaaccttccatctccatgtcaatgagaccacaactagcaaaaacgttttggaatccttcaatgagccaatttggatatagtcttccccctcttcactttggcaagttacattgttcacgtctcatatgagacaccacggaagactggacgtagttgcaagatcactcatgagcttccaagtgagcttctgtttagaccaatttggttctccatagactcatgtgagacgaaattgaggccattcgggagtagatataataatcatatcaatatgatttgtgctgaaagtttttaattccacctcctccttatttctccaaagaacttgaagcccacctatgtccctgacttcctacactgaatgaaccctcaaaaccgataggaattttcaatctatccatcttttctttttgacaaagtgtttcacaaagaaaataaaattgggtttcttttggataataatatcctttagggattgaacggtcaacggggtcccaagcccacggcaattccagcttaaaataatcataatccatggcaggtccgtgattcggagcccgcccagtcaagtttttttgcccaatgttatcaataggatccatgttacccagttgcgaagtctcattcttcacttcagaggtttggacaaattaatggtgactccaattctcatataatccctccatatacccatgaaattgtttggacaacattcgacgaatgcccctatgtaatctccgactgcctatagaatagtggatgtcatgaatccaatttgaagatcatgaatctgtacccatagatccaacgtaccgagagtaatacaacgaggattggaattatttttcgtacgtgacataatctgtgctttcctattgaaataccatggactgccttcaattacccacttaatgtcaatttcatggaaaaaataaaacagtttccgattagcatccaattcttttatgtaaactcccttaccaggcttccacaaagcaactagagtctgttgcattgacgggaaatccactgcccctgccgtgataaagccgcccaccaaacacagtcgttaatcgaacacaaactcctcttcccctctcgtacccagttcttgcagatcaagcccaccttctatctcatcttcaatggctatt

SEQ ID NO: 197677 - DNA, 2380 bp, Cannabis indica
atctttttcttttttcttttatagtaaatagttcatgctttatacaaattttgaattatataaatataattaattcaacaattaaattgtattaaatataattttccttatttaaaatggggtgtattaatttataagttattggggtgaaaatataattttctattaataaatataaataaaatgacaaaattaactatccttaatagaaaaaattacaaaactatgtttacaggaatatatgtgggaaacaatgaagtgatttactacaagagtaagagcaagagcagaagcgaaagcgaaaagtgtgaaagttgtaaatacaatccaacgaaagagagaggagtggtgaagtcgtgcttgaagtgtttccatcgaggccacgggctgtaccagttccagtacggagtatcgaaacgccattgcatgatttggccatcgggaacatgttacacggggtcatgcatcgaagatggtaaagttattattaagaacgcggaaaagatgttaaaggacagtcataaaagtagaaaggcgacagataataataagttgtacgatgatttcgacaaaaacagcatgggcttcgcggttatgtgcacgacgggaaatgttacatgcatacaagagattgctgccatgtctaaaacaaagatgtctttgaagtgctttgtggttgcatgccaatttgctgtgaccatgtttgcattgcaagaaggtattacaaatgctgctgcttgtaagatcaatgagaactaacaatcatagagttaataataaataataatggtaaaaatgaattcattaattgtacactttttttattcatgatatgtcattttaattatcaaattacaattaaagatttggtatattttatatgttattgtaactgttgattgaaattttcagtaattaattaagtaaataaagatttagagcaagataagaaaaatgaatatgtagatcatgacttttttacgtggttgaagtattaatgagtcttagtttaggagtcacttgtattgagatagagaagatgaagttctctctctaaaatttggcaacgttttgactttaatagcaataagagagaaaggacaaaccccttttacctgtaatctcatagtcctattaaaaggcagcgatggaatttatttttttcattcgtctaaatgttttacttgagggaaggaaatacattgatagacatatatgaatatgtgaatatatgtcaaaagttatgcgagtgagacataaccgggttagacctgatatgcatcatcaggataaaccactaaaggaacataatatatggattgtgtttatatgaataggattatgcgggtaaggcataatcaggttagactcggtaactataaccgagataaaccctactataattccttattttaaatagacatgtgagcgtaacacgtgggtctatgccatatagacataaatgggcgtgtgagcgcaacatgcatgtccatattaaatagacaataagggagatggcattattatatatacgatatgttatttgtgattattgatatctttactgtcttgctaggcttgactcacgggtgttctattatgcaagaaagggtaaatcagactgtgatcagccatgagtgcgagagcttggtggtgcttgtacatgttcaggccacacaagaccaagcgggttagggtctaccagtgttgtgtattttgtaactctgattttgccgcttagtttcggttcgtgaaaaagacttgtaatattttgtgaaaatatttacaggatcccgaaacttgtattttttggttgtttgtaaagtttaaaattattacaagctttatttttattctgtttcaaattaaatttaaatttcccgcgcttacccttccagtaatcccggtttaggggattaaggtttcataatcagttgtcgtggcgtgcctatttgttagggtgttacaaatttgctcaaaggtaagtccaggagttgaattcttctttctctatgtggaggatggacccaaatgctcccaaccacttctcgcagccatcgccatggtatccgtaccagccaccaccaccaccaccaccgccatactgatgtggccctcaagtaagttcccttttctctttctttaatgtcacattggggacaatgtatcactttagtttggggggtgaacttaacttttttattttgctaagtttaacatgttttttttagtcttttaatttttaatttctattattttgagtcaatttgcttaatgtgagtctatctgaaagtaggtagattgcatgatttaaaaagttcatttattattacattcttgactaatttcacttttgcgctttaaaagaacatggaatcat

SEQ ID NO: 197678 - DNA, 1209 bp, Cannabis indica
tacattttttattattactctgaaatatttttcctttgaagttaagtttctctataagtttattgcagttttacgagttttcaccgtttacattagggttggacacaattaagtgtttaaatattaattgggctatttattaattcaaagaaagaaaataacctagattatcctactattttcaaatcaaaaaattcaataaatattagtatatgaacatatgtgtacgtagaatttttttcttttcaaaaaccaacaattccatatactacatatgcggtttgaaaattagtgtcaacatgtgacataacctaataatttagttttagtcactaaaaatatatttattaacaacaaattataatatttttgactaatatttttaattaataattacatagaaataataatttatgcttagttacaattttttcacctttaatcataaatttattttcttgtaactaaaagtaaaaatagaacggtagcttatatacgagtggtgttaatcactacaaaaaactgttacatttatagataatcttttagtcacaacataatttttttatgattaaattaatgagactaattttagtcacaacaaaaagttacttatgactaaaacataatattcagttacaagttgtcatcactaatttaattttagtcataataaatattgtgactaaaagcattttgtcacaacaaattattatttttgtgactaatacttttaattaactacggatcttttagtcacaacacaataatgataatttataattagccacaacttttttatctttagtcacaaattttattgtgactaaaattaaataaaaaattttgtagtaaatgttagacatcatcacatgcatcacagttttgattttcgatatttttcttttgaagtttctctataagtttaatgagttcgtatagtttaacttgaaaatccgataaatactagtagtatgcagtttgaagattatgtaacacaacctaaacaaatataataaataataaactaaactctacatgaataaaattgattttttctagcactactttttcatcaaatgggggaagaaaaattaaaacgtatagggatatagcaagttttagaattatgtgacatgataatatatgactcatgacttttaagctacaaattattaattcattgtaaaaatatcattacgttacact

SEQ ID NO: 197679 - DNA, 712 bp, Cannabis indica
agccaacaagatgagtgtattctgattataatcgtgtatgttgtaatattatttaaaatctttacacaattttaaaaaattttaaataagttattgtctaaaaaatatggttcaaaaaagttacttactatgcgtgttataaaaaacagtcaagggcgcaataaaaaatatttaaatttaatttttagtattataaattttataattttttaaaaaaatttataagctatcttaaataactaaatgtatgtgaaaaaaattcaactaaattttttttagatgttaaaacaaataagataagaaatatatcaaaacaaacctttgagtgtggtaaaattttgtcaagaagtttgttttattttatttatatttctatcaactatgacttcgtacatgagatgagttattagtgactaaatatgttgtaatcttaaatgttttcaatgacttgactatgatgggtagttggagatggtaataacaactcaaccaccaaggccaatttgcactaaaagattggtcaataaactcaactcaaaactaaagccaaagggccaccaggctagctaacagtaaccattaaccaaaccaagttgttcgttcattcattcattcattcatttcatgcatatgatttgtatatttattctctctttagttgacacaacacaattttcttttccttcaaagcaaaggctctctctctctctct

SEQ ID NO: 197680 - DNA, 1315 bp, Cannabis indica
actaagtctatttttgctattattttatcatttttttttactccaaataattcaatcctaaccttaagtgaattagtataaaaagaaagaatggtctcataatccaactaatgactcttgacctagttttcttcttgtcagataactagagaatttacaacttcttcttcttcttttccttctaattttcgaatcctatagtcttcttcaccattaaaataatttcaagctttagtgattgagtgcatgcccacccatagcaagttagtcctcaatcatagtgtgtaagactgtgaagaatctaaacaactaaaggagtttcgggctcagatcttgattatactttgctacagaaaggatacaagggttagagatctgagcggaatgagtcatttaattctgctgcaatcaatgtaaggtttctcatactttatatgtgtttaattttcatcgttttagaagtttatatttaggatgttaaaaacatacttgttagtaaatttaggtcctggtaatatatattccaacacatacttgaaattttaaaagtgcaaaaatggtaatgattgttcccttgtgcctatatatagccgaggttggtgatcaacatgttttataatcaagggctaagatctcttcaggaaaaatacaaatttcaatcctacggctagggagttaaagggagggcattaaatgccgttactggaatcaaggcattttttatcattaatattttcctcgaggattgcatcaatattaagtagttgtcatagcaatatcccatacaatagacactttcccgagacgcgtggcatacacgaacccagaacatgaggtcacatatgaagtgtcagttgtattccaaacaattcttgactctttacttgccgagacccataaagggaaaaatacttccaccactaccagaagtgtccatgtgtccaagtatccaaggacacccgaaaggaagactgcaagtttctgccactcatgagtaccgaaagcttaggggtaaacgttattcgtgtttccagacgagagacacgtggcataacaagagataactattatttaaacatgggcctaagcctttccacatgatgaaacctagcccagacctaggatggggctgagctcgtcccacatccgaaggctttgcccccaaagatactgtccttccattatcagaagccattctagcctttcaagaaacagaacaaacaaagccctccagatgaatagcgggacacatccaaaggagaacaccaagggacactcctgaatgtcaactacaggaggaccctcagatgcctac

SEQ ID NO: 197681 - DNA, 2169 bp, Cannabis indica
gttcatttcataaatgagagaggtgagctcattgaagattactctgaagttgtcaaacactttgttaatcattttaggagctatatggggagtgatcatttagctactaagaatgtcgatttttccaacttgaaggggaacaagctctctcttgatatgcaagtgtctttgttaaagccttttaccaggaaggagatcaagaaagctttattcagcattcctagttcaaaaagtcctgggccagatgggtttaactctgaattcttcaagtcaatgtggcctgagataggggaagaattctgcttggccattctgaacttctttgaatcaggaaatatcccaaaggagttcaatgaaacagctatatccctgattccaaagacggataatccttctaaagcaatagactatcggccaatagcctgttgttccacggtatacaaatgtatctcgaaactcatttgcttaagactagctaaggtccttccctttgtgatcaaccaaaatcaaggagctttcattcagaacaggtcgattgctcataatatcctcatctttcaagacttaataaagaactatgggaggaaaatcacttcggctaggtttgctataaaaattgatctaaggcgtatgacacggtcaattggaactttcttgaaaactgactgaacttcctgtgctttccttctcgttttgtcaaatggattatggtgtgcatcaggggtacttcctataatctaatgttgaatgggagattgtaaggaagctttgaagggatgaagggcttgagacaaggggatcctatgtctcctttgttatttgttttggttatggagtttctaacaaggaggcttcataaacaaactgaaatggagactttcaggtatcaccctctttgtaaaaagctgaatcttgtcaatttgagttttgcagatgatctcttattgtttagcaaaggtactcgggcagcagtcaatcatctcaaaaatgctctcgatgacttttgtaaccaaatagggctatatgtgaatctggccaaatcccaaatcttttttggtggagtgcaagcagatgagagaaaagagattgctcaggttatagggcttgaagaaggaacgtttcccctaaagtacttaggagtgcctttgaggcctactaagtggaaaatggaggattgtggtgttattctggacaagatcaaaaaacatttgcataactgggctgcaaaacacctctcttatgctggtagaatgcaattgattcaaacggttctcttggggctcaggaactactggatgaacatattcattcttcctcaaagcatagttaaggaagtggaaaagctttgcagatttttcttatgaggtcacaatggcaaaagaagcaagattcatattgattcttgggacaaggtttgtctcccaaaaagctttggtgggttaggattcaggaatggtgctttatggaatcgtgcaagcttagccaaatttgtttgggcagtcatgcaaaaacatgatgttttatgggttaagtgggtcaatacagtgtacttgaaaggagtggatatctgggattacaatcttcctacagataccagctggtactggaggaaactctgcaatctcagatctgtttttagcccagagaagcttcaggaagcaagcagttcaggtaaaatcaaggctgcccggttgtataatagtttgataaatgctgatgattgcttgaacactagtgctgtttggtgtaagctttccttgcccaagcacagatttcttctctggcaggttgttaattgtcagttgctcactagagatcaacttccaagatttaacatcttcatagttgactctagctgtccagtttgcgggttgcagatagagagccacgagcatctgttttttgattgctgttattccaggaaaatcattgctgcaatattcaggtggcttgggttcaagggttggtccagcgagtttgaaaactggtgtaattggttgaaaataaaaacaggtagagtgaaggaggacattctttatgcaaccgtggcagctactgtgtatagcttatggaacaacaagaatcagtgtgtgtataagaactatgtttgtcgatagcagctgtagttaatgaaattcaatatactgttaagcataggttgtatagtct

SEQ ID NO: 197682 - DNA, 2706 bp, Cannabis indica
cgcccaaggtgtgcaggacctagccggacaaggtatgcagggtctaggccgacaaggtgtgcaagacctggctggaaaaggtgtgcaagacctgcccagacaaggtgtgtaggacctagcaggtcactatagctctaccaagaggtggccagactcatggggcctgttgtggtgacaggattcaccacatccgcagtgttcatcgggattccagttgtgactggaacctcagtgtctggatctatagtctgtgggtcttaagagaaacccgaagatgcagatggtgcgattagagttcttctcgtgtttaccatggcttttgatcagatacgatatccacgctctcaatgaaagcaccaaactgttgtcctcaaaaagtgatcaactgatagcggggtttatggatctgatgcttgccatgtgttacacaaacaagaatgaaaaataataaacatagagatttgttatagaggtttagcccccttgtgatagcgggtaatgacctactccccttttggttgtattgatacctagagataatactattcagatcgctatatgtaggatttgatataaccctctataaggatacaaagtatgaatcaagtaggcaaatctctaatgagagagatgaatagccttagaggcgtgtgagagatgaagtgagacgagagagagagccctattgggcgtgagccagagagagagagaagagagacatggctttcagacttagaactatttagaggctaagtgacttaggtttttaggctagggtgaaggccgttatataggagggctaaaccctagattacagtttaaatccctagatatttacgtaggttgttagataattataaaagaataaagtgcccttgaatctggatattattcagccattttgttaggttttcagggcccacttcccagcccatgccttgtgtccatgttttgggttgtacatagagtcttgccaggtcaatcatggccgcccatagacctacacggaagtttggccgggcatggtcctgccaagtcaatcctggtcgaccatggtcctaccaagacctagtctggcaagacaaagcctacaggaccttgtagatcactatagctccaccaagaggaggccagcctttgagtgtggagctagccttttgcaagttgaggcaactttgtacattgttcccttgaagaggtcaggttcccttgatcgaacggaggctcctttggtccgaaaagtcactttttggccggccagcttgtgcacagatcctggccgccctgtaggctcacctttgctggcccataggctcctctttgccagcaaaggatgtgggtacatctccttaagggctcgcttcactcctttcagttgctacttgacggttttgctatatctttcatggaggctctgttctgctattggcggggctgtactccacctgtattctatctttggcttatgtggacattccatgtcaggtggaaagaattttggataacatgtgtaaatccaacaacttataagctttcattcccataggatatttcgaaaaaaattcaagatatgactctaggtgagaacttggatccattttgattcaagattaaagcataggcaagacaaccaaaagtttcaaatgataatacaaaggaggttttccatgtaagtttggaacaaaagagctctaggcacattaagtaagtgttcaattttgttgaggtctttggacacaagagtgataatgtacaatttcaagagacctaaacaaatttgtaaattgcagccactactaaaaaaatgagtgtttttcgtcagtcaatgttactgtttataaagttgaccgacgtaaatagtgtgccaaaaatatgattgtcaattactaaatgacgctataaaataataacttgcgtcgtttactaaaatgatgctacaaacacaaccgacgataaaaaaaaagcaaaataattaaacgtgaaaatgttattcccgtcagtttattagagtcgaataaaagctacgtgagctagaaccgacaaaaaaaacaaatgggtaaggttaaaaaccgatgaaaaatacatctaaatcccgaagtccccaaatctatcccactgttcacattcgccttctacatttcaaagatgaaaaagctctagcgattggctgctcccctctcttcctccatcgtcgaccgacgatctcatctcttcctctccattattggcctctgctcccctttactcctcgccattgttgaccgctgctgccctctcttccttttgaacccacaaaactgccctaacgattttgacccaccacttccaattgtttggttctctctctgagtcacacacgggtgggtgtgatgtctaaaactccaatgaaacagccacagccacagccacagccacaggtatttgtttttatgtgtgtataatatatgtgttttgagtttgtggtgggttgattcgatctcctttttctatgcttgctgagaaacccattaaaggaattgatcagaccataatcaaacaaattattagggttttgtggatcttttttttttcctcttgtataaatttaaggaatgagtttactttgatgatttggaaattttctcgactcgtgctagtttttatagatcatttccttaattctaaacttttagtggtttataagcttttggttagatctgttttatt

SEQ ID NO: 197683 - DNA, 831 bp, Cannabis indica
gaaaaccaaagctcttaatgacattcaactaataatacctgttcagggcctgcaaattgaggtggattagccaccagatcctcaaattttagaacaaagtcttgaaaccagactagaaactgaaagacatgaagatgaaactgatctaagtacttaccagcttgctagagacagggtgagaagaaaaaccagacctccaagcaaatttggatatgctgattttatagcatatgcattgatcagtgtagaagaattagaatcctcaaaaccaaccagttactatgaagttgttacggcagaaacaaactaaaatagtaaagggcaattgatgaagaaatgacatctcttaagaagaataagacctggattgtggtcaagaaaccaaaaggaaagaaattggtaggttgcaaatggattttcaaggaaaagaaaggcgtacctgttgttgaatcaattaagttcaaagtaagattagtagctaaaggattcactcaacaagaaggagtggatatcaacgaaatttttttaccagttgttaaacaaatttctattagagttatgatggccaaggcaacaaatgaagagcttcacatagagcaaatggatgtaaggatagccttcttacatggaaacctagatgaagagatcttcatgcagctgccagaaggctttgaaagtaaatatcctaaccaggtttgtctactaaagaaatccctctatggtttaaatcaagcatctaggcaatggaatttaagatttgatgaatatatgaagaaaattggatatgccaaaagtaaataagatccacgcatctatcacaatgatcagatt

SEQ ID NO: 197684 - DNA, 1361 bp, Cannabis indica
tgagagtaaaagcaacatcatttttatgttaataatacatttaaagctcaaaccacatgaaaaggactcttctttctttgggtctttttaaacaagaagaaaacataataataaaaaaagctgaaaaatcacaatacatggcatttgccttttttctaaatgaaacaagatatttacagacaattgggtcctcatccatgactgacctaaatgtataaatataaggtcttttcttaatggttagtatgaacagcagcaacagttgaaaccatggaatccacaccacacacatttctgcctctgcatattttgtagaaccctttctcaccccaattctctccccatgaattctttataatccaatatggcttgttcttcaacctagaaggagcataagcagatgcaccataacccaccaacaaaacaccatgatcaagtctctttgaacatatatatgggcatgaaaccccacctacgtatgtttgcatgaacacagcattgatagccactgcaaatcaaaatcaaacccaattagtaattagtcattaaacaaacaaacaaacaaacccttttgagtatttcttctttctttacctgcaagaggaccattcttaaccaagttagcagcgatttgttcctcgtctagtgagacaacactgaagttggcaactgatgctgcaatcttcttcttgtcaaatttgcaggtactgcggtcggtgcctgtgtagggatagtctttctctttcattagtccaccggctttgagtgtgtactcaaaagcactgttcattagcccaccattacaccctgagtcacatgaccctgcctcttcgggatcacactgcattaatagagacaaaaatacaaatcaatgaatgaaaaagaacatccaaaacatcttttcaaatcctaattcctaattgggtttagcacagaatcatactactgttatgattccaatcaaaaactctctttttcttctttttttaaggtcgctttcaaactcaattaacctaataatcttaatgttataataaagttccattgaaacgacaaaaagttttgaaaaccaatcactttccaattgaattgacctaattatacgataataaaatccaataaatctccatttctaagctaacaaaaagttaaaatagaaaaaagatcaaacctcgtgatcacaatccacaagctgttgctcgctaaggctaacaagctctcccgtggcgaggaagttagcaccttccaaggcaccggttgtactgaaactccagcatgatccgcaagaaccctaaaatccaaaacacaacaaaaattcaatacaagacaacacacaaaagagtattcaatacaaatatata

SEQ ID NO: 197685 - DNA, 612 bp, Cannabis indica
gcaacagtagtggaggaagctactatgattggatggcgaatttggacagctagaaataatgtattttggaataacaaatcgtgtaatgcttttgaagtagttaggttggctagaactactcttgataagtggaaaagtgctcaatctcaaaggttaactccattactaaatgtcaattttagtagtagtagtgagcattggaagaaactagatatgtataagttcaagattaatgtcgataggaccatctttgaagctgaaaatcaatttgggggtgggctatgtagtttgtgatcaagatgtcaagctaattgaggctgtgtcaattagtaaagtaggcttggttgctcatgagattgcaaaagcaattggtgtgaaagaggctttgagttagataaagcaaagtggattgtttgatgtggaggttgaatcagattcattagtggtggtacaaactattaatagtatggttcaaatgccttcttagtttagaatgttggtgcaagattgtcgtttgtttttctttttgaaaaatgttttaatttcttttgtcaaacgatttacaactaggattgctcatcgtgttgcaaaacagtcttgttttatgccata

SEQ ID NO: 197686 - DNA, 908 bp, Cannabis indica
ttatggactccatctcgaggccgttaaaattgtattatgataatttcgcagcaatacctttctctaaaaatactagaagtacttcctgctctaagcacattgacataaagtattattttgttaaagagaaagttacagagtctcttatttccattgaatacactcctagtaatggcatgttagcaaacccactaacgaaaggcttacccatatgtatatttttggagcatgttgctcgaatggaattgttaggagcctagcttgttgagctcggtgggagttttactattatgtatcgaatatgctggtatcttgtatgaaatgcttatgacttgtattttgaacttgcataatgatgttgtagtcacttctagttattgttgtcatatgtatgcatgtatgcgttgtttactgaagtgacaggtattaaaggagatgaatgcgcatagtcttaattttgttgtacctcatgcatgtttggttaagacataaatataatataatatatatacataaatataatatatatatcacaatatatagtacgtactaagcgatcaatataagcgcaaaagatctaaactgtaatctgctctattaatatctttatatattaaaagtgcctatttaacgacaaatctcggtttaacgttttgttatttttattctgttaattttaacaaaatctaactccttcgttaactcgaaccgttcaatccaaaacgcacagttgattcctctttcttctccctcaaactcaaaatcaaaaccattttatgcgatattcttgatccttcgattctttttttttttcaaaactcatattgttgttgcgattttttttctcttccaaactaaaaataacaatcgaaccaatataacacctaatatttaatatgtcgctcaaa

SEQ ID NO: 197687 - DNA, 1419 bp, Cannabis indica
ataaaagactagaaatatctacaatcaaatcttgaaaagaagagatagcagaagaaggtttgcataaagcattagaaacccgaagagcatccgtttcaatttgtgatattgtaagttgaagctgaagcacccagtttaaactatgaaacagtgcaatggcctccatttcgtgtgaatcgaaacagcctactactggtttagagaaggcagctgctacatgtccgttggaatctctgactaaagctccaattccagtaattttcttggtggagtcgactgctgcatcaacgttaagctttagctgacctgtaacaggaggtttccaaggttgaaaagaacattagaaaaagtgccttttttggtctgttgcggttaagtgattttaacttcctttgctttctttttaactaacttccctttcaaattctttgtttttccctcccctttccagtttttctgggttttttctcttttagccttcatcctgttcgttttctccttcgtattccttgcacctcatgttccttgttgtttcatcattcgcctggtttttctccgattatggatcctattgtcaatgctctcaacactaccctttctcttacggaagaggaaggctctgtttttactctgccacaggagttcacagcttcatcatccacacattccaaccacatgttcattgctcgtgttcttacagagaactatgtccataagccatcttttattgaccaaatgtctggacactggaagggtcgttttcctgctgttatttctgcatatggtgaggatttatttaaggtttcttttggttgtgcgggtgacaaattaagggtgatgaataaggaaccatggcatttccaaaaccatctgattgtaatgtacactccaagtgctctgcagaatgtctcaatgaatgatctatccttcactcctttttgggttcaaatttatagattgccctttttaagtaagtcaaaggcgcttggaaaagctttgggtaatctcattggagagtttattgatgtctttgaagattcacttgatgagggttggggtcccttccttcggattcgtgtcaatttgccaattaacaaaccccttcctcgtggccgtatgataagccttcccaaagttcgtgatgaattttggattgattttcgttttgagcgtctcccagaattttgctttgagtgtggtttgcttggtcacccctttgaaaaatgcatcaaatttatggagagaatggatgatggtaatgatgatgaccttccttatggtccatggttgaagggtgccaaactcccttctacgggttacgataaatatcgtactgattttgctaaaggaaatgcttggcctttattaacccgccttgcccgaaagttacttaaatttttgtgactaaattttagtcat

SEQ ID NO: 197688 - DNA, 2074 bp, Cannabis indica
taattaattttggtgtgtttaattaattaataatcaggtgattagcaacgatcggtataagagtgtgcttcatcgagctgtggtgaacagtagcatggagcgtttatcagtaccaactttctactgtccatctttagatgccattatggagccagccaaggatttggtcaatgaacaaaatccggcagtgtataggagtttcacctatgctgattactatcagaaattctgggacagaggactcaacactgaatgctgcttagacttgttcaaaactgatcatcatcttataaattaagactggatcatctacctagctataaataaataaagttgtaatatcccttttagctgttatattagaaaataaaagcaaacccttaatttgtagctttacttgtaataaactactaatgagtaataataataagtactttcatattggaaaagtttttaagctatgacaaccttaacaaaacgaacttattaacttatagcaaaaccaacttattagagaaggattgctttcatcttattaagtgtattaagtatatatgatcattaatcatcttgttaaaattttactatatttggcataaaatctaaattttagttttgtggttcattgcacaattttatataaaatttaaattaatgttttattaaaaaaataatttaatattaaaaaaataagataaatattttataatttaatgtgataattaaatatactaataaaataatcaaaattacataaatgtaagtgaaaaaaatagtgtatttattatggtataaattttacatcatagcaaatgttttgttaaatttgacataaaatttgctatatgtcaaatttatatcactttttgacacactatttttattaaatgagctatattttaatttttcactacttatttatacctctaaaatgctcttattagtgaaattttaatacgccccctcacacaagtatgaatcatgtcaaataactgtgaataatttgatattaaataaaggcatccaacattacaaaaatggacaactatgatactataataggaatttattgggtctaacttaacgtaacaaaattatgggaggattgtcctcactttattaagtacattaagtatatagtgatgtaatatatagtgacgtaaatatagatcggatattttaacgcgatacctatacgaaaccggccggtcgtatgacacaagcacaactacacaccaatggctagtctaaaaaccgcatggcggcggctattattataaaagttaaatataatactaaatagtataattttataaactcttcaaaatattaaaacgactaaaattatattgatttatttgtagtgttaattaaaattttgaagaattacttaattttaacaattataataatttttttatatcattgtcaatacaataatatgaaaataattgaagatataaaattttgaagaattacttagattttaagctataacaatttaacaaaacacacttattagagaaggattgctttcatcttattaagtgtattaagtatatatgatcattgttcattttgtgaaaatttactactttgtgataaatttatactaaatttaattttaatgcacaattgtaaaattttgatataaaatttgatattttattaaaaaataatatttattaactttataattaattttattattattttaatcaattctattattattttaatatggaagataattaaaaaaaatgttttataatttaatgtgatagttaaatatactattaaaataataaaaattacataaatgtaaataaaaaagtagtgtatttattgtggtgtaaattttacatcataaaaaatgttatactaaatttggcacaaaatttactatgtgtcaaatttacattactttttcgcacactattaaagcacatttttcattaaatgagctatattttaatttttcagcacttatttatactttaattagagatactcttattcgtgagattttaatacaccccctcacacaagtgtgaatcatgtcaaataactgtga

SEQ ID NO: 197689 - DNA, 1193 bp, Cannabis indica
taggctaaaaataacctaacaataagcatcaaaataaaataagcgcaaaaaaatatatcaaacttaagttccaaagtcgccaagatgcaaaataaactaagttatatatgcttaaaaagttttaaggatgtgaaaaagacttgttagttctaactaataagcaatccacgataagtggacagatacaaatccacacatgtgtgtcccaacttcaatgcacaaccaaaaagtatagaacaagagaattaaactctgttcacagcaaaccttacttgccaaccaacttgagcaatagatttaactctactcaagggtgagtttgagaaaggaatacaattctactcaacgctcaaaacttaagcaagagattacaaaactctgttaaagtttcaaattcaagaaagaaatataactttactctaaattgaaaaaaaaaaaaacttatagcaaaaagttttaaaccttgtaaaagtccaaaaatcgagcaagagacataactctactcgactaccacatgagatatgagatataactcagctcacattctaaggtaaagttgcgtgctttaagaactctacacaaataagtccaaggacatgggtcatgtctatgcacacctattcaaaataattaaggacattgggcgagcccatgcacacatctctagaacagatgtaacattcatacactctacaaagaagtattttttgtgcaagccttgggaaaagtgcaaaagcattacttgaaggcttacaagcaaatacttttgggggcaaatgttatacccaattttcgcaaaaataaaataaaatggatactctttgcacaagggcccacatgccaagagtaccttgaagacactcaagtcaatcctacaattttgaccaaaacttataaatgcaaataagttaagacatcctacttgagggccccatggcacatctaggagactcaaaaatattaaccaaccatttggtgtcgggactcacacacccaagtgtgcccaaactagggtttatgggcctgcgcgagcgttttcaccctaaagacctcaattcgacaaggaaaccaacaaggacttaactcatttgggcataaaaaaggtttagattgagcataaagtcaaaattgcacaagaatcccatgcaatagggcatatgcgaccattgtcacatgaagatggtagtgctctc

SEQ ID NO: 197690 - DNA, 1617 bp, Cannabis indica
aaaaaaaaaaaaactcaatcaaatcaaaatcaatggcgatcatcatcaaagtatgctaagaagaagcaaaaactcacccgaattgaattgttggcgccaacgaagtactgatcaacagtcttgagccaaccaacatcgtcgtgagagtgaggaaccaaatgaacattgattttgtttggaacaattctggcactggtattgtactctatgtactcagacttcgtagtaatacccagtagtaagagtaacaacggggtcgccaccaagaacagcttcgtccccatcgccattgataaacaaaaaaaatggagtctttgtttttcttttggaataattatagtaagctaagttacgtaatattacattactgtttatctttattggataattttaattaattaatttttaatttaattattattattattttctttttttcttttggataagtaattattattattattgttgttattataaaaatgtaataattaaatatttgttgtgtcgttgtcacttaactacaaagcgacacatttgggtttcttatttatgtgaccaaattgaggaggcgtgcacactcactcactcacttattactcatgaatattctaagttaagacaaccaaaaaaaaaaaattatttatatttatatttattgaaaagtgatgaatttttctttttttttaatggaaatttttgtttatttaattcgtattgaaatttgtatattattattaatattaatgttatcactcatcttatccaaatgtttgctacaataattacttcaatacttagtaaatgttaaattttgattaagtggttgatggtagatttaatcaaaaaaaaatttcatttaattgtattacaataaggtaatgtagctagcacaggtgatactttataattaattaatgattttttataatttttattaaagtaaaatatatagaactagatattaaattacaccaatagtaatattgtacatcacaaaatattagaggcaagatacctattaacatttctttttattaaaagctataaaataccataagtgttcattttgtggatcaattaaaagaattaaaagacactccatcggctcaaggccgagttgtccgaaattattggactgactttaactaaacccttccacatacacttaccttgtcatattgctattctagacttctagttcttgacgaaaactatgcacacctttctccttgcaaatacttgtgcgagctaaacttgtaaaggagaaaagaaaagtgaaaggaaaagtaaaacttgttgaagagaaaatatttacaaacttactttttcacccttatttttaattcaaaataattaatataaatcattaaattataattttactttcctatactttctttcctttcttctaccaaacaacataacaaaaatacatttttttctatcactcctaaggatgtgctagaagtcatatttcaatatcacgtcaccctgttaatactaaagagtgttgaatttggacttgatttcaacataaaaatacatgaaaaataattatattttttgtaaataaaatcttaacagcggtaaaaatattcacaatttcgtacaacc

SEQ ID NO: 197691 - DNA, 1106 bp, Cannabis indica
gttacacgcttcttttgtccaccagaaataccccttctcatttcatcaccaaccataatatctgcacagatatcaagtccaagaatctgataaaaacaaaaaatgaaccatgttagacttgcgaacatcaagagaagaaaaggtacaacaaacaatcttaaaatggagaagaacaaacctttagaacataatcagtgatcaagctggtttcttgaccttccatagctgtggctttcataaaggcatcaatctcagcatctggtttaattccagctgctttctcccgtctagacaactctaccaacaagtcatatcttgttccaactcccaaacaccgccccgaaaagtctaatgtttcgcggactgtcatctcaccatagtgaagatcatgttgactaatataagaagaggttctctgaggtacaaactctttaaattcatggccacagtaagtcacttttccagttacctgtttgttggtcaaagtcaaaccttaagttaccaaacttgtgaacctttaaatacatatcagactaatatatattaagagaagaacacaaacccttaaatcataatcaagttttgcagcaagtgcttttagcagtgttgtttttccagatccaggtggaccaagaagtaaagtcaacctgaaaataaatcaatttgagctctatatatagcatttgaagggattaagaagaaaaattagtaaaagttagttgtgaacataacataccttgaaggctttgctataccactcacatcttggagtatcttaaccactcttttctttgatggagtgagtccaatcattccaatgattccctatttaaataagatttatagtttagagaagtgaaagaaaaaaaaaagagtaattggtatgagctgaattatatgaaactcacctcaatcatgttaagacttgaattcaacagagttggaagagctctagttcctacataggcatctccttcaattgataaattctcaaatctaacttcaaccttaggaatttcaatcccaaccctgcaccaaattatgaaatttgaagatctgggatttacaattaatcatattttgtaaaacaaacattaacacaaaca

SEQ ID NO: 197692 - DNA, 1257 bp, Cannabis indica
aaatgatttcatttttattaaaatgattgggttgtaggctgtgttgggctcgttatattttgccttggcagtttgtttatttgttggttgattaatgaaatcttgttaaaaaaaaaagtaaaaatgtaagaattgaaaacatatttatatttatacatgtatatatagtttgaaaaaattcctaaagattattattgaataaagaaagttaccttctaaaaagtgaaagtaaatcaaattctttgcttgcagctgtgatcttttcctgtggtcttgttttcctgatgatgtgtgtatgtatttgagtggctgatcatgtgtgcatgcattgcaagctctttcctttaacttgcgagagcttcctttgaactgattttgtcaacaagttcatttgctaatttttatatgcaggaaatatactcgatcaaacttcctggagatccaaaacttggtgaagggaagcctgaaaaccaaaaccatgccatagttttcactcgtggggaggctgttcaaactattgacatgaatcaggtcagatatttgaacgtatttattaattttcacttggtttcataagtatctttcgccaggttgtgtaaacatagtttttgtagtgttggttaattagtacaatatgttgcttggatacaagattgtattcttatccaacattgaattaattgttagatgtgtatatatataaatatatatatatatgtgtgtgtgcaatgcaatataaatatagaatagttgaaactcataattaataatgaaatacaaaaattaagaaattaataaaatcaatgttgcaacatcaatactcaaaattgcaaataataaattgtagaaatggagaagatgaatatgttacaacacaaagtaacgtaacaaggagctttataaaccagagatccttagcccccaatattctcatactcgaggacttagttcgaggatacaacaggaaaggtgtctcacctcgttgcttcattttgcttcttgggaggtgatttgtgataggaagttagtcctatccaagttatactttgcacggcaagagccaaatagtagcaatgatggaaaatagtagctgatatattgataatagaaaataaagtgaacaaggttgctgggtattatagatacccaacactcttctaaaagctaatgttcacttaaccaaacaattctctacctagatcccttccttactcatatagcaccaattctccaattataatacccaattatcctttt

SEQ ID NO: 197693 - DNA, 1372 bp, Cannabis indica
gatgattttctttttgaagcattggattttgactgatctttgtctttgctttgaagagttatagagaccttagagggaggacgagttggtcctatcagcttagatttagacagacaagtaggcttgcccctttttgaaaatggctcagtgagagaagaagaagtagaagctttttttgaaagagaatgagccttaccttgaaaggttcgaggcttctgactgatcagtggcgacgacggagactgaggagatgcaaaccttggggagctaggaggatcatcgaccgtcgactgataaggtacaatagataaaatggatgggcgtcgctgaacacttcttcagctggactagtcacgacttctgatgcgacaggagacacagatgttggaaggttgatggctttagtggaaatcgacatggaaacaacattctccattatagactgagaaagagagtcttttggatggacaaagtgtattgagagcttcatactttaggattgcttggagaaaagagtaaagtgagaaaacgatttactctcctttggctttaagtaatggataccctaacaatattttaccatgcaaagataaaaaagcaatgattattattattattattattattattattattattattattattattattattttgaactagactttgcaaaatgaaatatacacgcccaaattgaactgttttcatcgcaagttttggcacgtatatcgaaacaaacatattgacatgagtcaatgagatcatggagatctaatgactacaaatatgtccacaaaatttaataattgcccagaccttactaacagagataaaaagttagaagcttagagatactcaatatcttacgatgataacaagacaattaacatctgattaatgcagtgaattaaacaactgagcaagaataagaaatgcacaacatgagcaaataaatttttgtaacacataagcacaccaaactccaatgagaataactacacaagagccagtatctttataagtgtgtgtagagtgtcctcatgtggtccaagatgaaaaagatcttctagaccactccctcaaacaaacattgtttttttggtttttttttatgctttttatctatgacactctctggtttttctatagtacctagcagaaataaaaaaaaaataaaaaaggaaagaaagaaaaaaagaaaaagaaagaaagaaaaaagaaaaaaaagaatattttttttttctaattttaattttttttatattttaaattattttttattatttatattattaatattagctaggtggactaatgaattttgtcacgtgtatatttatgtatattgtgacagtccactttgacactt

SEQ ID NO: 197694 - DNA, 1090 bp, Cannabis indica
ttgtttataaatcaaaatttatataaaatttttgaatatttttattttttatttataataatatatttttattttttttttcccataaaatttatatttcttattttgcgcttacatatttttgttttgatttttgtccatataaaatttatattttttctccaatcaaaattatatttgtccgttaaaacatttaaaaataaaataaaatttagagtatgcattagtggtgtattaatataattctctataagaaaataataattataatattgtattaatcatcaccataaatattataattttttttatatatatacttgcattattattatttttagctattaacattaaacgttagatttgtttacttgctattttatcatcatgatctttagctactcaataataaaatatattaataataataaaaaaaatataaagaattatatttaatatattttcaataaaaattaaattaacattaataaaatattagtttttacataaattaacaaaaatccaacattattgtagtatggactctctttgtatactctgcagtctgcagtgtcaatcaatgccaattggcaacgcaattaataataataataaaatcctttcacaagaaatttagtcttcaacatttgataagagtaggtagttgatgaatggtgatctattatagattgtacatttaagtcaaaggaatgaaaatacaagttggtagattccaagataccatttctaaattattaattggatattaccaactaaaaacaaatgataaaataacattttcttaatgactaaattaataaattagaatatagtatattttcatattaaaccttgtattttcttatctatatatttattataaaactattatgaataatatataaaataaataaaaaaatgtagatgaagaaaggaaaataaagtgaaagaattttttcagtgttttattttgatagaataatctcttatttatataaatactagtaaataattcgcgttttgcggcgaatatttaaaaaaacttatacttatatgataattatatttttaatttatttaataataacta

SEQ ID NO: 197695 - DNA, 1063 bp, Cannabis indica
gtaatatttggagtcattagtgtcatgctcaaaagttcgccaggtgtagattcaaaaatgcacccaagtgaagctccacgcacaagctactccatccagctaaggggagctccacgcaccaagttgctccacgcaccagctactccatgcagctacggggagctccatgcgttagctactcgacgcagctaagaggagctccatgcataagctgctctgcgcagctagggggagctccatgcatcaactgctccacacagctaaggcaaactccacgcagctagggggagctccacgcatgagctactccacgcagcaataagtgccccctcagctcgaacacatgtagcctcatgtttccatgtatctgatctactcatagaaatagaagcaaggagaagatctcaaggctagagatgttgaagccaagaattgcagacaagatggcgactacacaatgaatattggtataggagacaaggctcctttcatccgagatacaagcaaaagaggcaattttaatgtaacttaggatttctggtacatcagactacttgagatacaatgttatcaggtgtaaaagtgacttgaaatcctatgatttgaggatctaataaggctctaaagtgtgaagggctcactataaatagagcccatggacacattgtaaaggggactctcttgtagagaaaaggttaatgaaactgtagtatttctaaatagtgaagagagtaatatttactttaggtattcttttattaagatcctaaaacatcatcttaaaatattgttatttcgttgatgagttcttaccgtcaataatttggcgctgtctatgggaaaagacacataaaagcaacgtcatttctttacacaaaattgctaagaagatgccaagatattctcgccatcgccaagaggtggaagtgtggcttgatgtcctttaactgattgcctcaaggcctgacccaccaacgcccacttctaggggaggaggtacaggtggccaagtgccttagaatggagaaggcacgaatggtcatgatgttggaattattttacc

SEQ ID NO: 197696 - DNA, 1751 bp, Cannabis indica
gttttttgaatacgcgtaggtaaactaaaatatcatgtaacttgtttttgacattgtaaattattacaaaaaatttacaaaaaattacaaggatgatactataaattataaacaaatactactatagaaaaaaattagaaaaaaatatttcggcacgtgatttagggaaactttaaagagtgaataacatgaacatgagttcataattacttgggatttatatcgatctactatagattattattgtgataaaaattaggtctttataataaacagttgtggggatttatgccctaaaaacaagtatttaatggaaatatattataaaatatatagaatgcaattataagataaaataaatatattaagcaacaatattttgttttattttgttattagttatgtgaagaaccatgtgaatgtacacattaaaaccatgataagacacattattccttagattttacttaattcgtagaaagcagtgttatattattttgtttctgttattaggtgattgggcattcaaaatttttaacatttttttttgtcaaaatgcaatctgtgcatcctagcttgaattttatttggttagtgaaataattttatccatatatttatttgaaataataaatacatattatttcattatttgaatattttttttttctaaatgaaataatatatattttttgtaataaaaatatacctatgaaatagggattatttcacaaaaacataaaaacaacaaattttttttacacaaatacggtttcacggaattttaaacatttttacgatttttttttattttatttacagaaaatactgtctttttatgttgtaatcttgttgttattttcatgttacttttacgtagttttcttgttgattttatgttattttcgtgttattttttagaaaaccgtaaaaatgaaaaaaaaaaacattctttgaatgtaaaaatgtaattatttcacaaaataatgttccttatgtaattatgcatatgaaataatcaaatttttagaactatgcatatgattaagtttgaaaagtggtagaatatttttatatggtaacaaattaaatatttaatttgatttgatttataaaatataattaattgtttactaatcaataaaaatattctaattatggttagatttaattatcaaatatttcagttacccgatttaattatggtcgatcttaatcgtcattgatattacctaaatatcgtatattatgcttacattgactaattacagggcatttcagattgatgcagaaaattagctaacatcgtctcgctagattatgggctaatcttggctatttatggtgatttaatggttgaaataactcttaatgatgatcgtcaattttcagatctctaatcgcgttcgtacctcgatttgaggatgatttttctacttgaaatctttagaattaagatataggtgtgagacatgcaaattaatttttttttttttttcgagtttgacttattttccattcacaaagaaagtttatttcgtggggagttgggacaagtcaatttgtcatgcggtaaaatatgaacaatgaggcaagtatcatattgccatttggatttatttagtagggacaaactccaaaaaaatttgcgattgagagtattcccaatatcgtttagtattcctgtcggaagaccgtaagtacttggatgttgccattgatacactttttatctgttttttttttttttt

SEQ ID NO: 197697 - DNA, 1225 bp, Cannabis indica
agttgaatttctatttctggtacacaagtttgggcatatttgatattcttacactgacttgaggagagtgtgaattaatgtgtaaaaatatattatactcagactcaatcataagttgttatcctatatctagagttaggtgttagtttgattgatcttatttttaaggcttttatatttatgaggtgttaactattgtatactatgagccattttcactaatcaatgaataataggaaattttattatgttaaattacagttaggagtgtaacatttttcctcttaaaatatgttatgctattaaacaaaattgaaatattaaaatgtaatcacattttttagaagaaaaaacaaattagatagtgatcaataatctaacgtattgaattaagagttgtttagtaaggtgtaacaagttttacccattcctcctcctctcttcacataagacgtcacaatattttgatagacaagtataatagattagtattgatgattcataaatacaaataaatatgtagtgtcttcgtgtgcgtatataagtacatatacatacatggaccactctttcgtatgttgaccaagtttttgttgtgtaccttgaaatttttgttgaccatgttttaatctacaaattattcacttatttggataagcttgaaagcttccaataatttcattaaatagctaggtataaaaaaagattttaacattttattttttaaaagtcatgcatattatattcatagtcacctgaacactgcacgcaattaatttagtccctatatatattattataatatatttgtatactgacatttagttgaaagtaattttaactaagtatttttattaaaaataagtcttattaaaagtaatttatcacataaatgtgtattataattgtatcattcactagctagatggattccctagtgtacaaccatagtcatttaacttaggatcaattctctattttcttttagaaatttttacataaaaacaaaaatttgaaaaaagaatatcataaaaatacattaacacggaaaaattattatttttactattttaaattttttatttacaattcattcatagttttcatgaagttagtttagtttagtcgttgtttttggttattttataatttatttatagttcatttatagttattgtgagattgattattcattattctttagttattttcttacctaaaaaaa

SEQ ID NO: 197698 - DNA, 604 bp, Cannabis indica
ctaataattattatttatgacaattcaaaataaactttccttaataaatatttcttactagtataaaagctttctttaattttttttaaatggaaaatgcaactttgttaatcattaaaatttgctaccatatgcggtaacaagtcgattggaacagtctccgtacaaccagaaaaaaatatagaagctctagcaaagttatgagctaccatatttgttgatcgtttaataaataaaacgaaaacaaaccacaactctaacaagagttgtttataatcatgaataacttggccaaacaaagatatcatatcaatcaaacttcgcaaaacttgaacgacagttagacaatcggtttcaagaataacttgctgccagttatgtgcctttatccaactcaagacttctcgtactcccatcgcttcagccggctccggtgaaaccactccagtaaaaaagttagttttgcctccaattaacatgccttgatgatctctagtcactaacacaaacccatagttgtttccaccttcaaaagtagcagcgtccacattaaccttgatattgatttcatttagaacagcccattgctcaactccatcacccg

SEQ ID NO: 197699 - DNA, 2468 bp, Cannabis indica
attgattgtgttggcttagagatttttgggcttgggcttaaaaaaataattaaaaaaaaaagatgaaatgggctgtaattagtatttaccttatatgtttgtgcttatttttagttttatttttaattttaccaccaagaggagaaggttgaaaaatattagaatatgaaaatattattggtgcttattagtaatttgcaaagaatgtgaaagtctataaatatatagttgtgtagctattattagatatgaaatgagataatagaacttttttcaattagaagattaatgtacattttactattaataacatacattattataacacaactatgttttacttactaaatatactgacacatattttatttttataaaacaaatcgttcaaataattatactattttaattattaattaaaataaaaaactaaaatattaaataaaactaacactacgtggcttggcacgtaacaatcacctagtatatatatatatatatatcaaaactttcctttttttacatttttttttttttttgcaagtagcactaaatttatagaatactaatttggtctatgacaaaggtagtattttcagttctctcaaaaaagaaatagtattttcagtttcaaatttctcaaaacggttcaaaattgaaaatgctagagtggactaataattaaatgaaattagtttccgtttatactattatatgtttgtccttatgtaattcaattcaaatggaatatttaaacaaagaatatggtaattggccagtgtacattttacagttatcaaatattaaagatgtaccaaaacaagtttcatgtgtcatgtcctctattctggtttttcaacactataaataggacccatatctacactagaaaatcacccattacccaaccaaaaaaaaaaagttattatatattgttcttattctagtcatctttatattatttctcctaaagatgaagaatatcatagctatgtactcttttgctgttgtttttgttattttctcacttacattttcaccacaactaacccattgcaggccaaataagcttgacgacctaatcgaaagcacatgcaaacaaacacccaattacaatctatgcatctcttctcttcaatccgaccctcgaagctcaaaagcaacaaacgttgaaggactaggtcttgtaatggtcgatgtggtcaagagcaaagcacaagcaactcttgaccgcatcaaccaattacttaagcaacagaaaagtagtagtactagtactggtactactactagtacactgaagcaagcattggatcagtgtgctctcaattatggcgccattttgaatggcgacataccacaagccaccgaggcttttaccaaaggtgacttcaaatttgcgcaacagggtagtgatgatgctgcaaatgaggctaatttgtgtgagaatgagttcacaccatctggctcttctcctattactcagatgaacaaagatgttcatgatgtagctgttgtcacttcctccatggctaagatgttattatttgcttattagtactttatttttagttatgcactttgtattttctttttaattcgtgcttatctattttgtgttataatgaataaatcatttattattttggaataattaaacaatgaacttgcctaccttttaaagattgttcttttaagaaattgaaagtttttttttttaattatatttactgggtttcgaattcagaacctaatttcacataaaagagtataaaattgaatgttaactattccacgtattaactaagtagggtcttagactcttaataacaattaataataagagtattgttattgagcactaataatactcagtacttctagactcgtcacttagtcaaaccaataacaatattaacatataagagagtgttagactagtaactaattctacccaaattgtgtaaatggtctttgatatttattaagggggctttcatttgtatagtttttggggcaaagtttacaggataattttttttttttttgaaaaatgaaaaatatgagaaaaatagtttagggtaattagagggtaaccagttacctccttagagcaatccactaccttcttagggtaattagttatcttatactatttttactttttttaaaaaaaaaaatttctcataaaataattttctttagaaaaaaattacatttttacacaaatttgtataaaatctcatgaaatatataattttaaatatataattttcactatataaaattgaagcattattggtttatctaactaattaaaaatttaaatttaaaaaagtaaatatatattttccttttttttcacttttctttgttcttcttccttggtttacctctccaattctaattattaaattttttaaattaactccaaatcacaaactaaaatattcaaaactaaaaccttc

SEQ ID NO: 197700 - DNA, 878 bp, Cannabis indica
aaggtggtccctctcgtggaaggggtttgttcactgtttgggatcaaaaagcccaatgccaactgtgtcacaaagttggtcacacgatgcaacaatactactatcggtttgataaaagcttttcaagacttgaatctcttcaaaatttccctaataatgccactactaatgtaaatgaaatgcagaattattttgcttaactcgagagtgtccttgatcccaactggtacttggatttaggagctacatatcacctcactccaaatgctcaaaatatgtcaacaagttttgagatccttatagactagcatatacatatgggcaatggggcaggtttgcatattagtaaaattggtcatttctcatttctttcaccttatgaatctcaacatcttgttctaaataatttactgtatgtgccttctataccaaaaattttcttaatgtttctcatttttctcaggacaacaatgtcttctttgaattttatatttttttctgggttgtcaaaaattatttttcactgaagactttaatgtttgggaaacttgacaaagatctgtaccagtttaattcctcttagcttattcttctagcctccaaccccaaaccaaataactcttcatctattgttccaaaaaaactataatcttagttgtaactctcacactttgtatgataaaaatgatgttttttctttatgccgtaggaggcttggacatccttcctctcagattgttcaagctgtcttctcatcatgtaatatcaaaactagcaataaaaatgtttcccactctcatctatgtgatgcttgttgtcttggtgaaacaccataaacttacctttcccatttctaaaactacttacactgagccatt

SEQ ID NO: 197701 - DNA, 1989 bp, Cannabis indica
gaagaccctttttccaaaatgtcatgaactaactgagtttgtttacgacataggatagatcaggcctcgtgatagtgaggtagatcaatttttcctatgatggcttctatatgttgtaggggtcaggggaggagatctcttgagtccttttttgagtttttatgttagattccatgggggtggaaactggtttcggcaccctagaactcggtgtccattaacaattttaaggcaaatggtctttgtgagactgaaatgccactggaacacctaaatctttcgagccctaagaagaattttagggggccaaggtcttttagtttaaatacagagttcaagtgttttcaaagtttggaatggcttgatcactgttgcctattcgtggcaatgactatgccatcaacttagacaaggatagccataaagaaattgtctttgttcttgatgaataagaagtggtcagagtgcaataggtgaaatccacaagagagttgagctaagtttgacaaatcattagcgagaggcttgtttcaagccatacaagcttttattaagtttgcaaacaacattaggggggaggccattttgctttctacccttgatgtaaagtcatgtaggcagtttcacattattgatgtctaattggtggagtgaccaattttttattgcagctagagctaggagtactttcaatgtattaaacttagccactggagcaaaggtatctaggtagtcgatgccttatttttgtgagtaccttttggctactagccgagctttaaattgtatagcaacaccattagagccatatttatgtttgtacacccatttattaatgtgtgttcgtaagggggcaaggggacaacatcccaagttttctgttgctccagtgttgttatctcaatgtccatggcatcgagtcattgtttgtatttgcatgcttgcttataggtggtaggttcagtgaggtgagctgcaagtatagtagcacgaaactgagcagataacctatcataagataagaatgattgaactaaatgaccagtggagtaatcatagtcatcgagatgtggatggtggggtgatgaccctgtcagatttggactacgtttggtctagtggttggtaatgcttttgagtagcgagaaatgcatctaataatggctatgatgcagcaggtatgggaggtgatggctcattttgtggggttgtgggggtagatgcaatgtctggtgtgggggtagagtgatcagtgggaatagaagatgtgtctgtgcagtgtgtagatatacctattatgggaagtagtgattcaacaaatagattatggattggggaactagattttaatggaaaaatgttctcatgaaacaccacatctcgagagtggcaattcaaataggtgatattcgttcacctcaataattctattaaattaccaagaacacatacatcaaattaccaagaacacataccaacaataaattaacaagtctcgctaaggagaagctcacacaaagagcaagatcactaaataaagaaacacctctgaaaggcacaaagagaaaaccaaacccctaaaataagggaaaagaagagaaacacatacaatgaaagagcaatcagaatgagccttaaaaaagtgccatttaagggttgaaaataaggagaaaacccctttcgtacgacacatcaagctttgacattcagtggagcgccatcattatgacatcaaactttgacttcagaggaatcatagacacaaagagcttttaagggagggagaataatgtcacccaaagctaaaagccaacctagattaggggaatgactaaagccattgtgaaaccgtggagaaacaaaaaaaggataaccaaaccctaaaaagaattaggtacacccaccactacgatagagtggcccttttaggagtgaggacagctacaacaggagccatatgacggtgaaacaaaggctcatacgacctca

SEQ ID NO: 197702 - DNA, 1322 bp, Cannabis indica
tttagtactagtgtatttatgtgttgtggtttcttctgatttgatattttaggactgatggctgttgttgctttagagtagtggtctaaatccataacgtaaagcaaatcttgcttatattatattttggtttgcttttaatgaaacaataattaatgcgtcagatattattaagaattcaaatgtttatgtagtgtggtgcgtgtttatgtcatgattctgagtctcaccagaaaaataaaaaacgccgttgtagcagaaatcaaacgaaaattaaacatgatttatttttctccacgaaaataagcattcataaaagagatatatcaacatttttgtataatgacagtggattttttctttttatttttccaaaaatgatagcactgaatttcataaagactaactggtagaactttcatcatgtacccgtatcagagctagagcagtttatctttaaaatgccatttgttggttgtggaaatgaagtgagagggggctgctgctgctgcctctgcaaacaacagtagggatacaatgtatagtaaattttataatgtgtggatacaataatctcgtgtagcatggtaactttcaactagagaaatacttacagctcttatgttggatgtggctaatctccatgggagagccactaaacacgatgatcattccaaacgcatttgatgaaagtgatctggattgtgtttgttgatgaagaaggggaggacgggtaggaggagagggaggaggaattggaggacgagaaagagaaggaagatgtgaaagaggaggatgaagggttgccctttgtgctgatttagatgctaagtattttgaattgaagcgtctttcaatccactctggcgataattaaaagctgaggtaattatgctgaggataattgcactcattgacatagatcaaaatagcgattggtcctaaagtaaataaagatggtctaacgagtacctcttcctgctcacttgtgtcttaattctttgtggatattgtcttcatagcgagggtatggtcctacagaaacttcaaaatcattctcactctcaccactttcaccatcttcctcatccaatgccctacatgtttctgcacgaagtacatatgtcattaactaaatgagacaatctttagagtttataactgccatgcaaaaataaaaaaagcaagggagatcttactattagatggttcaaacttagatctttgcagctaaaaaatagagagattaaaagatgagaaagaaaaaatggggtaaggagtttcagaagtttcagcagcaagtaatggaaaactcaatttgg

SEQ ID NO: 197703 - DNA, 768 bp, Cannabis indica
catgcatgttacaagtcttccaaatgaaaaatattcttaaatcctttgtaaaaatatatgattattttcttttttggtcaagttggaaaaatatatacatgaatttgtatattatatatacaattagggtcctacctaggatatatatgaacattattatatccaaaaattattaataataataataataaatatacacatgttgccaagaaaaagataagaacaaatgcaagttgttattaatcatcaatatatataactagctaattttttatttcacgctgcaagcaaaaatataataaaaatttatgtatattagaaaaataatgaatattaatattctattattcactattgggaaaataattaatataataaagttattcacatcaatgatacaccaatcacattagtaaggtaaataattaaaaaaaaacgaacaaaaaaataatcaagaagtacaaattagtaatggtaataataggtaaaaattttaaatagcattaatttatcatatcacaaattttttccacataaaagaggtgataagttcaaaatattgtatattcagagctagccctagatataagctagctacgggtattataactaagtttatactttcttgaagctcaaaatagaaaataaaaagtttgattaagtttttatttaaataaaattaagtatattatacataataaatatttataatttaattagttaagatttatagcacattatatacacattattagtacaattttaggg

SEQ ID NO: 197704 - DNA, 945 bp, Cannabis indica
ttcttattaattatttttgtttacttattttattgaaaaaaaaaatgaattagagtaataatattagtgagattaaagtgtagctattgtactttttattcataataattatattaattcttttgtgcttcatctccatatctcatttattaaattattcttcatcttctatttttttttccaaatttaatagtatcttttatataagttcagtcatgcttttcttatataagttgggtatatttattatattttatgtcatttgctgcattttaccaataatagtattttgtcgatttatgataaattgtcaagttagaaatgatattcagtttatgcaagattaattaattgtgtttttaacatatatatcttgtagttgtaataaaatggtgtagaattacaaatgtgttctgaattagtatcgttattaaaataagatttacataactatatttccaacttaccaagctctttatctgataatttttctcatttttattatttttagttcattttaatttctactattttttattttttatactaatctttagttgtaatttgtctccctgtggatacaacataactcgtttactataacaagatcacagtggaacaaattgggcgataccacaacacaatcagcgtcaactacatccaaataggctatcttgcattggaatggtctttctttttatttcaaaatagaatagtcattctaccaaaataataaaaaaaaataacattttaatactttaaaatgcaactaaatagaagaattgaattatttttttttctattctattttattacctttaaaatgcaacctaaattagatattgttttctggcgacttctcgacaatggtgccatttgaacactaagtactactacaaaattttatttcttaaccacttttagtcttgtcatattgacatggtc

SEQ ID NO: 197705 - DNA, 1856 bp, Cannabis indica
ataaggaaccaactttattgaaaccaaagggaaactacaacaaactcaaagctaccgaaggggcaacaactttgagcaaacccgaagtacaagacttggcacatctcgcccagcccgcaacagcatcagccacaccgtttaaataccgggggcaatgagcaaaggcaacataatcaaaacacttacaaacagatcgacaagattcaaatacaggataagtgccccaagcataaggcaaacaatcattgttcaaagccatgattgccaccatggaatccgaaaggattttgatcttcttaacaccccgcttacgagcagtttccagcgccagaagaattgccagaaattccccttcaagaacccccgagaccgcatgaaattcagtagccacccacgaatcaccaaccaacggatcaaccacttctacagccgccacaccagcagtctcatcaagaacagaagcatcacagtaaaagcattgtaatccatccaagttctccacaactggaccaaggacttcaacccgatcggccacttccagaggatcaaccctcatctccatctccttaactcttgttccaatgtcctttatcaatcccattaaggagaaagtgcaacctttaaaaattaccttattcctccaatgccaaaccgattcacagaggcaagcagcaaacaattgaagttcctcatcatttacttgagaccaccaatctccaaaatccatgattgtttcccaatgcaactcttccacacgaatgccccatcgactctgaaaccaagctgcacgaactacactgcaggatccaaagagatgcagagcagattctgcagcaacattgcagagagaacagttgttttcaaccattccaagacgctgtttcgaaggcaaaacatcggaccatgttttccaaagaaaaaactttaatctctgatgaatcttagaccgccaaagcttctcccaaacgcaattcggggtcttgaatctcctgaattggctcaaccaatacccgcttttaacagtaaatgtccccaactttgatcctttccagaaaatgatatcttcacttgtctccaaaggcctaattcgcagaatggccaatgccacttcttcatcaaaacagtcctttatcaactcttcattccacactctgagccttccaaaaaaagatctgagaccttcacaaaagcatgtcttctagagtaatggaaactaagacgaacctcctccatagatttccccggaacccacggtctctcccacaaatctgaattcccagcaccaatcaaaataccagccccagccaaacatatttgtctagcctctaacattcccagccaagctctcgaatcaccagtttttttctctactgaccaagcatccgcaacctggcaatatctatcctccaccaacttaacccaagccttatccatgcccattagaaccatccaacacagcttagccaacatcgctttattaatgtcactaaaccttcttaaacccaatccgccacattgcttgggttggcaaatctcctgccaacttttcaaagcacggtatctttctttacccgaattccccacccaccagaagcgagcaacaatcctatccaaatcctcacacaatgtctttgggatcaaggcagtcgacatataataccccgggatactctgaagaaccgagccaaccaaagtcgttcgacccgcctgagacaagtttctagctttccatccttccaaccgagacatcattttttcttttagaaaattaaaatcctttttcttgctcgcagagaagaagaatggattgcccaagtacttctcgtccctcctcaagctattcatgccgagcttgc

SEQ ID NO: 197706 - DNA, 882 bp, Cannabis indica
gaaaacaaaaaaagaaaaaaaagaaaaagaaaaagaaaaagtaaagtagagtgtgtagtagtatgtacttagttgtgaagttaggattgttattttctatatatatttactctgaaatgttaagaacaatcccacttcatctctctccactataatttcattttctctattctgaaacttaagatcatcaatcacataacaaaaatatgatctcaaccaaatcattagctgaatcatctaaccttacttcaattccaccaactcatattacaatcccaaataatgatcaactagcagtactggaacactcacaacaactacaaattccaattattgatttctctctcctaatctctagtgatccagatcaacggtccaaaaccattgctgaactaggcaaagcatgtcaagattggggcttctttatggtaattattataattaaacttaaccatattcatcatcatttttcttttataatttctgattttagtgactattgaatatatgtataggtgatcaatcatggtgtgacagagaaattaatgagtgaagtgatagaagggtgtagaggtttctttgatctgagtgaagaagagaaagttgagtttaagggtgaacatgttttggatccaattaggtatggtacaagcttcaatgcattggtagagaaagctttctattggagggattatcttaaggttcttgttcaatttcatcattctcatcatttccctcacaagccatctggattcaggtaggattattattattattattattattattattattattattattattattatgtacaaatagatttttgtcctaaacaatgacctttgtaaaagttttggcttctgaattttaatttatttt

SEQ ID NO: 197707 - DNA, 1554 bp, Cannabis indica
tcattattcctataattgttagctgtaaaggtaacttggatagaattcttggtaatttttgtgtttccctttaaacagtgttgtacaagcatattcttatcctacttgtactgaaaaatatcagactcgatgtggaaatctagattggttactaatgcaaattcctcaacactatatctaagaaacttcttagccacagaaaaattttagaattccaacttatttggttgttgaacttcctcaataacagactatgtaagagttggaagtgaataccgtactgagaaatacgaagaaagtgaccaaatataattttggaaaaccaattgggttggggtgagaatacttttagtatctttaataactgaataatacccaaaagttattatttttgaatgataatgctgagaacacctatatttacaagagcaactcaaaaaaaaaaaaaaaaacataaaaaatcatttaaaaacaactctaaaacaacataaaaataaataaataataataaaagcaaaaattaaaaaataataattaaaaaagccacatacatcaacaaccatttcactaagaatttcctccaaaacaacatcatgagaaatattaaatgaaatttacccttgccctacaaaaaacaaataaaaaaaaataccaagacaactgttaaagaaggtataaattatttcaaaacaccaaacacatacaaataaaaaaaaaataacacactaaacaaagtgtattgaaaaatccaaacacaataatatacaatttaaaaaatatgacataaaaaccctaaaaaaacacaaaaacaaatgtcttatcttgggaactttggctatttcaagagagtcatcttcaagctcaaaatctgaatcaaaatcttccaacatagattgttgccatttagaattcctcttggaaggagatttagccattgacttctgtttgaaatcaaccagagaagtaggactaggagggtgctctttaaaaaaaaaatcccaatgtcgatcgggataaggtagatttaagtttttttgggttttttaactactgtggaggaaaaatttgaccgcattacaccctagaaaagaaaataagatgaaaatttataagacaaaaagcaaaaacggttaggagggaaaaaataagaaggaaatggattttaaaaaataaaaaactgatcaaaaaccaagtacaataaactgataaaaaaccaactacaatatacacaacgtggctgaagattttaaaactaaggaaaaaaaatagaaagaaaaaaaagatgaagaagaagaacagaataacaatgacagtaaaaaagaaaggatatatgactatatttcttaatttggttgcaaattaaaaaaaaaaggaactgccacagacgtgacaaccaatttctcatcaaactttattagtttttttattaaaaaaaaacaaaacatcctaaggtgacaaatggaaaaataggggaaacataacttttatactgcatttataatatacaatatacgaatttacaattaaaaaatgcatttataatatggattagta

SEQ ID NO: 197708 - DNA, 1053 bp, Cannabis indica
tcattatcaatcacattttttgttaggttggatccaaaaccatctggaaacttgactgatttaagaaattgacaaaaattttttcgatcccttggtgtgaaggtgtactttgcagcaggtttttggaatcggccatttactcttttcagctgcaactctggtcttatattcattttttcgaggtctaatctagcattaattgtatctttggtcttattctccaacccaactattgtgcctactaaactatcacacacatttttttcaacatgcataacatctagattgtgacgtagcttcatgttggcccaatatgggagctcgaagaatatactcttttttctccaaccaacttgttcttctgtacgctttcttttttgcccgccataactttcatgtttaccaggaagagattctggtataaaactcatttgtgtgaacatatcttccatacttagttcctccggtggtggtctcttttcaacagtgccatatgctttcttgtttcttctaaaacgatgtttaattggtaaaaaatgcctatggccataataagcaatctttttatgcaaacgaatagaaggtgttgccacattgcatgtaggacaagcatagtagccttgaccactccatccagagagactactccttgctggataatcatttatagtccacaacaaggccgcccgaagattgaaggaactaccatcaacagcatctcgagtacgtacaccagacacccataattctttcaattcatcaatcaatggccttaagaaaacatcaaagtcctttccaggcgaattaggaccgggaatcaataggctcaacatgaaattagtctctttcatacacaaccacggcggcaaattatacgtcgtcaacacaactggccacatactgtaagattgactcatgttaccgaaaggattgaatccatcagcagccaaacctaaacgcacattccttggttccattgcaaacgttggattatttcgatcaaaatccttccaagcctccccatctgcaggatggcgcaacacaccttcttct

SEQ ID NO: 197709 - DNA, 1987 bp, Cannabis indica
  modified_base (1960)..(1960): a, c, t, g, unknown or other
cagactcaaagctagggccattgcttctcatcttgtgaggattttctactacatctctcagcaagccttcctacagtataatttgaacagttcattattatttgctggtgtatctggtttgaaaggaatgttgaataccatggacaagctgctaaaaaacttgatgcgatgctcatgtttgcgacttcatatcttattgattaccaatctgctcgagcccctacacaaaggcctgaaacgcacatttctgtgaaaattttggtttcaagtgtaccttcttgcacacatctaaagcctaaacacttagctccacctttgggaagacttagactaaacagagatgctgcatttgatgactctaaaaatattgttggtgttagtttaatcttaagggactcattaggtgctactattgcagctctttctaaaccaattcttggtcgctacaaacctaaagaaatggaagcaatggcccttgctttgagtctgaaatggctaatctctcacaatatgtcagcggagttcataaaaaccaattcacttatggttgtccaagaattctaatattctaatgtgtttaattatgctttcatgctattctaaatgatattaactttctagtatctaatttcctacgagcacagatcattcatgtttacaaatctgctgacacttatgcccacactttggctaagtttactcttacggtggatgatgaatgttcttagttgggggattttccatcttcaccaatgactgttgtgtaatttgatccaaattaatataatagtctttctctaaaaaaaaaaagctaaattatgacagtgatcttaataacattttatttataatcaattaaattaaaactcactcaaatagtcttatttattttggactaaattattgttattattattttaaaaaaggaatgatattatattaatcaaagagttccaatgattacaatcgataaaagttcagcaggagcaacactctcactgaaaacacgatttgaatagaaataagaattacgtgcaacacaatggacaactttatatacagaacgtttaacaaaataaatcttaacaaactttaaaatttctaacataatacgacaatcactagccaattgtccaaaagaataaggcataaaaatagaactaagcactgcttgaactgtaactaagcaatatgattcaagcttaacatcttaccaacccttctttttgatccaacttaaagcctcattaataccaactatttcaataaaagaagcctccatgtgaccaccaaagcacaatgaaaaagcttccaataatcgaccgacactatcacaagcaaccccactgacaccatagtttccactcaaagaaaagattgctctattgacactaacagagcctatattgacgaaacagcatgaaaaattacagttttactaacattgcatacttatgtcactaagataattattaggttaatgctacttacaaacttaaaactttagttacttattataccacaaatattccaaaaaaaatatatcatgtaagtcatgttttattcataggttaagtgtatgggattggatagtatagtttgttatcagaggatttcttcatttaaatgacgagtgcaatctcgtatttaattaacacattgacatgttgctcttagaagaaggataacgtgttaaactataattccaaaaaggcaataatccttgcatgatagaaacatgtaagaaggtgtgaccgagacaagatctagtcacatgttgtgcatcgcataatataatagaataaaagcaggatatagagagaagttatcaaaagttgcaacatatattgattatatgcggagaccaaatgtttctctcctgtgccctctgttgaggtctcaccttcactttagttggtcccaagaccgaacatacacaataactcatttgacccccccncccccgtccgtatgtttatagtatatg

SEQ ID NO: 197710 - DNA, 1626 bp, Cannabis indica
ccatttttgtaataaataaactgtagaattaattgtattgcaataaatgatataaaaagcaataaataacaagaaggtttttatgtagttttgaagttaaatcttcatagtccatgagtccatcttattaagaatttatgtgtttgtatacaaaatacaatgatattgtttttcaagaataaataataacaatattatctatttttctcaagattggccatcctttgttccctgggttctttcccagtttatagatgtatagggtgacaattattcccttaggatctaatcattcgtaactgctcatgaaacatgaacattccccatgttcatctttgtgcacatgtgagaataataaataactgcctaattgctcattgtctttatctatagattgtaatgctgactatgcttagttgttctcaccatttgaatgatatatttcttaaacatcttcgtagaaactgttaagtgttgagtcaagatgcatatcgagttggttacttcaacgtgttaagagcaaggtgagtgaatgttggagttgttttcattccttgaacatactcacaagtatgtggattaatgagctacaaactcattagctactcgttccaaataattctattgtgtattctatttatcttgagatggacttgtttatcttgttggtctcatcagtcaatagttattactcatgtctcgctactgtctatatgacagtgagttcaagtatttctattaactgtatttctcgagacaagtcatttaagtatatttaataatgcgtggtttgagctagttcatattctagctttgacacacgtgtcagcttcttattgtttcccaaaatatagatttaataattgccccataaaaagtacttttttttttaaaaaaaaaatgactttttaaatgcttcgagtgtacgcttgtatttttccatataaattttgcatgcttttatattggcggttcaaaacttcaaggcaaatcatttcaccatttaatgctctgactattcctttctcatttggtttccatccgttcgatatgcttttctcttgatcaaacagttaccaccatttgggtataaatttcaaattccctttcatttttgccatttctgcacacaaaacctttagaatttggaaaactctcaatcgacatcttttatgaatttgcatgccctctttgtctcttaccttcttcctctatgtttcatcagaatgcatcacatgacttcaaaatctttaagacccataatttctgtgttcagagtttttattgcaaagttcttccaaccccaaaaatctttgaaaaactagaaaatgaattctgttttcttctgacttttaggttttcaatattgatttctttatgagtgtagtatgttgcatattcaatctgtttaaataagctttgtgtgaatttctgggtagtctaaggcttagaaatcttttaggttacacgatttgcagactttggatttagttttgtgctctattttttttccaggatttggggcattttttctttgaaatcatgtcccaatttaacccatatttcatgctcccagaatcctcagagtttgaatgtaacgtcgccacttcaagcctccattgggcc

SEQ ID NO: 197711 - DNA, 963 bp, Cannabis indica
ccactctatactgaataaaaccagagtaattatacccacaaattaatctatcccgggtcgaaaaagaggaccaaggaatagagagaatggcaacaacttcatcaggacaaataatccataaatcaagtcaatgtcccagtctcccgaatcagctcaaagttgggaaatagtacttccttcaccaagcaaattaggacacaagacaagaaaattaaaaggcataggaaccccatctatcctcatacacctttatgtcaatcccatcaccaactcttcaaatagaaccaacatcaaacaatcttttccccataaaattttattttcaataaaagatccttttttagacttggtcatggaaccaaaaggcttacatcaatgatacaaaattttagaaccctagcaagaagagaattcgaatcatcataaagacgccacgcttgttttgctaacatcgcttggttgaaaaaggtgcaaatcctgaaagcccataccaccatcttccttatgctatcaaagcctttcccagtacaccaatgtatcttctgtttgacatcatcaccaccccaccaatatctagcacagatgctatggatactattaacaaaggccatggaaagcttgaagagtgtcattgtgtaagtcgatcgggatgggttgaataactgccttgatgccatagaaaaagacttagccttccatccattaagatttttctggatacgatctcaaacttaattaaacagcctaaatttactctgactagcaaaacacggaagacttagatacttttcatgacactccacaccaacaaccccaatagcagttatcatattctctttgacagtggccacgacgttaagactaaaacacacaacagacttctcaaaattaactataacgcttcgcgcaagttgcttaatccgttgctttgtttctttcaagcccgtttgcttagtaagtaag

SEQ ID NO: 197712 - DNA, 1129 bp, Cannabis indica
cttgtttagttttgttttgaactttgatggtttgattattatggactatggaatttgttttgtttagactgtggatttcggtttgtttggactatgcactttagtttttggaatatgaattaagattattagattaattttatttcttagaacttttaattagtttagaatactgtattgtaaaatgaaaaaaaaaaaaattatcttatagtggaatagttgctgaaactttgagacattttttatgaaaaaatgtatgaaaaaaataaataaaaaaaaggtccaacccaaacccgatccactttgaacctacaaataggtgggtttgggttacataatatataaatccaaaacccgaactcgataaaacttgcccgatgtgcacccatactttaatttatattacaatatatatatatatatatatatatatgaaaataatggaataataacaagacgaggaccactcatcaatataaaaaaatatctctataattatgtagttaccgaatagatttaataagttaataaaacactaaaataaatatcatttttttccactgaatagagaaggggtatataattttagtaggtagttgccaattggttaaatacaattttggatcctgtgttttgcaaaaattactaattggaccatctgttttgttaaatgacaaaatagtaaaaatagaattctaagctcaattttcaataattttatatttttaatatataattgaataaaatttctaacctgagtagatattgaaaatgtaactaattttatcataacatctttagattagattattattaagttttattttaacaaaaaatcagttcaagatattatttgtataattttgaaaaatataaaagggataagttgaaaaatatcacttttattaatcaattgatcaaatttacctctaattttatgtttaatttgaaacatacctctttttatatgtattgtacccaaaatatcctaacataagatagtcacatggagaatatcttaaagtgaaagggggaaaaaattggtacaatgtttttaaaaaaagaggtaaaaaatgaatagacttaaaaaaaaagggtaaaaataaaagaaagagtaatataaaaaggt

SEQ ID NO: 197713 - DNA, 1716 bp, Cannabis indica
atatggaaagggacaaaagggagtaattatggatcttagtcactaaactaattaaagtaattataattagcttaactaatcgagtagagagaaccttctccttaatttgggaaattttgggtccaatttcataaaacatagttaaacaaaaacctaacacaaatccacaaacagcggagattattattaactaataattataccttttctatatacttatatgatgagggacttcttaatataattaaggaatatatatctcacttaatttcttaaatatataattatacataatctatttatttctaataataattctctctctgtctttacacaattctatgttattttgtatttcttttatatatgaattgtgtgaaaaaaaattattttgtatactaagtaaattgtaaatatttattataaaaaaatgtaaaagtagatgttaagaattcattcattaatcttttacctaaaattacattctctactatatattacacaaaataatttttgctgttatattttcttattatattagtggcacatttattatataatatttagaatcataataaattaataaaaaaaaaatgtaacaaaatgaataaagagtaatcgaaatcaatatttgtaatatgttgtttactaaaattatttagaaatagaataataataatttatcttgtttactttatcagaaaatgtaatcataatgctaaattgattaaattaccctttataattaaactataatatatgatagttatttagtaagatatattataaaggacaacattatcaatgtatatttaatattaaaaaataaaaataaaaataaaaatatataaaaattattatccttaatggcatttcttaaaaaatggtgggaaagcatttctttttgttatctcatatttaataagttatatttttttaattttaataaagtaagtaaatataatataatggctaccttataactattgattcccattatttattagtaaacatacctaatattttatgatatattttttttacaattttagagccctgagcatgctggagtacgaagtgtacatctagcttgccttacctcaagatcggtcatgtatatagataaagtttactatatatatatatacctatatatgatataatagaaactaagtaatctatatattatatatattcatgagttttgtttatatatggagtgatctaaatctagcaagatatagtgttaatagtaaaattgtttaaattttagtactttaaatgtttttttaatgatatttattgattgggtattgaaaaatctacagttaaaatattgattaatattgtaaaaacatggccaacttttaaactaattaggattttagggagattttgcatgcttacaatttttttctataatccatgcttcaagaaatagatattgataaatgaataattaattggtaaaatatttatatatatcattattattatttggcttttggggttaatatttatcaaattaattagggcaagaaaaagaaccataaaggtaatgtagtggaaagcaccactccgggttttgttggatatatatttatatttatatatattatgtataaatattaaatagtaccccacaccatactcttacttgctaaattaattattatttacaaataaattatatttatatatatttatgcattgcca

SEQ ID NO: 197714 - DNA, 1219 bp, Cannabis indica
atactggaaatttctaaaaaagaaaaaaataggaagaacttctatgactacaaatgaacaaatcgagtcatcaagaatggtggttttaatcgatcttccactcaagcatgggacacattagaacaacattaatttcactgttcaactcaaattcgtgcaaaagtttcacaactcaaatcatttcttacataaaaatatgattctttattaatctctccaatatatcacatgggagccatttttgatggccttccaagcttctggacactacgtacgtacccgaattgggccttagcttggatagttttataactttgacaatattcagatccgtatggaaactttttatatatatataaatatctgattattttgtttagttaattagtatatatatacatctatatcaaatagtaactaaaaaagttgcttgcatgttctttattctcaggtcctttgaaggcaacaattttgtgggtgggaatatacattgggaaaattttaacttcacaatacttcgctctctgtgagacactatactccatatatgtattaattaattaataatgattattattggtactctgtgagacactatacgatctgttcccataataaaaataatgattattaattattaattgacgttttatgtatatatatatgcaggattataagtgatttagccatttccggatccgtattaccacaaaatatagaatccaactccatacaatatctgtgagcaatgcactagctaccataatcttattttgtcttaattaaaaataaaaaaaaaaaggttgtctagatagcagcaaattacgcatatatgcatgcaatattacgtatattaaacacaacagttaacaatttttaattttaagttacacacacacactatatatatatatttatatatatatatatatatatgatacacttatttttggatcacattattagaactctcacttaggacttgcttccttgagaatctctatatatatagttttcatatagtataagtaattgactttaattgtccttaaaaattctagaaagaaccttattcaactctgacatgattattttacatattttttcttttaaaaaaaaaaaaggataaatctaaaaataaagtcggttatatatatatatatatatatgtgagtttcatagagagagagtagagttgtacataaataaataaatatat

SEQ ID NO: 197715 - DNA, 1845 bp, Cannabis indica
tttttttttgcacattttttataattatgttgtttttgttgtacaaaaaagccctaaactttaattttactttggtctcataagtgttaatgtgaatgtccgtacacattataaatttctattgatcaataaaatattaattatttaaatattacaaaaaaaaatcaaaaattaaaatcagtaaaataaatgataaaagaattcaaaaatataatttttttcctttccttctattttttcttcgtgtgtccaccattgcaccatcaggtacttgtttggaggaaattttaatgggtcaacaagagactcagtgttagaaacataagaatggcccaataattgaatacaggcaaagctcacaaaagactgagaaaaatttaaagtttaaattaagagtcaagatacgggaacataactaattaagggggtaacctcattgtaggagtcgaagtaatatcgaagaatcgatttggaataatttcgaagtaagactcataatctgtgtaacaaatagagatagaatcaatagcatgctttatgttacccgatgaattattatataccttttcattgcgggtcatccagatcgtatctattacaatcaaagcatttaggaacaacttgtcagtatccactcctttagacttcaagttccagagaaaagtaacctgatcccaaacacgggcgctggaatcaagcactggaaaaactccccaaggggaagatctccaaagatggtatgcgaagttacaatataggaaaagatgctccatcgattcctcacccacccccacaaagagagcaagagatctccttaatactcattctctgagttagaagggcacgaataggcaggtcatcagaaagaatgcaccaccagagtactttatgtctctccaaaatttttgagttccagagtttgttccacactgcgggggcaacaacacaatatgaggatctctttaaagcgtggatcagataagcaaactttatagtgaattcaccatttgactctttcgtttaaacccacttatctttaccaaggccactacaaatagtatccgaatcaaagagggttcggagtttaggaatgtcccaatccccgttgtctagaagaagctctgcaaccttggtcaccccaagggttgggagtaaaggccttagggtagaaccccttgccatgtagaatctgcgggtctgtccaaatattggtctctttcctatcagaaatcattttacacgtacattttttcaagatttccttagatttcaccacattcttccaaaacaagagtccgaacttttaaaagagcactccaagaatggctttcctcttagatacttagcatttagtactttacaacacatagattgctctttgaggagagcccatcctcacttggcaagcaacgcttattcatttcaagagtcttttgaaaaccaaggccaccctttgattttggaaggcaaaggcggtcccaagtcttcaagcaaatacctcgattaccttgtttacagtttcactataagtctttgaacataccatctattgtagaggcaaattttttttgaaagtttagtagtttgtatactatagataggatagccaaccctaatagtcatatcacttaataaagtagtattaatgatgaaaaagaaacttgcttccttaatttaaaaaaaaaaaaaaaaaagaataactttctttaaaaaatagaataaggaaaatagaattaaatagtttatttttcacaaataattaggtattcgagtattgacaatcaaaattaagatttttttgttaaaaagtggtattccataatgtgttaaaccaattaaaatttg

SEQ ID NO: 197716 - DNA, 549 bp, Cannabis indica
cctaattattttagacaagagcgaaaatggtgagggagctgattggacttatgatgatgccaaacataaaatgtttgaagccttagaatttggcatagaaagtgcaagaaatgcttataaacaagctaagaagagtattgttagtaattacttggtagttaccaataacaacaacaataataataataataataatgaagttttggacaaagcctataatgctagagagttaaatattattggcccccatgatcatgatgaggaagtaattaatattgatgaggatcatcatgatcaaagttattataataataataagaatgaaaaagagaaagcaagattgaattatgatgaagctaaagaaaatgagaaagattgttataggttagccaaagagaaaatgaccgaagaggctaaggataagtatgaggctgccaaagagaaaacttcacaagctactgctgatcttggggaaccactaaggaagagagtagagctctaaattcattttctgtgagttttataattaatattatatagttttttttt

SEQ ID NO: 197717 - DNA, 711 bp, Cannabis indica
tttgtttttttttttccaatgttacatactgatgataatagatatagtaacatgatgtattgtattacaaagaatatatcaatgcataatttatattattattaattggtttatatctatagttcttatttataatgaaattgaatacctcatcataaggtcattattttcttcatggtgcaattattattatttttaagtttttttattattgtaacacttgtgagactttgtattataattagagtaatgatacgtaataatattatacaagtaatctaaagagtgagttataatttggataaatatgattagtttgaaaaatctacaccatcactatgtatatatatgtataattatataatattttagtgtaattggatttaggtttgtaaaatatgaatgggtcaactgttaggtttgtggcacaaggactactcaatatgaaaacaaagcattaataagtcaattccaagggctttgaccaccagccaaactattatcaacacatgttttagaattttcatgtacttacaaaagcatgaatttaaaacctctaatttctaccttactactttttaatgcttgtatttattatataaattaattatcaattgtgtttatttaatcaaatttaaattacgtataatgaggcttcagaaaattctaggaaggaacattaccaatacagtgtgttcataaaaactggtt

SEQ ID NO: 197718 - DNA, 2085 bp, Cannabis indica
tggaagagagcttcagggatgatagctgaatccataagaatgttgggaagggaaacatagcatatctttgctttatatcgaataaaccactcagttaggaaatgggctcgataagctacaacacatggtacatgtgcaagctgcatctccacagcaactgtaccggatgtacatagtgaaaccttactcgcctgcaagttgtttagctttttttttaatataagacatttgacatattgacaatctaattaggtgtaaatagatacaagactaggaacttggtttcagctgaatcccattctttcttcctccataacatgttatatgttgatgctaaacagctcctaagataatcaatttcgaatttagagaaatttagaacatggcttagctaaataacaatgtttccagaccaccccttaatgggtcaacaacactgcagagcattagaaccgggttaatatatagatccacaaactattggattattccaaagagaatttgccaattacacatttggtcacagaacaacaaggggacacaaacacacacactcataaagggtaaaatcagacatgcataattctgcaaacaatcttttgaattgactaatgtgattgggttagaaatcacacaaggagcttcttccagccacaataatcaacacagtatacttccataaaaaaaatcacttaaaagtaaacaaggtaaaacttattcaatgtataaataatattcactcacacaatactttttcttacacttaatgcatcatatttcaggtgatgggatccccctggaaccaatatggccggcacaggccatttactaacaactccgtcaatgtagctttcaacatgccgattagaagcaacatgaattacagttaccaattcaggaaaggactcttttaacaggtccattgtatttctgaagattgtgagcattctagtgacctcttgtaatctgcttccaggaagcaaggaaacaacagtagctcctacacaaaataaaaaagcaaataaaggtagtacttaaatgcagtatatttaaagaccttatagagaagggataaaaacatctgatctcctatggcaactttatttcaccccttaatactctcagagcttgtgaaagtcccctcaatactttcagagcatgggaaaggatgataaaacaattttaaaatttagcacatatgaattcataatacaaattatgatttacctgcaggtattgcatttttctctttgaaatcttctgattttccttcaatcttccatttacatggtgaagtattcctatcctgccataataaacctcccatgaattggtgcttactctgtcaaatctactctaatggctaatcacatgtttgccttttccaatgcagttagtatgcttaagtacaaaactggaacaaataatttccaccatatattctccagtaagggaataagaaatacactcattcaaccccaaaacagaagaaggtgcttacttttaattccataacatcctcaacaatggggtgacccacgaaagttgcacctagcccgttagctctgcacactccttcctcaaatggaagtatacacaagacatgatccacaaattcagttaggcctttgagtcttgcttcaccccctttccatgcccaaaatgaaggtgctacataatggaagtgtactggaccatccaaattgagctgattgtatctaactgcaaaaatattccctcaatttctcatatcctaagtttatcacttaccatcaagaaaatgttactatgaccccaaaattatatgacctcgtatcttctttagaagacgaaaagaaaaacccttgttgtcaactgttacaacaacatgaggtttaaacacaagtgcagcctctattgtatccttcaacttagcctgaaatttacaatagggtgcatgaaattattcacgagttagtgcatggatttgttacaaattctcgacatatattctgctagtagaatcttaagttactcactactcaccctgagtttatttatatgtggcaatagctcccatatacccatcacagaaatatcctctat

SEQ ID NO: 197719 - DNA, 993 bp, Cannabis indica
attctgctcacaaatcatgcaagccatattgttttcttcaagccttgaaaacattttttacattctaaggtagtgacggggagctcggttttgcaggctattagctctatctttatttgttaatcttgctttaaatcctttacataaaatgatgcagttcttgtagttttaaaacatatgcacatgcagatttcccaattgaaatgttaaaaagaaaaactcatgctgtattagaataatgataaaaagatatatacagctagtttgtagctaagtataatggatgagtggctggtgtaaagaaaaatggtatcatctgtcatcttgatcaaaaggtttgatcctttaactgttacttactttccactatggttctgatttgagtttaaaccatgcaattttccagccgacatccatctgttaaatgggcacaaaggtctgataaactttacataaccatcgacttacccgatgctcaggatgtgaaacttaagctggagcctgagggcaagtttttattctctgcaatcagtggggcggacaagattccttacgaacttgacctcgatttgtttgacaaagttgacgtaaatgtaagtttttcccaaaatattagcatgctggctttggaatatgctcaaatatgtcttcttttttgtaataacattaacaatggcacttgcaggagagcaaagctagtgtaggcttgagaaatattcgttacctcgtgaaaaaatctgaggacaaatggtggagcagactgttaaagcaggcaggaaaggctcccgtgtttctgaaagttgattgggagaaatgggttgatgaagatgaggagcatgagaataacaataaggaaggtatcttgtatttctagttcttttaattgttactaaacttgttttcctggaaaaacttatttttcttcttatgatttttagttgaaaacgatatggactttggggacttggatttttcggtaagtaacaatatctt

SEQ ID NO: 197720 - DNA, 2343 bp, Cannabis indica
gtctttttttttttacttgtatttttcattcatttattttcagctttaccacttctctaattagggtgattctttgtaaaaaaataaaaacggtgattgtataatgcacccctaaaagaggtgtagtgatacaattttttttttaactctaaattttattcaattagattaacttggtctcacaatgccagcaacatccaaagggagattagactccgaagaaatacgatcagcatataaactagatactctagccataaggtgagctacccgattagcagatcgtttgataaaaacgtacaaaacattactaaaaaaagataaaaattgtttacattcctcaacgacacccccaaagatggatgacaaaacattcaaatttctaacagcttgtgccaaaaccaaacaataataccaacacccaggaatcatgcttcaaccacgaaagcactttcttgagagcaacgactttagaaatccttggaagaactcgcccaattcgcaatcccgaaattccaaccacgacccgaccctggtgatcccgaacaaccccaccaaaatcatgctttccctcctcgtcaaacaacacaccatcaatattaaccttgaatttttcataacctggtttagaccataggccaaccccatccaaaagatactcagtaccaaacgaaggaaacatacttctttcttgagctttcttctactgatcaagagtggtacgagccaaattgacaatgaactccactcggcttttcttaccttcccacaagacttgattccgtgcaaaccaaattgcccacactagcatcacagcctgagcacattgtccctcacccacatgtgagaacaagtgaaaaaactagtccccaaacgacattgcatcaattggaaccatagtcgaacccgctacccgccaacaattttgcacaaaatcacaggaaactaaacaatgtaaaattaattcacccatcccatgacaaaccaaacgcaacaaagaaccaaaaggctttaggctatccaagttgctcaaatacgaaagtactactaacccaattgattatttagataaatttaacacgattatggaagtagaccaagtaccacaactagcaaagtgttggatactcgccgaaactttagaagataatgctcatgattggtttagccaacctgggaaacctttgtaggcttgttcttaacgcatttctaggccacgatgacgtacaaaccgtcgtacgcaatgctggaaaatattaaacaggaagttagtgagtctttacaggattattttaaatgttttaatgctcaaaaaaccaaggtcgagaaggtccccgagtctttgctagtttgtatgttgattacaggtgttttaccatgaactaacttttggaatgaactacaagcgcaacgatcggagtcgttggtggaattctttgctatggccgaaccacttaaaagaattgagaattcttttgtcgagttagaaagaggaaaggagaaacacgagtctcctgtacccaggtcgtcttcccaaagcccgaaaggaaagaattctaggggttaaagccctaaaagatgcagtccgtcaaggaaacgcagtccaaagctcaccaaatcccccactaaaaaggaatcatccccaaagaggaaagggggtccacgctttgtcaattacactgagttgtctactcctcctaaccatatctatgcaatagaggagcaaaatgacgtcttcatgaagccacctccaatctgggggaatcacgacacgagggatcccaaaaaaattttaaagtaccacaatgatattggcaatacaactccggagtgctggtttcttcaagacaagattgaagaattaatcatacgagggaaatttaaccaatataagaagaatggagaaaatcttccccgatcggatgataacactgatataaatgatgcgagtggttctcgagcccctcgtaataggaggatcgcatgtcggtggagagaccagaaaaacacatgaacactatgcaaaagaagcaaaagaaaaactccttaccaatgtaaatttgagtgaacgaccaaaatagttgttcaaaaaggaatccgatgacattaccttcatggaaagcgacgtgaggtgggtacatcatccacacaccgatgcgctagtggtagctgccaatatcggaggggataatgtacatcgtgtcttagttgataatggaagttccgtcaatctcctaaatttataagcttttaaacaaatggggttgcatgaaaaggacttgcaaccagtgaccttgagattttatggtttcactagggatatggtcgcattgaaagggatga

SEQ ID NO: 197721 - DNA, 544 bp, Cannabis indica
aatgtattgatttgcccaaaaaaaaaaacttgtactctaaaaatctttactaattaccaattgaagaattgtgatgggtcaaaatctagaacctcataaaataacatgtatataatatagatagagagaattttataaaataagttaattagtagtgttgttgtttggtaaaggagaaagtgatgtgaaaatgagtcaagtgtgaaagagtgacccatataatgaacacaaagtagtataactgtctacgcgtgtggcattgaaaagcctcattcattacccatgtccaagtgtcaactaactactatatctcatcgactcctacacccacccatacctattaaatgctctcacctctcttcttttgtaggtttcgaaactatattgttaaatgatgctagcattgtggtagagaagagaaatgtaaggaaagaaaagtgaagataagagataaatttgagttgtttgaggtaaatatggaatgaaagtattggtataatttagtatttaaaaaataagataatattatatttactcaaatata

SEQ ID NO: 197722 - DNA, 1182 bp, Cannabis indica
accactccctctcctgctcctacaaccaatcagcaccctatgcaaacaagagccaaatctggcatccataaaccaaaagttttccttgcctctcttcttcccactacagttaagagagctcttgaggaccccaactggaatgctgcaatgaacactgaaaacaaagctctcctgaaaaataaaacttgggttcttgttctcttaccacctggcaggtcccccattggatgcaaatggatttttagaataaaagagagtgcagatggcagtactgttcaatacaaggccaggttggttgctaaagggtttcatcaacaaaatggttttgatttcaatgaaacctttagccctgtagttaaaccagaaactataagagttgttcttacattggcagtcaccaaaggatggaaaataaggcaaattgacattaacaatgccttcttaaatggggagcttgaagaagaagtgtacatgactcaaccacctgggtttgttgatccccaatatcccaatcatgtgtgcaaactaaagaaagctttgtacggactcaagcaagctccaagagcttggtttgccaaactatcaacagttcttactcagtttggtttccactcatccaaaacagattcttcactcttcactaggtcttgttcagctcatatcacctacatcttggtctatgtagatgatatcttaatactgggcagcagtgatgttcaagtctcaaaaataatttcagatctcaatgctgagtttgccttaaaagatttaggtgaacttaactactttttgggcatccaagttactcacactgcctcgggccttcatctctctcaaaagaaatatttacaagaccttttatgcagaacaaaaatgcaggctgcaaaatctagctctaccccgatgacaaatggcttgaagctctctcattttggcagtgacaatgttcttgatgcttctctatatagatctgtagtaggtgccttgcagtatgccaccattactcgccctgacattgcctactcagtaaataaagtatcacaatttatgcaggcacctcttgaatctcattggatcgctgtcaaacgaatccttcgatacttggctggttctcttgactatggccttcacttaaccaagtcttctcaccttgacattcaagctttttgtgatgctgattgg

SEQ ID NO: 197723 - DNA, 1551 bp, Cannabis indica
tcctttttaaaaaattaataaaacatacaaataaaagaaagagacatgaaatcgatttttaaaaaaatgtgtttttgtagagattcaatatcaaaaattatctggtttcaaaaaaatatatcaaaaattatctcactacacacaaagaacaaaaatatggtatttgcataatatcctagtgttattacacttcttcttttttttaataaaaagaaaaacttctaagctcaaattactttaactagaatcaaaataataataataataaatgaattttgttgaaacaaccaatgttatcctattttgcattcagtcatataaaaaaaatactcttcttatggagcattaaaatatttagtactactataaaatgatgttgtataatttttttttattttttttgtaaagagtgatatgaatcacatgatgaaaattttcgaagagaaaatttcactcaacaagttaattgtttagctaatgatatataaagttaaaatatgagtcactacaaacaaagtgacttatataagacaaagttatcttagaaatttagacaaaaaaactagagatcacctttaggcggcatccaaaataaccggtttgagttatttcgtgttatttatttttattcattataacactgttatataatcggttctattttaattataaatggtttgagttattttgtgttattaatttttattcattatgttacagaaccggttatatttcaattataaccggtttgagttattagtttttattcacagaaccggttatatttttagttatatccaagatatctacttttggtgacttttctagtaactttttcggcgacaatgattttttcgatgacttttttgacgacttttccggtgacactaacttttccagtgactttttcggcgccaatgaatttttaggtgattttctcggtgccgacgaatttttcggtaaaatttattgttgttttacaaatatagaatttctacttttttttaacaaaaatatgacataaaaaaactcatataaatgtaaaaaaaatgaaaaaacacataactccatagtattatttatttatgccataaaaaagtaaactataccctcaattcccatatttatgagaattctccttatttttaagaaaacttacaaaaatattaaaatttgggttaaattttacaaaaatattgtcacacggtatttttttaaaaaaataatgtgtttttataaatcaacagtgaaacacaaaacataataactaaaaacaactcaaaaataactatagaacaacagtaaaaatttaacacagtacacagtacaaaacttacacaatatttttaaataaaaaaaaaacagtgtttttagaaaaaaaattcggccccacattaaaaaagtaaaaaattaaagtgtaaataatctttagttttactattgagttgactatgattgaaatgttgttcaacttgtttctttttttcttaagattttttttttatcctaattggaaatgtactattaagaatatttttataagtgcatatt

SEQ ID NO: 197724 - DNA, 886 bp, Cannabis indica
gaatcatatttgagagaggtagattttagaaattgaagtgttaggtgagttttgtgagacagcaaaaggatttcaattcgtaaattgaaaagtgtgaaacctatttccctagacataaacctctcctattatgttttgattttataaacactgaacagtcgtttttttttcaaaaacaaatgatggtatctaagggatatattcttgttatttagtcacatttatgagagtgttagtccaccgtcccctggggatagtcaccttactcaagcgaggagaaatgtgaccgtcagacttctcttccaatgatcatgactttacatattcttcatcaatttagtctcaatattctcgtgatatgtgtcattatttttttcacatcactagtcaaaatttgggcaaacgcgtacaatataaacaaagaaagaagttcacgtaaaagataagaagaaattaccataatagaaagtgcactatgaacttgaataagaaaatcccaccaaaataaattgactggttaatttaaaaaatttctatttttggtcaaaacatatatgatagagatatttcagtggtggtgggaagttgtggcttcagttatagtgggtggtggttgtggatggtggtggtgatagtttgaagaagaacgaagaagaaaaaaaatcaataaaaaataataagagaaaagagaacgaaagaaaagtataaaaaaattatttttatgatttaatttaatttttgaaaaatattatttatgtagactaataaaattatcatatgtgtacattatgtctatgtgggtaacgcactgtgtacataacatttaacagtcaaaactagatgggaattgtagggataagttgaaaattaccatttttattacaca

SEQ ID NO: 197725 - DNA, 538 bp, Cannabis indica
acatatatatgcacttcgtgatctctctcgtaccacgtactacaactttcactacgtaaaacagaattaatacacacaaacacacacacacatatatagcgcatatctcgcgcgcgcggggcagcgcttagaatcctggacgtccacgatcgcagaaattgtagacagtgcatgctcgagaaggtcgacgggcattcttacttggccgtatgcatgactggtatatgtgggcatcacaaaacggtcctctctttctagtaatatcataaacaatgtacttaccatcatcaccaccaatggcctcgtcctccatcaaaattaactcttttatatctccattttcgcattcttcaatagtacagctggcattgaactgtgactgtcttgtggctcccgcaatcactgaaacagcttccatttttggtgctgtactacttgctgcggaaagtgtcattgtgcgaataaggactattagtattgacaaaaatacaaggatggcataattagagatggccatgtattctcttctcttcatttt

SEQ ID NO: 197726 - DNA, 899 bp, Cannabis indica
tcttagttgtgttgtttgtgcttcgatttccctcttagattctagttcttgaatcttgtgtgtgaatcttgaagttctagagttattgacataccaaacatgtgctctgatactactgtagggaaagttacctttctacctacaccaataactcacgatattaatcaatcacaaggtcaattttgatctttctactttagtaatgccacaaagaaaatgacacagcacacacacaaactacactggattttgataatactcatacaaaacacaacactcgcacaaaactaaatctcaaaacacaaaccctatatctaaaagctacaattcctagcatagagtgttcgagcttgaacaccactgatctaccttaaatctaagaaccacacaacacaaaacaattaccaaaaaagagataaatgaagaaacaggttggagtacaaacagagagcaaaaaggcacaagagattgatctcggagttcacctcaatcaagggctacgtcttcgtcaagctatcctcagagaagagcttgatttctactatcaacaatggtgcgaacacttggtacatccttggatttccagccatagaggtaagactggtaacccttaaatttctcttgatttctttccttttattttacacaaactcactttctcactaactctctttttctttcttttacatgaacacactagcacgaaggccctctatctttcctctttctctctctagttgatgcagaataatcctcaggtagaaatctcagtctttttttttattaatagaaatcttagtcttgagtttagcttttataagcatatggtagagtagagctcagtctgagctaaagtaggtctgtaactgctttttgttgtgtttttgctagttgtgacc

SEQ ID NO: 197727 - DNA, 1911 bp, Cannabis indica
aaaaaacatttaataaaaattattgagtagatatatatattaatctcaaaataactttcagtataatacattctatctctttataaattattatttttatattttgattaaaacatttataggctaaaaatattaatcacacaaatcataatttattgtgaataaatatatatgttttcacaacactattgtgattaattatactaagttagtcacaatttgtatctatatacaatatttttagctataaataatttttattatgactaaaaatcacatttaattacaaaaaaaaattatattgtgattaaaaagttattactaaaagtatcattttttttatagtgtctatagttaaaatatatacattgtactgccctagctagatctattttctcagccaaaaatcgttattcggtttaattagtactattaattaatttggtcatttagttatttatatgtatttattaatctcataagaatttgaggttcattattataattgttatacatttctttcagatcatttattaattttattttgctgaaagagtttgaaagtgatcacacacagattataccataaatatatatatgtaaacttcttccatctgttcaaatatgagttctagaggagtgactatgtaataatattgggttaagaacacttaaaaataattaattaattttgtttgtccaattaaatctagtgactatagtaacttttgtacacgatttgagggaaaagagaaaaaaaaaaggttttgttacttttcgaataatgttgggatagtgcgcacccatatgtctgtactacaaccatatacatataaatatatatatatatatttacaatcaataattcaaaataataagacaggtagcccttttcaagatcacaccaataatcacacataaaaataattatatatatataatatatatgacataaagttgagagaagaaaccataaatgataaataatgttcattctatagcctatacagtctaaaaacacccattggatttttaataatatatatagtctattaattattaagtaaattattatgatttgtacgtaacattaaattcgattttatgatctcatatattaatatatatatatatagccattataataatttaatttattttctatcaaaataacataattattcatatatatatagggacaaaggcttttactccacaacaataaatatcacgtattattattgtaaaagtacgtacgtatatggttttgaattcccactctcttttttagagatatacattttgatcttagttcattgtacgtatatatatatgtataatgtatatactttaacaccaaaaatttctttaagcataacaaaacttatttaacttgaatatatataacataaattatgtaaaatatataagttgtcttaaattaattaaaaaaattagccaaataataatttttttttataagttttttcttatgtctccataaaatattaatttcccatttattgatgggcaaacgactgagattgtttatttggctacattttcgtttatctttgttttttgttttgaagtctctaattatgatagttattttctcaaaccttctcaaagataaattttttcttatactatgtatagaaagtctttagttgtgtttgtttggtaaaaatttttacttttatatttctaaatcaactgaagaaaaattttctcatgtcttcattgtttttatacccatgcatatattatattctttcttttgtcaatttatttataacaaaattcacaacctttgtttataattagaataaaaaaatctcactctcttcaaatacatctcctttatcaatatttgtattaccctatatattcatgatccatatatatata

SEQ ID NO: 197728 - DNA, 1234 bp, Cannabis indica
ttcaaagagatgttattattgtatgttttgcaattaataattttatcagtaattagcatatgaatgatgaatgacttacttaatttgatcaacttcaagtaatctttaagtaaatgagcaaatattcgagaacagaagatacacaaatcttgaataatttaagagatgaacttgcgctaaaattaacataaagaaaagaaaataattgatacttataatttcttaaaaattattattttatttttcagttgagtacttgtatatttttttttaatcaaatataatttaatgaatttgttaacatcatataattaaaagtatattcagatgtgagttaaaatcttattatttagatatacatttaaattcatcacattatcttaaaaataaataataaatgcactcttagttatgttctacttgacgaagtatcaaactagattttatcaaagagtagaagaactattaatatgtttagttcaattatcaaatatctcatctattgttattttccttgtcatgatgattattgatagaagtgaaaaaccatcaactttttcgtgggtgtataaataaacttgtgaactttatttatatgcactttgcattttctttattgtatttttcttcacccaattccgaatgcttaattcagtttgaagcattcgaaaagtgatcttagttctttttataatacaaaaacccatggtggttaatgggtcatttaaacaagctagagaactaatttagatgttgatagctgaaatggttagatatggaatttggtttcataagatttgaggagtttcttttcaagcaatattgtaagatgagattatgggattggctgctttttgggcttctaaaacttaaaaagtactttcactgccagtttttagttttaaaatacttctagccaaccaaacaagtcctacacgatagtactttattctcttcttgtagagattggaatatttaagggacaaaggtgtatgctgattttgagtgagatgtgcagatttgtctctagctaaataatccatgagcaaattaagtagttgacaaaaaacctgtcctaaccatgacttcagcactaaactacttctggttacttgtataaccagcattccgtacccatacaagaaaaagtccaccaatccgtacttgaaatataaaatttataatttgaataacaagtcaatacaacaagttactccaattctattattattat

SEQ ID NO: 197729 - DNA, 2327 bp, Cannabis indica
tttttctaatttcgtcagtacaagttctatattttcttaaacagaccacatgtaaggtccagattcttgatcattggatctaaacagaaatatgtagtatcagttacttccaaatgttcctttaataaattcaaacggagtctgtactacaaaactggaagaaaattacagttttacaagcattgggtacttatgccgctaaaaataaacattaggtttatgacgcttacaaacttaaaactttaagtacttatgccgcaatgaatgttttttttttaaatttcaggttggcctgaactaaggtatctctactaataatgtaaaaagtggtgtacctatagtagaaggttcctaatttataatatacttgttatttctttaccggattttatattttactgattaagattaataaaatcatcacctaaaaaaatctcaaaaattaaaatttgaaaaattataaagaatacaaataaaatctcatttcatcaaattaaattatccaatgcagaataaaatccaaatccaaatctggaatctaggagaaaatactccaattattaaagaaacaaacccacaatctcaataacttttaatctagaaaataccacaaaaaatatccagaatttattttaataagtctcaaagaaaattaatgacattctcagtcataaaaaacttattatctccagaaatcaaatcttcccattcaaaaccgttgagtttgagaggctcaattagattctatggcagcgacgagatcctccaatactttgaatctgatagaaaaagaaaaaataatttaatatatgtttttttttctaaagaaccattacaaattatcatataattagctttaaaatattttttaaaaaatacctatgattggaggagagcttgtggttattgtaacattagaaattttggaaaaataaatgtacagcaactttgccctttcttcataaccttcaaaattatctgtaacttcaactcttgccaaattatgttgccaacatttcacaggatattcaacacaacactcttgtgttattccaccttcttcttcttccatttcattagagtgatatagctacacattaattattcaatttaaactttcattaactaattgcaatcatatacacaatttattaaagctaaacaacatttttatgtgagcataaataaattgcacgcatttggtgtactattgaagaacattcttagttgcggtcaaactatctcaagtgattttgaactatcaaatatgttcttaatcatatctagtctaataaataaagaataatctttttttttgaataaaaaatataaatcacatcagcaacactttagtattttgttagaaacttaggataaaacttatcaaagtcctataaagaattttaaatagacaaaataatttagaaaacatgatttgctaatgataatataatttaggacaaaatttttaaataacttaaaattaaatatcgaaaaaatgtaagtaaataattggcgaaatttgtgtacataccttcaatacaaatgttggtgattttactttattagtggcgataaatatagtgtctagggaaggagcaagccaaaacaaatacttgatcaattgcataatgttggccaattcagtttccttcaagaactttattttcagatgcttaaggtcacacaagggagaaagtaaaccttctcttgcttccttaggaaaaataaaatcctgcaaattattatgaatgttatcacaaaatcacatacataggtaaatttctatagatgaataaaatgatagtaaagaatgaatatatatacctcttcatgagaacaaacgagagtcaaagttttgcaatgaccaaaatagcttagaaagttcctcatattttggtaatagtcaagagtattattataatcaccatgaacagaaatctgagcatcaagattaatggatggtaccacaactgtagatggcaaaggtccaccataattgaaccacactagatttggggcatcaatctccacataagacacattctcacaatcaatcagctccacaaatttcaaatgttgtttgctaattctactacaatgaatctcaactttctgtagaagattgcatctcttcaagcataagttctctaaaaccctaaaaccccacaatggattaaaatggtctttgatccatttgtttgttatgtttgcaccctctagtctcacatctcttaaacgatcacattggtaaagataaagctgtaataacatggtgctaaactctttggaagaatgatagtgaaaatattcgagttttggagaga

SEQ ID NO: 197730 - DNA, 1136 bp, Cannabis indica
tgtttactctggttttcaaacttacaagtgttagagatcttagagaaatgagtcatttaattccactgcaaccaatgtaaggtttctcatatattttatgtgtttattttcatcgttttagaaattcatatttaggatgttaaaaacatacttgttagtaaatatagatcttggtaaaagatattccaacaccaactccactcacggaccactcaacaacccaaccccacaaacaaaaggaataataactaattaaccagacagaccgaaagactgagacacgaactcgagaaaacaacaacaagaaaaacctcacgaaggaaaagtcaataacgaaacaaaccagcacacccaccacaaataacacagagcacacccaatagcaaaagaactaaacaaatgtcaacctgagagggaaaggaacaagaaacgaaagacggggaaagagagaataatagaagacattagcacttctataaatatgtaactttcactctttcacgtcaatgaatattagaatgaaaaactttttcttcttttttcttttataagaatcaatatttttagttttagttttcataccttaataattaaatgaggcttctatctcttttgtgcttagtgtatctagtgcccatgtgcacttttataccttaataattaaaaaactaaaaataaaaatattgattcttataaaaaaaaaaaaatagaagaaaaagtcttttattcaaatattcattgatgtgaaaagagtgaaaattacatatttagagaattgttaattacaacttcctattacaacctcttaatcagtcttcacgcctaaaatcacatactagaatatttttttcatagcaatattcgttgtagttacagaataattcttgtaaatttttgaatagtttacaataccaaaaacagaagttctaattccaatttactacgcgcgttcaaaaaacttcaaacgtattttcggtattgtcgactatttgaaaattttcaaaaatttacaggaatgatgttgtaagtataacgaacaccgccataaaaaaaatttaaaaaaaataatttcagcatgtattttcagacatagagttttaactaagagattttaataaaagtttgtcagtagcact

SEQ ID NO: 197731 - DNA, 1669 bp, Cannabis indica
aattcattgatcttgagctatttcactcaaacacttgttataatttacatggtatggtaatggtataaggtattcaaagaccctttctccttctctttgcttctttctctatgactgctgccactcaagattctgccagtgctaatgcccttcccagaaattccactataccattccttcccaagctttcaatcaagccatgtttgtcaaattagatcccaccaattttcttctttggcaattctcagatgaaagatatcattttcgcaaatggtgtcaagattttcttgatggctctaatgtagtaggatcagatatatacaaatatattctagataaatgtttactattttcttataatcaatataaaatagaaaacatcaaaagcatagttattgtgaactaacacttaaatacatgttacttgggagttttgtagcggaataaatgaatctcttttaattctgttctttattattttgtcatgtaaattgttacgaattaacaacaacagaagaacaataccaaagtcttctaaataacaatttaaagattagttgggcggcctataaagaaactttggttagcattttcttaccaaaaagttcaactctttctctctttaagcaactttgtttaattatagctaaagactaacaccatttatagaatacttattttatttttaattaattaaataaataaatgagagatatatggtgcaatttcttgcactccaatttaatctatgtgtactgccacttaagggtagattttgattttgaatttttgtttccaaattgacccaaaaatcaacccaccttcgccccaatctaattttccatctccaacaaagcatataagattgattttcactttatatgagacatgattaatctcaatgaagtttcagttcaatacattccttcagagcatcaagtagctgatattctcaataatcatctcctcccaaactgatctatttgaggggtggctgttaattaatctcgttaggcttctctgttagttatgttagctcatgtgagttggtgtattccaattataacagtattggtcaacttttttttctataaaaaatacaagccttgctaagatctcaactcattcatcttgagtcaattcactcaaacacactttgtattgtttacaagtagttcatacaaacacaaatgaagaaaacattggaactataagtaccaaaggaaaaaaagagtaaaacgaagaataaaatgaatcgaggaaaggagattattaagtaaaaagtcaaaaaaaaaaaaaaaaccaataacgaaaagcgatagtgggaagaaaaatgcaatggcattggcactttgttaagaaaaaaagttcgttattgttaattctttttagttagggaatagtgttttgttagttgctttttacagttgtaaaagttgccaagtttgttagttcaagttggtttgagttagtagctcatttgagctcttctttctatatagtttgtaattagtttcttccattgaatcagaaggaattcaattcattcacacttttaacatggtatcagaatagtgactctcgatttccagaaaaaaaactatatcttcttcgtccttctcattgagctccgttgctatggcagtcttcgtccagtccactgctcatc

SEQ ID NO: 197732 - DNA, 1769 bp, Cannabis indica
atgtttttcattcaactataatctatatatgtaattgaagctcaacctaatatgttctccgttgtaaatccctacaacaaaaactcaacacacaaatatacacattgcaatgcatacaaactagataataaaccagaaaagaaatgaacaagaatttggcaaaaacaatgcagaataacagagaaaaataaaagagtgagacaaagaaattatcctggtaatgtgagtcctattctagctctccccaaaggattttctccactatgcaatgtagtttacaaacaccaataaagagttcatcaatcagagatacacacagagagatactgcctctcaaacctccatgatcgagcagtttagaacaccatgaatgccatgattctacacctccaagagtctccaactttggctctctctctcaactctcttctctgatttttcactcactctaatgaactttctctttgtttcaaattacataacaattggtgtttaactaagccaactaacataactactttaacgaactttcttaactaacttccaagaatagaaagctcaaaaccaaaattggttttctatgaattacaaccacaatctccaccttaatttatagaaaactactgaacaaaatgcttgggggagtgaacttaaaaaactacacaagtccaagtttgagcaagtccatgaaatacctgaacttgctcattggcagcaccttagttcctgcatcagtagggttctcatctgagggaactttctccagttcaatctctccaaattctatcttgtccctgatccaaaacattctaatatcaatgtgtttggatctctcatggtaaatagagtttgtaggaaattaatacttccaatttccctacacacagcaaaagcttagtcaagtcaatggtcaaatcagacctattacccagtcaaagctattattttcttttccctgcttttatgcaaaagacaaccccttttattgaaaaagctacaggtcgtttttttatatattatattcaaaccctaaaattgcatcatacatatatatcctttttcttacaaacacacatacacggcctccactatgaaaaccctagcaaagaaataaaagcccccttcttcttcaatgttcttccatgaagaacatgaagaacaacaaacacaacacccagaaaaattacacactgcccagaatttttcctttctgcccagaaaacaaccctttaacccgagcaccttcttcgttgttcttctttgaagaacacgaagaacaacaacaataaaaacacagaagatcaagccaaaaacagtataagcataacagtaaaatgcagaaaatataatggagaagaagacaccgattttatagaggttccccaaaattttgcgagtacatcctcttgagctcgcctcagatgcttgtttccactataaagatcaaagagttacaattgctgattccaaatcacaggtacaatctggtaatcatttctgtttacaaaatttgtttctctcttctctcactgttattctctctatgtttaatctctaatcatcttctttcctttgtttctccatgaatcaatctccctggttttggtgttgaacatccgagccttcacccctaaggctccaaaactcacacaatgtaagtctctttcaaccctctaattctctagatctgatcatgtgttttctggtcttgatgatttttttgatctgctactctttttgttgctctcattttctctatactgatctga

SEQ ID NO: 197733 - DNA, 992 bp, Cannabis indica
atatatatatatatactgatttagcatatgaaaccaacaagatttgtgtatttgcatatggatatcatttgacatagttctttttccccttcaatgaggaaatatggttgacctttgactccatatagtactgtgtgttctaaaatgaattatcctttaaatttgttagaaatatttaataattttctttttattttttgatgaaaatatttaataagttatatggaagccataataatcagttctagtactaatagttgaatcttgggtacttaattttcacctttatatgatatgtagtgaaacaaagcatttatttgatcgttcttagaagaaatcatgtgcataagtgcattctctttattattattattattattattatttattgtatcgaaggtttcagttctttttaagtgttattgagaaataaagaaaaatagacaccagatattgatagagataggatactggaattaggaaatggatgaatatgtgggtaattgtagttaggggtagtggataagatgaaatagggttgtatcagagtctaagaaaaatgagtgaatcaagtaattgtaatgcattgagaattagctcttggaagagttctgggtcgtctttactctttattatcttaattgaatataaatctaaatttctctctgtttcttcattgtttattccaagtgtttgtgctactgaattgaggaccctagtgggctatgtcaaagaactaatatttgttccccaatgtggcagtagacagaacaaattaaatcatgcaaaattttaatatttcgtgtcagtatatataggttttaaaagaaaaattatttgcttactcccttatattatgctttcagattgatgtgcttgaggttgatggtgtttattacggtatgtgttcttatgtttcactctcaattttttttattgtaaaatcattttgttgctatgcttatctgaatctagcaaaagatgaagataga

SEQ ID NO: 197734 - DNA, 1514 bp, Cannabis indica
cccactcgatcagcttggacctgatgcaaccacaactcttcaccctctgctagaatattgctttccagttttggagttgcagcctactaaagttcctactttctagcattatatctcgaattcatcacatgaaaactaggtctcaaagtggcatttacaaaccaaaggcttactatctacagacatcctttaaaggaatctctttttccagctgaaccaagatttgttcagcaagctctcaaggatccaaaatggtttcagtctatgcaacggtaaaacaccgagcctaagacctggactcttgttccatatcatcctgatatgcatgttattgacaacaaatgggtgtacagaattaagcttaatgcagatgggtccctaaataattacaagtccagataagttgctaaagggtatttacaaacacctgggattgattatgaggagacctttagccctgtggtaaaacttgtcactgttagaacaattctttctcttgttgtcactttagattggcctataaaacagttggatgttagtaatggctttttgaatggtgatttgcatgagatagtatatatgaggcagccaaaaggttttgaggatccagataaacccaattatgtgtgtcatcttcacaaggctctctatggactgaagcaagctcttagagcttaaaatgaaaaactaagaaatacattgctacagtgaggctttcatgcttccagatcagacacctcttttttgatctatggttcagattcgaatttgatcatcttactagtctatgttgtgacatactagtaactggaccaaattctgctcttatctcaaaattggttgctaatcttaacaattcctctgcattaaaagattcggtatctattcattattttcttggcatagaaatctatagagattctgggggtatgtatctctctcaaagtaaatacattactgatttactcactcgattacaacttgatggagtcaaaattatcccaaccctacaagttctcaccaaaagttgtccctaactgacgttgaaccattctgggaccctactctttatcgaagtactcttggtgcacttcaatatctcactttaactcgacccgatgttgctttcatcatcaacaaactcagtcaatttattcttgctcccactgttactcattgcgaagcatgtaagagattactaagatactcaaagggacaattgcagatggattgctacttagaccaacagcttcaatggacaattgtgcctactctgatacagattgggccagtgctgttgatgacaggaaatcaacaggtgattatgttgtttttcttcgatggaaccttgtctcctggtcagccaaaaagcagcatgttgttgctagattgagtactaagagtgagtttcgaagtttagccaatattgctgctgaaataaaatggcttgtccatttgctgtctgaactacatatctcacctgctcatccaccaattatttaggttgataatca

SEQ ID NO: 197735 - DNA, 760 bp, Cannabis indica
caaaagcataaatttatagttaaaaaaaaatcatattttaaagactaattatcccagatcaaaaccctccctaaaaggataaataagtacatatatacatttcagcttttatcgttgaagaagatagcgcacaagaaatagcagttgtataccaagattcaagacgatacggaaaatcaagtaaaattaaaggcacgatcagtgaaaacaaaaaatataaaaccctaactccgcaaacagaaaaaagtggaatcggtctaaattgactcaatccccaagggaaaatatgtgaaaaagagtacctggaatacaaattcagcaagaaagtaaggaatcttatcatcatagaactccacatggaggaatcatcaagcaatgtacataaataaatgtatagaatatagatatatatatatatagttatagttatcgttatagttacagagaggaaagaaccaaactgaaccttgaaaatagttagtgagtggtgctgaggcgagaagagcgaagttataaagggttggagatggagaatgttgagtatagccgagagggtaacgacggtgggcttgagcttgactgttaaggtaggtaggtgggcgagttttcgatttggaaaaaaagtagaaaaaggaatgaagagtcgggtcagatcgggtacgatcccgacaccgccaataattttgtttcttccattattatttatttgaataatgttactattttgttttgtttccctaaaaattattattattattat

SEQ ID NO: 197736 - DNA, 1591 bp, Cannabis indica
ggacagacaatccaacaaagttcttcgaacatgagaacaacccatttcttgcctaacgacagtcaaatcttaccatatagacagtatagcacaaacaaccagttcttagcaccaggaggcattggagaacgacaaagcaaccttggagagggggtgttacatgccagccaaaccctagctgaccaacattatgactctctctcccagggtattcgagaacaagttattccaaggcctagagaccctgttcttgacaagctaggtcctaggataacgaacaacaaacaggaaaaaaaataactcgaagagcgagaattggaatgactctattccaccacaaaataataatttaaggtaggtggatcaaccaaactcaagaaattggtacgatcaaccactattaccacacaaaccaaccttatcgactaggagaatctcgtagatctggcaagctaaggaagcataaccagccaacggctggtggccatggccatttacttggacagaggctggccgaccaagacttattgactagctagaggttggttggccaagggccaatgttcagccaaggccagttgcccagcagtgagctggccaggaaagcatacctctctagccaagaagtttaggtcggtcaaggaatgctaactggagaagaaaacatcaaagtggacctatctataaaagcacaactggatcaactcaaagacatgatcaaagacctatccagcccaaatctgtcagacctagaagttgacaagtcgagaaagtcaccattctctgcatacattaatgcatttcccctacccaagttcaagatgccaacttggaagatgtacatagagaaagaagatccccaatcacacataaaatacttcttgacccaaatagatctctaaggactagctagagatgtgcaatcacaaatcattctggcaaccctatttgaaataggcaaacaatgaattatccttagaattctatactcaattctccgcatcaagacaaataccttccaaattggaggatcttgtcgaagtaaacaaaagtcaagatgagcctttaaaaggctacattcaaagatttttggacgaggccaccaagatcaaaggcctgactaaagaaggtcgatatacgaccatactcggaggaatcttttcagtgagtgaattctagaaagatatcaaaaggatctcaatgagtagtaggaaagaattccttgagcaagctgatggttttataaagttagaagaagttgtccagtaagccagacaagagggcaggtcaatgtgggaaaaacacagggcatcatattgcctcaagtactgtctgacttgccggacagcacaaacaatttttgttagtcctctaacaacaaggataatggaggtaagcgcaacaatagtgggttttggccaaaataatggaaaaagagggaaattaaataattccattaggccataaaatcaaagggagcaagaggggaagcatacatgcttcactctcttacgaaaattcccaaagcaatgcatgccaaccaaccatggcgatattgtcaccaaaacttgaagcatatggccgaccactc

SEQ ID NO: 197737 - DNA, 787 bp, Cannabis indica
accttctcatacaaccctctcttttaagtctgaaccattctcatatactaaatcaacaactactcatcaacatcactacttcaattaccataacaatcattaaacacttattcctcatagtcacctattcaaatctaaatcaatacaaatttattctcaaaccatcaataacaatggaactacgtaaacttgaacaacacccaaacaatctgtttccctccatgtccgaactctaccatcaagcttcttcttttttattagttgtaatttttgttactatgcataatttagctatatgagctctcctctgtaaatttccttctgttgtgcaagacccttttgtttatcaatgaaatttaaatattttcattcaagctttattaaaaaatacaacagaccactaagtcaattgcccccaattcacttttacaaaacaaaaaactaaaagaaagaaatttgcgtctgccgggagtcgaacccgggtctattgcttggaaggcaattatcctaaccgttggactacaaacgctgagatgttagccttgacacttataattaatttcattataagtactaattcacttgactaatctttttctcaagctgtaaaacaataatttttttttcttatgatgaccgtcttagttctgggaacgagtaagattgagctagatattaaaattacctgtgatatatcatcataattaattcattaactacctacaagaaatactgtatctttacattattgttattattgttataagtttcttcctgtaacaactca

SEQ ID NO: 197738 - DNA, 3125 bp, Cannabis indica
attttattctaatttagttttctctttctgttttttgctaactctatttatgtcaatctttttttcccagcaacaggtagtttatgcgccgtcaaggaccaactgcaagagtgcctgttgatgctaaaattgagaagacatgtaggcaaaacagaataagaggttagaaagagctgctatagggttgaattagaagaagtgatggctcataattagaataatagggtgtatgggaccaggataatgtctataatccacctgacagaagcttgagggattatgttctacccaccatgacaggagtctagtcctgtataagaccacctgccattgaagaaaataattttgaaatcaagccaaccattcttcagatggttcaatccacaatccagtttggggaacttttgttagaagacccaaacatgcagtagctaacttcatggagctttgtcaaacattcaagatgaatgaagttagtaatgatgttattcacttgaggttattcccattctcactaagggagcgagtgaagagttgattggtgtctattcaacataactcaatcaacatttgggatgaactggcactgaagtttctctcaaaattctttcctccagcaaaagctgccaagctgagaggggagaacaccaatttctactagctcgacaataagtctctctgtgatgcttgggagagatatatagacttgatcagaaagtgtcaccatgaaattaaaaagtggatattggttcacaatttttataatgggttttgtggtactcctcacactctcattgatgttgcagctggcgggcattcatgagaaagagtgtcaatgaagcctatgagcccttagaagatatggccatgaacaatcagtagtggccaagtgagaggagcaattcaaagaaagtggctagttgcatgaagttgatgatatcatcaaattgaaagcttaagtagaagttttgaccaagataatgactgctcaagttcaacagacccaagtaatttgtgagttatgtggaaggccacattcctatgatagttgtcaagttgatgtaaatagtttgccaatggatcaagctcaagccattggaaactaccctcagaataacaactctcactcctacaatcaagatgggaatagacaacaacatgtgtattatcaaaaaggatacatgcagtaacaatcacaacaaccccaacaaacctaacatgccactcaacaacaacaaattctagtgagagttccagtgttcagtctgacttcctactacaatttatggttgaaactagggtttccatcagaattctggagactcaagtggggtaattggctactcaattggccaactacactcaaggtaattttcctagtactattaaggtaaacataaaagagacttgtaaggacattacattgaggagtgggaggaattatgaggggccaagtgacaaagaaaagattgaagaaaagaagagggattgacatgtacaagctgaagagcatgttgatgatgacttttctggtaaagaagctacaccaccaattaacattgagcatcacatcgaaatttcatatccacaaaggctccgcaagaacaagctggataagaagtttttaaaattccttgaaatattcaagaaattgtacattaacattccctttgcagagacacttgagcagatgccaacttactttaaatttatgaaggagattttagcaaaaaagaagaatttggaggaatatgagatagtgccacttattgaggagtgtagtacaatattgcagcagaaactactgcccaagcttaaagatctgggtagtttcaatattccttgctcgatatgggatttagtggaaataaaagctctatgtgatctaggagcaagcattaacttaatgcccttgtctatttttaaaagactaagattgggagaagccaagactacaacactgacactacaactggcaaaccgttctttgactcatcctcgtgggataatagaagatgtattggtaaatgttggtaagttttgtcttccctgttgaattcttaatacttgatatggaggaagattcaaccattcccattattttgggaagaccatttttgaccacggagagagcattaataaatgtacaaaagggagaattaacgttgcgagttcaagatgaatagatgagttcaatgtatttgcccaactgacactcctacctgttgtaaggttgaattagtgaaggactatcaagaagaagaaagagaagcccaaagaatgatttcaaactatttgacatcatataaaaagactaatgtgtgggaattgtgaaggtaaatctagtcttatgagaggcttcgacattagcaacattgaatgacaattttcttcatttggtacaagggctcttatggatgcaagaggtagattttatccaagtttaagaggaaataaacgtctagctatatgatgttaatgacaatgctcttgggaggtaccccagataagttttcttctcaagtctttagtgtcacattggggacaatgcgacaattaagtttgagggtgaacttaaaaatttttagtttgtgatttagttgtgtgtcttttaagttttgtgttagtgtcatggtaggccttattgattgaagaaataccatttgctgttatttatttgatttaacttgttaatatcgtgtgcttaatttgattgtttttgtgcttacttttttcccttgttggaaaagttgagtataatttataaatgtgaataattggactttgttataaatgcttgcttggttgggagattgataagttggattggatagaacttgcattaattggcctttgaggcgaaatctttaatgatgatttgtgttttgaaaaataatttttgagccttgacttgttattctttgttttacacataatttgagctaaaaaattgaatccattctatcttcctttgtccttaactataccataagtggattgttagtttggagggggtttgtaatggaaaattgtgtgttgttctagtgaaaaataaagatattgtgagagcattcaatcaaaattttttttatgcaacaactcagaaaaaagaaacattggcaatg

SEQ ID NO: 197739 - DNA, 1552 bp, Cannabis indica
tagcacctgcattattagatactacttccaattcaatatattttaattctaatgaatgtattatccagggacattctcggacatcgaggatgggaattgctaagagatatggcaaactttactacatcaagcaagatgtgagctttgctcctcatctttcaatttcttgtaatgtacaaaaagaccaataccaatggcacaatcgccttggtcatccttctgtattgatatcaaataagatcaataaacaattacattctcctaatgaaatttttgctccatttcattgcctaacttgtcacttggcaaaacaaaacaaaattgccttttcaatccaacaataatttttctaaggcaatctttgatctcatccacctagacatatggggaccatatccaacaccctctatcgatggttacaaatattttataactatagtagatgaccattcacgatatacatggatctacctactaagagctaaatatgaagctccacaaataatacacaatttttttacctttgtcaacacacaattccaaattagcattaaatctgttcgaagtgacaatgctgaagaattatgtttaactaatttttataatcacaaaggcaccattcaccactgtgttgaaagacctcagcaaaatacagttgttgaacggaaacaccaacatattttaaactagggaacaaaaccgcgcgttgcgcgatcttcataaaaattgaaactatatattttaatttttagttaagttattttacattaaaatatatattttagagcggatagtatttttaattaattgatattattgttatcgtattgttcttacaccgtcactaaaaaaacacaaacaattgaaatatatatatatatatatatatatatatatatatatagaaagacttataagcatatatttaccacttcttataacattctataattattaatatattgtataattatggttatttatagtttttatgacgcgtagggtaaaatttaaaaaaaaaaagttttggagccttaagtgagctattgttaaaaaaaaaaaaaatttaaaaaaaaaacagagagagatagatagatagagagagagagagcctggatcgccacctaaagacgaccctattaattagtgatatatattgtatttgaacttggtcttaccatcctttaagaaaaaatttgattgacatgcatgttacaaaatataataatattcaaagtttttttattataataatttaaattgtatatattatattcttttttttttgtttattttttctaatttgtatataattttttattgtttcttacttttttgactctacaaattaattagaaaaaaatataatagactatatgaatattaatgtacttattattttaaatctcattcaaataatttatttggcatttcatgtaatacaatgtacatatatataaactagcaaaaactacgtgcgaggcacgtatactaaattttatattttatgctagtttttttctatgttatttgaaagtgatacaattaaaaa

SEQ ID NO: 197740 - DNA, 1819 bp, Cannabis indica
aacctgctaacaatttgcttcaagagcttcaaagcaagtcagacatccggattaaacatgaattcccaggtttaaaaggaccagagcagcttaaatataaaggaagtattccagatcaattggaagcttcctcttccgggacatcatacctggatgctagcacaatccagcaaagtttcccacttcccaccttctgtctggatggtgatgtccaatcaaatcatcgtaacaatctttcttttggagctaatattgatgggttgacaccggatactttgctttctagaggatatgactctcagaaagatcttcagaacttgctttctaattgtggtggcgctccaagagatattgagactgagttgtcaactgctgcaatcagctctcagtcgtttggggtgccaaacatgagtttcaagcctggatgctcaagcgatgttgccatcaatgatgctggggttttgagcaatggattgtgggctaaccaagctcaacgaatgagaacatacacaaaggtatttagttattttctgctgctgcattttgtccacccttttagtatatggtgcataagattcattttctcactcttattccaactgatgtaggttcaaaagcgtggttctgtgggaagatgtattgatgtcacccgctataaagggtatgatgaacttagacacgacttggctcgcatgtttgggattgaagggcaactagaagatccacagaggactgactggaagctagtctacgtagaccacgaaaatgacattcttcttgttggtgatgatccatggcagtaagtctagaacccaacaattgcagtagtagctaatgtttttcccattttaggtttctgttctaagatatgatttattgaattgctttcagggaattcgtaagctgtgttcaaagtataaaaatactgtcatctgtcgaggtacagcaaatgagtttggatggagatttaggtcaggtcccagtttccaaccaagcttgtagtggaactgacagcggaaatgcatggagaggacagtacgaggatacgtcagcagcctcatttaatcgttaggaactatgtatcttctctcatgaagtgtagcccttcactttggcatcccccggtgatactcgcggacatgagccctttcatacaaggcaatgataacgcagctagggaatgattgaaaggttcattgaatctcatcacacatggtttcaccagtgaggattcaagctctgatccaccagtatgtcatttacacacgagggtgggccgattatcttaatcatataggtgaggagaaagaattgcttttagctttttaggcagggaatggttgtttgccgtgctactacaccaagaaaaatggaattttgggagttgcacatgcactattctgggctgaaaatggtgtacaatatataagccttctaactatttttagattgagttaatcagtttgtaaatgctgtggggtactaaacagccactggtcaaatatgcagtaacagtaggactcttttgtgatatatggctcttttttttggccatctcttgacgttcccaagttgaccacaacaactaaaccttcctctgattgaatagtggttgaaatacaagtttatagcttgtaaccctacatttatttgtgacttctggaagaaatacttaatacaattatcaactttttatttttccattgttattttgaagctggatccttcgctatttcgctctgttcggtaatttgaagagatcattattatattttcccaacttttaacaatgctgacttataattttcaatacacagac

SEQ ID NO: 197741 - DNA, 881 bp, Cannabis indica
tacatgtattaaattcagaaattagaataattaattgttggcaaataaagcacaaaacaaacatttttttttatgaagtaaacacaaaaacagacatttattacataccaacattcatttctgttatgtgtagaacctaataattattatttggtgtctaatattagtttaattctctctctaatgctaggttttgttggattccctcgagtgtaatggatgtggccatagttcttaagaccttttctcactatgtgtaattttataacgaaccgaggtcatactatctaaagccaattctactaaacattctagaattccattttcaacataatagcctcaaaaaaaattgcactctctgatcatgagtcttgctcatatttagtttcattaccataaaatcatcacgcccctattgtttcctttttagataatgcagcacctcaaaggaaactaaaattttatctgttgttaacctctccagaataaatgcactttaagcctcataaataacaagatcaataaaaattttaatacagttagccaagaccttcgtgataactttacaaagaagattacacaatgtttttggcctcagatccctcatccccataggattgcgttttcttaagggtaagaactagatttgtataattgatattacccgacatcacacccaaagtaaaatagtcgcgaattgtttggaccacatcacctcccacaactgaccaaaaatactgataaaaagttaaagtcatgccatcaagccccaaagatttatctgaatgcatctggaataaagctgtcctgacctcatccactgtgaccgattttaacaactcaacgttgttaacgaaaaaatggatggctgaacataatca

SEQ ID NO: 197742 - DNA, 855 bp, Cannabis indica
tcattgatctgtgttttacatgattcagatgagaaatttatttataagctgtaagcattctgatcattgtgtgtttatgaattagtgtattggtctatcccatattccttatatgaatatattgatcggagtacaactaaattatcaccagggagtcagatagtaatagttatttttaacacatttctagcttattgtttaccttgcacttagtaaactcatgtgactctttgccgagcttttggcagtgatgattgactgaagttttgtctccttttcctgattttgcagtagccagttttataaagaaatccgtcatcaattagaaaatgactttatgacgtctcttcagtctgaggtaagttgaataaaaatttgttaatttagaattgttacttgatgcatatttagctactatgtgtgattctattttttttccgtttactttttcctcttgttttaattttttaaatatgatatcatgttcaggtgagtgagggtgaaaaggaggctattaaaccattaccttggtaccctgataacctcgcttggcatttaaatttttctaggatgcagctaaggaaaaatcagaatctagagaggtaaaatttatataattaattgtgccatgtgtaattcagtaaaatcctatgtaaatttttgatgtaccatttacatcctgatttagaatcctgttaaatattgcacttgtagtggtgcatttacttttagttgtaggattataaaataaaattttgtaaattttacacttggaatgatcacacttttgaatttaataggcacccagctttgttgtgtactttatatgaagcatgatatttatgcactcatacc

SEQ ID NO: 197743 - DNA, 1728 bp, Cannabis indica
acctttaatcattagttaaaagacaattgactcaactgatggtaatattaaatctaaaaaaagtttcaaaactgcttctctataatactgctacaaccaacctcaaacaacgtgacattaaaaacaaaaagaaaaggacaagtcccccttttcttttttctcattccctattttactttgggagcttggtgtattatgtattaactttttgtttagtaaaatctaaacagaagaaaccatcatatatttgagacttaaatgtggaaatggctgcgtgattgggtaaagttgagaagagagagagaagaggctgcctcggtttgaatgagtgaatcagaacaagggagccaaccaagacgcgtgcaaaggacgtgacactgttacctgtccggtatgccttgtctttgctgcttttcctctttttgtttgcttttttcaagttgtggcccttttcagtgcactccaccccacccaaccttaaaaccatttttttgttcccttaaatttggagaaatttcaagttatatctctattgggcataaaaatatgggaaaacaatgacctaggcacacgactgtctaagagggacatgttacataaaactacggatcattgcttctatatttatttataattgttaacgagaaaggtgagaaaatcaatccttttactcattcatctcgtggttccacttgccaagcacagagattatagtattttaaggtaaatttggttgggagggataaaaatattgaaataagaatgagtataaaaataaaaataacagaatgaaataaaattcaaaatgacaaaaaacaaaaaagtattgaatcattttcatctcgcattgatatagtatttcatttcattagaatactttcaaatgtaaccaaaggaataaaatgaaaattaattcttttcaattcattatactgatcccataattttttatttttttttggttattagatttactgatacaatagtgattccgcatatatgtaatcaagaaagccaaaataatatggataatcgagtaaatttttcaaatctagatttaaataatcaataagaaccaagaaaagttcaaaatcatgacataatggagacaacaaaagaaattatgtgaccaacaaagtcttttttttttttgtgcctggaaattaccaaaaagtagatgctcacatctcaaaactccacaaagggaattcatgtttctcctagaatgaaccaaggtaccgatttccattccccaatgaccaatatatgcagacagtccaagcattcgtggatataaacttgcagataaaaatgattaaaaatccataaaacataacagcctaaaacaatatctataatttaagaattcaaaagcacatgaaggtttaaagttcaaacacatcacaagagcagcagacaagtcaatttccaagagttagaatgtcaaccgggtacaaaaacctaccaaacactatcatcacggaacttcttaagacctagatctttcccttggcagtggtgaacggctgcgtttcaggagaaaaaaaaaacaccattaggctggagcatctaatttcagtatattcataagataacgagtataaacatctatttcagttttcactaatgtttctacggttcagatgaacaaaatgactgagttcagaatcttttctataattacagtttttcattaatatgtctacagttctcagttgtattattttg

SEQ ID NO: 197744 - DNA, 861 bp, Cannabis indica
tttatacaaaattatatatgcaacttgattttagacataaacgaactaagtctatacataagacctacaatacaatacaatttaaaaccaaccataattcaaatatattatttaaaactgtgtcctaatttagtgtctataatttgagactcataatagtacctttattctgctaatttttattttaacaaaatgaattaattaagtgcaattataaacaccctattacaacttacatgtgtcaaactcaaagtataatatagggtagatatccagtgttagcattcttctaaatgaaaggaattggtggttttttttttcttttgtcaggaaaaggaattgaagaattgaagtagtgaaataaatctatcagaatttaatgtgtctgtattaagttatgatcaattttgcaattgctggttctggttgtggctcttctacaaaatggttatttcctttcaattaatgttcttattctttccagctttaattaattcagtactaaattttgtaccttcctaggatccatttaattttttttttggaattaattgattaattaaaactgaaaatctgaggagaaaaaatgtatatatccccacattcatttggattaaaaactcttttccaaattttaactaaaagaatcgatgtttctcccaaaatattttattattttattattggacagcaatagtattcattaattagtggtttttctttttatgaaaattaattagtggtttaaacgccactgtaatggtgccctggctggcagacccacccactgccttcaacgaggccaaaatatggataaatcatgttgagatgagccggcccaagcccaccctggcccattaa

SEQ ID NO: 197745 - DNA, 557 bp, Cannabis indica
ggtaaacaccctgctgaagcttatagagatgaggtaactatataatataaaaacatcttcattaattaatttctaaaaaaaaaataaaataaaaatgttttttttgttggattggggtagtgttgaaatctacagactatactttgagcaacgtatagaaatgggttgctcctaaaaatgtactcactttcttacttactatcttatcttctattgaaattttaatttttttaaaaggtcaattagtattttttttaattcaagaacttttacaagttatgtctccaaattatgttgtaaaggttaaaataagacagtttgagaggtaggatttagtattcaaacaatttttacgttagatattggttagtaaaattaaaaggaattggttgaaaaactttaaaatcaaccatctcaataatttgaggataaaaatcataattaatctgttgaatatgccaatgaatctttttttgggtgttagtagtgaaaataaggtacttggttgactttgggcattttctattgcaacagtgtccaatcccactagttttttt

SEQ ID NO: 197746 - DNA, 590 bp, Cannabis indica
ttagacttttgaaggatgaaacttagaacaattttgcgtgatctgagcctctatataattgccccccagtgtgcaggtgacactttcctatcatgggatgtagggctccagggttctttctttgtgccacgtgccaaaaatagcttacgcatcatcaacctattttttgctataatgattaaattatttacataggggtcctaaaatttaattttatcttaggtcctacacaccttagggcaaactttgataatatattattaaaatatttatctttgcataatttaaatcgatagatcccacattttcaatttaaataaaagaggagtgatatcgtcaacctcctaatacaatctcttagtcagcctttgtacccaaacacacagaccattttttttttcatatttgtgttttaatacggtgttcgttataactacaacaccatctctgtaaatttttaaaaaaatttaaatagtttacattagcaaaaatatgcttaaagttttttgagtatgtgtggtaaattagaatatgaggaactctgtttttcggtattctaaactatttgaatattttcaaaatttataaaa

SEQ ID NO: 197747 - DNA, 1847 bp, Cannabis indica
cctcactagcagattgatacgtgttgggagattattcgacaagctcgccaaagaaaaacagaaattttttgcggggatcttcaaacttccataaatttccctccaaagaccctgagtttatccccctccaatccatctaccattcaccacttgaagtctcttataagcactttttaactgagtattgatcagatgcttcgaaaaaccagaacgattatcaaactcacgagaggagctgatcacaacccccttcacaagctctcggtctacatacaaaaaaagatcattaaggatatcctcatcccaccttctctcattcggagccattaactgaaaaacttttgcatgcaataaagcaggatgagaggaagtgatatacggattatctttatccattaaccaaggttggttcaatacatccaccaaagagccattagctatactccaacgagcaccacacttgattaaagattgactctcaaatatgctacgccagacataactggggttattcccaatgctagcatcaagaaaagagccaagagggtaataccttgccttaaaaattcgcccaaccaaagaagattcattagtgagaagacgccatccttgcttccccaacatggcaatattgtgatcatgaaggctccgaaagcccattccacccgagtgcttatgaaccaccattctatcccaagattcccaagatatacctttaccatgagtattagaagaacgacaccaacacgaacataaaattctttccaactcacgacaaactttcaaaggtaaaaggaaaacactcattgcataactaggcaaagcttgagccacagttttaattaaaatttccttaccggctcgagacaacattttagcatcccaactctccaccctttttcgaactctatccttcaggaaacctagaacagcggacttatttcttcccatagtactcggaagaccaagataagtactattctcatctgcctgaaccataccagtaattctcataatacgatctctcatgccatcatttgtattggtgctgaaaaaaatggaggatttggcaacattcactttctgcccagaagctaactcaaatttcctcaacagttccataatgtacgaagcttccacctcagaggcttgacaatacaagtagctatcatccgcgaaaaacatatgtgagatagttggagcactacgcgcaatcttacacccatgaatccatctattggtttcgtaccgctgaagaagagtcgagaacccttcagcacaaaggataaacaaatatggagacaaaggatctccttggcgaataccccgcgtagccaaaatcgggcctaaccgctgcccatcatggacaatatgatactgaaccgatcgaacacaagccataataagattaatccacctttgatgaaagcccattttcaacagaatcgcttctaaaaaaggccactcaactctatcgtaagccttgctcatgtccaatttgagagccatatatcatttcttcccttgacttttccttttgagatagtgcaaaacctcaaaggaaacaagaatattatccgatattaaccgactgggaataaaagcgctttggaaagacaaaatgatttgatcaaggagccctttcaatctattggcaagaaccttagaaacaattttatacaagacatgcaaagcgcaatcggacggaggtcccccatcacaatcggattcttcttcttaggaatgaggacaagattcgtatcattgaaaccaggtaacatctcacccgaagcaaaaaaattctacacagtagccaccacatctgccccaacaatggcccaactttt

SEQ ID NO: 197748 - DNA, 886 bp, Cannabis indica
tcagtagtgtctagtggtgtctagcagtacaagtattttaaagaaatgtaattgtgttgcaacaagtttggctgtgtttgccgatgaactttttagtgtaatggtttcaggacattcatctatacatatgcatggctttttattgtttctttcttcaaaatctgcttaatataactttcaatatttccttgattttgattttttgaacaaaatatatcatttattttaacttcaacactaactaaaacaaaaggcaaattttattttgaagaatttttttttgttaagggtaattaaaataacaaagataattatattacattctttcatctaaaaaaaatttattatcatatgttaaagttgcaacttacatgagaaaaagatactctagacatattaataaaaggaaaaaaaacaaatatttcaattatgtcttcaatccggccagagaaacatctaaaaaaaataataaaaaagtagattagtatcataaatttaataaatatataataatgttcaaattaaaaaatatataatctcacataattttatgatggaaaagttaaaattcatctgtgaagtctctatatattcgtgtcttaccaaaacaagattgactagcaataaaaataataaacacatttgtctaatgatgcttcaattttcgttagaattcaagataaaatgaatgtggttacatctcaaaactaattggtaatgggaggagtaacctatttatcttatatattctattatctttccacacattaacaatgtaggactctctaataattactgttcgagattagtgatagggtatttccaaccaattttggtggaagcaatgggtttgaaagaagtactaagttggataaatttctactgt

SEQ ID NO: 197749 - DNA, 1103 bp, Cannabis indica
tttattccagggatgcgcatcccacaattagaaacaactaacaaaattaaaagccaataaattttgaatattagggtgtacaccaattcgaacttttataggtgttcactgtagatttttcctatacattcacctattcttgaaattaattaattgaaatatacttatgtcctctcatcatttagaaagtgaaactcgtaaagatattgagcacaataattacaagctagtttggtaaaattcgtaatatattgagaaaaggatagtgtactatacagatcggattagattggatttaaaaaaaattatgtacacgatgtaatgagttggttaaagttgagagaggcataggcacacgtgtaaggcattaaaagaaaaagatatgaaagatatgcatagagccaaacaatatgaatagaaattacaaattcgttcgtacggttacgtcacatggcttccataatctaataatcttcaacgtgcacttggttttaatttgctgttcgaatatgttgtcgttttccctttatttaattttcatattattatcatctatatccctgcactaatcattagtgcatatatttaaagggtccattaaaaaaataagtattcacctgttaagcaaaacaatataaaataaaataagtgtacaccttatttctctaataatctccccaataattataatgtctaacaattttaaattaaaattgtttcaatatggaatacacaaaggattcatttagagcgtcgtattaatttgtattgtattatattatattgaattgtattttatgaaatatttttatgtaaaattacttatggtattaacttttatagacacctaaatatataatattttaatataaattaaagtttaacatattattatatataaatatgatatataatcgaattcaatacaatacaatattaatacgacgttttaaacgattcaaaaaaaaatatattagccaatcaaagtttggcaatacaccatacttgaaacattatttctccaaagaaaatatattattggttaaatattaaaagattattaattaggtatagcatgcatgtgtgttgaactatagtgcttt

SEQ ID NO: 197750 - DNA, 961 bp, Cannabis indica
tgtcaacctaggcgttgggtcatatttttttccactagatgactatattgccgttgatggaatcagagaatatgcccaaaagacttctaaaaaaaacttcttggaaatggcctagcacatggtcaacctggctgcgggtcctaacttttacccctagacgacattatttgtttcctaaaaacactcaaatcttaatagttgataaaaatagagaatacgcttggaagacttcatctataaagttgatggacctgggttatgggcctagcacctaggtcaacctgggcactgggtcccagttttggcctccaagtcgatccgtttctttccgaaaagcacttgtttccttattgtggatgaagaccaagaaaattgttggaataattattcagtattatttttgcaaatgccccaggttgacaatgtgtgaacctaggcgctgggtgcctaaggcacctggtgcctcgggtgctcaaaactgaaagtcatcgcattctaattacgttgcctcaaagatgctcatgagaggtataattcatgtgccaatacaaattttgagccatttgtactaaggcggattcagaaactaaaatcctagttggaaagtcaccttgggtgttaggcactcgagttgacttatggggtgttgtttcgtgtatttttagcttctaagccttgaatttggatttttctggtcttcttggtacataatactgaaagatcttaaattaaaaacaacttagcagtagccaaacacccattttggagttcctagagtcaacctgggcgtaaggttagggaccccttggtaggttgattgttatgacttgggactactcaactctaggatgttttctttcttgccacatgtcaaacgtttatgtccatgtcaccagggtcaatttcagggtaaataaaagaaatcatgtttactttttttatgtgattttttatattcaaa

SEQ ID NO: 197751 - DNA, 673 bp, Cannabis indica
aacttctctgggttttgtaaacactgccagggaaaactttggtgagattcctttattcattttaccaaataaagaaaaaattaaagtactctttttctgtataaattaaattacactctaatctttggggtatttaaaaatatcagttaattaagtgattagtgtaaatttatgtctgcttctttgcataattttcttacataaatggcactatgtattgctaataccaacttccatgaagaataggtaccaccataaatatttgatattttgactgttaatattattattcttttttaaaaaaataataaaaagaaaatatgagtttgtgtcaattatcatatgctgtgtttttttttttcttttctgacatggagaattagggcagttggacaagattattatgtttttcggtgtagtttcaactgtaattattaaatttaaaactgtaagctgaatcgtattgtatggttttgctaaaatgcaaatcacaactgcactataaagattaaagagtttcgaagaattttttatgtggtgtaatgtgggcggtttattctattccatccaacatattattttattaatctctctatgtaatataggtgtatatacctttagtgttcaagaaaaaaaatatatcatgtttgaattagaaactaatttagataag

SEQ ID NO: 197752 - DNA, 1246 bp, Cannabis indica
agagtcgagggtgcgaactatcttaggttatgtaggtgactcactaaggacctgcgaaattgagtataggcgagactgtcgggttagatcagtacgacctgacgaatttagttgttacccgcctgtgcgtcttacaagcgagaccactgagggggctagtagcaacaccagtataagtggcttgacgtaataggcgcttagagccttgagcacatcagggcaggggcaataatcccccttcgtgattatttcaaggacttcgtaaaccacctcgggcttgccccgttccaactgaatcccgtctcttacagaatccttgcaagtttgagggttttgtacaaaattctgaattgggagtgccccactcctctggaaatagagtatttttactcaattaaagtcgttccagcgaggaagaatgctgcaggaggcttttactatctcggcactcactccggcgagcacaaaatgatcgtggatttaccaaaaaaacttccttcaaggacgacttattttggacgatcggcctttccccgattggcacaatcactttcggtattatttgtaagtgattgttggcattagacttaattaaattaatccatgttttttattctaagttatctaactgaaattaacttttgttttcgacagctgtctcaaaaagacctactcccactcctgaaatggccgagcggcataggctcttgttgactcttccctacgaacttaggtcatgcgaattctttctaaatgaggtccatctgaggtctgtggacctcctaactgacaaggagtttacttgtgattacaaatatcccaggtattcttcttggcagcaggtgccagtcccagacgaggagaaagatcgggatagtaccttcagaacactgcccctcaagaagccggtgaaggagcatcccgaagtaatcaatgtgactggtcacccacattgcttagggccgagcgtaacactctagttacattccgagatagctactttaacttttatatttgccatcccctcctcgtagatcgcataacacataggtttgatagtcggtatcccagattctgtgtccaaattaactgtaatgagttgtacaatggtatagccgagcaatatggtaccatgacaaatagggcaagtcacttagacgtgagctgggatttagaaccagttgatcccttcgatatatttaagatcacgggttgtagagattttagtggatactatggtccttct

SEQ ID NO: 197753 - DNA, 774 bp, Cannabis indica
gggcatgcatcatcgtgtactatggtgtttgatatttacaattgtcaaagctttttcttaaacttgatgcgcatgttgtggcggtcgtctacttccatgcatggttaattaatttgggggttgtgctcattgattctaagccaattttgtgtcaaactttgatcaattttctagtcagaataagatattctttagggccaaaatttcattttgattggcttcttgctaagtctggcattataatgatggatgacctgaggtctttagtgaatgaaacacgccaaacataattaaatatattattaattagacacgatttccatgttgaattgttctccaaatgaatagtacccaaatagttttttagctagcttttcacaatattttcaaagatgatgtgtgaatacactatatatatgtgtgtgtgtttatgtatgaaagatgataacagtataagtagtaagaaatgaaattattctcttgtttgaagcttggttatgtgttactcatggtccacctcgtattagccaatacagtgtactatacatataaaacatgactagggtttacaatttggtgaaatatatattgtttaaatttagttaaatgcctaattttttcttatatcctatatacattaaaggaaaaaattaatgcattaattagtactgattcttacagagacacaaagtaatacaactataatttgcagatcatgtcattactcggaaatttgtaagggcaccaaatccaccccctcctccagaaatgaga

SEQ ID NO: 197754 - DNA, 833 bp, Cannabis indica
ttttatttaagtcgagtttaggttcgatctggaatcgaggtcatggtctgagtttgggactggggccgaagctggagttcgggtccgaggtctaggttgggatcagagtttaaaacattgtttatgaaaaaaaaaaattgtttaaaaaaattatgaaaataatttgtttttcaaaatttttataattttgattcccaattaaaaaattaaaaattaaaaatagttttataaaacatgtttttggataatatttttacttatttaattataaaaacagaaaactaataaataagtgttattacccctaattttttattttttttttggcttaagacaaccaattggcttgggatgtccttcaatggtttaaaacatttaagtttacattttatgtcaattatgacaatgcttaacaaaacaaaaataattccaggattatttttaacaaactgaaaagaaatttataaattataagtactgcaataatagatagattataatttggagaacaatcaaatcttaaataatcaattattattatacacatgtgatgagctttcacatatattaacaagataaatagataaaaaataatgcaataatgtacagaagataaactgagatcagtaacaataatattgctaaacaggaatatcaatgattatttttctaagaacaaaaaaaacaaattaatatgaatgatgttattttgtcttctttttttttttcctcaaactttaaaatgtgttgtgaagtcgttatctaaataactttcagttgaacttttgacaatattaattttgtcttttgaaatatacagtttgttaaaaatt

SEQ ID NO: 197755 - DNA, 1527 bp, Cannabis indica
ttttttaaaaaaatacatattttcagcatttcacttttttgagaaatagaaaaaaattaataattgactgtataaataaataattaatatactttatttttaaaattttattgatgaaataaatcacaaataatttattaataaactttgcattagcaatgctgactctataaatatccaatttttatactttaaaaatttttatatttgtaatttgtcattttggtattttaactacaggagctaacagttgcaacaaaaattaaatattaactatgtcaaaatttaagctcatgtatttatcctttcacaaaaaaaataatataataataattataataataaaacaataaactcaagtattttatgtttatatcttaaggccatcttcaactaaacactaaaagcttatatatagtgtaattttttttcacaaaatactctaaccgagctctaaaatttatcttattttgatggaagtttacaatgtctcactaataatagtgggcacggtagaccacaacattttttttttatactttttaataattaaataatttatttatgaaataaagatttttattatattaataaaataacattattataaagaatatagattttagtgtaatttttaatacagcagttagaattttagtgttgatttaacacttaatttgagttctagcattggagttgacctaagtaacatgtaccatatctgtagtggtatctaaataatttttcatatacataatatatgtatatataatcttgttattgcaggtgtttaacgagataaacagccgtgatattgagaagataaacatattccatggcatgtttagcagttgggtattcattggtgtgatgtttatcacagtagctttccaagtgataattgttgagtttctgggggcatttgccagtactgtaccactgacctggcaactatggctactcagcatcggaatcggatcaatcagtttgatagttgcagttttcctgaaatgcattcctgtcgaaaagaaaattaacattaagcatcatgatggttatgaagcactcccaagtggtccagagcttgcttaaacttccctaaggtgagaaaaaagacttatattttctttttctactttagtaattggaaaaagaaaaaaaaagtatataaaaaatattagtgattactaaactgactgatacaattactatgagggtatattgtatgaagttgggattcatttccatttttggctggagagaatcagaagaattaaaaaaatgttggataggatgattgtattttcttgtcaaacttttgaaaattttcttgattttcaatcttttagtagtggtttagaattttaattgaattttcttgctttctttgggttcgaaattgatgaggttgttttgttatgcaaaattatttccaaagtaaattgtgaaatacacatatgttcttctaatcctttttttttgtctttttttattcttggttgataataacactaaatgcatcttcaa

SEQ ID NO: 197756 - DNA, 747 bp, Cannabis indica
atgagagtgacaaagtcactcagagtgacgacaaagtcactcagccacaaaagtgacaatgtcactcaatcataagagtgacaaaagtcactcggccccatcatggcaaagtcactcaaccatgagagtgacaaagtcgctcgactatgagagtgataaagtcatttggacatgggagtgataatatcactcaaccatgggagtgacaaagtcactcggccatgagagtgactatacatagtaggtgttgtcttgaagtgcatgccaaggaaagaagtccacaaggcattcaaaacacaccctaaaagctagtctcccaagaatacttaagagaattcttgaagactagagggcaactgttaaccctggaaattggtgcttgtaaattctaaggttagataaataaggcatgagagacgatatggcggaaatcacccagcttaagaatgactcaatgtcacttggccatgagagtgaagaagtcactcagccataagagagacgaaggcactcaactatgagagtgataaagtcactaggccataagagtgacaatgtcactcgaccctgaccttgcccaactcggaggaactttctcaagcaataggggagtgaagcaacaacgatacggacacaaggacaaagtaagcacgcaaggagagtacggtcatgcctctgcaagttctgaaagcaaggaagtacgagaagtggatgcaccgcgcctgcaaggtctgaagacctgaccaa

SEQ ID NO: 197757 - DNA, 539 bp, Cannabis indica
caagataatctttgggtgaaatactcttccaacatccagagtagctggtattggaggcaaatagtgtttacttgaagggtcaaaactggtggaactactcttccaacatgcagagtagttggtgttggaggcaaatagtggttgtgaaggacaaaatttaacagttttgttgtgagcaatagttcttagctcatcgatacgccatcaaccatggttataaggctcttctttttacttatgagaaagtaaattgggctaatcaagtttaggagagactatccattctaaagcatcgtttatactttggctagctgttctacagaggctgcaaacaagagataactaatgaaattcaatatttgtgaaaagaatacatgtttattgtgtgattttcaggctaaatccgtggagcatttttactttaactgtcatttcagcatgacttgtttacaagagattaaaaagtgacttggttggagatgcttgagcacagatttgaacactattctaagatgaattgatagagcaaaaatctctaa

SEQ ID NO: 197758 - DNA, 1122 bp, Cannabis indica
tttttttttttttttttcatatgcttacacaaataaaaaatgtaccaaaaccaattagaaggtgtactatgaattaagaaaaaaaatgtttttttttaaaagaaacttgcattgataaaagaaaattagattttacggtcactacaaaaaatatttagtggaatagtagagagataaataaccatactgattgtgggtaaagactcaatttgtcacattatgagctgtaaaattacaagttctaaaaataaaaaaaaaacaaccaacaaaataaagataagttattttacaaaacaaagggtagttcacaattttccatctagaatccttactgttgatggtattgatcactaccctagagtcgctctccacaataataaacttgcaacctttatcctttgtcatttctaaagccaagcaacaagcagctgtctcgccacactgagcatcaaaaaattccaaccttgccatgttcacccaagtcacttcactttggtggttttcagcgataactgcaatacacatgttttttatatctactttgacatcacagttcaacttgagttaatcttaaggaggaggacattgttcatgcaataagatcagagtaggagtaaggataaaagaaccttgtgagagtaatgaatggagtcaatgaattcgataaattttcttattttgataaatttcaaaaggtttgtaacaaagtaatttacttatttttgataaatttcacgagtcatatgggacaaacaacaaaataatttattatgaacctatttttttttaataagtgaacctggttatttatttttttttatggttaatctgaaactatttttagaaattttattttacttttttacaacctaccaaaccaaaattatatcttctccctttcaaaaaataaaataaaattatatcttttctcactctcattctcactctcacggtacaccggcaccggcaccggcaccgtcgactccattacgcatgggagagcaatctggtcacggcagctcagagacacgcacggcagagttgtcttctccatctcctgttcccaacaaataattgagcatttgagcaacatcttctttgtctctaattgattggttcaac

SEQ ID NO: 197759 - DNA, 877 bp, Cannabis indica
caactaaaaaaaagtaaaattataattactcagtattaaaaacacatgaaagtgcatcaatacacttatttttgggaatgtactgtaaaagtaataacctcttaatttattttttgattcaatccaaacataattcaaagttcaaacaagcctaattaaattaatatatatttttagaaaattctacaatacacttttttaaaagagatgcaccgatgtacctttatctattttggtatccaaaataattttttagtcaaattttttcttatggtcatgtacattatagttatttaagatatcttgtaaaattttaagaaattctattaaaaatttaacacggcaaaaacacggttcaaacattgtattatacgagtgactattttattttatacacgtgtgaaatagactgtttgagcactactttttatattttaaattattccaaattttttaaaatataacgtacacgaatatgaaaaaaaattaaactaaaaatttcttctaaattccgaggtaaaagatgtatcaatatatctttttaaaggaatgcattgtaaaggtcatacttttatatatataaatattttaaataatatattgaaactggttccaaattgcaaaagaacaggcaagtaaaggtcaagtttttttgtttttattttgctttgaatatatatttgattccaattgccattagcatctcagccggctccttatgttgttttgtgattttcattatcacacactataaatcttttgaatattatacttattcatacttttttcacctgttgactttttcttaactccatatttttattatttaaaaaattaaattaagatctgttaaacaaaggcaatcatttaaccaata

SEQ ID NO: 197760 - DNA, 1098 bp, Cannabis indica
gtttgaacaaaacacaaagcatggtttgtatcaacataaatactactttttttttaaaaaaaaaatatatatatatacaaatttttaataatattattattatctttagttatcacattaattattactttattattttattattacttttaactatttttaataaaatatgtttttatattaaacataataataaatattgtgctaaataaatcaataattaacttttataaccaatatagcacaatctatcattaaatatgataaggactggatgtatcatttaatatttttctattttatttttataatagtatacgttgtaattatttagagttatatgacattgtaagctattattttattattaattttaaaaaaaaattataagtgatcctaaataattataatttacacaatcataaaaaaaaataaataaataaaactctcctgatgccaaaataaaataaataatctaactaaaatacccctatatttatgttatacattgcaatctcacatataatagtaagttttataaattttccgggttggagataataataaacgcacaactattgaaaatgtaagaatcttttctccttaataaagatagatgtactcaaattctatatatatatatatatatcacaatttgtaattatttataactacagagatgtccacttacaaatattatatataataatatttaatagaataaatatggttaattcttcccgaattatgattattatagagttttatccctttgaatttttctcaatttcaagaatttttcttaaattataaaaattattgtaaatatccttcaatagttgtattttgctcaattttttaaacaattttttgaaataacactaatgtaatgttacttagtacaatttaagagttcagataaaaagtaaatatacaaataacagtaatgatgaatattaagaatatatatgtggactcttagatctatttttttttttttgaataaaaatcataagatctattaattaataaattcgttcaaaacaataaaacgcacttcagaggaacagtcgtccaactgaagcacacgacctgtag

SEQ ID NO: 197761 - DNA, 790 bp, Cannabis indica
ttgttaagtaaatcagccaagaatcatacacgacagaatattgttctacaaattcgtgagcaacattgttacaacaacgcaaactataactcatttctacagccaaaaaagaaaaaggaaactcatttcatatgacatgtattttcataataacctccatcaaagagtttacagtttatagccataaaagaaaattaatgacaaaaattggttgaacaagtaaatgagcaaagagaaaacaaatactgagatactagtaaagagtttcagcagttgttaataccatttttaagtttttggaaaacactttgatccaactgcgcatacttatttcttatctcaagttgtgccttctcggcaaagctgtccacattgtcttcaaagttctcataaagcattggcacagtcagcaatattacggtcactgcagtaccaaaagatgacatttttatttttaaaaaattataattcaattatttatatatgactatatacattgtagttataattatatataatggcgaaaatagagttcaaaattcagtgtacattggttataatttttttaaatgccgaaaaatataaatgtccctactaatgacaagagtagtgtccctgccctgctatatctaattaattataacattgtcgtttgtgatccaatgaattaaaatagtgaaaaacaaacagaagcaagcaacacgatcaactagtatttttttttattggctaaaaattaagacttgaggaaataaagaaagggggttcacatgcattactattaaaaagt

SEQ ID NO: 197762 - DNA, 582 bp, Cannabis indica
tggatcatgaagggtgttcaatcaagatagtgaatggtgtaatgaaggtgatgaaaggatcaatggttataatgagaggatcatcaataaatggcatatatgttgtgcaaggaagtaccatgaaaaagcaaagtcaatgccactataaaaaaacaatgctgcaatgacatggcacacaagaggcttggccacataagtcacaaaggtcttagaattctacaccagaaaggagtttgtggcaatatgtacttagaaaatccaccagggtaaagtttggagtttggggaacacaacaccaaaggaattatagactatatgcactcagatctctagggaccatccaggacaatgtctagaggaggaaccaggtacttcatttcttttattgatgacttctctagaatattatgggtgtatgtcttgaaaaccaaataagaagcttttccaaagttcaaggagttcaaggtattgcttgagaatcaaactggaaaaaggatcaagaagctaaggactgataatagtcttgagttttgtgcatacttgttcaagtatttttgtaaacatgaggggattggaaggcat

SEQ ID NO: 197763 - DNA, 910 bp, Cannabis indica
gtgtggtacagtcgttaggaatgctgagatgaagattgttgatcctaacactggcgcgtctcttccacgtaaccaagctggagagatttgcattaggggtaaacaactcatgaaaggtactactacctaccacctaattatatttacttttttttgcatttccttttttgttgaaataaacttagctatattgaaatattgacacaaacgttacatagctctttcaagagcacattttagaaaacaaactgtccaaaaaacaattagagagtttcttacaatgataaatataattactgatatcccatctcacacaatcactattataagagtccgccactatctcagagtccaccactattattattgttgggcctatatgttcacacaatcacacaatcacacaatcattattgttacgagccaccgcaacagccatcatatagtcctgccccattctaacatcacaattaattttaaaccactcgatcggaggagagtcccaatcacgaacaatgacactagctggaggaggcaacaacaacattagtatggtgtgaaatgtcatgaacaatttggttgtgaaccttttcattcctatcctttgaaatggtgtcagccaccaccgaggcatagaggaatgtcccgttgatattgataccaagccaattgaggccccaaataaattaaacccattcccaacacacctggctacattatccacatacagaatcaaaccccaacgaagatgagtgtcaaaaatggtatgccgagccgcgtgataagaaaaagtgttctaaagtttcactcctcaaccaacatagaggggcataaaatatcctccaaactttgaaatctgtctagcccacaatggcttttcaccaaagcagagcatccaaaaaggatgcac

SEQ ID NO: 197764 - DNA, 939 bp, Cannabis indica
cttgatcctcaactcaactactaaacactaccatttttcatcataatcctggttttttttttcgtttgcgattgtctcgcactcgatttcactttgatctttgttagtttcgcttcgaaattttgtagcaccggcctaatctcaaagcaagcttttagatccgtttttatcattgccaacataaacatctctcgttcactttgatgaacgattttagtcgagtttgatcgactgactgaccgactaatgtttttccttcagcaatggaatttttagatgattctacctttttctgtctgacatggatgaggagactatcatagtggtttttagttcattcattcatgtcaactcaatcttcgatttttgcaacagaacttggtagtttcaactcgagaaagaaagagctcgaaaccacaaaaacagggttgctcacaacttgttaatttcccttaaaccaattctaacacttttatacatccagtcgaattggcagcaacaaccatgtttgatttccttctccaacagacgctagaaacgaattggccattgtcgtcgtttgtttcctttccagaaatgggatcaatggaaccaaactggtgagaagtaatcggcataggtagagatctatagtaagcaaaaacctggtgaaagtaaaaagagaaatacaggtaagaagatgcatttagcaattgaccaatattttcaaggtaatatgttcctaactaggagaaagtcgattcaagtacctcgttactttctgaaccgcatgttatataaccgtcgttaactgacaaacccacgaagttctgaataaaagagaacatttcaaatggctcaggaagagatgtttaggatgtcaaagcaaagtagcaaacattagggaaagattacaaggattctagcatatatataaaaccttttcattatcgtggccgg

SEQ ID NO: 197765 - DNA, 1533 bp, Cannabis indica
aaaaaatttagtaaaaaagtaagaagctctttatatttatatttataaagtttcctattttttcgctaatatagagagtcattttttatatggttgaagcttattttttaagtctcactctctattttagttaaaaaattcgtttagaacatgcatgattggatatgttttagagtatctattttctattattagtttttttttttttttttttttattggttggaacttacttttttaaatctcacttagtattttaactaaaaaatatgtttagagatcataattagaaaatgcattaacaacattctctatttactcttagcttctgcatgttttcaatttatacttcaaaattaattagactataaattttcaaaaagtagccaataaatcgagttagcataatttacacatttatttaaaacggaacaaattattatatagggaatagtcttttgagtatcttaattaatgcagtacttaatagaagatattaactattcataactagtactcatcgttttgtttcctatccacatcattataagtaccctttaagttaagtaactaaatttaattaatgcaatcaaatagtttcatgacgatgactactcatctattagtggataatgccaactagaatggaggtgcctattaatgtttgatagttgttaaaatttgagataagataaatgaaattttattgtaaaattaattggtaatggtaggagtaactcatggatcttatccttatgtatgttttaatctttccacacattaacaatgtgagactttctaacattctcctcaagatggtggctattttttttctcaccaatcttgcacgactcagtcttaagtggctctttttggttcacagaatcacagtggctcttttgctcagtattctcgaatcacaagcagttcattttggctcatttttttggatcgatttttggatttgaatcgattactcgttaaagttttaatttggctctgataccatattagaaattgggatgaaaaatgctgagataaatggagttccatctcaaaatcaattgactatgagagaagtaactcatagatcttatatatgttctaatttttccacacattggcaatgtgagactccctaacaataataaataaagttaaaaaagactcgcaaaagaaagaatacccactattgacactggtggcacaccattttttttttatttgagtaaaaagtaatttgtaaggcctaacaaacattaaaagagagtgcctgaacattatttgtttgactctactttttatgttttaaatgaaatctcaaaaaaacaaaaaaaaaaaaaaaataaggttggaaacgttgcttttcttggacaacagtgcttgagttttttttgtttgaaagcaggatcaattttgggttgaaacggactaagttagcacggtctacccagctcaaggcaaggcctacctagtattgggcagcttgtgccattgtacaaggttcctcattttctaagtttttttaagaaaa

SEQ ID NO: 197766 - DNA, 889 bp, Cannabis indica
ggcgcagcatgtcctgtagtcgcatcagcatcagtggttgaaggattgttagacccatccctgacttgtgctccctggttccccaaaagagcagcaaatggatttgaacctaaatcatttccactgtttccagtcattgtggtagcattaagaaatggttcttgaacattctcatacatacgcctaagcatattaaaaccctcaggagatgattcaatgttactcattgctctatcagtgtttctcatcatctcacgcatgagctcaggattccttgcagcttctaatgtctgacggagaatgctgggatcgttaagtatatgagcaagctcaggatttctatcaattatctcacgcatctgtggattgctcataatcaaacttcgcattaagtctgggttattcataaggctttgaatggcaggcatgttcattatttccctcatcatatttgggttttgggtcagttgttgctgtacttgttcaaattcaggaagcccggctccaaacaaaccagctccaccgccaccacctccgccaccaccaagagcatttaaacccagtccagggaataaagaagcccctagtccagcactttcaagccccacaccttcagttgaaccaacacctcgtgtaacaccaggtgtagtattaggacccgtagtttcagaattagcgggcgcaggaggtgtagatgaagcaggggaaaacccacgaaccatgtgaactgtgtgatctgcggccaaaccttagataacggaaaataacaagccattagaatgagtgcaccgaaaattcctcaaaagaaaaaaaaacgccaccattcccatggaactaacacaaactttgatacagactgaatacatcaagttcaagacttatattcttt

SEQ ID NO: 197767 - DNA, 3096 bp, Cannabis indica
taaggttctactccaattttggaaacccaccgcaaactttttatgattgagcaaaaccacaagtacaattttcaatagaaaaaaaaaagaacataggtacaatacgatcgagaggattttctgtttgtattctctcaaaatgtttatctctttgttaatgcaaatttttgttaattaataaatgaacctttttttgtaagaatttagaactttttggtttagcctagtgctctttatatgggagagagcttacagaagatctcaaccaaagtaggttaatatcccttgaaatgaggagatatcaccaacttttcatattaaatacacagaaaataacccattaatctttcctaaagaataggtaaatattgaagttgagcccctactttcgtgtgttgttggagtgaatttgtagctgagagtgaagcattgtctgtccaaggtgaaagttagagacataggaagctgactggcctaccatttgctagaggctccctggccaatgcttcactatggtcggctaggggtggtccggccagaccctcctggttggccattttgttgtctctttgtcctacttgatcatttcgactcttcgtcaactggtatgttattcatgttgacttagtcctcttacttacaggttgtacttcatgtggcattaatcttacatatgtggacatgccacgtcatgtggataaaaattgggataacaatcatattactctatattttataaaatatgctttaaataattacaatctaaatttctggaatattacactatgatatccaaacatcaggccctataattgggttaagctccaatacaggtccttactatgtgtgtttttagtctatagggcctctcccataaagggtagaaatctctgtctaaagatagaagactatacatctctagagatgtcttatttgatgaatttatttttcttttttcacaagcagcatttatggatcaatccaactcttctctgtccaccaatccaactcctacctctcttaacatctctaccataattcttaccttcagtactagttttcacccttcaaatcccactaatccacccaaccaccacatcccatgctaccaccaccaaatcctcctcaaccacaaactgaacttgttttcatcattggtacttcccaacctgagcctctcccgacttctcccactccacaacaagtgtctcttcctcaaaccacatctaagatacaacttcccaccactactactgctacaataatcactgtagcaactaataatcaccctaactgcacaaggtccaactggtatcactaaccctaaggtccttatggcttctttgcatcaagaatctatcaaatctatgcaagatagcaagtggattgcttctatgaacactaagttttatgcaatagtcaaaaacaaaacttgggtgttagtacctcttcccgatggttaaactcctatagggtgtaaataggtatataggataaaggaaaatgcagatgacacaatcccacaataaaaggctggattgattgccaaagggtatcatcaagagactggaattgattacaataaaacatttagtctagtcataaaaccagttatcgttcagattgttcttacaattgctattccaaaaaggtggtgtataaggcaattggatgttaataatgcatttctaaatgatgatttgtaagataaaatttacatggtgcaaccccctagtttcatagatccagaacatcctgagaaattttacaaacttaccaaagccttctatggcttaaaacatgcactaagggcttggtttaaaaaattaattcactattctacttaagcttgatttgattttatttcagcaaggtcagactcatttctctttgttaaaacttcatctacattcattctctatgttcttttctatttagataatattctcatcactggcaataatgacagagttgtctccactttcgtaaaagctttgagcaaaacttttgttttaaaggatcttagatccttatcatattttctaggcattcaagctatttcaaatgatatagagactgtactttctgaacaaaaaatatattcaagatattctatgtgtaaagctgaaatgcagggtgtaaagacaaaaaacactcccatgaataatggactaaggctctctcattatggcagtgaccctttggcagacccaactctttaaagatctatagttggtgctctccgttatgcttgcaaaatcagaccagacattgctttcagtgttaacaaggtttgccaatttatgcaaaaaaaaagccactagatagcagtaaaaaagattctgaggtacttggcaggaaccttaaattatgtcctgcaaatgaattttgtgtcttctcttcatcttcaagcctattaagatgctgattgggcagccgatcttgatgatagaagatcaacaactgactattgtgtatttttgggacaaaatttagtagcttggctgtcaaagaaacaaagcaccatttctaaatcttccactggatttgaattcaaaagcgtggcagcaattgtttttgaaatcacatggatacatctcttctctctaaacttcaattgatgtcctctctccctcagtttggtgtgacaatctcaattccaattctgttatgttagcagcaaagctggttcttcatgtcatgctagaacaaagcatattgagattgacacattgttcgtatcaaattcctcaacaaagaaatccaaatctctcatgttctagcagaccaccaagttgcatactgcctcaccaaacctatattcagcaattgctttccaaagcttagatacaaactaagtgttttatgtttaagagaaaagaagttgagttgttataaacgaattggatttttcagttatatcttttcatttcggttattaactgttttcaattagtcaacttctcttttagttttcagtctcttgtatagatacttgaaactctgtaaatcttgttcaatcaatgaaattgcttttttttttttatctttctttctattttctttctgtcttcaactaatctttaactatactat

SEQ ID NO: 197768 - DNA, 1682 bp, Cannabis indica
ttttggtgttgctgtgagtcagtgcagggctaggaatggaggtagattcatggctggcaggtgtgtttgacggctgtgaagatgcagcagagtgtgagaagggggcaggcacattaatgttttgagagatgatagggtgtgtgatgtttggttgagttgtgggaatgtgaggtatttgcggcatagcaggggctgctggtgtgaaggtagtttgtggttgttgataatgtgtggagttgggagagatatgggaatgagaatgttgcagatggaaaggtaagggagtgttagatgtttcaccatcaaagagtgcagaaggagaagcttgaaatcggtttttcagagatggcaaggtggaagtaagtgtagtacgagccaagcgggtaagtagtggccaagcattgcccttagcaaaatcagtccgatatcggtcatagttatgggtagggagtttagcacccttcatccatggtccatattgaaaatcatcgtcattgccgctgtccatacgttccataaaagcaacacatcgctcaaaagggtgtcccaagcggccacattcaaaacagaattccgggagcctttcgtagcggaagtcaacccaaaactcatctttaatccttggcagccgaatcatttggcctcttaacaacggtttatttgtgcaaagtttaacacgaactcttaaaaaaggaccccacccttcattggttgaatcatcataaacttcaataaactcaccaatgatgttaccaagtgcttcggcaagcaatttggacttgcttaagaagggcagccgatagatttggacccagaagggtgtagaaattaaatcatcctttgagacattttgcagagcatctggcgtgcgtagaacaattagatgattctgaaagtgccaaggctctttggttagaacccgtcttttgtcgccttcacagccgaacttaatatggaataggccatctccttcttgatattcagtgattatgacacggtaccggccttgccaatggccggacatttggtcaataaaagcttgtttgtatacattctggtgggtaaggactttggctaagagaatgggctggggagaaggatcgggtaggggaggattgtattcaggtatacaaaaaatagatctttcctcatcagtgagagaaagagatgaatgcatatctgttgagagtgagtccatagaatgaagaagagattgatgaggaggtcgggaagggcatgaacgctggcaatggaggagggggttgagaagggggaacggttaaaacaggggaaatttgaaaaagaaagagaacagaatgataatgaaggttgttaaaaagaaaagtaactaaaaactgctacagacccataatcgggcacttgagtaaattcttttcctaatattgttagaagagaattgagtgtggattatattaacaaaacaaattgatattaccaaatagcacaagatgtagcatatcagtgtaaattattatctgcttttatataatttaatttaaaaaaataataacgaattataatgtgttacgtcggtaaatgatgttaaatattgtctggtatttaataataatgctcaaataatctctcatatattgctttagaagaccccatgtgtgtttctggtattatgctggagcagtttttttttttttttgttttct

SEQ ID NO: 197769 - DNA, 971 bp, Cannabis indica
gttttacaaaacaaattttaactaaagactgagatagcagtagtaaatgacaatcctgaaccaagttcccaaagatagagcagagagaagagggattgcggatagcttggattgagacgaagctgtctgattcaagttcaacatgttgccatccttgtatttttgacccatcttaaagcctatttaattcccatgatctcaaccacttaaggatcaaagacaccattgtagcagtaagctttagcttcaatgagggatcctgaattgtttcttgcaaccataccatatttgtgcatgttatcactagcaaacgtagcagcgtcaacattaatcttgattgtattcacatccggtttagtacatagctcaactccatcatcatcattatcaaagtagatgtatgatagagatgtgttatcttgagcttttaaccagtgatcaagagctatacgggctcgtgtgaagacaattgcaatagcgagcgctttgtccttccaaacaataaaatttcttactttccataaggacgagaccataattaaaaagcaaacaagatcagcatcaagacacttgaaaatacagtctaaccagcttgcaaatgagaggtggagtgatgccctagccggtagacttgtgctatgccagcaggaggaaataaagctgcaagaaagaaggatgtgagagatggttttcggagaagaattacaaacgggacaaagagagggaacatcgacatgtttcattttgagattgacacatattggtatgatcccagaggcagcacgccaaaggaaatttctaacttttggtggaatctttaattgccaaagtttttgccaaaagcttgagttgttgcttccaatccttggatctttagaatcctgaagaagacaatatgcacttttgacagagaaatgaccagagctttcactagaccaagaccaaaactcacacgatgccgagaagcttaa

SEQ ID NO: 197770 - DNA, 948 bp, Cannabis indica
ctttgaaactaaaatcagtgtgtaaactgtaatgattgttccattaccatttacttttttaatctcaaaactcaaaattgaagagaagattaagatccacagatatagttttcatgaaaactgttcatgtggggtgtttgttttctccacctcccttgtttgactcctccacagttttttattgtttatttactttagtggtaagaggaaaggaatatgagccatgaagttattcaaaaaaccaatagggaaagtgattcattatcatttatatccaaagtcttcattgttatcattcatttattaatctttgttcatattcatttctatgctcttttcttcaattcatttctatggtctatatctggcatcttttattaagctgtaattagaatataatggaagaaatgaacgagtttataaattaatcgattttaatattttattatagtgtttactaaactattaaataaaattattttattttgtttacataagtaagaaaattagaaaaaatagtgagaatattttaattcaactaaattgtaaaagtatataattttaaagggtatgtttgtctttttatttttaattaataaaattaaaattaaaagaaagtaagttaggaaagagaaatgtatttctaatttatgagatttttttttttttaatttatagattccactaatttcttccattataaaatttagtaaataaatgaaggagaatcgataccatacaataacacatgtaaaatgtgttctatatgtctttaagaatgaaatttgctcctttagttttgaactagaagcatatgaattaaacatctttaagttcagactaaaagtattatgaatgattaaagcactttacaagtggcaagaacaattctgttttctatgattttttttattcttactcataactttgcatacttcattagagcat

SEQ ID NO: 197771 - DNA, 1181 bp, Cannabis indica
atagaaaatataaattaaatttatacactaaacattcatttatgaaaatttaggagggacaaatgcaaataatataataagtactattaaattaaaatattttaaattaaaaaaaaaaaaacaactcctattgttatgcttttttagccttattattttggaacccaaggtttttcattggtcaaatatggcaaacgcgttattaataagtttatttattttggtacgtaaaagaagaaatactctgtaaaacaattaacgtaataacaaagcacagacaaattgaaataataaataagaaatcccaaaagtagtggttggttttttcttttgttttgtttcaaaagaattaataattaaaaaggaaagatgaataattaataatatatatatacctggagttcagtggtaacagggtactcatccatgtcgacgtagttcttgttcattgagtccataacaagcttatcacactcaggctccatccaagtggtgacaaaggaagccaaattcagccttggcttcccatcaagcattaactcatcgtttatcatctgatacgccacttcctttggtgtcgaattctcaggtatctcatacctataaataaataaatattttaattaattaaatataaaaaacatatagtattatagaaatgtatatatgtatttattaatcttacttagcagcagagtctcggacgtagcgagatgcaaaggtggagtgaatggagtcattggactcagaaaaaactttggacaaaaccatactgttaattaatgcctcttaattaataattggtgtatgaaattggggacagagaaaaaataattggaataatagagaatggtttggatttgttgtgtgattgtgtgggtttttgaagaggttttggggtttgtatttatagtgggggttttgggtttgggtttacaaacgaaagagactatgaaggtacttttttttataataaaaggaggtgtattttattgaaagaaagaaaaagagaataataaaaagaagttgaccaaaataaaaaagaaaaatctaaaataaaaggtcttacatttagaagaaatggaccacgtgtaataactataatatcgatatttatgaagcgtgtaatatatatgtaatgtatgtattagtatcacattcacaggtgttaattgtatcta

SEQ ID NO: 197772 - DNA, 3931 bp, Cannabis indica
atatattgtgtattctctgttccttttttaactaaaatatttactttgattacaaaatatataaagtcaactcgaataaaaaaaaatattgttgttttataaccagacttgcttttgcctttggcagcagagtcattgtttcttctattgacataaccaggggaaaagccaatgagaaagtaacatttatctctaagatagcctgattttttacaattggagcaggtaggacgtattttcttattttttgaggtaaagtttgctgtagggtttgaatcaggggttgctgcagggttgggtgtggaagtagcagctgcaatgggattagtatttctatgccaatagttatttgacgttcttgatgaacaatcatagaaaacactttgttcagaggagaacaaaggatcaagaagtaatacctgatctcgtacagcattataggagtcactgaggccttttagaaattgtaacacctgatcatggttatggtattcttgatttctggcagaagcgacgcaagtgcatggtatttttgggcgaagttgagtaatctcatcccaaattacagtcagtttagtaaaatatgtattcatagagtcatcatcttgatgaagaaaggtgaaattttcattaagtttgaaaatctgtggaccattaccttgattgaacctattgttaagttcagttcacatgtctacagcagtatcaagatacatgataccgctctttatctcgggtgaaaccgagtgaaggatccaagattggaccatttgattacaacgaatccaagaactgtataaaggatcatttaaaggggtttgggaagcgtaccatcaagaaaatatatttttttacgtgaacctatggaaaacttaaaatctcgagtcgatggttgaaagttcctatctgtcaataccagagtaacaagagctaggcctgggtgatctgcgatgctggggtagtaagggcttcgtacatcctcataagttggtcgatctccatgaacatggtgatttggagcagctggaatagggactcaaggaggaaggtctgtcgagttttgagatgctggaggagcgggattctgaagagtatcgtccacttgattgatgtgagggtcagtggaggtaccagaagaactggctctcgtacgcaccattgttgaaggcagaggaagcttgtggtggttatggttcttggattatagcatctgataccatttttttttattgatgaatcagcagtgttttcattactccaataaatcaatttacaacctaagagcactccaaacaaggaacctcaaatatatttcctatataatacacagtttgagtaaaatcctacaaacttacaaggatctaaaccaatccaaatcttgtagcccaactttcttaggccaaatactacatattctttgtttaaccatttctttaactatacatacaactctgtctacatttccaaccttggagttcaatatttgatcattcctagtcttccaaacatggtagactaagcttgccaatgcagccgagagcacttgctctttttaatttgctgcttttacttctttcaatccatcaggtgagtcttgtgatagtcaaagtggatgcattccaccctaaccattctttaatcttttggaggccctgctgtgagaaagaataagagaagaagagatgctcacacgttttagctagagtgttgcatagcacacaccttggatcatcaataattctgaacctgtgcaatctctcttttgtcctcaaccttccctgaatagcaatcacatgatgaaactggttttaggagtgttaaacctccctcaaacttccttactccaatgcactctatgctgaggaggagcaagtaatttgtacccgagggatatatagtacttggattgggtaaactgttgtacatccaccatatttttaacctggttcttggcatctactaccttgttccagtaccaactcccctgtgtgggggccctgtagccccaccaatcctcattccgtatgtacacactatgaacccacttaacccacatgttgtcttctttattagcaattgcccaaacgtacttgaacatttctgctctatttcattcggctaccttcttaaatccaatgccaccctctaatttagcttgaccaacaaactccaaagctattagaccagaaccattcagagcattctgtcctttccacaaaaaagctctacaaatagcttcaatctcattaactatcttcttgggcaaaattattatttggctccaatatgagttaatagtcatcaataccgaattcacaaggactaccctgcctgcaaatgaaaggttcttggtactccaggtcttgattcaggaggtcatcttctcagtaagcactttgcaatcctgccctgagattcttttagcacagatcggcactcccaagtatttgaaacgaagaaaatgaaaatagagtaaagtgaagaaccatctttattttattgaagaaattgtattgaattgtgatacaagagaagagctttatacatagctaaaatacagttaagaaaaaaaatgaacacaactgacaaatagtaacagcttaactgaataacctaacaaactaactaactctaatagtatgtgattgatcatataaaagttacaataaataataagtgcacgtaagaaaaattaaaattaaatgcatgagaaacatatttaatgtagttataaaagtatattttggtttagtattgttaataaaagtatattccaatggataataatttagtataatttcgttatctatttggcatagttataaaagtatattgtaaccgttaaatttagaagaaaagacaattaataaattaatgttaacttaatacataaaagtacagttttttatcaatacttttaaatatagatattttttgaaaaattgaataagatcgtaaaatattaatttaaattttatgtttaaatatacaaattacattctattttaaatatatatatgggtaagtactgaatgatataatcatgatggttacatttattttaacttgtactagcacgttaccaatatgtacaattttttttagaattaaattaattaaattcttaaaataatttattgttgattttaatattaaacaaaacttttttttttcagaaattaatatttataaataattttattttttatttaaatccctattattattattttaacaacaaaaccatttaattataatatttacaataaaattttaccttttttttttactaaatattagacttccaccccttctaaaataattttttgaataattaatttgtttctaaaaatgacatttaattattttttttgcaaaaccgcttgactcatcttcccttttttttttttaaaaaaaaaaaagaaaaatccgtaatttcaaaaattagggtttcagtttgtctcaacctaacatcatatgcattttctacttcgatgcaatctcttacatctctaccataattccattccctccaatccactagctatatcacgttcttttctttctccctagttctcagttgtcctggccacacaatgatgtagcacatccttcataatttaattgacaataacaacaaaatgttattttgctttgcctacaatttcttcaaattcttttccacatataatatatttttttctcattcacatgatgtaatttttaggtccactcatttttaaatgatatttctaccatgatcactatgtcgttcatatataatacttatattcctattttttttttgtcaatttaaaaaattcataccaagaaaaactaaaacaagttcatggtggagagtctggggacaagaggctccacctcctcaaataatgttatttcttagtgatagttttactatgtaattaac

SEQ ID NO: 197773 - DNA, 712 bp, Cannabis indica
acagtcacacaacttgtgaaagaaaacgacaaggaaaataaatgaaaaaataaagaaggttggtataggtatttactttcaatgtgctccattttcttttctttcttctgaaagtgatatatttgtgcctttgtctccatttgtttgtttcaggatgagtatgagcagctaagctgcaaaattgagaatgcactgaaaatgtcagttccaagtggtcttagcggtgattttgaaatgtttgtcaacacgcaacgaaataatcatccaactataatcaaggtttaatttgtattattagtaaaattaattttattcgaatggattttatattccttaattaattttagataatatgtgttatgtttgtgtgtaatttatgtgtgaacaacatattataataagattattaaaggcataaatttaccataacattattttaaaggtaatatgggagaataaaaaaggtgttacggatgaattgccacatttagtttatatttcaagagagaagcggccaaagcatacacatcattacaaagctggcgcaatgaatgttttggtacgtaatctttaatttttgttggtttttttttctttctttattgtataatattttgtaattacaaattttaatgttaatatgttcgattgaataaatatatatcgaagctcactaacattattatgagcattaataatatatatatatata

SEQ ID NO: 197774 - DNA, 562 bp, Cannabis indica
ttttaatccatataattcaacttaagcactaattcatgtagggccattatgttattttatttaactattgtctttaggattggactaaattggatggaaaatgaaatccagaatagctgggcatttataactatgcacagtataaaaactaggtgaatgaaagaaaaagaaagcaagttcctagaaaaaaaaaaaaagaaaaaggaaaatagcagaaagtatgtatgaaaatgtaacctcagaactttgcgaaaaaaaaagaaattgtaatcacagaaatcatcaacagaaaaattgtaatgtgacgtgagaaaaagtgctgaagtcaaatcatcattgtttttagttttgttgttcaaaggtttttctgttatctttttgtcaacgcgcaaaagttccattgtttttgtcaattacacgtaaagttaaacttttagtacccgttttttttttaagtaaaagaaaagagagagagaaggaagaactcgtgctcaattgctatactctctctctttccctcaggcgtcctcaatcaccattcaccaactctctctctctctct

SEQ ID NO: 197775 - DNA, 2651 bp, Cannabis indica
aaaatagttttaaatatttaaatctaatttatctattaaaatataacatagataagaaaaattaaatagttacaggtttcctctggttcctgctctctcagctctcgagctggcgccatggcaagaacgagatccaagaatcatgggaagcaaccttctgcaactaaagctaccaaaccttcgaagaaacgaggcccgtcctcgtctggtgatgcaaagaaaactaaaataatggatgaaattctggggattgaacccatcgttttcactgatgaggaggataaccctgaaccagaccctgaagctttccaggccctctctcctcgagcatccttgcgtgaactgaagcgccaagatgatgttcgaaatgattttgctcacttcctgcaagcaaattaatcgtgcagcagagctttatcgcaaggtaattcttttgtaccccctattcttcgatctgattctgtggttaggtgtttggataattcctttcagaatattgagaaaactggcagtgatgaattaactgtgaagattacaatggatgatattgaggaagagatatcttattggaattcagctattgtttgttatgttttgggtgtcaatccactattggaagttcttgaggggtttgctcggcgaatttggaaggaaaaagtggataaggttggacttatttcatatggcatcttcatgattaggttctcttctgttgaaattagggatagtattcttaatggagggtacactttcttcaataagaggcctgtgattatgaaggcttgggatccagacactaatttcaggaaaggatatatttgcaaggttcccatttggattcaaattgaagaactggatctgaaatactgggggcaaaagactttgttcaagattgtgggacaaattggtgaacctataatggttgatgaagttaccaagcaaaggtaaaagctcaatttctctagagttctcattgaagtctctttggaactagagttgccaacaaccattaaatttgaaaacgaacattgttacactggatcagtgggtattaagtacgaatggaagccaactatttgcaagaattgcaatggtttgggacatactacagatgaatgtaagaagaaatcgactatgcaaggcaaacaatgggttgtcaaaggcaaatcaggggtgcaaactgatgctgcaaactcagggactacaacagatttgaaggacggatctgctatctgtttgggtcaaaaaaaaggtagaaataaatgctacaacagctactgctgttcttaatgcagatggggataatgagcagtgtgctggaaggattattagtagagattctgatgggttcaagccagttactaatggctggagaatagggaaaaacagcaaggtaatgccagtactttgaactctttcagctattacaggagcataatttggtagtggagacgcaagttagtgacgcaccaattgcacttcaagctaatacaggaggagggggagagcctcccatcttaaatggatagaatattagcttggaatgtccgaggagctaataattcccacaagcaaagtttgatcaagcaattgatttattcacatagtgtgggtcttgttggtctccttgagacaagagtcaaggcttcaaaacttggaaccttgtactctaatatttttaatggttggtgttttactagtaacaatgcatggcacaaaggaggtagaatggtggttgcctggaacccgaatactttttgcattaacatactcaaatgcacaagccaattgattcatcttcaagtgtccacttcggatggtatgaattttcttgtcacatttgtttatgcttttaatgatgaggagggtaggaaggttttatggcaggacttagtgaccattactactcatgacccttgggtagtgttgggagatttcaatgacgttttggaacaagaagaaagagttggaagcagagttcaaagcctcaactcccatgctttggaagattgtatttcatactgtcatttggaagacataaagagtagtggtaagttctttacatggtgtaataatcagcaaggaagagatcgaatttattcaaaattggaaagagtaatggcgaatccaaagtggatggatttatggctgggtgctgaagcgattttcctaaatgaggggattttttatcactcccctgctttagtaacttttcatcagcttaatcgaaatggaaagacgccttttcgttactttaagatgtggtcttctcacccgaaatatgcaacacgagtacaacaaatttggcaacaacacttttctggtacaaaaatgtaccagattgttaccaaattaaaggctctaaaacctgttttcaagaggatcaatcaagagggcttcacataccttcaagctgcatccattctagcagctaaaaacctgaattgctgtcaagaaacattgctactggaccccctgaacccggcattgcagcaggaagaattgaatgccaggatagctttcacacaagctcacaagaattacaagtcttttctccgccaaaaggcaaaaaccagctggacaagagctggtggtgataacatagcagtatttcatgcaagtctcaatgccagaaacaaccaaaatagaat

SEQ ID NO: 197776 - DNA, 1265 bp, Cannabis indica
tgttcttttgtggtttgctctttattatgttctctgttctgctgtgtatgttttgtgcttggtgattgattggttttaacactcaaatttatactaattaaattaaattaactttctttttgggtttctcagaactgtagcagcactttaaactctgtgattcgaaggtacgataataaaatgtactttgccaggcaaggatctgcttatctacctaatttcatgagacaagcttcaaatgatgacgtgattgaggagactgcaaacccagtaagttttgttctcaatacacatcaactaactaactactagtggtgttcatcaaaccgcccacatcataaataaaccttccatggtgtggctgtagtttgaaatttcataagtactgtttaaaccgcactgcattatttgctgttatttttatagtttttgttgaaatacttttagttttttaggtttatgcagtgcatgtacggtttggaaatttgttcaaactgcatctacattcccattgcgaacaccccctactaactactttttaaacgttagttagatgctaaatttaattaggggttatgataaattatacttgcaattatttttgttaatccgattcgcctatgttgtcttagaacaccaccaccactttaaactctgccaccagaagatttgacagtaggctgtttttcgcacgccaaggatctgcttatcaagctaaatgaggcagggatccaatgatgaggtacttgtcacttgtgctctttcttttttttttttgttttcttttctatttccttctcactctcactttgttcaattaagtctcttaagactcatttttaaattgcaggtacttcctcctcctcaatcagacacttgtcctaaatcctctgatgttagaactgagggtctttattatgtttctccagaaagaccctcatttctaggccttcatttccaaaacaacctgctgagcaatatcatgatgaccctcctaagtttgctacacaaagtgaaatactcagtcatcaaagggagcaacactcttcctgctctaatggttggtagtgtttgattgatgttatatatacataatgatgcttttaactcgttattctcaatgttttcatttttaatatatttgcagtaatggaatggtcgccaaggatggatgtgcagaatcaggacaaactttgtcatcactgttgagattccaggcgttagtgtcaaagacattagggtggaagttgatgataataagtaga

SEQ ID NO: 197777 - DNA, 1153 bp, Cannabis indica
tgtaataataagtattacaggggtgatctaatttaacaattataaaattcaggaattgtattgatttatttgttttcgtttgaaaattttaacacaaaataagttaaaaatgcccattgaaggatcgagacactcgttcaattcttcttcccacatacgtattaaaaactaaaagccatcatgcatacacacgatacacgatttttactgcaagggtattatactgttattataacattctatagaggttgtcgaacctaaaatagttgattattaaatttccataaatactatactttcagtatttatgctaactttaattagacgaattgaaattaagaataatttaagaacgaaataataaaatagcataaaagtaaatggataattaaacaaataaattcaatcagataaatataacttagagcattgattttcctaacctaaaatatgaatttcagtttaccaattatcttataatttattaataatttgtagtttcaagaacatgtaatttattaacctctcttgagctagcagtaatagaattaatcaatcaagcaataatatagtgatcaagcaattctaagtttgattttaaattacatctctcaagtataaaatctaaaatcttacttggttacactccattcttaatgaccttgacataaaattcaaacttccctaaacactcttttgtgacaatagtgcagctatccacatctccaaaaatctagtctacaatgaccaaaccaagcatggaaattgactgtcatcttaaagatcaacaatgacaccattttcatgatcaaacatatatactagacatcctcacaaagtctctatttcctacactcattttcatgaacttgtatccaagatgagtgttgaaattttctagactctattttgagagggccaattaatgttgttaggattagttatatatgtcaattatattagttttgtttcagttatatagtggattaattgaattcattgtttcacacttattttgcctatatataggcttttcatgtcattcaatcagatcaatataccatttcttttaatgtttttcaattcacaaaacttaacaaaagaagaattagaaggatgtgaaaaagaagccacaagaacaacaacagaaagg

SEQ ID NO: 197778 - DNA, 2041 bp, Cannabis indica
tttttttataaaaaaatgacttcattaattgataaagtaaatacaaacaccaataaaacactaacaacctcaccccgatctccaactagcagcaaaagaccctaacaagcaaagctatctgctttgtaatctaagcaaatagttactctcctgaatagacatctttctattgtttacaatttgtatctatactttacaatgttctttgcatcatttacaaccccaaaaacttactttgagtaaccattaaaaatacatctatttttattgagtcaaagattgtatatcacaactgccaagatggtggtgttgaatctctggattggatcctgctctttcgctgcaacccaacctgaccaaccaaaaaactcaagaggtcaacctctgtatcccatccaactaaaaaccagatctaggactttatgagacataacacaattgaaataaaatgtgctcatgagtctctacataagcctcacacaccgggcataaagaagatctcagcttaatgtgaaaccgattcaacttgtccctagtgagaaggtgagagttcatcacttgccataaaataaatttgtgttcaagcacaagtaacgaactccaaacaactttgtgataattgacctggttttagaccaaaatgttgttgtataaccaattagtcttaaacctgccagttgtacatgctttaaggatctcagatttcaaaaaaaatttcctcagataacataatttgggccaatatcaacttgaatctggtttaagatcataagtccagaagctcaccaactttagatagatgttatctatccatttaacccaaagaaggtcttgctttgttgaaatcgcccaaacatacttggcaagaatagactgatttcacttgacaccatctttaaagccaaggccaccataggctttcggaaggcaaactttctcccaagaagtaattttttttcttcatcctttgaatttgttattttttgtttcatttgttgttggaaacataaattaataataattttgttattttgttgttagttatgaacaaaatatattttttaataaatattaaataatttaatattaacaagtaattaattcaaaataaccgatcaaatccgcacttttgtatattggattggacccaaaatgttcactatgagaaaaatagtgcggattagattggatgaacacctcctactgagagatctccaagaagcacaccaaatttggtgtcgaaaattatttctactactcaaaattacactaaaaaatattacttattattatattaattttataataaaataaaaataattatagtattcacatttaatatatacacaataaattaaaaggtatttttacaatgtacctctcaaaagagtcatgcgtgcaatagagtatgaattttattttttgcgtgttaaatttttctgaattttttcaaaattttacagtatcttaaataattataatatacatgaccatgaaaaaaatagacaaattctacaatgcattaggggtctactgatgcaaccctatctatttcagcatatgagagaattttttcgtctaatttttttcatggtcgtctacgttgtatttatttaggatatcctgcaaaattttaaattttttttttaaaaaaataacacgtcgaaaataggattcaaacaatttattttatgcacgtataaaataaaagagtttcgcgtgcaacagactatttgaactctatttgtggcgtgttaaatttttcttaatttctcaaaattttattggatgtcttaaatagctataacaaaaaacaacaaaaaaaaaaattaagctaaaaaaatcttctctgatgcaacaaataaaagtatatcgataaatccattttaaaggagtgcattataaaaaaaaattttttaatcttataaatacaaataattatatcaatatctataaatagcaaaaatctaaagtatgagagatcgagcaagacaacaccattataaaaaagcctataatttacggatttttttttaccccc

SEQ ID NO: 197779 - DNA, 1270 bp, Cannabis indica
caaattttgttgcagttaactacttaggtaaaacaaattgccagctaattatatttgttctttctaattaaatatttacatagaaataatttgtcacattttcatttagaataaaaatttagtattcttcgcattattttgatgcttcacagtcgacggcttatgagtcattaagttgaaaatgttattagagcttttatccttcttgtaaagagtttagttaacctattttaatttgctaattctgctggatgaacaatatttaattttgtatttacttattaattaatgaaaattccatttatttttttaaaataattaatatgcaattaaaaaataaaataaataacttatttggaactccaaatcatgttagatttgatacaacacgagttataaatgaaatactactattggatgctctaacttttctttgtttaagtgaataagtgttcaagataaatgtgaatggtcacggaaatgctttcttttcttttgctatggttgtcgtcatcgtattatcagtacacaatgcatatgaattttattttatttcaataattaattacaaattacacgtgtatattatattgttgtaacaccttcattcttctcaggtctctttcttgattcttccccaccctaatttctatttaattttttttaattattacttaaaagaagttatttttacagctttcgattaattcccaatttcacattcaccctacaaaaaaaaatacccaatttcttgtttattaattatagtttatattctaattctaatttactagcccttcggataattaatctaaataatatctcatatataatataggtgtgaatgtgatctaatttaaaatactatattatttactataaatgtatattatatgaaattataaagtgtataccttaacttttttattcttagttttgttattcctggtaaaacattaaagaccattctcatacatcagttaaaaaggaattattccaatctatttttatttttaaatttattgtcactcttctttttttcatttaggagaaaaataaccaaatatgaaagtacatgcaaaacaaatgtgaattatggttggtgaggtaacacaccagaaatgatttaaatttactgtctgaaattagtgactcttaactaaatatataaagattacacatttttttttttgtccaaacgaatcacacgttaaactaacagtaaagtaaaatttaaactatgtgtgttagtcatgtaattagttattta

SEQ ID NO: 197780 - DNA, 2121 bp, Cannabis indica
ggcattgagaagccacgtctgtagataaccctgtcgaggatgaggtaccgagcaactttcctccttatttttcttgcttcattcttgtcctctagtaggacttttgtttggaggtatgctaatattggtgtcatccatataggattgtcatcaagcatgtctattttttctgaaatagtgatgcttaggtctttcaagaaatgaatgggcacaaagttggtcttgtttgtcaaggtatttctagctagtatggcaagtgcatcgactgttgcattttcttctttgggaatttaacaagtcttgaatcttgctcaagtaggctaccatttttcccctcgggcagtgtactcacccaacacatgattgatgaccaactgagagtcattatttatgtccaattagtctgcccacacttcatgtgcaagctttagtctggcaattagagcttcatatttagccttattattcaaggctttaaaactaaacttgatttccccatgtagctgttgcccctaggtgtaatgagggcaatgccaccactagacaggtggtccgtacagtgtccatcaatgtgcagcttccaggttgaattttcttgctcttgctttttctcttgctctttctctcgcttcttctctagctcttgcttttctcctaaatcttaagagatttcaggagatatgcctttacattcagccatgaagttagggaggacttggccttttatcgccactcttgcttggtaggtgatttcatgttggccaagttcttttttcaacttgagtaaccagccaaatgcttcaggtttctgaagtacttgtcataagggctggtcagtgtacactcttattggatgagcttggaagtaaggtcttagctttctcgaatctaggagcaagcagtacgtcagcttttcaatgagtgaatatcaacttttagcatcaataagtcttttcctaacatagtatactgggtgttgaacgtcattttcttctctaatgagaactgcacttacagcaaactctgtgactgccaggtatatgcccaattcttcattgtctagaggctttgacatgataggacgttgagctagttgtttctttagctcttaaaaggtagtttcacactcctctatccattcaaattttttatttcctctaagtatgttgaagaaagggacacatttgtccgaggacattgacacgaatctgcttagtgcttctatacgacatgttaagctttgcacttttttttatcttcatgggcaaattcatgtccaaaagggcttggatattctttgggtttgcttctattctctggccattcactatgaagcaaaggaacatgcatgagcctactccgaaagaacacttgaggggattaagtttcatgttgtactctcagaggatcttgaagcattcatttagatcctctatatgccttctagcctttttggacttgacaaacatgtcatccatgtagacttccatgttatgaccaattcggtctttgaatattttgtttacaagccttttatagatagcccctatgtttttcagtccaaagggcatgactttatggcagtataggcttacgcctgtcaagaagctcgtatgttcttggtttggtgaatgcattttgatttggttgtaaccagaataagcatccataaagcttaggatctcatgaccagctgtagcatctattagctggtcgatccttggcagtgggaaacagtcctttggacaagccttatttaggttagtaaaatctatgtacactggccacttgttgtttagtttgggcactaagataggattggatacccaaataaggtataaagcttcaatggtaaagtcgttggcgcgcatccttttgagttcatcttttagagcttgtgcctgctctttatccagcaacctctttttttgttgtacaagtcaaaagtttggatttattttcagggcatgagaaattattgatgaatcaatccctacaatgtcttcatgcgactaggcaaatatattgacgtttacccttagaaatttatcaatgtagatttcattgttggcgctaaacctttctcgatctttaatttcctagtctgaaggatgggatcga

SEQ ID NO: 197781 - DNA, 1343 bp, Cannabis indica
accctcctcagagacacaagtcaaaatctatacttatggcatattcaacataataaagaaaatcagcaagaggagacaactcgtttccttagaaaggaacctcagggatcacaaagaaccaatgcaactaaaactccctgttctagaaggaacaatggagatttcaatccaactggtaaacagattccataaagacaaagcaaagacgcctatgatccaaggagatatgtcccactagtggaactagaaaataggaaactttgacaatacctgacttagtcaaactggaggaatgccgagttagaatggtaagcagcgacagccaaggctacacagggagtgactcctcaaacccaacctgatccatctacaaggcgaccacagggaaggccccgaggttctaggcccaggagataaaaaaataatcaaggaaaccccacaaatacttaggaagaacaacttgggaatacgagagatatcctaattaaaagagaaaatccaccaaatattggaaatataagaaatcaagagcctcgacgtgacattccaagaacttctcatggatttgcaaactaggggaatgaacaacctgatataccagaatcatctcgcatgaacgcaaatgcccaataggcatgacctggaaaccgagaaattctgcaagatgacaggagaaatattagaagtcaactagggacaggttgacccccaacacatccgcgaatgttttctcataacgattgagaaagtacacacacatacttgagtagggttatgtgtcaaaactcttccgaagaagaaggtcgatgcaagaagagtcacgtgagactggttcaaacacaagtcaaggtggatcaaggtcaaggacccatggggtaaacacaaggtgaaggtggaccacgttgttattataatgatcaagaaagtatgagtaactctcgtagtttctaatcagaaagttactcaaggactagatttgtgagtaattatggtcaaagacatcgcaatcctgatctccacgaatagttaaaccaaagacagtttgacctatgtgagcatttaaactgtaatgcaccatatttacgtaatcaactaaatcaaaatgctgaccaatagcatgtggatccaatacaattgctggtaaatacaattagaagataagttcaggaagtaccaagatggagaatatggaaaactaccgagatatgactcagacaaagagaaaaccaattcaatcttgatattttgaattcaaaaatttcctcaaggattcaaaaaccatcatgtcgcgcaatatgatggtacaactgatcctgttgcctaccggacaaacttcaacatca

SEQ ID NO: 197782 - DNA, 585 bp, Cannabis indica
agtgacatttcttgtagtgaagacaatctcaaagagcatgatgagtagtttcctcttctaccccacataaaggacataaagcatcagataaaagaccatggcgagctaaatttactttagtaggaatccaattatggataatttgccatgcaaaaagtcttaccttaggaggatggttgagggaccaaatcttcctccaccatccaggaaaaccattagatggagaggcacgagtcaaagccaagttacgacgagccaaccaatagccactcttgatggtaaaccacttggaattctcaaagttgcaaataagtttgtcagaaacatcgttagtggaccaaggaataaagagaatagtctcagcttctttaacaagaaaattagaccgaataagctctttattccaacctccctaagcgtcacgaagcaaaaagaccttagccaacccatcaagtcgttgaggagttgacacaagacccggtggaactgaaggaatccagtagtcggagtagatattgatgtccaaatcattctcaacagtcaaactgcctcaaaatcaaagagtcactacaacaataatggttt

SEQ ID NO: 197783 - DNA, 1176 bp, Cannabis indica
aagtcgaatacaatctttataaaatctacttatacaattatattatatatgatcatatatatatatatataaataaatgtatacatgtccacctagattagattctgttaagtatgatgaggatggttcagcttaagcggaaatgttcctttgaatattgtgttggatttcttcttcccttgatccaacaatcttgtccactactgtccaattctcagcaaccgactacatacatgaaacaaaaccattaattcataaaaagagaaaaaaaaaacttgattataatttattgcaaaaccaacataaataaagaagatagggacaaaataaaattaaaaattttggttttttttttgcgacactaaaagcatatcatgtggtgcagattcgacccaccctttcaacatttgtgcatggcccaaacctaaggtccgctaagtatagcctgataaagggtatcgttgttttggttatgtaaaaaattgtcatcaattgttttttttatacggtagaatatattatagttatataataagtgtttatcgagctttttagaaactaattaataaaaaattaagcttaaagaagaataaattaaagataatgcaacaaggatttttacatggttggacgttaatgagtcttagtccatgttgactcagaaatctggacagagattcttaagtcacacccgccaactagattggcgagaataaaatatttgttaagtaattataagagagacacatcaatttatagtagtccactctttgtatcgcgacggtaattgatctatgagatgttaagtacagaaaaaggctaagtatttcaactctggtttctggagagagaaactataaagagatgttcacaccttgtgggtaattttttgaatatacctaataattatttaattattattgttgattacgcccaaacttatcttcacaaagtaattgttgtagtgtagtatgggcagtcatattcatagagagatatcttatcaaaaaattattagtagagctttaagcgcaaaaagaaactaaatcattggtagtttttgaaaaaaatattaaaaataaaattaaagcaaataaaattagtagaaaacttcaataaaaaaagtgataaggtttcaagaatcacttatatatttggctcatttatttaaatttt

SEQ ID NO: 197784 - DNA, 1567 bp, Cannabis indica
tccgcctgatatattcctcgagaaacgggtttcgagcttcgaccttaatgccgagtacaatccagcgtttgaggaggaggacattgttgtcaaacatgaagaagatcgtatcgttgaaaatgccccattgttcagagagggcgaaatcgcgtgggagattgaagatgctggaaatggagactctgaaagtacagtcaagaaagaagctgaaatcgatggatattttctggaagatgacgatggcattatctgcgctgtttgccagagtacagatggggatccttcggatccgattgttctatgtgatggatgtgatctaatggttcacgcttcctgctatggcgatcctctcgtaaagggtattccggatggggattggttctgttctcaatgctcggtatcgaaagggtctcaaaacgacatgtcgttttcttgctgtttgtgtccaaataaaggaggggcgatgaagccgatgaacgacggcaagtgggctcatgtcgtttgcgctctgttcgttcctgaagttttctttcatgacccggaaggacgagaagggattgattgttcgaaggtcccaaaaagcaggtgggagcagagatgttatctctgtaaacaaactaatggatgtgctatcaactgctctgagcccaaatgccctttgagttttcatgtgacctgtggattgaatgaagatctttgtttagagtacagagaagggaagaagaagggtgccattgttgccggtttttgcaaaccccacaccgatttgtggattaaggtctggttttttattttattatgttatgaatataacgttagattttactaaatgggtttttatttatttattttaatttttttatctgtttgcagcaacaacaaactggaaagtacaagattgtagcaagagatgattagaagatggatcggatctgctagttagagtgttttatttttaatatagattgctgttgtaagttttgttttttgttgctgaaaaagttgtagcctttattttatttactttaaacataataggctgatggatcaaatagtaagctgtgtccattttcagctggaaaaaccattaaacacctggctgtagactgtagtgttcttagaacttagaagtctttgtacaaaatgggggtcaacagtcaacattacgagtggacaacctcctactgccaaagatagctggttgtgtagcttttattttggaagataattgatgcgtcttggaccttggtctctgatttttttgccatactaagtgacttgttaaacaaaataatgatcaataaaaaagaaaaaatcatgcagctcaactcaagttcatagtcattcatcattagtgtttgtgttaaaaacattacaagttacaagcccaaactgcaattgaactaaaattgttgcaagtacatacatatatggggctttacaagagacataagaacttagtttcctcaaattcgaaggctctttcttaatgatcccttagccaagcatcgcattgtcttcttatgtgaccctccataccacaatggtagcatttcctttcctcttt

SEQ ID NO: 197785 - DNA, 583 bp, Cannabis indica
tttgataaaaagtagtgagtgagttttttcatatcactagtcattttgattagtgaatattatatatgatttaataattcatcttttgtacaaatagaaattcataatttaatatttgtgggaaactagtttcaaaacctttacaattgattacaaacaataataaatagaaaatgagattctttccttctaagctaattttcttcctaaattaagtggaatggctaggtgtttttgtgtatttggccataatcttttctttgatattttgtataatatttggacatattaatattagtataatttacaatttactagattttgatattaactttttttttttttggtatttaagtgtttatatattacaatcatgttttatttggtactcgaacccaggacctccaaaacacacacacccgcttatggccacttgagctagctcaagtggttagattttgtatattaaattagactatatatatatatatatattttttaatttgtaatcttgtattgtaatatatgtaaccatatgagcctatctcaactctaattctatgtcatctagatgtagctcatc

SEQ ID NO: 197786 - DNA, 1843 bp, Cannabis indica
caaaaaaaaatagacaacaattattaaattagcctaaaaatatatagttgatacaatgatacaaatgaacattaatataaattgagatttgtcgacaagaaatttaacatgtcataattattttttaagtaatttatgttttgatttttttaattaattaaaatattaatgtgtcaattaattttaaaaatatcaatttaagcgcaattcctctaagtcataaacaacatatttctatgtacaatcacatttaacgaatatgatattaatgcatcattcaagtaatttctctaaatttctttttttccaaaatcaaaattaactaattaataacttgttgtttatcgagatttctgaaaactaaattaaaaaagagtttaaaaaattaaatatgtaattaagtgatagagatgatgatttttatgtggttcaagtgttaataaactttagtccacgagtcaatatattagcctaaaagctttgaatgtattgcaatggggtcttataagtagaagaaccctagcttatggctatagtgatttttctctgagttttcccttgctttgcaaaaaaaaaaaaaaaaaaaaaaaaaaagcctgaagaaaaattaccgagagttctgtcgtccccctttcatgaaagtataaaggggtatttataggctaagatttggattcgcgcatacccgtgactcgttagggttactgtgcaaactaggccaactattagggtaaatacatgaaatacacaacaataatacccacggcaagatacaggcttgtggagtgaaagtgtctgtacagatggggcccgcgcattctggacaggcgtcacgcacgggcattacaacaatagacaaagatatcagacaaacactgttggacaaagatgatgtattccttttggtggtgtgcgcactaccatgtcctgacatataagacaagatttaatttcgtgggaccaagcgttagagggcagccacataaccttgaaaatggattccaaaagcgcctcttgggattcctctctgagtgcctcaatgttaacctagagggtttcgcctattctgcctttaggaaggcagggactcttctgaatttaagtaaatttggaggcaagacttctaggctttagatggactcgggcccatcttctatctagaccgggccttcttatgtggaagggctttgatccaagcgtcgatctcctgctctctcattctatggaagtcccattcctcatctatcaaaaaatactatttttacccccaaagatttcaacacttgagaatggtgaaagcttcactacaataaatgtcactattgtcgggacatttgaccaaatacttcagcaaaagtggtcggtaaaagtggcttaccctaggatgaaaaattttatccaacacttttgtcggtgcatatttgtactggcgaaactctgtcagaaaaaaaaattagcttttaggggggaaattttactttagttggcacaaatatgcgccgacaaaaggtccaaaaaaatgagaaaattctcgtgttaaaatatggtaggtgggaatactttaccgacgtaaatgtgcgccagcaaaatattaccaaaacactgtgtttcaattagggtaatttttaaaccttttgtcggggcaatataagcttttgtcggcgcaacaaaatgcgctggtaaaagtctatatatataacatgggtgaagcccccccccccccccaccatcgccatttcttcttcttcttcttcttcttcttcttctttttcttcttccttctgtaaatttttgcccaccaccacacacacacacaaatatctgcctctctctctattctagt

SEQ ID NO: 197787 - DNA, 662 bp, Cannabis indica
aaaaaaagtatgtacttgacttgttgacagagacaaaaaaagttgggagaaaagccttgtggtacgccaatgaatcttattgtgtaccttacaagagattcggagaagtctttgaagaccttgaaaaatatcacaagttggttgaaaatttgaattatattaccgtgactcgtctaacattacattctcaattagtgttgtcagtgttacttaaaaggagcaccagggcgatgtatcatgtacacagatcatgggcacacgctcatattgagtgtttctcagatgcagattggacatgtttcaaagtggatagaagatccacttcatgttattctacttttgttggagagagtttggtctcttcaaagagtaagaagcaaaatattgccccgtcctgctcacaagttgactactccagtcttggccaaactttttggctggctcatactctgtttaaggaacctgtattttcgtcgtatttgttactttcttccaataattgggctcttccaactatttgttgtctaaactacgaaatcatggccttcttttctggcggagacccttttctggcaaaatgttgtgttacaatctagtacagagtcaaaacatagagctatgacaatctatatgtgaggtaatgtggatatatcaactattga

SEQ ID NO: 197788 - DNA, 917 bp, Cannabis indica
gtgtgaacgtgcaaaaagtttacaagattatctatgaacgatactaaagcattagaattaagtcttaaaatgctagaactaaccaaaagcgcttgattttctgcattaacattttccagaaatactcttctatgcaatctctgttgctcaacttgaggattctttgctaagactttgcgcatatcagccacaatattctgcatagagaaaaaggcaatcagcatggatattccataaactatgataatccggaacaactaagtgcaaacatagaagcactaaaatcaaatcctcacatttatcttatggacatctaagtgactaatcgcaaggtgggttttgatacgccaatgagttttttgactgagatttctaacaacattcactgtaaatttatggtttggaatgtgaactgcttcacgatcttcacctctaataattgttggtgaccaccatcccacgtgctgaattcaaccaaatacagacagtaaagttaaattattacttcatacatacattaggccaatgcattttactgggatggcaatggttgtgtaaaactcaaatacaaacctcaacagtaccagaaacttcatagccttctatttttgtttgaatccattcattcataacaaaaggtcgagttgcatgaatcattgcacttgaaaggaaatttgtaaatatctagttagcatgagaaaaaaaacaaacgtgtcagactcttaacaagaaattcaattaggagaaaaaaacatgaaaagataaataaataaaaaatgttcaaagaacaaagcacctctcgaccagccaatgtcaacaatactgtcccaagacctccagcagtaacccacttctgggtagagaaacccaacaactccataaataatgaaaaagcagcaatccagactgcggaataa

SEQ ID NO: 197789 - DNA, 1376 bp, Cannabis indica
gtagagtgttggatgttgggaattagttaactctatctcaacaattgaagttaattcatcctttcaccaacaaagagatcaagaaggcaatgctcaggattccgagttcaaaaagtctgggtccggatggttacaactctgagttctttaaggtgcttttgtttaaaattggagctagggtgtgtaatgctatcaaggatttttttaatactggtatcatccctgctcaactgaatgaaactatcattactcttgttcctaaggttgaaaatctgaagagatccattgattacaggcagatcgcttgttgctccacaatttacaagtgcatcaccaagttgatatgtaaaaggcttattgaagtgcttccttggttggttcatcaaaatcagggagagtttatgaagaatagatctattgctcacaatattttgatattccaagatctgataaagaattatgggagaaagattgtctctccttgatgtgctatcaagatagacttgagtaaagcctatgacactatgaactggggctttgttgaagacttacttgttggattaaactttccagctaagtttgttatgtggattataaagtgtttgagaggcacctcttatactatcatgatgaatggaaggttccaaggtaatttcatgggaaaaaaggggctgcgacaaggggatccgatgtcccctctcttatttgtgctcatcatggagtatcgctctaaaaggtttgttttggtatcctctaaaaaatcatttaagtttcatcctatgtgcaaaagtctaaagttgattagtctttgctttgcagatgatcatatactctttagcaaggggactcctgaggcagtccaccacctcaaagttgctttggagagtttctcggaggttacaggattgattctaaataggtataaatctttagtttattttgggggagtctcttttggtgataaagctgagactttggaagatttacaattttgagaggaatcttttcctctcaagtatcttggagtgcctctttgaccaactaaatggaagagagaagattgtgatactatcgtgaagaagattaaattgtggctgaacacttaggcaacgagacatctctcctatgctggccgaatttagcttattcattcggtgttcttagggcttcacaattattggatgagcatttttatacttcctcatactgtgatcaaggaagtggaaaggctttgtaggggtttcctttggggaaccaaggtatggaaaagcaagttccacttggcttcttggataaggtatgtcttcctaaacattttggtggtcttggctttaaaaatggggctaattggaatagatctattctagggaaaattt

SEQ ID NO: 197790 - DNA, 755 bp, Cannabis indica
cttaagccacgcaatattctcgctgcattaatatttggaaaaaataaatttttatcttgtaaagcaaaatcctagttaaaaatgtaacggtcagagtattctaagcatacatgggacagagaaaacctaccacagtcctgtttgaatgaaacatcggcagggattaacgttcgtagctaattcacatacccaacaataacacttctttagtacatttcaaatgttgaaacagatactaatttatacaccaaatgaaagttccaatatataaatatatatatatatattatatacacacatatagaaagaaaaaaacggacactcacttttaaggacctcaagtcagccattccattggcataatcatagatcatcttcgagaaagggtcaaagaataaactgtttcaacaattccacaagaaatttcagaagttagagggaaattaaactaaagtaaaagagttcacatagtaaggtaagtgctttatctttgctgccatattctgatatgtactaaactagaagagaggaagaaacctgtttattgtatagtctcgcttcaaggagttcctccagagagtaaggtcttttttcccaaagccacgtggtgcttgagaagaatgaggttctgtttttttctcagcatgtttagccactgtttcaaaactagacacctgtttcatgaatcagatgtaggaatactaaaattgaaaaataaataaataaatgggtatgcagcaccaaccaaccaacct

SEQ ID NO: 197791 - DNA, 913 bp, Cannabis indica
taaaaatttgatgatgggaaactctgtggtctcacaaaataatccaacctgtaataatgggaaagttattctatgggatggttcaattcaggaattggaaaaccccatcaccgcggcggagctcatgttggagcaccctcagcaagcggtggtcgagttccaatccgccgttacgggaaaacgaccgacgccattgccggcagacatgaagctggagactaagaaaatgtacatgatggttccgatgaagcgagggagaacggcagctctttcttctgaggaaatccaccgacttcttcttgtgacaaattcggttctgagaagtgatcgttactcatcggtgaagtttttgcctctgtttgctagaatttgccccgtggattatggaggatcacttggggttttggtgccgaagatcaaggaaaagaagaagatgatcgatggtagtactggtgatgatcaggagaataataagacaaagtatgttcctttggaaagtttggaggagagtacgccgccggagtatttgacgaggcagttctctggcaggggttggaaacctagtttggacactattgaggagaaggtaacggtcgacaagaagatcactcattggttgttttagattctctctctctatatacatatatttatatcatggatataataagttgaattggtaagtatatgtaagatacacatatattaaaaaaaaataagagtaatgggtttgaattagagttttttcgtgataatattttgcaaagcaaagtaaattaaggtacccacactattagagtggacgtcttttatccggatttttaagttttttttacgtaatttcacacttaaatggaactgtgttggaaggtttttatatggaagttgtgtttaaaaagtttttttttttttt

SEQ ID NO: 197792 - DNA, 795 bp, Cannabis indica
tttttttatctgaacatatatatatgaaaatacatataaattttttttgtctgactatcctcaagagtggcttctagtgcctaataacaatgctaaaaaaatttaaaaaataaaaaaaagagaagagagagagctctatttcatataattgcaaaaaaggagctataatttggtttaattacctgaagggcgaggttgtggtgcagtagtagaattggtctcttttcttggatgaactccagttgtttggccagaccttcttatgtcaattgatctctttgttgttttctttttactttttttaaaacacgaaaagcaactcatttctttccttctttttttttaatggtaaattttcttatctatataattttttttttacatacatggacagaagaagaaagaagaagaataagagatgaaaattatgagaaaagaaatccagtaagagaggtttacctgagatgaagagaagaaagtttttggaccaaaaaaagcatagcaacgaaaatgggttaattaatttgaaggtgtttccgcataaaatggtgattttaaagaatgaggaaattaataaggttaaaaatataatgcttaaagattctttgtagggagaaaaacatgggaaaccaaaccaaaccaaactcaagtttataagtttgtttttagatcatcctaattatatcatttttagttaataacttatattttatatattaaatttaaaaaagaaatattaattatgcaaaaatagttaaagaaagagttgattattatgatcatggtgatcactaa

SEQ ID NO: 197793 - DNA, 587 bp, Cannabis indica
tgatatattatcagttctgttttccctttaaaatgatgaaaagaaatatgaatgccacaaattttttaaatgagatttcaaaataaattcagtataaaatatatcatatcatactaagtacaattgcagcaaagttgcacatatattattagttctgttttccctttaataaaacccttgagtttgtcttttaattttctttctttatattataatgtatggtgaacttacactgttgctgtatactttacctgttttggcattcaaagaacaaaaatgtgttttagtctgattttgtttcttcataattatttatatttgtgcaaaaagttatccaattcaattataactgaccaattgaattgaattggatatcaattttgaaaactcaatcggattggattggttgttggatgagacatttgattaataatcgaattgaattgatttaattatcatttaattatatttatatatttttaaaatatatttataattttgtacatttaatatatatttaaaacatgagattaaaaaaaatatatccacgggttcgggtacccaccgcccctaatggggtgggtacg

SEQ ID NO: 197794 - DNA, 1415 bp, Cannabis indica
tcactcaattaacgaaatttgattatgaattcccatccactcaacactctgctcagaaggctaccttacaaaaaaaattcaaaacaataatctttttattttacctttaatgttgaagcattttcaacacagttgccactcccataagccaagtgtgcctgcaataaaactgttgatattgttagtagcacttcagttcaaatattttcatattcaaataaaaggatgctgcaaatttaaacaaaattttacataaataagagatatctgtttcatacaattttgagaaaattaattgtaagaaaatatattttctaggattacaaaaaagtgagaacacatattttatttaatgaaataaatatccactaattactccagccttcagcatctgttccaaacacatgttttatttaatggaataaatatgaaagagcttgtattctcgatcaaagtagagtaaactgctcctaaaaatcaaataagggaatgtgacatatgaaaggagtactgttgatcaacaaatacatagtgtgccaacttaagctcaccaacagctccaacaatgatgattgagagttgtatcattatgaaaaaagagaaaaacaattcataatttgctaagaattaattcctaagaatcaaatatcaaaaaccaaacaataaataaatatagaaacaaaatgagaacaaataaattgaaatgcgaacttgtctggcaagatgatcaatattcaatggttcgatagaagtagcgaagaggaattcgttaatcgattatagtttccaacctaatttcaaaaacctaattgcaaatatagatagaaataaaatgagaacaaagtaaaatcaaaactctgttacgcaaagcaacaatgtatattaaagtactgtctagatatacatcaattaaaagaaaattaaaagtgagcgagactaaaaatttctatgaaatagagcaaatgattgtttgagaagacaattttgtccaattggatgatgatgatccaaaatttaatttcagtttaatctacaaacccttaaatttcagaattgctagataataattaaacaaatgtaaaagtgagaaggatagcttacctagccagagtgaagaatggagatcgactgatgaagaacgacgctagctagaaatgagacaattagattccgatgccgataaccgccatggcagctagaactgagacctttttttttcacgaaatgggttcatttttgttaaccgtgagcttaattttattgggcttttgaaatcagagagtccatttcaatttagacatccgtaaccacgtacatatgtatataatataatacttttttaataaacttataagcatgtattatggaaaggtatatttgttgtagtgataattagtttaattttttaaatatta

SEQ ID NO: 197795 - DNA, 1160 bp, Cannabis indica
tcttggagaagcattttgtggggctgtgagttgctcaaacagggtcttatttggaaggtgggtaatggtatgagtattcatacaattgaggatcattggcttcctggttgtcgttttaagtcccattccacttccacccctcccaattagtctctttctttctttctttccccttttggagattgggataggggtaacctgaaaattttttttgactgtacacttgtggaagagatattacaggttccaatttctggccacaattgcaatgatactctgatctggggcctggacccgacagggctttttacagtaaaaactgcttaccatctagcccttcagtctcgggatatgcctaggtcctcctcttttgtttccaacaaatcttttttggtccaaaatttgggcctcggtggcccctcctaaaattaagcatcttatttggcgtgctatttctcattctcttcctgtggcctcttctttgttttttagacacatcattcctactcctctttgcccggtttgccagttacaatcggagactgtggaacatgctatccttgggtgtaatcatgcttggaaagcttggaaacattcaaaatttcttaatttttataataaccataaggatagtactttttgcttgtttttggccagtgctctagactattatactaagtttgattaggctttgttgttttgttttatttggtcgatttggaatcagaggaataacttatttcataagaagacaggcctctcttcgtaccaactttttgattatgctgctaagtatttacatgaatatattcatgcccatgctaagcagttgttgttgtctcctcctgcaaagcatcagaatcagagagaggtgcagcttcctactgggcagtagatagtctatacagatgcagcagtagatttgggccacatgaaacacagttatggagttgtggctattgattgtgtaggctgttccagagctgggtttatggctccatgttctggtgtagtttcccctgaggtggcagaaggcaaagcaatccttgtagctcttaagttgattcaagcgattcaactccctgttttgactattgcctcagattacaaaagtgtggttgataaaatttataattcttattgtaataattcttgaaaaa

SEQ ID NO: 197796 - DNA, 619 bp, Cannabis indica
ataaggcattgatttgaaatgaatgatatgctaaactctcttataacatttgatatgtgttttatgtgtgcttattttatttggcttgttttctatgctgtgattgttagaactaaatctttatgttgtgattaattagaacttatagataatttattaaattatttttatcatatattttagtagtcacatataatttaattaaatcaacattataatattatgaaaaataaagaatattacacaaagtttgaaatggaaatataaaagtaaattttttaaaggacacattgtctctagtttttaaaataaaatacttaaaaaaattagtaaattatatgaataaaattgtgtttatttttaatagtgaaacaatttttttaacttaaaaacacacaattttaacttgattcaaatttgttaatgaaaagtattataatacttcaataccaaacgttttataattgtaatatatattccaattcattaaaagttcctctaatgcatctaccctaaaagagaatccaacacaaaaaaaaagtctaaagcttcaccattctctcagattgagaattgattaagataccaaggtgcagatgacacatactaaggaatatga

SEQ ID NO: 197797 - DNA, 1619 bp, Cannabis indica
tcattactttcaaaatgatcatcaatctctcacctacctaatggatatgagtcatccttcatcgattcaccatgccaataccatttagtataacttttatcaattccacgacaaaatacacgattatttaatatggtaatattttattttgatatatttgttagacatttatatgcatgatatgaagcaatatgatcatgtataaaatgcgaaattaatcaaacatatatgctctatgaataaaagatcaaaatacctacaaccatcgattatttgagcttcaattccacactagttttgaatttgcaaaagaaaagaaaactgattagtgtgtataatcaggcttcgaagctctctctactctcattagatggatttactgttttcacagaattagtaatgagctcggcgaccgagatcctatatttatataggtcagacctgccattaaagtctctaccacattaattgttataatattttgacaattaattcaagaaagtaaattggaaaatcaaatatttgataaatcgtaatctaaccatatataaaatatcaatcaattaattgtgtccagagtcaattaatataaaatatttatttatctttaattaatttactgattctattactataataaaatttattttaatattctctcacttggtcaatatttagatttaccatttaaacctaacgattatccttgttgtataacaaacatataaatcatgactaggggtgtgcataaatcgatccaatccaatgacaaccgaccgatctaattacaaccaaccgccaaacattggatatccaattgtgatcggatcgaattggatgttatttttgaatatccaattggatcggatcggatgttggatggagtgtttaaaaatccaatacatccaacatccaattaaactaattagtattttcatttagtttagatgagtaattagattttataatgttatacgtaaaatatatatgtatacataaaaattaacgtcaaaatttaacaaaaattaacgtcaaaatttaactctttttttcttggattggatggatccagtctaatccaatacatattggacctaaaatattggatggatctaatccgatccaaaaatactagtttaaaatattgaataaattcaaattgaaccaataagtatatatgaaatacatccaatggatagaaccgatccaatccaacatccaatggatgttggatcgattggatgactgaaatcaattggatcggatcggatggtaaaatctaacatccaatatataattggatcggatctggatgggcctaaaaacattggatgtgatccaatgaacacccctaatcatgacgatatgtcctcattatatggcaagtattatcttccatgtattacgatatattcattacataacaatgttctttatgtagcaatgtacttaagcaaataaagcataaaccttatgtttattctagtcctcttacgataattttctcagataaaattaaggtgcatgtaaatatgagaaaatatcaaaattagagtttcattgaataagtttagttgtccaactaaaaaaaacaaaataaggggtaactgaatcccata

SEQ ID NO: 197798 - DNA, 2417 bp, Cannabis indica
ggatgaagatgaagagatgatgaggacgatgaagatggagttatactgaggctggaagaggggcatcaatggggattaatgtgtttgaccatattgaggtttttggtagagatgacaattttcccaatgaaactctccatgtgatgcctgtagaagtttttggttctagacgtcaagggcgcactacttccatttacagtcttttgggcagaacaggcgagaatgctgctccatcacaacaccctcttttggtggggccatcactgcacccaacccctcctaggcaatcaggtactttttttttcttaaataaaaatcattgttcttggaaatctgacttgattttggcattaaactaatttattcactcttaaaataaagaatttgatccgccttctaaataaaaatatcttttattttttataaataaacaaattatttcaagttactcccccccctaaagaaattatttgttttacctcaattgctttttgatgctgaaaattcaatatttcagagcttgctcgtgatgtggtcactccagataggaatttggacaacacctcatcccaacttgatgcaatttttcgatcgctgagaaatggtcgccatggacaccgcctaaacttgtggatggatgatcaccagcaaggtggtggatcaaatgcaggtgtagtaccccaaggccttgaggagttgcttgtttcccaattaaggcgacctacccttgacaagacttcaggtcagggcacattaggacctcaaaacaaagatgaagttcagttacaagaatcagaagaaatagcgagacctgaaaactctgttgagaataatgtggatgatgaaagtcgagatgtgcctgctataagtactgatacttctagaaatgctactgtgagacctgctgcaagtgaatctctacaagcagcagatttgcctagttcacaatcacaatctgttgagatgcagtttgaacataatgatgcaactgtacgggatgtagaagctattagccaagaaagtggtgggagtggggcaactttaggagagagtcttcgaagccttgatgttgaaattggaagtgctgacggccatgatgatggtggagagaggcaggttgcttcagatagaacaccattgggggatccacattcagctcgcacaagaagaacaaatgtttcatttggaaactcttcaactgttagtgcaagagatgtgtccctgcatagtgtaactgaagtttcagaaaattctagccgagaagcagagcaggatagttcaactacagagcagccaataaacagtgatgctggttctggtgcaattgaccctgcattcttggatgctcttcctgaggagctgcgagcagaagtgctatcagctcagcaggctcaggcagctcctccttctactgttgaaccacaaaatgctggagatattgatccagaattccttgcagcccttccccctgacattcgagctgaagttcttgcacaacaacaagctcaaaggctacaccaatctcaggaactggagggtcaacctgttgaaatggacacagtctctataattgctacatttccttctgatttacgcgaagaggttcattttcctttttatattttctgttttacatattaatttacagttttgctctgttgtgagaagtaattgattgtttctttttattgttcaggtgcttttaacttcgtctgatgccataatttccaatctcacacctgcactaattgcagaggcaaacatgttgcgcgaaagatttgcccatcgttacaatcgtactctgtttggtgtatatcctagaaaccgtagaggtgatacttctaggcgaggggatggtataggttctagcctggaaagaattgggggcattggtcctcgtaggaccacaggaaccaaggtagttgaagcagatggagttcctttagttgatacagaagctttacatgcaatgatacggttacttcgtattgttcaggtaagaataatgattcatcacttctctatgctttctttttctctatgttcagaaaactaatgtatccaaatttatgcagccattatacaaagggcagctgcaaaggcttctgttgaatatatgtgctcatagtgaaactagaacttctcttgtgaaaattcttatggatatgctcatctttgagacaagaaagcctatgaatctagtagctgatgttgagcctccttatcgactttatgcttgccaaaccaatgtcatgtattcacgccctcaattctttgatggtgagacctattttctgcaaatgtagtaaattgtttaatattataattttacttgtgtagggagtgaacgtaattatttgaccttgatactcattttataataattatttgaccttgagaacttgcatgtgttattt

SEQ ID NO: 197799 - DNA, 4330 bp, Cannabis indica
ccttgactttgtagtcaagaacagcacatgtcagtttggccttcaccaaaagattgtgtcagacaacaacaagcaatttgatagtgatatgttcactgatttttgtaatagacatggcatcatcaacaacttctctgccgtggcccatcctcaagaaaattggcaggtagaagctgtcaacaaaaccctcaaggacaccttaaagaagttccttgaggaagcaaaaggcagctggcctgaattgttcctagcggtcttatagtcgtaaaggactaccaagaagacggccactaggcaaaccccatttgctctagcttaccgctgcaagggatgttgcatgtagagctagtgccactgtctcatagaagaataacatatgacgaacaaacaaacaacaccctactggtagagtcccttgacgaagaaggagaaagaagagaacaagccatcctaaagatataggcctcctagcaaaaagtatcaaggacttcaacaaacacgtcaagagaaaaagattcttcataggagacatggtgctccaaagactaaagactcagcaataggagtgtatggacctaactgggaaggcccttatcaagttacaaatataactggtaagagagcctacaagctgggaaggtacaacgagaacatggagcttgtccggaaaaaatgttatttttttatatatattaaaatgttttatcgacgagctcatgcgccactaaagagtaggtgccaaattcgcgccaattcttttgtcggtgtgttaactcaatggcaaaacctcgtcatggtgacctcagccggcggtcctattgccagcgtttcacttatgattgctaacaaattttccggtgtaaatacttttctcgacaaatttacccactgcaccgacaaaaggtgatacgccgacgagctattgtcgtcaccctttgctggcgaaaaaaggcgccagcaaatctttgccggtgacaaagatgatatccttgtagtgttaagaccccctagagacatcacaagctgagctgagcttcatcagggcctaaaaacaaaggaaaacaacatcagtgtcgaagatcacaaaactggcctgccagtcccctctttggactgctatggccggccagccctccatataagcttctaaggctgaccagccacatgcaagaagcaccatggtcggccagtctttatagtaccaagaagatggacagagctaaaagtacaacttaccaaggaatgatctcaaagcccgatagagtaaagcctgtcaggtccacgtcacccagctccttcagatccttgtcaaataaagaaagagccctctttatgcaccaattggctgactcaatagccttctaacctgcaactgacccttctcctctattgggcctccgtgcaccttggtcagcaggctgtatcacaggctgtctggctggtgctggccttggtggaggggaggcagtgatggtccgacagcatcctcaccatgggaagtcctggccactttcgccctcacctgtcggataggctcatttgaaggtccatgtcaaagacctctcaacttagaagacatgtctacaaagataaagtagcaaactcaacaagcattcacaaacatttaatacaagaacaaaagcatggtgttatcaactatcaaataccatcatcatcagaagaggagcaatcaaaaccctcaactgcagccttgcccttgcccctaggtgtaggcacgggatgtgtatgtctctcaaaaacctagcctctaggcccaatatgaagggaagtatcacctactggaccctcgctgtccaagcaccgacggagagccttatctctcctctccaaatttgatgcaatgtgagacaaaggtacttcatcataatccaagccagggccttgcgcatctctacagcaggcctcatctacagttggcactcttacagctctaggagtaagagaataccagccataaattcgaaaattgtcgacactggtcaaccgcgacttgccaacctttgacatggttgggtacatctcaaagtaagtagcgacgtctagaaaatactggtgaagcagcaacactgccccatgttcaatatggcgcccagaccatgccaaccggtttgtagagggcctctccgccctagagtttctaaggggagtttcacaatggacatcccctattaaacagctagtaaggatcttactgaaggcctcatcggagagagcagaagtaagaaaaatccaaccaactttaggtggtttggcatcaagtatctcttgatcaggaggctacttttggacatggtccagtcctagttctgaaggctcaccgagtccgttcaatggattacctcaggcgtcataattgcccaagggatagttagggaggattgaacatgtcatatacctcgtcctcctcattggagaaacctcctccagcttagattcttcatcaaaattctcagtcccttgaatccatctctggctgagcctcgataagaggttgggcagtctccccctacattctaactcgaccccttgtggtcaccatggccacatgaagatcatataggggcaccttacatagagtctatttcattcaaaccataattatgaggtaaacaagagatctacacagttgtcacctctcctattcaatgcctgacactaattgcatggaaaaaataaggggaggtgataaacctgacaaagctacaaatatattccagtcaatggcaccaaagggcatctttaggtaaaataaagtgtacaaggtttaccaatgaccaagtaccgtcttaggtacatttactaagacatacagtaagtccaaagttttacaattgactataatggactcattacctatccttatatagagtttccaatagaaaccactcataaggccacagttgtatatgcctccaatgccatcacgagaccgtagccgaggtcaaagaagggagaaaaactggctgcccacttggagccttgaccagctagggttccaagtcctagtggacggccagagcccaagacccagcctagtggctgcccaagattcctagttccaagcataggccagccaacctaaggacataatctccatggccaactagagcccatgaaagccacctatgtccaacaaagcttcaaacaaagcctccttggttggccaagatttgcttggactagaacacgtgttttttcaagaacttaaacatgttcttcgtcacgcaaagatccaagaatcataacaaaggtcagattcagttcttttttgtctagaaatcacacattatccatcctaaggctatcatgcgaatcaaaataccgaatggactacaatctaacgtaagaatcaaagcatgctcaaaataagaaataatgttcgtgaattcaatgaaaaatcaataaaaccaagtgaaatggcgacactagaaagcttaccgactacaggatttcgatggagaagaaggtgggaagcttgggttgtctaaatagtgcaaaaatactgagaagaatggtgcttgtggattcgaccaccaagagagaaagaggagcgttatcttttcttgtgagagaaagtaaacgtgaaaaatgagaagtgcaaaaagggttcccccaaaagtcacttatgttgtaattgtgggccccttttcctcacttatttaacctacacattattaaggcaactaaagcagttatttctctactgcaatgagatcagatagtcaagacaaagtgttttaaaagtgcataaacttttattcaacaaaggctacaatagtcctgacaacaccaatatagttgttaaagaccctatccgtacagacgtccgcacaaggacttgggaggaaaatgttatcccaatttttatcctcagtaagtggcatgcttacattgacaaacgaatatgccgacactcatacgagcatcaagtgatagaccagctccctctcaggagctggttggccaaccttgggatttcaccatggttggtcagcctagcctccagaggcccctggcaagccaagaagtgcactgcaggctttcctggacatttctacacgtgaacaacaggatatgggctacgaattgggccctaaaagcctaaataatttgctaaataatatatagaatcaaaggcaataaggtcttttataaatatctaacaaattatgcacaagttaatagatttgaattgtaaacatagggtttgaggcttcctatataaatgccttaaccttaagctaaaaacctaagttgcctctaagcagaggcctgctcctaaactttaagtgtctaataaactctctct

SEQ ID NO: 197800 - DNA, 1673 bp, Cannabis indica
ccaaaggaatgctcttatataattttattactaatagtaataagaaattaattatatcatcatgctatgtattgcttaattcctctaattaataactaaaatgtatacttactttattttttttttttggacttagtcatatatatgggccatatgacaacatattttcaaccttaaaacttttgtacaaaaagaaggaataaataataataataataataataataataataataataataataataataataaatcattttatggaaaggaataaaaaaatgcgtgaaattttccctagtcaaatcttgactagataattaaaaaggaagtttataagaggaataattatgttttgctaaaagaaaattttttcatgaactatttgactaacacaaatcgctaaattaattggtaatcattgttgtttattatagttaaaacatataatttgattgaagaaatgataataatgatatgatcatactacattataatatagattttttatattctactaaataatgctaagggcatagattttttttcgaaatgaaattcagtaatgaaagaaactaatataaaagaaatgacatgtcttgctcaaagcacatatataaataatatgcctacatatatattttaggattagttttgtaattacatgtagattgaatagatgacaagaaaatatagtgaggtggttattatcgataatagtaaaatttctatttagcctcaaaaacatgaagaaatttttttaatacttatgaaagaataaattttgaaggaaaataagaatattacaacatttacaaagcaatcgtaaaagcgtataaagaatgagttttagtacaagcgatcaagagaagttacactgatatgcaattaaggaaaaaatacaatctattaagacaaaagcacaatgatttcaagtctttactaaaagacgctggtataggaatatttagtttaacaacaagacaagttactacaccagataaagtgtggaataggcttattcgggtaaaaaatatttttaaatgaatttatttcttgatttttaataggtgttagtatatttatcattattattttattttatataagttaacaagtcagctaaaaaatttaaaataaaaagttgtgtactttatgaaaagttatgaccaatttttagtaataccactacaactggttctaatactcatccttcaactaacagtcattctataaatcttgataatgatgatgatgatgctatgtcaaggagtccatatattaggaatcaaaaaaatagtttgatgaggatggtagcaaaagaagaggtaaattaacttccactacaagttttcgattggcaaaaaaagtaaagttctcactcgcattggcagaaatattgacggtgtataatgaaaccgcaaagcgaaagataaaaatgtaagaatttaatgacatcgacaaaacatcacttattggatgagtatattgaagctctcattcaaattgatggaattagtggagaagtatatgcaaatgctattgagaagtttagatcaatgggaaagatcgggtaatgatgcacgaattcttttagaatgtgtcataaacccagaatatgaatgtgtcataaaccccatagtaagtatcatcaaacttattatgtttattga

SEQ ID NO: 197801 - DNA, 552 bp, Cannabis indica
aaagttttgaatcttgctccaagaaagaagatttcttcatgtcaatgggacgcctttttgccatcatttgctttggcctttcaagaacaccgaagaaaatcgagcctccgataccaatacaaagcactcttagggcagtaccctatagagaaatatatacccaaagggatattgataaaattgtttgagagagaaaaaaaaataactagtatttggttggttagaagattaattatctttgactgatcatttaacttagtaatgaacgaaaagagagagaaaaaaaatgtgacactaacgggacattcaaaccttgaaaaaaatgcgactgccttcttctctcattatactcccaacacaatcgcagattcccttatattgttttgttgaccccttcaaaagttcaaaaggaagataaggtttatgtacaaattattctcaaagaagtaataatctgtacctgaaccattactcgggtttttataacatcaagaggagtggttatagctccagtgatcgcacctgcgagatgaaaggaaaatattgaaattt

SEQ ID NO: 197802 - DNA, 1355 bp, Cannabis indica
tccaactggaacccgttttctcattcgttatcctcggttttaactgttaagcttgatcgaactaacttcttgtcttggaaatcacaggtgattcccacggtgatcggccatgaattagatgacattcttcttgctggtgttcctccgttgcagactcttgtcaatggcgaaccgaacccagaattaaatctctggaaccgcaaagaccagctcctcttgtcatggctccgatcgtcgatgaccgaaggagtcttagcttctgttgcaaatttttcctcctctcatgcggtctggcgtgctcttgaacaaaagttctcaagccagtccaaagctcggttgttacaactcaagaatcaattttctaatattcgcaaaggaggccagtccatttcagattatgttgacaaaactcaggccattgctgactcccttgctgtagccggttccccaattcttgatcaagacttaatcttgcaattgctaaacggtctcggacccgaatatgatcctgttgtctccggtattactgctagaagtgatgttctaacatttgaagaggttcaagccttgttactgtcccatgaaactcggcttgagcatcatagttctatcaccgattccaccctcaaacttcaagctcatgttgcatttactggctcacgcaacaccccttatcgtccacctcaacaatcgaagtatggcggcagaccccactttcgaacacagcatcaacaaaatcggcctctctgccaattgtgccttcgatatggacacaccgcaccagtttgtcactatcgatttgataaatcttgggtcacacccaaaccaggaacacatggcccctcttcatcggttcccaacaccacacctcgggcatacatggctgagcatgaagtcgagtatgaccctcaagcatttgccacctctttcattcctgactttggtgatgattccggttggttcgtggatacgggtgccacaaatcatgtgacaaatgggcttgataaccttgacactgcagcaacatatccaggaaatgaaggtcttgctgttggagacggtaagaaactactaatatctaatattggcttagcttctttacccacttacaattctaatcatcttaaacttaaatctgtccttcatgttcctgcaataaccaaaaacttggttagtgtatctcaactcactaatgacaattatgtgtttcttgaattccataaatcttgctgctttgtcaaggacaagcaaacagggaaggtactgctcaaggggacacttaaagatggcttatatgtgctagaacaagtctctcaagaatcaagaaaggctaagttgcagcagtgtgcatcgag

SEQ ID NO: 197803 - DNA, 1562 bp, Cannabis indica
ttcaatgttgactgttaaggaccaccgcttattatgctccattttgcgtcggtggcataaactttaatcttagaaactgacaataataataatagctgactattttaaacagtcgcctaatgccttttttcaatagtgtatataaaatgcaaggctattagcgatgatttatgacaatcgctaatgaatagccgactattataaatcgtcgactactccaattatagttgactgggacccactgacgcgtataatcaaaaaaacataacaatgtaactgttttaaacaggcgagaaaaagttgtgacaattctaaattatagttgtcggtttctaaatagttacataattttttccctgtgggtcctaaaaaaacaattttctaaccaataagaattctctatttttttcctgtgagttgttttagaattactaaagggattctccatgagattgaaagtttgatagctcatttttggtggggatctactaagaataaacataagttgcattggggtaattggaggaaactttgcaagttgaaagagcaagggggaatggggtttcgtgatttagaagattttaaccaatctcttttggctaaacaaggttggaagctccttactacaccagattgtttgcttgctagagttctgaaagccttctatatgatagtttttttgaagctaagttgggtcactttggtcctcagtttggagtggtattctctggggcagagatcttttaatgaagggctcaagatggtgtgttggagacgggcgtatgattcgaataaatgaagactcgtggattcctagaagctttcccttcactctccgaaacaagattcaaattcctccaaaggtcacaataaatactctgctgcatcaaaatgggaattggaaagtaaatgaagtggtaagttggttccatcaagatgatattttccttgagtccttgaaattaagccttccataaatagaccagattggattacatggagtttgactccaaatggtaattactcggttgcaagtggttacaacttacgatttcgcaatcgggacttagccgaatgctcatataattccaaagttaaagcttggtagaaatttgtttgggggtctcgtcttactccgaaaataaagaatttcatatgccaggtgttcaatcattggattccaacaaaggtggagcttgtgagaagaggtatggcattagatacttgctatgattggtgtaaaaatcaggaagaagacatttgtcatgcgctgtggttgtgcccgaaggttcaaaatgtttggaagaaacttggtttctctaaactcatacccccggatgtccataaggctgctgatgtactttggtggcttctagatcacctccccaaagatgatttgatccgggtcaggagctttcctggttggtttggcaaagaagaaactcctttgtcttccaacacaaagccccggatgaccacttatggaccaattgggcgttggatcttcttgctttgcatctggggccaaaccagcaggttttcaaaattcctgcaattcagcc

SEQ ID NO: 197804 - DNA, 1081 bp, Cannabis indica
tatatataagagtagtgaaaccccgcaagtgaaaagaccaccatttctcatttcataaaataaataaataaatgaatcaaaacatagtttctggtggaagcttattcaatgacgataataccctcaatttaccgggaaaacaatcgcccttcgccgccgactgttggttcgacgacgcatgtatcttagacatggattacttcgtcaaaaccctttccggaattaaggccaaaggcgtacgccccgacttaatcggctcaatcattacacactacgcctccaaatggctcccagacctcctcaccggtaccggagaatccctccccgaaattaataacgccgccgccgaaagcgtaaccgtttcttggatgaagaaaagattcttcgtcgaaaccctcgtcggagttcttccaccggaaaaagacgccatcccgtgtaatttcctactccggctactccgaacggctaacatggttggagtggagccgacctatcaagccgagctggagaggagaatctcgtggcagcttgaccaggcgtcgttaaaggagctaatgataccgtcgtttagtcacacgtgtgggactttactcgatgttgaacttgtgtatagattggttaagaggtttgttagcttggatgaattaacgaagactaatggggcggcggcttttgtgaaagtggctaagctagtcgactcgtacttggctgaagccgccgtggattctaatctcactatgactgagtttgtggcactggctgatgctcttcctactcacgcacgtgccatggatgatggtttgtaccgagccattgacacgtatttaaaagtaagtatttatataatatttatttatattaattttttaattaatattcttatcttatgtgagcttaatttggattatgtttctcgtgatatcatagccagtgattttctttcatctgaataataacttagcttaggtagaggtcgacctggtctaatgagttgaaagtgacttcactacgtatatccccttactatagttatattatatgtatgagtaatggtactatacttatttaccttttataacat

SEQ ID NO: 197805 - DNA, 1884 bp, Cannabis indica
tcaaatcatggtccatgtactcaaaaaccatatagattccacctttaaacttaccaccttctgtatagacgaaaaaatttatataaaaaaaacacttgggtagaacacggtcagcaaccataaaaataatatggactggatacacaacaagtttaacatagacaacaaagtaatttatgcaacaatttgctgaccttgactgttttgttgatccttttcattaccttgaagacagaaaacacaaaatatttaagcagggatcaatacatacatagatatatgcattcaaaattgtatcttctaagtattaagactctatatccaaaagatctttaaaaagtacttgtggaggttacaattactatcagcctaacaatattcttgtgatcaaacttcttaagaattttgatctctctaatggctacaaaagggaactgcataaacaaaaaaaaaaaatggaataaagtaaattagcaggcataaactaatgatctaaatcagttgtgaaactataatttgcaaaacagaaaaaaaaaataacgtacccattctttttcattgtccattcgtatcttcttcagagcaacagtttctccggtcttgttatctttggccatgtacacttgactgcaaaaagatgaaaaaggaacctaagtaatcccaaatctttataatcaaaattcaataatttggagcttatagcagcataaagcaatcaacaacttcaataacatcattacagagttcacagatttatgggtgaacactacaccgaaccaaaaaacaacaattcacagtcatgaatataattactgacctatagtaaaaagaagtagattcgatttcttaggaaaatattaggaaggggaatcaaaattacaaaatccagaagccctttactacaacaacaaaaagaagaaaaaaattgcaaattcataggaaagacaaacccacaagtcacttcaccaatttgctccgactcaccattttgaaaccataacttctatctaaaagaagcaatgccaaattcgtaaacttggcagcatcaatcatgccactgatatcattagggcactccacaaactatacccgactattcttacctaacaaatttttttaaaaaattaatcaaacaaagctcgaatctttacttagcatcagtataatttcaatatagatagatacaaacctgtaacaatagtaattggcccttgaaccgatggcatattatgtttaatataatgcttcactaatgattttatcaaaagacacttcccaacctacaaattcgacagccaataaataaaaatgcacaccaaattagtataagttcataatagaaataaaattcaaataaaatttaacgctttgagtatgcacgcaatgatataattaaattacacaaacgcttaatggtctgtttgaattatggtgttggtaccagcccagtgaatacataaaccaaatttgcaatcaattttagtctcccaaaacaaaatttttgcctgcacatttgtagttttgcaagaactttagctccaaggggtcgatgaatactcaaacgaagtttcttagcaagataggcgagatcagagacaccgaattcgctatcgctactacaccaaaggtcagtaccacagctcccgttctcccaaattatttaacctcagattgatatcaaaggagaagagggagaagtggcggagatcaaatgagcatttcacaaatttgatgtcgtctgattgtgaaagagagaggagaatcaatcgtatttttgggattttaagcttccaatctcaatcgtataaatgaaaatttccatttaggctcagccaaaaaaatattacttttgaataaaaacttaaaaaaacgtcacccacaaat

SEQ ID NO: 197806 - DNA, 1016 bp, Cannabis indica
actactgactgtcacaaatttttattggtacatcagtcaaatccaagttacagttacaataaccgattaggaaataccattctaaatcatctctctatttaagcttaattcctagctaggttatgtgttgatacattatcattccttgaaatgtggtttaaggaaacattaggaaataaagataaagagtttttcaccaattgaacaagatccgaaaaggaagatctgtccttccatttatgcttgatcttgttaactaaaacttgacagtctaattctgtcgcttctattgggaaatgcacaactacacaccaagagagggttgcctgtaaggccttggcttcagcatagatgggagttgatgcacctacaaaatgagaacataaatctgctacaatagccccattactgtcaatgacgatagctccaacacttatttacaaagcttggacatcaagggaagcagtcactttcaacttaaacatcctaagagaaggtaatctagctgtgccaaactcttgctgacgaacatcacctcagagagagaaggactcactggattctgttgaaagccttggttttgaacatccctgtatttctgcaaaagatcaattacaaaatgttccacatctacaacagttagggcaggcttattgaagacaacattatttctttgattccacaccatccaacaaataccaaatagaagaggaagtttatcactattcagattgtcaaaagatcttaacagaaagtcctgaatattacaattgttggaatatattttatcaggatctagatttactaacaagtatgtttattaacaccctaaatatgaattttctaaaatagtgtaaataaacacttataaagtttaagtaaccttacattggtggcagcaaaataatatgtctcctcttactcagatctctaacccttattcctttctatagcagagtattatcaagatctgaacctgattctccttcaagtgctggattcttcacagtcttaca

SEQ ID NO: 197807 - DNA, 839 bp, Cannabis indica
ggttataattgaatcggtcggttactattagattggatcaatttatacacactcctaatttaaatagttaaataattttttttacatctctataattttttttaattgtatagtttttttatttttttattacaattttacagaataagaaaaaaaaaataacaaaataacatacaaataataaaaaaaacataaaaatacaataatgtgaattattttcgttaaaaaaattttctaaaccgtcaaaatatttaaaattttgtataatcatatttttatttactttttagtttttttttaatgtgaaaatattattgaaagaagagaaatagagattgagaatagagttggaaaagaaaaggatcgaactcggtgattactatttttagtaattaagattagacaagttttcaatatcaacattaggtactaattatacactaatttacattaattacaagataggagtcaatgtgaaacaacggaaattcattgattcaagttgcatttgtttatcacttgttataaattattattattgggtataaaataagctcagacctcatcgtttctcggcatcattagtttaagaatgagattttgctctcaaatggattcgggtcgggtcgggtcgttctctgaagaatgaccgcctgttcgccttgattgcatacagagccgataatttctccgtcgtcacggcacatcgatgtcctctctctttcaaaaaatattataaattattaatttagaggatttaacttagggatctaaatggggcgaggcggggtgagatacggctcccttatgcccgtgttaatttatttattttttaaaaa

SEQ ID NO: 197808 - DNA, 1367 bp, Cannabis indica
aaatcatattcctatatttatatttgcataaccactctttaaaatacaacaatttttattaaatatttccacaaccaaactataaagaagactacacaagttctctaatctcttggagaaattgaaggtctgtttttgaaacacttttttttttgtgtgttaattgagagtgactccaatatagttattaaggtgctgaatgaatgagacctgttccaattgggtattggtaacttgtttactattataataaactctctagtttatgtttgaattgtaattttttatttatttttagagtttgtaattttacagcttataatatacttaagtttgctttcgccaataatatttttagcatgattgacccgtcaatcatcctagagaacatattttataacgactgtaaaatttagttttattttatttataaacatgttttttcaaataaaagagaaaaaattactattcattaatttttttaaaatttatctgaaatgtactattctcttcattcatagaatgtgtaatgctagagttatagaatgtgagcaaaatagaagaaacaactaatatgaagatggaataataaatttagaacaacaaataatattctataaattgtagtttgggaaatagtaaattttaaaaaagtttttaaaatgaaaatgaaattttatgcctatataatgtagtgtgttttaaatattctaattagttaatcaacttaaattaatttttaaaatttagttttaatattttttttttaaataatatatatttttattatgataaaatgcatgaattttttattttagggcttgattggtttgagatttaaaaattgtgttttccaagaaagtgttttggaaacaaaaatttgaatttgtatgttaaaaattatttttaaaaatgtgattggttgtagtttaattttgtgtttttgggttttaaaaagttagatttgtgattggttgataatttcaaaataaaaaagtaagagagtatttgaagattttttagatttaataatttgaaaacatagaaaacataaaattgttatattcattttttaagcttaaaacttaaaatacatattcaaatttaagtttttattaaataccaaaccaatcaagtattttatgtggaccccactcttttaagttttctaaaaatataaaattgttttctaaatctcaaaccaatcaagtttttctatcttttttttttttttgttaataaaaatacataaaatttattaattaataaattcgttcaaaacaatagaacgcacttcagaggaacagtcctccaactgaagcgcacgacctgtagagaaacaagaatctcttgccaagcaatgagcc

SEQ ID NO: 197809 - DNA, 917 bp, Cannabis indica
cgccaagtttttccattactaaacgtgaaagtaaacaattcgatgggaaactctcttacacctcgtttcctttccaacaaagtaaacataccataaatacttgattgccaattactatctttccatatttaagaagatatgatattcgaacaagattatcgggagttaattctcaatatatattgatggatgtagtaattaataagtgggaaacggtactatacgtccaatgcttgctaattagttttctcgaacgctttgtctaatgtcttctagacgcatgttggataaatatcgcctggacgaattgtctactcatcatttggaaggactaactttgcctttaaactcgacttaatatcttatttgggcctgttagtgggcctagaaacgtaaaatgtatttagtcatggaattccacagtctttatttaaaaacgcggataataatatatatttggtagaaaatttagtgttaaatattagagttgttgcagtaaaaagtaaaatgttttacactaaattattgtagatttcacattaaattaatatattggaagaaatggtgttagttgttacacattcacaatataaattatgaagatgccaattttgcatgaaattaatcgatatttcaatttcacacgattagttctgaacctccttttatccggggtcattattttcttaggtcctagtatatttctttcttttttctacatcgaataatgatgagcactaaaaaaatcaatttcactcgatattttgctctctacctcttttgaaaaaaattccaatacactaatctcttttatttcaatttggaaatgatctactttcatcattatctcttagaccaacaaagtctatctgtatttgcttagacaagtaatttaagttgttgaataaaatccactt

SEQ ID NO: 197810 - DNA, 2225 bp, Cannabis indica
atgttctttattcttaaaaagccagtttcctgaacgaaccgccacttgaggaatctgatgggactgtcatcaattttatcctggagtacaaatatgactatcatttaactaaacattcaaacataactttggaagtacattaaccaaaaacacttacctgaccaaagccggcatttacaaaagcattaacaaatgttgcagccaaattctgtctagctgaatcgacactagcaccagcacttgcccggccatcgagtaagtgtgcctaaaaacacccaagtaaattatgatacatcaaattcccgtttaaatcactcatcaactaacttcaggaatagtgatacagcataagtattttttttcacattatgagggctttaacccacccttcatacaaccaaccacttcagccagtcttgagtggctcacacaacatatgtatggatgtaaaaactgttacatagcagctaaagtgacgataatgaaattacatttaaggacatgcctagtaggtcagtatgtaatcccaggagatatccacacattccttaaggctatgtttggaagttggattttggtggaaataaaaaagtagggaaaaatatgtggagaacaaaagaataaatccatttttcaagtttgatatggaaaattttgttgaattgactgtttttctatacaatgtttctttccataccaaatatgagaatttattattttttatatttccactttttttccccctttttctttgctcaccaaaatccaacttccaaacataacctaaaacgtttgagcttttcatcaatcatgtaaaatatgcaacaatacaagaccaaatcatgcaaaaaaagaaactgctccttaataaggtcaggaaaatgctccattttcaggacggattatataaaagttgatgatgacactgaaatattaaatcaagcagaaggggtttccatttccaaaagaggaaactgcattaaaggcacaaacaaccttttcaggtactcagaaggcattgaatatgtcgaatacaacaacgggcttacagtttatataccactcttacactagatcatattaacacactaacacattgacaatggaaacaatcaacccaaaagaatatatttatccagataaaagggcccaatatgtcttagataccgtgcaatatctccacggcagaatatttttttttcagtacacaagttaattctacagaacatgaaatcataatagagttgatatgatatatatatatatatatcaaaagagatcaatatctcacactaaataactcaaaatgttctaacttctaaccttgtaaatatcctcaggggtttttgcttccataacctcaatatctcgggcaagatttagatagccttcatttagttttgcattgttgataatatcctgcaatgcctctcgttcctcatcatctgcaatcatctcctcatcaagcacaaaagggacacccttcaaataacagaaaaaatattagcaaactccatccatatttgaagaaacacaattttttatggccttaacttcttcatcccagttccactagcaacatcaaacacaaatttaaaatccaaccaattttttttattatcaaaagacaggaaaatagtttccatcaaagaaaaaagtaaaccaaaaaccttacctgtcgagcaaggatgtaacagaattgcttttttcgttgtagatcaggacaggtctcaaatagctgccttacatactgcagcacaacattgacaaaattacaactaaatcacatcacattgtttattacaatttacaaagatgtggatgtcccattcccacctaatacagaatcatttaactcacttatacacagttaccgcagtttcatttgaaacaagcagcagattttttttaaagagaaataaaggaaatgtaatagaagtgcgcgaacctgcaaattatcaaggaaaagagcaacttgaagtgcacttgtatattcttggtatttttgatatatagtgtatgcaatatccaaaaccagcatatcatctgggccaggtacatatctgcagtgtaacattaaatggagaaactgagttgatacagagggtaataaggagaacttttgcaatgccgcaggcataagcagaaactcatttcacggacaatctgatcatcaacattcccatttcacatccgtagccaaactacgtgaggtagaggctaag

SEQ ID NO: 197811 - DNA, 700 bp, Cannabis indica
taaaaatacttatatttattttctccaccactcaaaacaatagatttgctataaaaagtccattcaaccctttagcttgagcattcaactattggcaagatatgtagttgcaccactaacaattcccttcaactttagagaacttgttattcccaaccgctaataaaaatttgatggcgagacataatagaagaacaaaaagataaaccaacaacgaaataaaataaaaccaaaccatgtcacagagataagactaatcacagtaaactaaacaaacctcaaaactatatcacagagacaagattaattgtagtagaaaaatcacagaccctgaccaagccacgtctaagcccaaggagggccaacgagcctagccaaagaaaaacgacaacaagtggctaaggatttaggaagagaaaccctaacacacaataaaaaatatttagagatagacaccatattaaatgctatgtttagttgtgatttgtttcaaaatttagagtgttaaaattaaattcattcataaaataatatggagataaacacttaatttattgaggttaaaatctatttattttttagttaatttttacatactagggttggtgaaattctaactcgggctcttttatgagaagaaatatggtattattatgttaatcttatcacaacaataataacaaaaaaatcaaaaaaaaaa

SEQ ID NO: 197812 - DNA, 690 bp, Cannabis indica
ggagggccaacgagcctagccaaagaaaaaacgacaacaagtggctaaggatttaggaagagaaaccctaacacacaataaaaaatatttagagatagacaccatattaaatgctatgtttagttgtgatttgtttcaaaatttagagtgttaaaattaaattcattcataaaataatatggagataaacacttaatttattgaggttaaaatctatttattttttagttaatttttacatactagggttggtgaaattctaactcgggctcttttatgagaagaaatatggtattattatgttaatcttatcacaacaataataacaaaaaaatcaaaaaaaaaaaaaaatcacatacctattctgtgtttttctctttccctttattatttttcttattcatatccataaattaattattttaatttcaaattagctctcacatgtatctacctttttattttcctttattggagacatgctttagaaaccccaattcttaatactaatcccatatatttagcatttgaggaaagaaattaaaagagaagcataaattaatatagtagaaattaagaaagaacataagaagaaaaaaaaatgcattttttgtttggtgaaaaggaaaagataaaaattacaattaattaatgagaatactcttgtaatcatatttgtttcttcttgtt

SEQ ID NO: 197813 - DNA, 599 bp, Cannabis indica
tcacataataaattgataaattgagcaatctaagtcgtaacccaaatctatataacaaccactaaattaagccaaaaagtaaaaataaaaataatatataattatcttactaataataataataataataataataataataataataataataataataataatacaaagccaactagacatgcatatgttgtgacattgtcacatgacatgtgcttaacaataataaaattatcatgttatgtgtgcctttaacacaaggaaaatcaagatgatttataagaaataaaattattaagggtatatttggaattaattgtgtaattattaaggtagtattaatatgaattgttactggtagtatcatgtttgataaaatagttagtgattacacaagaaaataatattttttaataattaatatttaaaatgaatttttttagtaattatacagtataattacattcaatttttataggaactatgagtattgaaaactgtaattgaaactcccaattgccttcaattacagtaattatataatcaaataaaagtgcaaaattgtgtaattgctcaaattatacacaaatctaattaca

SEQ ID NO: 197814 - DNA, 856 bp, Cannabis indica
ttggacaaagtcactgctattgaggttgatagtttcaccctaataatttctagctctgtttttcgatatgagtcattatagtattttaacacaaacgtgtgaactttgggcttttgattgaaaatagcagcccagtatctatagttgtaatcttccatttgtttcaagattgggcttttgttgtggactaggccgatggaaattaaagttagcttaatacatcttgtttgctgttttggttgttaacttcatgctcttccatctatcaattcaagataaataaataatcacaagaagaaaatattatagttaaattctcatgatgcatatcaactctaaggtgtatatatattgtttaataaggctctttttctcgtttgctttagtccattttcatcttcatatgtacttttttttccttctatcttttagtcctgtttcatttttaactattgtttgttttatcgaatcaatggcagaattcttccatatacaatttcagcaaagtgatagtgacttattaggggtctcttcaaaggaccactaaattaagcttctaatatttaaagatttccaagaaacttaaaattctgatgcaagttagataggggtacgagagatagcctcccgaccactaattaggtgtttagtcttggaggagtacgatttctttcgattctaagaaatgaaattttgttctacactctcttgataccaagtttatagttaactctagtaaaaattaaccaaagagaccaaatggctacgaatctcatgttggtatatgttcgaatttagtaatgttggattaaatctccacacatactgtcaagatcaacataatatagttacaaca

SEQ ID NO: 197815 - DNA, 536 bp, Cannabis indica
aataccacatttatccacatttaattgtcacccctaatttttttttatcttaaatttgctctaaaatttagaccgagatcaagagttatactatgcattatctcctgaaattaataactccaaaaaaaaaacaaatcggtactgagattcgtgtgtcaacggaaattaccagaataaccttaaattatatatagtaccaccggtgaccagttcagcattaaaatgagaaggcaattttggtcaattcctaaacaatattgcaatggtaaaaggaaatgtatggatatgactgtgtctgtaagtccctagaagataagggtaatagtagtagtagtactgagttaggagtagaaagataatcactacgtagagaaaaaaaaaattcaacaaaaaaattcaacaaaattacataatttgatgcacaatttggttttctttcacgtgaccatagcaaaaagtttcatactattttcaacagttcagtactgacctgggaccaaaaccctaacctaacaacaaaatataataattattca

SEQ ID NO: 197816 - DNA, 1017 bp, Cannabis indica
gtttatatatatgtccaaccaactgagagaaaatttagattggcacaactactacgtatattactgtagtagattcttaattagagttgttcgtctcttacttcaattcttctttctttcctttttttttttcagtgaaataatgatgatcatatatatatatatatatagttatatttataattaaaaaaaactaaaatttctctgccggcagcttaatatttagtattaaatagtttacttttgaattagttacaacctcttttgccacttgtttggtttggtcttttgctttgattccacactttagcttctcctctaaattaaccacctccattcctaccattaattaattaataaaatcagtcactctcaagtattttaattaccacgttttgtatattatgaaggtagatgattattaatcaagtgttctattgtcattggtacatagtattattataaataagtgtttttgttaaataaaaatgaaaatattgctaccatcgatattagaatcctagtgttgtccacattgccgcagttggacaaatgttactaaatttagacacttctttaactttaaggcaaattttttcgatttgtataaccctttaaattttttagcttaaagttttaaacaaatttcggcacgttaaacatgtggtggttttatacttgaacagtattaagtctagatttacatgtttcatttgacttaagggctattatattttaattgctaaaagagtgaggtcagttttatgctaacctcttaaagtttagacagttggatagtttaaagcaaacttttgatgtgtacaaacttttaaaatatgttctaggttcgtgtttgagtagtacttggtggtgttttatgtaatgtggatagacgcttttagataaattagttagccattggtacttcagtttttgagcgtatttgtatcaggttttgatgtgtcaagccttatatgatttgctccttttgaggaaaatatttgtattgtattttat

SEQ ID NO: 197817 - DNA, 1185 bp, Cannabis indica
ttaactagtttaaaagatgtaattcttaacttttaaatctcaatattctttcttattgaaatgtatgcaatattcaaaagaattagttgataaaaatcacttttttttttactaattgcatttttattttattttttaaaatgttatttatcatttttgtcccttaaattatgatgaatacattagtgtgcttcttaattattatatatgttaaaaataattctcgaactatttgcaatgttgtaaaatgatttaacagaattatagttagtctggttagtggttagaatcttactaatatttgttagttatagttggttgttaggttaggtaagttgattctttactctagtttaactagttcttgatttggttatgtaaattaatttcactaacattttgtatatataagtccttatttcatctttgtaatttaattcagttcagtatcacactttcattttatttcattttgttctttctgtccttcctctaatatggtattagagaagaagaagtgaagttttcccttgatcttggttctacaggcttccatagatcgtgttcttcttcggtcttgttcccttttttccagtgagtccgtgtcttgatcgaatatttatctttatctctatgacgatttatctcctctcttctccccatctctattttccctccaagaaaaataatgacgatcaaggcaatcaaggcacccagaccatcaatggcccacttattcaaactacaacagagccacaaaatctgatcgttcaaggtttacaggtagctcactccaaaaatcctctcgatgatctcgtcaacccctattatccatggagataatctaagtaacattttggtctcacatcctttaaatgggcaagccaattatgtctcatggagtaaagttatgcaattaaccatttttatcaaaaataaattgggatttcttgatggtttgattcacaaacctccatccacaaattatgttctttataacatttggattagaaataacaacattgtggttttttggatcttaaattttatttttaaggaaacatcatctaaaatactaatcatttcatttggtttcatttagttgtgtataattcttgccttggttgtttgtagcttgttcgcttttgaataaagatttctcttttttaaaaaaaatactcaact

SEQ ID NO: 197818 - DNA, 1350 bp, Cannabis indica
gagccatagttattgaatgccttcaatttgcttggactagaaatcagtgtgcaataaacatttgctctgagcatctattccaagacttgaattgtaactctgcaatatgatttaatctttttcttttttctttaattttttttagttttaagtgagaaaataagaggaggaaagagggttaagcagcctctctcattaaaaaggatggttgtgttttatttagggaccatgtgttgtttacgtggagggaaataatgcataccaaatagtttttgttgttttcttgccactaaactaattatttgaaaaaccccatcaagaaaaaaagagtattatttgtagagattaaaatggacggccagtggcagtgtgcttggctttgcagtattctcagccgtccatcaaatgagaatggtcaattagattatccaaattttatgtggtttgtagaaagggattttgggtgttacttgtgaaacgtggtagttgttactttgcacgcaattttgtgtgtagttctcatgctttcactaggttgtcttttgtaaaaaaatccaaccaaacgaatgattcatcatcctttggcttctaattcctatgttattctttttttaggccaacattgttaaaagacatcaattctagaaaattttaacgtactttataatcttctaaggaatttctaacaaaaaaaacctagagcactctataaagctttggaagaaacatagaatttacttggactagttgtaaatagttagagttatttacatagtggtagaaacttgttagtaacttgaaaagttagaaaagtttaggtatctcacttgtagcctataaatagaagtaagatgtgtgctaaatttataagtttgagctaaagagttcaagtgtgagaaagagagtctaaagtgtgtaaaagtataagagtgtcctagagtcattggtccaaagtgttctaagtttgtaagtactcttcataataataaagtgttgtaatttttacttaacaagtggtatcagagttaggttcgtcgagctcgtagtggtagaagagcttcttgttgtcgtgcacaatttgaatttgtgaagcttacaagttgggaaaaacttgtttggtaatttgtttgccaaaccacgatgggtgatgctcaagtaattggcagtattaaaaagctcaacaatcagaattacaacacttggtcaacgatgatggagtcatacctccaaggccaagacttgtgggagattgtatgtggtagtaaagtaaacccacctaaagatgttgtatctttaaattaatggaagatcaaagttggaaaggcattgcttgtgtaaagaccgcttagt

SEQ ID NO: 197819 - DNA, 589 bp, Cannabis indica
ggttttggtcaggttacttttatgtattccaaaaataataatgatatatactcaattcgcaaatatatgcttttttttatgttattaaacttaatcaacacaagtatgattaaaaatggaataattagcatttttctcggtgaattttttatactactaaaattgcttcttacatctaattatactccacaaaatataattttttacagtatacactattagtctttctatcacattttatttaattttattgtaaaataagtaatagcaaaagagaattgataaattgatacaaattaattacttgcaatgtagaaaagctgaaaaatatttaatttgtatctatttattaactaccatatttcatgacaaaatattgaaaaaacaataataattatgattatgaaaagttatatatggtatatattaaccccaacaacaaccggtataattaccgttgtgttggtaaaagatgagtgtccctatcactaacactactcttaaaaaaatggtgttttgtgtccaataataagattgtgtttggtaggaaagaaaaaaataggatggttgaagactagaatagagaaag

SEQ ID NO: 197820 - DNA, 1169 bp, Cannabis indica
acaatctcaatagttcatggggcatttttaacaaccttaaaagttcacgggatatgatttggtacatgtcaaagtttgggagtaaaaatcctaattagctttattattattattattattattattattattattattattatctaataagtaaaagtatagctagcatagttagtgacatgtgaaaatgttaagttgcatgctttgtcaagctaattgataagaaataaacgacgaaggcaagatctgaacaattctttgtgctctattttatttttatttattatttatatatacatatatttcttttcaaataataattaatacacaaacatgtatatatacatacacacctatacatatgatattgtataaagatagagaaaaaaagtacatagttagttgggatgtcttcagcaattttgttatatattaatgatgttctcataattattttataataaggtgtttatcatttattgatttgtttttatttactctatttatttatttataccaatttgaagaagaaaaaaaaaaatcaacaatttagtttctataactattggtattaatacttaaaatattatccaaccacgtaagggaacagaggctgcaaagaaattattaataataaattgaacaaaaatattgatattataaattggataaataagatttttatccttcaagttggaagtactagttgttagattttgttatctgatttatttatttttttaattttttgtgtaagaaattaattcatttgaattatggaaataattgcatatttaattacctctttgattgcactttgtaaataatttgatgatgtaagattgatcatgataatatatctgagagtctaaataaaaaagagcaatttgcggcgaaacccccttatgttttgatttttatacacttaacccccttatctttatttttggtggcaaaacccccttatgttttaatttttatacacttaacccccttatctttttttttgtggcaaaactcccttatgttttaatttttatacacttaacccccttatcttttttttggtggcaaaacccccttatgtttatttttctttgcaaatttgacacgccagttaaatattaccgttaaatatcaactagatgaccactgtatacacctttgta

SEQ ID NO: 197821 - DNA, 1369 bp, Cannabis indica
tcaggtacaaggtcaaaggttgtttcccacaacacgccatcgtacaaacatgggtgccctagtgtacctgaccaaacaaaccaacggctagggatagaggaaattcaaaaaggagaaaccctgaagtgacacgcatccgaagttcgagttgtacaatctgatgcacttaaatgccacatgagaaatatgccacctaccaatttgatggtgggatttttccccaacgatgacccatccaaggcagcctatgcaaacaagctggcgtataaataccccataaaaagcacaagggagggatgaccttctctttcacatggaagatccattcttcatcatcccatgacaaacacatgtctgtaaccctactattaactccagaatattctactaagcatcctcttcttcaaaaggaacatggtgaaaaggagttttagtccattgtatctttatttgtataaacaattaccgacgaaagagcctaataaaatggattcgtgaactaaggatagttaatgcttgaaccacacgtaaaaatctcttatttgttatttcactatttactctattattattttcttaagttcaaaaaatatttagttgctgaaaaactcgataaacagttatgattactaaacaaaatacaatcgcacgcaaagcgtgatttattttctagtttttataatataattgcaaataaattttaaatttcaacgagcaagaaaccaaaactaataaaacacactccttgaatgctttagcttcattattatttatttagttttttttttttgaatagtagcttcattttttttaatcaactaaaataggggaagttaaagactattttgatagtagtatatatctactaggatattttatggacaaattttggttactatttcaaggaacaagatccacgaaaagaggggaagaaaataaatcgaattttaaaaagagccaatattatgtttttatttatgtggggagggagggcccacttattttgtggtgatacaaacccctccatgtggtctgttgggtgaagaagaagaagaatgtgttctcccataccatagcctggccataccttattttagtcttacacactgtactttgaacacaagttataactatgggctttctctatccaaatttactttgtgttacttctctattctattcaatgtgtttgaaatcacactattagtgaccatctcaactctctagtctctacagctataaatgatatataatctgaataaactttgaccctattacagatgacatccaatgggaagttactttcaaaaaaaaaaatgcacactatttttaaattctactcaaattcaaaagagtgaataaaagaaat

SEQ ID NO: 197822 - DNA, 702 bp, Cannabis indica
aatgctaattctgacaactttttgagtgccgacagcaactccagcaactttttcggcaccgacagctactccgatgacttttccagcgccgacaataaactctaacgacttttccggcactagtaacaaataaaattaccaaaacaaataaaaacattaaatataggctttgaaaacctaatttacatatatatagtatatcaaatactataaaaatacctaaaaaaagaaccatataaattagtcaaacttaaaaataccatatttaagcaaacaactggtaaaatttgtgtaatttcctattataataataataataataggatcttttattgattacttttttctttgtaaatatagtgataaaaaatttagaatatatgatactttaacaaaaataatcaggtctttttctagataaaaaataaaatatagtattttaaaaaaataaattagattatttttttatttaaaaaaactaatttattattgtgataatagtgataaaatttaaaatagtatttttgaaatataattggagcctttttatctaaagaaatttttgggccaatgtgggggccttgggcgatgacccatctcaccccactactctatgggctattggtcttttacaaatatattgtatactttttttctaaaaaaaattacttcctctataatcgttgtgtaagctttgaaaag

SEQ ID NO: 197823 - DNA, 1545 bp, Cannabis indica
cattgttagttcattttgaataacgatttcttcttgttcaaaaaaagaatatatatatacactcactcacaaccttaagtatagattggtggggatcaccatgacttgaacaaggtataacatctttgtcaaaaaacttattttccctatctctaaccaccaagggaaacgaaataactttgagaattatcaagtcttgtattttctagcaagtgcttgttgatagaaaacttagttacacaaatgagcacatttgacctccttatatagcgtttagaattcacatttgatatcacacatctcgatggatgttaccagccgaaataggacattaaatggacatataaacgttgggtttgacactagaaattcccccattaaagtcccaatattttgcaatattttctcaaaaaatagctcaaggtgacatgtcgcctgacactaggcaacatgttgcctggagggacaccctcaaaccacatgtcgataaaacatcactaaaatatcaaaaaactttcatttagtaaagtaggcgacatgtcaccgagtgcttgggcgacatgtcacttgggcctgtttctattcacaaactttggttttcaaaatttctctttgatccaactcttcacccaatattcgaaaactaaatatttgacagtttcaaattcttggaaacatctccatttgattttctaactaccatatacaattactaactcaattttatctttatcaaacgtgaatcgtagggttagtaatttattttaaatttgtaatctctcttatgttacaaaattatgacaacttatcatacactcacttattagtatgttacacatatttaatttatatatatatattatattattcaaatagtataataatcccccactaaattaaatattttcccattagtaacaagcttgtaactttgtaacatttatttaaacaatcaaaatattatattctctcactttgattgactaaatagattagttaggtgttttgaccttatttttagtcaactatgcggagtcaataaacatctatattaatgtttgaatattaaaaataatcaagtagctataaacgacacaagatttataaaagtttggcccctgaatcagtaatgactgtaatatcccagaaattcaatttttataattggggcatattttactaaaaatgagataatatgtgtgttatgagtttaataagtagaattatgatcttactagtcaattatgtggtaattaagaatttcaatataaataaaggaataagcgtaatttgtgaattacgaagattttgtaggtatatatgggtattgttggggattattttaccaggatccagatttactaccatggatgttatttaacatcctaaatatgaatttctaaaataatggaatttaggctcgatattatggtcagtagtactgacgtacgaacgttctaaactcagccaccgtgttggacacggggatagggttatggttgggtgtaggggcgcatgattataattcaaattattgttatgtta

SEQ ID NO: 197824 - DNA, 650 bp, Cannabis indica
taagaaagtgaattcgtgttacatatattactataataatactatatttttagaatattaatttgggcatcacttttttaataaaaaaaatattggagtaaaattggtttaaaatcaaaaaaatttcaaatataatcaaaatattttttcatttataaatgaatgaattgaaacttacataattcatcattctcaaaattaagacaaaaatatatatttttttaatatgaaaaaaaattaaactatacaaaacatataccaccaactaaattaaggcattaattgaacccactcaattaaatccaattaaaagaattggatgttaaaaaatcgttatcctagttataatccaattcaaatagtaattagctttgtctttttttgtttaacattaatattattattagtttaaaaacatacaaatcatataattaaaataaatttaatagtattttcttcttgatttttaaagatatactagtaaaataacacgtgctccgcacgtgaattatacttataaaattaaaacaaaatatatatcaaaaataatatttttattatttatattataaataattatcctgtatattaagttatatatgataaataattatattattataataattaatacaaaaaaaataaattat

SEQ ID NO: 197825 - DNA, 517 bp, Cannabis indica
tcggttatttcataataaccgacccataggtgcatgcgataattgacgcgtggaacctatggcgtgggttatcataaaataacctagggcatggggttttataaccctcttcgtcatttcaggcgccctcttcatcttcctcatttcgtctaacagccctggacagaaaaaacaaagcaaaccctcatctaatagccctatatttgctattttagggccattttggctcattttttttgttaaaaaaatatctcattctaatatccaaaaatatattgtcggcattggacccttttttttagcattttagtataaaacgagcatttgaggttgcagttttgggagtttcatagatccaagttgaatcacaacgttaattgcggtaaaaatctgttctactaaaatttgactaatatacattgcatttttttttaaaaaaaattgtaaacaaaattatgggtttatggtttgtgaaggagtttgggtatagcccctacaagaatgtcaacttatactg

SEQ ID NO: 197826 - DNA, 1758 bp, Cannabis indica
cgcttttttactgatttcaccaacatgtcatcaaagtagacctccatgtttcccccaatctggttttaaacataccatttacgagacattggtatgttgctccagcttttttcaatccaaatggcaagactaacaacacaaccccatatttgtcacgaagcttgtatgttcttggtgtaggacacgcattttaatctggttatatccagaatatgcatccataaaagtcattaattcatgcactactgttgcttctaccaattggtcaatccttggtagtggaaagcaatctttaggacatgccttattcaaatttgagaaatctttgcaagttctccatgtgtcatttggtttttgtaaaaggacttgattagagatccacgagggataaaaggcttctcgtatgaagttattagttaataatttattaacttcttctttgagtgcattttgtctctcgggattcaatggtcgtcacttctgacattttgctggataattagggtcaatattgaggtgatggcaaataacgttcaggtttatcccgaccatgtttaaatggctccaagtaaactgatcttggcttgccttcagaaaaatgattaattgctattttaattcttcccccaaacttttctcatatatacacatttaatgagattgtttgggtctaaattcacctcttctaactcttcaattggattgagctggttattatcatcatggattctaggatccaagtcttctatttccttctcaatttcttcagtcagaattaccataagctgatgactggctcttctatttttaagttccaccttgtagcattctttggccaacagtcggtcgcctctaattgtccctactccggagtgtgtaggaaatttcaaggacaagtgctttgtcaagcttatttcccccaatccaattaaagctaagtgactcatcaatacattataaaaggggatgttgacaactaaaaactcttgcatttgagtcgcagacaacggtggttcccccatagttatgggaagttcaattatgcccaggcgacacgctcgcgatacattcgcctgtgaagccacataaattcaccatgcaaggtcttagttttgcttcttctaaccccattttctttaatgtttcctaataaagaatgttgacagagcttccattatccaggagagctctcttattctcttattggcgagttgaattattatcacgagaggatccgcatgtggatatcgtacatgcttcgaatcttcttcaaaaaagatgatgggtggctcgtctaattttgttttctttaaaggttccaaagcaaatgcagataattcattcttaacctcattaatgtaccttttttgtgcaccattgttgtttcttgtgaggtgtagccctccagaaataactaagatattgtcaccctctacgggaggagattgcaaccttgggttattcgggttattgggttgattaggcgaatttccctatgtcctcatatattgcctaaaatatcctctcaagattagactttcaatttcatcttttaattgacgacatttctcggtggtatgtccaatgtctttctcaaagcggcaatacttggttgagtctcgcttattcctcacatgcctcatctgttctggtctgcgaaatacgagcccattttcattggcgagataaatgttcttgcgagtctcattcaattcagtgtaaactgaataaataggtacttacttctcatgtttcttt

SEQ ID NO: 197827 - DNA, 534 bp, Cannabis indica
gtaagagtattatttgggtgacagttgggttttgatactaagaaatccattaaaagattaggtcaaattaagtttaattatgctcttaaatgttggtttggtcataattaactttggacaatatggctttgccttttcaatagggtattcattcattcatttcatgaatcatgcatacataatttgttttctaacaacaacaatattatatatctcatttcaataaataagacaagtgttagatagaatattcagtatataataataataataaaacagctctattttatttttctaaattttctaagtattaaaaaattaacaaaagttgtttatttatttcaaactaataaggctgcctaaaatctctttgttcaaccaaaccatgcagtgtctaaaatatgctaatacagctagaatagttgctttgtattattattattattattaattggttaagtttcaccaaaaattacttaaagtctccaaaatttagagagccccaataccaattaaatatgttttttcaaaaaa

SEQ ID NO: 197828 - DNA, 634 bp, Cannabis indica
ttgtttagttttatttctattttgaaaaaaaatataaatcatgaaaattagtcaaaaatacaattttcgaagtgtcaaggctagagattctatgttaagacgctaaattgtaccatcttcttcttttccttctccctcttacaagcccaaatcacccattaccatcattaccatcttatttcttcatcaaaaactcaaattcttttcaccaattcacttctcaacttctttaaatcaaaaccaattcccaattttttcttttttttaccaaatttttctaaaatcacaccaatttttttaggaaccctagcaatccaaatttcacaattagcattagatttcttggtggatgagcatgtcaaaaattatgagtttctatctcaaaatcaattggtgatgagtggactagtccatgttttatatataactcgatatttttacatatgatctatgtggaacaatgttgtccaatagttcttagaaattgtaactatgtggcccaaaatatggctcaatagcgaatcagtacaacaactttagctacttcgattcgtccaatttcaatagctccatgctccgtgaaaaggcagatgactgatacggattttcctcttcttcgatttatttctgttta

SEQ ID NO: 197829 - DNA, 558 bp, Cannabis indica
ttttaaactagattgattgtaaaatatcattatattacacttaaaaaaaatatagatatgatcaataatacaagtttacaaattaataatgtcgacatttaatttttcttttatataaataataattatacagtactttaaccagtacagtagataatattgtacttcatttattatgacgaatagtagtaatttgtggacttattttgaaacaaagtatggagacaaaagacaaaagagtacccactccatccacctccatgaagttataatgatttgatattcaaatatcttccaactacacaccacattttccgacaaataaattaagaaagaaaattgtatagtataaattaataatttttttttgagaaaatagtataaattaataattatactatacttcaccatgtcatatttagattgtgttaaacttacattacatcgcacatttatatttttaacaaatattgtttactaaaagaaaatatttattacaattttggcactatgtatttatacttccttatagggcagtctttattattattattatta

SEQ ID NO: 197830 - DNA, 1991 bp, Cannabis indica
ctaaaagtgttatgacaaaactgtttacatttttttgtatctgttcgtattaagcattgtcttcaagttggttgtattaaaaaaaagttgttaaaaattaagctcatggtcctatttttactattttagaaaatacagggtccattttgtcatttaacaaaacacagggtccaatctgtaacttttgcaaaacacagggtccaaaattgtatttacccaatttaaaataataattttttaaaaatatatcttacattttttacttaaatctcaaataaaattattatataaattggaacaaattttagcatttaaataataatatgagattttataattcttgttttagtttttttttatgtggaaacttgtgttaattatagattaaatataattaaacataatttcttaatataataagttttttctaacagaaatattatttgtagtttgaatactctatgttaatgctgtgtaatttttttttttttttcaaaaggatagatttatatatataaataaaaataaaagataaagctgagcggaatcagatttaaaactaggcctaccgagtaacgaaaaaacacctaaacaaattatgttgcctaacaatcatgtattgtttctatcccttctaattttatatattctgttttgaaatttgaaggtgggcttaagccttcctgagctctatgtaggtctgcctatgggtccagattattaaaatttttatttttatttaatttaaatatactaaataactatgaaagttccataaatataacaaagatattattaccgtaaaaaattaaacttagctattcttttgcaactaaaaattaaacttaagtatttacgttacaaattattactcttaattcttaatgaaacaaaaaagttagaaaataatctctctttattctttctttaaactccaaatcttttataaaatctagtaaaattaaatggacaccactaatttatttttcactcatcttattaaacctttcatgtactagattcctttcatcaccacaaatatatatattttgactctacaaatatattcttattccatggcctaaaaaaaagcttgtctattatggtctcaaatcataaaagcataaacactcacccaaatttaatgctttgtccccccataaataattttatggtcatcaataaaattgatcaaaatttcaaactttcacatattgggattttcttgggaaaaaataatcatggaaggtcatcatcatcataatgaagatgaaagaaaaagagaagaagaagaagatgatgatgataattttgatgaagaagttgatccaaagagaaaatggtggaaaagggcttatagtttgttgatgagaagtgatgaaaatggtgttgaattaagtgaaaatactatacacaattccaattccaattcaactttggatcgtttagtcattcatccagataattggtaatttaaatatttatatccatatatatttataatttatataacactatattttaagctcattatatatataattttaaagaaatcatttatattttgttggctattaatgtactattattgtcattttgaaaaacttgatgagaatgatcatatatgaatagttgatggtgtttgaattttttaggaaggactcatttgcatttagagaataaaagaaagaaaaaaaataactaaactttattattgttagcataatgttagttttctttttcttaccttaattttaatggtttatgcatgaaagttaattaaataagtacataaatgaaagaaaaatagtgcttttagttggaaatttttaacctcataagttacacttaattttgactagttaatccttcttttttagtaaagctatgtatataaatagaacacatatttgcaatagaagtgctatttgacacttttcattttctttgatcacttgtcaaagtgtgaggcattttttttttttttaatt

SEQ ID NO: 197831 - DNA, 759 bp, Cannabis indica
acgtcttttgaactttttaggtcgttaaaattttttcttgaactattaagattgttagatctaaaaacttttgttcaattttactagaaaaaaactaacgttgatgaaaatttaagtaacataattcgatacatgttaaagtttaaagacatgattttataaatatcaaagtttagggggcacaatatagtatatggacaatatcatattagggaaattgaataaaattaaaccaaagtgcttaaatttaacaatttcaataattttaggagaatttttaacgacttgaaaaatttaaaaagcacgattaatacatgacaaagtttaataggcaaaaaatcctaattaacttaattttaaaaaaaaaaaatgctcttttaaacactttgatgcctcttaatatcgtgttgaaattttgtgacaacatgtaaaaagtttaagatattgggtgagaaattttcgacaacttgtctaaattccaaatattattttgaaatatgacatagaatgatctatttccacctaacagagagattaattgacttggttataaaattataataataaaaaagttaaaaaaaaaaaaaaaggttttcgaagtaaatgaaactaaaagctcttttttttttgggattaaactaagacctacctttaagataatagaaacaggctgggcgaaatgagaaaaattggaaccttttttggcttactctactttccaacggcaactctaacaataaataatctccaacttgcatt

SEQ ID NO: 197832 - DNA, 665 bp, Cannabis indica
gtgccagtttctaatgttgggattttaacctattttaaaaattcacaaatttctcgatgtgtatatacacaaattttctaatttagccttgtgggattctttcaaatgtcacgttcaaccctgtagtttcttaaaaattgcttattatactcacactttctaagctcaaacgtaaagatggtgtattagaatcagtcacacataaataatatgtgaaaagagaataccatatataagatttatgagctattcttcattgttaactgattttgaggtaaaactttatgcaccttaaccaaacacttccaaattttaacattaacttccttaaataggtcaactaattattagtgagttatctttgacaaatttaaggtattattttgtattatttttaaaaaaattcaaaatccgaaatatcatttaacaaaacaaaagaatcaatcatctttacaaaacacattcaaaataatatttatacctttaagattataagattatgtcatcttatacatccctatatatatttaaattattaggaagcaactatattagatatatttcattattttaaaacgcctattttcaatattaagataaattatagcctaatatttttatatgacgttatatacattatatagtaggcatgcattttttttatt

SEQ ID NO: 197833 - DNA, 2858 bp, Cannabis indica
aataaaaaaaaaaaaaacatagtcacgctttttgtgggttgctgatactttttcactttgactaaacctgactctaaacacttacagtgacgagtaatgagtgactgtaaaaggatttagtgacacaagttgaagggtcactaaaaactgactttccagtctccctcattagtgacgcgcagtgaagagtcactaaacagtattagagtcactagcatgggtcactggaattaatttttctagtagtggttcttgtgtatggtggacgatctggaagactacagtgtgagttctatttcatcatccaaggatataacataagaaaagaaacaagaataccctgataggcttcaagaggtaatttttttttttgtctattttttcagatttaatatatatacatatggtgatcttgaggatgtagtacgttgataatcataaattactatttcgttgcatacctgatttagttcaataaaactaattaatattatacattacaaaattattaaatattagttatatgaactaatatatctctcatatttttaaaaaataaaaataaaaataacagctaaattatcttctatatctttattttttttaaagatttattacataattttaaaatttgagataagatgaatgatattctatcttcaaaccaattggcaatgagagtagtaaatttgagataagatgaatgatattctatcttcaaaccaattggcaatgagagtagtagctcattcatgttatatatgataatttatttccacactttagcaatgtgagactaactctaatacactctttttacgtttgggcctgaaaagtgtgggtataacgaaccatctttaagagatcttaggaaattttatgggtgtacacgtcgagaaatttgtagattttgaaataagtgaaagaccccaatattggaaaatagcacacattggccgaaaggtccaaatggaggttaaagaaaaaacagcgaaagtttttagtttggctcttcttttttgaactggtaccactttgatctcactacagaacacaagtggctctgataccatgttagaatttgagataagatgaatgatgtttcatctcaaaaccaattggcaatgagaggagtagctcattcatcttaaaaatatgacaatttatttccatacattagcaatgtaggattaactctaatacatatatagttctttttttaatatataaaataaatagtttattttaaaagaattatttggtttgaatggtttttaggataatgaattaaatattactttattatttatttattattaattatatttttatagtgaattttgattagtgtgagtatatatataatttaaatttgtaaattatttagtatatattgagataaaaatgatctgatatacagtgtaaaaaaataataatgtatttaacatttttaaatatttttaattctagactagatgaggtattaaacacattatttaagtgataagtttgaatttttgtttttgatgatgtatgattaagggactattatagtcgtttttagatcttaaagatatgttaatgaaaatatttataatttgggatagaacttaagattaagattgagatttagaaagaacaacaatggtgactacaattaaaatacaatgatgacaatgaataagatttagcggtgacaacgaatgagatgtggtgagaatgagtgaaatacagtgagaacggtggagataaggtgatgacaataggtgtgatacaatgacaacaacaggaaatataatgatgataacaagtttaaatgatgatgatataaaaataatacttatgagaaagagtaaagagtgtgcttacttaaataataataataaacactctaattcatcaccttatatatttatttatttttttaaaaaaaatgaaatttaaaattctattccacattagtagtataaattttacatatcttaataaacaaataatattacacactaatgaatttttctttcaaacaataataattaaaatagggtaaatagatttaattttttttttccttttattaagttttatgtttaataaataaattattgatgataatatgtaattagataatataattttaatattattttatattacaattattttaaattactatttattatataatatatcattaaataattattttttattataatattaagaaaaattaaaatagcctcgggttatattggctagtttatcctaagcaattgcttagtttaccctagtaagtaagacttataaacccacttttcttttataatcgtaatctctaacctctgaatctgatatgaaaatggatcctaggtccacataatacgattaaaaaactcctttttgaatttagttgtgggctccgaattgcacctaccaagcccaatcatagtgcttataatcttttgctggtactggatggggtcttctttagcttatgctccatgccttctattattattattattattatttatttatttatttcttaatgtgttcattaaatggaagtgtctccacgttgttagctgatggccatacatgtgtaccctttgggcatgtttctgaaagtgacatttacaaaatggagaatgggacccactagcacaactgtgatccaccattgctcgacaagtggcgatcctatttatttcttagattatcctagaattttacacaatttacaggtgttaccactcatcagctgacagagaggatttgttagaaacacatttatttcagtgaaaattttgacctttattttttaacataattttgatcttcaatttagcatttttaaa

SEQ ID NO: 197834 - DNA, 833 bp, Cannabis indica
ccaatcaagcaattacagaatatgtactgttattgaataggagagtagaacctaagcatgaaaatcattcataagtttaatgagtacatcaatcatatacagcctagcctatgaattcaatgcagtaatgtgtatataaggaaggatagaaaaagggtgatcaaagtgagatcctccaataagctgtcctgatttttgtaacaaaggaaattgttattgttatgaacctctgcttcaatgaccatttgttggaatgtataggaagagagaaatcaaagatttttgtgtagatttgacatgttcgaagaggaattctgggattatcaataacatcattgtgtcttgtcaaataaataacttacactggaagacagtccggtggtatattagaaagcccatcattcatgatcacacgtaagctctgcaagaaacatttaatttgagctgaagataaggaagtaacaaatctataaaagaagtggtttcatatacgtatatgataaatataaatccccaaagctggatatctgaagtctttttctaacctggaagcccagagtgacaagttccttctctgaagcatcagctaccgaccttggaaatgaaaggaagtggagaggatcaacttttgcaaataagactcgcaaagaaggaaaaaaatgaaaaaaatgacacgaaatataggttttttctctataagtttattaaatatgggattaacattgtccattttttatggggtttttcctatatttgtttagaatcactgatgaggtactaacagcttaccattataaaaaaaaaaaaaaaaaaaaaactaaattgtaggctac

SEQ ID NO: 197835 - DNA, 1565 bp, Cannabis indica
ctatgatgatttcagagatctcatggaaacggttcgtgataaagccccaggtctctaatctgtggctgatttgatgatccgtagaacgagacaatggaatactaattatctatgttacttattcggagaagagttggggaaaaagatcagcacaatccaaattgcggccgacttaaacaatgacttatttggaaacaagcaaacaatggtgtttttaatattttgaaacgtccaataagttcatcttgttgttccgtgatcacaaatgcagccacaactaatagtgctcttccattgccttattattggtttgtgaatagccaaacttattgcgctaattcgcaacagcatctgccttcgcctccatcacgtccattgccacctcctctcccgttttcaaataattacaacataagaaattgtccagagttcaacatcatgccagaatcatgcattaaacagatattgagatatttttcgaaggatgaaccaatgaactcgtcatgttgcaccacttatcttagcatctttaacatgtgtactaatactccatggtcgaaggttagcctgaatgtcatgattattgccaacatcaactctcatcaccatgatccatcatttaggagtaatgtctttcaagattttaaatttttaatccggctataactatttttatagaatttactaatgtattattattatttgttattattattattatttcgtggaagaacattattataataataattattattattttgataaaataaatgcaatcaaattttcaaaatttataatttatatacatatattatttctatatcatattgttattattattaattaattaattaacataatcattaattattatatgtaattgtatatatacagcttcatttgcatgtgtgatattctcttaactaaagagtgactcatctacttactatcatgtctttaatatgaatcaaaacagccgatttgaatgaccaaacaaacaagactatatataatatcactacgtacaaactttatttatatgtacacatatacatatacactatattattcatagatacaattaattaatgagtaggaaataataataaagttctatgcatttgcctttttactgtaagtcgatgtcatgtctaatcatttttaattattcagattatttcatgtagattttcaaatgcaaaatttacctattcattacttaggtatgtacgtacaataaataaaataatctctctctcaccaaagtttattatttcttatatgattaaatatataaattacatgtatttattatatttttaatgttactttgatcttttcttttatttatgttaattttgataacaataatattatatttggatataaataaagttgtttctaggtcatttaaaactattttataattttgttcaaaaaaaaaaaactattttataattatatcatgaaaaattcctttttttttggaccaatattaaacttaatattttatatgtactaacgaaaattattatgatgtcacagtcaacctaaatgtacat

SEQ ID NO: 197836 - DNA, 533 bp, Cannabis indica
ttgaaaagccaaggttgcttctcgagaaccttcttcgcatctcctctgctctgatatgataatccaaaataattgttttccttatcctcttccatgatcttcactttccattctccaagtgctttccacatccttgtaaaaattgtcctaaacaatcctaaactgaaactttgtttggaaattattctcccaaccaaggatttgtctccaaactcagaagtctgttcttcattcacttcccattcctcttcttgatccatacccaacttatcagtcaattgcacaacctcatcaacagaactagtggccattaccgtagccatgaatccacaaatcactaccagattaatcataaagaaattgagtcataaagaccattagaaatcgctcagagtcacagagaccattctttgtggctatatctatatgactttctagagtcaacattatttaatttataattgtatgtagtagattaaattttttgttctcattttctttttcataaaagaatactgagaaaatatttaaaa

SEQ ID NO: 197837 - DNA, 1523 bp, Cannabis indica
ggtctctaccagttgtccctgccatcatcatccactactccaaaatatgttaatctttcactgtattctcctactatgtcttctaaaaatcccaataaaattgcttgtactgcttctagtccatgtagcacttctcattgtatttctcaactttggcacaatagacttggccatccttcctctgttattctcacaaaagttcttcaagaaataaacacaaagttttctaaatctgatttacaattctgagatgcttgtcaatttggtaaaaatcagttaatgcattttagtagctcttctttaaaaaccactcaacccttgcaacttgttcattcagatgtttggggtccttccccacatcctactactgaagggtatagagattatatcctctttgttgatgattttaccaaatatagttggatttatcccatgaagaataaaactgaagcttttccaatttttctcacattcagaacttttgtagaaaaacaactagattgcagcctaaagggtttacaaaccgattggggtggggaatacagaaaattacaacctctcttacaaagattaggcatcttgtttagacatccttgccctcatactcaccaacaacaaggaagagtagaatgaaagcataggcatgtaactgaaatgggattaaccctattagcccaagctcaaatgcccttaaatttttggtgggatgcatgtgtttcagctatttatcttattaatagattacctactgttgtcaatgatttaaatctccctttcaatgtttgtttagcacaaaaccagattattcattcttgaaaacatttgggtgtgcatgtttcccttttcttagaccttataatcaacacaaatttcagttcaagacatctaaatgtgtctttcttggttatagtccctatcataaaggctatagatgcctccactcctctggaagaatctacattgcccgaagtgttaacttcaatgaaacagaatttccttattctgcaatattttccaaaccacatactgctacttaccacaaaatttttcttgcaccagcttttgttatacccactgtaccacattctgctcacccttcccagattcagtttggatcacttgatctaaattctgattcttcacacaacaacatctctgcatcttcacctctgcagcagccaaatgacacacctgatccccatttgactgattctcaccctcctactgcaccttctcctgcagctccttctttcaccaatgaagccaatcctgtccctacaccagaaactcctacaccagatttttccacaacatcaattccctatcatatcccaccattacctcaaggacatccaatgcaaaccagatcaaatctgcaaaccaaaagtttttctggtagctgcttcaaaacacaacttatgaggaaccaaaacagtaaacaagctcttagcatgcctcattggaagaaagcaatggattgtgaaaatatggccttgattagaaagaaaacctacattctagtt

SEQ ID NO: 197838 - DNA, 604 bp, Cannabis indica
aaaatatgctaatacaagtgtggtcatgattgtattgttaagacttagcccaataacaaaagcccacagttacaataatagcagacccaaaaccaaagatcatatttttattagggttttattagggtttctctgtcgtccatggcatcaacacccaccttctctctccattgctgattctctcttcatagggctttattctttggttttcttctctcgctaaaaagattatcaatttcgttgtcggagaagaggaattccgttttgctgggctactgagtatataaacaaaaatctatggggaagaagagaaagcacagtgagactgtggtggtggcaccagtgaagaaggatgatacagctgcagagaggcctcaaaggactcttttgggttggaaagagaagaagaatgaagcagaagcagaaactgaatcaactccgtttttcaggaacaaagagaaggttttggttacttgttctcgaagaattaattacaggtttgtaaaaagaatcaatcaaatttcttaatctgctttttcaaattgggaattttgttagtgattaactattattatgcttacaggtatcgtcatttgatgttgaa

SEQ ID NO: 197839 - DNA, 1398 bp, Cannabis indica
aatcgctacaacttcttcgaccattccaagaaattcatcattaagatcttccactagctctataaccagatccaatggagtagcttcctgataaacaactcttcaataaattgcaacaaaacagtagaaataagaagaatgtggaagaataatcggtggtatttagccaagaattcaagagcttggttctccctcaaaggattacaatgcactattttttccgcaccccaaaaatactctactattctatttattcttacagtaggcgtcaccactgtagctgcaccctaggtacagaaacacccaacccaaataactaaccctttgctgcaacttttctcttgctgagtcagctgctgactttggctatcttgttgcttctccttgtgtatacatacatgaggggaggcttatcagtacctcccgcccaaagtctcaccttgtcctcaaggtgaaatgaggaaattgcgcttgaatggtgctgaaatccttcctagtggccaaaagggcaggtaatttaactccttaaatcaaggcttgaggctgaattttttgagtgctagggtgaggatccaagactctggttttaaggtccattcgagcttggctatcataccaggaggtagaatcgatgcttgttgataggctcccaaagctgctcacagcatcgagacatggagcaccggatgaatccgcgagttaggtggaaattggaggcgattggtagccgctcccacacgagctatgacagggaaagggcagaagaaaaatagagttgtactcagtcatagtttgttatcctatacttacgattagttgttagttagatcttattttcaagacttatttatttctgacttgttatcctttgtactttataaatgccatttggctattcaaggaataataagaattattattctctaaaactacaaaaataatgccatttggctattcaaggagtaatgggtgaaagaggacatgtctcatacctttcatagaagtggcattactatgaatagatccattaataataacaaagctaaactcaggcagagagataacatcgcataatattatctagagtgttcataaaataactgatctaatctaatttgcacgatccaattcaatccgcaaagtgcggatatccgcacttgtacggattggatgttgattaacctataaaagtaattgatccaatacaatctacacatatataaattttaaaaaaaatgtagatacaattaaaactttaaatgtaaagaacaatagaaatttaaaaaaatctaaatacatataaattaagggtagagcaacggtcggtttggtcggttttttacacaaaaaaaatctaaaattcggtttttcggtatttatggttctaatccgaaaact

SEQ ID NO: 197840 - DNA, 2694 bp, Cannabis indica
gagaaaaacccaaaattttccccctgctagtcaaccagttaactggttcaccaacaccctaaaaaatcagttaaccggttctggcaggcaaggaaaatgctggttttttaccccgaaactaaacctgagctacatcaaacctgctcaaaccttccagaataattccatatcataaaaacaaggttcacaatcaaacaattctcaaaaattcatcacaatgcccaaatcaccatgttagaaccaaaacgaagttcttaaatcaaagtttcgaattctaaaccaaatagccataaaattcaaccaattagaacccgaacaatctttgaattaaacttaaaacaagctctaaacttaaactaatcacacaatcctcaaatcacaagtttccccattcaaaactcaatctaaaccttgaagaattcactataactagatgagaaacttacctcaagattttagacagcaacaagtatagatttcttgcaaagactgagctgaattaagatgaaaacttgattttcccttgatatcttctatggccgaaaagaggagagagaaaaggcttgagaggttttctaattttaaatttttcttcttatctttcaaaattttactaacttaggaaaataaaataaaatatatatcactcctaattttcagcactaatcatccaaataaaacaaaataacatttaacctatgaaataactattctaccccttcaccacacactaagttaaaaacataacttaagggcattatggttattttctaactaatcttgccaaaccgataatttaaaattctaaattagtccggaataaattttgattccaattcaattcatcttatatcgtcgtgacttttttgaccattccgtcaagtttccacgaccgtcgggcccaaaaacattttatttcaaaaatgatattcgatatacccacttaatctaataaaatctgcgtaattaataaattacgttttatttgttcctttacttgtatttcactaattaactcgtaattagcttaagtaggattataatcctactctaatgtgcacttactcacatatttaataaaatatgtctaattaaacatcattatattttttaggatattacaatctgctcatgcccgtcctgcatggttatcgttacattgctggtcgtgtgtggtccgtcgttgatacctgttcgtggtcatgtgtgggtgaatgtggatgctgggtgtggatgccgagatagagaaaggaatagggaaagggtttgagtttgagaataggttttagttttaggactgctagatgaaaataaaacatatatatattattattttaatcggttactgggcgggttcagtttatactcgaacccgaactttagttttaaaggacactcgaacttggcccgattatgactcgggtttcatctgcacccgaatcaaagttttcaaaacctaattttttagttttggattccgatcaaccgctttaactgagtaagactagtttcgagtatatatgtgttgccctaactcaaccaataagttggtttgaacaataggtagacacctatgattagagggttaggcttacctaaactgaactcatagtagtaactcctaaatcaaacatacttggaaaaataaaatggaacaaccatggtgacaaatttttagaaaattttgaatagtttaccgttttaaaaataaagtttaaatgttttgttgcactcatgactgtattttattatatgcatagtaagtaattgtttgaactttattataggcactacatttggttaatggtgattatctttttcatatagcaactttgctaactcaggaggagtttgaaatgttgatctgcattatgtgggtgatatggacggatcgtaataagattattcatggagatagaaataaggatgctgctgctttggctttatatacaacaacatatatgaataattatcttaaagctaacaacaattctactactactgctactctattttctcctacagtaaccaacacttcacatactgctgcaacttctgcaaatgctgctgcaatgaaggctcgccctacagaaggtgtaccatggaagccgccattactaaacaaattgaagcttaatgtcgatgcaacaatcaatacagccgacaaaatacttggcattggagcaatcattaggattcatgatggccaggttgttgctgccttatcaaagccggttcaaggatgctttcgatcagacgaaatggaagccaaagctctatttcatgcactcaattggatcacacaactctctctgaaaattgattatgttgagaccgatgctcttcgtgtttcatcagcaatcaataatgcatcctctgatctatcttctttttcagatttaattttagatgttcgttgtcttctttcctttttcccaagcattgttgtttctcatgttaggagaaatgttaaccaagctgctcatggtttagcaaaatatgctcttggttggatgtggacacttgttggagaggagaaattccttctcctattttctctgttgttgtaaacgatggttgattataataacagtgaatctttcataaaaaaaaaagttatttagaatattttaagaatttatcaataaccttaaataaataaaaggtacgcagaatataaaaaaaaataataaa

SEQ ID NO: 197841 - DNA, 951 bp, Cannabis indica
agattcaataattatctacttcagacatgttggcatcttggacaataattatggtagggtatttactaggagaggagtagcactaagtttattttttttaataacctgtaaaaacaattattagctatatagagtgggtacctctttcagaaatctcaaaaagagagcattaacatgtaaatagaaaagaaaataataaaataaacaccaatgcagacatttccatggcaggtgaagtaaccttccaaataaatgcatattgtatgttagaaaagcttcccgtgtattaatcatacctttccatcttggtaaatgaatgcagatgcttcaatataagctactgcttgatacctaacatcaaaagtaatatcaattaattgatgcatagcatattcctcgcagctttcaaccactgttaaaaagagatatcttttcttacccaaggttaagaaggccagcaacagtgctgatgcttatatcaaaatccactttgggttgtatgatgaaatttccttctcttatgggcttagcaatggtaattccacaagaagcagaatcaggtttccgcagttttgaaaaaaatagagaccatgagtatagcaatgaaatacacaagggttttcagtacaaacctcccttatcaatagtgcaaatcttccctcacatattctaacacgtatacaatcactttcggtcaactgtccattagtaggaattccaggaagcttaaaatataaatcaataaaattctgaacagagctgcagaactttgcaggatcaagaattttcaaaatatcttgataagctacctgttagcatttgaatatcatacataaaggtcagaatcaaatcacaaataaaaaaattaatatgattatagtggtgtggtcttacttgcttgttactcttcagcacaaacaatgagctctcaggagaaagcacgggatcaaa

SEQ ID NO: 197842 - DNA, 681 bp, Cannabis indica
acaaatggcacgcaatggcctaataaaaacaacaaacaatcattaagtatagataaacattattttattattatacgactttaaaaggacaagagagtataacccttgagtacttcataaatcatcaggttacctcccttaaaaagcttaaggagatttcaagggatttccaagaacatatataattttctatacatatgtgaatgaaattacaaaagaaaagctaatcacaaaagtctccctatcctgatgaggtgctactgcttggtccacaacttgactaataatcaagcaccaaaacatgccacattacaaaatgacccgttgtgggtgtgctatggggcagcacgccacacccaacgttcactcaacaacttacacttgttatcaagtaaatgtaatgtgtggaaaacgagaacactttgtttgcaataagtaatcattcttgtaacatgtgtgtaggaaaggctgctaatgacattaaacatgctatatgagattacaaatctgccaagcaaatatggaagagagtggattttggaaggctatcaactatcaagagctttaaaaaaaatgatattttgcccatggcttggcagatctggtttgttaggaataaaactgtttgatgaggaggagccttccccaagaccagaagacttaactagaatggtgttggaa

SEQ ID NO: 197843 - DNA, 1279 bp, Cannabis indica
aaaggggatgcaatccctataggctttccacaggataggcttcaaatgctcctggagccccagcttccaaatcttagtacaagtgttatcctggaacatggtagcagtgtgtaaacacctataggcagccttaattgaaaactcgccattaggactatttctccacaccagcctatcctcttcactgaaatcctcagtcctacaattcaagattacctcggcaatcgaaggcctgaacacccatttcacttcagtcgtgttccactctactccattctttgttaaaaatgcatgaataggtaaatccgtcaccacatgaggattgattgcactagcatcaataataacaccatcgccacaagaccagccattattccacacttggattttcgagtcatgtcccattaaccacaaacaattatcattgatgaattgcctggttttccaaatcccccttgccacatgcgaagcataacgagggagattgcaatgccaaaagcctgactcacgacaatattttgccgtaaggatattaacccaaagagcgtttgtgtttttcaccatcagctaccccaatttggcaagaaaacacatattaatatcacaaaaactacgaatatcgagaccaccacagtttttaggtttacaaatagtgttctagtttacaagagcgaggtatcgtcccccatccaggtttaccctccaccaaaaatgtctaaccaaggcatccagagtgttagtgatactactcgggatcgagagcacaaccatattataggttggtaaagtagataccacacttttaaataatgttgttctcgcgacttgagaaagtaacttggctttccaaccttcaattcttctcctcaccttgtcaataatgaagttaaagtcattgcatatgttacctttcacaaataagggattacctaggaagagctcattaccatccataaactcaaagcccataatctcatccaactccacaccctgctccaaacaacaattcttagacagaagaattttttgtttacctctattgacttcctggccagaccaatgacaatattttaaaagtacctcacagagattctccacattctgcatattggccttcataaagaacatagtgttgtctacatacattaaatgagacaccgacggaccattcctcgagaccctataaccttcaagcatcccctatctctccttctccatgatcaatcgagaaagaatctcaaaatataaaatgaataggatccccctgccttaaacctct

SEQ ID NO: 197844 - DNA, 1042 bp, Cannabis indica
ataggggccttgcaatatctcaccatgtctcaacctgacaatgcctttcctgtaaaccagttgagccaattcatgcaatccccaacttctgaacattggagtgcctgcaaacgcattcttagatatctagcacgtacattggataggggttaacctttaaagctgctacaacactcgatttacagggttttactgatgccgattgggctggatactatgatgacaggaaatctacttcgggctactgcattttggggaaatctcatcagctagtgttcaaagaaacaaactgttgtagcaaggtcaagtacagaggctacttgctctctgaattacaaattgcagttcctacttgccccattctatggtgtgataatttaggagcagggtccctagcttccaaccctgtttttcatgcccgcacaaaacatatcgaaattgacattcatttcgttcgagacaaaggcttagctcaagaacttgatatttgatatgtagattctcaaaatcaaatcgttgatctcttcacaaagcctctggcagcatctcctttttttgttctttcgagagaaattaacacttggtcttacctagtgtcatttgagggggggtattagagatgtaggtggttagtcggttagttagttaagactgttcataactaactaatttttatgttagtaagttagttatctttttactgttgttgttgtacaactggtttggatatcattgtaactaacttcttgtatcaatccacctatataaataaagagatcaacaaggccaattgattgattgagcttcacttttcattccatctgttttacacttctttctattttccatctcacctttctctcagctcatgaactctggttttccgagtcccttcaaagaaaaataagatcatttttttttaaaaaaaatgtaaataaaaatttctacatgaaaaataaattaattttttcaaaaatataattgataagaaaaacatagaaaaaaaaaataagatcatgtttagaaaaaaaaaaattgtaaa

SEQ ID NO: 197845 - DNA, 1077 bp, Cannabis indica
gctttccacttagttggtcttaagggaactcccaagtatttgagagggtactctccttcttggagagccaattctgtcatcatagcttgttttacatcctctttcacaccaccaaaatagagttgggatttattgatgttaatggcaatcccggacgcagcactgaattcatccaaaattccccttacaacttgtatagagccaaggtctcctttgcaaaatatcatcaagtcattcgcaaaactcaaattaacaatcttaaggttcttacacaaaggatgatacttgaattgagattgattagcagccaagatcaatcttctggtcaagtattccatgattaacacaaataagagcggagaaagcgggtcaccttgtctcagtcccttcttgccttggaaactcccttggactcttccattcaacaagatagagtaggatgtcgattttaagcaagtcatgatccaagatatgaacctgcccgggagtttgaatacattcaaaagattctgcaagaattcccaattgacaatgtcatacgctttactgatgtccaccttgatagtgcgtctcggagatatgtttttccttttgtaattccttaggaggtcttgaagaatcataacattattagctatggatatcccttgcacaaacgctccttggttctgattcacaatacccggcagcacctgagaaagcctagaacaaagcaacttagtaatgcacttgtagatggtggaacagcaggcaataggtctaaactccactgccctggtcgaattttccgtcttagggatgagggtaatcatggtagcatgaagttcccgcggcatgatacctgtcatgaaaaagttctcaattgctttagtgaattcagctccaatctcaggccacattttcttgaagaatccagctgcataacaatctggaccaggagacttggaatccggaatactaaataaagccttttttatttccttgctggtgaaaggtttgatcaagttcagttgttgctccctgttaagattgctccccatctccatgcagtcttttcttaagtcttgactaggtctt

SEQ ID NO: 197846 - DNA, 1046 bp, Cannabis indica
tgttgatatcatatcaacaaactaaaaactgttaaaataaatcaaagccaaagcaaaattatcgataaaatttcgacatcctatcaaaaaactcaaaattcttgataaaattaaaatacaagaaaaattatagataaaccatagacaaaatgtcgatatcctatcaaaaaactcaaaactataaaatatcaaaacacaagaaaaattatcaatacgatgttgatatcctatcgacaaactcaaaattcgtaaaactcaaaacacaagcaaaattatcgacaaagtcaaaattcttaaaaaatcataacacaagaaaaattattggtaaaccataaataaaatttcgatatcctatcgaaaaactcaagacttctaaaaatttaattaacaaccacaatccaataaaaaatcatcgacaaataatagataaactaccgataacactgaagaaaattgaaaacccaattgagctaaaactatcaactacctatttgatttttaatcgatatcacattgataacctattaacaattcatcaataacactgaaaaaaaactaacataaaacataaacaactccaaaaactcaacttatctccaaaaaaaatcacaaaaaatcaataatctcaagaacatacacaaactcacaagtcaatctatgaaaaatctacattttcttaagaaaaacttacatacagttttactgtgttttatggtggaggtagttcgtggtggtctgagctctgtcttagtctgtttcatggtggtggtggcatcattcaacagtgagtatggtggtggtggtggtggtggtggtggtggtttcaaacttttcaacagagaagaggacaagcgtctgggtttgctggcgatggtggttaggtgaggaggaattttgggttgggtttcatttagttggtcgatagggagaagctaagtaggaggattttgggggttgtatggtttcgttttgtgttttgggagttttggctttgttttcgtcgggttgagaatggtggtaggtgaggaggtgcgctggtggaggag

SEQ ID NO: 197847 - DNA, 1641 bp, Cannabis indica
caacaacatccacttctgaaattgatcaactactacctgatactgtcattcccactatcagatcagtacaacaacaaattcatgcttcccaaggtgtgttactgccaactgcaccactaggatcagttgcataccagcacaatgctgctatcacaataaccaagaacattagtccaattcacactgattttggcacacaagaaattccactaccagaacaaatgcattctggcctcactaatcctacaacaatagatcccacacaggtagcctcaaaaccacaacagatatttggtactaatctcacaccagattctgctgcaccagaattcacaccagctagttccataccagcagaaacgatttctggcactccaactattgagccagaaaatgctcaaccttccaccacaatcacaaggactggtaggcccttgataaaaccaaaacacttgacagattacatctgtcatgcctcatctactgctcatccaattgagcaatatctttcttacattaaactacatcccacatttcgagcagctgttcttgcagcatactctcaaattgaaccgcaaacttatgttgatgcctctcaatttaaacattggcttttggctatggacaaagaaaccgatgcccttgaaaaaaacaacactttggttgtcactaagttaccccctggccataaagccattggttgcaaatgggtgtacaaagttaaatataatgagagtggggttgttgaacggttcaaagcttgcctagtagccaaatgctacactcaaaggcatggcattgattactctcaaacttatgcccttgtggccaaatttaacacattaaaattttttttagctcttgcagccatgaacaactggaatgtacaccaattagacatcaacaatgctttccttcatggggatctccatgaagaagtgtacatgaaaattctcccaagttatgaagctcctcctaacacggtgggcaagttaaacaagaatttatggcctaaaacaagcttccaggcaatggtttagcaagctaagtcaaactctcatttcaaatgatttttctatcagtcacttcctgacaactcattattcaccaaaaagaccaacaccatcttccttgccattctgatatatgtagatgacataatcattgctagcaacaatgacaatgccatctctcactttaaaacatatctccatgacaaattcaaactcaaagaccttggaaccattcagtttttccttggtcttgaagttagtagaacaaaaaaaggcacctcggtctcccaaagaccctttgccatccaattactcaaggacgcgagatacatagccgcatataactagattaatctatatatttatacaaaaaaaaatataaaaagtgataggtggcattttgtatgttttttcttctatttttattaattttttaagttttcatattttgagaacaaaatagtgtgaacaagtttgatataacattatgtttgttttgaaaagaatcccacatggtttattagccattttggattctatatttatatgtataagtaaaatatttctttcttaatttttatttgtcacaaaattagtatgtggttaaatgaattcttgtaattaattc

SEQ ID NO: 197848 - DNA, 1861 bp, Cannabis indica
cggttgtgccatagctgaaactctgattgggatggctgaaaacatgtcttgcaaccagaagcagaattttgagaccctgagatgacagtaaaggcagatttggaattcgacatttgactctctgtgttgggagatagggatagaactttgaattggcctggatcaaaaatatacaggccattgtggagagtcccagtcaagagaatatccctggaaacctggtccttaacataacaaacatcagcatgaaactcaaagaatacattattgtcaagagcaaatttggaaacacttagtaagttcttagtgatctcgggaacatggaggagattatttaaaatcaaaggtttagctggatctttagacataatttgactgtggccagagtgtttaatcaacagacctgtaccattgccaacatatagttgatccgagccattgtaatcagcagctgttgtgagattttgcaagtctggtgtgcagtggctagttgcaccagaatctggataccatgagccatcatcagcagtgtaggtctgagctacattagcctgcaccgagggagcatcagttggtgataccacaccagtgaaactcttgtcaaagcgatagaaacaatcgatgaccgtgtgtccaagcttatggcagagctgacactgaggcctgttctgagtttgagccatttttcctcctctgttactcattactgagcctcttccagcattaaacggcataggtgttcctcgagaaaaattaccaggatgatagtttcgattaggatggaagaaatttgagtagggagaaggaaaattatggtaagatggatggtactgacctcttaaagtgccggaacttctaaaatttctgttgaattgagctaagttggcttcgagttgtggtaggttctcagatcttgaagctgtatccacagtggccatattagcacttagatccacttccttgtcagtcttttcgattcttgattctgaagctagcaacaaggcttcgatttcagctacggtatactcttcaatgcgagtattggatgagatgataaaggtgtcatactcggtaggcaagcctttgaagatagcagcgatatgatcacgggaagatagagattcaccgactgaggcaagcaaatccacatgttgtttgactttgagcaaatattcatctagagacgatgaacctttcttcagattctgaagtttcgttcgaaactccaggatttttgacgatacttgaagtgtataatgtttctccagggcgcaccagatctgtcttgatgtattgcagccaaccattctgatgagaaggctttcattcatggaagacagcagccacgacacaagaagttgatcttgaatctcccaattcaagaattctggattgaatctttgagcagcttgatctgcatcagacaagtactgaggtggaggagctaagtcttggatgaacttctgcagctgatgtcctttaatggcagcaagaacttgttgcttccaaaggaggaagttatggtcattgagcttcacagatagcgtatgactaaaatagactggactgcgattgttttctgggtctcgagatctgtttcctgggttagcagaagggttggaagtcgacagaggggcctgaggattcgtggagccattaccagcaccattaacagcaacatttgcagtcaatggtggaaaaggctctgataccatgttagatctagtattgtatctagccatggagaaaaacccagagaaaaggaaaaacaaaggaaagaagaagaaagagaacgaaagatgaagaaagaagaagactgaaagaaagacgtacttactctaattagtagtagtacgaaact

SEQ ID NO: 197849 - DNA, 1043 bp, Cannabis indica
atagctggagttatatttgacccaatttaacagcctttacataatactttagaaggttcttataactaaaatttggcaagcgttaattttacttcaattatatatatgtgcatcaaaatagggcatgtgatgcaatgtatttgtccaataaattcacatcacaacaggacaaagagtttattaatatgcatatttaaaattttacttaaaaaaaaattaaataaaaatgaagaggaaaaccaaaatataaaagtagtaccctgattgcatgcagccaagattgatgatgttagagtttttgtgaatcttccattcttatatccatgcataatcatgtatttacaaaagaaaaaaataacaataatttgtatattttccttacttattttatagcaatttgcacatagcatgaataattagacagtgaccaaagtactattattcattcaattcgatccattcactcacaattttagtcacttaattcgactgcccacattaaatttcacttatttgacaaactctaatttggtcatttaaaaaaaaatattctagtaaagcaaaaaagtaaaaaaaaaaaaaaaaaatctacttgatctgttgatcgtcaccaagttatcatattatctttctcatgatactgtaaaattaattaataaaattaatttgcttcaatattctactaggaacttttgaccaaaatttatgcgtatacaagtgtaaaataatacaaaaattgccagctaagcagcatgtgatatgatataaatatataatatatatttaaagtgttcgtgtcattcaaaaggtagtcaataaatctatatataattgttccataaactatattttatatgcatagattataagtagtaaaataacataatgatggattttatagcagtgtcatcacataaaagttattgggtcaaccaaatatgcataatactagagattcaaatcaaataaagttccagagtatttgaaagtctacaaattttaaaattttattttcactacatgactttggtcaaaagttttca

SEQ ID NO: 197850 - DNA, 2253 bp, Cannabis indica
tgaaggggggtatctttggtgaatttaagcaagtcgatgtattagcttgctggaggtggcgtaatttaacctattttggagaaatagaagttgtgtgtttattatctttcgatggatagttttgtgtaaaagaagaatgatggaatgggaacttggttgaaaaaacttacgagttgtcctctttattagtaattcttttatatgggtgacaacttgtagggtaagtgtataacttatcgataaaaaggatttcagtggtgttctaaaattagagtagagtcatagatcatatcgatctatcaaatttgaaccagtatatatcttgatattaattttattattttattgctttaatcgtttctaaattttaatgctctattaatccctatttttctctcattattgattttgatttattactcttgtcattgttaattatttagttgtttaaaatttaactattttcattctacactattagttataattttcccacattttctaatcaacataaattaaaaatatgaaaaatcacaattaataaaaattctcttgattccggtctctgtaccagatgacaaatgacatgtcgttagaatagtacggatacatattatatgtcgtttagaaaacttttattcatacaaatataaagtaaaggtagcagtagtagtaagttagtaacgagtaacgacttggctgcctcaaacatcttatccaactctgctttgaagcaagagcgtggcaacaacatgaacgctttgccctccacttccttctgcaactaccaaataccaaagtttaagctcacaaattcaacttcaaccctcaaccacatctccttctcccatttcactactccctctctcagcagaagcctcagaatttatgctaattccaaccaagttgaaacacagcctcctgtagaggaagaacccaccggtcttgaatccaaggaagcaactaagccctcctctgttccacttgacaaagatcttaaaaaggtttcttctctctctatatctctctctcttgggtgaattgggtcagaagggatagcaaaggcaattgggttttctgggcttgttaagattagtactgttttgggtaatgcttactttatacgatgtttagaaaatttggatgattagtttggagaaagtttatgtgtgcacatcaattttcttcaagtcaatagattttgttgagaatcatggagatggtcactatctgtgtaggtgcggatcgtaatcctatgggtctgataccatgtcgagaattatggggtccatctcaaaaccaattggcaatgaatggagtagcccatgttcttatatatggctcaattctctaccatttattccacgtgggataatgtccgatttgatattgtatgtgttgatatgttgttcatataggttgttcaaaaaactgctgcaacctttgctccaagggcttctacagcttccaagaaccctgcaatccctggaactgttttatacactgtttttgaagtacaaggatatgtttccatgttgttaggtggagctttgtcttttaatctactgttcccttcaaatgaaccagatatatggagactaatgggaatgtggtcaatttggatgttcagtaagttatctttctttctttcttttttcatcatgtaatcaaacttatttccctagtgtagaattcgatcatcataacataacaagtaacttatttcaattttttcagccattccatcattacgggctagagattgctctaaaaatgagaaggaagctcttaactatctcttccttctagtccccttactcaatgtagcaattcctttctttttgaagtcttttgctgttgtttggtctgctgatactgtagccttctttggcatgtatgcatggaaggtatgttttcattcaacacttgaggcaatctctatcttaattctactcccttacttctcattcattcttctgaaatatattgtgtgttcttctactacagcttggttggttgcaaaaagaagagtaggaatcctttgatggctctcttccattgagtaccataaataggcattttgatttagcagtgaggcactacagaagaaaaagacaacctttttcatgaagatacataatcatggtattcaagcccaaatgatttgttaatatgatgtattatatggggaaacttcattataacatttgggtgctcattaatacacctgaattcttggtttttttttttttt

SEQ ID NO: 197851 - DNA, 1316 bp, Cannabis indica
aaaaaatattataataccttacagtagtactggacaccattaatacaccttaccccatattagtatttagtatggttagcaatgtagatatattaactaaatcaagattagtatcatttatttaatacttatatgtgacactcataaattgaagagcattcaatctaataactttaatgtcggctaaaggacacattaagctagatgagttgcttgtaaacaaatgtcacattctaaaaaatttagataataaagttttgaaaactgaaatatctagaaaaaatgacatcttgaaacacacatagatatctttcaaacacaattctattcaaaattagcctagtccactaatgcattatttgaaagattatttctttgaataatatacatacatagaatgcttcttttactaggggtccctcctatttatataaaagattagatttcaaatttttcttaagaaaaaaaaaaggaaatttcatttatatcaaaatcaactagggaaaaatatgtatttttgaacattgttattaaataccttaagatatctaactatataatatataataatgtgatacgttataagtggttaacagattcttatgttatttattaaataaaaataatgtgagatttgatattgaattcaattaataataatatgtcacaccttataatacatagtattttaaggtatcacttaatatttttctttcacaaaaaaaaaaaaaaacgttaaatgagaaaagacctatatcgtaaaagtacaactcgtaattagttttaggtataaaaaaacaattgttggcaactaaatgagccacacaattgagtaatcaaattcctcattgctcatgggttatagctaacatttaatgatatgaacaataatagaagaatagaattgatgttgaataaaaaactaacaaaaactactttgtcttttttttttttgttaaaaataatatgtttaatttttttactattactactacgtggtattttaagatgttcaatatcatactaatgttaatgtagtacatatttataaatcatttattaaattgaaatttttgaaaattaatattaaaatgtactaataatagtatactatcttttgtaatacttaatactttatgtgaccattaatattttatttattaatatatatctttattaattttcatatatatatatgaatttaaaatatcttattgatttgtatgcacttagggtggatggtgatttagcttagatcgatgattatatctttcttattgatttgtattaaactcttggttgttgttaaataagag

SEQ ID NO: 197852 - DNA, 681 bp, Cannabis indica
attaacaagataaagttggtgtacaagagattgatatgaactaaggtggtgtttggttaaaaagaatgaaagtatagaaacagaaagaatgagaatagaaatattatggaatatataaaatttaaaatacataaaaacaaaattaataaaaaaaattattaattttttttttattgttatattggaattagtttttttttttttttaatggaatagtcattccaccaaaatggtggaaagaacattttattataatgtcattctaacactttaaaatacaacaaaacaaagaaatagaataaaaattatttcctttctattgcattttctatttcatcacctctaacaaaacgccaccaaattcttaagttttttttttttctttttaaataaagcagctaatagtgttttattgttttcttagaaaataggaaactggttatcttgcacgacacatatattcatatttatcgaagtatttaatttttgacgtcttcattgcaaacccaatgcgtatattatgctagcttctttctttgtttttcttattctctccacttattatgtactttaataaatacttgcataatttccctgcttcagacaccaaataaaatcttcaaacgaacaaacttggccaataatggggaattatctgactctttcgtcttgccctataag

SEQ ID NO: 197853 - DNA, 1699 bp, Cannabis indica
caatctttgattcaactcatatgaatctacgggtgaaatatattaattaatcctttagacatgactaatagtacatagccaatttccaaccagcttattcaaaagtgtaaaatataaacaaactcacagatcttacacagatctttgggaatactaagaaagggacaaaatcatctgctacttcaaataataacaataatattcgtttcaaggtaagttctgttatgactgccaatggttgtgaagaagaaaaattacttaatccattaacaatgaacaaatctaaaccattaaagctaagtgagaatcttatttcatcagttactgctactgtttttgctgagaatcttaagtttttgttagactaattttacacttcaaacaagttgaactacgtagttaccttaagttcctttagagccttgggtatagcctcaaaccctttccatgtatattgattcttagccttccttgccagaacctataattaaattaaacaaataataaagcttagaccttcacacaaaacaagaaccaccaaggaaaaataaaatgagaaatccaatatttggtgtatcagaaaaataaataacccttttaagttcagaattgaccactgaatataggtcaatctgtaccaatccaatttactctacttatttcaaggaaaatattgaaaaaaacaagaaacaattcatcatcaaactgttttcagagcatgaacccattataaagccctaatcatagtccattgcagctacattaactctgtttggttgctaagaaaatacatattttcttggaaaaccaaagacagccttgaactcaaaaatatatttatacaaaaacatatatgtatgtgtgttggagctcttaagccagaagctggaccggaaccctcacatacccattctgaaaacatatattgtattgtcccgcaaatacttcctagcagtactttctcctaagccagaagttggaccggaaccctcacatacccatttgccttcaacatactcgagaactgggataagaaaaaataaaaggttagctaacgggtaccttgaaagagatcttacagaaagcttgttgcataaaaagattttaacatattactgaaggtagaaagatacccatataaaagtgatcagtttctggatcatcaatgacttcgacaagattgactatattgggatggttcagcatcttcatgattaggacctgtgaaaaaagggttaatatcacttagtagacacccaactttataaatttatgaacccacatccaccaaagatattagaagaaaaaaataacatcaaatcaatcattgcgctatttctctatgctctgttaattagatatatgtaagaacacagcagaaaaaggaaaagcaaagaatgcaaactccagttgattgtgaaattggacaataggatgcgaaattattcactaaaagatattgcaaaagatgttccccaagttaagaataaggcaagacgtgttacctcacgatagacatcagtcatagctgtctctgatggtgcaactcgcagtttcaacaaatgagacttatgaaaggccttcatacaagaggaagaaaaaaaaaggttagattaggataagatcagattttcttagtttgacacaaatctcgaagttcaatcaaatatgcacaaacaataacatgcagaagagcaat

SEQ ID NO: 197854 - DNA, 726 bp, Cannabis indica
taactttgtaaaggtgagttaattaactcaactcttcaactcttgttattatcttttaggagttaattatgtattattaaatctcaaaaatatatataatactcattattttggtttgaaatcattaattaaaataaattgtattactcaatcctctattcttgctataataattcttttgcattacgacttttactacactactacgtaaagagttttaactacaaacttttaaattagctttaaaaggattgcaaacttttaaatgagtttgagctcatcaaaaaaccctaacaaacccttataaaaccttaacgaacatccaaccatcttaaccacaaaaaaaaaacccttcaaaaccctaaagaaatacccctcttaaccgtcttaactgtcttagcccaacaaccactgtccctagcaccgttggcgcatcaaccacgaagatcccaccactaccgacgaaaaactctctctctagcaccgactcaaccaccactgaaggtcccatctttcttctttttttttttgccagccatgtttttcttattatgtttactgttaccaatttgttcgcatgtggttctcgcagctaactgtatgcattttttttttaaaaaaaacaaaagtgttattttacgttgagatctatgattccttagttaaattgaactctcttgctctattcatcattctctgtcgttgaactgccattaaaataaaaaa

SEQ ID NO: 197855 - DNA, 1854 bp, Cannabis indica
gtatagcaactcacatagaaaccggagaaaccactttagatacccaaaccgtaaatttgaaaaaaaaaagttcaaaaaatagtatatacggtaatttcccttaaaattattagtataattgtctttttcaacaccaattattgtctatctcatatgggtattcatcggatccaatttgcactattttacttattgtgcatttgatattctgcactaactgcaaattttatactttagatccaattaaatttgcatagtaaatcaaatccaatccaatacgaattaattgaatcgattattttggttggttacttttaatattaacttatttaatattattaaatatatttttacacataattatcaacaacataaaatattccaacaataaattaaaataaataaaacaaaaataacaaattcaattcaaaaaaattgtatgcataaaaaatgtttgttttgttttagattatattttctttataaataataataaaatatactggtggcattattcttctactatgtagagtagctggtattgaagacaaaaagtggatgtgaaacagttcctaacttatcgatactccatcaaacatgggtataaaatactgcttcttactaatgaaataaatatttgtggattagattggattagttacttttaaatgtcaatcaacattcaattctcacaaataagattttaaatttttcaaaagataatgcagattagattaaaattaggtattttataagtgtactcctactttttcaacaccaattgaaattattactattattccattgggttgtttagtaacaagaacacacaacaataaagtcttcgtcatgtagacaatttatacataaaattactaaaggtaaccttagatttttctaagtcttccaattagaccaagtccatgagttcgacagacattgaatatgatggtcgactaatattgtaaaataatttagttaggaagaattatattttatcacagtgacattattaattatttttgtccctacaggatccattttaagaatttaacaaaattataaatacttaattagcagaccgcttaataacataaagagacattactaacatcggccaacaaagccttacaatctaaaataatatggccataaggagaagccataagtttattcttttttacatcattaatcactctaagacaatattcagactcaacaatcacattagtccagccagtactcttgatccaactcaaagcctcatttattccaatagcttctacctcatgggactgaaatgtaccaaccttattcatattttttgtgagaataattgctccagctgaagacgagaaactggtcctacaccgtacctcttctcactagcaaagagtacaccatcaacatttactttgatttggttgaaatataaatataagccagtagtacacaccccgcagtattgcatgtgctattatttattgattaattctaacaactttatgatagctaagatctgatcaattggcgaattagagaacagcctaacaacatgccatccaagcacaaggacacgcaatttagacaaggcagaaatctcttgtatgcatgtcgcaatatttctattcgtcttcgtgcacgtaagcgcgaagcacatgttgtttttgtcgaaaaaatcgtagcacccattaatgagatcgttatttagcattaatctactactctcactctcctttagcatctccatcgcattattaacaatagtaggacgatgttctatctgcagcccagtgtcgcatgttcccgatcgccaaataaagcaatgggtatcggagactccgtactggaaca

SEQ ID NO: 197856 - DNA, 517 bp, Cannabis indica
agacacactatcgagccttatatcaggcctagcatcgggcctacattgggctagtatcttcaacctttatttttttccaacaacaaaaatacatcaagcttgtatcaggcttgcatcgaaccaggccaaaaatctagatttgcccccaaaacacttattcgaccatttcaaccttaaatctaatccaaactcaaaatcacatacctttaaccctaaatctaaataaacatatcaataatttcatatattttaactctaaatcatataaaaaaaaatatacttacttttgacgatattgcgagtggagaatttgtggtcaatcgttaggtctttggatcgttgtggtcgtggagagaagggactgaggttgtgggttgtgggtcaagtttttttaagtgagttcaaagagtaggagagaaaaaagaaaagaaagagggtcgcgtatttaaaatgagagatataaaattagattttataattgttaacatattctatataataatatgagttaagttta

SEQ ID NO: 197857 - DNA, 2692 bp, Cannabis indica
aaaagaaaccactaaactcatggtcaaaacaatcctcaaaaagcattgtaaaaattataagactttacacaattatacttgcagaaataaataatgacaattttgttggtaaaaagataatatacccaaattttgtaatttattattatatataaccaattacaactttttttataaaaactgatttacaacttttcttttataattttactaattaagtacaaaatatcattacgttaagaataaagagaatcttaatggaaattaatacacaatagcataaaatcttcttagctatacttggaacttttcgaaaaaaatatttggaattggcgacaaaatgtcaatttgggcactgggacctagcaccgggtcaacctaggcgctaggtcccagttttgaccacttggtgactccgtttgactctcagaaatactcgtatttaaattgttaatgaaaacagagaatatgcccagaagacttcttgggaaaaatgcttgaaaatggcccaggttgacaatatgtcaacctaggcgttggggtctagcaccaggtcaacttgagtgatgggtcccgattttggctcccaaatggttctgtttgtttcctgaaagcacacgtatcttaattgatgatgaaaatggagaatatgcccgaaaaacttcgtaataattgttgttgaaaatggcccaggttgacaatatgtcaacctaggtgttggggcctatcaccaggttaacttgggtgatgggtcccagttttggctcctagacggctccgtttatttcctgaaagcacacatatcttaattattaacgaaaatggagaatatgcccggaagactttgtcataattattattgaaaatggtcgaggttgacaatatgtcaacctcggtgctgggatctagcactgagtcaacctgggcgctgggtcccagttttggcctccagttcaatctgcttctttcccaaaagcccttgttttctaattttggatgaagacaaagaaaatacttgggaaaagtggttggaagtgccccaggttaacaacatatcaacctaggcgttgggtgcatcaccaagtggtctgggcgtcaagtgcttaaatgcctcaaatgggaagtgttctgattctgattttagtacctctagcatgttcgtgataagtcttattcatgtctaagcacaaattttgagccatttgcacagacggacccaaaacctaaaaccctagttgggatgtcaacatgggcattaggcacctaggttgactctcgataggtcgtttcaactcttttcagttctcaaacttcagacttgaatccttcttgacttcttggtttaaacacccattctggagccccgaagtcatcctcagcgtagggctcagacccttcccagagttgactgttatgactcaagacacttaactccatgaatgttttccttttttctatgtgtcaaacattaatgatatcatcagggctagttttcgtgtaaacaatgtttaatatataaattatattaaatctcgaacatatagttatctgtgattacagtgttgtcaacacagtgaaaaataatcatgattatatgcttcaaactatttagtcctacgatttatcattgcactggatttacactgacgtgataatcagcgatgtggtttgcttacacttggataagtggaatgtcttttccagggcattagcaaagcaaacttgtatcgaatgtattggttatacatcgaaatggaccgatattgacagtggaaaagatatcataaacttattgttgtatcttttcaagtcaatatcacttagttaatcttagatcaattattctcaatcctgagatgactaagctttagattaattgtactatactggttctttgacttgttcgttacccgcttacccataagactagcctatacttacatcttagaaactcgatagtgcatttgagtaggagcataaattataaatatggaatttataacttctgtaactatttagaagtaaaatgataatttccttagagcttggttaaacaatataaatggaagagctcttattttgatatttatattagtttaccaaaatatcatttataaagaactaagtattgtaaggataaaatacatcgaagggtaaaacggtaattttagtccctatgtgatgtaaactgtctataaagtatcattgattatttagactgaaataatggataattcataacgtatttatatttagtaaatagagtgttttatgtaatcaatagtacaattctgaatctataatagagtcaaaagggattaataagttaagaaatttacttagtaattttaaatctacttattgggagcttgatttcataagcacatgattcctacatcatctaggataatattaccttgtaggattaattaatttatttaataagtcaattagaattcgaaaataaactgtcttatttgggaattttcactaagtttggaaaattttgagaagaaaaaaaataagggtttatttcttaattaagatactttgtgagtctaactaataaatatatttaaattataattttgtttgataatcatttataattatgaaatagataaaaattagtatttaaataattagattggatttacatcaaaaattagaaaaagacatattgtttcattaa

SEQ ID NO: 197858 - DNA, 1898 bp, Cannabis indica
gagcattttctttatcagcaggaaaattcttcttgtagttctttttcaagaacttggcataatttttagtcaactgggcaacagtctcatcagtaacgccattaatttcctctaataccagtttcttgttttcttaatgaatgagtgcgatactcacatcagatttatccttgaccgcatccttttgtttctttgatttcttgcatctggacagtgacaactcataattctgcaaggacccaatgagctcatcgagatcaagttcttcgatgttcctcatttcttcaatagaggtcactttagacatgaatcttcttatgagtactccaagcacttttcgaaccagcttttaattggagtagattttttccagagcataggactcattggagatatcacacagccttgatttctttacagcatctagtccctcatattttattttcagcttctcccacgcttctttcgcgatttcatagttagttataatctttaactcgttcgtggagacaacattaaacagtgcatgtatagggcctttgagttaaagttagccctttccatttcatcagtggtccaccgactcatgggtttaggtttaaccatttcattctcaatcattgtaggtctaaaccacccttcttctatggccatccagactctttcatcagcagctctcaagaatgcacgcatcttggtcttctagtaagggtagttagcaccctctaacatcggaggtcttgaggttgatccacgcacattccttaaacatttccatcctacacagagacacataagagaaatacagacacctgtactacagctctcaaagatgaaaatcagagagggttagtggcaacaagatcaagagatcaaatcttgaacacaaatctactgactttttctgaatcaagaactaggcaagtataggatctaacgcaaaatttaaaaaatttcaagctctaataccaattgaaaaaacaacttgtacagatttctagattcagattaccgagtcactcaagatttgatttagcaattgtaactttaacattcaagcattaggttaaagagcaagcaataatgaagacagtgatttacaagcttcatcagcattgagaacaaatctcagtcgactagtgcttgggttccccgaacaagggtaataacatccactaaattcagagattcatattacaatctccagttcacaattaggaatttaatacaatctttacaacaattagtgaagtattaccaaggtcaagcaagatccttggttgaatacacaagatttcttgggcatcaactaagttcttcttgaacaattttctccaatctgaaatcccttcagatctgatgacgaagatgacactgaactcccttcagtctaaactcagctcaaacaagctctgatctttctgctatggataaccatcaccaagctattcaatcagacctgcaacaacactgaacaatacaagatatcacacacaatacaacacgataaaaatgaactaaccaagaaaacgatttagctagttaaccaagtcacaaaatagaactagctatatatagaaaaggtagttctaaccgacctaacaacattttatgacaactgttaatacataacagactgatgtggacactaacagaatattcacatgtagttacaacagatgaacaccacagataagactaaaatcactattaatataatctgtcaaaaatatgaaccttacagacgtgagtgtgggcgtgcatgggtgcgggctaacgcgagtacgagtgcaggtcgggcatgcacgggcgcgggcgtggtggtcgaaagcgtgggcgtgggcgcgtgcgtgctaggcagtgtgaggcggattcggtaggagtaggtcgaactgaac

SEQ ID NO: 197859 - DNA, 927 bp, Cannabis indica
gttgtgtcaacaatgtcacttacaattcggaaaattaaattttgccatacaatcaatggggatcttttcgttagaagaatttctttctatagaagaaagaaatgctctatggattcctttgcctactattcaaatttaatataatttatttgattctatgttcctgaaatgtcatcattcatactaaatactaaatttataatgtcatttctatgattcaactttcaaaaattataaaacaatttaataagtaataagctgctgttctgttcttcatcacatgaaagcactttttctattatttgatcattagtttgaaaagaaaataacggaagttctctttaaataagaaaaattaaaaaatgggcacatggtagcttaatagtataaattgattacattatattcatatcttgtctttaaaatatatgacatgaacaaaaatagcgcaatcgacaagaagtgaattagacatttcactttcgatctcttcaaaatttaattaaatagcgaatgaaatataatctaaattttactaatttcatacaaactttaagtaaaaatcaactagttatctaatctaatcagcagttaagggttaattgtttttggtttgggtcagactaaaaaacaaaaaaactattatcattatcttagatcgcacggtcataatactccgcagaattaagatcaatggctccagatccttgccgacgaaatttcttaagcgattctaatttctaaaccagaacgctctgcatcggttttaagctcttttgatggcttcgaatctgcagaactgtcctttccgttggcgccggacacatctgccggagcagtcagcgctgaaaagtatctccgtttagggaatggatgatccagattgtcctgtagattgatacgaattagtactaattgaatatttgt

SEQ ID NO: 197860 - DNA, 1049 bp, Cannabis indica
cccgacccattgacactcctattgtcaaacataccctcattgtagaaagtgacttcaccttgagtatatcattgaagtcgcctagactaaccacggcttcgaggtaaaactggccactaccatgcacatctctcttcttccttcttttgcattaaaacatctcctttattatatggcctaaccaacatatgaattaattggctagagcatttaataatggtaatagtaaacattgtcgaattccaagcaaccacaatacaacctccattatgccaagcattatttgatgtaaaataccatctcaaaaaataggtgaagatacaaagccctcaaattgtgtgccttgacccttgttataaggagcccaactaacccaaccttatcataagagattaatttcttaacctcattctatttttgttgagtgttgagcccctgacattccatgccatgattctatccattagcaagaggaggtactccttctcttctgctaatgtcctcattctcattaacctttgaacactgtccaatcccatcttctagtacattgtggaagttaatactccaaaatactaacaactttaactaattatttgttaagttagttagaaccagtttgccaatggtgtctattattttcaattactcttttttgaatgagctatggtttataaatagttcatgtcccattcagctaacttgtaacttgtatagaaaagtctagagagagagaggcagagaatgagagagagctagaaagagaagtcaagttttttgggattaagaatttgagggtgtactcaagattggggaagaactgctaatattcttcatgtttgagtacagagagctctattgatatccactattggtgtttgtacaagttctactcaatcatattggattcgagatgatgattctcagctagagtatggctagggatcgatttgatctctaggaccggaaccatgataaaactaggtgttctctttctttaaattctatctttgtttgtgttcattttgttgacaaaaagttaatcactc

SEQ ID NO: 197861 - DNA, 1258 bp, Cannabis indica
aaaaaaaaattaaaaaggttaaattgaatttgaataatctaatattttcttaattataaaatacagtcattaaagatataggatgcttattattacattgatcatagtagagttagattagagtagccttgttttggtccaacgttgaacattgtccatcctagttttgactttgactctatgatatttaaataaaataatgtgattagatatttttaaaggacattaattttaggagaaatccttattaatgtattttaatattagatttttgtatattttaattcaataagttatataaaaaattactaatcaattataaaacgtcacattaatattgtgttagacactttaagatacgtaattttaatgtttttaatattttttatttttagacaaattattattgagcattttaatatcgatatattttaatttaataagttatataaaaaaatactaattaattataaagcgtcacattagtattgtgctagacaccttaaggtgcgtaattgcaatgttcttatcttctttttttttttctcgacaaatcgttatttgtacattttaatatcgaatctcatatattttaattaaataaattatataaaaactcactaacaaattataaagcctattagacaccttaagctacctaattactatgctattaattttttttatttttctcactaggtagagagtataagataccttttcaaaacttccctttgtttaaaaaaccttacaaagaagattgtccaaatcccataatcaaaagaagtaaaaattagtgtcccaaaatggcctaagacctactctattatttggctttctcttagtaaacacactagttttagttttagtctttgtttttttttttactattaaattttcacaaataaattagacaaaagagacagatagttaagaaagaggaaacaataggggggttatcactttaggggtatttatagccctatcagttatcacatgatttgtctatacatgtagacaaaaaaaaaaactcatgtaatctcagcaccatacccacttgggtctgattctcaccacaagccaacaatttttcttttttttttcttttaaaaagatcattatataatcaaataaggtgcaatttgtatattttggagtttattttattttctcttctgtcccttttaacttcagtctttatgtagatttgttttctgtgtataccaaaaacccctagtcatgatattaaaagaaaaat

SEQ ID NO: 197862 - DNA, 863 bp, Cannabis indica
tagaaggaatgagtactcatgaaaattctgaagatgaaaggaggcattcgaaaatttgtaaccacaagcagaaagggactaatgcctaataaattcactcattaactaaagagagaaaaagagaaaagaaaaattgactacgggtccctcaatgtcaatagaggaggatgtacaagatttgcaccaaagtctccttgacagggatttgctacgacctatgcacgatgactactttactttgttgaggtcagtggatcttccaactacactcccacattttcttgtttctcatttcattgtctatttattgttgcaattgcttatggttacccctttgcagatttttgaaagctcttacattggaaagataattcaaatgtggggagaaatgcttaactagataaattattgaaaagacaatatttttggaggtaggttgtgtcaacattttacaactctgtaaatgtatgcttgagagtatctcagtgtagctgaaaaagctataaatataatttttgggtaaatctacagtggggcttagtgtctttacctcatgatatagggaagtaaattaagtcaatcaaagttaaaagaattagattgtatagaacttttgctttttgtatgtgtagaaagattattatattaattatactatatgataatattattgtcttattattttttattttctgtaaaagttataaatatattaacagttagactttaggttttggtttcaacactaatatactgaatatatgtaattttaattttttttaatgaaaaactataagataatggtactttacgcagggaaaaaacaatgaattacttttttttgtttgggatttttttatttt

SEQ ID NO: 197863 - DNA, 989 bp, Cannabis indica
tctttttccaaggcatacgatgacttgacacacacattgagagctataccatctgatctgagtctttatgttatcattctttatttaatttcatgacatatattcctatccaatactcaattcctttatatattcctgtactatcacaattcaaaatctcaaggatattaagtatgcattatctaacttaagtgtccaataatattaaccttttcagaattaatattaaatcaatagttcataaatggtaattaagcacaaataaacttaaacgttaaaaaaaactttgatacacaaaatcccacatgctatacaaattaaattgcatctttccccaaaattattataaccacaaaaagtttagctcatgttcaaattaaagtaaaacatcatcataattagtttatatcactaaacccataataatccaaattcaagattaaaaatacaattgggattaaagtggtcactacacaagcctgttttccataatacatcaggataagtctatttagaaagtattattgtaagtaaataaaattaaaaaattaatttaaaacgtgttggtctgtgatccgatgatttgatccaacgattttcttcattgatccgttgagttgctcaatcgatccgacaagtgctggaaatagaaatgtgaaaggtgaatttaatgaggtcagggtaacgaatgcaaaggtcgaaagattctggaatcgaagatagaatgaataagactacaaatgctttggcgatgctctggtgaggctacgcaacaatatttccctctgtaataacatattctaattaggctgtagtagaaactttaatgattattatcatgtttcaactatccacctctgcctatgatgtggagaggtgtgatattcctatttgtgaacaagtttgccagatatcatagcctctgtttcctattttgttgtgctgggatgtatttggacaagaaataagagtgttaaaagaatcaccac

SEQ ID NO: 197864 - DNA, 1014 bp, Cannabis indica
aaaaattatgatttgggttgcttcagcgatttctctggtaacttctatgtggattttggttgcgatttagttgcgatttagtttttatgaaagtttctgtgtcgagttttgcaaaaatatatataaaaaaaaactgttttgaagtgtaaaaatgaaaaaacccctaaaatatattaatttaattgtaatttattattatttaatttttaaaatctcaaataattgtatgtaataattatattattttaaatacaataatctagtttataaaatgtttaattaatcttgataaatttcataaaaagaaagttatcagtatataattttcaaaataaatttaaatagttttaatttaaattaaaaatcaaagtagcatcttccactttgaaatttaccttttttgatatttttaacaaaaaaaaaaaataacacttattttaacatttttcaattccatcataattttagtaaaactattccctttgtcacattttaatttatttttttgtcatatttggataatagatttgtacaatagatttttccaatattataaacaaataattttataactattttcaatatttaaaaaaaaaaattaattcagaaaagaaatagtgaaaataaatagaaatatttggttttggtgtgaaaagtggagtgaaggatcgagattcgagctataaataaaggaaaggcaaacccaaacaaggcgacctgaactgagagaacgacactccccaagctccaaacgacaccaaaaatggctactctcaactctcagcctctgatctggactttgctaggccttttcatggtctccttgacgctgggttcctccgattcacccttcatcgttgcccataagaaggctactcttaacagactcaagtcgggggccgagcgagtctccgtctccatcgacatctacaaccaaggatctctgtatgttattttttctaaatttcaattctttgctcagatccatgtacctttgactttctttctcttaga

SEQ ID NO: 197865 - DNA, 531 bp, Cannabis indica
aaaacatcgtgatatcttgacgcggtcgacaaccacgggccatacatgggaaaaggaatatcatcaagattagccacggtgaccggagttgacagagaacaacccttcctttggtggcccaaccggccacagaaataacagaagataccaatcttctcatatttgaattgaatccacctttttactccagaagccaagtcgaaaaagcatcccgacaccagaggattttcaatattgaagtcaacttggaccctgagaaataggttccaagacgccggattatcttcttcgaactccaccaagcagactttaccaatggtagcgccaagaagcgttccattagccacagagaaatattcttgaggaagattatgaatctgtacccataatcttaaatactccactagacttggtccttcaacactaggcatccactttctaagagcaaaggtgtggcctttaaaagaccatggcccctgctccaaagcccattcactgtcttcttcgctttcaaaaccaagtttaaaacag

SEQ ID NO: 197866 - DNA, 1243 bp, Cannabis indica
tctcaggtctatgagctaccacatagtcttggctaattatcttaacatattggaatattttgtgtatgctagtatgtgaaacctgctaagtgatagtactttgatcttaccacagattgcttggaggcaacttaaacaggatgattctagcacaccagtaaaaaagcctcgcaatgacttgctgttggctcaggtttttaactggactgggcttaaaatgtttattagtcttctgctagctcatagggatttcacctgtgatgagctgtttccttatagtttacttgcctattattatcattaaaacttaagctttgcaggtcaacagcttaaggcaggagctccaaatcttggcttccaacagatcagtcacaattataaatgcaagtcgaaatggtactgatgatttgtctttctatttaagctatttatttttgtaatggctgatacaactatttagctccaacagtttattttgatttaattggctgcatcggtttctatttcttatacctgaatatatgtatttaaattcttgctaatttttttttttttttttttttcaaattttcatatctagcctgtaatcgtttctttaatttgttcccttagaaataaagattaccagcagtcatttttttttattcccgcttcctttagttacaccaagtcttctgctcagaaatgatttctatcaattccgaacttctcttgcatttactaattttttgtttttctctttgtatgatttaggtggcaaaaagtatggtgtaattattattgtagctgtggcaggatgtggctatatttggtggaaggtaagagtgtcatctctaagaactctttctgctagctgacaatgctctacatgaaacttatatgcgggcatatgtgggttgtccattgttcttgtctagttaacactgtttgctatgtatccttaggatctttataccagtagatgtccatttgaatctttaataatcttttttttttgaataattatcttttaaatagtggcaatgtgtatactagctttctcgccactccatttaatgctacatatcttcgaatttaattgataaagtattttgtgtatttcttgtattattacagggaggagggggattatctggtttgatggttgcaacacggcgtagcttatccgatgcttgctcatctgttgagaaaaagcttgagaatgtttactcgtcagtttcggcaagttattccttctgttatt

SEQ ID NO: 197867 - DNA, 1102 bp, Cannabis indica
atatattttttagtattttttaatgaattggtgatgaatagttcggtgaatattaaaataaaaaggaatattggcattaaaactagctaaattctacaatccaatctgatttaattacaaaaaaatagatattcaattatgatttgattggattagatgctaaaagttaaattctaattggattatatcggttattgaatgtcaatctcaaaattcaattaaaaactgatcaaatccaatatatttatatacattaaaaaaataatttatattgatttacataataaaagtaataaacaaataaaaaagtatatattagttgtatttttagtgggtttttttgttcaacttgtagtaattggttgttttgtgtatttattttcatgatattttgttatattttattatttggcaatattattgttttagttatttcaaatgtttagttacattatgctcgtaacaatgatatttttataaagtattaaacttaaaaaaataatgatgtttagttattacgtatttttctttatatttttaagttaacattaaaaattaggtgtgtaattagatatccaattgaaaaattgatccaattcaattaatacttggattggattttgagatctatttagattggatcgaatggtaatttttcaaattaattactaattagattagatcggatgaggataaaaaagttggattcgatcggatgtctagtcctacacttaaccacataaattgattttttgatggtaaaaccctcaaaaccgcacttttattaactatttacctcttctgtttaaaaggcttcgttaagtgtcacggtggacatgccacagtgcacagtgtacacaagtatacacgtggtaaaattttagtgagaatattagcggtaaaactatatgaactctatgattagtgacacttaaccacataaatcgatttttaaatggtagaacccactacaccttacgtatgttagctatttacctcttctgtctaaaagactctgttaagtgtcatggtggacatgccacagtgtacacaaatgtacacgtggcgaatttttaatagtctacataattttaattgatta

SEQ ID NO: 197868 - DNA, 590 bp, Cannabis indica
gtaatatcaaaacaatagtaaaatttggagggtttgacaatcttaatttataaagttaagtgcaataaaatatatgtctagttcagctagtttttggtccatatccctttctttatcaatatcaaacttagtattttcttcttttatttatttctctaacattataaaccaatcaataatacacaacacaatcacactttaactgaggaaaaacgaaaaaaaaaataaaaaagaacaatggcaaatttcgaacaacattgagaagagagggttaaacaatggaggcttaaaaaaagaaaaaactagaatagtttgaagaacatgagacaatgaatactaagaagagcacaaaattcagtgtcgcttggataccggtgccaccagatccagatgtgttaataccgtccgttgactttgaccctcctccaactcctacaatcaaatatttgtgtttgttaacaaacgacataaaatgcttaaaacgacaataatttttttttatggttttaaaaagaagtacctgaaggaatgtctgaggcagaaggagtaatagaagcatcaggtgtgttagtattgggagagtctgctgc

SEQ ID NO: 197869 - DNA, 1746 bp, Cannabis indica
tgagaaagttctgaaaagtgggataaaagagcgtgtacctccccctagaccaaagaagaaggctactcatccatacccacataaatcccctacagatggtctgtatgtttaacctttattttagttctttcttcctttttaatacccttttgctcataagcttgtcttgcagctccaaatgttgctcagttcaatggggctacaaatgttacacagtccactggggcttcatattttactcatgccaatgggtttccaattgttacttatatgactgggtctccaactgttgctcatttcactggtgctccaacttttacaaatgacaatggggatccagctatgtctcatttcgattggactccagctgttacacatgttgctgggtctcctaatgttactcatgataccgggccatttcattattctgctgctttgtatgaacctgcattctgtagcccacattcatcatcagcggttgtaaatcccattaacggtgcttcatcgcctccttggcgatcaagttctgcaccaccagtcattttaccacaactggaaacaggtttcaaccgcttcttgctaaactttggaaactacatttggcttttagtctatttgcatttgtttcttcatttctctgtataatgtttataacctattgcttttcagatgttgagtggttatctatccctgaacttgaggataacagatgctataatagtgaaagaagtgagcctgtgttctactcccaggccatgagaggtaattgatcttaggaaaaaaaaaagtatattttcttttactatataaatacatatcatacatcttatatatgaataacatgtatgcagttactttcaagctcttcttgctaaaccttggagactaaactagtcgagtagtgtatttaaatttcctctattaatgtttttagcttatgttgcttttcagatgatggggcggtatttctccctgcaattgaaaatatctgtccccaaaatagtatgactgaaagaactctatggactgggccagctagtgaaataaatcaccatgaggtctacttctcacaaggaatgagaggtactgattcctaccaaaataaaatatttcctttttgttgctgaaaagtattacattatttgaataacatgtatgtagttatttacttctttctatacttcggaaactaaacttgccttttggtccatttaaattttgttacttaatttctctataaattttattattaacttatttgctttcagattatgggccacttctccctgaagttgcaaataacactcgttataatagtagtaatgaaagcactctaatgattcagccagctgatgaaatatctaatattgagagcttcttgagaggtaactgatctcaccaaaataaaatatttccttttactgatgcaaaactatatttggattacatatatgtaattattactactttcatagtcatgaactcattagctatgattttatttatttggtgggagtagctgccataattttattacaggtattttcatgtttttgttcattcgttcattttaagtttcggtacttggtaacttactgaatcttataattgcagatgatccaagtttagctctactgtatgaattacttgccaatgtcttggaaaaccctaatgcagctggtcacttgcagagacacagacaaatggatcccataaaattagtatcagtatgtcttttggttatgt

SEQ ID NO: 197870 - DNA, 1267 bp, Cannabis indica
gggcacgcagattctaaattaaagcttgaagtccctcagtgggcctaaatgatatgaattgggtcgaataccaatctggacttttgagaaacaaacacatttctcgcttgggcgagcttctgccaaggctaattcatatctagaaggatcttaactccctgtatctagaagaatcatctagcatgtgctggatgccagttatagtttcccattattgttttgtaaaaaataaggaaattattttccttaaatctcaaaaagagaataatattaaattaacatagaaaactacataattaaagatcaataatcaatgcataattaattacccaaaattataggacatgataacaatagctatgaccgtgatcaaaatgccaaatcagcatacacacattgcctcatgaattggacttcgtcagataagcctaaatctatgtattatttgtaaactccccattatagggaaagtgtaactgagtacaacctctattactctttaaatactcattaaattcttcatgcaaagggttagaatttcttgactcgcaaacttgagaatagaatagagtgttcatattcattgtaatcctttaggctattccagtctatctcataataatatagactcatggactaagactcattagcgccccaatcatgtaaaaattctgagtgttgtcttcatatttgattcttttaatcacattttctttatctctaaattaaataattcattttctaaaaatcttggtaaatattttagtgctttcattgagagttgatgaaagtaatgataccatccaagattacattcagtaattatggtactcacccaaactcagtttgatcttcactatactgaccctaaaaagggtgatcctgatcccaatcctaagacgagagatgctaaagatccaactgaggcgaccagtcgccacaaaaaggatcaaaccagtaagaaacctatccctaaagatcctatggctgaagacgatgaatcaagagagaatgattctgatgatcttggagatgatcatcaagatacacttgaggatgatcatcaatatatgcctactgataatgatgccgaaaaggagggtgatccaaacgagtcaaatcatatggtcaccatggccagaaaattgaaaatagtggaggataaattatcgttgcaagagtaattttctttgttcacacacgagaaaatagaaacaatggaggtcgtaatcaaagcactgaccactgtaggcacaaccaatcatac

SEQ ID NO: 197871 - DNA, 687 bp, Cannabis indica
cttgggattgaaatctggtttgggttatgtgtatgtattctctacagatgcaatgatgcatgatggggtgggaatatattgaatttggagggctaattatggtgactgactattgagtgtttgagaagggtagttgttagaaaattcaagcctaaagaaaagagtagtcgagagagcgagttccttttgtcatttttggttatgttttgaagagtagtagagttgaatcagtatatgtagaaaatgtagtcaagtcattttgttaatttttgctatgtgttggagtgaaatagaatggtaaaagagtacagtcttagctaccacgtgtctgtctggttgcctaaataatgtgacgactcacctggtttactgcactgccaatggctagagctttttgaccatttttgagtaatttgtgccgtaaataggtggtttaactttcggttgcagataagtacctaagtttaatttttgacgataataatattgaagttatatttttagaacttccgtaagtagctgactattaagtgtcaaaattatcattcacctgtcatttttttattggtatatttaaattaatttttaaataaaaataaatgactttgactaataaagactgtaacgtgaccattaacttgacacttaacgattagatacccaaatatgagaagaaagaaaatagca

SEQ ID NO: 197872 - DNA, 2384 bp, Cannabis indica
attaacaaaataactgcaacataaaactaacaagtaattttcatataatagtaaaaaccctagaaagattacctagcacgctgcagctcttgtttcatggcttcaatttctgccttcaaagatggagcctgctgcagatccatagtcatcctagccaaatcttgagtcattgcttgtacattgcctgtaagctcctgccttccagcagtgaaatccttaatatcagaacgaacttgatgaagctcagcctgcatttccttcactccacgaagatccacttccaaacgtaaagacttatcaatcatctcttgcatttggacatctttctcgatttgcagtgaatcagcaatatgacccatgcgctgcagctcatgttgggcagcttctaattcctgcttcagagcaacatgagttgccgctagcctctgattatcaactagaagaccttgaatgtcttgatgttgagctgcaagacgttcctcaataattgcagggtgaggagggaggggtctgggaaccatcccaaactgggattctcgcatctcctcaaataaggcaggatggggcactggaccaagtcctcttccaaaagcgggttcatgaactgtagacggtaatccagaatgagaaactcctttcattggaagaggtggtccgcgatttcttccggacatattattatcttgcttgaaaactgttaatttaaatagagtaagcagctatgcaccaattgaaaaaccctcaattaacatacaatgaaaaacaacatccacaatccattcaaagaaagcaaaagtttcattttttagtttaacaatgaagcactaagacaagttaatgatgacactattggcacaatatgaattcctttggcaaaataaaaagttcagtgataatttagcacataagattatcagatgcatagtctctcagttaatattatttacagaaacttgacccaaaattaactgcactgaacacaataagacatgtcaagtcaatttcgctaagtttttactttaatcgtatgatataaatgtagagagagactaaaataaatatcctatcaagaaaaccaaaaatcgcattatatgaacaaaaaagatggttcttcaacccgtatctattgcaataatattaccagaaataataaagtagtataatcgtgtagtgcaaacataacccacgaatcaatcttcagtttaactacgaaaaaagaaaaaatagggaaattcaaattttgaactcaaagccattgatgtcagtccagaaaacaaaatttccacgaaagttttttccctacgtttcctcagttaataagagaaaatttgattttcagacatacaaaagaagataataattttgataagtgggcatgaacaacaattaccaagttgttgcaatggagtaaccgtacaagaaccctagggaaattgaagttgtctggtctagctatggaaaccggcgttgtgcagaagagaaagaatataatttgaggaaagaaccaaatttaacactcgtcttctattttcttttctgattacgataacattggtgagttttttttgcaccctaaaataaatttaaattaattttaaaaaatcaactttaatatttttttataaattatttataattttttttagaaggatcactattattaaattagatgtaatttacaacaacagtaaaaataggatgaggaatttcacccatccaacacacaatttcattcaactctagaacatatttaggttgtttatggacagcttgattagcatgcatactaacatgagaaacaataactctagggaagaaaaataaaagacattaaacatcttaaattaaattaaaaaaattagataaatcaacaaatgtggttgaaagagccaatgagactctaagaacatcagtttcaatatgactaattgagagttgaagttgatgtgcctaatttgatgttatggaaaagaactttagcttccatctcattacttctaaaacaaccttgtataggctttgaaaaggcagctattacttgtcctaaataatctcgtactattgcccccacgcccagtatctttgtctctgaattaaccgcaacatcgacattcatttttaaagccaaattgatcaggtggcctccatgaaacctactgtttttcattgatattaccaatagtggcagctggtttagtgttggtgtatgttggcaggaagtggaaatacttgcagtagtggtttgacgatgtttggttgttatgtaggactctaaatatgtgcttgacgtaagtagcaatggtagagtccatctcgactcttatcttcatgggagactcgattctttcagtccaaatagtccacatatacatataattagatcc

SEQ ID NO: 197873 - DNA, 564 bp, Cannabis indica
ttttttgcggtgcggtttctgcatattttgagttttgtgatgcgggtgcagtttgggaaatcggaaaaacaacatgtgcaggttggtttgaaaaaatagtcaaaaaccgcacaacccacaccgcgaacactccattagacggtggtgctatgattatttatacaattaattaataaatttgagatatttgatttaaaaattgaatgtaacaatatattaaaaagtcaaccgagacatcatataatgatggacacgtggtgttatatgaatggggcaaagtatttatgaagtgatactaaatgcattggattgaagtataagccaatccttttttaatataattggtcggttaaattaaatgtactcggaggtcgtaccaccgtaccacgttgcattcacgtggccccacctcatctttaattacaaaattaataatttcattaacaacttcttttattcctttttcccttaattagaaaaaaagttgctaacaaaaaaaaaaaaaaagaaaaaaagaaaaaagaaaaaaaagttgaaattggacctaaatcaaaattgttacat

SEQ ID NO: 197874 - DNA, 2389 bp, Cannabis indica
cagacctggacccaaaaccaaacgtggacccataatcagaacaagaattgtgactaggacctggaccttagaccagattacgaaacccaaaccataaaaccaaactcagacaagaacctggaccgagaccttgaacaaagactaggagctgagacctgggacccgaacctagaccgggactcagaccgggacctatacctgacctggtccaaaaccctcatcgttgtacccgagacccaaaatcgaaacatgaaccgaaatcaagaccctagaccatgaattggacttggaccaaaaccaagatctagacgtagaaccgaacctagacccagacccgaaccaggacttagacttgcgccaggcctgcgacctagaacctgaaacccaggacccatgaccatggacgtggaccagaacccagacccatagagaacccagaatgagaccctgacccagactcagaccaagaccaggccccagacacggactgaaaccaagacttagacctagacctagacctacacccagacccagactcggacttgtactagaactcgaactcaaacttgggactcagacccggacctagatcaggactgggacccagacccaaactatgaccgagacctaaactttggctaggactagaacccagactaggaccgggacatgcactcgaactgggaccctaacctagaccgagacctaggaccctaacctgaatcagggactcagacccatgactcaggacccaagacctaaacctagacccaaacctagacttgagacccaaaccaagacccacgaatcgaggcttaaaccccacccatagtcgatgtctaaatttgggaatggacatggacccagaccctgactagaacccgaacccgtatcagaatttgaactagactcaacatgtggttggtgttttgatttgggaccaagactcaaacttgaacagaaacacagacctggacctagacaaggacttggacccaaacccacaccgaaaccttaaatcgtaccttgtgatacgaaattggaactagaacctgaagcggacccttaaaccctaaaccctaaatcctaaactctttacacttacccctaaaccctaaacgctaaatccctaaacactaaacccaaaccctaaaccctaaaccctatattggacacgagcccaaacacatacccataccgagatcgaaacccatgacccaaactcggacacaaatatagactcaaacctagacccaaacttagggcctgaacctggacccaaaccaagaccagaacccgacccggactcgaatagggaccaggactcagattgggacctggactaagactcaaatcttaacccatattgggacctagactcgtacacaaagtcgggatccaaacccgaacctgaaattggacctagatcgagacctaggattcgtacctagatgggggaccttggccccgaacccgaacttggacccagacctggaccaaagatccaaacgtagataggggacttggatccgaaactgggccgctgaaccaagaacgagaccaaaaactcgaccccaaactcgagacatgggacctgaccctggactcggaacccaggacctaactaacaggacataaccccaaacttggacctaaaccaaaacttatgactaggcccaagactcgggacctgaactgcaacaagaccaagatccaagaccaagatctgaatctggacctgaggctttaggtcctgacccatagtcagtgtttgaatcaaggacccagactcagacccagatctgtaccccgacccagacctagacccagactggatccaaacccgatctcggacttggaattggaatcggaccaggtctgggactagaacccacacttgggacagtaataggacccaaacctaaacccaaacacagaccaaaacccataccgagactttgacacagaatgggacctgtgacttaggacctaaactaatattaggacctagaccaagaccagaacacggacccagacccagacccagacccacactcaaaaataggggccacacctatgacctaagaaccagaaccaaacatgggactcaaaactcaggcccacactgggactgggacccgaactcggacaaaaacccacaccgggacctggactcagagcgggactcgagacccgaacctaaaccagaacacgaactggaccaatgacctaggaccttaacattaattgggcaccataaccaacaccagaactttggccttggaactcgttttgggattcaacctgaccccagacccaaacctaaacctaagacccacctcggaacctgcgatgtgggattggattcttggacccgacccatagtcgg

SEQ ID NO: 197875 - DNA, 792 bp, Cannabis indica
atatttgttagaagtactgatatccctgctttctccaaaatttggggagcgtagtacaaaactccatttatgccagacaactgagatgtatacaaatatgatcaacaagaaagaatatatatttatatgcgaacaaattagtacacacaaaatatacaacaaaacactacatatatatggtgatagtttaaattaagcacttctgttttaatcaaatataattggttgaaatgctatcatttcatatgatgtaatgttttggtgtatttagtttttttttttatttaagcgtttatatattacaacatgttttatctgggactcgaacccaggacctccaacactcacacatctacttatggccacttgattaatctttaagcgttttggtgtatttccttactcaaacatgattaatcttttgatttgattgtttatgcaatgaataaatcttataaatgaaagctccaagaacattatattttgataaaataataccttatattagttatgacggcaacttcgaaaattgttatacccaaatattggggaaattatgcctacgtacatgcttgattatttgaaaagcaacatacaattacctaagacaaaatacatattgcatgtatagctaacatgtataataggaattatatataataaaaatattgcaaaaagaaaaatgaaattgaaaattacacaagcaaaaaatattctaattcaatttttgaatataaaaaaaaataatacaaatatttttaatttatagatatatgcacatatatatatata

SEQ ID NO: 197876 - DNA, 1213 bp, Cannabis indica
tgatttagtagatatcaaaattcaagaggccgaatttcgtatatagacaattaacatatcaacaaaattgaatgaaatttaataaaaaaaattaaacaaaaaaaaacttaataatttcaatagttcaagagaaatttttactagcgtgaaaattcataaacataattttataaatattaaagttaaggggtaaaaatgttaataaccctattaaatatatatagaattaattatgatataaaaaccatcttaagaagaaaaaaaaacatggttatgatataaaatgttgaattaattatttaattaaattttttatgcgccgaaattaaccgttaatttcggaaatataataggtgtttttagttttgccgttttttgttttttttcaaaaagccagtttgtcttctattttatttttttgataaatttcattttattgagttaatgttagtctttatttagtattttttttttttcacataaaatatagatactatatatatataattacttagttatataatgtgtagacaaaataatattctctatatgactactattataaatgaacgtgaaaaaagggaaatattggtgggtctaggggcaatgatttataatgaattttaaaatattaaatttatttttctttaatacatacttatcattttatttcaataaaggtacgtaaattatttcatataattatgaaagttgattcatatactattcttttgtacaattaaaagtctgaaaaaggcatcatcaacactgtttagttgttcagataattaaataaataaattaaaaaaaatattttgttgttttctttctccattatattggtgctaatgattttttttttttgggtaattatagattaaaattgaaaaataaatctataagcattctcttgggacttaattttttttcttactatttattagtcaaagtcaaactatacttttcatatataataaataaatatatattttccacttttactgtaaaaagtcaattaaatcagtcaatttttgctcttatatgagtatgagataattacttaattaggaaaataaaatgagatcacatattattatttacttcttattattcctttggttgacagcacaaaaggagccttttacagccaaaaaaataataaaaatttgacctttattgtgcttgtttggctattcctattttcataaaaaaa

SEQ ID NO: 197877 - DNA, 1504 bp, Cannabis indica
tagagattttttaaatataatatgacttatctataaattctttcacatcatttaaatataatatttatttcaattaaagttaaaaaaattaaaaattaataaaatacaataaacaaatgatcatgggagaaataaagacaattaagtacaaaataaatagagaagcttaccttaactacatttagctaaagattttcaggagtttaggattaggtattttagctaaagatttaaagcatttgttggagataaatttgaattttttagttatttttttagctcttagttattataaaatatctattggggtgttttaagataaaaacatgctacatcagatactctaaactgactctattttgagtctaaactccttttctattttaaaacttctttaaaatttactattcatgtttacatatatagaactcattgttctaaatgtattttattaattgtttggagttttaattttttttatatgggagatgtataaatattaatattatatttttgaaataaataaaataaattaaaatttaaaaaaagtaaaattttagtgatgtattttaaaaaatttgatgcatggtgtaatataaacgtttgagttaaaatagaaaaaagtagagtttaaataatgtattttaaaaaataaagtagataaggtgatgggagttctcttagacttgataaaaataaaaagaaaaattgactttatatgtatttattaggtcaaaatttatcccctaatcattagtctaccaatattgttagattaggtcaatttttcattaaacacaagattactcctcttatttttcaactcagtcctgtctctcactccctctagtctcgctcgttctcttcaatagaaccgaaccgccacgaccaccgccaccatccaagaccactcgactcgctaaaaacccaattggaccaaccctctcgacttcatttcaatctgtctaagcccacgccaatctccttcctcaaccatgaacagagagaccactgcgctgccacgaacagagaccccaaacgcagactacaaacataaaccacgaatggagagatcacgaacgaagacattctctataattttctagttttttctttcatttttttgagttggtttgatagtggccgatattggtccgacatagattcgatgagggttccaaatttaagtttaggttgaaggaaaaagtcggatataggttcgatagtggtccgatgcagctgattggtggacatatttcgtgtccgataagggtccgatactctccgaatggagtccgatgggtatatatacatattttattatgtatatatacatgtacttttattgttgtgtgtatatataagtttgtttattattttatattatagttttaatcttttaagtaactaatcaatgctcaactttgtaattctcaaattcgagttttgacgtgggtttaattcaactagctttttaattattcttcgtcttaaggagaggtac

SEQ ID NO: 197878 - DNA, 1986 bp, Cannabis indica
atataattttaaaaaataactttaaaagaatatcgttaactaatagtgaaatatcacttataaaatgtactggacaacactattacttaataacaacacaaaaatgatattaggcttaagattatttaaatatccacaacactatgcatttggttgggaggaatgaaaatataggaataggaatgagaataagaatagaaataggaatggaatggaataaaatttaaaatgtataaaaaaattgataaaaaaataattaaattttttttcttgttatattggaatgattattcctttctttttaaaatggaatagtcattccaccaaaatagtggaagagcattccattagaatttcattctaatactttaaaatacaaccaaacaaagaaattaacataaatagaaagtgataaaaagagagaaaaacaccatggaaaattaaataataataaaaaagaaaagaattgaattgtcgttatcacatggctgggtaggactcccgacctacccagtagcctaatgtaggacagcatctgtagccaaaatagaccctacctcactcaattcccccttcttcactgatttccctgcctctctctctcctcatcaatattttttcttaattttttagaactccttcaaagaaaattaattacttttgttacaatatcatatagcatagatttttatatgaattgtatctacgtagatatatgtgaccagtgacctttacttatataagagaaaattattctgctgcatgcatgatattgatgatatttattcaatactaacttatacatcataaggcacacattaagaacttcaataaattctcagataataaatctgagagcagtataatagatgagagagaaagacagactagagagagcgccccatgcatcaaaagagagttttttttttttttaagaaccgagagcagtactgttttatgggaattttttaaaagagtggcattaatattaaatgggggaagaaaaagggttactataggtagatgttgttgatgatgacgaaaagggtatggtatctctgttgagtttccctagtcccttcacttcacacaccactttttccctaacaaaaatgtaaaactgcatgcaacgacaacaacagtacatcaaaaagctctgtctatttcatcattcaaacccctctctatcttctctcttttctataattatttcttctcaaattcttctttctctctctggaacaaacatgatcaacacacaaacattttatacactaaattctcaaaacctaaaactgtaaaaatgaacatgatcatcatccattcatatataattatcgtcatgcataaaaattaacaatgaaaaaaaattaagttgggtcctgagcattttcatgcaaactggggggacgtgtaggtagtcttggattacaaaaatatcggtagtttagtatgaaatcaatcacgatcactttcacttgaccccattttaagtttttttttttttcttttcaataattcaaaagaaagaaaggaaatgaaaaaataacaaggaaattaatttggacgtgtactagtggtggtggggaggcgaagagaagaagcaccagcagcgttgacccaattctggtcaacgagcttggcaagcctggcgtgcttactgcaccaagcttcgataagtttcgcttctttgctctccgcttctctctgcaactcactgagttggtctctgtactcgttctcaattcgactcagtgacgccatctcttcctctctcaagctccttatcttggcttccgtttcctctattttctctctcctcttcctcgctttctctgactccagctgttgctgcagccggctcaaacgccacgtggcctctttcttgtgatgcagccagctcaaccgaccttcctccacctccttacagtactgaaccagactacccagttgctgaactggaaccaaccggttcatttccgggtc

SEQ ID NO: 197879 - DNA, 1270 bp, Cannabis indica
tatccattcgttccataaaagctacacaacgttcaaaaggatgtcctaacaaccacactcaaaacagaattccgggagtctttcatagcggaagtccacccaaaattcatcttttatccttggcagccgaatcatttggcctctaagtagtggcttgtttgtacaaagtttaacacgaactctcaagaaagggccccaaccttcattggttgaatcatcaaatacttcaaggaactcaccaatgatattaccaagtgcctcagccagcactttggatttgcttaagaaaggcagccggtagatttgaacccaaaaaggcgtggagattaaatcgtcctttgagacattttgcagagcatctggcgcgcgtagaacaatgagaggttctgaaagtgccaaggttccttgctgagtacccgtcttttatctccttcacagccgaatttgatgtgaaataaaccatctccttgttggtattcagtgatgtccacacgaaaacgaccttgccaatgtcccgacatttggtcaataaaagcttgcttataaacattctggtgtgtaaggactttggctaagagcacgggttgagggttgttatcgggcaggggattatactcgggtatacaaaacacatttctttcctcgtcagtaagagaaagaaaagagtgtatatcatgagaaatggaatccataagtcaggggaagtcgagcaggggtgggagaaagggacggtggtcggagcagggttggagggaacggttaaaaccagatgggaatttgaaaagatgaagaaggagaaggcagttaagataaagtagttaaaagggaaaaagaaaaaacggctacagacccaaagggcactgaaaatgatatgtttcttgttaatttctataattaaattctttcgtgtggattattaatacatagactcagatcatatatatatataataatattcgattgatgaaaaaatatattccgattaatattattcaaagaaaatattatgtattccacacaaatatataaatttttatatataaaaaatcatatttattcatgaacgtactaaatttagttaaaattaaattttcattatttaattataatctggtatatatataactgtaacacacacattaaaacattagtatttattcgatgaatttttttttgtagcaatttattccatgatttttatttcttaagcgtaggggcatatttttttcttattaaattacaaataaaaattccttttcaaaaaaaaaaa

SEQ ID NO: 197880 - DNA, 3774 bp, Cannabis indica
actctattttgtagagttatcagttcaccttttcgaccttggtcagggcaaggttacagcgttcccgtgcaattttctaattcccttttaggcaccctaccccattttttcttgtgaacttcatgcacaaatgaaaaactgaagtgatagttttcaagtcatatagggctggtcggcctaacatgacattgaaagctgatggaacatctattatcagaaattgtgccatcatagttatgctcgtcggagtttgcccaacagtgaacggtagatggatttgtcccaaaggtgcaacactttggctggaaaaatcatacaccaattggctataggggattagatctttaagttggagccccatcttctcgtatgttatcttaaacaagatgttcgaagaggctccattgtctatcatggtccgggccaatgttttgttttctatcggtacttccatgaccaagggatcattgtgcgagaagtggacgtggataacatctgcttctatgaaggttatagtgggttctcctacccatggtatttttggctttctctcttctacggcgaaaactatttccttctgctcatgttgtaaggctcaagtatacttttcccgagcttttcccatgtctccagctaggtgtgggcccccaataatgacttgtaaatgcccgtccactagtgggggcattagtagatcctgattattatctgtttgggcagcccgttgattctggtcggcattgacatatttctgcaagtgcggattattctttctgattaagaattcaactaccgcttcaagttgttgcgctcattcatttcgtggtcgtagtctgcatgaaaatggcagaacttggacgtttctcttttacttacatccttattcataggagcaggttttttgtacgggaccattgattgagttgttgcgtagatcatctctaggtcgtcagttggacagagaaggcagtgaacttgtaggcattttctctgagggtacattcggtagtgcccgtgaacttttcctttttcccgttgcattccctaccattgttattggacctttacccgctcagagttgagctgcaagggtattgtgtactctgagcaggtgctcctacagagaagatatatggctagccctgcttacgttcaatgatgtccactcgccgaatggcctcctcgagtttaataaacccatctgataggtctagaagttctaccatagaccccacggggccacatcttttaatgtccttctacagttctccaagtggctcaatgcatcctagtatagcagccacccttccctcctcggttaaccttgcaacctttgtagcctatgtcatgaacttgcttatgtaagctctgaggggttttcctagtatttgttttatctcgaccaaatcttttaggtgcgaggggagttgacgagaggaagagaactatgcatggaattctgaggagatggctttccacgaattaaacctccctagtgatagcttgaagtaccattgttgggcggcttctgcaagtgtagcagggaatatcctacaccatacatcacccatactccctgcaagtccatttgcatatcaaaatatttaagatgtgataagggatcttctttccttgtatacatcatccaagtcagcatcttgaatttcaggggtaattcaagtacatcgatcttcggggtgaaaggcgatcctcgtgcttggtccatcttgagatcagtgagttttgggtcgtttaggccttgaaccatattttttagttgatccaattgtgcttgcaaagatggatgaattggttcagcctcttcaccgacccgtgtcacgtcaggatctcttggagctaggtcctggatgcggatacctggttgagtagctggttgaatgtattgttcgtctaggcatctccttctattcaggtcagccctgaggtcgtgggtcgtgcccaatctattgaataccgaggtaccaggtggtctcgatgtttgactagtttggtcggtgggttgaccagaactatcactttggatgatgttattagatataagtccacctgaagagcgaataggtaggacctgaccgtctaccacttggcccacgggttggacctataagcggggattggacgattgaccattatgagtttgggcagtatgcccaacaacaaattcttttgtgccgcccagtgggatactggatggagtagctggttgctgattagcaacctggtaggctctccgtattagtacggtagcctctcttgtgtggtcatcgatggctacttgctgagccttgaatgtttccatctccctgtccctccactcaatgaactggcgtcactgctcatcgaacgcaaggtttatggcggcacggagatcctcctgatcatgatgcagtgcgttattatggccttgtataagtccaagggcagcacggaggttttggatctcactgtcatcccccaccgtccgctgagcattggtggtggacgggactccagtgttaggagtggttcgatcggctgcagaactggtattcccaatctcttgcacacccagtgtgatcctaaccataggtcaagttacaccatggcccaccgtaggtggctgtgtgttggcctgctcaagattggtccccgatggtatcctcgtgttcccaggggtttgcacaacaggatctgtcaccattgcgtaactctgatcgaccaggcctctgcgagtttacaccacaattttgtatgcctgttgagacttaagacaaagaacaaacttgggttgttgctctcaatgaaagcaccaaaatatttacctcgcttttagtcaacgacaatgagtcaattattaagcgattagaaatgtgataaaaatagagcaaaaaaccaataagcaataaagaaaaccaaattttgaagaggttcagtcccattattgtggtactccccgtagattgtattaacttgaggacaacaaacacggtgtttcctctcttaaagctcttacaatagaatctctgagtatttctcttagatctctctttacagcaattctttcgatccctttcacagtgaagctagatcactatttatagggcgttaatgcatgagggaaggttttctttttgcttacaatgtctataataggaagaaacattcattatataaatagaatacccaaaataggggattgggacagcctgccgtatccctctaattcaatcccatgattgtagggattgtcttcgtgcctggactccatgatatcattctaaagtagtcaagtcctcgtaaatagctcagaaaaacaactttgctctctgctcgagtagtctaccctttaccctgctaaggtaagtagacgttgtgcatgcagatgtgctacttgaactctgttcgggatattcatccccaccaaggtgcaaggaatgttggacatatgtcactcgtatgtgttgccacgtcatagtgcaagaaatgggataacaagtagaaattcaaatttctctttattattcgtcatcagataaaaatttaatgatttaataattttaaattaatatatagttaaatttgtttagtaactatcaataggtaatactcattgttagagagtctcacattgttaatgtgtggaaaagtaaaagaatatataagatgaatgggtttctcctcccattgccaattggttttgagatggaacctcattcatctatcccaaattctaacatgttatccaagagctaaagtcaaaaaagccacttgtga

SEQ ID NO: 197881 - DNA, 702 bp, Cannabis indica
gccattcgtgagagcgtggcgagtattgcagaagagaaaaagtgtaaaaaaatgtaatgaaaatcaattaagtttaatagagaggagtgaactttttatatgggaaacaactcaatgatcaaaaataagaaataagctaactaagctaactaacagttggttagcattacagaccgacaatgtaacaagaataacgaccataacccagttaaactaacaaaccaatatatagtaaatcttgctactcctctcaagatggactatagatatcgtgtacatacatcttgcccaagtgttttgccaaagtggcggaggctaagggtttagtaaaatgtctgcaagttgtaaagtgctgctaacaggtatgagccgaatggtagagttgctgattttttctcgaatgaaatgacattctaattcaatgtgttttgtcctttcatgataaggttgattgttagcaatgtgaattcttgattgattatcacaataaatgattgtggtatttagaaatctgagaggagatatgtaatcaaggtatatgctggttgtagcagctagagcgcgatcttctgcctctgcagaacttttggaaatggtcatttgtttcttcgttttccaggatatgagactatctccaaggaagatgcaaaatccagtaatcgatcgcttgtgattggacacgatgcttaatcaaacccctta

SEQ ID NO: 197882 - DNA, 859 bp, Cannabis indica
tggtgagagtttgaattttactggttttttacatgttaggcatgagggagggcaatgcccctgctgcacatttacttgctaaaatggcctagtagtttcatttcaaaaaaaaaatgaatgaaaaatcgtaagatgttgtagtcaatttccaaagccaaatgttattgctcatatgtttatttaaattcttaagattgtaataaagcaaaacgttacaataatcatatatgctttctgttgatggcactttttttttctttttaaaaattgctcctactttttaggatatcaataacattctacaaaaccactcaactcaatccatgttttataatagaaacaatcatatcaggcagtaatgtctcgcaaacaaacagcaaccccaaggtggaggtgtaaaaattaaaggtgaagatctgatgaacggaatcgggatccagtgagtagccaaactgcctaccgaaacatattagccggaacgattaaattcgatatgttctcttgatataaatgaaattttgtgacaggagtagctatactccaaacatcaaatccatgattttgtttgccaatgattttgtcggggaagcaatggcgcctccagtctgccgcacactggtattaccattttgaagatagtaaggcctgggagtgttgccggatgaatttagttctgcagatttgatagaagactgagggggtagagtcataaatccttgggtgttgagtctatcattcaaagcctgacgctgcattggatccaatggcttaacacctactattagtatcccattaatttgcattccgttcttgctgagtgccttctgagcatcagatcggttctgttcaaacaacaaag

SEQ ID NO: 197883 - DNA, 695 bp, Cannabis indica
tctcaagcatgttagtctttatgattgctctagatttattaatgttgtagcttacaacttagctaaatatgacattgcttcatcaattagttagttctatttctgacctagctatcttgattctcttcaaaatttgattttggcgaaagtttttaggatgaataaatttcttgttcctgtctcctttctttagagctttttactctgaaaggttgtgttctttagggaattctaaaataatatatgtacatacactattgatgtgacattgccacatcttatgttagctactataaaaaaattaataggagtctgataacttaataattctaatttgttccgaataaacttttaattaatgtaaaatctcaaaaaaggtcgatttgatagaggtaatattttggaagacaaccaaaatcctcttttattcttttatgattactaatatatagcgggacatacttgcacaataaaaactaaaacttattaatatatatatatatgcatattattctctaacatcattgtgagagaactgagttcatgattggacgtgctttgcacaacacttgtagaggcacaagttttgtcatagtaatacctcttccctcggtcatgtcaatatttttatcgctaaccttttcccactcaaagcactgaatcaaagttcccaaagttaaaccaattactcgtag

SEQ ID NO: 197884 - DNA, 695 bp, Cannabis indica
tttttttgggaaaaaatgttaactgcaattcaaatattagatcaaaattaactcattttgtccttaattatttaggtggcctttggttaaaaaaaataattaaattatttttatcttacattaaaatagtcttttctttgtttcataataaaatagttattttaccaaaatagttaaaaagtcattccatttcaaatcaatgacattctaatattttaaaatactactaaacaaagaaattaaataaaaataatttcatttccattttattaattccaaccaaaattatcttaattcatttatcacaatcataaatcaaattaataagtatgtttacattataccaaaataacttgattgttaaattaatttttagtcatatttacaatatcaaacattttctaattagtgaattttactgtgcttaaaaatatcatattataaactatgtgtgagtagtttaaatttgagtttagcgtgcacttattacactatacccttttctacctcttcatctatgaaatgtttctccgtattttttttgtttattttcaactaaaataacaataataaacaaatgatttatggatctatctatctatttatgttttatatatctatctatcaatatacttatatacataattataaaaaagttggtgtggtgtccacggccggctctgaaacaaagtggg

SEQ ID NO: 197885 - DNA, 2457 bp, Cannabis indica
gatagaagaggccaggatctcataagggatccacatcaaggaagactgccgacaagttcctcatgaactaggacggatcttcccctatctaagggaggatagacctttgctcaaaggttaaacgttgagaatagccagatcttaagaaccagcagcttaggggggtgactagggatctctggctcaacagcaacccccattatgtagccactggccggctagccatcagtaggagtacctatagctggccagggtacaacacttcctcccctatgcgagcgaggtgcacaaaaatcaatctttgactaacaaggacaaaaagcaggtggaaacaccaaaaatggtaattctagaagtgagatcgatcacttcaagcatctagatccaccaaacttgaacaactggtgtgatctacttccaaccaacacaatgcggataccagtccgaggagtcaagggcagccagaccctgccctttgcaagtctggctggccatggaaaagtactgggtggccataccctgtccaatgcatgtctggctgaccaagcataataaccaggtgtaagcatggccagcctacgccaaatcccctacttgggaatggtcgtccaaggactatagggcatggctaatcttcacaattaactctcccacaatatggccagccagcccctgtctcttcaagatctgcaacctcccctaggagggccaatcaatcaagtccccacagcaacagatccttctgtgcaagcacagttgaaccaactcaagcacatgatctatagcatagcttgcccgaagcctttagatctcgaacttgatcaatcgaggggatcaccattctcgacatatataaatgccctaccactactgaattcaaaatgtgagtatggaagatgtatactggacgagaggacctgctggctcacatcaaatacttcgaaatgtagctagacctccaaaaggtcactggtgatgtgtattgtagcatattcccagccacagtatcggagacagcccaatggtggtactttaaactcaccccgagaagattcaactcctgggatgagttctcacaaaaattctacacataactgtcatccttgatacttgtaccatcacaactggaaaaccttatcgaagtcaaacatcgacaaggggaactttagaattattatattaaaagatttatggtcgaggctaccaaagtcaaaggtcttactaaagaaggccgatatatggccatactggggcgcattctccaactaaacgacttcttgaaagatatcaggggtatccaccaacaacatgaaggagttcctcgatatagcaggcgactttattaaacttgaagaagccatacaatagggccatgcggggcatgtcaatagcaggtagtcacaagggacccatcagcctcatgaccaaccaggcgcacatgttcgcaatagtaatgctgcccagacctctagtggtaaaatactagaaataagcacatcaccaatagctcttggaggaatgatggcaaaaaagtggaagcttaaaacttctcccacgccacagaagaacatggaggagaagtaaaatttcttcaccctcctaacagaaaaacccgagaccatcttcatggccactcagggaacggtcccatatcgaaagccatttccaattagaagggagatgggcaagagggacatgtcaatgttctgtagatatcattacaacttcgaccatgacactaatgagtgtcaaaatctgaagagggagattgagtacctgataaggcataacagtccccacctgcgtggttatgtgtaagacgactagacctaggtggaaagaggccaaaatggagatccgatgccaccacccatggcaggacatttaagggtcataataggcggaccccacattgcttgtgaaactagcaaagctagggagggctcagacactctatcacgatcccaaaagtaaagtcctaggtgtcgaagaccagagctctaagcaatagaagcccatagagcccatgatctcctttggtgaaaaagatgcagcaccgaccagttcttgcataatgatcccttactgtgaaaatcgggaataagaccgtgagtagatgtatggtggacgacggagcctcctccaacattcttttcaaatcaatatattgcaaacatggggctccaactcaccatcctgggcctttgctaccaagtgttgtatggcttttttcgccaaggcatcgtacctatcaggtatatcagattacccctcacaattggagaaaatccaaccacaaggacactgatggcgcagttcatcatgataaaatgttccttcgacattcattgccatgattggccgactgcccctcaacgacttgaaagcggtgacgtctatcaaccacttgtgccttaaattcccaacaagtcatagagtggcatgtgtgaggggaga

SEQ ID NO: 197886 - DNA, 1865 bp, Cannabis indica
cattagaaagggtcttggttggatcattacccaaaggccctttaaaattgtcacaattaggaactccaatttctttggccatcggcccaagagtagtaataggcctcacaccaagcccatttccaatttcacttaagttgttcataaataaagggccggtcccaccaggagatgaggaattaaaacccaacttgggcccaaaagacttgcacggttcactatacttagcaagagcctttccttttcttttgaaagttggactcggcccagttgaagagatggccggcccaatagccaacttccttgacccatcaaaatcacttgaatttagagccaaattcaaatgagggtcaactctattcaagttaattcgagcaaaattctggggcactttccccacttcttcttccccaagtacggccctattacccgaacgggaaacgccaggcacgcctacgacagtcgaccgtttgggaatccacttggtttgcttggaccgagaaagttgctcaggcctccgaacggtctctttcacggctttcatcgagacccgcacccccttcccttacaatcaaaaattccacctctgccacctacggccaacggtgccgtcgacctcgacctgatagagcgtgaaccagtccggtgcgaagctcccatagcaggggagaaggagaaagccccagaaaaaacatccaggtaagtcgactcggttgacaaccacggcccaaacatcggataaggaatttcggagctattgacaaccgtgatcggagaagaaagagagcagcccctccgttggtgaccaagctttccacagttatagcaaaaaatgcctattttctcatatttgaattgaatccaattattaccgcccaaagcaacctcaaaatagcaacccgagaacagaggcttattgacatccaactcaactagaactctcaaaaactttttccatagggccggttgcccttcctccaaatccactgaaatgactttaccagctcttcctcccaaaatgaagccattgtctacagaaaaatagtcccgtgggaggctatgaacttgtatccaaatctgcatagactcaagcttcaccgagagggacttgacaggggaccaagcctggagaataagagaataaccccggacacaccacggtccattggctagggcccagtcacggttcgcggcacgagcaaacccaagctcaaagcaattcgggctgagagcagaatccttcaaagccacaacactcaccttgcacttccaagttttgtccacaaagtctaagatagtagcttcattaacagtcatgggggcaataactcttccaacaagacaaagaaaggagagggcttgttgagaagaggcacagggagacagttttatagatgtttccaaacaagaaaagcacttaccattaccaagagactcactgttggggacattaactaatgccatgatcgacagcaaaagacaaaagaaaagtagcactaaatgccaccaacctctactcaccaaacacaaggaagaccccaccacagaccccacaacacactacacagagtagtgaactccacactaagcacgaaaagagataaaacaaggagaggaccaaagaaaaaaacacaacacaccaggggaacaaaaacacaatgataaagaggagaaaaagaaccagagatccaccaaaccgaaagaactaggactaaaccaggaaaaacaaccacacagggagggatgagacaagaagggactgactcaggaagaaaagaaatgaagagagaaagacaagagagaatgatataagaccattctcactgatgcccattcatcaaactattttgaatctttaaaattat

SEQ ID NO: 197887 - DNA, 856 bp, Cannabis indica
aatatgttcaaagatatgtacacataatttccattgttggggcttgattgcttaagtatgaatacattgtttctgacaaagtatgcatcaaaagcctctccattataaccaatttcaaaatacttctctaaatcaccagttaacacattcaaaaagccgagaacatgtaatgaagaaagaaccgcactgaagctctcttcacaatcactggcttcaacgataacgacaaataattttgcctcacgtaggctcaacacaacattagcagactcaagttaaacaatcataaacccaacatagcaataagctacgatctgcaaactaatgcaataaaacaaattcatttgtgattatcttaaattgtactgtaagctcaaatcaattacacatttcaccaattatggcaccgaattccaagctccaagttctataacatataaagactaatcgaagctaaagcaaaaacacgacgggctaggagtaaaatctaaaaccttaatatggaacgtagttcagataacataccaaaggcgatactagcagcagtgacgcagtcacgaaacaggcgaacaggaactgcagtgtagagcttcagagtcctcgaaggatcatcggaggtagctacgttggccgccgctactccgccgaataaggcggtggttaccgccgcgaatttggctcggccgcgccacaaggatcgcgtcgccattttctcgggaataacgcgcgggcaatttattgaaaataataataaataaaaacaatttattttttgctggaaaaataaattttattttaaagaacctgtatgtaccccttctttcaccgtttcggtattttcactgttaaatgaaaa

SEQ ID NO: 197888 - DNA, 922 bp, Cannabis indica
tttagtgacaatctatatttttagtgatccacattacaagagactaataacactgaatttttagagtctaattgtgcatgtcactaaaaattactctcaactctttagtgacacgcacttttttgcgagtcactatatagtgtcactaaaagggcaaattgtagtagtgatcctaacccaaccaacgtgtcaattcgattttgacttacttttcaccgtgtctatttttcatgactctaattaacccttaataattcatatcgagttcatttggtattatcgtgatcgttacttgaattaccacacttagctgcagccatcaaaatttagttttgtatagttttccaattaataggaatgctattatgcatgtgtattggcaacaaagaagaacagctaagggatttattacattgtggtcatcatcttaaaaaaatgtggagagagctaaagagatcaaaataaattgtatacaaccatttgaaaatgatatatgtaataaattgaatctttcaactcttgcttttctttcacatacattttgccaccacaacaagtaacttttccgagctctaatatcacttcaaactaacttgtttaatgagcgtacatatataaaatagctttaataaaataacatatttcatgtttttggtatcataaactattaagaactttttgaaaaattgtcgatgattctaaataactacattgtttatcgtaacataaaatttataggattgtaatccatccttgtgccaaaatactcaaatatttgttttgaaacttgttatatatatatatatagatatattttatgtatacgtgccaaaaactttgatggtatatgaggtattgttaaaatgtgtgaatggaattcaccacatctgatcacagctctctttggtgtgctgtcattcta

SEQ ID NO: 197889 - DNA, 1144 bp, Cannabis indica
atcaaagaaagtaataacatgaaagtaattacaataacatcaactattgatcatctttagaatatgaattagatcttaatttataattttatttatatcggtccttcttatatataatctctattatgtacaacaccttcacttagatgtcatgctatatcagcaatctaaatcgatattacttgcatcgaataacaagcatcagtgaaccgcactagcaaccattgattaaagattcctaaactttaatatgttattgattgttttattcatggctaagtaatattaattctttgtataatacaagtcacaacctcgtgtatgaataagtttttttttgatatttatatataaattattcactattaaatattaataatttaacattcatacatatatcaaaatgttcaactcttattaataattagaaatatctttacatgtttttcagagcataaaccctaacataatttcactaaatctgttatttgcttcatttcttaagtgcctattgacacgactcaatgcatactattttgggggtgaatgtggtagcttttcatgacaaataccttgctcttccttactaagttggtcgaagtaaaaaatatttgttccaatttgagatcttgtttggaataaacttttcacctagaaatctcgatctttttcttctagtgcactattacaaaaaggagttttttgtattggtgaatgcgtctagtcaaactagttgactgacgcaaaagttaaccctctcctttttgcttcgattgttaatcgatgccaataataaataatttttgttagttgttacttcgatattaaaaaaaactaatgctaaagatgattttttaaaaaaaaaaatggagggctcaaattctgcgtctgtttcgctcaaacgcaccatttaacgtcagttgaatgggtttttatgttggttatgagtggacgcaaaattcgcaaccgacacaaaattcacaaccgacacaaaatttgcatcgattcataaacaacgctaaattacttaaaaaatcacagatttgtgggtttcgacccattttaaaaaaccctacctatatgttatctctatagccactcaaaccctaccgcacttagcctacattctctctctctctctctc

SEQ ID NO: 197890 - DNA, 1249 bp, Cannabis indica
ctgttttggattattatgatcatgatcagtactaggcaacgactttacctcgttcagatttgaaatattcctctgaatagaaatagttggcattggaataattggccggcattcttccaaaacttcggaacccatattatttttaaattaagatgatgatgtaattaataatgggagaaagaggatattggagatgagatgatgggtgcgagaagagtagatctcagcagagacaaatgtggaggaagatagtagtagtatataattatatagtgtgagagaaatgaaataataataatgagtggaagtttgagaatgtgtgataataaattgttgtgtggggttaacagacgtgagaatgaatgaatatgatggggacgaatatgcgaaaggattggaagagagtggagaaggagacaaattaatgaccaaataagcgaaaagatgtttccattattttcaaaataatcaataatggcgtgttgtgtatgggagtgagtgttgataattactgctttaaaaggtgacaacgcagcctttttaatccaaagggctattattattgttattgtataaaaataatttagtgtattcctattttacactttaaagactatatgagagataagtctttttgaagaaactatgggacaataattttgtaacactctttccagtctcttcttcttctccctctcgacatgcatagtctgaacagactctcaccttcatctccaatgagttcacactcattccctctgcgttcccactcggtggaatctttctcaagccccagatctatcgatcttggtggctccgactcgccctccatagacacccagcacagctcgactcgcccgagccgcctcagccgcgtcgaacagccctgccccaaccatcccagtcacttcagccataactccggccagtctcccagaagtccgaaccgtacaagtattaaccaaccccttacaggtattaactcctccttccaccttttcctattccctgtcaaatcccatcagagaaatgggtattttctaggttattttagatataaattcagcttgcccattaaattacctctgcataatcgatttttgaaaatgaatttgggtaaaggaaatatttttataatgattttcagaattgccataattccttttgcccaaaattttcaactgttagcatttatactaatctgcaagggtgatccgcctagtaccttttgtaatcctattgtgcagca

SEQ ID NO: 197891 - DNA, 2654 bp, Cannabis indica
ctataacttttcatgtaacatatcatctactagatgctacatttcctcgatatttttctttttttttttatttgaaacaggatacattgccaacaagagagaactacaacgaaaatggcaagtctgtgataaacacaacacaagttgtagagggaaaatccctattctagaaaacactaacctcataattaatggagtacttagtagaagatgagcgacattatttgccttatgaaagaaaaactgaaaacccaagaaaccatgagtgggaacaatgattgtgctttaaaaattgtctttctctctctaattttcgtgcctccaaagttgtctaatgaatagtccccttgaatttttaaaattagggtttaaaaaccatattggctctaaaattgggtagcgagttgcgacatagcccttttaatgtcgtgacccgggtagctaatttttgggcagcaagattccttgtacagagaccgataatattttggccataactctttcgatattgctcgaaattggacgaattaagatgtttttgaaagatgaaatatatatatatatatatagatcttattcacaacgtttttcctgaaagtgaacgcatcatagtcaaaaattagcttgaagctttagatttgatttttcgatcacaaacggagcgtgttgagcagccaaaacttagaatttttcactcattatatcttagagctccaaatttcatgataaatctatcatattcatctcatttaacatgtttctttttattttatattcatattatgaattttactatttaaacatgaaacaagtagaaaacaaacataattctgcacgaaataaatataatcagctgaaacacacacctaaaacacttcctaaaatgcacctaaaactagcctatcatcgactctggtggtggtgggagagaatggtgtaggtgtttatgggggcggagagggctgtgagggggatggggtggtggtgccagttgggatggtgatgcaaacgagagatactttcccaatgatgtacgaaataagggtaagattgtagtatacagggaggttgggtgataggcacgagccttttgtcaataatttgattgtggacaaaattttggtcatcgcatgagggtgttcttgatttggtggagatgaagaaacgaaagttaggtgttgagggggatggtgtgccaattattgttgttggttaaatcattaaatcaattctattattcaacttacaattaaaagcttaaagacaaaattaaggcaagattactaatttgatctctttcttcaccaagaagtaaacttaaaaacctaggggtaatatggtcctaatgcactcggcattctaaatatctaactatattgtcccactaaaaccaggatattatatcttatctaagtgactttataggccaaacgccgcattctactgttactgggcataaaaaatatgaaaaacataaaattatatatatcataattaatatacatagaatttaaattaatctctataattgtaaaattaataaccaaaagcctaattctgaaaataaactttaattatctactaattctcaaataaagctgagcagtcatatatacatatgtataaatagatttaaaataaaaaatgataaaaattatagtttaatttatattgttaccgcagatttatgttaactaaatatataagtttttttacataataagtttactacagaatttaataataataaatgaacacaagatattttatgtggttttgtagttaaaattcacatactccacgagtctttcttattagggatattttttggacatagagtacagttctttcaataaatataaataatagtttctctctcaagtttttcgtcctctcttttttcctgaattttacccctatttatagatgtataggatgacaattatttttattaggatctatttatttacaattgttcatgaaacgtggacattcctcacgttttatttttatgcacatggataattatttaataactacccaaccgctctttgtctttattcttaaacggttatgttgacttagaatgttgtttctcactgaatgtgaattttccttctttaccgtctttataggaaaaaatgttaagtatgaatatgcttctccttgcagtgtttttcatattgtagtgatattagagaggtagttactctgtcgcgtaaatggagagatggatgaatgtagttattttcttcatatactaacatgtggattaataagttgcaagctcttattcccaagtatgtgggtcaatgagttacaagctccttgatatctcatctttatacttatatattctgtctatcctgagatggacatattatctcatcaattacatctgttaatagttattactcttatctcgcatatgcttatgtggcagggagagtttgaatatttctatcaactataattaattgagacggttatttaagtttcatttaataatgcaatttaatattataattattgatctgattcatagtcattttttagtacacgtgttagtttttgataaatggccgaacttatgtccatatatacccaaatatacacaattttataaaaatacaaatattgatattataaaaaaa

SEQ ID NO: 197892 - DNA, 1431 bp, Cannabis indica
tactttattataaattaatgcaatttttaccatccttcctacaattttattcaatacatgctaataaacaaaaggtaggtacacgcaaatgcaattaggtaataaaatgttgaaagatattaataaaaatggtgaaatgtgaaggtgaggtaatataatattgttttatgggggctataacccccactaaacaaaatataattacactcaaataaacttaaatatataaaatttaatttgataattctaaataaaaataataaaaaatttagtagaaagtgaatatagtgtaggcatcatattttttttcataagttataacaaataatagaagataatgattcaatcctaccattttttaaagtatcaacattatccttttcaatgatagttataatactaaaggaataacattccaaggctaaagactcaaaacaaacaaagtaatgtttcacattaccattctcttgttagcattaatccattctaaacaccccataataaagtaaaaacttgagttcaagtgaaaaagacagtttattttatatatatatatatattgtatatatataaatatgtatatatgtgtatgtgtgtgtgatatattcaggtccccgacaattggtaaaaagtaaaggcttcttaaactcacgagtgtttgtgaataatgtctgtgattctgacgttttgaaacactactcaccttcattattatcatcacaccataatcactatttaatatttatcctaaacaataggaatacaaaatgtatggatattatcaacccatcccttctacaaaaaacggcatgtgtatacaattttttcttcatatttagtgtttgattattaattctctctactttatcatatatatatagagagagagtgagtgagtgagctattttagtttgacttggctttctttccccacaatttattctagctactataataggttgaggaccactcacttataactactactactactcaagaattatatatatttatatataaagaaaaacctaattaagttttttatttttgatgaagtttatcaatattaaatgtggtataatttttctaattgaaaagatctttataagattgttgtagtaataaaaaattatttatcttttctgaagtattctcagataattaacttatccatccagaagaaaaaatctcgtgaaatgatacatatcattcggaaggatgttcccgaatgtctatcttaaccactcagaagaagtttttaggaaagctagtcctcttcgagaaaggaatcaactccagctattgattatccctatccgggaagccctttcaggatacacttcgattttttgttccagaagcgtatgtctcgtccataagcactttgctgctgacgtggagattcgacagagaggtgatcttgagagagaa

SEQ ID NO: 197893 - DNA, 728 bp, Cannabis indica
ctcaaggacctcctgatcttcagaatctccagaggagaatcaaagagagtgagttctttcgttgtttaatacaattttgtatgacaaacttgataattctaaccaagtttaatttttttattagttgttcgagtgctctcaaattttaaggctttgaggcaagaaggggcaacaaggaaagattacgttgatcaacttaagaaagatttaagcacttcctatggatataatgaatttttaattggagctctagttgaggtattaactatatttttttaactattgctattacttttgcttaccctaatgagacttgctgctgtgggtgggaatcagccatgaaccttactaatcattaactgaaaaatgaacaaagaaatgtttctctttcttaagcatgtgttacttatccatttgactgagaaaatatggcgaattccttgcacaattagtttaaaataaagaagggctgtctcaagtttgtttcatgtctctatcctcgtatctttttgttattttataatggactaataagcatgcctagggtgtaaattgagagccttgtttacttgagtcccattgatagaagtttgtagatattaagccattagaggaagtatgtagatatttctatttattttttttctgattctaattaacaattgtactctgtttttttagatgtttcctgttgttgaactgatagaacttctagaagcttttgaaaa

SEQ ID NO: 197894 - DNA, 1801 bp, Cannabis indica
tttttttgaattacaaattaatactactaacagcccttaggcatatcagctaaataactagcagtagcacacaggggaataacagtccacaacttagactctttgtttactctagcccaattagctaaactattggctaccttattacaagttctaggataaaaaataaactcagaggaatgaaaattgcagcaggtcttcaaaatactctgaattatgttgccccaatctgtatgaattgcttctttattcttgatagcattgactaccgtttggcaatcagcaccgatcaacacatctgaacaagaccagcgcaaaacaaggtccaatcccatccgaatggctactgtctcagccagaaccacggagataaaaccatgaataaatctggtttcggcagcaattaactcaccattatgatcccttatcatcgcacttataccacaccccgaatgattcggaactaaagatgcatctgagtttattaggaatttaccaataggaggaggctgccaagaggattttgttggagattgctgcacttttcgttgctgctgaccgtgccaaagatgaatatcaagggtctccaaagcccaaggtatccaataactatcattaggcttcttgtgttgaaaaacaaattggtttctcctcttccaaatcagccaagataaaccaatgaattgaatcatattgtcttttgagagatgatgattcaattcaaagaggacatcaggagctttatttaggtagggagagagataatgagagaaacccacctgctgccatatctgttaaactgctgggcagagccaaagggcatgacacaaagtttcatcatgagttttacaccaatcacagctagtatctatattcattccgcgcttacatagttccactttgataggaatccaatgattatagactcgccatataaaattcttcattttcggcgtaagacgggatctccaaataaacgaccaccaagcttttatttttgaaatgtctgaacagccagcaatttcaggattactgaatctcagtttatagccgctagccacggtataattaccattaggagtaagagtccaagttaccgaatccaaattttgcatactgggcattgttccaatgatccaagggacatcatcaaggtgaaaccagcttataacttcatttaggttccagctaccatcttcattcaacagagaattaatagttactccttccggaatcctaactttagatcgcaaagtaaagggatatcctctaggaatccagggatcttcattaattcggatagttcggccatctccaatacaccatctagagcctttgatcaagatctctcttccccaaaggatgcttttccaaatagccgatccatagtgacccaattcggcctcaaagaagtttccattagggaagtagagagctttcatcacacgggctagaaggcaatcaggcattgtgattaatttccatccttgcttagccaagagggcttgattgaagtcttccaaatctctgaaaccgattccaccttgttccttcagcttgcataattttccccaattcccccaatgaatcttatgttttttggattgaagagccccaccagaaccgagcaaccatgctctcaatttcttgaattatgcctttggtaaatctgaaacaactcatcacataacaaggaagagcttgaatgaccgcttttattaaaatttctctctccgcttgagaaaaagagacccattttccaaccttgaagtttagcttcaacccgatccctaattttgcc

SEQ ID NO: 197895 - DNA, 561 bp, Cannabis indica
tttttcaaaaattgcaacttttaaaccgaaggaaattatgttttttttgtagtagtgttatttttataatttgttttgctgtggagagttttggagtggaaactttggaaattatgatgggaagcacccacaagaactgttttcatctttatcatcagctcagtgttcatacatataaatctttctaagggttgttttggcatctttatgtataagctttgtgattgtaaattattgattattagaggcggctttagatttattttaatgtgattgcttagtgtgatctactttaaggtttgctttgtgttaaattattgtttatgagggacgtgtttagaagtgttaattttcttggttgaaatgaatcaccatttggaatattacatctatacaattttagtcaaacccaattaaataatgtgtgtagaatttgaattaacttaagttgtgacttttaagaatcaagaacgtgatattagtttagaacttaagttattattattctttatatatatgtataagagaatgaaggaaaaaaaggaaagaaagaagttactt

SEQ ID NO: 197896 - DNA, 1742 bp, Cannabis indica
ccctagcaccaatcagggcctcagtgtttccatggagccaggagccttgctcatgcaatttctctatcaagtctaaactcgagtttaaattaccatgtttagagtcctctagagagaggtcaatcaaagatctctcatcagcgccagcagtgttaaatttctccttaccagagtcttgggcaagaggattggcatcagccgttctacccctcttcctgaccttcctcttcaaaatattagaggcaataggaattctttgaaccatttcccttgccaaaggctcagtttcctttaacactataatcttcctcttcaagttcaaacaagacgccatggcagctaagaacctcatattgtctgcaaagaataaagactgaaagttattacaacaaaagaaaaacaagacaaaaagataatgagcacaatatggagcgtcagccacctattgattgcccatccttctccggagtagtcttaacgaaggtaagttctctatcatactggtctaagaacacagatattctccctaaatattctgtgtcatttcgaacagaagtcacctttttatcacagtttgagataaaataacagtagcactatgggcatcttcatcactttgctcgagtggcatagtccaagattctttagggaaactagtctcagcatacattctttggcatgacatgattaacccagccttctgaagatttttcaataccaaagagggtttgaccatctctctcccatgcatcgatttcaagcaacatggcctcagctcttctcttcatgtcaataagaacagtaggtcttttaaaagggccaatttttgtaaggtaatgtatctcgacggaaggatagaagtatagaagtactcttggtagtaaaggctacaactactctttgttatgttttctatgaataggcaaattgatggaagtggtaaaagccttgatctttgtaggctagaattattttcaagttgcaaagaaagtttatctcatgagtagatagaataggctagttcctaaggtggtagaatatgcagaaggtggcaagaatcctatagccatttgggtttatctgctaagggcagacaccgaagaaattagttatggatatgaactatggatgcaagggcaagtaagcacccgcattcatgtggaatcttgaccagacactacaacaagtattctgagaaccctttggagcaccatgccgagacttccgttaatagttttaggaagacagtaatcatttcggattgtttgaccttgaagctcagtaagggtactagacacaagaggcctaagctttaaaggctctatctcttggattgtcactcttaatggtagctttgagaagctcagttgtcattacttttctaccacacaccttgtctaagttcttagaattagacacatttagcttagcgctaatgaactgagccacatgggaatcatactcaccaggtaatcttctgcttctcttcattctagccatctcaagctcaacaacttaagttgcttacaactcaagaaaagtcaaaattgagttgaaaaaagtcaaagtggcttggaagaatttttcaaggcacaaggagagtgttttggaaatttaaaaggttttagaaaaaattaaggattttaggaagttaaagagtccttggaataagactaataaggaggagaagagaaaaaaaatcagtcaatagaagagagagagagagagagagagagagagag

SEQ ID NO: 197897 - DNA, 2385 bp, Cannabis indica
ggcaagaagtgcagtcgactttttgttggtatcgcatcatttagaatcctccaaagcagaactgaatttctaggatgaataccactcccccaaatccatttccaaatttctttgacaggttcgaacctccaagattgatccacattataagttgtctttacagagaagtggccattctgagattgtttccaaaacacctggtctttaaatggggaaggaattcttggtatagataagatacgattacccatttctgtgccaaagatttgtaaaatcaactccggattccactcgttgcccaaggaaacatctgcaacagttctgatggtgtatcctctactccttaaatcatgcattagagacataaattcttgtaattccataatacatttccaaaatacattgaacccaaggaaacatctgcaacagttctgatggtgtatcctctaccccagttgcagcaaccgaaattgaacccttagagattgttggccttgtatccaaaatacatttccaaagataagaatcactagacttgctcttcacctcccaaaaggattcaaatttgcaatatttctttaacagacaagtgacccatggcttatcttcttttgttgccaaactccacgccaatttggttagcaatgctttattcatattttcacaccttcttaagcccaaaccaccagctgctttaggttgacagatcttctcccaagcctttaaagcaagaaaccgatccttttccacccctccagaccaccaaaacttcctcatcaatgcatcaaattcacggcagctagctaaaggaactttggatgtagacatagcatatacaggcatggccgaagttactgacttgatcaacgttagccttccagcataagacataagtttcatcttccatccttctaatttcttcaacatactttcctttaatcgcaaataatcctcttttttccttctcttaaacacaaacggattgcctaaatgtctttcctctccccttacttgctcaatgttgagaataccaaggataatgttcttcatgccattgcttaagttctttgaaaagagaacacccgattttggtttgctacacgattgccctgaccaaccttcataaattgaaagacaatccatcaatttctttgcttcggaaggatttgcacgagagaagagaatagtatcatctgcaaacataagatgagagaccggggctgcagattgtgcaatcttgatgccgtggacggaaccttgaacctcagtctttgatataagtttcgaaaggacctcttggcaaagaagaaacagaaaaggagagagtggatctccttgacgaagacctctctgaggatacaatttcttaagaggacatccattgagaagcaccgcataagagacgcttgtaacacatgccatcaagagcttgcaacttctgtcattaaaaccatttgccacaagaactttctccaagaaagtccactccatcttatcataggctttatgcatgtctagctttaaagccatgagccctccgttgcctctcttgtgccgaatcttgtgaatgatctcctgtgtgagaattgaagactctgctatccatctaccagggatgaaggctgattgaagaggggatattaagtcgttcataaaaggtctgagcctatttgataagatctttgcaatgactttataagagaagttgcataagctgatcggacggaactgatccacactaaggggaaaatctactttcggtataaggcatatgaatgtattattaagaataggatccattacacctgtctggaagaattccttgactgtagcacacagacttgttcccacaacttcccaatattttcggaagaaacaacccgaaaaaccatctggccccggtgcctttagagggtgtaagctgaagaccgcttccttgatttcctcatctgtaggaattttggagataaactcattggactgttcatcaatccggttaacaaacaaacttcccagagaatcatcaatgctaggacgagaggaagaaaatagttcctgaaagtaattattgatgataccaccaatgtatttcctctccctccaaatccttccttctttgtctttgatcgcccaaatgttattccgtcttttccttatgacagtcgctgcatggaaaaatcttgtgtttctatcccccaatgatagccataattctcttgacctttgtctccacatacactctagctttgaccaagcaatttgaatttgcaagagaacactggcttcttcagctttttaaggtttcggagataggctgacgttgaatccactccaatcttttttccaacttttggatgtctatgttcattagtgatttgtccagtc

SEQ ID NO: 197898 - DNA, 502 bp, Cannabis indica
ttcttcaacttcatgggtcaacccaattcgtagctcagaaattcctatagatccacattcgaaatagtcgaagtattcgaaagctttgtcaatgaactcgtccttactgtgcatcttttttaggtaaaatgatatgattgcaaattctccatattccatatatccatccttataattttgatcaccctgtaaatccaattctagttagaatgttaatgttcataattttttttaaataaaaaaggtttgggaattacttctccatctaactgtcctaactaacttaacaaccaattctgttaagttagttgggttcaattctttggcaaagaccagctcaactattcgagctggccaaagcctataaatagagaagagtgagagaaagagagctatggggattgagttttgtattcgagtcatcacactggggtgttgatctcggggttttaaatatcaagttcgggggatactcttgagagattccaatcaagctcttgac

SEQ ID NO: 197899 - DNA, 1069 bp, Cannabis indica
tttgactgggctgagtatgatcatttctttacaattataatttatatatactgcaatcttgaaggtaaagaaaatctagcagacctcatagacaattaattcactcttttattataagctcaatgtacttcttcaaatatatcaacacagttaatataatgtgacaccatatatacttacggataaataacgtacatacgtacctttatatcaaaataacggattcctacaaatatttgccaaagaaaaaataacggacaaagtgctatatgtattttttagctcaacttgataaaaataaacttcaatttttttcatattatattgtattttgttagattaatatattgtattgttagtattatttaatacaataatatatttggtattgacttgtattaataggttgtgtaaagttataatatattttcaataaactcgaccccaacaccgactccaggtcgagttcgagttcgagttcggaatccgactccaggttcaggtcgagttcgagtctaaggtccgactcccaggtctgagtcgagtctaggtccggagtccgactgtcaagtttaggtcgggtttgggtccaagtccgggtcgagtttggattcggatctaggctcggggtttggggtccaagtccaagtcctgggtccgaggtccaggtgtgggtccggtacccacgtctgggtccaggtctcaagtttgggccacgggtcctggtcttagtcctggtctgcgagtctaggtctgaatcctaggtccaagttcgagtccgggatcagggtccgggtccatttttgatttccgagttcggattcgggtccaagtccagttccaactcccgagtttggatttgggtcaaggtctgggtctaggtctcaaaaaaagagtgaataaaaaaagtaacatttattgtaggataaatttaatcaagtatattttgtgctaaatttaatataacttttagcatgtattaaatttaattcacactatccacaactatcctaataattatttaatgcagtttcttcttccttccaaaaaaaaaaaactaaagaaaaac

SEQ ID NO: 197900 - DNA, 1865 bp, Cannabis indica
aactcccatgtctataattggatacttgttcatgaaactaaacatagaaacaattaagaggaagcaaaattgcaccatggttttaaccaaaaaaatcttatcacatgtctccactattttgttaatgtagttaggtgcattagacaagaaatggccaagaaaaaaagcaatggttataaagatgaaacctttcaagttgtcagcatctttaaaatgatgctcagaaaaaggggataaaaaaagaaaaatagcaccaacacttgctaaaaccacttcaaaactgaatagaaatatgtaccttataaagatgaaattattaatcttaattatctgtccaattaagaaaaacaacccaaaacagcagagaacagcccaaatcatataccttgatgtgatttccaaacaaaagtcgataatcaagcttagcacaacactaaacaaaccaagttgtaactttttgtgactgtgtaatgataaaaccaaggccaagagaccaaaagctccaaccgaatactgattgtattgactgtaacaagactttatatttataggacgagcagcaaaacgagaatatttggtgaagaaggcgagcaccaaaacaatggcatggaaaaaagagtgagttaagaatataggagataggtttaaattccttgttccccactgcatgagcctattccggtaaaacacaagaaagcccaagagaacagaaaccaagctccctatcatacgtttagtaataatagtaccatggtttaatggaaaagtagtgatgaaagagctttgggacagagaaattaaaccaaaaatggttgtaagggctccccaagtaattcttacatccatggagaacaagtatggaagtaaggaaagaaatgagttagaattgatcaatgaaggtgtttgataagaattaagaaatgtccaccaagttgctaagcttcacacatgtaatctcatctcatctcatatattaatatatgttttttttgggttaacatcttatattaatttttaatcagttgtccctttccattatgtacaattgcttatgaaagacttcaccacctcattaaaaatgccaagtatgcaatgccatttttttttcttctctttcaaaaaataattatacttcaaatatgtcatgttaacgttggtttttagtgcaattaaatattaaagtctactgatttaatttaataactactataagtctataactatctctaactatttgtaaaagtcatctcataaagatattagattagtatctaataggtaatgttctaacatttaaaatggaagtatgtactttttattatctattcctatacactcctaaaatgagatcatctgtccccatctttttcattgactttttttcctttgcagatgtgctctaataaatagatagatattataacttacattatctatttattttttttggttttctcatttatacacttcaaaatagttatttccttgtattttttatagaaattcacataaaaacatgcataacaactaacgaaacaatttaaaacgcaactaaaatctacataacaagttaacaacctatataaaaattactagagcaactattagagtaacccaaaccgtaaattttttaaaaaacagttaagaaataatatatagaatatttttttttaatagaacctcatctattgttttaaaaccaaaggaagaaaaataacataaagaagtgttattcttttttaatacttctgcaaatcagctataaaatagcttgtaaatcaatagggaaaaatctcttattataactataacttaatgataaacacacgaattaaataattaacgatctaatttacagattgttc

SEQ ID NO: 197901 - DNA, 1452 bp, Cannabis indica
tataacgtatatgactatgaaaacaaattactaaaaaattatttaagataatagaaatatattagtccatactaatattttccaattacttttattttattagataataataattcacaaacccggtcccacccccaacatgtgatcacatcaaaaagaaaaaaaagaattaaaaaaataaataaaaatcgagaataccggaaattaattaatgcactaaaagtcaaatcaatgaatctttatataaaaatatgaccacatcttatccacacacatttatccaaaatgacaaaataaaataaatatgtaaaaagacactatcgtcatccacatctaatacccaatgcctttcgccgcgtacacgtaatagagggcattttcgtcatttcacactaaacacgcaatctccgcatctccaccgtccaaaattaattaacaaaaattaattaatattaactctctctttcctttcctataaataacaacgttctaagctttcaatacccattcaaatccaaaaacacagagaaaaagagtgaaagaattgtaatcaaaatcatcaacaatgtctggaatcatgaacaagatcagcgaaaccctccacatgggaggaagccacaagcctgaagatcaacacaaatccggcgaacaccacaaggaagagcaccacaagggagaacaccacaaggtcgacgaacacaagggagaacacaaggaaggtatcatggagaagatcaaggacaagatccatggcgaaggaggtcacgaagataagggagagaagaagaagaagaagaaggagaagaagaaggacggtcacgatcatcatggacacgatagtagcagcagcgacagcgattagattcactgtatatatatcaaaacatcatgatccgtcgatcgatttaggtattgatttctttctttttcagatctgaaattttctctgatcattttcaaattttgtggttatttttttttttgtaataattttgattttcaaataagaggactgatttgtaaagtgattttgtttggagggctaatttgtaaatttggtgtgaaatgcaggtatttcggttgaatgctaatatcagaggtcgggtcgggtcatgatatctgaatctattacgtcgtcgttttgtgtgtttggaattggaataataatattgtgatgtaataataatggttattaattaattaattaatattgatataatatcatatgagatattgtagggtagagtattttaatttctatatatatatattgtcgtttaatgaatgatgatattttatgaaattaatgcaaaatctttatttctatggtaatatatatctcactctattattgttttctaactaaaatatattattatcctaaaattataataaagaaaagaaacaaattcttttcttaccgtatttgtaatatttttcaaatctcacata

SEQ ID NO: 197902 - DNA, 724 bp, Cannabis indica
tctcttaatgtctttggtcctacatattttgatagcttcctctccattgatgatggccccactttccacttcactgccttttatggtacacctgctgcttctaacagatcctcctcatggaccctgcttcaaagattaaatgatattgctcctactatgtcatggcttgttactggtgactttaatgaaatcttatctcaaagtgacaaatccggtggccctttacgcaatgaatcacaaattgaagctttccgtaaagccttggatcactgccatcttcatgatttaccttatgatggggatcgttttacttgggtcaaaaacaggactgccatctctactacaaaggaaagattggattgggttttcactaatcatttgtggaattcttgttttgacacgcctattgtctcccacttggatttcttctcttctgatcatcgtacagttgctgctattgttgctcccttgaatactgctgcctcttcccaccgccaacgctctgatttcgctttgaaaagttgtggttggttgatcctgaaagtaaggatattattacagcttgctggtctcatggttctcatagtgatcccatctctagtatcattcacaagcttgaaagttgtgcaacatcccttcagcaatgcacctccacaagtatggtcatatgaaaaaaaaggatctctgaagctcaaaaaaacagtcactgacctcaatacatcag

SEQ ID NO: 197903 - DNA, 548 bp, Cannabis indica
tttttagaaaatatcaccactttcaaaaggttccaagtattattagtgcccaataataatgttcctaaacaaacatctataattactcagataaaaaatataatgatattgtgcacgaaaaaatagcacacaataaccagttctttaattaatcatattttttcaaactaggacctactgatttagaaaacagtattgtatcattaaagataatatatatttttgaagattaaagataatattttgatatatattttgtggaattttttccaaaaaaacatatatggacagaaaggttaattttgacaaagtttaagtccatttatctgattactcatccatccatgtgcgtgtacctctttgaaggatatgatgtgttaaattccttggttttttagttttattttattcactattattataagttatattaaagatggaatccttgttatgctgatatctataatgagaaaggtaaggtttttaacataatctaaatggtaatgcagaaatattatacatataaaagttaattatactgatgccga

SEQ ID NO: 197904 - DNA, 1379 bp, Cannabis indica
taataagcacgaaacctaattttttttccctttgttttattcttttctgctttttattttttctctgtctcttgtttaagcggctttcctccgccttaagtgagggcattaatctattgcagagggtgatcagtctaagacaatgatctctcttctttttttaaaaaaaaaaattgtgctacattttgtgaaaagatttatatgataaaattaaagatagcctcatagttgatcaaaagagaatccaacaactgttttagatctacatctttctctgatataatttatgatatccttgtataagttcttaatttatcttcaagttaggagatttagagaagataagattttgggaagattcttggataggaaacattttgctgcaagagatgtttccagatttaactttactttcttctgtaaaaaataaatgtatcaaagaattctccgtcgaggtggagtgggaactaaggtcagctggagtctacagttaaaagaaataaaaatttaaatggtagggaagtcccgcattgctccccatgcactttgttgaagggtagacggatttggattctagacagcacttagattcttgtaattctgcatttaaaagatttaaatttgaataccttggattttgagaatgattgagcgaaaggtctatggagaagttccgccccatcaaaatcagaagtacaagtttttgggtggcttcttgggaaggtttacacgaaaatatgcaaaaaaagatgcccttgacaagccttgtctccaggtgggtgtgtttgctgcagatcaaatggagaatcaacaggctattagttaagttttgggttaagcaacttagggaattcagcgaacttttggtattgagttctacccaagtgcttgtatgagtggtattagagccatgcaccctcaaatgggaccgatgttgcagaaggggcgacctgtgaattaggcccagagtagagtgggccgctgtagacgccggctccaaaggacggtgtatcgtcaggattccacattgaccaagtatgggattgattagcagtatgtaactatttgggcaccctcctctttttggccagcttttgggagtgaggtctatccaagtgcttgtatcatgttgctgctttctttttctgtatccatgcttgtcttttggccatgtttaggttcatgttcgcatttctatcagttaaacatgttctgtttactttttaaaacatataaattactattattttgttgatattgttgttttggctttgtttctttcagtttgcaatgaatttatgttatatatggtaccggaaagatgatacttgaataatcatttaaactctaatagtaggttgttctttgtttctttcaga

SEQ ID NO: 197905 - DNA, 1411 bp, Cannabis indica
atatctttaattgtattaagttttttttaattttttttcttcgaatttatagtcttataaaaatatacctatcaaataaaactaaattatattttaaatattatgacaaaaaaaaattatatcaaattttcttagaaaaaaaataaaatatatatacatgagttagacaaaaattatgaaaatgaaatcaaaataagtattaaaattaacataaaataacgtgaagaaaaaattaaaaaaatatattaagagtaatttttaaaaattatttaagtttatatttttttttttaataatggtgtgtatttatcattttatggggtgtaaatagaattccgctaaatattaactattagtgccacatcataatttatacagtcaattttaaccatttctaacaaaaggagatagttactacaaatgttgtaatttagggagtattaataacaagtattatattataggggggcacaatttagtagtgtaaaatatttagggggacaaaaatactaaagcatgtttggtattgttttctgctttttattttcaaaaaagtatttttagaaatgagaacaaaagatagtttttgaagttttcacaacacaagtcgcgtttggttaatgttttctaaaaacaatattgaccaaaagtgaattgttttttaaaacagaaaacaatattttgttgttttcaaaattcttattttttgtaattttgttttctaaaaacttttttaaaaaaaaatgccaaacaagcctaattgttctcaaaaaatagttttttagttatgatgtcaaatatgaactaattaatctaatcctaatgtattaacaatagattaatctatttttttttctattgtggatttttaagtttatcaagcttcataattattattttcatttaattattacaacaataacaataataacaatcagttacatagagttggtataaataggtaaaagtggctttgctttttcttcctcgtgaagttctctctccaaccctagttctggtttagtcttgggatttcccctgggttttgctctctttgctctgcgttttgttccttactctcccctcttcttgttttgtttttttccatctctatgctaatgattacacttccactcttaaaagtccaacgcctctttacattaattgctctcacttacttgcatttattatctatatcgcatgaaccttcttatttattatgtttgcaggtttcttttgctggaaatagcacccaccttgcccaaatagtcgattcaactgtcgttttggatgttctgatgcccccgagaataatcattcctactcctactctccccagcctacaatggatgtgcactgtgccgatagccctagatcctttccacaatccgatgaggcaacttaactccag

SEQ ID NO: 197906 - DNA, 1839 bp, Cannabis indica
tatgagtagttggtaccacatgcttgacaatatttttctattctatcaagcagatgtatgcttctcagtatttcccccaaatttcagagcttttaaggaggctaccacgtgtaattcttttgatgctaaaaacaaatgattgtctacgatcagttaataatgccctggtattgcatcttgacctctttttacccctttcatctgtttttgatcgcagtcctttaattaaaaccctccctgtgttttggcattggtaactctacatatttcttttctatttaaacatggtaatattctaagaatttctcaaatcaaagattaggaacaatcaagtagaaaagaagaataatcatgagacaatatgatcaatcttagagataatcacgccaagtttacacaagtattgcactttgtccaaaactcttatttccaaatcctaggtgatgaatttgaagcttgaggtttcttcaatagaaataaggagtgggatgaaacaagtctttaaaattatcaggtcaaatttttcttgatgaatttcttagagataatttggattcttggagagcttggagagagtgagaaagtgtgatcaaggcttttaaattctaatgaaccccttaaacagtgcaggaacctccattagacttgtccaatagaattagagtcattaaattcaaattttggatcatttacttattaatttcttaaccaggatttactcccagcgaggttaggtcgcacaatccttggagtaaaaccctaggacttcattttcatttgtcccagacctgtttaggaataggtgatatgtagcctgtcctgttgtataattgctaaaatcacatttcgacatttccaaatgctctcaaaatttttgggtatccttttccactccaatggtacacttcagactgagaaacttaatttcttatcacctacaactcaaaagtcaaattttacattcactttgatgtgattttgactaagtatggaaacacaaccatttgtgttcacactttgcctattaccagctccaacatcttttgaccttagttattttgtgacggcccacatggatggggcatgtcaagtatatgcactacattgttgcttcatttacacttctaaaatatcgttgtaaacttgtagtttacccaatatgcaaaatttcataatttatctgtggttaagtttgctctacattattttgcatgccaccgcttattcgcactcttcatccactaaaacatttctgaaacagttgcaggagtcttctctggaaacattcttgataattggaaggatatcttctgaagctgttattgaggctaaattgttagagagtaaatccttgttggttcggttgaatgtttggatcgatgaaattttattggacgctcgactttttggaatgcaggtggccctatggcttttgcagctgaagagagctttgtgttggatttactgaagcgatgttcttataattattctttggttcctgaactgggctcgcacattctttttctctataggtcacattccccacgaaaaaaaatacagggtctcgatcatatgggatttgatatataattgattttataaaatggaagaacaaataagtgattattttcttttaaccaaaaaagagggaaacaattcactgtttttggtttcaagatgcagactgttaatttttttttttggatctcatcgatctttgtaaacatcttattccaactggtaagtgagagactgaaagaaaaatgattcattcgggatgtctgtttttacacacaacttcacaataattaattgattaatttccctggaaattcagaa

SEQ ID NO: 197907 - DNA, 1148 bp, Cannabis indica
aatttctataaagacttatatcatgtgagaagtaaaacgaaatttttatggctgttagttctaaatatcacagtaaaaatcaactaatgtagcagattcataccgcataaggaatgttttcattttatgttaacattcgatctatctttgttcttggcagttagttgcttgtggggttgccgtttccacttacaatgaaggagctaccgatttcaagaacacacctgtatacaaggagtcagtccagtcccaggagcttttagaagaacccgatgcatccaatcccgatgtatttgaatccaacccaactgaggtggctcctaatttggaatagcatacctgatgaacaaatgacttttacaactggtatatgactgtgggattgttttcgggctcaatacccctttacaatccccaggggaggtgaaccagagcgagaggaagccctcgtagtcagtcccccctagattgttcagttggagctgttgttaccatactgttgtttcaaaaactatctgtattgtataatcctactgaaggaaacaatttaaaaaaggtatgttaatcaatttgtaaagtgttgtttccattgtaatgtttaataccttgatacagagaaagtctttaacatgcaattgagttagtagcaaatttgtgaaaaggagcttcacgttattagttcttatatttggtgttaaacaaacgcctcttgaaggcattgatcagcatacgtaagtatagaaaagatgcaactttacacaaatactccaatgaaaagaaatatctataaagacatttgggtacaagcaaagtaataaaatcaaagttttgaagcatatattgtttcttccaagtgttttggtcaacttttactaattcacaaatgtaaagaaagataagtacctgtttcatctctccagcacatttttcctccagactccagaggtgtcaaaccatgtctccagcgcattttccctccagaggtcttttcatacaagttaatgtatcaaaaactttattatgcattctcccttctctccttttttttagggaaagatcttctattataaatcatggaccttcatttacaataacaaagtaaatgcgggaggaaatatccttgaatgctggttaatttactatccaac

SEQ ID NO: 197908 - DNA, 847 bp, Cannabis indica
tcttcttctattagctcattcctttagctttggctctccacttgttacaatttgaaacaagagggtccatggctatacaagaagatgtaaacgaaagggatatgacactaaaacattcttcttgtagtttttgctattgctaaaataaataaaatatagattattttggttgaaccacctataattgaagtacacatacccaaatgggctctaaaggttctttgattacaaagaagatatggggtctagccgtcaccgatcgacatatgatcttagaaatatgatctagaaatgattacaattgagaaaaagtaaatataaaagagacacatataaaaagtatatggacccctctcttcatgtattctttttagggttcattaatgccataaaagtattcaaatcaatatataatcaaactttttaaacacaatgcatcttttctatttaattacagttctgtctcatccaaaattactaaactccacacctcatacttttcatctatagagagagaaagagagagagaagctgtggcttttatcaaaagatagcaagcagacaaagtttccacaggttaagcttttgcagtctttgtggaaagaaggaaacagagagagagagagagagagagagagagagagagcaggtaacggctgtttaccacaaggacatcatctttttaaagcttttcttttatgttacaaagaaaatagtgcatgaaagtaagggaattctaactcggatccccaaaactctgcattatcattctataattgaaataacaagtatttaatcctctctctctctctctctaacttttgttattactgatcatgagtcttac

SEQ ID NO: 197909 - DNA, 609 bp, Cannabis indica
taataagttatgtccattgtattatgaagggaatgtttgataccaatttttgaaaatatataagattatactttttttatttattttttgagataatattatcacctttttatgagataattttgtttttattcagtaataatttttcaatatttatcacaaacaattaccatgccaaatatgagaatgtgaaagaaccattcctattaaaacattacacaataccaaacaatccattattagtgtaatataataataattttcttatatataaaaaaatctaaaccttttcatgattacataagactttgttaaaaatattacagactttattatataaactataaagcattcatagctagtcatggtgtttttttcccttaaattcctagcctcatgtatctcactttttaacaatattaagttatggttttatgagtttattaagagttggggattttgaaaattacagaaggattaaatcttatagttagttttttattctttcgtttaatatattgattttttgtttaatttaatttatttttctaaaaaaaaattaaatccttactatcaattctctatttttcgtgtactttacaggttttt

SEQ ID NO: 197910 - DNA, 2096 bp, Cannabis indica
aatttttagtaatcatactgttatgtattatactagcaagttctgatcaactctgctaaatatagtattgtattttcatttgttacatgagcaaattttgatttacttgttgtacaacttttaatgaaaaaaataacaggtataatggcccgatgggtcttacttcatcacattttaagaaaattattagaagtatgatgtggctgatagtgatccaataagatccgatggatatcttttgtccacagtttttaaaattagcacatttaatcaaatttcaccaagaaaaatatatcaattgttattgaatttttagcgattaaatcctcttaattatcgttttacttgcacttaattattcagcttaaattttagctggaaaactctccaaactactaatctattagtaaatttaaggtgtcgtccaactaactctaccatgaactgcatatagtattgtacacgtgatacatttttattacacttaatattatcatttaaaaactatttaaaaattattttaaaattaaatacaaaataaaaaatatatattataatttttaaataataatattacgtatataatataaacgtgccacttgtaaaaaataatatacacaaaaaatgtaaattaaccgtttgtgaaaaataaattaccttaaaattgccaataattatatagtttcaaaaattttactatcaaaatttaaactggttaagtgtagataaaattatatcagtaagagaatttaaccgcaaaaactcaattgttatttaggtaactgaggagggactcgaatagtcatttttcttttgacaccaccaacagatgtcatgcacatcaaaataactaacacaacaatgccaaaatcaaatcaaattattatgacatatgcctctacgtaaatatatacatatttactaattgctttgattttctatagaaaaattccatgtctttttgaacaaaaatatatccaacttcactaagtcactcacaagtcacacctacaatatagtcaaaattcagctcagtcaataaatttacaaggacctactcaacaatttaacctttacctaattctcccctttcttatgtaccaaactgcaaaaactggtgtgaaaaatacctcttctttattcctccaaatttttggtctttcagtttcagcatccaaaccagcttacaaaatgtttaaccgaatttcctctccaatttcagcaaatataccattcactctccaagaacatatgttcacctcggcaagccatgttgtaaggtaaacctccatagtattattatgattcaactgtcgattatcgcgacgtgaaattgagacatcagactgtgagaccgccaatcgcggttggcctggcccggatgtttcctcagaatacaagttacaaactttcagatcatcaaattctcctggatagagctcatctgaccaattcaaccttttgacatttgaagattcacaactgagagataacaattccacaacaagaaagcgcttcaaattcaattcaagtataaacatctgaacaagctcctcagacaatttctcaaaacaagaaattaaccgaaaaacaaagactggaaatccaccaccatctcctgaatcatttatgtcttcagaagagctacaaaattctactaatgaagcattacttgtccctttaagatagcatctcatggatttactaactttgctcatctgagttacaacagcaaccaattttttatatgatgtcaacaatttgctcctatgaagctcgaactgcttaaacagtttccatgaagctgtctttctaatatcaggtatatcacttagagcacccaattccattgagggcatgaatttctcattaaggtaagcgttgacaagagaggtggcaagagatcgtccattggaagaggaagagttccactctttcgttaaagaagatagctttgaccactggtttcgcagatttcgctgggcggctggcctccacagccttgatactgatggtgctagaggcgaaggagtggagccagggcttctaaaatcaatatttactgctttcgatgaaggagaaggggttgttggttc

SEQ ID NO: 197911 - DNA, 2793 bp, Cannabis indica
gtattttaaatttaattccatttctatttttatcttcattttcattcttattcttatatttttatcctttctaaccaaacgcgacaattctcaagctaattcttattcattgttgttctacgtgaacgttgttgttggttagtattcacaatttcacatcaagaattaatacttggtaatattaatctctacttttagttgcgacattttatacataaaatcaaaatttactgtgattaattttaattttttaaaatactagattctaagtctaagaatcttttcttagcttatttgttcttttcatttatattttataaccctattttaaatatacaaaacaatgatataaaaacaagaacttggatatatatgtagtgattggaagtaattaatattttggacaacaatgtgtttatgaccaacaatcatatagctacatacacatcaatacaatattatttttggtaaagtatgattattatttgcctcctatagttttaatttaaagatgtgtgtacacctcttaggcagaggtatctggttctttcttcaactacctgttcatggaagaccaaaatcaaattaaagaaaaaaaaaacaattcaagagaaaagataaaatgaatcataattgcttttggtcaaagcttccaacattgaaaaccttcacaatgtcactatgaccaaaaggttcttttagtattatagattaagagatcacaattcatatatataagttattatatccttataaaaatgatattaattaagagattaagcatatgaattatgaaaggaacaacatatgaactatgttactgtgcaagaagattaactccaatgaaataatattgttactatatattaaagcataaggtgttgaactgaacacttgagtaaatgtcatatagtgaaaacttactaggaagaactcttactccaaagttcctggctgtctatggtggttaggcgttggtcatcgaggcgtttccaagttctgatggactttatacctccccaaccaccctcttcaagtttctccaatgttgctacaaccaccctagccctccttgaccatccagccttcccataagcatggtatccgaatcccccagcatagcaaaggtgaatatcagctaatttgccacaaaagtcattcaaatgatcatggcctgtgaaaactgccttaacatctccagctccaaccatggttgagaagaaaccagagttcacagatgcagagctaatgcccttttccatcttcacccctatgaagtttgattcgtcaaatctagcatattctggtaatggaatatgaaagtatgcaagccccggtgcaggtcctttctgggtttgtggcttgcttacataagcttgctgcaaagcaatgaattgattaaaattcaatatagaaagaagcttttcattgaatataacagtaagggaagttaccttaagctttgaagaagtacgttcgaaccagaactgttgggaagccttgatccaaccatagccagggatggagggaactgttgagtaatctccactgtctaagaagtaaagattgagagcagatttattctcaaaactagagcctttgactccaccaacctcaagattatagttcccaaaaccatcaatagactttgcctctggagggttaacttgtgataaagtgttctttaatccaactatgtgtttcattaccccttctcttgaaagagtggattcttggtcatggtttcccaaaactgcagcccaagggatgttggaggctattgcgggggcaaatgcagcatttagagacttggcagcatcagtggcatcagacccgtatatattatcccctgttgcataatataaaaatagagaaaagagaatgagttaattgggcaagcgaatgagccaattgggtaattataaagttcatttgctaaagatacaaacccagttattaaataggatcatcaaaccagtaaagaaggaaaagagaaggtttaccagtgaaaacgatgagattgggtttctcagcaaggatcatgcggtggatgaaggcggaggtgttgagatcagagcaacccttgacctggcttgggagcacatcaagacaaggagttgattttccatcagcaaagtgcatatcggccacttggagtatcttaaactcaccattggacccaaatctgagctttggttctgcagctaaagcacttattggaaggaacgacaacgaagctattaacaacaacaatacaacagaggtagtagcactaagaccagacctaaacgacatcttgttcttcttttttctttattcttctggctttcagagttgatatatatagtaacgacaatgatattagttttgtcatctatgtattgttttttctcctctgttcgacgtaattaacatacccttattctcttcatgcataggcagttgacgttgacgaggacttaagattttaaattaataaaaataaaaataaaaaagagaaacgaacaaagacttcggttttcattgatccatgccaatcttcaaacacatctgtaattagcaaaaattaaccattaacagtgtatggaagcataataattaagacatcagaagtttaaaaagacaaaagtaatacagtaaaaaagaatgaagaaaattcaattaaagtaaaaagtttttttttttttttttttactttcgaatctaaaaaagaacttttgattttaaattgaaatacgaccccttcctaaacgacgtttctatcatcaagaactcactagttgactacatata

SEQ ID NO: 197912 - DNA, 1402 bp, Cannabis indica
ctagtaactagcagtaagcaatctgattttaccaaatcaaggtgaacatgtaaagaatgtgcccattgaagaccataatagagcgccttagcctccatttcatgaggttgtaaattcccaggcagtggcttagatagagcagcttgaacatgcccacgagagtcccttataatagctccaagtcccatcttattgctggccgagtcaattgcaacatcaacattcaatttcaattttgttggaggaggtgctgtccgtggatgatgtgccgcaactggggaggaatgctgaacaggttttgaagctcgcgcagcttgctgaaaattgcagagatgagccatggccttagcagcaattgcctctggtttttgggattgtttatcatgaatgatgttattcctatcaaaccaaatgtaccacatagtgcatagtatcttttctaactcagatttggtgtaattttgagatagtaacatcacataatccccatctttcattcgactagcagcttggaaatcaataaaaatgtcagtagattgccatactgctttagcatgagagcaactaaacaaagcatgcccactgattcccatgcatttgagcataaaatacaagaggacgaagtgattatttttcgttgaaataatgctgcagcaaccggtaatgattgttggataaccctccagccaaaaatttttacttttgatggaatgtttagtccccaaaaagttttccaccaagtgttggaaatatctgaagtggaagtttgatgctgtgtttcaatcgaacaagcaaagtggtagcccgattgaactatatactcaccagaactatgattgttccacacccaaatgtcctctgtagtagaagcagcaagtggaattatgagaatttcagccacatctacaacagaaaaatccctttgaagtgataccagatcccaattgaagtcagcagtgatgtaattggaaaccagattatgttgcaaaccagtataacagactagtgtgaatcgggtatttcctggaatccaaggatctgagttacacctaataccttggccagttccaaccttaagacgcacaccttgaattaacaaatcacgaccccaacatataccttgccatgtcattgaagaataggaacctttagcagcagtcatgaagtcaccattcagataatatctggccttcaaaattcgggctagcaaagtattaagattttggaagatacgccacgcttgctttgctaacaaagcttgattgaagtgaacataagaacgaaagcccatagccccctccatcttagttttacaaagaaacttctattttttccaatgtgtcttctttttatcttctgttgaaccccacaaaaattgtgccatcatagagtccaattgatt

SEQ ID NO: 197913 - DNA, 1470 bp, Cannabis indica
ataattataataataacaataaataaccaaaccaatctaaaggctacatcgaatatgaactgcacatttgcaaactagataggagaaaatggcacgctacatataataataaaatctatcaaaatatatatgtataattattaagtaaaactatataataaaatatatatatatatataagccgtagctaactagttaacaccactcaaaataaaacacacattaaacgtaagaactaaaacatacaaaattccagaaaataataagacaataataattttaaaattatatataatattagccacgtgaaacaaaaagattatattaataattaattgtgatattataattaattgtgacatctcggatctcggcctattacaaaattaattatcaattcacgtgtgagcaaaatgtacggacgcggttcactattgttctatgccatccacttgtcaccttcttagtggttagcaaattagctttttcttcacgttacgtgacttgcatgttttttactatatttacccacgtttttaaaagactcacattattatttctttttaaccacgtttttaggttttggcttattagctgtgaaatatcaaatcctatattttctccacaatttagtgtctaacactttttataaatagtaatacataatttgttagcgatattctttagaaattattttcttaatttaaatgagactaaatatttaattacatcatcaatagtgatataacaccgaaaaatatactagatactataagtgtcttttagtaaattctcctttcccaattacgtgcaatttacataccaacccctttagttaaaaaattaaaatttgacttttttataagaaaaaaatattatcaataattacttcatatattaagctgtttttaaaaacaaaaaaaaaaatcataaattctaaaataggtaaaaaatttagaaccatatgtattattaggaccacaaggttttatcatatttttttcagtgtataattgttcttatataaatatttattatgtatacaatatattatcaaaaaaatatttattatatatataaagtgatgataaaaaaaatgaagcattttaatataaagaaccttgtacaatgaccaagttgtcatatgcttgggtcggtctaattacatccactaaaattttcactatttagaacaaaaaaataccaaaaaaaaatacattattattattattattattattattattattattattattattattattattattattattattattatttagtaccatggattctctataaatacattaggattttcatattgttcattacatatcaaaagagaaaacaaatatacttataaaaaaatattcctctcatatacttaaaccaaaacacaccattataaaagctatttcttcttcttcttctttattaaatggatagggaataattagatgc

SEQ ID NO: 197914 - DNA, 2516 bp, Cannabis indica
gttcgattccatatgggtatttgtggatgattaccaagtcaacatactttacaccagagtaaaacaacatacatagtagatcaatatgcaaaattatatgtaaaggaatagtaaggttgcacggggctctaaagtcaattgtatcagacaggaatctaaagtttacttcaagttttgggaaagcctccagcgagagatgggtacaacactgaagtttagtacaactttccatcccttgatacatggtcagtctgagaggacaatcctaatatttaaaggtatgtacgagattgtgcgatggattttgaaggctactggagtaagtatttgccattgatagagttttcatacaataatagctataagagtaatatagggatggcttcctatgagatgatgtatggcgggaagtgtagatctccaattcactaggataaaactagagaaaggaaatatttgggttcgaaatcggttcagcagaccaatgacgtaatagaaaagatcaaggccatgatgcttgcctctcagagtaggcaaaagtgctatgcagatctaaaatctaggagtatagagttttaagtaggtgatcatgtattcctatgagtatctccaatgaaggggattaaatatttcgggaagaagggcaagttatgccctagatttacaaggccttttgagattctcaagaatgttggattagctgatattgtctagccttacccccagccatatcagtagttcataatgtattttatgtctctatgttatgaaaaatacatcctgttcatgtattgagttacgaaaatctagagctctaaccagatttgtcatataataagctcttagctttaatatgagaattaatacataattattgcttaattttagaatttgattttaattattatttatacaattatgaggatatatttgaataggtgtattaaatataatatttgtgaaactttataattttcatattgtatgcctggtaatagttgaatgtggcgtatggcctatagtgtcattttatgatggtttagtaccttaaaattagcagagcaatatagttagacatttaaaatgtcaagaatgtatgggattatgatttaggatcattttacccataagttgttagcttgcttcttgttgaagaaagatggtaaattagtaattttaccgtagtttcgtcttttatggtatgagagaattatttgtaataatcccttagttttgtttttgtataatgataattgagctatcacttagataacacttagtaatttagtcatagatctctctttttctttcttcttgctcggccacatccgagaaataaagaccaagaatttctcatctttttatcatcaattcagaggggtttggctagggagttcttagattttggaagattgaagctcaaggtgagcttcctcttttccttctcttcgaattccaagttttgaaattacggttttatgcaatttttagaattgggttgctttttgtttttggttaagttgggtttattttcttgagctgttttatgaataattaagttgattttgggttgttttggttgttgttgagcctagaaaaaatttgagctttgctcattaatggtgaatatcattttaggttgttatatctatttttattgcttgaattatgtttgttgtggcttaattaggggttttagaaggtttggttcaatttgggggtaaaattgagttgatggtgaagtttttatggttttctatagtgaaccagttaatcagttctggcattcctgtagaaccggttaactgattccctaagcagaactctaataatcggttttccattttgggaatctaggttaccggttctagcagttttaaaaccctagcttttcatattttagaaatatttagggtattgccaagctatccatcgatgaggaaacttttagttttaattttaagtccccgaaaagtgatttggcgtatcacttatcagttttatgaatgttgtaacttaagggcatgtaaaccgttgagtagcaatttccactaagattgaccgacacaccctaattcaaaatcaaggtaagattagtgtaataatgtgcacatatgattacatgtttagcgtgcatgtttatgaatgcctaatagataacatatcagtaatggcagtattgtacatagagtttgactaaatattgatggatatatgtttggaaatgtactaattgatgcgattacatcggtacaactagattaccgagtatatgcttatattatggtaaataatatggttgtttgaatgttctagacttaatacgcataggacgcgagatagggttataattgggtgtatgggcacctaattataatctggttcatgttatgttatgattatgcttttcaaaccgagtctttagacttacatatattatttgcatgtgtaggtaagggcaaggctaaagctgaacaacagtgagttcaagttaatgaagattgtacatatcaggg

SEQ ID NO: 197915 - DNA, 549 bp, Cannabis indica
tgaagtagttttcaatgtagttatacccaatattctttttctattttatttttttgtgacattcaatttagagcagtgtagttgttgttacataagttctatccctctatttaatggatgaagacaacacttacatgactgattttactagaaatctccactcttttcctaaaaatacttagccatcttctaaaatttgtgtaatttaatgactttaacttctcagggttgtgtttcctaggtgatcaaatttaaagttttcctgtgcttgttatatcgaatttaaagttttcctgtgttgtagcttctttgttgttgacttttggggtttggtggtagtatcatttgagattgagtaagaggaggaaacatggtcatgatattggaagagatgatgattgggctgagaggttttactcacagtataattaatattattccataaacagtagacccatcttttgtttactgttattatttttatttttagggtgggagaataggggagcttataatttacactagtgtctatgacaaaaaaaaaaaaaa

SEQ ID NO: 197916 - DNA, 636 bp, Cannabis indica
atgatttcccccataatctagccattttttgctccatatcctgactactttccagcatgaccaaaaagacaatgcgtgataaagattgggctactattttgacaagtatctctttgctcactcttatgaattcacttcttcaaataactgaaaaacaattattttattgacccttaaagtactgggaagacccaaatatatactcccactatctgccattctcatttgcaatttataacagagatcgaccgtcaaattttttcactatattactgctgaaaaaaaaaaggaagacttttctaaaatttaactttggcttgaagcctcttcaaacttgtgtaaaaactcttaaattttaaatacttccttttcaatttctttacaataaaggtagctaccatcaacaaatgaaatacactcttagggccccatttgcaaccttacaaccacaaatcaaacctctgtcttcatactttcaaatcaatcgcaagagatctttcacacacaaaataaatagataaggagataaaggatcgccttggcgaatatcctgtgttggaattataggccttatctctcgacctccataaacaacaatgtaacaagtacaagtatttggaagctaatgaattaaga

SEQ ID NO: 197917 - DNA, 1726 bp, Cannabis indica
ttagaagatctcttaatacaagaaaagacaactgattcaaactccctgctcttagacatacaatccataaaaactggataactaccccaaccaactggaaaacacccggactgtaatccctgtattgccacggcacaatccgattcaatagctaccttatgaaatcctttagaagccgctgtagacagagcaagagaaattgccgataattccccttcaatcacactatgcaccatcccaaagtcaagagcaatcagagtatcattccaatcatcttcagtattcagaattgcagcaatgcctgaatcattgccgctcaccgaagcatctacttggaaaactggaatgtttcgacagacatgtgaagggtgagatggagaaggagtcggaggagagatctccacctcttgcatcagaaccgagaactcagttgctctggagagccactccttagccagcaaattcatatcccatggtgtgtagttgtgagcaatcttattgcgccaaaaccacaagacatccaaaagacacgctgcaaacacctttagctcatggtcctcaatgtctgcccaccagcttatgaaggcaaagatagtattccagcccatctgatctatccgaagtccccatctgctttgaaaccatagcacgcgtaatgttgcaccttgttatgatatgcattaagtcttcggtctcttccttacagaacacacaggttctatcttggatattgaggaagcggagcctaccaaatgttggaacacagtcgttcaaactttccacataaggagttgcaaccgaggatgtaactttgttttccatattttgttccatatagaatttgactcattaaatcgttcatgttgatggatccagtaggcgcttttaactgaaaaattccccgatttcgcagccttccaaaacagcttgtctttcccttctcgaagaggcttgacgttgagaatggccttcgcaacatcttcttcaaagcaggaacgaattagaccttcgttccactgacgcgtgccatccacaaaaagattggaaaccttgtgaaaagcatgaattctattatagctaaagctgtctttgatttcttgcatagacttccacggaacccaaggtgtagtccaaagatctgtatctccattagcaatgactaccccagcccctttcaagcaaacatctctagtctgaataatgcgtttccagatcagagaatcttgatcctttttctccaccacccaagcattgactgaagaacaatattttcccaaaagcacattcacccataatttttctttctgttgaaggaccatccagcaaagctttgagagtaaagctatattcatatcttgaaatcgcctaaaacccagtcccccacaattcttcggttggcataagtccccccaagatttcaacgcacagaagcgatccttgtccggatgcaaaccaacccaccaaaatcttgccacaagcttatctagttcttcacacgttgattttggaaccagagaggttgacataaagtaagtaggaatactttgtagaacagaactcaccaaggttgttcgcgccgcttgagatagacacttagctttccatccgtcgatacgattgagaactttctgttttaagaattggaagtctttcgttcttcttccagtgaaaagaacgggttgcccaagtattttccttgcccgaagttttccattgacatgattgc

SEQ ID NO: 197918 - DNA, 3033 bp, Cannabis indica
caaagaatggaggatatacagaaagatttttcaagctttttccaagcaaataagcaatgtaacagtaacattgctagaggtatgtctgctactccccctgtgcttacgatctgcaactatagttaggaatcttgaaaattcttttaagggttctgaacaggggaaaagggttaagatttatttgggaggatatagaagaggaagttaactattggatgccctctctggtctactatgtcttaggttccaaccctcctctgcacatccttgaggggtttgcaaagagactatggaatgacaaagtagacaaagttaaaatgctagcatatgggatttttatcattagatttgattcgattgagagcagggatgctattctgattgggggatacatattttttaataggagaccagttataatgaaggcatgggaccccaataccaattacaagaagggagatgtgaagctaaatcccaatttggatttagttagaggatttggatctcaaatattgggggcaaaaatctttgtttaagattgtaggacaacttaggaagccaatcatggttgataatgtcactaaagaaagggagagactcaattaccctcaggtgttgattgaagtgctaatggaacaagagctatcggggatgttagaattttgggatgaaaatggaatgaacacttcggtaggggtacactatgaatggaaaccaaccatttgcaaacattgtgatggtatgggacatttaaccgaggaatgcaagaagaaagggaagacaaagcaagaatgggtaattaaggtggataaaagggctgaagttaacaagagtaaagtagatgaagatggattccaaacagtcagcaaaggaaaaaagcagccagaaggcacctgctacaacaacaattgaaaacacttttagcatccttgctgaagacaatggagaaaaaatgattgagttacaagaagacatgaatattgaaaaggataacacaagagagtggggaccctctcttggcaatggataagttcctttgttggaatgtccgaggagccaacaacattcaaaaacagaggtcaattaagcaatttatttagactcagaatgttggattggtagggctcattgagacaagggtcaaggttcacaagatggggaccttgtaccttcatgtgtttgataattggtgtttctcaacaaatatttcttggcataaggggggagaatagtaatagcatggaatccggtgaggtacattgtagatattataaagtgctcaagccaattgatgcaccttaaagtttctaccttggacaacacttatagtagttttcttactctcatttatgccttcaatgacaaaaatggaagacaaagcctatcaaaagacttaaaggagatggccactagagacaattggatcttaaagggggattttaatgagatcttggcaaaagaagagagagtggggcacagagtgaaatactacccggatactgattttgctgaatgtgtgaactattgtcagatggaagatgttaaagctacggggaacttctatacttggtcaaataaatagcaaggaaatgacataatttgctccaagatagacaggattatggctaatcaagcatggttagacacttatcagaatgttgaggcaaattttttaaatgagggccttttcgatcactctcctggcattctctccctttatcctagatggacaaatgggagaaagccctttagatatttcagaatgtggaagagccatggtgattatgataagaagatatctgaagtatggaggaagaagattgtgggaacaaagatgtatcaggtagttactaaacttaaagccctcaaactggttctaaaggagatcaacaaggctggtttttctgatattcactcagctgtaattcgtgctaaaaacgtgttagaagaaacttaagttgagctccagcaatatcctcttaatgctagtttacttgatgcagagatgaaggcaagagaaaacttgatgcaagtgcagaaagattttacatcttttctgcaacaaaaggctaagtcatgctggattcaaaatggtgatagcaacacagcccttttccatgcaagtataaaagcatagaataaagcaaaatcaaattttctcaatagagcaactaaatggcagcagagtaatagatccgaaccttacttctgaggctttcgtggagtactacaaggtactgttgggatccaaaatgaaagataagaagagggtacaaaaaaattatagcaagaggccagtagtgaatgcttagcaagctgaaatgttaactcaaagatttactaaggaagaggtgaagcaagctttatttgatatacctgagaataaggcacctggaccagatggattctcaagtttcttctttcaagacaattgggacttgattggagaggacctttatcaagttgtgacatctttcttggaaacagataaattactcaaagaaattaatgcaactgttctgactttagtacccaaattaaaatgtccaaatactgtaaaagattttaggccaatagcttgttgcaatgttctttacaagattgcaacaaagcttttgtgttctagaatcaaaaacattcttcctaatctaatctctcagaaccaaggaggttttattaggggaaggtttattgggcataacattatgatttgtcaggacataatcaggcattatgggaggaaaaataacaaaccgagttgcatcatcaagttagacttgcaaaaggcatatgacaccacagaatgggatttcattgaagaaatgttgactgacttactatttccccaaagtttcattaacattgtgatgacttgtgttaggtcaccaagattttctctaatgtttaatggaactttacatggatactttgaatctaagagagggcttagacaaggtgatccaatgtctcctctcttatttgtgattggtatggaatatctatcccgaataatggggatggttggggagaaat

SEQ ID NO: 197919 - DNA, 1724 bp, Cannabis indica
attgccataaccgctgttagtacgatatcagccacaccccaactcacatggtcttgcaaatacacaattacagttacaccaatgaggagtccagagcaaaggccaaagttccaccaattaaaatatgacatcttttgttttctttctttgggattttcttcatcaaattggtcagctccaaagctctccaaagctggtttatggcctccagttccaatggatatgaggtatatggccaggaagaatattattacatggattttccttggctcttggcatgtttcaccatgtttacaagctcttaggctaggtgcaaaccatgacatggtcagcagtattaagccctgtatttttccatgtgtaaacaagaatttcattaattgatcatgaccaagtatagaatagaaattgaaaagattaaaaatgtagtataccaaatttgttaatgaactgaccaatacaacttaattatctagttaaaaaagaatcttactacttttgaaaaataatgatttttcctacttttgctaaaatttgaatgagaaatttaacttaactatatatagtactaatagcaaaaagtggaatgaagcactccagctaagttttcaacttttttatttgcttgtaaatttaaaaaagaaattataaattacaaaattattgataacgcgcagtttgtacgtaacagttatgtaatagcttgtaataataccattttgaactttttgttttccaaaatttatcaattagattttctgttttgttaaataataatatggaccctgtaaattccgaaatggtaaaaataaaactctgagcttaatttttgataacttttttttaataccaacttgaaaaataattcttaacgcgaatagatacagaaaatataaatagtttgtcataatacttttaaattggattattattatatttttttgacaaaaaattaattcaggattctatttgtaccattttgaaaaatacagagtaagttcatttaacaaaacagaagatccaattaataaattttgcaaaacacaagtccaaaatagcatttacactttatttatagtctataaatattgtttataaaattgtaacatatagttatgaactaacttaattttgtttacaaattgtggaaaacttcaagtaacaaaaaaaaaaaagaacatgttccaaattggtgaaaaaaaaaattgcagagaattaaagattatacttctctatatgtttgtaattcttttcgaattccataattttaataatttttatttatttctcaaaatctttgcattttttgtttcccaaatataattgatattatattttgcaaattatattttctaaattcttaaagaatgttggtgatgatcactattaaaactttaacaaaaatatgtatattataacttaattaagactaaaataacatgtcgactttagtaggtttaataggaagttaattattaatgaaataattaccaaaaggtatacgatggtagaagcaaagacagtatagaagcgacccaaataagagtcagcaatgaatcctccaaacaaaggcatcaatgtagtaacaccagaccaataattaacactctttgctgctgtctttagatcttcatgcattactttgttaagtatatgattaagcttgttgctatcccaaagtactcaatctctcactgaactcaattgctgcacacaaataaact

SEQ ID NO: 197920 - DNA, 1101 bp, Cannabis indica
catccgatccaatccaaatcaaattagatattcaaaaaataacatctaattctatctaatcctatctgattacaattagatatcaaatgtttagcgatcaattataatttgatccatcatttgttgaattgaatcaatttatacattattagtacccataacaatgctattgttttctatactccttccttcctagttcatatatatccacctccacctctctattctattataaaatttgcgtgtttcccagctcagcaagagccatactattttggtagcacacctaacttattaaaacccttttaccattcaaatttctacctagctactacgtactaatactaaacttatgtgttccaacattctgttttgctaagctggaacatgtatttggacttttcaacacttcccaccatcccaatttctatataaaggctttttcatcaactttgatttcccatcaaccaaacccaaaatattacttacatcttcctctaccataagcaaaccaaaatgccatctcataacaatcctctcctttgttctgttgtgttgatagtaataagttggtgtctagtgagtttggtctcagcagggaacttttaccaagattttgatataacatggggagatcacagagcccaaatactcaaaggagggcagcttctcacactctcacttgataaggcttcaggctcgggtttcaagtccaagaacgagtacttgtttggtcgaatcgatatgcaaatcaagcttgtacctggaaattcagctggaacagtcactgcatactatgtaattaagaacatagatatacattaattattaattaatcaagttttcatatgtggctaacttgtgtattgattaatcatttgtacaatgcagttatcatctgaaggtccaaaccatgatgagattgactttgagttcttgggaaacttgtctggagacccttacacactccatacaaatgtgttcacccaaggaaaagggaatagagagcaacaattccatctttggttcgacccaacaaagactttccacacttattcccttgtttggaataagcaacgtattatgtaagtaatgatcaat

SEQ ID NO: 197921 - DNA, 2047 bp, Cannabis indica
ttctttgtctcctagatttgctaatcgagttaggagaaccaaattagtctcccctgagttattgcgtagacatgatttaggtaagccttcccttgattttgaaattgatataattaaaaatttcacttcctgccctatcctaccccgacatatgccaaagtaattaccactattatgccccaaactggacctacttatgaacaattggttgaaagaccacataaccaagtttttaagtctagacaacctcataatcaccctgaacccacccatttccattggcccacttatgcaagtgagattggtcttgttgaggaacttatggggccaacccctattgataaatttgagcccactccagttttgtttcatgatccaattgatgtctcagagttggtccaccattgtcctcaacccagaaagagaaaatctggactcactctcatacttatgtccaaagaaccccagagatagtaagagagctttcccaaaccattccaaatatccttgggttttcccatggccttatcccctcttctaagatgggtagtggtgcttcatcatcttcttcaaagaaacgagataaaagaagaagaaaggtctctcatttaggtaattcaaatatgaaaggaactaaagctcctttattgattaagtcaaacacagaattagccaagaatttggcttctaatgtagatgagctagttgaatttcaagtggatgtgatcacaaattttcaatcgggcgaggaggcgacccttatcaagccgtccccaccacccaatgagagtgctttcttggaactgtcaaggcctttcgaaggactcgacagtctaggccttaatggtttgggcgaggaagttcaagccgtgtcttcctcatggaaactaaagtcaagaaggaaaaaatggtggagataacaaggctactgggtgttgggggatggagtgtattcttgcttgcagtttagttggtggcttttgctttttatggaattcagaggtgcaccttcagatccttaagattgaaaattctatttttgaggttgatttgggatgctcagttaaactctttgtgaagtttgtttgctgtttattatgtcacaccatatgatcaatacaaggaaatattctagaataaaatagagaacatggtcaatgattgcactatgtcgttgattgtaattggtgacctgaactgtatcagtggccctgttgataaaacatgaggtaatagagttacaagacaagacaccagatggcttaatgagttcatgtacaacttaggaggtgttgatcttcgctttaagggatgtaaattgacttcgcataacaaatgttttcttggagggatgattagggaacgaatggatagagtcatcagatcttataactagaatgctaccttccctaaggctagggtctgatcatgcccccattctgttggattctctgatatttaatagcagaggatatatcgcatttacgttctttgaagctttgaccaatgaagaatcttgtaaagaagctattgatagtgtttggtagaatacatattgtgaaggcacctagaacatgattcgtaatatggacagaacaaggagagtgctgcaactatggaagaaaaatcattttgaggaatgtgagctacttgttcatcaacttaaaagtaggctggcgttgattcaacaacaacaattggataataatttgtgcattgaagaaagttatattcattccaaattgaaagaggcttggcacaggaaagagagcatttggcaaaaaaaatctaaagaaaattggctgaagcttggtgaaagaaattcatatttcttccatgtttctacatcaatttgttgatgtagaaaccaaattcaggtctcgaaagatgactaaggtaaaatttcggtagatcaatggaaaacgatacgtcatttttaaggggcagatttcaataaaaaaaattaagaaaactttaaattctgaaaatttattagtttgatttacttagaattttttattttatttctttatttttgttaatttag

SEQ ID NO: 197922 - DNA, 1044 bp, Cannabis indica
tttttttttttaaagaaaaatagcaaatttaaggttttgaaagtttctttcaaaattgtgttaaacaaaccaggaataatcttagtgggttgtaatataatatataaaagaataattagtaattttttttctagaatttttaagactattgattttatcccgtaacaagctaatattggaggaagctttgtagacttagacaaaccttttgtaggggagatattgctgttgcaggtgtgtttgggaaatgtagagctgcaaaactctaataacaaaaggttgattatcaaaagaatgtgtcccaaagcatagatttattctttggcaagcattgaataatcacttgtttacgcgagaccatcttcccaaatttaatatctttgttgaaaacttgaattgcccagtgtgtgagcttgatcgtgaaagccactgccatttatttttcgattgtaatctgtcttctcagatttttaaccagatttttcgattgtaatctgtcttctcaggattttaaccagctggtttgctggcttggtgttgtcccttggcctagcagatacaatggctgaacagagtggttgaacaacaaagagaatggccttgttgcagcagttttcaacttcgttctgactgctgaagtctatgagatttggaggaacaggtgtctctatgagaacttttcttattcaacagctagattagttgctgaaataaaaaatctattgttgtttagactgcatagctatactaaaaggaaaatgagtactagtgatcaaatgtatttactcaaaatttatagctggttgaaaactagaggcaggggcggtttgccttgctgacttggtgtttgatgcaattgttcaagtgattaatgaaaacttctttcttgataaaaaaagaaaagaaaataataatgtcaatactttttattattaaattttatgtttgtatgcttatataataggatataatacatgtaacaaatagaccctaaaaagcactcacctacttgatcaaacatatctaatatatgtagacaaaaca

SEQ ID NO: 197923 - DNA, 1389 bp, Cannabis indica
gcaacaatattacctctcttccttcggcatttttataatatggtattatttttgttttcagtaatttatttatattttgaccaactgatctaattctcaaaaagaagtatttttgaataaaattatgtaataatttatataagtatatgattgattataaccctccattaaaatatatatttggttttagttttttttattgtaagattgttttctaagtttgtttaatgattaagatttcggcattaagtttatgtattatttttcaaatctttcatgtttgttcctttaaacatttttgatattgtgaaaaatctgaaatgtctaatcttaagaaaaacaatgggagattgtatataagtatgatcaccatagcccaattcgattgcttttttggagcaactcagtatattactctgtttaagaaataatgggagattgtatttaagtatattactcagtatatggagttagtggtgatggttgagatttttagatctgggcattgtgatgctatgtgttagttttaaatttgggtgtagttggtggttttggattctcttcttaattttcttattttaatattttattagaatataaatctactacaacttaatattttaccattatttacactcgtaaaattagttcattaattccttcaaaaaaaaaaaaaactagttcattaattactattatttccatacttggttatataaatgggatgttttattactgcaaagtaatatctcaatttctattaatttctctcatttttttttctctttctctataggtttccaatttttgttttttatagattgaaagtatatatgtttttatgtatacacacacatctataatagaaggtaataaaagtaacggcaatcctaaaataatttttctcttttttactctcacgcaatagtattataaattttatgactattatccgtaaagcatactctattggtaatactctcattacaggaacagacatgctttgctgatatatagtcatctatttttttgttagtaacatgctccgtttttttttcttttttcttttgttaataaatttattatgcattgtaattttgttttgtgtagacgtaaaaaacaagaggcaaacaggatcatatatgtaaaaatattgtattagaataattttaattactaaatatttcaattatcgattcatggaaagtcttaactatataaatataaacctaaagtattacgggaattttgattttatatgcttaaataattaaaaaaatttattattataccaaaaatttaaaccataaaaaaactatatttttttttctaaaacccaaaatacccccctcacaattctctctctctttgcatcatctctctctctct

SEQ ID NO: 197924 - DNA, 702 bp, Cannabis indica
aaaaaaaaaaaaaagaaaagatgtaggtttagaaaagatacataaaaacccaccaaagtccttttgttttgatttgtgtttattttgtttttgttctttaacgctttgtgatctctctctctcacttactcacaccaaagcatcgagaatctttgcccctctacttccagtttcggctcttcctacgctttcttcgtacttttcttctttctccccttctccttagccttccccacctcgaactctctttccaaactacagatctctatctctttgtgtcgagcttcagatcagtcgaaagcaggtatctttactttggcttactttttctcttcattcctttatatttcattttatttgtcttctttgatctgtgttttctgatttgaatgttatattgctgattgatctgtcagtttgtttggattcatagtctactccttcactttttttttttgtttgctaattggggtcaagggtcttagtggggttgccgtatttcttttccgttttagggctttgatcagattccaaattcgttattataatcaaattttcgtatctgggtctgtttctgtttaactagtaattgctttttttttcttttcctagattgatttctactaagtttataggaggtggagtaatgtggttttgtgtatgtctgacactttattatgtatcttgtattttttttttttt

SEQ ID NO: 197925 - DNA, 1477 bp, Cannabis indica
ttttttttatctaaaaagggtcagcagctacaggaagcacattgtgtagaactttcaagcaaaaatacgtattttggtggtaaattcatgtaccaaaaaaacttccctaccaatcacggtttggatctaagatagaagaagtatttttgctcttccaatgttgtggctaaatgaaaatcatatttaacagtgtaggttccagaggatgagtgatgccatatgagtctatcgttagcagtaaaaaactctaagggatggtcaaaatcttttcaacatcaattggctggaaaaaaattatttaacaagccaatattccattccctctgttcagttataagattagagaccgacatgctagatggaccattttagctaactggtttgaagttagtatggctgggaatccaaggatcaatatcacaagctatgtgaagaccatttcctatcttaaatctcatacctttaaccagtaggtccctaccccaacaaatgggttgccatgtataggatggagagtgaccaatgttggcatccaagaatgatgtggttgaaaagtatctatgctttagtaggcggctcagcaatgaattcggtatataaaaaattcttcaataataatattacatgttggaagtactattagtttttgcaaaaaatagacaaaaagtagttaaaatcaatgagtgacatgataacaaagccagagaatttttagccaatatttcaaaacaagataatattttgttaattagtattggtcctgatctaatcaaaacaagataatattttgttaattagtacttataatccatggtttctaacaatactaaagtgatgtttgttttgcttgtgatgtaatgggaatagtaatagtaatataaacagtaatattaaccaaaatatccttaattttattattttaatatttaaaattaaataaaaaagggcaaaagaggtcttttaaccgtatgtaatcaccatcacattagttttatgatgcaatggggattacaatatatgaggcaatgactattacaaagctttaatggagcagttggtatgaggtttaaacttgatcggaatgagaatgtaaaatttaaattaaacttgaatgataaaaggtttgtgttttcaagtatgtctcacttttaaaattaaaatgatggtaatgttgatcccctcaaacgcatgggtttcatattccctccaagtctcctctttctaactttactctctccaaaggctatgaaagtatgaatgatcaaacaaaatgcaaatgttgcaaaggagcagtaccaaaaagaaatgctgacaatagaagcaagaaaatctaaatatgaaacaaaaaaatagtttggcaatttttcattcacgtaatatgaaacaagaaaatctcacttaagtgtcatagtaaactgcccaagtatacacaagtgtacatgtgacaatttttcattcacgtaatattaattattaa

SEQ ID NO: 197926 - DNA, 1707 bp, Cannabis indica
aagtaacttgcatgcaccgaccaatggatgcgagttggaaatttcagagattgacatagttattcccaagcttgcatgtcataaaaacaatccctacatgtgtgggattattaatttgtatgttaagagagtaaagaaaattcgcttagatttctcaatctctttattgtaattatggaaacatattagtttctatttatcaagatttttggaaaatagaatataaacaaagagcagaaaaaacaaataattggaagagaaagagtaaaaagagacaaacaattttttacgtggttggggtattagttagccttagtccactagtcagtattattcgaaagttctttagcttgaaaaagtctttgagaatacaaagaatatatgttctcaagttttccggagcaaagtttacaagagaattcaaccattggtccataagatttgatgagtatttatagtagtttgagaattacattcagttccccttccaaaaaacggtaaataatacacttgggccttcgcatgaagtccaacccacgaaggagacgatctgcttactaggcacatcaaatttggcttgatttggtcaacaccgtgtgctttgattatgggcaattcatttatgaattaatttcttaatgttcgttataggaagttttccatttaacctaatacgatattctattgtaatctggcaattgtagttttcttatttgtctgtaggaataaaaaggaaacaagatgagtcttttaagaatacgctacctcatccttctggtctcatggtaccgtatttgcttctagaaatggttcgctgaaggcgcgcgaaaggttttattattgtggagctaagatacgttcgtggaaggacttgtccaaatgggcttggcccactttacctttactgagggacccactgatgggtcttggatgctgacccagattccacgtgtccaccatcgatcactcaacttcctagatggctccaatactcaagtatctagaaataggtacactcccggaagatagagctgcttcgcgaaagatccaatatcaggcgcccatgtacgtgatcatggatggtaaattatacagaagaggattatcaataccgtacctaaggtgcatggcttgaacagagataagcgttgtcatgcatgaaatacatgaaagattttgtggagatcacacatctggacccaatctttcccaaaaaaattattcgtcgaggctatttctagcctaccatgaagaaggattgctttgaatatgttcgcatatgcaaacaatgccacaattactcgaaagttccaagagccccaccaacggagataacccttaggaacagtcctcggcccttcgatgtctagggaatataattagtgggatcacatccaactaaaaagggaggagtcaaattcactattgtcgttgttgactactacactaaatggatggaagctgaacccaagaacatagtgacttccaagaaggtcatggaattcataattaaaaatattgtgtgcaaatatggacttccagataaaatattgtctaataatggaaagtagttcaacaatgatcaattcattgacttttgtgctaagcatggaataatcaaaagctattctgctgtggttagacctcaagcaaacggacaagtggaagccattaataagattttgaagactaccttgaagaaaaagc

SEQ ID NO: 197927 - DNA, 995 bp, Cannabis indica
ctcttgtgttgatcacgcattataaatgtaattaaagggttattacacaatttgatttaaggaattaaaaactatgatgatatagttgttacaaaatagattaatactcatttatgggagagaaatgaggtggtgtgtttgaattctaagtgtgatcacctaaacactataaaaaaaaaagtctttggtgctcgtttgggatgagaagttttctatcaaaaaagcacattgctggaaaatcctaaggcttgataattcccaaagctatttccatgagagttcccttagtaattagatatagggaaaataagtttttggacaaatgtgtaatatatactttgttcaaatcatggtgatctctaataatctacactcaaggttatgagagagtgtatatatatatatattcttctcttgctatatatatatgtattatattacatgtattgtaattcttcttcttctacctttcatatatatatatatatatatacaatatatatggtgtatatatgtgtattgtaacataaatttaatcaatctcttattttagttcttgtattatatattttacaataaagttgtaatgtatcttgattttcttccattataatttctcttttatttttaacatcttgtactcaaccaaaacagtgtaattcaatttacgggaatatgattatatattaccctacacagtcaaataaagtttacatgtttttctacaatcatattctcattcataatattctctataattaaattattttgaacaccttgtatcaaacgccccttaagtgtaatataaataccacacattactcacacatgagcaatgtgagacaaacacacacttcattattttttttaaataaaatcacatcaaacataacatttgttcaattactgaaacgattttaacagtattttgaaataattaattcaccaaaatcaattgactacgcaaaatagacaataaagtttttttttttttt

SEQ ID NO: 197928 - DNA, 672 bp, Cannabis indica
atttgacacatcatctaacgaagttaagaggaaaacctttgttcacttttctgtcaataccaagaacattttgtctaatcaccttcttctaccgattttatatatttcataaagaaaaacagagtatggtatactacattctcatcaaagttccatttttacttattgttatctttctttttcgttatctttctttttcattttctttctaaagtttaaataaaataagagatatgttcttgaagaaattaaataagagaaaaaaattctccattttctcatgtatgtatatataccaactatttattgtttcatcttctttctcatttcttttcatttaatactgtttatcttttcttttccaatatatataaaaatggaccgaaaaatattatattcaactaccttgtttgtaatcattcatgacaactaattactaatcacatcatttctattctattatattaatctaaaatgactaattttttggggggttttacttgacttgcaattataaactctatttctcaaaaatttcagtccagtaattctctttgtactactcatatcaatgtattacattctttcattaacaaaaagtatataaatttatatatttctaaatctattcttggatgatattatcaacatattaatttttaaagaagatat

SEQ ID NO: 197929 - DNA, 1479 bp, Cannabis indica
aaattataatttcgtattgcaccatatcaatatgaatgtgaaagttaatttcaataattttgattctcacatatttatacatacatatgtatataggctctctccaatgcttggaaacaagcatgtgcatctcccacccaatctgaattacgaattccaaaaggcacattcaagttaaaacgagcgacattaaacggaccatgtaaggctccaattaagattaatctccaaggcacgttgcaagctccaagtgaccccgctggtttcaaagatggagatggatgggttacttttgaacgtattgacaaactaactttaatgggtggtggtagttttgatgggcaaggcaaaggagtgtggggcaagcattgctcccaaggacaatattgcagtaaacttcccattgtaagctcttacttaaatcgtttatgtataactagttttttaaaacaatcatgtcagtttgtttaactgtatttatttatgtgtatacatgaacagaatgtgagattcgactatgtcactaattcgataattcaagatgtaatatcacgtgatagcaaacaatttcatatcaatgtattgggtggccaaaacattacattttcacgtgttcgagtagatgctccagaagatagtgctaatactgatggaattcatattggacgttcaaatggagtaaacatcattgactcaattattcaaacaggggatgattgtgtttctttaggagatggtagtaaacaaataactgttagaaatgttacttgtggaccaggacatggttttagtattggaagtttgggaaaatataaagatgaaaaacctgtcgaaggagtacttttcaagggttgtacaatgaaaaatacaatgaatggtgttagaatcaaaacatggcccgattctactgatggtttggcatcaaacatgcattttgaggatattaacatggaaaatgttggcaatcccatcctcatagatcaagagtattgcccatggaacaattgcaacaaaaaggtgcgtttgttaaatacaatcttttcaaaaatttcttatctaagacacacataatcattactaagcaactaatcccattatttataatttccaggttccgtcaaaaattaagctcagtaatgttagcttcaagaatattcatggtactactacatcatcaattgcgataaacttaatttgtagcagtggatatccatgtcaaaatgtggcagttgagaacatcgatctaaaatataatggaccagaaggtcgtattacgtctcaatgcaaaaatgtgaagccaaagacaatcggcaaacaaaatcctcctccatgcattgcaatatgatttcattgttactacatatctttttttgactaaaaaattatgtatggctttattatgtaagtcttgggaattatataagtatatatgatactattaacaatgtgctcaataaatttcataatataatcatattt

SEQ ID NO: 197930 - DNA, 495 bp, Cannabis indica
ataatgagaccatatcgaatcaataacttgaccaaattggttcaaaaggaatacgatagttgataaatggagtgtgaccaatttttataccaaagtgacattttatttttcagatataagcaaattgacattttgaaagtaaaaaaaagaaaagcatggtttactatgttcaatgatgacacttttgaattttcatcatatagatcgatcgagtgaaatgcattttaagtaaacctttattgttttggacaaagggaacggcgccgaaactttccaaagccttggtctgctaactgacatctggaactgtaatctttttgccatttatttttttttttttttttttaactaagtagttttataacatttgaccttattttatgactacaaggattattttcaatcagtctcatggaggattacgaaattaaaaaaaaaaacttttgtactattataagaaacaccatcttcttttctggttctaagaagaaaaaa

SEQ ID NO: 197931 - DNA, 632 bp, Cannabis indica
gtaataatgttgtgcctaaaaataagaaacaaaaagtagtttagcaattaactacatgcctaattatttactactttattagatttgatcaatcttattaaattgaattttcaaaagtaatttaactaaaaacaaacataattatattttattatatatatataaaaaaaaaattaaagttttgggtggtggatatcactactgaaggatttgagtattggaagtaattgatggaagtatgtatagtggggttattgacagcttgtagagttgtagagtgagtgggtaatagtatgcttatactcacagactgtattccattattttcatttcactttatcaaaaagctgccctccttttgttttatttagtattattaatatttattttataactctaatctaatctaatacaattaataatgagattctcacacatacaaatatacaatcactcatttttctctattttaagttccatttccccattaattaattaaaacatgtcaaattattgcaaatgccatctcggccacactcaaaccatatgaataggttagaatacttagtcaagtgggacaacatacatataccaaagatctaaaagatcaattttcatttttatttttgtat

SEQ ID NO: 197932 - DNA, 1918 bp, Cannabis indica
gaactcacaaaatctcatgtcatgttggggattgtaagttaaattgttatttttagtgtcatcgtattgtgtgaaatttttaaatttattttaaatggttgacatgaacatgacctgcgacacaacaaatttataaagcacaaacacaatctgtataattttcgtattatgttaaacttgtaaaatctcactgaattgccactcatacattttattaaattttcattatttgcttttcataaaaaaatttcttcaaaattgatttgttttattttttttaaaaatgtttttaagcatccggaggtaaaatttgaaaaagataacaaaatcttgttggcttctttatttttttccaattcaaataaaataaaataataaaaagtaagtttttttttcttttctttttctttacaaaacactatattcaatccaatcttattaatatatatacttttgattgatacacaaataagtagatgtattgtacaatgaatactaactaactctcaacgaaattaaactcaacaaattataaagccgaagttttgttgatattttccaacgaaaaaacaacagcagataccgactcatccgacggttgagaatgcaacatgagaacgtagatgacccacaagtgtagacacacaaggtaaaccaacgaccacattttcgcggttggattcctcttcaagaacaccgctcccgccaagaatatagcatcgaactgttgtaccaatgaatacaaatgcttcttgcttgaacggattttgtcttcgattagaggcttcaactttgaatccgagagctcccattgtcccgattctaagtccctcgatgatgatgaactggagaaatctgccattgatttgttttcttcgagcatcttcgaaactgcctgaaggatacacaaacacgatcacagattataccgagtttcttctgaatttcggttcaagttattagctggctttgtatagaaaagagtaatatacctcaattctgaatagaatagtagccttttctgatgaaagagcctcaacctggttgaagcaaatataaatataagattttttgcaaattaatgagattcatcttcgattaaattttgattcagttgcaataactacttttatatcttttatgggattgaattgaaaacaagtatatgattaaagtgtgaaacctgtgcttgtttctgaattaaatggtcggtcatctggttaagcctgcgttttagctcaacctcgacttctgtcggttcctccaattctctcctagtcatgtcaatatttagctccagctgctttgcctgaaaaacacaatcgttttattaacaatgctgttgtcgataaagaatccaattccgaaaaatacagtataaaaggaataaccacattcggaaaagccaggtgtggaaccaaaaccatagccacaaacacaaactcatacatgagaggtttccgagaaaatgcaaggacataatagttatgaaaaaccattttcagcatagcaagcaaatagaaaaaaaaccaaaaatagaacaatgaatcacaatctgtaacaattagacatatgcacataagaaagtgaataacaaacaaacatgaaatccaaaccttattttgtaactttccaattttatcaatcacaaaagagtactctgcctccagtatctcaagttcaactccttttgaggctgcaagctgcaatttttaaatcgtcatgttaaggactacaaaaccatttcatacaaaaagtgatggaagattagccatcttttaacacaaccaagttatcaaaatatcttgacaagcaaaatccgacttactttcttcaaagatgtcccggtccaatgacttctagaaatctttctttggagttctacaaggagataatgaaattatatgttatagggcgt

SEQ ID NO: 197933 - DNA, 1815 bp, Cannabis indica
tatcccgagttgggcaattttttccctatcataaaaagaccatatgggagatcgggatcaattccatcatcaacaagctccaagaaactattgcatttatcaaaagggtgacccaacccttccacaatgaaagcaaaaaacgggaaggttctcataacggaactccaaccaatgctcatctctaaccttgagaagattcaccatttttcccctcataagaggttgggaaatatcgatccatgctctgactaggacaaacggccccacacttcgtgaagagattcttcataaacatcaatgtattctcccatccattcaccaaccttcatatcaagggcccgtgatttactcaaaaatggtaggcgatgtatctgcacccacaatagaaccttaccgagatcctctttagtaacactttgaagcataaccggagagtaacgcagtattagttgattgaagtaatgccacggttcaccagagagaatcctatgtttatcaccagcacaaccaatagttagtaaaaacaaatcagaatgcatttcagaaattaccacttcaaatcaacacttattgctccagaattcgcccatcttcttgatgaaagttttcgagttaattgaatttgagaggcagtgagcaaccagataaaattttggggcttgtttatcttccgaaatgtcatcagcagaaaaggagtggacttctcgttctttctccgaaaaaatcatatttgaagacatattttgtaagattgaatccatataatggggaaaagcaaagtaaaaatatatgaaacgaaggaatagagaataaagtatactgtgagggttatatatagcatccaacggaggatgggactgccgtaagtagaggagatcttggtacatggtggtaatggagggttgttgtggatttgaattgaagatcatggggtagccacaaagaggaagaaggggaaaacccagaaaatcaagtaactgcaaccttgagaacagaaccccactcgggcactacaattttttaaacaatttagagttataaaaggaaaaaaaaattagtaaataaatatgttaattttactctcttatatctacatatttatgtattaaagataaattttgtttcaattttatggcacgtttactatacagtattcagaatcgaaataaattaatagaaaaatgtaacgaaataaatgaaaaataatcgaaatcaatatttgtaatatgttgtttactaaatttttttggaaatggaatacttgtgatttatcttgtttactttattaggaaacgtaatcggaatgcttaaatttactaaattacccttttgagctaaattatattatatggtagttattttgtaagatatattttaaaggacaatattgtcattatatatttagtattaaaaaataaaattgtcattacccttgcattctttacaaaattagtggggaagttctctctttcttttttctcttatttaatcaagttctccctttcctaatattaataatgtaagtaaacaaatataagaaaatgattaccttaccattaattctcattacttattagtaaacatgccattagcgttttagagaacgcatttttttttaaatctaattaaaaatgttaattaatttatttacacctctaaatctaaattaatataaataataataatatttaattaatttttatttacaaattttagttaattcgaataagcccgaacatttatatttataattttattgtcaattttattgtcaattttattatctattatgattaatttttaggctaattagga

SEQ ID NO: 197934 - DNA, 596 bp, Cannabis indica
agaaaaggtatttgagatgttatagttttattatttaatttttagggcaatcttagttctatgtggctcttcataagaattatgtagttcattagtttggcaaagaccctttaattagtatgataaactatcttaatttaaaaagtttcaggcattatagattactaaatagttaatttaggagtgattttgttcaccacaaaaagaaaaagtcatttggacagaacttcaaatgctcttaatcttatcaacttagaaaaaaataaaaaaaataaatctgagtcgttttcgtgaattcaattcttaattatgtctttttggagtcgtgtcgtctcagtcttattcaattataaatataaatataattatcaaaaaaaaataattataaaatataaggagatatctctattgggtttctctcatcaaataattagtgttatttgtcgtagataatacaccactcaatatcatcacattgaccaatcaacatggtagttacatgtagtgttcaatgtaggacccacacccactgtactacaagctgacggcaccgcactggataccaactccttcctttcttataatgtcagacctgg

SEQ ID NO: 197935 - DNA, 719 bp, Cannabis indica
ttttttttttttttgaaagtagcttgttgtttttctttattcagtcctttaatatctacttactacagtatttgctttcgaagtgttaaatgcaaattctgtcagtgaaagagaagtgaagacaaaaacaggaagctgttaggaaactgagagtgatgagctggcacgttttgattggattataaaacaaaagaccaaaagagtcaacttaaacattgactgactccaaagcagtcctatgcatgtatgaatccactcaactaaacttttctgcttcttctctctctgttttgtttgttttgttactatagtcttttcatttttatgcttgcagcctaagtttaagctggtcttcttttttgagattattttaatcgattaccaaagtaagtctttcaaacattactttcttttttagaagctttatatatattataacacgtctctttcatagttcacctaataatctttcttttgtaatttatagtatgttttttgtgctgtgtccatattagtatgcttttcagttatttgtgtcaattaatgaaatgtgcccatttgatatataaaagtcccccttttcgtttggtttcttagagagaaggttttgttttgtgatatatgataatataattggatgttcttgacttatggttggttgtagatatcttctgggctcagaaagagagtatggttcacttataaggtgtgttcttttt

SEQ ID NO: 197936 - DNA, 670 bp, Cannabis indica
aaatattggtaactatagtatgaacacaagttaattattatatataagaaagaagactaacattggtttaataaataaagactagtattcccctaaatatgaactaaataaattatttaatataatatgcatagattagaaattcttaggtaggttcttacatattaattaaagattattttctgtattcacaaagaagttataataatacgattctttgttatatgatattataaattttagttataccacacattcttccaatttttaaatttttttaataatttacggtatcataaataaaattcaaaatactcaatttcacacataaaaaaaatagagtgtgcaacttataactatttaaactctattttaagcactgtaaaaatatttcaaaatttcattaaaactaacaaatatttattataattataatatacacaatcacatataaaataaaaaagtataattataacatgaaaccgaacagaagaaaattttgatgataagggcaaaagttaatttgtaattacatccttgtattataaaagtgtctatatcattatctattaattgttggtttgagaacattttttttattaatggccttttgatgataagggcaaaagtgtcttccccaaagtgtctgatcagggcattaatgtggcaa

SEQ ID NO: 197937 - DNA, 842 bp, Cannabis indica
taggatctatctgaaaagaatacaatataaaaattctacattaggtaagttatattgataattttcatctttaaaactatatattcttactaaagaaattaatacttactcactagtgctcaataagttttctcctcaagatattccatttaacgatcatcacatcaaaccagtctccaatattttgcatcaatacaaaataggaagctctccaagaattattgattaacaagtttccacaaacactacaaaattcaatgaagaatccacctccaattctcttgtaaaaccacgacaagtcaaaccattctccaccattgtcatcctgagctaaattagaagcggaaacatgcgaagactcaccatcgtcatcttcggagcatgaactagatagaggagatccacaaattaagtctaagattcttggtaaatgcagaagcattgaatgtttgtaattgagtaccggtaggaatttttcctgaaaatcgattatttgatagatccaaaagacttaaagcaaatacttcagccaagtttatgagaatttcaccatttattttgttgtgggacaaatcaagcacttcaagtttggccaattttccaatttttctaggaatttcttcaaacaaattatttattgatagatttaatagagccaactgagagagatgagtcacttcaatagaaatctctgtattcaatttgttacttaaaaggtcaataattcttagtaatcccaaaatcttcacatactcattttttactccttttcaatgcattattctcatacataagaattccttctcctttaagaagtcattaagaaatagttacatctgaat

SEQ ID NO: 197938 - DNA, 1217 bp, Cannabis indica
gaaaggctcaggctccttgtccgagtcatagccaggcagttttctgaattccccatcttggtacctttttaacttgtcctccaacttgttaattcgcaattggatagtattgtcttgcttttgattgaggtattgacgatggtcaggttttttctggtcggttgttgttgattatagctactcacgaacctctcctttagtagctttcagttttagatgtgcttgtactttctccatctgtactgcgacgggttctatcccctcctcccgtggatcgactacgagtccttgtacgtcaagagctaaaactggcctcgtcacgtattgaccttctcttttgagaacgagtcgatacatgccccctgctggggttagtatgtgccccttccccatcagtgcgagaaggacgttgacgatgtcttgggggcaacccacctgacctaggttgagtcccaagatttttctcgttgccacgagcgatttcctgttccctagtttgagttctgataaatcacaatttccattcccctgggttgtgcatcctcaaggtcttcgaggctcttcttgacgacgagcctggtcatttggttgctcatcatcaagggcatcctcagtctcccccgattgttctttctaaccgttttgagggtcctcctgagttatctcctgcctcctggttcgagtgccgcaaggtcagcctcgtggcctcactactacaaaaatttgttttagtgacccgtattgagtgactctaaaatcatttagtgacacttcgttgcgtgtcactaataaaggtgactagaaaagaaatatttagtgacccttcagggtgggtcactaaaccattttagcttccctcatcgcgcgtcactataggattttagagtcaaatcttgacatactataaaagtaacagctaatctcaaaatgtgtccttatatatttggttttttatttataaaaataattaatattatttttttttcaaattatatattataaatttataataataatttaattaatgatataattataaaattcaaccaataaaattaataatttgttaggtggatcaaactatttgtaaaaaaattataattaaaatagaagtaaaaaataataacagatacaaacttataatttatgctaaaaaatttatacagaaaaaatacataaatttacacataattcttacaaattattcaaatgcaaaa

SEQ ID NO: 197939 - DNA, 1121 bp, Cannabis indica
ctcgggcctctccatttttttcttggtgttcaggttcattgatctacagccggtttccacttgtcccaaacaaaatatattcgggatcttctcatcaaaatagggttgttggatgcaaaaccggtcaatactccaatggctcttgctcctttatctctctttgatggtgagcctctcaccgatgctacttcttatcgaagtcttgttctggcattgcagtattgtactcttacacggcctgatatatcgttcacagtcaacaaactgtgccagtttctccatgctcccactaccatccattaccaagctgcaaagcgagtccttcggtaccttcatggcacagctcatcttggtcttcttcttcaaccggacaattcacgagagctacattgtttcactgatgccgattgggcatcatgtcccgatgaccgccgcagcactagtgcttattgtatatactttggcttaaacctcatctcttggtcatcggcaaaacaaaaggttgtctctcggtcaagtactgaatcggaatatcgagctcttgccaatggagcctctgaagtttcctggcttcaatctctccttcgtgaactcggcttcccacttactgtcccgcctactttgcattgcgacaacatcagcaccctacatctcgcttccaatccagttctccatgctcgcactaagcatgttgaaattgactatcactttgttcgcgaacgagtcaaaaacagtcttctacaacttcgctacactccctccgatgaacaagttgctaattgtctcaccaaaccgctcgttgcctcttgttttcaagacctccgcaccaaactcacggtgcttcccaatcccgtgagtttgaggggggatgttaaactatgaaattatcccttcgtacttaattgtattactttcttgcttttattatatggtgacatgtgtccttcaatgggtctcttctattataaatacaatgatagtgtgtactcttttctttgaggaacagtaatacaattttcccattctttctgacaggcaagatcaaatctgcccaattatgatgccaaatctacccaattatgatgccaggaactacaatttcaatctttatatcattaaca

SEQ ID NO: 197940 - DNA, 855 bp, Cannabis indica
atgaaacaatgataataagcatatgccgagtgaaaccaggcacattttcagaagctcatctactatgtttcaaaaccttagaacataataataatgtctatgaaaataaaatgagagggatatatataagataagttttaattataattttttattgcaagaatatatattttttttcataagagtattcattatagttatagtattatttttataaatttttgaaaatttttaaatagtttacattgccgaaaatagagctcctaatattttaatttaccacgctcgttcaaaaaaacttcaacatatttttggcatggtaaactattcgaaattttttaaaaatttaccgtgataagattgtaagtacaacaaacactactataaaaaaaaattaaaaataatattgtgatatgtttttaaacacggaaattgattaaaaaattataaaaaaaggttgataataacataaatacaattgtcaatgacaaaagaaaataatgctcttgtagattaatatttgccaatagatagaccatcttattcccctctcgatgaataatgggacaataactaactttgacaaacaccatagaattttagatgtgaccaataataataatgtcttcactactatcacaccttccctcgatagcattaatagcatttttttttacactcattctcaaaggatataataggattatgttgtttagcacaccatttgagagcttccaagatagcaattaactccgccctaagagatttttgccaagatttatgttgtgccataattacctattaccgccccgaaacccaacagaccacaccgatgacaaaacccggcatcaatat

SEQ ID NO: 197941 - DNA, 708 bp, Cannabis indica
aaacccaatgtcaaaaataaagaaaaacatgacacaacatgttgaattttggtgcaagtgacccaataagagcacttgttgatgaaaaattgacaaataaaaaagtgtcaatttttgggcttaggcccaccaatgattaggcccaacaagtttctttgtttttttataagagaataggcccaaaaagatgatcgagaaagcaaagcaatcaatcaatgacaatcctgagctgtagaaagaaattgaatagaagaaaaaaaagagtggtagtgtatgcatgtgaggtatattagcaacaacaacaaacaataataataataataatgtgagaaaaataagagtaaggagtggacttggagatgagtaaccacagccatacaaatatatgagaagctatccataatctaatcccttcttcctttcatttcagtcacaccccttcttctctttctctcttttctcttctaaatattattcaatatatatatcaaaaacccaaccttacaaattttctgagctcaaaaaatacccatatcaacacaaccaaccatggcttcggctattctttctgtggccaaaccatctcttcaggtacatttacattatttatatttatatgataaatgatctaattataatcgtactaataataataataatgttacattaatttgttatgtatatatatatatatatgtatatatatgt

SEQ ID NO: 197942 - DNA, 1371 bp, Cannabis indica
caaaataggtaaatcccatcccattcggggtgagtacccgtgggtattcatccatatgtgttaaatttccaactctaattgcactacatgcctcccacaaaattaattatctaacaacttgcaatgaactaataagacatatatattaaaaagaaattatatatagaaataattgcagcataagtatttaaaattttgtgtttataatgggcgtaaattcaatacaaactccattttaaactattaaaaaaaattggaagtacttcatactacattatgtatccatccagaactaataatttaaaatttggatttacatgtgtcctgtttaagacaataattgatgcgtgtcatatgtcttatcaaatttactaattaatttaattccaatacttctaattatatcagtataaaaagaaagtatgggacgatcccatgaggactgtgattaatttattattcactatcacaaagaaattaaagaggagttttgagttacaattaaatatcataaaaagaaaataaataatgaataacaattatttaaaaacagtgaacaattatattctccactcaaataatcaatattccaaaattaaactattaaccccatagataatcacttattccagtctccctattacaattaattacgaaaaagcactcaataattaaacctttttactaagcaataaattcacgaaacatgcaatttatttaacctaagaaaaatattaaattatatgaagataggttaatctaagcaataactcaatttaggatataattcatttaacttaggttctattcttcatcactaataataatacgcgtcacaatatcattaaaagtaatttatcacttaaacctagaattctagactattaggtgaatagaaattctaagaatgatagtagaataatataaaatctagtttaacagatgttcaaacaagatcaaaatattaatcataaaattaagcatagaaaaatataaacaattcaatatgaagaaataaaacaataatattaatcaacatttaagaaatcatgtttctagttttgaaataacccttaacctaaaagaatgactactccataatcttaaacataagcacaagcataattataaataaaaagaaaaattaaaagattttaagaagaaaaactagacgtggatttagattctccttctctcttaagttctttccttcaaaagcgtaataaaaaactttatgaaaataaactctaaaaatcttatatatagaaccctaaaaataaacccaatttaaactcaaaaattaattttttcataaatcatgcagacccgagtgcctgggtggagtataagtggcacatgggcgctccttcc

SEQ ID NO: 197943 - DNA, 503 bp, Cannabis indica
ttactcgagattttcttagtaagattttgccgttgcaaaacatcttgtgtccggtgtgcgaaagtgaggctgaaactcacgagcacattttctacaactgcgtcttcactaagcaggtgcaaagagaagtgagctcttggcttggagttcacggttggcctagttcgaacactgaccttagctacaggtgtaatttcaagaagcaagacctccaaaaccgtctcttaaacatggtgacagcagctgtcttttatcagttgtgggctaatagaaatcagtgtagttttgacttgacttgtgctgctcccaaaaacattagcttggaagtgagaagtattgttcagcttagagttttgagtaaatacccctttaaaaggagtcaaagaaatttgtatttactaaatgtaattaaaagttggtagtcctttgcttttcttggtggctactggtttagtggctgccgtttggttgttgttggcttgtgctttgtttagttgtatctt

SEQ ID NO: 197944 - DNA, 1640 bp, Cannabis indica
tttgataatatatgatcccacataaataaatgtaaaaatattgagatagaatcatagaactcataattcttagcagagtaggactaaaatttcctattatatatttttcttcctttgctcccaaaaataccgagatttctcattaaattttagttttaacatttatatcttttatttcctttcttatatatatccctttcatatattctttactaaagtttacaaatctctctaccattactatggaacttcctttggacatatttctatatgaaatattatgtagagcatcactagaaacagtagcacgttgtagattggtttcgaaagaagtaaatgatgccacttatgaaagttatttcacacaactttttcataaaagaaccaacataacttcgggtattcatattctaagtcaaaagcgtagtaattactacactaactatatctccatacactcttcctcaaaattatcattgagaaattttcttccttctaatattcgaatcgaagcagccaccaaacaaggtcttctcctttgtattgatcgttcaagtcatatcattccgaaataccttgtttgtaagccaacaacccaacaatggcgaactattccgaaccccaagacccgatttttcactcaaaaaatcatgatgcttactataggatctaatcctcttcgatacaagattattagattctcttcacgtaattttggtggtgattctatcaaatataaatctaaaattcatcttgccttccgatgtgaagtttttgactctaaattttggggttggaagcttttagaacaaacaataagtttgcctagtgattatgaagagtctattgactataggtcaatgatttgtatatcaagatatatatatgcttttactaccaaaaagagattatttgtgtttgatatagagaatgaaaagtgggaatttgttactttggatcttggtgaagcatgcattaatgctaactacaatgataatatcagttatcaacttgtggagtatggaggaaaattgggacttctttgtgtgtttaaagatgatgactttatgtaccacttattgcaactttggactataacaaagaaaagtggaacaccatggagttggagcttgcaaaaaaaagattgctttgaaatttttgaggaaccctatgctactttagtcaaatttctcgacaatcatttggctatgacaatgggattttataaaatcatagttcatgattttatgatttccatctcaaagactaatggagataaatactatgttgaacaatcaattttttcaagttgaatctgattggcttcctgttagtttataattcaaatgtaagaagattttgtatttagttatcattatttttatttttatttactggtattagtttttgttgaaataattatttttttaattatgttttttcttgtaagattttcttcattatgtttattattaattaatatagtaaaattcgtaaattatttgcataaagaatggaagctatgtatgaaagtagtttttatgcaatttcatctatggagtttggcactggtatatgtcatggatattttttttctttcattctttcaaatgtatgaatgagttatatttttcatagtc

SEQ ID NO: 197945 - DNA, 541 bp, Cannabis indica
tttttcatgggagatggttttttttacgacaccatagactaggttgttgcataaattgtctctatgtcatctgttaataccgaaaaagcattaaatttagaagcattctccctagaatttgttcagtgttgccagtgaacttgcttttctttgtattaccctgtctattgccattgtttgacctctttccatttgaatttgagttgctaggataatgtaaattctgggcggaagtaccagcaacagtggtgttcaattgattcttcttttgctcgatggtatcaacacgtcgtactacttcttcgagcttaatgaatccatctgctcgatccaaaaactcagccattgatcccacatttaatcttttgatgtctttatataactctcaaaaaggttcaatgccccccccccccaatattgcttctaatctcccatccttcgtcatccctttaaccttttttgctttattcataaacctgctaatataggcccttagaggtttaactggcacttgctttacttctaccaggtcttctaggtg

SEQ ID NO: 197946 - DNA, 1157 bp, Cannabis indica
gtttcgatttatttgcagaggtggtggtaaagtaggaaagaaagctgttgaacaaaactatgcttctgttcttgctgagcttactttacaactgggaagttgtcatgtcctagcaagttctggccagctagaacctttaaagtaagcatttaaaaagtcttcggaaaactagacaataaaacttgaaaataactcgacgaaaagtttaagccaaaaaagagtcttcatatatcttgaaaagcacatccacatataatgaatttatcaataagttaagcgtatttgtaccactgctcattttgcagggctcttttgactgcatttcaggcattctgtgaatgtgttggtgaccttgaaatgggaaaggtagagaaacgcacagagcagaattactagtgtagtggagttttcatcatgttttgtagcttgaaggaaatgtggttttttatttatttatttatcttatgttgtttgtagattttggctagagaaggagagcaaaatgaaaatgagaagtggatcaatcttcttggagaaatagcaggctgcatctctataaagagaccaaaagaggtattctggtgcatgtgttacactcttttgctcattattttttttcaatctgtgtttgctctttgggaaatgaatacaagtaggacttttattgaaattcatatagtagagatgagtatgttcaggtatataattctgaatgtttttcataagggtgcccacggatgttcaataaaaatattaaatcagtcaatacaacgtgaaagtgacaagaaagatgctgtattgtttgtgtgcagtatttgcaacaaaggatacttgctatccttgctctagattatatattagataatttatgaatggttggtgactgaaagatggtacagcaagccgaacacaattcacattaatgattttttttttttaatttttaatttattttttgtgaactcaagttcacatcatgccttgaatttggccagttctttctaggttttaaaatctctttcccttcttgaatgataacaagtctttgaatggtggataagatgcgaatagatccatatgataaatgaattaaaatatttaaaaaaataatgcataagtattgcttaagtctgtgcttttttcgttcttgttttgtc

SEQ ID NO: 197947 - DNA, 697 bp, Cannabis indica
ttgagatctttcggccaatgtgtattaatttccagaatttgcagtgtattagagttagccgtcaattaattttgagatgaaacctcattcactttatcctaaattataacaagtattacttgcgggaccgtccatgtgttattatgaaactatcattttcaatggttaaaaacttaaagtcttgtattaaatgcaaaaccagctgggtataataattctattatcatggcagatttctcactctctctctctctctctgaagtctgaatctatatatctctctctgtatttatagatacgaaggaaatgatcaagacaaaagaataaaattaaaactaaaaagcccaaagatggatggagacattttaaactctaattatctataggccatgatgagatttctgttattttatgtctggaagacagtcaacacagctctttcacaaaatttctcagaccaacaacatgttttcacatatatgcatttgctgctttcagccaaaaatggcattttatttgaattatatattctgtgtttattttgtttttttgttcactctagctacagactacagtcagataccttttttattattattttttaatttaggtcaaagtcagcaagtgcaagtaatacttttagcaagatatacatgtaatgatgaatataaatatatatatatatatacctatagta

SEQ ID NO: 197948 - DNA, 1565 bp, Cannabis indica
attacattttataatttgagttctctgatcatactctcactgcaggtaacttcagcttcacagaaagaattacagtaaaatatgctggtgctgcagctatgtacttcgtatcgaagaaactgaagaagaaatataacattaccgatgaacgtgctgccctttatgatgctgctgaaacatgggtgaatgcactgaatgggagagattttcttggtatgttgctcaaaatgtttaagcttgtgttatttttctaccactaacacatttttttacaacacaatatgtaatatagtgtttgcatcactcgttatctattgcctaatttgcattcatgacatccttcatttaatatatattgatgggttaaaattaatggatgttgtactcatgaactcatatatatatatatatatagcatgcacaacattatttaatatatatcattcatggcagccattcaatggaagatttacacacttgaaatatacatgaaaattgtaaatattgctgacttgtagtaaatgtttatacaactacttagccaatgacacaagaaggggtagctcaaatggttaggcatatggtatctacatagcaattgctatagtttcatggtccccgaaatattgtaggttaggctgttcatggtccttggtgagtcttaaccttctgccattggttaatatgtagtgatcatgttggtagttaggtcttatatttgttaatattgccaagggacaccaatattgcagcctttttccttttttttatttaagtaaattatgtgagacccgatattaaatgatattgtatgttacattcttggatgatcgatttcattgttatttagctgtgtatatgcacaatttcattgtgtttattctgtatcaggtggctcaaagcctaatatggcagaccttgcggtatttggggtgttgagaccgatccgttatttgaggtccgggaaagatatggtagagcacacacgtattggagaatggtatacaagaatggaggcatctgtgggagagtcttcaaggataaaagaatgaactgtattcatgtaaagttcatgaaagccgggtctcgactctcagcttcgcttttgagtttgcagggtttgtgtcacttaactatatttatagaagaaagaacacaattttggagcaacattctcttttgatgattaatcatattgaaaattatcaaaattttgctatcttagaaagtgataccattattatcacagcagttaaattaaatttgtatgcaacataggaataaagaaaattaagatgtgggttttgtgatttagaataccccattgattcaaactaaatactatttgataattattccttgttatgagttacatgcaattatttgatgaaaattcattaagaagtggaatattttgaggtgttatgtttcaatgttcttatttggaaaatatatacaaagggtttatatcattttggatttgtaatagtttacaaatgagattgttccttttgttttgtaaaaaaaaaagtaaatattacgagatcttgttttaaaatttttgg

SEQ ID NO: 197949 - DNA, 1080 bp, Cannabis indica
taaggggaggctcacaagtctcattgagacggacaacattcttttgagagtaaggaatcttatatattagattaggaaaaataagcttatgagtgaatttttaccttgatgataagatacaatttgctccaggatgaatgaagccaaattaatggaagcacccatggtgatttgataaagaaaaaatgccaattcgtgagagactatggtcttgttggaagaggaaaacaaatttctaaaagaaaatctcatgagagaggcatgaccataggtgaggtgagtgatgtgtacactatgatcagaaggccattcaacttgttcaccagaaggccattctgaagctttacattaattgaggttactttttatgcctaagtgtaattttagggaatgcttcgcgcgttcttctgtgatgttgagggagaatatatctatgcgaggtactgtcatcatgtgcgaaatgaatcacctttggtgtatatcccttagtctttcaacatactcataagtatgtgagtcaatgagctgctaactcttaaagaactcattatctaccctttccaacttactgtcattctattgtatactctatgtatctcgatatggactttctatgttggttattcaccttgctggtcttataaaatggtagttgttatttgcgacttgtccttatctttgaaagaatgagttcgaatatttctaccaattgcattctccgaggtgagtttattgaacatatttattttatcataattcgagctgattgattttctagcttcttcatacgtgtcgtaaccatattacttgcttgaaatacaggcataacaatcaacccctagaaagtgctttttaagattaaaaaggaattcttacttaaatagagggtttgatcatattttccattttaatagaaaatgcatgctttatttttgtggttcagtattttgagaaaaaatatcattctggcatttattattctgacccttcttttcccaatagttctcatctattcgatcgatcatcattatgattgaacgattaccattatctggatataggatcaacaacctccttgtc

SEQ ID NO: 197950 - DNA, 1656 bp, Cannabis indica
caagggtggcgtctcattcataatccccactcctgttggcccgggtcttgaaaaatagctatttcccacttcatctttcatggaagctaggtgtccaccgggggcttcttgggtttggaaggaattatttgggaccgtaagattctcagcgaaggggcaaggtggtgtgttgggaatggaaggaaaattagagtttgggaagacaaatagttacctcagccttctggagcgattctcactcacaagcctagaatgaaactgaacactaagcttcatacattcataacagaggaggggacttggaaaatggaggaagttgaccaacattttcataaggaggacatcccatggatccgaggtattccgatagacttatataccgaggacatattgacttggccttacacctctaatgggaattacatggttaaaagtgggtatagagttgggagggaaatgaatcttcatcccacgagatgctcaaatatgggagaaatcaataaatggtggaaaatgctttggatttgcagctgcctccgaggatgaaactatttaggtggcgggtctgccacaattggctgccaacaaaaacaaacctgtgtcatcgaggtatgaatatcagccctgtttgtgatctttgtggaagtcatgccgaaacccttcctcatgcattgtggaattgtgataaagtaaaaacggtgtggaaacttcttccttggtacaaacactgtgggaagttgggagatgggtcaatgtttgatcttttgacagctttaaaggagaagctcacaaggagtgagtttgaagactctcttaagatcatgtgggctatatgggagaatcgcaataggaaatggaataagctccctgttatgaatggggctcaggtgttagatttggtgttcatagcttatccgaattcaaatagcaacccaagtgatgatgtaaagaatagggtggcttccccatctaacccgacgcattggcaggctcctcattggggaagaatttgcgcaaactgtgatgctgcgatgaatcctaatcaaattggagtgggtataggctttttatggcctgactggaacgggaaagtgcttactgctgggattgtttacatccccagtagctgtttggtgcttgtggctgaggcttgggccattctggaagctataaagggacgaccgagtacagataccagacccttcgagatccagtcggattgtaaagctgtggtggaagcgatcaagaaccaggacaaccaactgagtgttgctggaacacttcttcatcaaataaagtctcggttggaggattctaatgaagctaatatcagttttgtaaatagaaatcataacgaatgtgctaatatgttagctaggaaatgcctagctactaaaacctcacaattttttgctcattctatccctgaatggttggccaagctttgtaaggctgactgttctaatattgtgtagttctggttcttcttaataaaattcatactttaaaaaaaaaaaaaaaacagttaccctataatttttcataaaccaagaattctgttatatagccatattttatatagaatagatatgagtgactaggtatccaaactatgatagtagtctcactacataaaatttttttcttctaatttat

SEQ ID NO: 197951 - DNA, 515 bp, Cannabis indica
ttatgtacgtgcatgttttattgactattatatttttacattggaagactcttaactctaataattagacataacaaattagtttcgatacaatagtaacattctcagtgaaaaaagtctaagataaattttttcttgttaaaataataattatgttttattattttatctaaaaaatcacaaccgttgtatagtaggctgatccacttttctatattaatttttttagctagttttggtctatttagttattcatatcggatgtcttttaaaggtagtttaaaattgttttgtctaaatcttagagataatttagtcttatataagtcgcattatttgtaataattcatattctcactcggtatatctttagctagatacttagcttgttaactgaaaattctttttcgggatgattgtcatagtgtgatttcagttaaattttttttttttttttttatttttttttttttttactttttacaaacgttttaagttttgtaggacgactaaac

SEQ ID NO: 197952 - DNA, 1884 bp, Cannabis indica
ttaacattagcaattgagaagctgaactaacatgattcctattcctaattgcttatccataaataatcactcttagttattattttctagttagcttttatttttaacgcaatcgtaaaattgtcaattttccaaatagaatcatagatttaatctagtggtatttagttcgattccctgtggttcgacctcacctgtgtgagttattacttgattacgtgcacttgcgtactgtttacaattttcgtaacgacgggtcttgtccaactatcgtttacgactccagaggacttagatatcggtcctttgaccgactcgggttaaaattttatgggcaatgttatatttgttatttcaatttgtattggtattaaacattgtacactcaacgaggggatatcaaaatatcagaatcgactgtgttggtatattatttattggtaattcatcagacagggtaggaaaattagagaaacgacgatatgagttaaatttgttgatattcccaagtggaatataagatatgagtagttaatgggggtatccatctaattgatttggagaacataatcttttgatataaacttatctagtgttagtataagtgggacattttatgagtattgtctcaaatcctaggtgaattaaagggaacaattgtgtgggtagatctattcactaccagaagggatgagtcaagctgtgccaattagagccccgtgatctgcaaaggaaagaccaagagctttacaatccacatcacctagagaaaggttgtatgtagtgattttgagattatgttggcatgggactacgtagtgtagaggacttgaatgaattgtttggagtacctatattagcaagaagtatcctattttggtagcccatcatgaaggagctccacagtaaagtgtcgttgacttagggtgattacatttagaaagtttgcccatgaagcatgcgagttagaacaaagcatgttagaaacacttgaatcggtctgtagggccagtcgtcatacaggaagtagctaaagtgatccactcttgtataagagccattattttgtgggtgtcagtggcccaatggaggcttgaagcatggacgtaactagggtaatgtataaaagaatgtcagggagagtaggggtatcactaaggtaaggaatattgcctggattatatattgtgatacagtaatgatggaaaatacttttatatttgaccggattgtctatctggtatataaggagactatagaaattttgggaaaggattaccttattaagtaatgatggaaaggcataatgacctagattgggggaaaggcttgtaaattgagatgcaatctaatggacatgtattcgagtgattggtgaatgttggatcacaaagtaggttgtttactaaacaatggactatataattgagggtaaaatgaattttagtgtgattaatcaagtatgaaaatagtgatgattacaaggaagcaataataacgtacaaatcatggagtgaaaccttagtgataacaataggaaaggagtataagagtcttagatgttgatgaaacagtaccattaatgagagactcactacaagttgtaatagtaattaataccaagagattgtcaataaaatagagaatatacttgagatatgtatatttctgggtgtgttaaaaagaaaattttaggatttctacctaatacagattcagagctttgagatcaatgaatgatctttgatcagttgtaattagctaagaactcaggaaatgaatgcatgcaaaactgagtggagatggataagattcgacttgacagtaagatgaaaattccttaagcattagtgaaaaaattgacgatgattgtaggttgataat

SEQ ID NO: 197953 - DNA, 1002 bp, Cannabis indica
ttttttttaaaaaaaagactagctagtcctacatattccatcattcgaactcatgctttatttccttctacatttttcatctggaagatgtgatactacaacaaccaaaaatccaagtgacgattctttttttttcttcggtgctattaaagtattttttacatggtaatgagatgccttgtagaaaaaaaatgttagattttaatcttaacgtttatgagttgatggattaatagttgtttgatagaaaaaacaatattaaatttttattttgagcttacattaacgtttcaattatttcattaaaatattagttaatgaataattttttgccgtatagttaatggacatagtatttgtatgaagtagggcggttcatcgagtgggttttacgggttttgagttttttgggttttggatgtggaagaagtgtgtactgaacacgcctattcaagattgtgggttttcaggtgggttgggatggtctgggtgggttaggatcgaatttcaagttgggttgggccaacaaatattatatatattttttttaccatggttggctggctgttgaagctcttgtgggtgttggaggcgctggagtggtgacgccaaagagacactacaaaaaaatcttacttatagttacaacaaaatttgtgactgaaagttaaaaaaaattgtgactaattataaattattatttttatgttgtgattaaaaagttcgtggctaaaagcgttagtcacaaaaattacaatttgttgtgactgaatgtatttttagtcacaaaacttattgtgactaaaattaagttagtgacaacttataactaaatactatgttttagtcacaagtaacattttattgtggctaaaagtcacatttagtcacaaaaaaattatattggaattaaaaaataatcactaaaagtatcaattttttgtagtgagagggcggaactcaccctggaccttggagaggaatagaaaaaaaaattgagaa

SEQ ID NO: 197954 - DNA, 998 bp, Cannabis indica
caatacaaaatacataaacataggaaaagagacgaacacactcttatctacaaaataaagtcactctttcttacaagatatgaataaaatacaaagctgtgaaagatcgagataccaaacctagctactataaggtgtatttataattaatatacaccttattaacaactcatacaatgtctgaataagaccacaatttactatacatttctctaaaatagatcttcaatcagtctaaaaatttttgcttttatacctacaaaatcgtgagctgagtcttaattcgtttttcttaacaagaaatctgatcaaactaattagaaaactcatataggattagaataatacatctaaaaagataaaaattgatttattcataaaacttaccctttgtgacaaacatttcaagtatagaaaagaaaagataatcatttttcatatcttatataaattaatcaatcaaatactaatatatgaaaataaaaaatacaatttagctgaaattaaaaattaattttataaaatattcttgtcaatttaaagatgttaaatttagaattaacaaaaattatagaaaaaataaattgaaaacctactgtgataccatgtgagaaatgatcaagagagctggagaaagaacataatatttctatcttgattaactgcaaagaaaatgttcttatacttaattaattacagacttaaaatatcttgttaaaacaaaaggataataagttaattaattacagattatacataaatagttatacttatacacaaagataacttaatccaactaagttataacaaaagttgttaaaaataactatacatataattacagacttaaaatatcttgttatatatacttactctagtttagactaaatataaatgattattgctagagcatgtctttttgggttaatgatttaatttaatctctatttaattgaggaggtcatttcgaacttgaataactttgtaaacaaaaatat

SEQ ID NO: 197955 - DNA, 1283 bp, Cannabis indica
ccaaacattttcaacaaactttactttatatgcttgaataagagataagtaaaagattttagttttaaacttacttttattttcatcttcaactacaatcttcatgtcaattttatctctaagcctcaaaattttcttgaaataccaactagcaccatgtttgaaagccatcgaccaaaagtcttatccctttaagtaaatgcattgatccaccaaacccagagattatcatgcttgcttgcaattgcacaaataaacttagccatcaaagcaacattccattttctaccctcccgaaaacctattccaccaaacttcatgaggagacaactttctcccaagacgggatgtgaaatttgctctggttgcctttggatccccaaagaaaatccctacaatatttttcaataactatagtaattttttgggggagaatgaacaaggtcatccaaaagtttcttatacccaagagcaccgagtgaatcaattgcgctctgcctgcaaaagacaaatttttgctagccagttattaagatttccgttaactttgtcaagaatgactctgcagtctgaagctcaccatttggtgggtctcagttgaacctccaaatacttaagagggaattttccttcttccgtttgtaacatatgaagaatattgcttttacaatcatcattgacacccccaaaataaactagagatttgattttattggccgctaaacctgttaaaacactaaaggttttgaatccttcatggatgatctaacagagtttaaattgcccttgcaaaatataataagatcgtctgcaaaataaagattagccagcttaagagacttacggagggggtggtagccgaatcccttctccttggttttttatctcaaaagtctcgtcaagtattccatgatcaacacaaataaaaagggggacatcagatcaccttggcgaaggcctttttcacctttaaatgaaccttgaagctggccattcaataaaaggacataagaggtaccatgaagacagcttaggatccaattgataaaattggaagggaagcacagaccctttaacaaatcagcaacaaatttccagtccacagtatcatatgcatctagcatatctgtttttctctttataatctttaagtaagtcttggaagatcaagatattatgtgtcaactgtctattaattcttgacaaaggcgccctggttgttactgatcacactaggaagaatttctaaaaatctagcataaatcattttggagatgcattta

SEQ ID NO: 197956 - DNA, 1097 bp, Cannabis indica
cacaaatttccaccatgctttgatttgggaagtattagagcattcagctaagtcaggattatgaaaccgaagtttataaccgctagcaaccgagtaaattccattgtgattccaactccaagtaagccaatctggtttattcatgttcggagtaatgcctagaacccaaggaatgtcctctttgtggaaccaacttattacttcattacttttccattgaccatttggctgcagtagcgaactaatggtaacatccggaggaatttggaccttgtttcggagggtataaggatagattctcggaatccagctgtcttcatttattcgtatcgtacgaccatctcctacacaccaatggagacctcttgttagaagatccctgccccggccatagcatgccactccaaacagatgacccaaaatggcccaacttagcttcaagaaagcttgaatttgggaaatagagagctttgagaactctagccatcaaacaatcgggtgtgttgatgattttccagccttgtttagccaaaagagattgattgaagtcttctagatttcggaatcccattcctccttgctctttcagcttgcaaagctttttccaattaccccaatgtaacttatgtttatttttagtagatccccaccaaaattgggcaatcaaactttcaatatcatggagaatccctttagtaattctaaaacaactcataacatagcaaggtaaggcttggattaccgctttaattaagatttctttcccggcttgagaaaaaaggcccattttccaaccttgaagcttggactcgactttctctctaatcttaccaaagacttgcttttgttttttcccacaaaagttggcatacccaagtatttggtatgatgtttgaccaagcgaaccccaagtttgaagctaaggtgtttgcccatgagtcatttattttacttcccacacacatttccgttttttcaaagttgatacattgaccggacattgtctcataggtttgaagcacctcttttagagtagtgctttcttccaagtttgcttcaggaagcaaagactatcatctgcaaaaaaggaggtgggc

SEQ ID NO: 197957 - DNA, 1449 bp, Cannabis indica
agagagagagagagagagtggattggtttcgtttgttggtttggttttggtgtgataataaaaggaagaagcttctccaacatataggacaacccagcaccttctttaaattgttttcctctaaatagacacatttacaaaattatcccaccctaaatatttgaaaattctacgattcaatatagttttagctatttagaattttttaagttcatataacttgtatttatttaaaatattatgtaaaatttagaaaaatttaacaccactaaaaataaaattcaaattgtttgtatacacatactttttattttatatacgtgtaaaatatatattactttaattgtaaattattctgaattttacaaaaatttacaaaatattttacataattagagaaattttaatatttttacataataaaatcctcaatattaaaatttatacattctacttatttgtacaaaatagtgccattattttcctaaactacccaaaataccctttttatttaatgcactaccgagagaacccatattctaactgtcgtcatcgtcgtcgctgtcgccattaccaagctcagtgaaaaagtaagtttttttaaaataaaaaattatatttttcatagatttgcatgcgaatttgtgtatgttcttcagattagttgaatttttgtagatgttggatatgtttcaatagtatttgtgtgtttttacagtgttattgatgaaatattgataggttatcgatagaatatcaaccaaaaatcgaaatggggtagttgattgtgtgagtgaattggttacagttttatcgatgaaatatcgatagtttgtcgatagtatatcgaccaaaaatgaaaatgggtagttgattgtttgagcataactatttttttttattttttactgtatatcaataggttatcgacaacttatctatggtttatcgacattttttattaggatatattttttaaaatttattgaatatatcgatatgttgtcgtgaaatgtcaacttgttgtcgatagtagttctttgtttgagcataactgaatttttcaatttttttaactatatatcgataggatgtcgacatgatatcatggtttgtcgacaatttttgttaagatatactctgttagactatgttatgtatgtcgatagaatattgaccgtttgtcgacatgttatcgacaattttatgcattattatgttaacaatttgttgacaggttgtcgacattttgtcgataattttattgtattcattttttttattgtgataatatcgccagaatgtcaacaggatgtcgacttttttcgacaactttttgtggggcatctttgatggtgtgcataacgtatgtttttgttatatatttttctaaatgactccacgactcatagtttcaacatttgagtattttactggtcgtgtgacata

SEQ ID NO: 197958 - DNA, 851 bp, Cannabis indica
gttcaataactagttatctttctaattgtataattaaatgtcccaattctatttttccaaaaagaaaagaatatgtacacctttctaaaattttatcagtttacttctctttatccatttgtaaataccttccgccggacaaaacatagctctaatgctcaaccaattcagtatgaagcttacacactgagcactaaaatgaatgacctcagaaaaagagatgattgtgagactcatctgtactcatgccacagatacaacaacacatattcaagtctaacccaaacttgattagtctatatacacaaccggttgcagatgccagcaaaagcaaactgatcctgctgagaagaaaaaaataccttatgagtgtttgccatggagaatgaatccttttcaaaaagatgccttacaatttttgttttgattacatattttgcctttaccacttgcctctagtaccagctactatcaggagtagctgagtactcccaccagtcttcaccttttaagtaaataattattgatttttatgttccataatagagttagaaaagcggaaacagattttattacaaaattaatttaaactacatgaaaattaaacaaaattcttgtagcttatcaggggatcctcgattcttctcgttaacaaatatcaattatccaatccattgctatgaacaataatgaagacttcacaccatagtcttttagaccaacatcaacactcaaaataagagtgggcttataaaaaagaatttctatcacagtatctacttaactcatgagaaactatgattatgagataagaaagagaatctcactaaactagagagagagagagagag

SEQ ID NO: 197959 - DNA, 770 bp, Cannabis indica
tataatcataatataattaaaatcataatcataataataatcatatatatatagtttctcataataaggaattagtatatttagaaaaagtaaagggacatgaatgtaatgttttctttacaatttacgtacgtatataatctacaatattagttagtgttgttgaaatatatatatatattatttatatatatatattagataactttattattaatcatattattgataccgacttttatgataataatttgtactaatgactaaagcccgaaggggttgagactttccaatggctaatgattgacaccactttttcttttggtaaatttcccttttaacttttctacttgaataattgaggatcaatcttgacaagggagaaaggagaacacagttaataatataaatattaatattaataataatcaccaaacgtatatccatcttaatttcacatgtttatttattttttatatagctagtatagtttctcaatcacttatatatgtgtatatatatatatatatatacttatatatatattagattctatcggacactataaaaaaatcaatagtgataattcatttagtttacgatatatatttttttataattaaatgtgatttttagtggtaataaaaaattaaattacgtgtgactaattaaaatatagtatttaagtacaaattctcactaatttaattttagttacaacaagtgttatgattaaaaacacatttggtcataataaattgtgatttttg

SEQ ID NO: 197960 - DNA, 1122 bp, Cannabis indica
tgagcttgcctgattaggcaatggtatgaatggatgccaggctatgacatagtcttcatagtctttcatgattattcaatgcagtatataaatggcaggctatagcatgagcttgcttgattaggggatgcggtatatgaatgctaggctatggcatgagcttgcctgattaggcaatgcaatttatggatgctaggctagggcataggcttgcttgattaggcaatgtggcatatggatgctaggctatggcataggctcacctaataaggtgatgcgatatatgaatgtcaggctatgacatgagcttgcctgagtaggaaatgtgatatgtgaatacatgtatttgggttgttcctaggtgaccatgataaagtcatgactctaaactgaaattgttgttaggtttttccttgtcgacaatcctgtataggtagcgacagtgacatatgggttccaagatatggcacgggctcgtctggttaggtgatgcgatacattagtgccaacttatggtacgggcttacctaattaggtgatatgatacattggtgtcaggttgtggcacgggctcacctgattaggtgatacggtgatattatgtatagtgccaaattatgacacgagctcaccttattaggtgatgcaatacattagtgctaggatgtagcacgggctcacctgattaggtgatgcagtgatattatgtatggtgttagattatggcacgagctcacctgatttcgtgatgcggtcatatgatgtatggtgtcaggttatgacacgggcttgcctgattaggcaatgcaatatttgataacttcttatttccatgtatacgattgattatattacttactctttagaatattattgtttgattattttataatagtaagatggataattaattattacatgtattttttttattacttttcttgctgagtccctgtgaatcacgagtgctccatggtgcaggtaagggtaaagaaaagttagagcaaccatgaggtgatagtcttctccaacaatatacatatcgaccctaccggcctgtgtgccgagttgctaggagttattttagattgtatgtgccgtgtattttgatttcgtattttg

SEQ ID NO: 197961 - DNA, 1004 bp, Cannabis indica
tgtataattttattttgccttttatctacgattgcaggggttgtttttggtgcacttacataccttataatagttgagtattcaagctacgagattgaatgaactttttacaacaattaattgaatataagtgttttgtaatgttataatcttttttatctcgttttattttaattaattattttgtctgatatggaaattagactgccaattaaccaatttgttttttttttattctaatagcaattcttaaaagcaaatgtatgattcagattatttaaacttgtttgatgcttagttcactaatattgtttgataattaattttgctgaattgtgttgttaattagttataactcaaatactccatattgcatatatggttgttgtactaggaaatatattctttattttttttagaaaagatgcttggaatactctaacaactgcctaaagcaagttaaagtgaaaattaattaagtaaaacacgtgcacaaatgaaaccccaacaaacacaactagacaaagacaaatctaaattgagtgtgttgttgtatactctaaatattggatcatgttgcatgttgtgccacatgccatgcaataataattaatacactctagccaccttttactctttcccaaaataaggtagtttgagaaatgatgaaggaaccaacatatatataataatgagaagaaaaatattaaaaagattctactagaatttaacattttctaccatgttatattaatgttagtttaatttaatatcgagtttttataatttaacataataaattttaaaaaatattattaattaattttaaaacactacttataaaaaaatattgagcagaaatgctaagtaggatgtcaaatatgactagatgcattataacaatattctaatgatataaagcattgttataagatatttgctaatgattattgatatgctataaaaaatattgtattaagctataaaagatttgatatttaatt

SEQ ID NO: 197962 - DNA, 578 bp, Cannabis indica
cttacttctgatgctcttcaaatagatggcatagagaaagagtacgttttgacagttaagcagcaattcatgaacataactttcactcctacttcttctcaagcaggagcttttgctttcatcaacggtatcgaaatagtttccatgccctctaatctatattattcatatggtcttggccttgctattgtgggacaggaaggtcgtttcttcgacctctcgaatgaaactgctatggagactatgtatcgagtaaatgttggtgggagcgctatctctcctgttggtgacaccggcttgtttcgtcaatgggacaaagaagagagcttcctgttcgataaggggttgagcgttttaccagttaattataatacgagccacaagcttaaatacaaagacgataatatttcatcttttgcagcacccgaagaagtctataacactggtcggtctacaggaaacaatcagaataaaacactactcaggagccacaatcttacatggaaattctctgtggattccaaatttagatacatgttgagattgcacttttgtgagataaccaaagagtttactga

SEQ ID NO: 197963 - DNA, 1009 bp, Cannabis indica
tgtgttgtttttctattcgaatactttctatttttggtattttctaatcttctctgacaacatgggaatttacttgccaaatatattggacattttatcagtgcaaatttgcaccaacaaaattatatgaactttagaaatttatttgcaccaaatgacagtttcttttatcacttttgccggcgcaattaatgaaccgcaccggtaaaaggggaccttcggtggcacatattttttccgacaaaattttagctgaattatttagagcttcttatctcatcttttgcaggcaacttttgccggcatatatggcgaaatgcggaggcaaaagttacaattcttgtgatgatataattcaataattgtagtagtagtttctggtttatgttcaccagactctaattgcttgacttgttttgtagatatgggataaattttagcttcacaaaaaaatattttttgaggctttgacaaggaagatctcgaattgcacagagaagaatgctgagaaaaaaaatatatgggtatatagtcttgctcaggacaatcatttgggcgatcccgaggttgatgagtccattgaaggagatgacctggccctagggttgaattatcttttaaggggatcatgttaaagataaaatttgggctagactttaagtatcatgagaggtgtgttaggcttaggataaatcacttatcccatttaataattattgtatttaaaatattacaaaattttattataaggtttcagtattacattagttgatgatttgtgcacccgcccacatgcactagattgctccatatcacatttttgtggtaagtctacgctgtttcaaaatctgtgtggtcccgtcagttttttgttatgagatttcacttatttttgtggcgcactaaaacatatttctattagtatttagcttcttgttttcactatgtaaagtacgtaagaactcagaaagcctagaaaagtttatgcttcctacctttttcttactca

SEQ ID NO: 197964 - DNA, 1001 bp, Cannabis indica
atgctaaaattcgtgttatgcttgattttgtgtcgtactttatttttatagttaatgatataattactaaagttatgtgttcttttataactttaatatttttatataattttgtaatatctttttatataaaattatataaaaaatcattaaaactattaaaatttgaatattacattttatttttactgaataattattaaaattatgtattttttataattgtaattacttttatataattttttaccaggctcgatacttttctattgttaaaacgagtaaaggttgaaggcgaatgtccgatagtagcctgatgctacttataaatgtaagatatgatttgatggtaatccgatagtggtccgatgctttcgtgacgagcttaatatctataaatgtataatctggtctgatgatagtctgatatggtgtcctgatgctaccatttttttatatacaaaaatattaaaaaaataagtagcatcaagcaaccatcgtaccactatcagactctcattagtatggatagaaatagggagtatggaatgtgaagttagaagtgaagtgaagtgaagtttgaatttcttaaaattttgtaggatgtcttaaataactataacttacataactataagaaaaagattattttagatacgaaaatatagaaatgtattaatgcatctcttctaaaatggtatattacagaattttctaaaaatattgatataagattccttttgttaagaattcttggttgtatggcattatattttctttttgaaatgaaagttattgctgcaaaaaaatatcagattctcaatgaacttttccataaaaggctgcaccatgacatatatgcagttttgctacagtaataacatttttttaatatttatatatattgtttatgtttataatagtaattgggatagtaataaaaaaaaattgaggttttttattttacatttaaaaaatagtttttttttttgtatttttac

SEQ ID NO: 197965 - DNA, 1340 bp, Cannabis indica
aaaaatcacatagtgtgagtaagtcacctggtggacgcccaagtgagctttttactccctaggtagcacaaaaactaaggttttggttctagggtccaaactgtattctggttctcaaaaattaaccaaggaacaacatgtgtaaatgagttttttgcatctagatcccaggtggggtacacacagcacccaccgcctaggtgagtcttccctgactcctcactgggcacctagcggtggacaatatgtccatcctagtctggttccgtgggagaactagtttttagacttggtttctacttagaagatcatcaaacagctaaggaaggaaattcaagctaggatattttgcactcaccgcccaacatgggccttatgcagctaccagcaccaaggtgaaccttatggcacctggtgggcacccaggtggatatggctaggttttagggcatttaactcttttttttctttcaaatgagagtaaatacaagtgttaaagcatcaaatgaagccaagaagacattgtgcactaggggcgctaggtggccctaaccctagtactaatgcccaggcgaacacctagtgttaggggtgtttataaaaaagttacgaaccgcctaacccaaataaactatccaaaccaaaggaataaaccgacaaaaaatgcaactaaaataacccaataaaaattcaaactacccgatgaatatattgaatagattaaaattattctaaattgtcaaattaatccaaataaacaataaactattttatatatttttataaaaagatttatataatgtaatgcataaattttactagttatattattttatctttaaattttaaactttatagtgtttaacttaaatttagactttacagttaataatttttatcataatcggatattaaattaaatttaaatttacaccatattattactttttttatctatttttatctgaatatttgttgtatagtttagtatttattcaattaatacttgtcttatgttaaagttattaaaattaatttagactataatatttttaagcttgaaatataaataacatacttttgaaaaaaaattatttgaatactaaaaacaaacaataataattgtagaaaaaagtgaagatcgatttggataggttaactcaaccaaactaacaaaatcattcggcgaattaaaaaaattattttttcaattgggtgagttacaattaaatatttataacatgatatttataaagagctggtaaaaatatgccataacctgaccaaattgaccactgtacaccctacctagtgcacaacaggggttgcacatctttttt

SEQ ID NO: 197966 - DNA, 590 bp, Cannabis indica
tatattaatggaataaagatagggaaatttggatatggtcaaaaagaataagcaggcgatcgaagctcttataccagcaaaatctgtactaaaaacataattagagatttttaatagagaagtcattggcacgtgcctgttacgccgctaggaacagtgaaaaagttgcttggtgaagaggtggtgagcttggctcccacttttccacattttcttctttatgcacatgtgggtcttgtccatgtgtacagggatcatccgattttgtacgaagatacccacttggcatgttgcgccctttctttctactatatattcttttgccatgatgtgtatttttttatctccaaatcccatgtcccacgatcgaaacaagagcaaaagagagaattataaagcagaggaaaacaacaaaacaaccaaagcacttcagttttttactttttagtgagcttaaataacccgtactaactgaagattagagaactcgcgtgtgtgatttagaccactccaaagctaatggaagatctatgcagtccttttaattggaattttcgccatgaaggagaggtaattacttacaaattagt

SEQ ID NO: 197967 - DNA, 676 bp, Cannabis indica
aggagacttttaactttgacaagagcatgttatttgctaatgtgattgtttttacaaaagcccttaaggattactttcttgcacaaaacaaggatttcaaatacatcagcaatgactaaaagaggtgagagatatttgtaaagggacatcatgtaagtggttaatatatgcatctagggttagtacagatgggacaacatttagggtcaacaaactagagaaagaacacacttgtggaatagtgttgaatagtagactagcaaattcagcttttttgtccaaacacttcctcaaaaccattaggttgaatcccaacttacattatatcgggttcaaggatatggtttccaacacaaagtactctaaagtgagtaagtggtccttttatagagcaaaagacatggcgttagctatgttggaaggaagtgttgttgagtagtatgctattcttgatgattactgcaatcaattattggctactaatccaagtgttgctttcctattttgttttatgtttttagttgattacgattaatttttgaagaagtataattgtcaagaaaataaaaacagaagaaagttgagatttattcctatgaaaaacacaaattttctttttagcacatatagattagacatatagagtctttaacggctcttacaacagttttaaccc

SEQ ID NO: 197968 - DNA, 1618 bp, Cannabis indica
actggagtggatatattgccagtgttcatctggatcttatgatttattgtgttgattgactgtagaataatcaccgttgttagggtcgaatcaactcaagtttttgcatgatttgtcttcattattattatgcattactctactacaaaataacctttaaaggtggtttttttagaacattaataaaaaagagaagctaaagcatcctaatatttcctgctcattgaaatttgacatttagaggtggttatgttataaaaattgtagctatagagtgtacctgattgctatagctacagttttttatttcagttgtgatgtgtaaatgagaggggatatagcgtcagtttttaagaaataatcgacgccacagggacacgctgtagcttaaacgtgtcttctctgtcgtcggttatttcctaatgatcgacgccataaggtttatataacccagtcccagcctttttcttcgtcacttcatcttcctcaaaccctaaataactattaatgccttcttcctcccaaacccacgaaactctcgccaaccaaccccttccttctcccatttcttcaattttcaatttttttttttttttttaaatcttgtatttttcatacccaaaaatatatcatcagagtttgattgtgttttgtttagttttttaggataaaccgaccttagaggttgtagttgtggtggttgtagctccgaccgccagttttagttaagaaatgattgaatcttaacattcattaaagtataaagttaatctttaataattttagtaatgtacattatttttttaattattattttgtaaacttttgaaggtttttctatattgttaagattgtgttattgtggttgtatgtggtggccagattttgatcggtattggtggctatattttgataataaaattaaaatatactccttaattatatatgtatgtattttatattgaattgaatatgtattatatatatgtattttataattgtattgtatgtataaaaatattataattgtaattgtatatactttatgtattatgtatgtatatatgattttaaactaataattttattaaatattgtgattgagaatgagttaggcgagttttaaaataaaaatttagaaattagtttataaattgaattttagaaattttgttttgagatataatttattatatatgtatatgtttattttttttaaaaaaaataactcttttatttccatattaatttttttttcatttatattcatgtgtttagatttttttactagctacttactagttattaatttcattgtttttattactaactagttattaattttactataagttactcattagtaactagttagtaatttattactaacttaattagttagtaaccggttactcataaatgatataactagtaagtagttaaataattaaaattttaattttgtagtatttcattatattgtaggttgtgaggcaatttgcaaagttctaattatttagtgttgattgggttttagctagctacatgaatacatttaataacttttgatattaattaagtatcaatgcttataagagtttaaatattttaaatattc

SEQ ID NO: 197969 - DNA, 548 bp, Cannabis indica
tcaaaatgtggaaagcaaaaagcagagaggtaacaagtccaagaaaaacaagaagaaatcaaaaggaaagaagagataggctaagtaagtatctaaagcaatgagagttccaaattcttatgatgaaactcgattttgtattttgtactacataccttttgaatatgaatactattgtgaaacattttctcattgcaaatgaaagaagacttgtaccttgttatcttaggaaatcgatataattaatttggtttcagtatattatattatgtaaaaacttggccaaattaataagtaatttgtatgctgtttatataattgacaatagaataaatatacttcaatttaaaaatatcattacattaatatttggttttaatatattattgtttattatgattaaaaaaaattgcatggtaaaataaacatgatatataagagtaactagttacttggtaattcatacgatttgaaaaccatgaccaacatggaaaataccagttagtttgattaatccaagtttaactattcatctcatttgagaattg

SEQ ID NO: 197970 - DNA, 642 bp, Cannabis indica
gtcggtgaaaggaagcgttggtttgtcggggttcgtcgggctgttagtttcgacgatctgcgattgggagtgagaatggaaggaaagagtgaagtgtcgcacgtaaatgagttagggttttgagggtttagttttatttatatatttttgaaagttaacggaatgatcaaacctactaacatcgttaaatttaacagaatattcttttatttttgaagtatattctgttaaaccaaaaaatgtcgttagatagacccttttaatatgtaaagatataggtagatcatgccaaatttattatggataagaaaaatccattagtggatgactatccttcaaaattaactttcagaaactgaacctaatatttatgaccttaccaaaaagaataacgttcaaaattagttttcctttatttttttttttaaaaaaaagacaataatctaattaaaatttatactgacaaaattttaggaccattaatgagaattgttagggacagttctcttatttatgagaatcctaactataaaaaaaacctagtacattaattattatcaatacaatctctcaactcgcaagctcaaggaatataaagcttcaaggcattctctgtttagtgtttaacaagaaaaaaggtta

SEQ ID NO: 197971 - DNA, 1414 bp, Cannabis indica
ccctaactcatcagctctaccctagataaattatcaacctcgttcacaactcatcggggaccggagatcggagatcggagatcgtagattaggaattccttttcaatcattggccgccggataaacaattactgcactcacaacaggtactgtaagtaattacggttttgttgaggctgctaatgaggattaaatacaaagagtcgatggaaaatgtgtttgtttgtttgagtattctcaagttattatatctgatttgtatagagttctacttgggcattctacagggatatgatttagcttttatccaattctcttttcttttttctcttttcttttttttttcttctttttaatagtagttaggttttatgatgtttagttgtaagatttagaaattgagtatattattaccatttaaaacgttacaatacgaatatatgtttataatcataagatattttgttctaatcttgatgtttccgagattttgtcctcattctttggatttgaaacttaagggccagggccagtgaaactttcataattttctgattttggttcaataatttttattttctgtttctttcatgtgaatcccttgtgtatggtatttgttcctgcatatattttatttcagtagtgtgtttaagtttgggataattctatatcttgatgttgatcatgaagtgtttggtgacattgagaaacttctctccaaataaaatctaatttatggtgtttctaggcgaattgtaattattttagcaactcacagtgacaaataagttgcctgaacaatgttgtgttgttgattggagagatattttgtagttattccaaattttatcctgtattttaataggagaagaaaaataggcaatgcttcattgaagaggtaccatttaataacctgtagaagttttgaaccaaaatggacaatgcttaattgaatagctaccaaataatgtttagagaagttatgaacaataattgtttattcatatgcatctcttcagcattgttgtttggtcaatatgtttatacagatcaaatggcgttgcaagacaagttggacaggttcaagaggcagcaagagaagtgccaatcaaccctcaccagtattgcagcatcttctaaacctaaaccagctcagactcagactcagactcaaagattcatgcacgctgatcttccagccagtgtcaaacctcctgctcctgctgtcaaattttctagcgatacagatagacttcaacacattaacagcattcggaaagccccagctggagctcaaatcaagcgtgttattgacttgctatatgaggttggttcaaacacaaactttgtttcatgtcttgatgaattgtggtcatgtttactaatccataataaactgtgatgggtaataaaa

SEQ ID NO: 197972 - DNA, 932 bp, Cannabis indica
atttatttttttttttttttgtagagagaaaaagagcatagtgtttatctctcaagttttcgagattctaggaagtaaagatcacatttgacacacacacacacactcatatttataaatttgttggacataaattgccaacttttggttgctaattgaagatatgtaattatataattaccacatgaaaatgaagctccacctagaaggaggcaaccaaatattactgggccatggtaaatcactaaatctaaccgagtaattgagtgcagtgggttataacaattacctttttttcaattaaagagtgattttaaagcttagtaaagtatactcactccttttctctctcttcccctcccccccaaaaaaaaatattaatgaaatggaaagaaattagtttggatgtctaatatccaccacacatatatattcaataaatatgtatatatttatacacaatataaattaacgtcagctagtgtagtagatgcgttcatatatgtatagcttctcatatataggccatagaacatggccaacatccacttgagagctatcaaaattttccatgaatacaaactagaagccctagaatccaaggaaaagcacaatctatcttgtgcccccctgcaccatgcccaacataaacctctagttgtcaaagcatccatatatgaataaaagatataacataaaataaaataggaaatgttcaaaagaaaaagaagaagctttcattgtttcacttgtattaatgtataccccactgtttttcttgatgtgtatagcttaaaaagcacatattaacatcaagtaggcccctgccaaaaacctccaaaatcttctacaattacataattaaacataaatacaacaataacaaatatgtaaataaattgaatattattattaatataaagctagcttcc

SEQ ID NO: 197973 - DNA, 1089 bp, Cannabis indica
gcacacactcttaatactcactcttcctcatcatcacagatcaagaagaaaaagcttgttatatatcaattatatatatatatcctatatatatcctaccatgatatatttgattgttatatatatacatattacatgatggatataaatatataacaatcaaatataattgagcatgtatatgtatgaatcaaattaaaagataaaaggttatttgtgttttttttaaacatattcatgcatatatgattatgattgtttaagcgtttacagaggagatgagatcattatcatcatttaatataaaagaattagttggctgttaaaataggacagttgtatatacatgattggatatcaagtatgacatgtttcatttgttgcattattggtaaatagtagcacagtatagtatagtaagtaagaagtagatggttcatgcaaaaagaaaaagttaagaggaaacatgcacatgttttcatattagctggttttgttttagatgaaatcttaaaaaaattattttgtactaatgcattacaatttggcagctctctaacacaaattcaaaaaaggttcagtttatagtcaaccaaaatttttaatgttattgcctttttatgcttttctttgttttctattaattatttttattttggttgatagaatggggatgatataggacccattatgcgtatcataatattactatatacatttctgtcattttctacttggaaataatgcatgtcaaaaggcaatatattatatatctaaaccttgctttgttttgagccctggaataaaatatacttctccaattcactcatcatatactgcccatatttgctttgtgcaaatgtaaaaaaactttttattttatttcatctgtaatataatcaataaaaagggtcaccatctgcaagatttcattgttattatacacagataataattatataaacccacaatgtaaaaatatctataataaagtattattaacttttgctttacaatattcaaatttgggaaaatcccatacttgtgctctactacatgtggctaacttttcccttccactccctgagg

SEQ ID NO: 197974 - DNA, 634 bp, Cannabis indica
ttgtaaacaataaatatttataaattcgttagtgtatgacacattacccagtggcgtaagtttgagttttattattatactctttttctatatttttttttatataattccaaaagtgaaggcttcaaaatttaaattgtcttagctaggcctatattgtctcaaggcccgaccctcttttttagtggtaatggctgctttgacaatttttctattgataattattaagtttattttttatattttgttggactctcattttttatatagaaaactgctatattttgtgacattattttttttacaatatttttgtaagtttctcatatgatttttttttttttgtaactcttctcatatgaaattcaggttgagtgttatttatttattttgtgacaacttgggtttctaaggctctactcggtggatgtgttttagttatgttgctctatttcatgagcaacaatagattgtacggttcatacactcacaacctctgttactagttcttttgataaattagtttcgttagcatgttatgttcatgtgtaacatttgattttgtttgataatgacatgtatctttaccaagaaaaaaatgtaaccacggttgatattttgagtaatatatata

SEQ ID NO: 197975 - DNA, 1326 bp, Cannabis indica
taaacaaggttggaaaatcctcacttatccggattgcctactgtccaaaatcctaaaagctctatacttcccaaaggaaagcttcttggttgctaaacttggtcattatggatcttcgatttggagcagcatcttatggggccgagaccttttacaacaaggtatgagatggtgtgtgggtgatggtagtcaaattcgaataaatgaagatccttggatcccaagaagctatccattcaagcttcggggtaaagtgctaatccctcccaagacaacaatagatactcttttgttccctaatggaagttggaaagaaaatgatattagaaaggggtttcaccatgaagatattccttgggttcttggaataactccacttataaacaatccggattggattacttggagtatgacccccaatggaatttactcggttgctagtgggtacaaaatccgattcaaaaatcctgatatagccgaatgctcaaatctgtccaaagtcaaatcatggtggaaactaatttgggaatctcatcttactccaaaaatgaagaactttatatggagggtctacaatcaatggattcccacaaaagtggagcttaataaaagaggtatggctcttgacacttgctgtgatttgtgcaaatttcaggatgaagatatttgccatgcactttggcggtgtccgaaggttaaaaacatatggaagcaacttggtttcacaaagaccataccccaacaaatctctcaggcagatgatgttctttggtggctccatgatcaccttccaaaagaggactttttcaaattcataggcctctcttggttggtgtggcaaagaagaaattcgtttgttttccaaaataaatccatagatgaccaaacttggatttattgggctcttgacttgcttgcaactcacttggggacacaccagaatctgctcacggttcctgccaccaaacagatcacggcgtggcaacctcctcccaatggtgtctacatgatcaatactgatgcttctttaatttttggtagtccagggtgtggtattagtgctgtcataagagattctaaaggaactttggtggttgctgctacttcttttctccctggttgtatgtcagtcctctgccgaagctacagcaatccttcatggcattaacttggctaggagatggtccatgtcgaacgtccaggtgggttctgatagtcaaacaattattaaagctctctctactgaagctacaaatcacacagattgggggaaattggtgcatgaaatcaagcttttgaagagttcctttcaatctttaaattttt

SEQ ID NO: 197976 - DNA, 1079 bp, Cannabis indica
gaaggatgggtatcggattttggagccattttggagaagcaaatggtgtttggatctcaactccactcttttttcttctaaataataatacaatacaatttctcaaagtttttcttttttttattttttaaattcgggagagattctaatttggaatctcttttttctaaacatgaaactattatatcatcatataagtaaatacatagaataatttacagtgtaaatgtataataattttaattaatttttaaataaaaataaaattttaataatttaaactaattaagatcggtcacgaaacattaaatacctacataaatttcaaaattataacttaagttacctacaatggaaagttaaacttagataattataccgtttattactctaataataataataattaataaaagtttcagagtagattgaatctcagttgatcgatgattaggtgagaccgtttgtcgaacgctttagattaaaggctaattcgaatttgtctccgagtgtttgatatgtactaaatttttcctgaatttttcaagctattaaaaaaatttccaaactattatgattgttggatttaaggacttttgtctaattttactaacgaaaatctgacttggatgaaagttcaagggtacaatttagtacatgttaaagtttggagatacaatttgataaatgttaaagtttagagacacaatttagtacatagacaatatagtcacatttgtaaaattgaataaaatttaacagaaatttttcaatctaataattctcataatttaataaaattattaagagattattatataaataaactaccattttttgttaaaaaaatatatatttttacgtttaattttttttaacgtttttataattttctataaaaataacaagaaaactacctaaaagtaacagaaaaataatacccgaataatatcaaaacaacaaaaaaaaaatttatacaaataacaaaaaatcaacaataaattaacaaggatgcaatataaaaatactgtattttttataaataaaatcataataatagtaaaaatatttaaattccc

SEQ ID NO: 197977 - DNA, 1897 bp, Cannabis indica
aattctaaagataaaagcattcattggaagtcttgggactgtttgtgtagtcataaaattgttgggggaatgagttttaggaatctaagggattataaccttgctcttttaggaaaacaaagttggaggttttcgactcggcctaattccttagtgaccgaagtttacaaagcttgatatttttcagggggtacttttctcatgactcaattgggtaataatccaagttttgtttggaaaagtattctagaaacctaagagctagttcgacaatgtattagatggtgtgttggagatgggaaaaacattgttgtaattggagagccttggttacccgttgatgaaaattcctatgtgatctcggatcatcttgcaatatctagttctactgttgctaatttaatggtggaaaatggcaatggctaggacttggaattactaggtgacttgtttgaagatagagatgtggaccttattaaaagaattcctccacgacaatcttcccctaatcaatttttttggttttttgaattatctagcaatttacagttaaaagtgcatacaatttgatttaaaagataaaaaataactggttcaaagtggaggcatctgctttttggaagtgcttatggagccttaatgttccactaaggttaagaacctaatgtggggagggggctctcattattttcatactatgacaatgctttactctaaaagagtagttgtgtgtcttttatgtccgatttgtggctttgaaaatgaaacgattttacattgtttaatgacatgccaggcacttgcaagttgcttggagagagtcagaattggaaatatgattacagatggtatgtccttcttgaatttgtgtgctgcaactttcaagaatatagatgacgagaagagatgtttggtggctttctatgttgggctatatggggagcaagaaatggcaaagtttggaatcataaatctacaaacactttgaatatgtattcttctactgttagtttctttgatcaatggaaagctgctcaaattatggatgttgaatcatctcagattggtttggtagccgatgatggagctgagcagtggtgtgtaccgtttggtgatattatcaaagtcaacgtggatgcagcgatatttggagagtctcatagttttggggttggtatggtggcccatgacagccatggcttcctgctagaagggtgtactcaattatttcaaagggtggtaaggccagaaattgtagaagcaataggggttctcgaagcattaagttggataaagaggaatcaatggcaggaagtgtttcttgaaaccgactgtttagtggtggtacaagcattacgaaattcagttgcaatgttatctttgtttggttcaatcattgaagaatgtgaaaatttgcttgtaagtttggaaaatattgttatttattttgttaagcattcaacaaactcaggagcttattcctttgcaagaacctctagtttatatcttgatcgcagttttagtttgggaaatatcccaatcaattttctagcttgtttggtaccaaaggttaatctttaataaagtttgattaccttttccaagaaaaaaaaaaacaaaattattcataaacaacacaattatgtaataagattttcttagtttcctcaactttgagataatgaatttttgtttaattgatttcatattgaagctgaaaaccatttgttgtgcatatcattccaattaattatggtggcacttggtaacaatttttaaatcaattttttgtttttaaaattggagaagtgtaacatatttttcaaaaatatgctttataaaactgttttcattttttaatttttaattaaaaatcaaaattttgaaaacaaaaaaa

SEQ ID NO: 197978 - DNA, 1847 bp, Cannabis indica
acgataggctggaatggaatttcctttcgagagttctcaaagcaaacggatttagccccaaggctatccttcttataatgaattgtgtgacttcggtcagctactcaatcctacttaatggagctccacttgctcccttcaatcccaaccgaggcctgagacagggagaccccctatctcccttcctcttcatcttatgcagtgaagtcctctcaaaactgattcttaaagctgagagagataatctggttcgtggtatcaaggtttcgcgtcaagctcctcccatcactcaccttttttatgcggatgatgcaatcttcttcacacaagccacggaagataatgtcaatactttattgaagatctgggaaaaatatgaaacttggtcagggcagcgcataaatagagagaaaagtggagttgtattctccccaaatactcataacagcaagaaagtggctaccctacaactcctacaaatgcagacgctaaaagctaaggaaaagtacttgggaaacccgtttttcttcacggggcgaaggaaagatgacttccagttcattaagcagaagatcataaacagaattgacggctggaaggcaaaatgcctctctcaagcaggaagaactacactggttaacgcagttcttcaaagtattccaacctactacatgacaacaactttgatccctccgtccacttgtgaggaattggatagaatggtggcaaagttctggtggaccggggcaaaccaagaaaagaaaaactattgtgctttaaaatcctggggtgatctttgtcaaccaaagaactgtggtggtcttggtttcagaaaattccatgccataaactttgctcttattgcaaaactgttttggatggtgctccagaagaaagacaagccatggatcaacactttgtgtgctaagtactgcagtactttcgacgcttggacggtggagaagcatgactcggactctcgggtttggaaggatatcctcagcaccaggagcctttgctctgagggggcaggggtcatcattgcagatggggacacagacatctggacaaagccttggatcccatggaagtcaatccaagacatcagggaaagcttccactataacaggattcatgcgttcaacaaagtatcagatctgatcattgaaggcacaaggacctggaatgtgcccctaatccaatcttgtttcgatagacatatagctgaggcaatcatcaacatcaagcctattcaagaggggagtgacctactcttctggaccccatctaaagaaggaagattttctgtcaaaagtgctcattggctccaccaacgacaaaggtttaacaaccaaaacattgtgtggaaacatttatggaagaagaagatccatccgaggttaatcatgataatatggaaaatgctgggggattgtcttccaacttttgaaaagatgcacttccttaacaacccggacagaatgtgcctcttttgcaatagtgagattgaagatacattccacatcatagccaaatgcaatatcaccagaggactatggttcagaagtaaatggggattaagaattgactcaatgggctggagcaatgtcatggactttggtaaatggtggactaatctttctgactatgaactgctgcttttttcggcttgtttgtatgatacaatttggtactggcgtaacaacatccttcataaccacatttcctgggactctcagcaaatttataatagctgccttaatcgttttactgaattctctttggttgaggagagtgaagtaagcgaggaagacagtcatctagtggataagcaggatcagcctaca

SEQ ID NO: 197979 - DNA, 1309 bp, Cannabis indica
tggttgtttatagctcaattcagcatcctgaatttgcacacgatgttattgcaaaatgtttaagtgtaccgggacataatgttcgtgttatcacaagaagggttggaggtggctttggtggaaaggccagtagagcaatggctgtaagtattataaatcagtttcatatctctcttttcttcctaagataacataatatttaaagcatgattgacattttcaagtttacactatgattgacttagattccctgtaaagctaactaaaaaaaaattctacagaaaacaaatcgctagaaaagctgtaatcttacttgacataatattttgagttggttttaaacaattttgttacttttgtcagtggaatataaccccacatgtttattcttgtcttggctcatatccttgcaaaattttcttattccatttcaatctgtttgaccatcatacagctgttacctatcataaggttcaacccctcttactgaagagggaatcacgacctgaaatcggtaataaaacaaagaaagagaatactacagaggaaaaacaaatggccttctgccaaaagatatctacctatttttttagcttgcgattgttataggaaaggaaaaaactaaagtaaatggagagaatcaatctgttttttcagcttgcgattgttattagtattatccaataatcggtttgaccaagttatctgaatagaaggatggactttctgttttatactgctggtgatatccttcatttgaagaaactagaaagtttacattttcctcatacgcatcagctgttgtttttcctactttgtcttgatttcaatttttgctatcgttaatcaaacaaaagggaaggacatagtaccttaattgcaagacataggatgtaaatctattctgtctctagtcttcttttggaccattaaaagctacataatcttcaagttcatttcagttattttccccatcacaaatatgcattccgaatagctgctttagaatagtttgaagctgttagaatgacaatgtactgagacgtatttcataatcatgataattctatcctgtatggtgtcatgagcttgcttactctgcccttttatatcttttattataagttatcgctaaactataagttaacattccttacgttatgataattcaggttgcagcagcatgtgcacttgcagcagagaaattacgccgccctgtcaggatatatatgaataggaaaactgatacaatattggcaggaggaaggcatcccatgaaaataacgtacaatgttggatttaagtcaga

SEQ ID NO: 197980 - DNA, 1184 bp, Cannabis indica
tttatttttttgtcttctagattccaccttttcaatgggaggtaagactgttacgtctttcacattttgtggtacgtcccattcaatttggtgtcctatttggtacactattccttcataagttgctaactaatttttttttggtgtagtaatctgaatagagcttgtgtagtaacctgttgcacgtgcatgttctctttttgaggtctactatccatgattcttttattctggttacctcaaataaatattcagtggttggtttaatatgtctaatttgaaaccaatatttgttaaacatacgaaataatagtggaacaacccaaaaataacattagaaaaataatgataaccccagtattattatgtttaagaatttaaagtgctcaaacaacatgttaaaagaactttgagatctatgtttgagcatcatttgtaatttcagatttaaaagaatttgggtgggtttaagcttctaacctttttgttccgttaatttatgttattgacgaagcttttgggtgttgatttaacattaattttaatttttttgcttcatctcgccaaaattgatgggtatttttcggctattctagtattcctctggtggttcggttcgtaggtgttgaagatggacacttcacatgtattttggggtatgcacagtataaaagaaataaaatattagggtatggtgtacataaagtagcactagaataccaacatccaatcgaagtagttaattttttcatttagtttgaattagttaaattttatgttattatccgtaaaaagatgtatgtatatataaaaactaacattaaaattctacttattttttttttaaaattgcatagatccaattcaatccaatagatgctggatctaaaatactgaatggatctgatctaatctaataaataataggtctaaaatattgggtaaactcgaattaaatcaatagatatacatgaaatacatctaatggacagaatcgatccaatccaacatctattggatattgaatcgattggatgaataaaattaatcggctcagatcagattgtaaatttaatatctaatatatttagctcaaatctggatagacttaaaaaatattaaatgtaatttaatgaacaaccctatcactattgatgttacctatgttgagaatcatggagttc

SEQ ID NO: 197981 - DNA, 1389 bp, Cannabis indica
agatttgcatacccaggcatgtgatatttctaatgactgggctaaggaaggcccaatatcggggatatcattttcttggcccaaagaaaattcgggtgttggtagatgtaagaagtttggcccaataggaattggaacgttagagtttcccgccactcggtccattggtactctgccacacagtgtactattttccccagcacacctctcattcgtacctgacgactcgcctgcagctatcattccaccaccatctttgctgtcctgtgtactgttgatcagagctttgtctcctccggtagccttgccgttgattgaacctcttctcttccaagtacccctcctttctttttgcttttcaggccaaactccatcgtgggattctatctaaagccgagttattcccttcccagccgcaatgaaacagtttctcctgcctgattccgttttgatccaaggaccatacatagggacaacattcccaatctttggaataaccattgccatcggagtgttgcatactttgtcaagatgtgcaagtttcccacagttgaaacaaaggaaggggagcttctcatacttgaactgaatccatgcatcatccttccctgtcatagttaggaaaaaacctgcactgaaaggatgagtgatccacacatccacccaagctctcaagaaaccccgtctgactatctccactttctgctttccatcatttttgacaaaggttcccaccttctttgctattttatgggtgttctcatcggagaggaatcttgtaggaaggccatggaattgaacccagaatctcgctatttcaaactcagctacggtaacttctccctctacaggccatggtctgaggttaaggagaaccccattcaccagccatggccttttttccattacataggcacagtcatcctctgagtcaaagaacaatcccataactccttctccgcatttcttcattctccaatttcccagatttttccatatcccatgagtaattttttttaccgtcgagggtcgcatttctttgcatcccattaccttcccaacacacgctttgttcacaaccacatcctcaagagtaatatcctcgaatagttccagcatttccatctccatagcactatctctttccatattcttgcagccgtgtctataaagtccacattaatatccgtcagagcttgagcttgagtctccatactcaacaaaagaccaaaccctggagcgaacctgactagaccttaaacaactctgtatatacggtaatagtgaaagatgtttcaagagggccttacaagaaaactaatgactctcagtaagaagaactcacagttagaataactgaacaaaacaaagagtaaaaatactcagcct

SEQ ID NO: 197982 - DNA, 592 bp, Cannabis indica
tttaagatattctgtaaaaatttcaaaaaattctagaaaatttacaatatagaaaataatgttaaaataatatattttacaggtgtataaaagagtaacacatgcaacaaataatttgaatcttatttttagctagtgtgttaatttttttaaaattttacataatgtcttaaataactataatgtacacgaccatacaaaaattaaactaaaaaagtttctcataccgaagagataaaaatgcatcggcacatcacttttaagagtaaattgaagaatttttctatattcatatagtttttttttttgaaagatatattcatatagttactatctggttatatatatacttgtatccatctaatgaagcaagtaatattattcaacaaatttaattaatgaattagcatcttatttatttctattatgttatattctattaatcacacacatgaataattacggtatatttgttggcttggctaaaacactttttttttttactaatataattatgtacacctttatatatatggcagtaaaacttggaaagtccattaatttaataatatctacacagattatacgtagc

SEQ ID NO: 197983 - DNA, 559 bp, Cannabis indica
caccgtagagatacacttaatgatcttgtcaatccatatagaatggagtcctaatttattcatgatgcgagatagaaactcccattctattctattgtaagctttagacatgccaaacttaataacacaaaactcagctttgcccttctttttctttaaagcatttatgcattcaaagtcaatgagagcattattaatgattaggcatcccaaaagaaaaaattttgttcttcagaaatgatcatccccaacacttcccaatctattagtcatgactttggtgataattttgtaaagcacattgcataaactaataggcatgaaattagaaggcttagaaggagcatcaatttttgggattaaacaaatgagggtacggttaataccttggagacaagtatcaccattcaaaaaatccaacgccgatctagttacatcgacaccaataatctcctaattttttttatagaaacccgcacgcataccatcttcatcagggctcttagagggatccatttggaaaagggcatgtttcacatcttcagcaaaaaacgactgc

SEQ ID NO: 197984 - DNA, 1320 bp, Cannabis indica
aagttaagaaacagattagaatcaaatatactcttagtttattctctacgcatagattatatagcacaataacaatgattctttttatacagaagtgtaatatgcaaattgagaattaaaaatcaaaagtagggaaagaaaataaacctcacaggatatcctgcaagtatcaaaataggatttgttgaagtatctaatcgctgcttcggcctcatgctccgtcctgtacccaataaaagcgaattgtctgctcttgccatccctgaagaaacttgtaagttaggcaacaattcataaccaattaaaagaagaaaattgtctgaaaaaataaagccaaatacttggtgtgcatgagctttgcatctgtaacttctcctttcttagaaaagaattcccggagacgatcctctgccgcatattttggcaaattcttcacacatatccttgacctatgtaatcccacccacacaaaaaattagcaattattgtgctattttttttttctcattttttcaggaaaatatgaacaaagaccaaagtacacactaaaaagcacaccatatattacaaaaattgggctcaaacaccatacattcaaatcaattttacaggatttttcataaacgtgttcaggattatctaatcacaacacgaaaacgagacaattctgctactaatgtaacaaataaaaaatagaaattagatatactcacattcttcctttctttcagttatacagaggatacaagtatccggtcctcagctatactgcagagcaaatatgaaacggctcctctcctacccaagataaaaggacaggaaaatcaaaatagagacacatatattatatatataaatatatatatatatatccatagcagattttacaaataaatatatatactacggggaatagattttagaaatacctattaatgtgtagataatgggaaaggagatgatctggagttgtagttgaggaggcgaccgttgacgggagagagagagagaggctatgctaatgcttcagtccaaaagaagagcagagtgagtgagtgagaagaaagggtttggttttagtttatgaatatcagtttagtttcttacgtttttttctcttcctttttttaatttaaaataaataaataaataaatatagccttttctataagaaaaaaaattaaagttaattattagtagggggaaatttaattaatcatacttacattagctcaagaaaaacatttctttattataactttattaggataaaaaattaccgtttattgccatatgaaaaaataaacaaaattagaaaac

SEQ ID NO: 197985 - DNA, 2735 bp, Cannabis indica
caaaatttcttacagcacattctctccccatctctaataaacgtgtataaatcggttcaaatatgtaactttgttatctcatctttatttcctttaatttttttaaaaaaacattatagttttcctgttttgtccaaacgctgatattgaaagtgcaaaactgttgatacatatttatacaaagaaagaaaaggatgcctagtgagattgagaattgtgagactgttgttagagaccctcgtccggtggttaggaaatttttggctaggcaacaacacgaagggttaggtgccattgttagaaggagtattggcaggtgacactttgcatacaaaagccaacatggttttattttttcattaaatttacttaatcttttgagtttttttttcttctcttgttaatgggttcagaatgctttcagatttgagctcaaatactttgatccttttcttgctttggatgaattttcaggtgggtgttctctgctttttcatctattcttctttatttatatttacaatttggtttcatgagatttcatttcatttttctatgtgtatttcagttactgctccagctgggtttcctgatcatccacatagaggttttgatcacttgatttaagtctcttttgtcattgatatgacatgttgcttaagttctaactctttcttcttcttcttttaaaatctcagggtttgagacagtgacctacatgttacaggtatagtcctataatataaattatcttaatcttgaatcaacttatattggctatattaattttcaatcaatcacaacatggcatcaaatggccagtgcagcaggcaatatggtagactggttttactttttattagccaatatcagggcgaaaatgatctgggcctttttttaagggcaaaaaagttgtattttataacataaaaaaggaaaaaggaaaaaacaatttatttatttggagttactttgttgtaaaatatgaataattagggagctgtgacacatgaggctggcgatctgcaatggatgactgcaggaagaggaattgttcactctgaaatgcctgcagcccagagaacccaaaagggtctacaattatggatcaacctctcctccaaaaataaaatgtaaaaacaaaatagcatccttttttttttcaaaaaatactaatttaaattcgctaatgcaatttaagaaaaatatgacacataattctccaaatgaaatagtttactttttcccaaagctgctttgaattattgatttttggtgtgaatgtgagaaatctatgtaccattttacccctatatcatggttttgaagtaacttttcaaaattttggcagcctgggactaatctcctagaataaatgaactacaaatctataacattattcctttccaaatttaatttttatatatatatgtaatgaattcaggattgaaccaaggtatcaagaaatgttgagcaaggacatagcagaagtagaaaagatggaataaaggtaagagtgatagcagggcatgccttaggaaccaaatcacccatctacacaagaacaccaaccatgtacttagacttcactcttaagtcaggagcacaccttcaacaaccaataccagtatcatggaatttatttgtgtatgtcttagaaggtgaaggaatcttctgtggaagcgatggtggttcgaagctgatctcgccggtgacagctcaccaccttcttctcctaggatctggggatggattggaggcttggaacaagtcttcaaaataacttagattcatcttagttggaggagaaccgttaggtgagccacttgctcaattgggcccatttgtgatgaacacacaagaagaaattaaccaaacaattgatgacttcgataactacaccaatggatttgagaaggcaaaacattggagatctgaagctgctactgcacttggattttagctctttaatttcttaccatttcggaagaaaaagaactatttgtttttatttttttggttttgtgaaccaaaagatttagagaaatgctaactagagtttcatgaatatccatgttattagtgtaaattaatattaagtaccacatatttttcttgtttaagaaagatttcatttcattaattgataatgtcactcttatcggagaacttgaattaatttatattaattattttaaatagaacttatgagaaaaaatataaaagttaatataggaaataatgtcactaatcacaccccaccttgtcttttttttattaacaccatactacctttttttttaagccacataatgatttcttcaatttataaatttatatctctcttctatcttttaaaatatattattttatagcacatttttacattatttcgtatattaactaatatatttgttttgtatttcttctttatattatatatataatatattttaatatatataataaatattaataaatttaaattaaatataatttaaatatgattagttaagatccgtacttctttacatataaaggagaagagtttgaagaaaataaaaatctttacgtatagaattatttatctgatggaaggtattttttttttggttctttatttttttttaggtatagattcttcaccccactcaataattaaaaataaattttgttaaattggagttttaattaataatattagtgttggacgatgttaaccaataatgtgtatt

SEQ ID NO: 197986 - DNA, 1360 bp, Cannabis indica
tacataaacgtgacattgaagcactaagaatctcctcgtttaaatcattagatagcacaagtctattttttttttcttaaattattgtcgtacgtcctagctttcgtagctatacatagcctttttctttcttatctactcaacaatcatggaatataatgcttaattatattttttttcctttttccctggcttatcacataatctgcaatctcctctgatctttattaacaagttgttcattcagaaaattttaatatgcactcacccatgtatcccattaattaaaaaaatattatattaaatatatatagtcaatcactttcatatatatgacatgtgggccatagttatcgatttgatctagaataataatccatatgtatatatatttacatatatataattattaacaccctggccggcagccatttcatcatctagaaaagaaaagaaaaaaatggtaaatatgtgtatggaacaaaattgacaacacaatggagacatctatatacataataaaccaggcacagctgggatctaaattgctatgataattaggataagatgctgaaaaaaaaaattcaggatgaactgcatcagccattaaaaggaatataataaggaggtatgaattttggtggatgagactgacaattcatacaaaggatctttcttttctttatatcttcttgtatttgaccatttatttatatatgtatacataaatatatttttgtaatccatatggaacatttctaacatatattagtagcctatttatgattaccagaacaacaattaaattgaagatgtggtatattctacattatttgttttgggccttgccaactcagttgtaaaccgagctactccatggatgtcacttcttcttgaatcctttactctagcaacggatatttcggtgattccggagagggactttgttggattggggggagagatacgggatacagaaggacgtggtttggttggcatagtcattaggtgtgttaggtgatttttctgctaatgtggcggagctgcttgccattcgactagattcggttcttgcacatcagtttagttttaatatctccattattgaatccactgtgacaattggttggattaataagctctacatcaattttagttttcagtttattttattaaatatttattctttcttagctgttgttgttggtggttcttacagtatcattctgcgatcaacgagtggtgttgtcaatacactgacaacttctgttactaatttaggagattgtgtttggacatgtgcttgttctcaatttttgaagtttttctataacagtggatttttcttaatgaattttgc

SEQ ID NO: 197987 - DNA, 875 bp, Cannabis indica
ggagagtatctgttctgcctctgctaatacgtttgtcttgtttatgacttattaaagagaagagatttagggaaagctggaacaaaatacacactccctttaaaacaaattacatactgaaaattaaattattttttttttaagaaatcatactgttattaatagattgattagttataagacccttcaatgaataatataaaagcatctaaaagaagtgttaaatttggctaaaaatggacataattgtaagagataataagaattattctatacaggttaattaagatttttactttttaactttaacatgtattagataatgttctttatacttttctagctggtaaaaattttccttgaactattgacattgttagatttaatgatttttgtttaatttcattcaattttattatttcaatgattgtttatgtactaaaccatgctccttagattttgaaatctaccaaatcatgtacgctttgacatatactaaattatgtccctgaactttcatccatgttagtatttttttactaacattagacaaaagtctttaaaaccaacaatcttaatagtacatttttaaactactttaaaagttcagtgagtatgatttggtacatgtcaaaggaagataaaaatcctaattagtcttttacatattatttttttatttttttttcatttttatagtttgtattattttggtggttgttgttttctagtgacttcgttttttatttctattctaaaaaatccttaggaaaaatattttatttctactaagttaaaaaatttgtccatgtctctagtaagccacttaatagctattttgctttaactttatgttaattgttatgtgaattttt

SEQ ID NO: 197988 - DNA, 1390 bp, Cannabis indica
taaaaatggtccgaatgattgactataatgccaaattcagataggagttaagtcaggtttcaaatttaacatttctgatgggatcctgtagtttgtcctctgaacagtgctagagtgctgaagcaatcagcaactaaacaaattaaataaataatacataagttactatttactctagcaaaagaaaattttctaatttggtaaattagtttttacgagtcaggtcgtcaattataaaagtagacagcaccatcagacccttttcaaaaatgaaatagcagtcttcatgcaaacagtaaatgatgttcggcgaattgtgtaattctgtgataatttgaggattggtttgtacagggtcttaagaaagctgatcagcaaactatcttggatgacttcaacaaacatgggcctgggattacacagccttctatcacaccacaaatggttgctgttgcccaaccagccccaagtcatgctattgcttcattaatgcccagttctgcttcgattggacttattgcttctcgagaggatgtgcttacacgtgcagccgcacttggaagaggtgctgccacaacaggtttcaagaggttccttgctctcactgaagctgcaaaagacaggaaggatgggccttttagaaagctcttcaacgcataacagaatgaggctctcatgtaggactgtaaaccacttctcttttaatcttttcagaaatttttgttcttatctgattttcctgagattttcgacacaaacaggaaagagaaaaaaaattgtatattatttcgttgatagtttaataagaaatcccataatctttttgttcgttatgtgagtgtgatctaccgcgtgatccagatttggactgaataaaacatgtgttttatgttatagttggaattggttattgaaagaggattttccccaaaggttgaattaggccaaccgtgtgtggcgctgggatgcaccatgtttcgatatttatttaaagaggcaatctatttgtatctattatattcattcatctgcttttttcttcaaagctcttctgcttcagttatttttatttattaattagttaagatgatgaagatgactcgttaaacaaatggatgttttcctcttttcttctttttttagaacaaaataggtgcatatattaataagctagatcttactgtcaatatataaaatatttcctggtattgagtcaatctcaatgatatcagtaaagttttgagaattaaactatgtattaattttagaaaaattacaactcaaaaacaaactacaaatccttcttaaatttctaatataattattgacttcccatcgagaaatagaagcttctttgagctttgatgattatgttagaattattataatg

SEQ ID NO: 197989 - DNA, 566 bp, Cannabis indica
atcctttagtacggttaatttactaatgaaagtataagttagatccaatctaaatttgtgcacaatttttcaattctagaatgaacacttaaagggaagcaacataaggtcctgttaacctggacacttaccccaatgacgtggacatcaaattttgacacgtggcaagaagagttgagtagtcctgagtcatagcagtcgacttaggaaaggtccctagccctgcacccaggttgactttaggagctccagaataggtgtttggatcccgccatgttatttccaactcactatcttttagtattctatactataaagacatgaagtatcaaagtccaaggcttgggagctaaaaatacacgaaatagcacctcaaaagtcaacccgagcgcgtagggtatcacctagcgcccaggttgataacataataagggttttggtttttggaactatcttagtacaaattggtcaaactttatatttggacatgaattagacatgtcagaaatatatttgaggcattagaattagattctaagaactttcatttttgagcattctgagca

SEQ ID NO: 197990 - DNA, 1589 bp, Cannabis indica
ttttaggataatatttgccccctcagtcctcgtaggatcgtactggtcgtacatggacttctcagttccttcgttaggcaaccatataacaagtgtcccaaaccatgtgatctaaaccctaagggtccgtatctgcgtccaatggatctcctcgcatctttgtaaatctttagtcgtcctcactacttgtacaaaaaatcatgtgtggagaaaactactcaacgattacacagtttccgagacaatgttaatgaaaagtgaaggctttggatttttggagggaaaaagcaatcatttaaatttggtttcctaaaaactcttttcccttcacccctttccactataaatatccccccttatattccatttattcttagcaattctaacttttccaaagcaagaaaaaacttcccattctatagcctttaaacttccaggatagctccaaattttcttgcaaggaatccaagaggtttattagctttcttcttcacactttaatttgaacaatgagtaagtcttcttatctttttttggcatggatttttaataattttgattcttgtattttgtgtttcttttgcttgttgggacatgtgtgtaaggactttgttattacttgtctgaaattagagctcttcacgatgagaaattttaaggtaattctgcaaagatcgcctgttttatctccctaagttgaatgttagcgtttttcagattttgggtttcctttaaattcaagaaacccttgtttttttttttttcaaaattccaccaaaaatgcgaaaaccttgtggctagatctccacttttatctggtcagcatgttggaagtgttttcttgaggaagcactttccgtgcagttcggtattttacctctatgccattcctattttgtagattgaacgttgttgttatggattttctagtacgcaagtaaacatagtcgattcaagtaatagactcacaagagtgaggtcgatcccacaaggactgtagttaattactaacaattaaattcttaaattctatgtggcaacaataataattgaaacgtggagtttaaaatctattggaaaggaaaacaaatgaattaaagtacaatttaacaatgcttttatctgaataaatcctatatggccttataaaccacatgtttctgttgcttgtgcacttggtgtgtgcgtgggcacttgtgcacccacgcatgcctacacaccatgcacaagaattttttcaaccaattttgcctttgtcttattttttttttcttatttcttaagtttcacttttagttttcatccaaataaatcctatatggtcttacaaaccacgggttccattgtttgtgcacctggtggatgacatgaccctgtgcaccatgggcacctacgcaccatgcacgagattttttttttgactaagtttgcctttgttttgttttgttttcttgttttcttaagtttcacttttcgttttcatccaaataaatcctatatggcttacaaaacacaagttaatttttgttgcttgtgcagttcgtgtgtgtctgggcacctgtgcattcatggacgcttgtgcaccatgc

SEQ ID NO: 197991 - DNA, 1326 bp, Cannabis indica
atttggcaaaatttctataaatccagaattgtctatcccgttttcctttgagtgaacccttatacatagaatagagcattgttattgggcaccagtggtccctagcacgtctagacatgtcgctttgcgattggctagcgatactccctaaaagttattatattaaattatatggaacccgatacttagttggaccatagtattgacacataggagggtgctaggcaccactggtgccctttagcatttctcaagaaatagaatggtggttactcagtcatatctcaataacaagttacaagtgattggtggttaatgctcacgttttacgtaccattgtacatttagataagagtaaataactgtttatatttaaaatataaagaagtggtctttgacttggtcagactatgttgtttgtgagcatatgcatagctgagtgtgtaatacgaagggatgcatagctgagtatgtaatacgaggagatcactacaataaatttaccttttaatgatactcttcagtgacccgcacattcgtgggggtcattaaagggttaggagtaatttttagtgaaattctcaattagtctctaaaattcaatgttagtgtcctataatttaggtcactaaaaatttgaggggtcactaaaaactaattcccataattttatatttttttttattataaaggttcaactatagagtcacatcaagagagactagaaaaacgtgtaccaaccgccttgcgcgtcactaaagccacttcacactactatagtgatattttatttttaaattaataattattttattcatttttattaaatgtagggccaaaaaaaatgtaaggtcggcggtttcaaaatgtatgtgttttgttattatataaataatataatagcaaaaaaaacataatacaataaataataaataaataagatgataagaaactcttaaattaacatctcattctctctcaccctttattaccgcctccttctcactctctttgaaaatctctcaagctctcaatgtgaaatggaagatggtctgaaacagtgggtacgaccgccatgaacgaccgtttcttgatgccagtgagtcaaacagaggtcacaaaggcctctccgctacttgatatctcatcctccattcctcatgacccaaaaacatcatctgttctatctccctctggcgattctcgctcagacacgaatcgacccattcaactctctgttcctccatcatcagtttgcttcccccctcttcgacttctttgagatcgtctatctcctcttctgttctttatttttttttctttttt

SEQ ID NO: 197992 - DNA, 1662 bp, Cannabis indica
atcttgctaatttgggatatactagatctaagagcgaaaattaaactttaaaatatagaataaaataataacgtgtaatgataaaactttatgataaatccaaaaagagtacattatatttcaagatctcatataacattttcaaaatattacaagtcattagtacacaccgacctaagtagcaaaagtggagctttacaatgattctcctgttagacataaccctcgtggtctagcttgacctgaacatatacaatgcacttcaaaagccctcgatctcatggctgctcaactatcgacttaccatttcctgaacaatagagcactcgtgagccaagacccaagaagatagtataaacaataatatgaataataattgcaatctcacttaagtgttgatgccagtgcatctattatctatttgacatagacctacgtactactctcaaacatgtatttataataaggccttatgatgatttatctcaattttaaatactaaatctaacctaattatgctttaactgcacaattctttatattaacataagtaatacattattgcattcacattcacatacattctagagtaatagccctagattacataattgctaaatttagggtaataaccttaatctcgatttcctgcataatatataaaaaataacatacatgagcgccattgtgctaactcactgtcttacctggtaatccaagtatgtcgtgattccaaatccccaggtgttaagtaagcgtcggtaatcctagtcacacattcttgggattttacaaatagggttaatcccaaattcattttcatatacgtaatatgaactccagttatagactaacacatagagctcaaaatgagatttctaatgatataaaaaatgtccaaaacagagttcagagtcaaaagttatggcaaaaacaagaaaatgaaaaattgagaaaaacagggccctcgtcgcggtagctccaacctgctggagctcgctgcggcgagcctttttgtggtcgcggcgacggtccctgaacccacacaaaatccaactttttcatgctttcgaatccaaccaaaaatcttaccaaaattcatcaaattattatgcataaactaaatttagctcatcacctatccaatttaacattggtaagaaattgagctcaacaagtagctcaaaaaaacaaatccacaaacacaacttagtatacaacaggaaatcaacatggcacaaaaactatcaagtcttgaaacccataaattcaagacacaaacccaaaaattcaagatgatttctctagaaattcaatatcaaaatccaatccaaagacttccaaacaacatggatgattctagcataaacactatagcacaaccatacaaaaattaccacaattcactagaacgatcaatgctttagattccaggagaacaacgagggatggatagatttatggctaagtaagatccatgcttgccataagttgatcctatggtgaatggcttctaatttcctgcctacttgtgaaaaacgctttttccttcaccaaaacagccatgaatggggaattgtgtgttttgagggtactttgaatcatgcctacatctctttaaggaatgtcctttcaatagagttatattttttagttatcaat

SEQ ID NO: 197993 - DNA, 935 bp, Cannabis indica
tcttggttgctttttcctgaatggtaaaactattagtatcaaacttaactttaatggaatcacctttagttagacaactgacagatactatattgaatttaaatttagaaacatacaggacattatcaagaataaggtgtttagagagggcaacagtgccactttgatttaccacaagaacttcattatttggcaggattaacttgatgctaggaacatgacatatactctgaaacattttgggattattgcatatatgcctagtggcacccgaatccattatccaagatgtatcaaagaattcagatgaagcatgagtgagaattatacctgaattacctgttgatgtaccaggatcagcagtactcatgttagtttgttgcccagcgagtaggttcagaagttgcttatactggtttgcattcagctgaggcaaaagtgtatgagcatcctcggttttccctttgttttcttcactggtttggaactgatttgccatgctttctttctgtttattagtcttgaaaccaggtgggtaaccatgaattttgtaacatctttcaatggtatgcccatggatgttacaatgagtacaaaagggtctccctttcttggtagcttgaggcttttggttttggttatcggatttgttacttttgtctccttgaaaggcaaaagcatggctagtattagggtcatttccagtggtgatattagccttctggttttcttcttgagtgacaagatggaaaacacgatttacatcaggtaaggggtccatcaagagtatgcttccacggacttgagagaagttgtccgaaagtcccataaggaatgacataatgtattccatatggtagtgttcctgcatctttttaattcccccacaagtgcatccattgcatgtacaatttggtctataattggccaattct

SEQ ID NO: 197994 - DNA, 521 bp, Cannabis indica
gaagttttattagtaatttaaaatctggaaaggtattttaatttaaatcacactttttttaaactaatagattagtatgaaatatgtttgaaaaagcacacacgtggcgtccctgagagtcagggcgttacaagatcgatagtctcgaaatgtctttgcaaaagactgaaaccaacgatggggatggcaatctttgcttttccatgtgcttttgtgagcgacaaattgattcacaacaatgcaattattaggttcaaaggaaaacactgtatagtttgacaatggtagtaaaatctgcttgaaattagatatgtttgagtcctatgatcgagttgagtgaaagtttgtggagaaaataatgttgaagttggggtaaaataatgcttgagttgctatgtctgagtcctatgattgtattgagcgatacatttttcatgcttactcaatcacgacaggccaaaaggtaattatagtaactctgaaatgatatttggatgtagagttaacaccaatgcgttctc

SEQ ID NO: 197995 - DNA, 1035 bp, Cannabis indica
accatcttattatctggtataagagttgtttattgtgatattattgcactctagtgagtttttcaatatatatttcgataatatttagtatatgttatagactgaccccctcctaagtttattactaaccttcgcttatgtcggagaaaaatcttggttacaaatttgggaagaacgaacataaaataaatcataactaaacataaaccagaaaaccaaaagacaaaaaccaggattaaagaagcttgtacttatgtataaggaaaggacatgatcatgcttgactttatggaaatcttctcctccttcctctatcctttctttgaattccttaggcatattagatatctttatctcaatgagtgtagaaatgtttcttactccatctggaacactcctcagtgttcagcatttatgaatacacaaataggcaagtttaggcaatgcactcatctccactttccactcttttaagtttttcataaaaataagctgaagcgattcaagtcgagggaaacctcctcttgagcacgccatctcatccccgataaaggtttcatatccaatgacaaggactcttaattttggtagcttttctaatgttggcattggatcatcctcaagtttgagactaaacaactttaacttcattctggtaatcttatcaatggaacaatatttatgttattaaccgtataatttcccactgctaaagaaaaaagactagtgaatgtgagagcttggggattgtataagaatgtgtcaaaattttcattcactgaaatttctaatttattgagacttttcagctggagaaaatcacttacacccagattcttggtatgaatacccactaatataccaccaactgcatcagtgtaaaaatatagatgcctcaactgttctaacttgcacattgaatttggtatattagcactctgtgttgctactctcaaagtctggaggcatctaaattgccaaaagaagatggaatcttttcaatccgccaactaagaatacttaataaccttagat

SEQ ID NO: 197996 - DNA, 1966 bp, Cannabis indica
agacatggtgtactattcaagtgttaaacagtcaaaaggtaacaaataaagtaaaataaaaaagcaaaaatcagaataaatcttttattacgttggattactttctaatttaattcaaacaattttgataacattttgataacacactaaagctaaaagctaaagacaaaagaagaatggactcacataatgtcctagaattttattatgtcaatagtagcttctttcttatcctcactctctataattggctcatcaacaacaatagaaggaaagtcgggatgctcgaagttgcagctttcaactcctgtatcttcttcgaccactggctaaccaccattcaagttaaaatctataatctggagagcatcttcactgaaatgttgctcacatcactttataaaatttgggacttctgtattagggaaagccaactaattcaaggattttgctcctctgttagatgaccaggaattttaggcatcaaagtagaagccatcatagaaggcgacatcaatagtagcttattctttcagttgagtcacctgctctatcaagacttagcttgatctctaagctgagcagtagctaaggtctgttcatcaaacgcaagataagaagactctttagcatctgaagtcttcttctgagaagtagccaagctcttcttcaggctattttcttaaacttagtcaccattagccacttctcgaagagtacacaactcactctcttaagaatcactactctcctttaaagtagtcacctgatcttttgtagtaacacgatgctcctctacagcagtgagcttttcagcaagctcaaccactttcttgtattcgttatccatggtgtaagaataaaaaatacaagattgaaataagaagacaaagttaggtgatggtgaataaaagaaaatcaaatccaagaggaaataagaaaaatagttactctgaagatatcagtgaagcatctttgggtgatgacatgcagaggtttggagctgacaaacttttgcaatggaatgttctcagccttggaaccaatcaaggcatcaccattggcaagaagccaggagccctatgcacgtagttgttccactaaatcaaaacctgagtttagaaaaccattcttagcctcatccaaagaaatatcaatgggagatctcatcagcactagaagttctagacttctccttgcttaagtcttgggtaggaggaacaacatcaacaagtcttttccttattttgagtttactctttgaagtagcagggataccctaacaacttccctaactggaggttcagtttccttcagcactagaattttttgctttgagtttgaaaaagatgccacgacagtcaggtagctcatgttgtctgcaaagaaaaaagataagtggttagtacaacaaaaattaagcaaaacagtaaagttcaacttcacaacatgagcatcagccacctgcccatccttctctggaacagattgagtggaggtgacttctccatcatcttagtctaaaacacatagatattctccctaactattctgggtagtctcaaactgggctatcatctttcaacattgtcttagataagattacagtttcactctagacatcctcttcatcttgttcgagtggcattgtctaagaatcatcaaaaaaatgagtattaacatacacttactggaaatacattatcaaaccaactttgtagagattttttagtggtaaacaaagttctctcatctctctcccatgcatcaatctcaattagcatgacatgtgctctcctcttcatgtcaattagaagagaaggtcttttgaaagagccaaccttttgaaaggttatgtgtcttaaaggaaggactggggtataaagtattcctggtggtagagatcgcaatttcttttggtaatgttttctatgcatgggctgaacttgtgaaagtgatagaagcc

SEQ ID NO: 197997 - DNA, 604 bp, Cannabis indica
atattttaaaaaataaagtagaataacgagtcttgttagctattgcaatatgaatgtgcttcatcaataattattgttttttgatattatattatgggtggaagttgcactaccaaaccaaactcattaaggaaaccaataaatggcaaatgtaacaccacaattcatagatgtcatgggacatacattttccacacaagaaaacaatttcaatgaattctatttaagaggaaactaactaactcaattatattttaatgttttttgtctttttcacacaaattacatctcaaaattgttctaatataatattatatattttttttatagacaaaaaaaaactaatataaagtcttgagtttaacttcttttgtgggcaatagaatgatgatgcttggcttgctatggttgacatgtttttgtttggagaattaataccttggattggctaattaagaaacttagctatcattcatatgaagaaggaagggtataattgtaaatttgtatttaaagaaagaaacaaatagataatgctaaagagtcttttattctgaaactttattggtcaatatactaaatttcacaaaactagaatgtgaag

SEQ ID NO: 197998 - DNA, 712 bp, Cannabis indica
aatgtgaagaatcaaagtcatctaccgcgtggacccattttgttgttggcttgtttcaaagaaagtatccattgaagtttgccctttctttgttataaaattaccagaatgccactgtattggtagggagggtatttatgtcaataaagttattaatttccagcaaaaatacactacaagtccgatagaggttgccatcaaaatggcttgtcaagggaagtgaaactgaagttgaagagtcaaaaaaaaaaaaatattttaagatatataaagcattttagtatcaaggatactaacacttagttaattatcattatccaactgttagttaagtgttatttttacggttacatgttggttattgctgtgtatgcttcttgtatatatactcctttttttgtaatcaacattttaaggaataatgcaatcaattttttttcaatctctctttcactctatttatctcatctctctctttctgttattatcgttacatagtatcagagcttgaagtccttcaacaataaagagttcaacaaccaatatcgaaaatgcatactcaaatacattactggtacattggactatggcttacacatatacaaccagcaccagattactcacttgaagcttttttgtgatgttgattgagcatcgaatcctaatgacaagagattcacatcaggatattacatctattttggaggaaatc

SEQ ID NO: 197999 - DNA, 517 bp, Cannabis indica
cccacgtcggagagaccacgacaatcacaaatgtcgtaggaccacacgaccatcccacgagtgcccagcttgctcctcctcctccaccatggacgaccctaaaaacacgcaataatgggtaagtgttgtttaagtaatttattaaacatttagaaaattatggcaagatctgattttctagtgtaatttgggtattaatttaaattttgatacattgtcggtatgttattgatgaattctcgatatatagtataccaaggtcagggatgatcatttttaatactttctgcattgtttttagataggtttttgattgtcagcttatttttttttttacttgattttttaatgtaattttttgttacgtttttgacatgttttcaatgccttttagatagtttcttgatagttcactagaaactgtgttgtgatattttttttatatatattttcgatgattttttgataggttcttgatggtttttcgataggtttattataaatgaaaactctctat

SEQ ID NO: 198000 - DNA, 1157 bp, Cannabis indica
agacgttatttttttataaaaatattatattattacgtttaatgaatttttttatatatttttacagtttcccgtaaaaacaacacgaaaacaacaagaaaattacataaaagtaacataaaaataacatcaaaacaattacaaaaaataacatacctataacaaaaaatcaacaacaaattaacatgaatacaagataaaaaaactgtattttctgtaaataaaaataaaaaaaatcaataaaaatagtttaaaattctcgtgaatccgtatctttgttaatttttttattatttttgtgtatttgtgaaattatcctaaaaagaaaatacaatttcaatctttgaaatcttattttcattctacacctttttgtcatgccctttttccctctctcaaacatacccttctccttttcattttctctgatatattttctctttttcattattttcctctcagccaaacataaccccaaaccaaacccaaagtaactcaagtgtcagctggtacgacttttttcgtttaacaaaaaactatagtcttataaattaatatctcatcaattttgcaacccactcactacatattatataatagaaaaataggggaattggccatgaaatgtgtgcatatatatcatatcctaaataaaaaaacaaaaaaaaaaaaagaaaacgaatgacaatgtgagtgagggaataggaacgattgaggtaaaggtcagagaaagctgaggcaacagtatggaggagttgttgtttgtttctcgggaaaatgccatttgaggaattgggcagcaaaaacagaaagcctttccctccttatctgcttcccaaaagccagctcgctctctcttcattgccctatggcatgtagtgtgtgacgaaatataacatataattccttcctacataatttaatatctccaaaatttgtcctactttttcaaacattttttggctttaatttctcctaaaaaaaaatgaaaaaacacaattttagcttgcttctgtattatttttaataatcaatatattaatataaaggaaagcacaaagagtgtctatgtgtccgttttataattttttcttttccattttttccttttttttaactacattttcctattttgtttgaaaactaaatcatatgtg

SEQ ID NO: 198001 - DNA, 731 bp, Cannabis indica
ttatattttttgtttgaaaattttaatttgtaaaactgtaaagataaaagttaggtcatacaactgtaaataaaacctttataaaagaatagggagtttttttttttttttttacattttaaaacagtttttttgtatttatatagaaatatacggatcaacctaaatcgcaatccaaatccacatatatagcaacccttgcagcaaccactggagcaaccaaactgtaaaaaataaaaaataatattaaaaaatggtatatggggtgattcccctaaaataactgcaaataatatatatatttaaataaaaaaaaaaacccttgttattagtaccagtaatgtctagcacttcctaggtgacgtcttgcgattggttagcaatactctataaaagttaatatattaaattatatggtaccaaatacttgattaaacttataacaatattatactttaagagaaatattaaagagcacccatggtccctaacactcttatgatatgtaatatcgctaaaaaaataatatatgttcaaagatttataaaaggacaaatttatattctatttatattctttaatgttttatgttttgttggtgcaatttaatatcaagtctcacttattttaatttaataaaggtactaggcactttggtgcccatagttaggggtgtttgcagtacgggtggtgcgagttgtagtctttttttttcaaaccaaactgcaacc

SEQ ID NO: 198002 - DNA, 1069 bp, Cannabis indica
ctttgctttcaaaaatatataatttaatgccttctaagctctattattagcacctaatgccaccacatctcaatttataatgagaaaaacacttcactttcaatcaacaacctcttttggattatcataacttgacttatcatgcaccaaaattttactttgtattaattaattaccagccataatttacttgaaactacataaacgtgtgtttaaataccacgtatgatcattgatttattcaacctttatttagatttatctcactctgtttttttttagtcttcatatatattttactactcaatagaaatttggtagcataactataatatgaggctttaataatgtggggtactacttatattaatgtgtgatgtttacatgtcgattcataatttagtgacctcccaaaaaaaaaaaagaattataaaaaaataatgttcataatctaaattatgtatgaaattttggtgatgcataaataaatatataatttaaaatttaaataaatactctacatgtcattcattgttaatggaaatattactatttgagctatttatgttacaaacccagattaatttaaacactttgctcaacaataacacaagaccagtaacaatatagtacatgtcaaccttatatagtatcacaccaccaaaaaaaaaaaagaactagctagttagtctattcggaattagacgtcatttctttctatttttaaatattaaaaatgacaaatgagttttaatacttggataaattatgtgtttgttgtggttaaatttatcaaaattaatccttcttgtagttttaatgagatattttaaacataattattttaattataattttgtgggtttctcatctcaacaattttatgttccatccttgttgacgaggcaatattttttattttccattctacattcacgactaatttttttgtttggtatgaatcgtatgataaactgaagatggatgaattaagagatgtgtaataaagtaatcttttctagtctattttgcttttggtaataagaatataagataagagaaggaatgg

SEQ ID NO: 198003 - DNA, 740 bp, Cannabis indica
aataaataataaaagaaaaggaaaaaggaacctgcaatgtccgagttgcaaactcaactccaatggtagacttggactcaagacaaaactcatttctggtaaacctagagagtatgttagatttgccaacacctgaatctccaatcaacacaatcttaaacaggtagtcgtattcgtgatccaccttgtacgccatatctcctcctaacccacacccaaacctgtatatataatacatccattgtaaaaatcttgatatataatgaaaaatatatgaccatgttgtctacaagctaggaataatgttctttttaaataaaaaaaagccagagggtgttttaagagcctcatgttgttgaaatttcatgtatgtcaccaatataagggaagcatgaaaaagtaattaaagtccttaacaaattaaaataataacttaccatataatgaaagttttgaggtgattatctataccactggaaatatgatgaacatctacatcaataataagtttgaaatttctgttttaatctgggtaatgaaatgtgtttttgggaacaagcttgacaaaaaaaaaaaaacgtgaataggaaagtaaaaattaagaagagaggaaaaagaaaattcattgttttccaaagccaatgagaagaaacagtcttgcaaaagaaaaggcactcaaaacggaaaaaatattctaggttcgcggactacgtaccaggtcaaatagatacatacattta

SEQ ID NO: 198004 - DNA, 950 bp, Cannabis indica
ttaatttaagaaaattacacttaatatttgattttaaattattttcacttaaatcatattgcattctagctttgtttgttaaatggataataatttttgtgcaggaacgatttattccttagtgatgaatggtaaaatacaacaacatttcaaaagggctaagggtttgagactgagtgatccaatatctccttactatttgttctgtgatggaatgtctaactcagcttcttattcaacaacctaagcttatggagtttagctatcaccacatgtataaaaatctaaaatagctaagcctacggagtttagctatcaccacatgtatatggctcaatacttttacatttaatctatctcatgcgtctttgctccatctagataagtgtgtggatcgaaagcccgctagggatatgaccctgataccatgttgagaatcataggactctatctcaaaatcaattggcaatgagtggagtattccatgtttttatatatgctcaatacttttacatttaatccatatgtgacaatgttctccaacagatggtttataaaaatcttcaatattttaagtttataatcactatggacaactttaaatgactttcaagatttatgttttagactttgaaatttagatgactgtaatatttaaactttgagtttttttttttatttgaacttttaactttatattttcctaagtatgaatttaattatattaatatttatttttttttaatttgaaataagggttataacccaatccaactcaacccataatgtatgaggtgggttgtataaaaaaaatgttaatgggttgaaattcttgatgtaattggattagcctactaaaatataagagaaattgaagaatacttttttaatacataaatcaaatttacatttaaataaaatttaattcaaatatacatctttttatgagt

SEQ ID NO: 198005 - DNA, 1401 bp, Cannabis indica
gttaataaagatgcattttccattaaaaaaaaaataggtttgttggtatttttttttttttaaaaaaaaaaatgcatttttcacaaatgaaaacaaaaaaacctattgaagcttctacgacctacctcttaaaaaaaaaaaggtacattgttgtagggtggatggagggtgttatgtgggggtatttgcccatctcaacttcttataaattaatttttgtacatataattttatatgtttttatttttacccttataaaattaacaaccgaattttatttgcactctaaaattttataaaatacactttataaaaataaataaaaatatatgtgaattttttttagaaaaaataaaaaaaaattatgcatgattttttttatataaaaatataaaaaaaaattaaaataaatattgaaattaacacaaaataatatgagaaaaaaaattaagaaaaacataatgagtgattttaaaaattattttaagtttatttttttaaaatattaaagtataacttttatttttgtgaaatttcttattatcccatttaattttattttcatctcccataatctcatttttatccctactaactttacattttttatttttatattcacatattctatttttatctctataaaaatgatattcttcattaatagtcttttaataaaaaaaaaaattaatctctactgaaaaataggactagtttcgccactgtattaatgtattggacactcaaggaaaaaaattagtctaacatttttcataatttttttaagtaggtacgttataattatttaaaatatacataaaaaaatattaaaaaattaaaaataatttataatataaaaattggtatttaacaaactactaaaacattaatttcttttttttgaaattttttttaaaatttaactttttttttatgttgagagtacaaaccatataattttagtatttaaaaaaaattgaatataatttgtttcgctatgaaaatatgactttttttttcttctttgaaagcccttttatataagagttttgtaacgtgggaaccggacattgtgtaaagaacaagtgtgacagaacagaagaaccaaacccaaaacactctctcagaacaccaatccttcacttcacacttcaaacttcaaaccaataaaataaaattaataaaaagtcttggatccactgcacgtacggatcttgctcgggtcccacaacacatatccaagtcagctaatttgtctttatttataataacatttaatactcaaaataaaataataattaataaaataaccaccctttcgttttctataagataaacattgtcagtcattaataatttttttctttttcctctttttttttaaaaaaaaaattaataaat

SEQ ID NO: 198006 - DNA, 697 bp, Cannabis indica
gtgaaactatatattataatttcgatatctggttcttcagagcctgttgtacttgtatacaagtaaaactttaacataatcttgaaccttaaggaaactaagcgcagagctacaaataccacaatgtaaaaaaatcaagataaaagccaaaacccatcactaatgcattgtcataatcactccactttacaagcatatgaagctcaatcgattaattcatcaaagaaaacaagtaaagcatttaactttccggcaattacaaagcaaacaaacacaatacaaaaacaaagaaagagactctaagctggtacctcacctcaagagcgtgattatagcgtttgtaatgcctgagttcgttgatgataccaactaggtcaaacctattgaccttttgaccttcttcgatccactggtcgagaaccggaagaatggaaaccgaatgtagattaggagatattctacggtacagagaacgcattttaccatcgcggaaacgatcgtcaatagttgcagctgtggtggtggcggtagagtagagagaaagagttaaaacgtttcgagttctgaaacgggagtgccatttcagtgcagagttgaggtcagaggcaaagctcttcattggtgactgacgagtgacgacgacggcggaagaagaaagatcatgggccggtgcggacaacagaacaaactcttgcca

SEQ ID NO: 198007 - DNA, 2246 bp, Cannabis indica
aaactagaaagtaagagaaagtataaaaacaatgggagcgaaataaaacaagacagaaaaaaggactaacctgctgcctgagataataactcctttgtaccaggtttttaaaagtccctttattgagtaattcccaatcacttgactcaaaggtttgatagcgctgcaaattattggtagcatgtagcgagcagagttgcaagccttctgtgccagcttcaatgggcaaggggcaggagggctcgaggaagaccatctctaggcaagaaccagagaatttcacctggggaatagaccctaggggttattcactagcggtcgccacagtaggtgcagccttttctggagattttgcagactcgatggtgaaatgggttgaagatttcttcttatttgcagttgtttttgtctttgggttctttggtaaaagctgaggcctcattcgcctatgctgattgtttttcggatcttttgtttgcaagattagggctgagcatgtcttccaaatcaagatccaggtgtatgaggcaaaagagatacatcaaatacttactcagaaatagataataggaaaatgggaaataaactgccacttaaaagaagttaccataattatcagaagatgacgaggaagaactatggtaattactaaaatccctagacactatgatcatgtatatatcataaggatttattagagataaatcccaatttaaagtctggatggcatgccctatccaagtttgtaccatactccttgcaaatcccgtaatttgaactagtgcaactaagctggacatggaatcaacggtaccaactatcaaacctatgggttatgcgatctatatagaagttgtcccatttataaaaattatattggctatccctaaaggttactagggatgtacgtttagccctaagtacggtgggtgacaatccacattgattacctcaggatgcttcttcttcagcatcccgaggggttactttcttgaggtaatggacgcggagcaaggtaatcctgactatctttatcggctgggaatgggtccttctcccacgaagagtacttcagaaccttgtagtcataagtgaactgacccgagccaaggaggttaacagtcctcaaattggcctcgttcaaaaggaaatctattgatcgcaattcgaaaggaagacccagcaagattttgtggcgctcaacgatcttaggggtggggattggtcttttggtgaccgctgtcaacacaattagagtaataagtaagcgatctcaaagtcataaatataaaaagaactcaaaagcaagttgttttgagacaaaaattacttacatataatgcgaaacgcagttgtgttgacaggagaaagaccagtagtccaaaaaagtcatccttgaacttggtcttttttggtaacctcacattatcctctaattatttgtgtgggtaccaaggtaataaaaacctctagaaccacgtttcgttgcgggaacagctttgacggagtaaaaattaactatctcaaggggagtgggacactcctaacctaaaatatggtacaaaacttttaggcctgctaaaattttgtaggaacttggaatcaattgaaaatgggcaactccaagataaacctaagttcactccttaaagccctagaaaatacacaaaaacaaaatcgaaaaatacccaaaccaaaaacagtagaagaagatgtaatcagaagcaaaaataaaagtaccaactcaggaaaaagagaataacagagagttaaaaataaaccacttactatatttttgaagatttcttggcagtgtataacttctcgattgggatcgtgatgaatgtgatgatgggctctgagaatttctaagattaaaaatgaaatttgataaaatacgcagaaaatatgtcaaagacaatgagggcatgcaaggtaatgaaagactaagatgagtttttgcagaaaagcttaaaggtttggaaggtagaaaaggaaaataggtgttttcccttgggttttatactttaagaatgatcaccgtcagaatgaaagaataaagatctaatagatgggaacaagggagaattgaaaaagatggacatttaatgctaatgatgtgcctcgaaatcatgaatcgccaaaactcaaagtatgccattttttcaaactgtgattaagataaacatacccttgtaatactttaaaacgctctgtttattaaaaaggaactttttaaggggcaa

SEQ ID NO: 198008 - DNA, 2388 bp, Cannabis indica
ggggggggggggtcgacatgcgagtcgtggtgtatttgtgtgagtgtgtgcatgagtgtgttgcatgagagtcgtggtgaagtgtacgtatgttgaggatgtaaggcaaaattcaaatatgcatattgacaagaatgtcattggagtaggaatcaaaggacaaggcatgcaacagaaacaacacacctacaaggtctagggaaccgattaagggtactctacaaccaccacctctgcgacctgggaccacctgacactagataaaggtacgaagcgtaagaccacctcctgcacctgtggtttgcaacccgaaagcgacaacttgtctatttgggaccaccatgtaactcaggccattagagcctataaataccccattctcaagtcagagaaggcagatacatcacctaaagccacttgaaggtgtgcccaagacgaggatgacattgaccctcgttttgggaaaattgactcgggagttggtctgaccgaggaactcagagaacttcccatcaacacatcggacccgaccaaggttgttatgattggaacaaacctgacggaagtcttgagtgagatgcgcatggattgcctcagaagaaatcaagacatcttcgcttggtcgcatgaggacatgatcgagatcgacccccaggtcatctgtcatgccctcaacatagacaagctaaactttaagcttatacaacagaaatgcaagctccttgacaaagagcattccaaagctctcaaggaagaagttgaaagactacaggagaacaacttcattagggagaatttctacccggtctaggaatctaaccctattctggtgcctaaacctaatggaaagtggaggacctacgtcgacttcaccgacctcaacaaagcatgccttaaagattgtttcccactaccaagaattgatcaactggtggatgcggcaatcggccatgaactccttacattcatggatgcatatttcagttacaaccaaatcagcatgcacgcaccagacaaagagcacacgagcctccaaactgatattgggctttattgctacaaagtaatgcccttcatactcaagaatataggtgcaacatatcaaagactagtcaaccgtgtgttccacaacaaaattaggaacaatatggaaggttacgtctatgatatgttggttgagtcgaaaagattcgaagactgcatcaaagatctaaagaaatgcttcaacatcctacgggattatcaaatgaagctcaaccctctaaaatgtgccttcggcgtccaatcagtaaatgggtatttaattatggaccattaaatttaatcaaatggatgatatttaaagttattaataatttttttaaaattaatatttttgttttgtacctactacctgatgacatggcagtcatcttatttttcaaatctctttttttttccatttatatattataatttaaaaaatattaatttatatcctttttagagtttatcatattgggtgattctttgtataattccatgaatttttagaattatggtcttcatttagccacaagaaatagttttgggtacaacggacctcccattcggtatgaacaacttagtttaatttcttttctttattttcttttatcattgtgctccttgattgttgaactgggcttatttcatttctttcaattcatgcagaagagaaaaatcgagggttaaactgaacaaaatttataaagtatttcttttatgttcttgatacacaagataattgaaaatggttgattgatataattcttaacaacataacataaaatggatgatacacgtatttcttttataaagtatttcttttaaaagttgtgacacacatagaatggatgatatataacatagattaacttaaattgggtgaattaatactttttagtatattagtggtataaactattgattactatattttgccaactcattactatgtataatttattgataatgttttttagaaatttttatcaataaattttgacacataaacttgcctaaaatataatcacaatttgtaattttgtactattaacaatttcacattactatatttacttatttaaacttttgttttctaatataattgtactatctttctctaataccactaaatgtattaatgattattattttttaaataaagttatttgactaaattattcgagttttaaaattgattttatttatactttcttatttaatgttatttagatttttttttagatttgattatttttagatttgttttttggacaattctgagctctctcatatttttgttgctcaaataagttgacatgcctgatgttcacaaatacataggcattgcagctcacttttgtg

SEQ ID NO: 198009 - DNA, 1354 bp, Cannabis indica
tatatatatatatatatgcattgagctttatttgaccctccacattacatatcatatattttcttttgtaattagtacataaatatgtttggtatacaaattccaattcttgatatttatgtactatatatataatggttactatttaataattacattaaaaatacttataataattacattgtttttaaaacttactataacaaattactaatataggtatttttttttcactcaaattaattatatacttaaaataaaaaaaattactccatatactatttttaatttttttttctttcaaatttacggtttgagatgctccagtaatttcttcggttatttatatgtagattgctatacgaattttatttgcaatttcgattgctccattaattactataggggttttgtgtggaattccgtaaaaatacataaaagaaattattttaaagtgtaaaaataaaataaaaaaaatcctaaaataaattaattttttaattaaaatatttaataaggtatttttcaccactaatgtttataaatatttttttattcataagaaaataagtaaaatcaggttagtattatgttacacacaatttattaattatttttttgtctttcaaaaaaaaattattaattatttttattataaattaattacaatcatttaacaataatttaaaataaatataactaccataattacatatttgatttgatgtaactattaaaactccccttgtaatatatattcaatgttatgattaatttaatactttattaccatttttttaaaggatggtgacaattttctgtctaaattaataacaatacatatatatttatttagaaatgtagcattacaaagtaaaataaatactcttattactattatgtacattaattaaaaagtattattataaaagctcttcttattatatccattgaaacccttatgatttttaagtgattatattatacgatatataaatgtttaaaaatatacatacatgtttagcacattgaaacttagtgtacaaattataaatatattaatttacgagtacaatagtaataattcaacttaagatgtttttggctatatatacatatttgtctaaaaatttcatataaattacacatcaccacgtgcaaaaccaatattggtcataaagtgaattataccctaaaacttaagagaaagacactcctaggattcttaagctaaatatagcaaaaggaatctttttcttttcttttcttttcactcttactctttaccctattctcactttctctctcatatgaaatatatttcattcaacaaaaagaaaaagatttttttttt

SEQ ID NO: 198010 - DNA, 977 bp, Cannabis indica
cactctaaacaaattaaataaataaatggacatatatattcagacaatgaaataaaggtaataagtaagtgacaagactaaaacacaattacaatgaaaaaaaatggtggtattttcaatgttaatttccttcggtttctccactttagttgtctctttcaagtaatggaagtatcaataaatagcaccttctaattagtaagaagaacatattatatatcactagtaatttattaaagcaaaaagagaatttcaagaaaaaatcttagtgtgatcatcatggcagatccaaagcaaggaggagtagtgaagaaaggtcatgaagaagggttgaaattggcagtttctctattggaagagtttggattaccaatggggcttttgcctcttgctgatgtaattgaagtagggtttgtgagaagcactggctacatgtggattcaacagaagaagaaagtagagcacaacttcaaaatcattagcaaacttgtgagctatgacactgagatcaatggctttgttggaccaaagaaaattaagaagctcaagggtgttaaggcaaaagagctcatgttatggccaccggttagtgagatcgtcgtcgatgatcccgccacaggcaaaattcactttaagagctttgctgggatcaccaaaactttcccagttgaggcttttgctgctggacagtaaattatgcatgcatgcatctatatatatatatatgagtataataagttctaatactcatattatataaccaacacatgatgctctaaaagtaatattttcttcatttgtcttatttttagtttatttgcattatcagttttctatttcttttttcttttctttctttaaaacattgtaagggggttggaagttctcatatgtttcaaaataaatcaagagctttctatttaaactttgacactagtgattggttttgtggaaatgtgagatcaaagaatatatac

SEQ ID NO: 198011 - DNA, 1954 bp, Cannabis indica
agcaaagagtacattaaaaaaaattgaaattaacaataacaacaacaacaaaaacaacaataatgataatacaaccttaatcattgtagaatttaataatcaatagggagttcgtgttaaattagtgaggtatcctacccattatcagattctgcccaaaaagtcaaagcatcaaacaaaactaatgagggaacgatacattttaaggcagctccattattatatttctcaccggccaagactattaatacctcacttttcttttctttctttttctgcatcgcatatagacacaaagcaagcaaacaaaacgattgaacagagtcattcatatacatgccactttagcctttacaacgcattgtttatcatatggtcatattaacaaatttttctaggcaaaatttccaactacaattgacaaggataataaggcttgagaggcagtagaaagatcctatgtacatttgagttcatagaaaatgaggagaaagatgcattgaatgaaatgatatggacgaaagttccttcttccagcattatgtagttgtatctcagctctggtccactaagacatcataaaagtatggtcatcttcagctggtaggtgagcaattgttgtctatatagttcttttataacactgtcaagcaaaagatttgaatgttgtccattagggaaaccgaagggtgaatactaaaattatttaaaattctgagcatgaacactctcaattctaaacaacacaggtccagaaaactaaaataggtgttgtttggttgtaagtaatgaaatggaataaaaagaaaataatttttattctattcctttgtttgattgcattttaaagtattggtagaatgcctattctattttgaaattgaaggaatgatcattccaatgtaacataaaaaaaattaataatttttttatcaatttttcatttacattataaacttgattttattctatttctattcttattcccattgtcatttctatttcgatattttcattccttccaacctcatgggtttagtgttggtagcaatactacttcatgctttatgagtcatgatgatagttccaaacaaccaagtagcaagttcataatccacagaaaaagaatcagcagttagaagataaacataagaagagatgataccgggttcatcataatttaccctctccagtagaaaagatgttgtggaaaatggctgtgggaaaatacaagagtgatgtgagcaacaaaaatccttggaaagaacccaataattctacaaagaaaccagatccaactgcttgcacgattacgaaaaatgttccagcagtatttgacagtcctacggggaaaagaaaaggttgttgcaagttaaaaacttcagttttgtcatcaagttcggtattaaaatcaagaaaaaggtttattactattatatatacttgcttttattgctatccaacatagtaattgcatagaaacaataatgcaaaactatgctgttcaaaatgtaaatcacgaggttataaaaaaaataaaatttatagcatctcattaatatgttgtcatgaatactaccatgcaaaacaccaaaatattgtggagtgatctcctggaaacagaaacaaatatcaaaaatggtctgacaaagaagagttaattcaaagaagccaagttaaggtgatctggtcaaacctggagattcacaagaaatcctgaatgaccagaagatttcaatccaacagctaatgtgaaccatgcagatgcattcactggactttttgctgtagttaatcccacaagagcaacttaggtaccaaaaaaaccaattgactgcagagaaagcaattggatcttttgattattctatgcatgattaaaatattttaagattaatgtttttatgactaagaaagatatggtagtgtgctagtgctaaggttttaccttaat

SEQ ID NO: 198012 - DNA, 1626 bp, Cannabis indica
ggacttgaagagccagttttagagcatgaaacatttgcatttgcctccatttcatacgattccaaattttcgacaatcctctttgataaggtagccacaacattaccatgggcatttcgaacaaaggcaccaacacccatgatacttcgactggcatccaaagctacgtccacatacgttcagtttgaggtcgcctgaagttggttgtagccacggttgagttgcaaccggcagcagagaagaggccgagggagagacactttgggctacggttactgtaggtatgtatttgaggttggcatattagaaattattaacaaatgttgcagcaaaatcaaaaagttgtgttgctatctttgctttcccgccatggatgattttgttttgttccgtccaaatacaccacatggtacatataatggtttccatttcagcctttgtgtgcagtgtagatagatggacaagggagtcccctttagtcatagaggatgaaagattccaatcaaaagacaaacccaaactacgccaaactgaacgagcatacttacaaccaaacattgcatgtctgattgactcccaagctcgtcgacaaatagagcaagtagaatcagttataaccttattccttctaacaagatttgtggccacaggtagagcatcatgaatcacccgccaagcaaatatttagattttttgtggcaaggtaagagaccagaaaaaaccccatcatgatgatgctaaaacagaagtggaggagagactagcattttcaatagaatcaaccaagtggaagactgatttaacagtgtagtgcctagagttgtcatgatgccaaataaggatatccagatttgagaagaaactcaatggtatagtaagaatcctttccacatcgagagttgtaaaatattattgtagtagcggtagattccattggcgctcatcaattatcaaatttgcaactacaccattttctggccctacataagaaagagggtgaaaatttttgtgacctggaatccatggagccaaaccacaaaaaactgatctcccatcaccaattttccaacgtaggcccgtttccaacaactcacgatcccataagataccttgccaagtcatagatggagagtgtcctgcttgtgcctataggaaagtattctgaggatggtatcagcacttaagcagcttgttgagaagagaatttggattttgcaaaagccgccaagcttgctttgccaaaagtgcttggttgaagtgaacaaaagactgaaaacccataccacctgaagctttagatttacatagcaaattccagttatgccagtgaattctcgtgacattctcattagattcccaccaaaaattcgacatcatagattctagttacttataaaagattaccggtaaccgaaaacagctcatggcatacgttggaatagattgtaccaccgcttttaagagcacttccttaccccctgctaagaagggcttctcattccaattgtgcataaggcgccaaattttttctttgattccactaaagagcatctttttatcttttccagagtatgaaggcaatccaaggtaagtctcatgacactcacaaattgacatgtcaagcta

SEQ ID NO: 198013 - DNA, 879 bp, Cannabis indica
ttatggtgatcaggttggagggacaccggtttcaagaagcgaaataaaagattttaattattggttgaccttggggtatgtggaccctttgaagaggcagtgatcgttttttacttggtctaacaaccaagggtgtcatgaccgaatctactctagaattgattatgctttcaagaatgaggattgggtggatttatttcctaattctatagctactttcagttgggaagaggtttctgatcattgtgctatagtcatctcttcaacagtaatggtggagatagtagtgaaaccttttaaattttttaactactagactggccatggggagtttaaaccagtggttagggaaaactggcagaaactagtgcatgctactggtcttttaggcatttagtgtaaactggctagacttaaagatgtgctgaaggtgtttagttcttctaggattggaagtgtggagactaactttcaaaaagctcgagataggtttattgaagctaaaatgcaagctcagaacaatccaggagatgagatctttgtgaatgcagagatgattgctgcttcagattttgtgcttcatgaaaaaatgctgaaaagtatgcttgtttaaaggagcaaagtcaattggctgaaccaaggagatgggaatacaacttacttctttgcttgtatcaagaagagaagggaggagaataaaatagcaagttacatggatatccaggggaacattgttgatagctatcctgaggtggtaaagcactatattgatcactttaagagctacatgggcagcaccaatgatgttggcaatcaacttaaaagtagagtgttggatgttgggaatcggttaactctctcacagcaattgaagttttc

SEQ ID NO: 198014 - DNA, 1657 bp, Cannabis indica
ttttttttttaaaaaaaataacgagttaatcgggtcaatccgttgacccagccaacctgaactcgagagcctgaaacccccgaacacaaagccttatcacgggtaggggtcgggtacacttttttgaacccgaaacccacaaatccaaatcccagtcaacccgcccgatgtttaacgctagtataaatcatatacaaacatcttgttcatatgtgaagtaagtgtggtagaaaggcaacgatttagtaaatgcatctgcaatttgtaattaagttgttggagataagaataagctgaataatagagttgttagtcttgtcacgaatgaagtgacaatcgagttcgatatgtttggttcactcatgaaatgtaggactgttagcaatgtgtatggctaactaattatcatagtagatgaaatcaggtttggtttcgggaagatgcaagtctgtgaggagatactaaatccatgttatctcacttgtcgttcctgcaagtgctttgtactatgcttcaacagagcttttggatatagtgggttatttcttagttttccaagagactaggcaatctcctatgaacatacagaagcctgtggttgaatgtcttgtgatggggcaagaagcccagtctaagttagagaaattctagagatgtgatgagggatttgtcgaatagagaagatcttgtcctggactctctttgaggtatcgaaacaagtggttaagtgcctaaatgtgatgcttcgaggactagacatgaatcgtttgagacaattcacaatatatatatgtgatgtcaggtctagataaggttaggtatagtagcttgccaatgagttggcggtatgagaaagggttggtgaggggttctccttgttgatcatttggtttgtccaaggatctataggcattttagcgagtttgctacctgcataacctgtgtcttcgagcaattgaatggtgtacttgtcttgagaaagaaataaaccatctttgcccttggatatctcaaatccaagaaagtatcgtagcggtccgagagcctggagtttaaacttttggtgtagagactcttagagttgatgtaatgcagcaagattaggtccagttattacaatgtcgtcgacataaacaagtagtgttatgaattggtcatctatgcctcgtgtgaaaagagtactgtagtcgaattgggattgcttgaaaccttcttgaagcaaggcacccgagagctttttgtaccactatcttgatgattgacgaagtccatatattgacttgtgaagtttgtataccaaattagtatctatagaggaagaagaatgcaaagttaaacctggtgataatttcaaatagacctcttcattgaggtccttagttataaacgcattgttaatgttaatttgtaacatacgccacagtttcattgtagagacagaaagtagcaacttaaatgaccattttggccacgagagagaaagtgtcaaagaagtcaagtccctcttcttgtgtatgtccttgagtcacaaatcgagctttgtatctttctatggacccgtcattgttaaatatgattttatacatccaatggcaacctattgcttttttgcatggtgggaaaggcataataaaccatgttttcactacaagaaaag

SEQ ID NO: 198015 - DNA, 1097 bp, Cannabis indica
atatattcaaattaatttaaaataaataataattttattaaatttaacagaatatattatattgttaaaatactttgttaaaaaaatagttaaatagtcacattttatatataaaaataataaagataaaatatatgtatatattgttgaatttaaagtgagattatactatttagtatgggacattaaattaaaaataaaataatatctcatctgtattataaatgtttatattttataagaattatttcataaatacacaataataataaaaaaattacaaaaaaacgattttatggaattttaaatatttttacaatttttttttattttatttacagaaaattttatattgtactcaagttaatttattgttaattttttgttatctgaatgttattttttattgttattttgatgttatttagatgttattttcatgttactttttatgtagttcttttattgttttcgtgttgtttgtataaaaaattttaaaaatatatataaaaaaaatctttaaacgtaaaaatgtaatttttttataaaaataataccttataaattatccttattttataccaaggttctactatgtttccctatgtatatatgcacatatatatgaaatctgtatattggccttttgtttcatgcatagtgattggaagttaatttataagattaaattggaataaattattatacatatccccactactgaagaaaaaaaagaatataaaacaagagtgcaatcataaagtttgattaagaaataatatttgtatatggggagcataactgaagaataaagatcgaatgttgacttaaggggaacacagagtggaaaatgaacagaattgagagaagtggtgaggaatctccatatctaaacgagtgaagtgtgtttagagtcatgtttcttgttgtacaaggcaaacatttgggtccccattaccctcctcctgatctgtgtctagtaaactgggatgacttactagtgttaaatgtaactccgataacaaatttccaccaaattttgatgtgtggaaaaggaaaatgtattattttccaagcaaaaacgtccaaaagtacag

SEQ ID NO: 198016 - DNA, 672 bp, Cannabis indica
aatataatatgaataagtagaatgcacacctttgtcaccctgtcactgttgaatccattttcatttaccaaaaaggcaatcaacccctgtaaaaacaagatgacaacttaaaactaatttaattacaattaaaaaagttgatatttattaacatatatgatacacacccaaaagaaaattaaaaaaaaaatgtacaaattacttcttcatctggagcagtccacttaatctcaggttcttcttcattactatagacgttcggctctttaaaaagctgcctagcctcttgatatggccaattatctggtatttggtacctgaataagtaataaaattaattgctgaacgggaacagtgatgagactaaatataaagtacaccgctctacaaactaagaaggaatattctccatctgctgttaactaaaaaaaaaaaaaaaaaaaaaaaaaaaaaaagaactctcagtaagcttgcaaaattgtatatttctttcacatgtatattttgcaattgtcaatgataagcagaatggtaacaaacctgcatatgccaacttgctaaaccatttctatagaataatattctaacatacaagtatcgtcatttttattactaatcgctttgataacaataattatattcaaaagataaaacaaaataatgattttaagt

SEQ ID NO: 198017 - DNA, 624 bp, Cannabis indica
ataagataatttattctaacaagtaaagtaacaactcttgtttggttatagattagtgacactagttttttctacatgccccctggttttagacaaaagtgccctgaaaaccatggtttaagacaaaagtgccctaaaaacaatgggtattgggtagcagtagcactttacttaacttgcaacttgcaaagtcatgaatttgagatttgattcatgagattggaacacctgttatgcatttatcagtctccttcattaccaaatcaccaaaatagtgtcgaaaatgttgaacaaaagtaatacttacttttattattacaaactaggtgcagtccttagtatatttttagttgtctaatcttatggatgttgttcaatgaacaatataattttaagggtaaatggcggcaaaacttctaaaattttcgtttcggtttcacttaactcccaaagtccaaatttgtgcgagataacccctaaaaccactatactgttagtgaaaacacacatccgtccccctgaccctattatttgcctacgtggctcagtccaagtatgcaatagcttgtcatattattaattattatgacgtggaattttaaaaaaaaaaaggttttttttttt

SEQ ID NO: 198018 - DNA, 551 bp, Cannabis indica
ctaaataaaaaaaaaatgtaactgaaacaactctttaaaaagtgtcttataaaacatcattaaatttgtttgcatatcataatgtataattatttttttttaaaaaaaaaatcattcaacttttgtgaaaaataaacatgaaagacttaattggtactatattaatagaactcaatgtttaattgctatattattttttttctcaaactataattcaagtggtatttatgttaaaactctctattaaataatgataaaaatagaaaatgccatgctatatacatcttaatagtttaataatatcgattaaaccctacaaatttgtacgttcaatgaacttaataattcattcgtaccaacttggctttattgaatttatataaagtggaataaataaacatatatatatatatataatattaaatgtctttcataagttattttgttttgaattatataaatatggtttacaatcttttaatatattgcatacataatctttatattatattaagagatatttacggatgaattttttttaatatttataa

SEQ ID NO: 198019 - DNA, 847 bp, Cannabis indica
tttacttatttttttttttgttgtaatttgtaacgcttaaattgttttgtgtatttattttcataatattttattttattttattttattttattatttgacagtatttttgttttagttttaaattgaattatttttaaatttaattgctgactgaattagattgaatttgaagaaaaatattatcagtattttttttttttttgaaatgtagtatgctttattaagaagagcaatcgcataagaatagacatcaattccataagcacacaattaattggaaacatacattcagctaaggtacgagaattccgggcaataaaatacgcggctcgattcgcagaacgcttaacaaaaacaagtaaaacatgagacaatttattgagtatgttcctgcattcttccaccaccaaatcgaaaaatattatcaaaaaataatgttaaaacaaaaattgtatgaacaatattctctctctcaaaaaaaaaaaaaaaaaaagaagaaaattgtatgaacaataattaacattagtactctttctgtacatagtgataacttcattaagaaaaggcaaattaaatattagccgaatctctagagtactcatacatatgattatattcttttgatttactgttaagtttcttaatttgaatttgcgtgcctttcacaaaagctataccttatatgtattttatttttcttgaaggaaatatattatatatagagattagagaatgttttaaaggttatattcaagatggttgcattattgaattattgttaaacaattatgattaattaaaattaaataataattaataaattacatctaatctgatataactt

SEQ ID NO: 198020 - DNA, 1149 bp, Cannabis indica
ttatgtgtaccattcgtttgaaaacagaacactccttcatagccacttgcgaacatgtatctttgaaaatattattcatctttttagagctctgacatatcaaaatttatcgtgaatctttctcgcaagctgtcattccaaacagctttgcatcttaaatattcatcacgcatcaaccacattccatcttctaggcccaaagacaaaatagtttttctccacactcttgaaacagcggctgcaactattctagacttgactgtgagttttgaaaatataacttccagcacatcccgagagatttgatgtgtaaactcattcacaactttttttgtgaataatcagatttttttttcttccgtgatctaatgccaagtgttattattccacctgaaaatataatcaactaattcagtaaaataattaattaatgcagtaaaattatttagataaaaacatcaattacctattttgaagctggggaggatacttaaatttgttaacttgggcatctctatctgaaatatcagagaattaaataaattctcttctccctaaaactatcttttttccactcgttatatttagaaagcacattaatatcatatggcagttataacttgatagtttacattatcatcaacatggaggaaaggccgagtgaaaagtaaggacacagaggattgatttttggtcattccgatgtgcttggaaacaaatgtcgggtgtttgatgaaagtcaagatttgggaataacaaaacttgttcacaaatttaaactgaaacacaaaatcgacaggtaccaagaacaatatttcagttggcaaatcataaagttcccgtgaatagtatcaaccataaatagactttcatatattaataaaacgttgcttaattaggacatatgatatgatgacattctgcttgttgtactactactttttagaccaatttctaatctacattaagttgtaaaactgtcctaaaatcaaaccaacaactagactaagtttcaaactaaggaaaagactattaattaaggcaaattattgaagaaatatctgatcgtatatctacaacctcatcaaaaactcataatgtgacacccatgttatgtttaaattagagattaagcaaatgaattcaatt

SEQ ID NO: 198021 - DNA, 1284 bp, Cannabis indica
aaagagcttacatatactcgaacaaggttagcgaattaagaagaactcttgcgtcagatgcaagaagcacttgcacgattgcaggctcaagctaacctccccgaaggaaaccctcatgctaagaaatttaatcatcctagagttgggccatccaccccaatgaatgacaaagggaagggtgtaatgggcgcccctccaagaagatccacaaacaatgttccacaacaaaaaagcagtaggccagccgcagcagaaagaaagggatgctcaagccccaaggctaggccaacccatcaatctgtggggaagagtcatgtggaatgatgggtcgggtactcaggtacaagggcccaacgttcggggatggaaaaatcacctctagtaattctattaactagagcatatgtgtggatgatctagactaggattgattagaatagcatagaccgaatgcagtgtcgctcttgggcagacccaaaacaaaccaagaaaaaagtttttgagtcagttgtgagccagtctcagaataagagaagcagaaaaactcaaggtcagagtgaagctccaaagaaagaaagaaagaaaaggatatgaagcccaatatatcaaatgtactaatttgtcgacactcgtgagaatatctatagggctacgtgcaatacaattcattataggaagccccctccagtgtacaagggtggcaagcacaaaagagatcccagtaagaggtgcgagtactggtgatgtcaggcaaactacaaaagaatgtgatcatttgaaagatgagatcaagaatctcaaaaaaaaaaatgggcatctccatgagtgggtgagaatcccaaacatttattcaacacaatgggtagcccaaagacaactggttatttctggacaacatggagtggtaaaccctcctcagagagtggtttactaacaagttccaggaatacaggccccacaaggggtcctaaatgtccagacacccaaaatgttcaagctcccaaacaagggatcccctaccctccaggtgttgctccacctccagttgatggtcacgttgcaaaaaatttttaggcttgcatttcactagaagtaccaaaaatgtccagaagaggtactttagtgaacttgaacaagatggggaagtgtctgctctcgtgcaaacaccatccaaaaagctacaaatgttgaatctaccaatcacattcatggaaaaagatgctaaacatgttcatttcctccataatgactcatttgtgatcgaggctcaggtcgccagcaaaa

SEQ ID NO: 198022 - DNA, 1086 bp, Cannabis indica
aataatttataatgctgaaaatatatatgtaaataatgagtagcactcgtatgttttattttattgtgcaaattgtttagatctttattattgacactataaattgtagttggatgcctgctataattataagttaaacagttatatacaaaattgagatatattttctccaagtaccataaactaaaaaatatgggcaaaagcgatgcctcttacctaaaaagctgtatatatatacatataagttgccatgatgaaaaataaataaatgaatagtcagtatatgttttccctacaatcagcaaatgacaaaaatagaaatagatatatataaaaatggaacaagtaagacatgcaatggaaaaaggtgtattgattgtcaaaagctggtaatgatttttgttcttttgggtttgggggtatgttgttgagcttcactctcttgaaatgtctatttcgctggctacgattttggtcttaatttggtgggaagatattttgcccacgtttcactaaattaaataaagaaatagtggaattcaagttggacggtttataatccacttattgatcaagatttctttatctataatttaatcaaattagagattgcatgttgaaaatcataatccatccaattccattggattttaaccgtgcaggccaattttttaattaataatatatttatatataatgaaaagaaaaaaaaaaatgttatgtgatgagcaatagaatttgttagggttggagtaggagtggtttggactttattaattagtttaaaactgcattatagaaaaaaaaaccaaaaaaaaaatcttgatatatttatgtatcttgggcattgctcaaaatagctcaactattcctagaatataaataaagtacgtaaacattattataaagtccttttactgataagatacaggacaagaattttagctagataaataaacctctctaaaaattcaatgtaaaggtagatagttggatcactgaattagttcatgtttgtttaatttgaccatactccaaagataatggaatctaaaaaaccaggaaaactgaataatcaaaatatta

SEQ ID NO: 198023 - DNA, 1160 bp, Cannabis indica
catgagctaattagatctaaagatttttccaggtttatgtttagaaactactcagtaatcagtatcacaaaaataattaatattccaagaaaattcttctaatgtgagtggaattttagcaatcactatgttcaattaccaatttaattcttgtgttttatgaatatagtttcaattaagtcttattattattaattattgttcattacaaaattcttattagtttctgaatgaatttttaattaataagagtttctcataaatgtacgtaattgtcaaaattatcaagaaaaaaaaaacattaatgacttaatgaatattatcatgtcaaaaataaattccgactcatcaaattatgaaacaccaaacaccaaagatatatatatatgctaataattatattctgtcatatatattcttatttatattatgcatttcaagttgtttaattagtcagttttaatttacttttacaaaaatattagattttaggcaaaaatttataattttactgatactgatttttttacaaaactactatctttttataaaacaaccgtaaaataacaaaacagaacaattaaaacaacaatagaacaactaaaaattaattgtgaaaatttaatacagtacacagtataaaacttacacaatattttttttaaaaaaaatattgtatttttaaaaaaaaaaaaaaatcgccccacaataaaaaaaaaattaaaaatttcagtatgtagtgtaaaaacctcatttatatttggtattgataaacctcaaccatataagcaagacctggcttaggctatggcggtcttaagcctgcgcctaggcccatttagccgaggagttaagaaaaattcctctttaaaaaatacacacaataattctttactgattttgatattctttttctttagtaaggactcaattttttttttttttaagctccattaaagttgatataagctgacacatcgtgtgtcctcgtgttataacttcatgaattggtacgtaaccttataattaaaatcccttcataattaacaatcaaatatttttatcaattaataataaatgaatctttctactacgtattacaataacaattaataacaatataattacaaccgaccttttgtgaataaataaattcatga

SEQ ID NO: 198024 - DNA, 1126 bp, Cannabis indica
attaagtcgtattgtattgtattgtattatattgaattgtattttatgcaatatttatatataaaactatatgtggtattaacttttatggacacctaaatatataatattttagtataaattaaagtttaatatagtattatataaaatatgatatataatctaattcaatataatacaatacaatacgacctaatacgacgttccaaacgaatcctaattaataaactggattagttagttgagatgcttgttatttatgttattctttgtaactaattttagttactacaacttacagattggttgctatatatacacgtaatttactttttcattcaattaatgagaattttcctttgattcaatctctctcaaatattattgtaatggtgtgaagaaggcaaaataagaacatgtcttggtttgtatattcttatccatattgctaaaaaattgtacggaaaagcgtagctgaaagtgaacacgaccctcccccacacacaaaaaaataaaataaaagggtccatttgttcaaaaaataggatgaatgtataggtatagagtacttaaggtttgtacgctgccgttgggaagaagagtgattgaacaagtggacttgtattcataaacattattacataattattgtcaaatatctttccaacatatgttttctctctcgaatgtttagttcaaatcaacaacacactgacaaatgcaaacagcataaactcttctgtctcttttttcaaacatttaccaaaaaattccatctctctatataaattccataaaaaaagtaaataaaaaattacatgcaataaatgacaaatttgataaattatgtatgtatccccgagttgtacaatatgtatataatgtgatgagggaaggaggggaaaaagagagaggtcatgggttcgaacttaggaccttgaagctattaagctattaaatgattgtaaaatattattacgctacactaaaaaaaaaaacaattgaaatagtagcattctagttaactaataaaataattaaggagaatgtgattaaaacatgaggtacataaaaagatattgaacatagctgtagaaactaatagtccagaaagacaaaacgttta

SEQ ID NO: 198025 - DNA, 1580 bp, Cannabis indica
aaatccagtctcaaattacagattacaccgtacacataaaaatactattttatttattttatgcttaagccttaatatgtgaatattggctttggcaacggcaagcatgaaattaataatttataagaaaataaagagaatttattatacaaaatgagaatttaaagaaacaaatgtaatacagctatgcaaattcaatttaaacaatttttttttgtagagagttcaatttaaacaatttaaattttattaataggagggtccacgagctatatatccactctacactcccattcaattatatagtgtattcacatcgtacaagaattttttaaaagaaaaatcaattattttaactattcatttttttttagtgttgtctgatttgtagattttattccatttgatggtttaatggtagttcattttattttataagaaaaaaagctatttatatttgtattcagtataaattaaagagacataaaaaagtggatttttttaatgttttataaactataatatatatatttttaaatcaactcatatatatttttttttaattatgtattttataaaagttattaattagattctaattttatattttgttaaataataaattagactatatatttttaaaataatataaaataaaaatagtacttaaattaatattttatcaaaataaaactaaataatacatgatctacaagtgttataacaacattaattacatttattttgtacatatgttcattctaaaaattatttcaagttagttatataaaaaatagtcaaaaattaaagtaaaatattattttatattattttaaaaaatatagtattcaatttatcatttaataaaactgaaaattgaatttataacttttataaaaatatagaatccaaaacgatatcaacctaatttttttaaaaagaaattaacttccactcttctatattcctaacaataaaattaacatataagttggattgatggagaaaaaaggaagtaagcaaaatgtaagcaaaaatgtaggccaaaaaaaaagtatgaaaaaaaatattttcggaaagtttatgcgacaaacttttatatccaacatgaaaaattgtttattttattttccacacttttattttcttcaccaacatttatcttctaacaggtcacgaaccaaaaaaaaattaagtaccatcactttttggttgagttgtagagataattgtagctaaaataatttttttttttttagagaaaaagattgttattataatttttttttttttttgtaaagaacctcggttcgggatagattaactccaaaggatgtcgggatttacagggggaaatccctcccctttacagttcaaaaagctgctgcgagagtgacgagactcattagcaagcttgtccacattggagatgaaacatctcttaacaaacaggaaattacaaacacaaaagaagataacaaacataaaacagaggaaaaagtagcaaacaagtgccaatcaggacacttcttctgattcagcgcctgaaccaggatcttggaatctgagacaatggataa

SEQ ID NO: 198026 - DNA, 1207 bp, Cannabis indica
tttttttttttttttttttatatcttttattttttccaagaaaggatcgatgtagctaattacacgatatagtttagaaatggagaagtgaaccatttgggaactttataaaaaaatgaaaatttgtttggttttttttttttaaatcattacctatagtttatttattggaagagttcatttatatttaaaaataataataattattatattaataatcaatgttacccattattgtagataaataatattttttcattattttttaaatttataaaaaaaaatgaatgggaatgagaaacaatatattagacttcgtttgttatgttgtattatattgtaaagtattatattgaattatgttttatttaaaattgtttatcgagattttcgaaaactaaatgtttaagaactttaagaagttaaataaacgacttagttaatgagaaagagagttttacgtagttcaggtgttaataaatcttagtgcacgagtcaatgtatttgtcttaaggctttgaatgtattacagatggggttttacaactttaaaaaccttaaaatatgctatagtatttttcctttgggtttctcttaatgaagaagaaagcttagaagagatctatcagtatgtttctatccgtccccattcatgaagggataaaggtttatataggcttagatctaggtctgggcatactcgcgacccgtgagggtttctgtgagtaaataggctcactattggggtaaatacattaaatacatgactttgaggcccacgatagaactctggcttgtgggatggaagtgtccatacagaggagagctcgtgcggttaatttggacaagtgtcatgcgtgggtgcagttacagtaaacaaaaatgtcagagggacgtcgtttaacaaagggaatctatctctccttgtggtacacgcactaccatgtcctgatataggggacatgatctgatttggtaggcccaggcgtcagagatcaactacgtcaccttataaggccttctggatgcacctcttgggcttattgtccttatatacttcattttctcgttcagatgatgtcgtccgctccatcttctagaaggctgagtgggcttttgagggtaggagggtcttattctcaaggataaggctcctggagatatgatgagttggggcccattttcagtttggactgggccttcgcat

SEQ ID NO: 198027 - DNA, 1519 bp, Cannabis indica
ctaccaacgaatttgtttcatgcttcacactcggccaccatttcgtcttaattcaactaagatcacttctttgatcctcactacctctgctaaagctagttccacatgaccggttctacacaacaaggtatcttccaccaattggccagcactatcccaagaccactattctgacaccaaaattgcttttcgacataaaaattactccatcaacattcaccttaatcatattaatatctgatttagtcgaacgctcaaggtctttatccaaacccataagtgaaaataaagaactcctcatttcaattaagttgacgtccattgattaagggctacacgagccaagagaaccacttcagtcgctggagtacttttgttctgccaaaaccaaagtgttacgggcttgccacactgcccaagaaaccatgtccactagcctcctctcgaaccccagaaccaacaacatgttaatgcattaaattaccaaactaggcccaaaaatcaaaccccctcccctcccgcaccactagcattcacagaagaccaagtccaacatgctttagcaaatagacatccacctaacaaaatgaaaaatagattcatccacttgattgcacatatgacaacacaaatcaaaaggaacatgtttaaacactagttgtactttggtggctaaataaccactaagagcacgccaaaggaattggtgcaccttagaaggaatataaaggctccaagaaatctttcaagtcctaccatcatcactacataacccaaaataattagccttatggtgaaactaataggcttcgttaacataatataaagctttgatatccaaagatcaataccaaagatctttagctgccaaagaattgagttgaatactaaaaatgagctctttatccctttcattaaaaggatcttcaataatctccaaatcccactctcttgaacccaccaccatgagatctaccaccttacaaccatccagccccactagtgtagacgggatataaggagacgtagcatctggcagccatagatccttaaccacgaaaaatattagtaccatgaccaaccgaccgcctagtcccaacctttattaaatcttggcttttaaaaatactcttccaaataaaactagtattgggaccaaaagaagcttctattgatttttatggtccatataaaagttagaaaagcagaagcggatttgattaaaaataatttaatccaatatgaaccataagcccaaggatctcaacatagcgtatatagataaatctagactaatgaaaagagagacaatacctcttgtagcctatcgggaaatttttactatcgttttgtattatatcgaacatccaatctaagaacttgttgaagagttcacaccacaatcccaggccaacatcctcaacactcaggaataaagggctattaaattctattggtattggatgagtataattatgaaatcacactatgctcagctcatgagatactgtgaagagat

SEQ ID NO: 198028 - DNA, 1948 bp, Cannabis indica
  modified_base (44)..(44): a, c, t, g, unknown or other
tgagtgtttggaagatattgaccaagaaagtgatgtggaagacncccaatgagagacaaagggaccttatatcatcacaaaagcattagaacctgagacaaataggttgagtttgtatgaatgcaacttcaatctagtgccagtaccaaggtgctagaacggggagcatcgattagaaatgatattattaataacgtaattaatccttagacagtttgcttcacagtgaaattcactttccttctgtaattgaatcgatcgcctcttaaaccgagaagatcgacaaagtcatcttttggttaggaggtctatctctaaggtatggcccctacactattattcgaacaaggcattagtgtagtggggatcacttcagctaagctttgatgaaaaatgaaaatttgcaactactacttcttcttctttcaacttagctcacaatgatgtaattgaatttaatatcttataaataaaagcgatgagtaaagtttgttggtacttcattgttattaatcaattgcagctcacagacctgacgatgctctcaagcgttgaacaaagcttgtgaagtttttcttgaggtaactacagttattactttagtgagttaaacactaccaacccacgaatctcaagatgagtggacgtgtgctcacacatgtaacaactccctaaggcccatgatcaagaaggcccaatgtgatttggtacggaaaataaccaatgaaggtatttcttcgatcactcgggggtaaatttgagatacaggagctatgcacgttacatgagcattcacaaaaaattatggtatacaagagccatgtatgtcacatacactttggtatatgagacctaggcgttaccttagtgtaggggagccaagggctgcaggacactgcatccagtagagattttgtaattgattgaagaaaatcctttggatgctcctcctaagtataggacattgtacttagcacgggtttagtcaaatctatcctttttctttttcctctcttagagttttttcttaaacctttaacaaagttctatgagtagaaattatcaaactaagttcttcaacaacctatgatttcacccctatatagaagatctgacacgtttttagcactactctttgacaatgattcaactcacttacaataataaagtgaacttatacttgagcaccaagcacacaagcaataacccactacacatcaatagtggtctatctcacatagagaagataacttcaacatacaactttaaattttttttcacccctgtcactaagagactaacgttggggggcaagagcagtcaagcttagaaagtgtcaacaaaatttcaaacataatggtaacaaaggtgatggttaataattgagcgtcaccaattattctaattaaagtagatcctaaaaagagtgggtcacaccctaacagatttggagccatgtaagtagcccatgtattgtttcaggtgagccaacattgctccttatggtaaaattagattaccactcacagtcaaaaaaagtcccatatatggaaaatatcattatgcattcatagtgattgacaccaagtctccttggaatgtccacacataacgacctctgagccttctcaattatctaccacatgtctttcaagttcttgacagcagctggtatcaaccatctccttggtaaccaaagagtagcatgcaaatgttacaacacatcattgacatttgccaagaagacctcctcccttgtgctaacagctaaggggacgagaaagacctacttcgctagcaagacaacaaaagggacaaagaaggcctcttctattgtgaatataaaaaaaggatgacgaagacctctaaggttaagaccaaggaaaaaaaatggagattcacctacaaccactataaggtgcagtcgagatagggcagatatcaccac

SEQ ID NO: 198029 - DNA, 829 bp, Cannabis indica
aattatgtgtctgaagagagtaaatagtgattctaccattttcaagttcgaaggattaagaaacagcagaagttgatattccatgtgattttcatcaactaaaaatgccagcactttaaaataacaaaagatctggaagcttacttcatcattgtcaacaccaacaaggaaaaacagcgaggcatatcgtctgtatataattttgtagttcctatgctcaacaaatgaacactgtttaatataataaaaaaaaaaaacaaagtcagcatcacaaaacatgatttgtgaaacaatgatataaacttgtatatctaagtcgctcagatataaaccataaacaagcaaagcaaatcaaggatcataatgactgacgacatcatgatcaaaattttataatctaagtttcacaatacgatatagaataacaataaccaagggattcactatttgatccaaatacagaaacttggagacgataaaacacataataaggcataagccgccgcataaagaaaccaatgtcagaatttaacaggatctgatattaagaagaaagaatcaaaacagcgtttggtcatgaaattaagtaatatcagctagggattccaatttttctaatttcaaaattcaagcatgagaatttacttcgagtattccaaatcaaattcaattcctcaattataaaaatcagaaaatttcaactcctacaccattccgtcaaatatgaaaaccaaaacgctcaattttgcttgcgatcgggagagagagagacctgttgctcggtgcgggcgagacatttgcggacgatttcaccctcaagagcacgcct

SEQ ID NO: 198030 - DNA, 1182 bp, Cannabis indica
atgagcatctttattttacctcatagtgttataaaagaggttgaaaaactttgtagatgattcgtatggggctggaatgggaatagaagtaaatttcatgtggcgtcttgggaaaaagtgtgtcttccaaaggcttatggtggtttaggtttcaaagattgggttaaatggaaccaagccattcttgctaaatatgtttaggccatttcatctaaaagggacattcttgggcgaaatgggtcaataatatttatctcaagaacaagtctttgtggaactatgaacttaagagtgatactagttggtattggaggaaattatgtcatctaagggagaagttcactcgagaagacattgtgaaggctggggctggtgtgaaccgattcaagactaatctgttatacaacagttgcattccccaaacttagttcgagttcaacaagtacgtttggagctccctaaacatgccgaagcacaaattcatcttttggcaagcaatcaattctcagcttttaactcgagacaagtttgctcaattttaaattactcttgacagcatcaactgtccagtgtgtgatgcagcaactaagagcaactctcatatttttttttactactgtttctctcagcaggtaatggatcaggtgagtaagtggttgggaatcaagaggtggccgactgatttccatagttggcagcagtggttgctgcagaatagtagggacaagaagcatcatatctatgtttcgatattggcagccataatttacagcctttggagcaataggaacaattgcctcttcaacaattactcgagtacaaaaacaaagattacacagaaaattaaaaatatagtgtattataaattacaaataactaaaaaaagaagtttaaaagttcatgagaagagatacatagagagaatttttatgtaaaagttggtttgctgccaagctttttagtttgattagctgtataattgttcgtgattaatgaagtttattctttcttaataaaaaaacaaaaataattaattatacatgctttgattaagaaattacttcattatgtgactaacgtaattgtatatatgggcctatgaggatggataaacgagtttatttgatgaaagctctgctccaaaggaccaggggtcagcttttttataggaatgaataaaga

SEQ ID NO: 198031 - DNA, 801 bp, Cannabis indica
aaattgcactcaataaataaccttacagttttatcaaattaattacaacttttttttacatgaaaccaattcttttttttaagtatgtattttattagctgtacatatatttttatttttgaagtgatatgtatatttttggctttttgttaaccactaaatatttacatatacgggtgtaatattaataaattaaaatattagatgaatattggtacgtagggttgccccaactagaagttgatagggttgtacttatttatctccccatgtggagtgtaaagtaatgggtttgagagcataataggatgccacgtcgaaaacacttggcatgtactccaaacatatataataaaagtagtatagtagtagaagaagaagaagcatcaaatttaaactagtgaaaattatatcacactttcgtttcttattttttgaaaggtagatatgtatatatcgatagatggcgtacaactctcatatatattcattttttcatatatataaaataaaagaaaatattgcttttacttattacttcatttcatgctagacaaagttatcacgtgacgtggagtttttcattttttcatgtaaattatatttatatgttaattatttatgcatgtcattgatcacctgcttaacttgagctttaattaagtgtgtatatttcacctcatttgctaaaatatttcaaaaaaatatatatagctatgttttcttgttttttaaaccaccttaatagatatcacaaaatcacatcgtttgttgcgtatttgactaccaacatttaaaaaa

SEQ ID NO: 198032 - DNA, 2257 bp, Cannabis indica
aaaaaatattttagtttgtagtctaagcagtctagtcaaatacttcatgacaaggacgacgaataacaaaggagagatgggtccttgaaaattctattacgcaaaaatatgtagtcgaatcaagtaatataagaataagtataatattgtttcgaagaagactatagttaattaccaaacattaaattcttaaattctacttggtgacaataataataataaagaaggtttaaattctaatgataaaaaaacatataattaaaatccaattaacaatgatcagagcttagggtgattaatctcaatagaatctactttctatggtttaatataattttattccgaattttaattttcatgtgatatcgaatttactaaagaaatttataattgggttagaacatataaatctcaacctatatgcaaactttctacttttttcgtgataaatttaaacatataaaagatattaagcataaaatcctaaattgctaaatagaccatacaagtattttcgtccaatatcgaaatttatgtctattttactatagaataatcaacattcacttttcaaattttgtattgaaattataaacaattaactggtgatcaggtaataaaagaaagtaaatacgaatgaaatagatgcacacaagaaattaaagaaaaactagaattgtactaaaccatagacaagtatcaaagaatatccattaaaaatcctaattatgagtttagctcataataatcattctaaaccattgcaaataacaaattagaaacatcaaataaaagatagatgagaagaactaatgaagaaaaatggttgtgcttgaaaccctttttctctttaatttttgtgcctccaaagttgcctcataaaaacccatgaatttacgaaatcagggtttgaaaacctgaatgggcctctaaaagcaagcaggccgcgacatagtcctttcagtgccgcagcctgggtacttagtttttgggcaacgagtttcctagtgaaacgactgataatattttggccatatctctttcgatattgctcaaaattagatgattcaagatgttctgggaagctgaaaaagagatctagaacttttattcacaatattgttcttgaaagtgaacgcataatagtcaaaaattagcttgaaactttagacttgattttcgatcacaaacagaacacgttgagcatccaaaactaagaatttttcacccattatatcttagaactctaaatttcatgttaaactcatcatattcatatcacttaacatatttcttcctatgaatattaccatttaaacttgaaacaagtacaaaacaagtgtaattctgcacaaaatgaatataatcaactgaaacacccttttaagacacttcataaaatgcacctaaaactagcctatcaaactactccaaacttaatatttactcaccatcgagtaaacatcgacactaaactaaaaacaaatgaacaaagacaaacaaattaaaccttaacttttattcacaccacactatcatcacttgcaagactcaactgttgctaaacaaaattttcaatccaattgctccaacaactaaccttaaaattagaaaaatgaatataattcctaaataaaaaataaactattggacatcaccatacatgatcaactcagtccaaataaatccacaaactaactatcaataagcttgtatcacttaacattttctactattgtcaacaacatatgtttcaaaattaaaaataatttaatgggctttaacgtttaggcttaggtaaaggtagatggaaaatatcatttaggctcacctataccataagtttttacatttcaatgagctctccccattacattcaaatattatcccgaaattctctttcttttgaagcacatgaaagaaccttttttgataacattacaacaacactcttttttttttttttttcctttttcattgaaaaactaaaattgcaatttgcatattatatctattttctttttttgttcaacttttttttttcctgattagttgcaaataactctctttcttgaattctcttataaataacctttatttctcacatatcataccccaaaattttccaaattacaatcctttctcaaatttgtgctaagcttaggtaaggacagcgaaagataataatggagtcatttctagctcgtatatgtgttaaaataaagataaacaagtcaaggcacaaaagagtaaacta

SEQ ID NO: 198033 - DNA, 1181 bp, Cannabis indica
aaattaattttttgtttaatttttttcttcatggtcatgtacgttataattatttaagacatcatgacaaaattttaagaaatttaataaaattttaacacgtctaaaacatgattcaaactcatgtacaaaaaaaaaaaaataattcaaacagcgtgttgtatgcatgactattttattttatacgtgtaaaataaattatttgaacactgctttctatgttgtaaattatattaaatttcttaaaattttataaaatatcttaaataactataatatatacgattataaaaaaataaacttaaaaattcttatagatatcaaaagtaaaagatatatcagtgcatcatttttaaaagagtacattgtagaaatatcacatacttttttacaactgtaaattattattagtggcgggaactttagagccgaaagggttagtagttactcttccactcacatctcacatatagttaaattttttcgttcacataaagtaataataataataataataataataataataataataattttatgtcttcataaagggacttgtttgttgggttttataaattagttagttatgttttaaaataattaattagttattctaataatttagttcgatattgatgacatgcaggttcaatgttccattaatttatatatatacttacattttattatttatcttttcaaagatattttcttcgatatcttattatagttgaattttatatcctttagtttgtaatgatggtgatggagatggtggtcttgcaatagagattataagtagcaagtaaattagatttatctagagtaatatgtcattgatttattatataccataaaaaaacattaagtcttttttttaaaaaaaaaaaaatgacattcaataaaaattaaattcagtacaaaggaaatgtcattatcaagctgaatagcacaaggggaggaatcccaattgttgaggaaagtttaatatgcaagtgcacttgtagtttatatgggagcaatacttgaaatgacaatctataaaaaaacaccaatattcagagatgctaaaataaggtgagatccaaaaaaaactactgagtttagaacgttcatacgacaataccatcgaccataatgttagtctatactcaatatgctagtcatactctagtcca

SEQ ID NO: 198034 - DNA, 591 bp, Cannabis indica
ttatataatccgttttttctagtactgatttttttaagacttgagctttgatgacatctactagaaatcatcaaagttttcatttcacaacaattgaattgacatgttgatctttttccgacagagggttggcggttcgtgggatggttattggctgacggagagtttacttcacgacggagatccttttgcgggtggattggcctattgaacagtcctaaggtccagtccagtccagcgtgatataagatatagtaagatcttagtataggttgttcagttgttctttgttttgtacagccagctttagaaaataattatggaactttgtacataataaataaagttcttggagtactacgagtatatctctttcattctgcaacttctattttcactggcttttcttttgggatagaatttgcaagattttgtttgacaagtatagttagtggcttccaaactaaggtatagaatggaaaaaaaaggaaacaatcttcattccattcttttgtttgattacatattaaagtattagaataaagattgagaaagatgtgaatttgcgttgatgaacggtgtgaatttctt

SEQ ID NO: 198035 - DNA, 824 bp, Cannabis indica
ttttagaaaatacaaggtccattttgtacactttaacaaaacacagggtccaatctgtaactttgcaaaacacagggtctacaatggtatttacccttattattattacaggatattaaagtaaaactatctaaacactatcatttgtaatacttaatcctataaatgaaatttttagttgtaaaatactaaaaataattaccaataagataactaacatctacacaaatattgaaatatacacatatcatgttattattagtttacataattttaattattacaatattaaataaataattctaaaataggaaaattaattaaaaataataaataaaatctaaaaatatatattttcatttttttttttcatttttattattttcctgtgacatgtaatcttaattttccatttttttcttcaaacccctctgtgcagaacaagaggcttcttcttctgctcacgctagcaatgaggcttccatggtgtttcatcgaaaccccttcgcccataataaaagcgatctccttcattttggttctctttcagatttttgttcggattagattggattttttttagagattgaccattgatttgagaaaaaataattagaaaaaattaagattgttgtgtttgatgaatagatgaaattggagtttatttttcttgtgattttgttaagatttgttttgttcaatttgatctcggtatgcttacatttggttgtggtgattggttcaatgtttatagtatttctcttttagtggtggtgataatagtgatattgcgaagaaaagaaaaaattagagaaagaaaatta

SEQ ID NO: 198036 - DNA, 737 bp, Cannabis indica
cagatcaaataactaccacatcttacggcttccgtacatcaagaaatacattctgtaaaagtacactaacaggacaaaatcgtgtccctatatatttatatagaaaatagatttggctatatatagttagcaaacaaaagaaaaaagactatatctataattaattattaattacaaggtgtacttggaagcacatgcaaaggatccaatcattatacatatacataaaaacttaaaaagagaattaattaatttaagagcacataatatacattaatcaaagaagttaatcaaaacaagtacatatatacatatatagaagaaattaactgatatatattaaaatgggaagaatttaaagaaagaaaattaccagaaaaggcatcaagtaaggtggattttccagagccagaaggacccatgagagccataatcctgttaggttttgcataaccagagagattgttaagtagttttcttcttggtttgatcatattattattaatattactacttcccaccaccactgttatctcttcccataccaaataaggcccttcttctttattatcaactatcatattcaccttcttcacaatattattataattattattattattattattattatcttttccttccactactacttccatagagaatactacatcatcatcatcttcatatttcttcatattcctattctcgatcttccacctcctctctctctctct

SEQ ID NO: 198037 - DNA, 868 bp, Cannabis indica
taagtatcttactgttacatattaaaaaccatccataaactaatgagaagtacggcaacaacccaatcaatcaattcaaaagaagatgaatttcattaatctgatttccctttggggcaattttgtgtaattagattatggatggaaaaatttactagcattggaatgcttttggtttcttcattacaaatgttgtgaatagttccaaagataaagagaataaaggttttaaaagggtggaatttctgttgagtacagtataaactcctcctaaagtgagaaattagaacaatagtttatttgcattatcggtagtaaaaagaagaatagagataaagttactgaaacagaaaagctatttcaacttcttactgaagtcggaaagctcaaggagacgaatcctgggaatgctggctgcttcctctctttctttcttggtgttgtaaccccaatcccctgatttaatgattttagttaagcaattagcactttataacaacaatgcagaccaaaaagaaaaaaaaagaaaaaagggaaggaaagaaaaattgaagaaagaacatagctagctacagttaaagacaagtatgagagaggtactaaccgagataaaggttccaaccatctaactcaggttccttaatgacattctttaaggttgccagtcgatcttccacaaagctggtgaaatgacagtcaacattttcagcttttaaccaatagaagtgctagatatgaaagtgtgcttaacagaattgccatgtgtataaaaacatgtgagcatgttcacaagttgaaattgagtttattttattagaatgcattacatatttttgcatcaagaggcaaaaggattcttactgtagtt

SEQ ID NO: 198038 - DNA, 1064 bp, Cannabis indica
taaattatgcttaatgattaaattatttgaaaaataaaaagagaaaattttcatgtgtactcatcattatcataatttcaacttaaacaatagcttttcaatgatattgatattttactttttttttgttcgaaattgatattctactatattcaataactaagaaatatcataaacattagattctagaaaattatgtttaacaattaaattatttcacaaaaaagtttttcattgtgttcatcaacattttattatattctacaagaattatctgatgaaactcaaggaaaagaattagaaatatgaatttttatacaaaatacctaaaattatatattttttgtatttatatggattttttacccatttttcatgaaaaaacaactttacataattttataaaaaaatattattatccataaaaatattaaaaaattataaatttatatttttacaatttttttttgtcttttttatatatttataaaaatatccaatctcttctatcttactcatgtttaagtagatttctaaaatagttaaagactagagaatattttcctcttaagaaaaacataaaaaaatgttgatatagagagtgtgattgtctagaagtcatctatttaatccaaaccaaggaaaacaactgtttttttgaggtttagcgtagagtctaattgtcttgaaatcatccatttaatccaaagcaagtttaatatagagtttgattgtgtagaaatcatccacgctagaatttgagataaggtgaataaagtttcatctcaaaaccaattggtaataggatgagtagctcatttatcttatatattctattatcgttccacatattagcaatgtgaaactctttacatctcaaaatggtagctattttatttgttcactatcttggacaactcgatcataaacggcttttttttggctttcttttgctctactttctggattggtggctatttttttggcttactatccccaaatcacaaataacttttttgactttggcttttggatcaattgtttttagatttttggtggctttt

SEQ ID NO: 198039 - DNA, 572 bp, Cannabis indica
attttttattttatttttttggtgtcttttaaaatatattattacatatgtatgaatctgatcgaagattgtgtgttatatacattaagaagaagagattggaataagttctaaaaaaaaattgaaaataatgcttattacatctatttttttaattaaatttattatcaaaatatacataattttgcctctgatttttgtcatttctatttttatatcaaaatttcattatgtggtttctttatattctgggcaggtttgatctaccaatttttaaaaatttcagaagacattgttttctaattaaattttattttcttcacttatttatttatttttttaaaaaaaaaaaaaattgtggctatgaaatttcgagttatctcactattttgttttgtccttgcaacttacaactgtgatcgttttttctttttcttttatcttcaattaattgatgtacacaaataagagggagggaccacatgcctcattgatatttggtagcccttttctcattacgtgtctttgtttttttcttttcataaatatattattattgagtattgagtaat

SEQ ID NO: 198040 - DNA, 663 bp, Cannabis indica
ttgtgcttaatcaaagatatatttaggatacaaaaacaaaaaagaagtaactaataaaaattacaagttactatataaactttacttgctttgaaaactttggattcaagagtaactcatttcttgaaattatatgttttagatcatctttctcaatgtatagtaatgctttaagcccttctcctgcaataacttttacaagtcaccaaatcaaaaaagaaaaataaatgaataattacaacaaaaaattacataaaaaacaattactgtagaaattagaaactaaaaatatagacctgaattatctctgactttttgattctcttgctttggattccttagcattgttgagtaaacctaattgaaattgaagcatgaaatttttataggaaaatcttggaacttgatctatgattttggcagtctcaattgtccctattcacaatttaaatagatatattcttcaccttgggcttatataaatatatatatgtatgcattgaattaatgagtttctccatgaattggaatagccaaacttggaatttgaagattcaatttaatttcacttattattaacataacattattattattattattgacaaattctaagagtcattttataatatcatctaaagattgacggttcctatttctttt

SEQ ID NO: 198041 - DNA, 1245 bp, Cannabis indica
tttaagtcgttgggaataatatttgtttttttttttttttttaaatctgagtgcatcaataacgacattgtcgttattgatattattatcaatgacgacaatgtcgttattgaagatcttctacgaaaaaaaaataaaaaattatattaaattatttgtaattaattatttatatatattattatattaaaattattaatttaaattttaatttttttaattatttaattaattaatatataaattatttaattaattaatatataaaatttttgaattaattaaaatataaaatcatttaactaaaagaaaatatttaaagtcactaatattacaataagagtaagtcataaacattatagtactgcctacctaaatataaattagtgttcataaaatattaacaaacatattagaccgatagtaagtcactagtgtgtacattgcacagcacacataaacaaaaaatttgtataatctactttccataatacattattttttttaagaatgtaaataaatttatatagatttttatttggtaaattataaaaaattaaataataactattatgaatattataaggtttttactcaatttttattttatttcagtattctgcatcctacattatagaatatattgtaaaaataatacaaaactaaaaatatatataactcaaacatttgaaagaattacaatacatattttttttttttaaatttgatgtctttaatatttacccaatctttcaaaatatattacatttatctcttgtttcacttattttaccaattttatttttatcactttcataataatttttgttcttctctaatcaaaattttatcccaattttcccacaaacatacacatctatcaccaaagaacacaatctatattatacttgaaattatgtcttagttatgtgaggatgtgagaataatttggatacaatactcataaaaagaggtatatatatttaaattaaattttatttatagataaatttgattaatgtataccaaaaaaaaagtatcctttaattttccccaaacattttacaaaacatgcatgaaagtagctagagaatgaaaacaataagaaacaaaactaattattatataaaaattaacttattaggcgacataaagtattagaaattagaaaataaataatacatgaaaaagtttataaaatatattattaggatttgtttggaatattgtattaaattgtattgt

SEQ ID NO: 198042 - DNA, 1849 bp, Cannabis indica
aactaatatctctcatttagtgtacaatttccctggagtgtagatctctcattttaacatatctgcgaatactgatactcatgtattggctaaatatgctttttcggtggactctacttgtttttggttggaggaaatacctcctccccttatgcctattgtattttgactcttgtttaaatataatagcatttttcaaaataaataaataaaaggagttttgttaaaaaaaataaaagatgtaaaaaatcaaaagataaggggtttagctgcaaataattttttttttcaagacaaatatgtttctctcatgctgcctcccccttcgctctggttcacagccgttgtcgtcccccacggccagcccagacgggccatctccggtcaccattgtcctaagcttacgccaaatcgaactccctggccccaaaatccctaagccctctcattcccctttgatttcactcatctctcgctccattctccatttctctctccggcatcaatgacgaccaccgggggctcgcctctgacgcgcataccagcacaacatcgcccatctctcctcgtcgctaccttgagaccttcaaagcccgagcaccgtgctctgttgtaaagttgtgcgcgtccctaacgaggttgggtacttaaatccggggtttgaggtttaacatctgagatttggggtttaaagtctcgagtttggggtttcagatggtatagtggtattatgggtttgacgaagaagaaaacttgtctggggttagtgtttggctctttgtttttcttttccctctgcgtttggatatggcgattagaggatactgaggatttggttacatgaatgtttgacatgtttttctggattagagtttcaattcatcacatgaagatatgaaatttagggtttcaaaaagccttaggaatttaattaaagaattttttttttgaatagtaaagatttttattttaaaaaagccttagaatttagttaagatttttttttgtttgaatagtaaagatttttattttaaattaactaaaatatgaattttaaactattatttatttaatttgcaactatttaaataaacaataaaaataaaatgatctggaccaatcatctaatctaaatatatgtatatacttaggttaactaaagtaatatacacttacaatcaatacaacagattttttcactcacaaaaataatctccattctttaaacttctcaatctagaatttaaaatatgtgtggcgccaaactacaaagtttacaatcccatgtgcggaagacacaacacaaccaaaccaaatactaaaattactgatacaatagatgtaacttgtaactaattagagtgtatgcggactggaccccaccacaccgacacccttttctttttcattttataatattttcttaaaaaaaattatatattatttccctctctttctttttgcggctacacaacactttctcttctcttcttttctctttctctctgtactgcgcactcacataaatacgtgccatcactcacttgtttttcttcctcttccatccacacacacacaccattcttcttctctactttttcttttttgtttggttctttcttcaaaccaaaaacaacactattgttaaagtaacaaacgaactgaacaattttattcagtttctatggcgctaataagcttagcgagagttaaactctgcgctctgctatgtatcgtcacttctctgttcgccattgttagggctgaagatccttacagattctttgactggaatgtcacttatggtgacatttacccgctcggtgttcgccaacaggtacctgtttaa

SEQ ID NO: 198043 - DNA, 695 bp, Cannabis indica
ttagttttttttttttttttcaacactatttgtgcttagtttagacacaatcaactaatcaattataacttatttattatatcacttcaatttaaattttaaaataaaataaaaatattcgtgaattattataattattttgatatttaaacctttaaataaattaaaatactttaaaaaatttatcccgaatcataattaaaatataaaatttatttgacccaagtcctacttatctctcatagaatgctaacaatgttaatattatggtcttataaatttagtatatattaaaaattaattaatactaaatttaacacaaaatataaagtgagtcaaattttacaccataataaatattattttgttatttttaatgtaatttaatattttcttttatatctttaatatatatttttatactttttaataaaaaattaatattttttacctttttattaaaataagtttattacactattgttgtagacaaatttaatagttatatttcccaacttggaatttaattataataaagataagataagataaatatgaaaagatgatgggaaatgtataaataataaaacaaaatcaaatagaatttatatcccattatgacttgtctccttgtctacttatggttcaaaaatgttgaaaggttagaattctctattatattatattttaattaa

SEQ ID NO: 198044 - DNA, 1215 bp, Cannabis indica
atcattcttacttctccttgcacctgtggtgcttcttcacgatgttgttgccactgcccttgctcttgttcttcatttcactggttctctcgacgatattaatctaagtatcctcttcatatgagctcctccatttcaatcttgaggtgggaacattcattagttttttgtctaaagtgcttatggaatctatagaatttgttggcatccctcctaaatctatcaatccttatgggtgttttgatgggaaattagtgtcatttgtcaagtgtcaagaagatgtgttcccttgaatcagccaatttcataaagtgggtgtatcatagatgacataaaccttcctctctctttggcctcttattcatgtcatctcttatcctctcaaagccttacttctttgccctttcattaaaatccttgaggtcatttagctctcttttaagcatattgttccacatctttcccttggggtatacaccatccactatggcaattatctgttcatccttggtcagtcgccctacttttatggcatctgtgttgaagcacttgatgtagttcttcaagctttcattctctccttgtttgacattagctatacttgtgctggatggtatagtctgacgaggcatagtgctaggctagcaattagtgagttgcttccataatgagtcaaagctgagagtcaggcatttgaaccactgacatgttgcaccttccattgtcaaacattagcaccttgcttttcttgagacccttttcatagtcatcagttcgttaaaggcatctaagtggtatttttgatctgtcgttccatcatatgatgagaagtttggctctttgaagttgagaaggagtggtccagcctggatctctcttgttaatggtgatttctcatttaatttgtcatcgtcgcagctacattcctccgatgcaactaaggaaactttcttacataaatcctccattttttgtttaacttctttcttttcctgttttgttcattctggaggccttgaggtgtggactttttcctatctccacttttttaaggcgcaatgggtgacgtatgcctttatgattttccatttagtttgtccctcaaatattggggagtggccttcgccaaggtcctctggggttggactgagacatttcgcctccagtaggtctaaagttggcattgcatggccgcaccacttcgtggacaagatt

SEQ ID NO: 198045 - DNA, 1277 bp, Cannabis indica
aaaaaaaccttattttaaaggtaattttgattctttgtattcaaaaaaaaaaaaaatactaaagcatgtatttcatatacacaccttttgcataacatagttacatttgtacgtggctttgttatcataatattatcatatttttcactaggaaaaaaaatttagagtgtgtttagaagtaattgtataattactaggtaaggtaattaaaaaatttagtaattacattacactatattttataatgtaaagtgtgtttagatatgaggtggtcactacatatgaattcttaataccttgtttgacaaaatagttaataattacatgagaaaataatattttttagtagctaatgttaaatatgaaaagtttttagtaattacactgtgtatttacattcaattctcataggggcatgagaattgaagagtgtaattagaactcatcaattacttccaattacacagttagagtgtaattacatagtcagacaaacatgtcaaattgtgtaattacctccaattacagtgtggctttctaatttcactaaacaaatctcattttatatattaaagtcaaattaggatataatgccaatggaataagtattatttagttggaaggaataaaaatatagaaattaaaatagaaataggaatgaaattaaatttaaacttgataaaaataaattattaaaaaaattctcatcttgcattcctcccatttcaaaatgaaatagttattctatttggaaaatatattcaattaaaatggcatttcatattttaaaatgtaactaagcaaatctttaataacagtggaaatttcaaaaaaaaaatatataactaaacaaaaaaataaaataaaaattatttactttctattttattgcatttcattacataaatataggaatagtagtaggaatgaatagtaatgtgaatgagataataaaagtaaatttatttccattctattacatataattacctctaaccaaattcaactaaaaaataaataaaaaatctgatgcaacaaataataatcaataaggcatcaacttttttgttttctttctatttgcgtgtctccaagcaacttgctaaacaaaattcttaactatcacataaatgaaggaatcacaagccaaattttaagataatggatttctttttcgtgccattgtcacaaagtactgaaattccaaatccaaataacttttccctagttggtattacttaaataactaaaacccaaaaaaaagatataaaaagaaa

SEQ ID NO: 198046 - DNA, 1869 bp, Cannabis indica
acaaagaacaattaaagaagatgggcctaggagaggcaaggctaaaactgtgtatggtcaacctatgcgggttcacaggtgatagtgttgcaagcttgggcacaattgaactccaactcactatgggagaaccacaactatcaaagaccttgatgcaagagtttttagtattgacatcccttcagtatacaacatactcttgggttgcccgacattgatagcaatgggggcaataagctcgatcaaatatttgtccttaaagttccccactcattcaagggtagcgactatgaaaggtgaccaactattagctcgacaatgctatagcgtggagtggaaaaataaaagggaaacccatcaattgatggtgatgttgacagaagaaaataaggaagatattgaagatgtggatgcaagaatccatgatgaatataaccaactcaaacctattgaagaattagaagagtttaatttatacccaaacaatcctaccaagtttatcaacattggaaagggtttggggaagaacttaaataacaattaatcactttcttgaaggtaaactcagataagtttgctcggagccatttacatatggtctggattaactcgaatgtgatattcagtcacctcaatattgatccttcttatccctcaaaacgttaaagaagagaacctttgcatcccaagagacaaaatgccctaaatgaagaggtcgacaaactgttagccaataaaagggaggctttttctatccctcgtggatatctaatccatttcatgtcctaaaaccaaatgggacacggagaacctacatagacatctccaatttaaataatgcttgttcaaaagactgcttcccattaataaggattgaccaattggtagatgagacaggagggcacgaactaatgacctttttggatgcatactcttgatataagcagattaaaatacatgtcccgatcaggagcatacaagctttatcaccaatatagggctttactgctacatggtcatgccatttcgactaaacaacgcttgaccaacataccaatgcctcgtgaatggtatgttcgaaaactagatagggaaaatatggaagtctatgtggatgatatgttggcgaagtctgttaaaagtgagaaccacacagaggacctcatagatttcttcgccatattgaaaaaatatgatatgatattgaaccctacgagatgttcatttggggtatcctcgtggaaatttcttggctttattgtaaatgtgaaaggaattgaagccaaccttgacaaaataaaagcactgctcgagatgccttcaccaaccaaaccaaaagaagtataatcttttacttgaaggatggtggcactaaacagattcattttcaaatcaattgataagttcctcccatttttcaacatcttacaaggcaacaagaaattctaatggaaagaagagtatgagaaggcttttcaagaaataaaaaagcatctctccacataaacagtactggctaaaccaatcattggagagacattgttcatttgtttggccatctcataagtgttgcactagtgcgagaagagagcaggaacaagcaacctgtttattatataaacaaaaggttattgggggtagaatagaggtaccctccactcaaagaacttgcactttgcctggtgcatgcatccaaagagctgcaaccatattttcaggctcaccccattaattttttttatagatcagccattgcaaaaagtattctccaagcccaatgcatctgggagattaataaaatggtcgatcgaactgggacaatttgaaataacctaccgtttgaggatctccatcaaaggccaggcttta

SEQ ID NO: 198047 - DNA, 4495 bp, Cannabis indica
aaaccatttacatcctaagagcatttctaactgaaagacctcaaattgtgtatatttatatatgaaaaacaataataacctcatatgttacttaaatttataatttaacttttgtcaaaattttacacataagataatagggtaatattcaataaaaaacttaaacttattaatttaattaagaataattattcaaataacataataactttaatcatactactttaatattttaaatatttagtattctttcatttttggtcttgtatagtcacttaaattctttaattaattattatgtcatatattttcagttaaacccccatcacttataccatcattttcattagtaagtcccaacaaattaaattaacattttgttttttaattatcattgttaaggaagctcattagttagttaattgttattgttaaataactaactctattagttaagtgttctttgattgtattcttagaaggttgttatcttcgctgatgcctatataaactgtttgtaaccttcttcattaatcaatgaatatagatcactctttctttcaatctctctctattcttgtctcaaaccttacatggtatcaaagctttctctttcgttcatcaatgaagatttctcatacctctaacagtggagcatcaagattgaacaatgctcagatagagaacaatcacaaagcattactgccaaaatcttaccttgtttctttttactcattctctctcgattaacctcgatgaacataattacctctcatggcgacatcaagttctagcattgatcaaaggcagtcgcaacttcagaaatacctcgatcctgacaaagctctaccaaagtaccttagtgctgcagatgaaagatctcacactatcaaccgtaaattcgaagattgggaacagcatgacaatctcctagtttcttggcttctgttgtccatgtttgagaagaccacaaaatgatgataggttgtgacaccactgcttagatatggcacactctcagtgagtactatacaactcttaatacaacaaatataggattgtacaagacccaacttcaaaacaccaagatgacaggttctctcaatgactatctgctcaagatcaaagggattgttgatcttcttaccatgataggtcacaaacacacacctcaagatcatattgaagctatcttcttacgatgtgtttgtcacctctattattacaaggaaagatgactacattgtagcagagatcgaagctttgttaatggctcaatctgctcgcattgataaacacataaagaatattgatattttgaaagctaaagccaatctttctcactcaagattcaatggtttccactcatataatcgttcatcgtactcagctctagctgttccattttgattcagccgtggtagtccccctcgcactgatggttatatagggtattctatgtctcgaggtggtcctactccaaaaaaaagtgcccctggctaacgtggtggctattacaaccctagacgtggccaaaataccaaatgaatcaaaaagctcagtgtcaattatgtcacaaatttggtcatttggttaagcaatgtttctattgcttcaacaagtcatttactggccctgagtcttttgccaatttccctgccactgctcacattgctgagatgcctacaatgtatgccacaccagaaactgtccatgatgacaactggtaccttgactcaagtgccactcacaatctcacaccaaattctaccaatcttggagccagcacatcttatgcaagtaatgagcaagttcttgttggtaatggtgttggcctaaatattgaaagtgttggtaggtccctgatcaactttccttttttatctcaatcattgtctctcaatagtctattacatgttcctttcataaaaaaaaatctgctttgtgtatctaagtttgctcaacataacaatgtatttttttgagttttaccccttttcttgttgtgtcaaggatcgtgctacctagaggattttgttggttgggaatattgagaatggattgtacaaattcaattctacttagttgagtattctctcctcttcacctgttcatgataaagcatctcagcctgcacctcaatgccatagtcatcatcttttcaattcaaattctgatttttctttgaggcacaacaagcttgaccaccctgctgccaaaattgtaaaaaatggctttgtcaaaatgtatatccaattgtcaaaataattttttttatgtgtgtgaatcttgatgtcttggaaaatctcacaaattgcccttttctcactccaatactacttatacagaaccattacagctactccattaagatctatggggacttacacccattaattcaatcaatggttatagatattacattagctttgtagatgcatattcaagatatactcggctttatcttcttagagctcgtgatgaggctttgcctactttcacaaaattcaaggctcaagttgaattacaattgggttttaagatcaaaacacttcagtcagattggggggggggtggagagtttagagcctttactaatctccttgagagttcaggcatagtgcatagacttgcttgtcctcacactcatgaacagaatggtgttgttgagaggaagcattggcatgttgtagaaactgatttaaccatgcttgcacaggctcatctttctctcaaaaattgggatgaatcttttcgaacaacaacttatctcattgacagaatgccaacccctatggtaatgaacacatttcctcttgaggtgttgttcaaaactgtccctgactacacacgtctcagagtgtttgggtgcctttgctattcaaatcttaggccatacaacaaaaataaactgcagtacaggtctataccttatatttttctaggttatagcatggcacataaagggttcaaatgtttgtctaaagatcataggctatatatatatatatatctaaagatgttgtctttgatgaaaacacattcccctatgctaacagtcaagtgactcagttcagtcacattgaatctcatcccacttctatctctactattcctcctctagtgtcattcctcaatgtcaacaatccaccaactcctcccactgtcattcgccttgaccctcctactattcctacaccagtagcacatgctgttgctcatgttgttgctccattgagacagacttctattcctcttctcataatagcaacaaatgacgtagtctttgttcctctgtcagtagtaaatccatccatctcagtctctcccaacatcatggatcaaaatcttgggggcataccaattcaacagtccacaatacctactaccaacactgttaacacaaatgtgcctattgttactaaaaatttacctgcagatgcaacagtgtcatctacttccaaacatcacatgacaacaagacttaaggcagggataaagaaactaaaggctttgttagctgtttatgaacccaaatctgttaaagcagccttagaagaaactcattggtttgaagcaatgtccacataaatgtttgctttaatgaaaaataggacatgcgtgcttgttcctttactagaaattaaacctgtataggctgcaagtgtgttcttagaataaaacaaaatgcaaatggttcatttaacaaatgcaaagcaaggttagtggccaaagacttccatcaacaagttgggtttgattttttttttgagacattcagtcctgtggttaagccaatcaccatcaggattgtgctcaccatagctgttactaaaggctggataataaggtagttagatgccaataatgctttccttaatggagacctaaaggaagacatttatatgcaacaaccaccagggtttattgatccataccattcaaactatgtgtgcaagctcaacaaggctttatgtggtctcaaacaggcaccaacggcctggtttgagaagttgtccacacctttggttcaacatgtattttagttttcaaaggttgatcaatctctcttcataagggtaacatctcaatcatgcatttacattcttgtctatgtagatgatattcttattatgggcaatgatgacacccttgttgaacagctcatccatgaactaagttctactttctcacacaaagatctttgccttgttgactatgttttgggcattcaagttatcagaaatccagctggtgtattgcttactcaaacaaagtaccttcaagatcttcttaccaaaactgatatgcaaaatgtaaacacacaaaatactcctatgaccagtggccttaagctttctaactatggcagtgaacctgtcaaagatgctacaatgtataggtcaattgttgtctacagtatgctaccataaccataccagagcttgccttttgtgtcaataaagtgtgttaatttatgcaaaatcccttgcat

SEQ ID NO: 198048 - DNA, 1912 bp, Cannabis indica
gaaaggggaaatctcgattctcacaatcaggtctgcgaaataagttctcaaaggaaggtgagccccactggaaatgtgaaaccaactccaagcactgaatccctctgcactaacggaagcatattctcccatatagaaagtctgtgccacacattaatccagggacattgcgaaggccagcgacgtcagaataagcttacagcgtcccataagatcgaaattagttggctttctgatccatttcccaaatggagttcttatgggcctgcaccggtggggagttttgacccccttttctcttctaattctcgcagggggtccttttcagcagtgggttcattttgtggaatagtttccaaggccccctcaggttgaaatgttaccataggagtcatggtttgatcctatctcaccgaaatactttcaatagaagagataagcacatcctcggtaggcgcaaccatgcttgtgggaaggtcctgattcaagcccattgctaccaacacaaaaatgaaggaaacggcaaacctcttgaaatgactgatggatggaaggaaaataattaccagactaaggcccatggcaacataatctctcagttcacgggtgtaagaatagagtttctctcatgcactctaccttcctatttgacacatgaacagtcctagccctaacctgaacaaaaattcttgccctagacacgaaatgccaaaagtttagacaaggggttagtgtacttacttgtcaaatagggaaagaagggtggcgtgttggaaaagcctgcctgaaagctttgaagccagttgatgcaacagtcgcaactagcctgaaaatcaaatgcttcccctaacgaagagctttgtcggtccagtcgaaggggtgcgatgtctggaaagagctcagtgcggatgatgagtaatcgttggatcaagccctctaactcttcttacatgcaaaggctgactagagaagaaaaaggtcataaggaaaaatatgaagcttcgtggagaaagtaaaaagaacgccactaaaggtggtttatatttctaaaagaaaataggccaatgcgaaatcaacggttcaaatttttgcaatagatccaacaaccagggtgatgagaagtcccgtatgattagcctggggcccacaaaattatcaaggtgactctctacacgtcatttaatcgtcagttgcactccaccttttttgttgaatgcgccctaccacacgcgaaaggggcttggcaagatttttgaagtgccacgtgattaccacgtaagaggaggtaaatgccgtatttgcccttagtagagtatagctcatgcagagatgtatccgcgacttaaatcatcatcacgtgtcaacaatcaatggaaaagatagcaagctcccacaattcaatgagtctcgaaagctttggggtaaatgttatccaaattttcatgcataagacatatggcacaattgaaggcaaaatatagcagtggaaagaattagtcaaaattattcataaggtaaggaacgtctcgcggacctagaaggtagttagaatggatgactcccgaaaggaacttccttaagtgatgaacccggagcacaatagtagcttcgtaggccatggccacatcaacatcatacatggattgctctatagacattaattatacctttttgtgacacaggttgagattttgtcccctgtgccaggccatgatagtgcgcgtacgcaccttcaaacatgctttttgcccaacggcctggttagagagtattttgtgaaggagagacctttgcatgacgcgtcacctagtttgtacgaaaaccctcactgtagctgtacactacacgatgaagaagatttttaccagtcaatggtcagatggtcctttaagctgtaccgaccttggcagcg

SEQ ID NO: 198049 - DNA, 660 bp, Cannabis indica
tttttttagcagatattccatttacttttgaaaatttacaaacaatttatggtaacaagctttaaagtggaatcaagaaaatttttgctataactataatatgttattatataaatgtgtacttttacggtgcactctttctgtgttttttttaatttttttaaaaaaaattagcgacaaaattacttgaactataacttctgttatgctatttactcttacgtcttaaatgctctgttaagtgtcacggtagatatatcacattgtattctttaatgtagcgaatttttcgcgaaccacttaatattaattctttaaatattataaaaaatatttcaaatttaaaaaataattttaagaaataatgtaaattacaaattaccattttattccctttatttatttttcctttctttttctttctctctagaaccatcgagacccctttggtttggtccaaacatatctttattcttcttgttcttcctccttttcttctaccaaagagcccatcctactctcacgattctccccgaaaccataatctaattttctaaaagtataaacccaaaactataaccccaaaatccaaacaacccctcccactctcacgattctccctcttagtctctcgtctcgtcgccctctctctctctctct

SEQ ID NO: 198050 - DNA, 2555 bp, Cannabis indica
gagtttaataatttaaataaaattagtataccgttataacttcattttgaaatttatgattaagtgggttaaaaattaaaacttaaaccaactcatttataaacaatttgatcttgccctataatatagtttcaaatttttggtaacttatacatccattaatatgtttataactagtttaataagtttacaaaatttttacattttatttagtattattttaatgcctattaactaacttaataaaataggatattagatacttcaaattttacgttttgtaacacttaactgcataaacttattttttaacggcaaaattattactgaaccccatcttgttttactctttatacttccattcaaaaatttaagttaagtaccacagtgtattgctcacgtttacacaagtgaacccgtgataaatttttagtggtttatagaatattaattattaaaacaattataataaattattcaaaaattataaaaattaaaaaattaaaaatatattaaatttatttaaaataaatcattaattgttttcatggaaaaaagaaaaagaaagaaaaatgaaatataataatttttatataatttttttaaactatttttttttataattaatattatgtgtgaatcattaaaaatttactacgtgtgtacatgtgaataattcactgtggcacttaacttaagctttggacgtaagtataaagagcaaaatgggatgggagttcaataagttttacattcaaaaattaagtttatgtggttaagtattacaaaatataaaattaaagtgattttaccgccaatattcctaatatattctatatacaataaattattataataaatataatattggttggtgtgtattttaaataaatctcctattgttttttatttaggcatattaacccgaaaaatgacttgtttaacaaataagttagttgtgttcacttgaaaataattcaaattaggagtgttcgcggtgcggatggtgcggtttttgactattttttctaaccaacccacacatgcagtttttttaatttcccaaaccgcacctgcaccgcgacactagaaaaccgcaccgcaaaaaatagtgtggtgcggtgcggtgcggtttatgtggtttggactatcactaaataattaaagtatcacaaatacgacaaaacttgagcaacacttgtcaaaaataccataaggcttgaaaatatatatagaaaaaaaaaattcaagtttcaacaaataaataaataaaaataaatataaaaattagtatttttataatatgcggtgtggtgcggtttgaaccgcatattaataattcaaaacgtaaacctcaccgcaccacgcgatttaggaaaaattcaaactgcgaccgcaccgtaatgaatttcaaattgtatttttttgctgtgcggtatggtgcgagcgatttgagcggtttgatgaacacccctaattcaaactcatttaaagtaaattcaaacacgtttatatggtgtcttatatacctattttgccgcaccctaaatattctcaaattataataatttatggtccatacattttaccctatgtacttattaaatttagtcaatattattaattggtgtttgacatctttcagaaacgtacacaataataaaaattgaacaatgaagaaatttaaccaaaatcatttaggcacacacgttttttttttttaacatatgaaaatatttattaatgtgatatgtgatgatgtaggtctcacatatgcaaacacatttttgaaaaatgaagtactttcacaaactttgaagttggttcttgaacatataaaaaatatagaaaatgtatagattcatatataaaaaaaataagaagatctagattttttattataatttttttatcaatatttgtgtcgaaaaacacataccgaatttttttttacagcagtgttcgttataattacaataaatttttgtaaaaatttggaataatttataatgttaaaaataaattttaaattttttgaacacgcatgcatgatagattgaaatatcaagaactctatttttaatactgtaaactgttcgaaattattcaataatttacaagaatgatgttataattataacaaatattaaaaaagaaatttcaatttgtaatttcaaatgtaaaaattaactaaaaaaattataataaagaattgtaattatcacacttcaaaatacaattttttttatatatatatataaaataagttgtttgtacccaattttttaataaaaaaacaataaataagacaacttatattatcacgccaacataatctacaactttttaggcttataatatataatagaaagaaaacgaatgatctcagccgttcattttaatttcaaaatatctataaatagaaagaaaactttcctctaataatccatacatgcataatattcagtatactagtaaatattatctcatactcatatatatcatattctccaaaaacccaaaaaagataataatgaataaccctctaaactccg

SEQ ID NO: 198051 - DNA, 1233 bp, Cannabis indica
catgtgaaaagtgcatgaccaatggtttcccaagcttggcgacaaactgagcatgtcgaatctgtaataattttcctcttaacaagagaagttgccactggtaaagcatcattgataactcgtcatgcaaagattttgactttcggtggaagttgtagtgcccagaaaaaattccaccatgaagaagccgatgtagagcttgaggaattttcggtgtcatcaagatatatggccaaatgatagcccgattgtacagtgtaaatgccggtgtgttggtgatgccatatgagcctgtcatcggagctaaagaagctaagtagcactgttaaaattcgttccacatcaaggggagaaaaaaactattgcaacagagggatatctcattgaagttctggtgtgattaaatttgcaacaatgccatttggaggccccgtatattgaaaaggcaggaaagaactatgtcctgggagccacagatcaataccactttgaataaatctaccttcacctatcttccaacgcagtccggatttaagaaggtctttacccatgtgaattccttgccatgttaaggaaggggaatgactgatatgagcctctaaaaaagaattatgcgggaagtacttgctttttagaagctgtccgagcaaggagtctgatttttcaataaggcgccaagcttgttttgcaagaagagcttggttgaagtggacaaaagatcggaaacccataccaccataacactttttttttgcatagcgaattccaattgcaccaatgtatttttgcaccattctcattcatgccctaccaaaagttttccatcattgtgtcaagttgtttacgaaaaaaaaccggtaaatgaaagcaactcatagcgtaagtaggaatagattgaactaccgctttgagaagcacttcccgacctcctgttgaaaaaatctttttgttccaattgtgcattagtttccaaatcttttccttaatgtggctgaaaagttccttcttatccttccccgaataagatggcaaaccgagatattttcatgacattcactaatgggcatgttgagatgccgatgaaaaaatatttgggcagccaaagtagtgttgggggagaaagacattacagatttgtccgagttgagaacttgtcttgaagctcgatgataagatcaagaactcgtttaatggcaaaggcacgaactttcattagcatggaaaaaaaaacgc

SEQ ID NO: 198052 - DNA, 1706 bp, Cannabis indica
gagacaattaattagtaaagaaacaataacacaagcctgcagctgtaaacttagtcaatgaattgatatgaccaactccaaaggaaagaaattgatttccactattaaaggcacaaggagttacaattgttgtagaattttgaagaatgttgtgactgcctcaaatatcatacttctttaagtttaaaaatacacggattcatatatttttacttcttttagctcttaggcatcaagaattatcttgaaatcctaaatttggtaatatggcattagttgcagcccagaataattagccagtgatttactgggccaatcccacagtcactagtagaaatcttcatcctaaagtcactagaagaaatcatcagcaaaatttataagtttatgctgcaattaaaaaccaacggtacaatgaacatatttacagataaattttgttgaataaagtaaaactcttaagtaatgagataattgtaaattgtaaacgatataatcaatgaaaatttcactcacctgcgttaaatattcaagaagattaatctcgcaatatcctaccagagtgttgctagacacagtattcgtctgcgatacacaaacaatgcgacaaaggaaaacataagatgatcaacagttacagcaagctagtaaagtcaaaccattttacatttcagattcaagtaaaaggtaaacagttctacatatccattttcaataaaactatgaaaactaatccctcaaaaagtctaaaaaacatttatcccccagactattttcacaccaatgccttgcacactcatatcctgtaatccttaatacacccacacaaagtcctttagtccgtcatatataatagaagttatacaggtatcacacataaatttagtcaagttgcgacactgtattatagatacatacctcaaacacagatatccttgcaacatgaggtccatctttttccaaaagaagctttttttcctgtatattgaaagatatggttgctcaatgaagaagaaaaggagaatattcatcaatttggacaatcttttagcaatactcacagaattccagactggtttgtctgtcctgcattatcaaccaaaaaagcaaagggggaaattaaactcaataactaagcttaaaaatctgtacacattgaaaaactttgtgcttttattattatcattggaccgaaacacacaaaacccgttagatgaaaataacatgatgttactaccttattcttgatcaaatgtccaatcttaatcttaatcctattctttgctgcaactggtcactttttttaagcattcttaataccatcattttcgaagattcacgtcattcttatacaattaacacaatttacattttctgaaaacgtactgatcagatatttgtgtacggaatgtctgttctccaaaagaaacacaagcaagccacttgtccttgaacttcatttccgcctaaaagaatcagacaaagcaaatattcttttcagtttcactaaattctcccgaaaaagaaggaaaaaaacaagaacgattaaagtcaaaatagataaaaacaacaggaaaatcaataagaacggtaatcaacaacatacactacggagagtgagaagagctattccagcaaaatgatcagcggtgagaggtttatgaagagaagaagagctagagctagcttttccaggtcgttgacca

SEQ ID NO: 198053 - DNA, 1486 bp, Cannabis indica
atagaagccaatctagagaaaatcaaggccttccttgacatgccctctcccaagaggcataaggacatccagagtgttacagggcgggttgctcctcttagtcggttcaattcgaaatctaccgataaatgtatcccattctttaatgtgttgcgaggtaacaaaaagtttgtgtggactgaagagtgtgaggacgcttttaagaagttaaaggagcacctcaccaaagctcttatcttataaaaaccgatacaagaagaggatttatttatgtacttggctgtgtcagatcatgctgttagcgctgcactcgtgcaagaggaagacaaagtctagtatccgctatattacgtgagcaaaagattgttgggcgcggagtctagagaccctatgattgaaaagctaaccttttgcttacttatagcatcacgcaagctgagaccatacttccaggcccatgtcattagagtactcacaaatcatcccttgcgataggtattgcagaagccaaaattgtctggcaggttactaaagtggtctatggaacttagctagatcgacattcattaccagccacatgtgtcaataaaaggacaggccctcgctgacttcgtagcagagtgcacaagctttgatgctcttctagaagagccagttcctaagctaccaatttggaaggtctatgtcgacggtgtgtccaatgagaaggggtcagagttggggtaattttaatctcccctcaaggacaccagctccaaatcaccctacgctttgggttccgtgcctcgaataatgaagcagaacataaagctatgttggcaagctttaagttagaaaaataagtaggagcccaacaggtggatatttatagtgattcccaactggggtgaatcagatatctggtgagtattagacaaaaggtgagcgaatggttgcctatgtcctaatgttgcgtgaattgttacagggatttaagagttataatatacggaaaatctcgagagaacaaaattcattcgtcgaaatgttggccaagttggccacatattcagaaatcataaagcatggtatagtccctgtttgtcacctgcaaaaatccagcattgctgtgcaaggggtgaatgtcgtggtggataattcacactcctagatggcacctatttatcaattcttgatcacgggagaactcctcgcagatcgagctgcctccaaaaaagctccaaccaagcccctcattatgtgattatggatggaaaaactatatcgcagggggttgtccatgccctatttgaggtgcatcgcagggatagagattagaaaagtgattcatgaggtccatgaagacttctgtggagatcatacttccagaccaagcctttctaataaaatcctgggacagggttatttttggcccaccatgaataaggattgcatggaatatgtgaggaagtgcgatacatattagagattcgctaaagtcccatgt

SEQ ID NO: 198054 - DNA, 969 bp, Cannabis indica
aaactatatactattgagttttattctatcaaggaatataagtaagagagatatttataccttttcattttcatccctacatttgtcataatcttctaaaaaggtatcaggcaagtttagatctggtaatattgattcaatagattgatcaattgaatctcctgaatgaagagaacttggtgtaatagcttcaatcaaatcctacaataaatgaaaaacaaaagtcatttatgtaaatattaatggtgaaaaaactatactattgaatttattctattaaggaatataaataagagagatatagtacctttcctctttcatccctacatttgccaatgaaaatttcatccatgaaatattgggtagccaaaatgttacgtatggtgtagaatagaaagcactgacaacaggtgaaatcaacaccatcataatgcaaatttaggattgctgtagaagtactacaactactgcaaatatacggttgatcatgtgttacaagtagttgactagtactggtttcacttgaatcttctactggtaaacctttatatggcagaatttggagttttggatattcatcaatcttgatatgggagatatggcccatatagaagatgctggttggaatagacttgagatttttgcacccactcaagtagagccctttaagcataacaagattttctattgatgatggaagcacttcaatcccagttccatctaaaagaagctccgtcatattttccataggctccaagatttctggaaagcttttcaattgtgagcaaccttcaagatgaagttctctaagagacttcaacttacaaatgttagttggaataaacttgagatttttgcactcgctcaagtctaggatattaagcacaactagattctctattattgacgatggcatctcttcaatccccgtgcctcttaaattaagcaacttcagattctgcataggct

SEQ ID NO: 198055 - DNA, 515 bp, Cannabis indica
gcgtccctgatttaacacagctaatggaaataatctttgagtaaaagcggatcactgaaaaattcattgcaagtccgtgagcacaaaagaataaggccatgaacactttcacatcataaaaaaacataagcccaaattaagatcaatgaattgccgaacctctagtagcacccctatcactttaagccttgaacaaaacatttgccgacctaaaatgagagaattcagaaaatacttggatccctatagttccgaaaaaaatatcaaagggagaccaaagaataagtaaacatataacttaagtttgggaagggaacaccaccatcacaggaagcatccatacgagtacctaagaaaagatgcatttacatgagaaaataccaacatctagggaaagagagccaatttaaaattgagtatataaaaataaaactcttatttttcacaaaataggtcagttgtagaaactccaatttaagaactacaatgttgatcgaagggaagaacaaaaaaat

SEQ ID NO: 198056 - DNA, 1239 bp, Cannabis indica
gttaatttttgctattactattaggatgtagttatttttattggagtagttgtcactgttattgtgtagtgataatgtagtttattttttatgtaagaaatgagttataatttttttttttatgcttttttattttaacaatatgagtaagtttttgttttgaattgttggcagtaaacttgaggcaagaatcactaaaggaagaagattattagatgttattttgatcaagtttgtaatcactatttaataagtattgtattatagacatttttatttataattttaaaactttggattattgtgatgatattttaatacttgagaatgatgagatttagatctaaaaaatttaatgtaaaaaataagagttgtaacccaacccgacccataatgtattgggttgggttgggttgtgcataaaatataatatgaatgggttagaattttctaggccgatctaattaggttggtctgttgaaataccatcaacccggccaacccaacccgtgcacaaccctaggaataggaatagaaatgagaatatgaatagcaatagaatggaataaatttaaaattcataaaaaattgctaaaaaaagtattaatttttttctcatcatacattggaatgatctttccttccatttcaaaatggaatagtcattccaccaaaatagtagaaaggtcattccattagaatgacatttcaatactttaatatgcaaccaaacaaaagaataaaatgaagattgtttcctttccatttcattacctccaaccaaacgccaccttaattctgcacctaaagggcaaagggtctacttgaagaaatcagattatgtagcaataagggcccttttatcatctttggtaactgcccttgtactaatccaacccactataatatcagtagcagcatcaacattaattttcacaatattcgttggaggtggattccaatcttcctttggttcttgcctcctctttctttcctttgtttctactatcatcaagaagcctaatgcaccaatcagctcttgtagccgcacttagaattacattagcatgattccaacagagccaagagaaaatagcaagcaacacaaagtccaccgtttaaagaagatcaaccatttgtagaagaaaatatattgagtcctggatgttgtaatttttttaatccatttccacaaacatgtcctcttctttttggctctttccacatcttccacaattt

SEQ ID NO: 198057 - DNA, 599 bp, Cannabis indica
agtggtatttcccatatttatataagcaattttcacaaatacacaaaagtaggaaaaatttgacaaaaatacgtggacatagaaaaggaacataaagacggtaactatatattaatttacataaaatacggtatcaccttcctcgacaccttcaacactcttatccaaggaaaaaaaaatcagccattttttctcgatgaagctttctgaaacaaaaattcaacaacaatttaataaaaaatccacaaaaaactcacctatttgaatattcaggttgacaaaaacaaaaaacaaatattaacagaggtcaattcatcaacaacaaattctcaaagaacaaatatgcttacaaacaggtatcaaacattcgaaacacaaatattagaaggaacttagtaagatctacactccttattcaaaattctcatttgaatgttgcaaatcatacaataaatagttgagagattgttgatcggaactccctactaaatccaaattaaaattgaaaacaagtattaaacatcagagccgcaaaattcgaaatgaatagataaatatctataatacaaaacatataattattgtttaattgttgtagt

SEQ ID NO: 198058 - DNA, 1205 bp, Cannabis indica
tatatatatatatatatatagctctaatattaaacctctctcatactctttcaataatatatatttatacttatatattatatataattttaaagtacaaaagtagtacttgtacgtaagagatgatgaagatgatgatgggtgatgataataacaaacataattcgaatgaagtttgtgagctttatgaagccgcagtagacggatgtgtagccacgttgaaatcgttgatccaaaatgaccctttaattctgagtaagatatgtctcagtacccagctcactgaaagtcccctacacgtgtcagcctcactcggccacgttgaattcactaaagagctccttcgtcttaaaccaaaacttgcttcggagctggactctctgaaacgctcaccacttcactttgctgcggctgagggtcatgccgagatagccgtagccttgttacgggaagataaaggtgtttgtttggtcaaagaccaagatgggaaaattcctctccaccatgctgccgtgagaggccatgtacacctcattaaacttctcatttcatcatcaggactgggtcatattgaggagtccctttttacaccgttacccagtggagagactattctccatttatgtgttaagcacaatcatttggatgctctgaaaaaggtggtacacttggccggttgtagtgaaaatactgacttccttaacgccaaagatcatgaaagtggtaacaccattttacatttggctgtcatgttaaatcaagctgaggtacgttgtgattttaatatatatacaagtagctagggaaatatatttctctctatatatatatatatttaaatttttaagtacgtgtgtttcgagtattcatatatatacatatatatattataatgtactactaaatagtactgatgcaaaaattaattaagtgtacgtaacaaatacatattttgtgctaattaattaattaattcaaaatatatggaagctgatgatattgatttttagtaatataatatatctatatatatgccaagtggtttgtttgtgctgattaaggattaatgctctcataataattggatagacgtacgtccatatatatatatagctagctgcagatagagtacatatataggtacaccttataatatataacatatatagagagagttaattgggtaacgtccccacttcaagcct

SEQ ID NO: 198059 - DNA, 639 bp, Cannabis indica
tttgatcttattctagtcatcaaagtataacgcagaatcttccaccacatcaatttgaatcttggatgcattctactcttagactagcttctaatttggatcataactcctattttgctcaccttatatcctctcatacgctgattttagaatgaatttgcttgcaagtaacttcatccaaccgcatctagctattttgaaagtcatctattggtaatacaacaaatcgaacaaattaaacacactacattaagattgtaattttactcaggtcaaaattataaaaatgcccacaaagataaaaatgagaacttaagctcaaatattcacatataatcacaagtattggattataaagtaatataaactatcattaatacttaattaagttaattataattgctaattcatatctcattttaggatatgacgcacatgtccctaatgtgcacttaggatgattttgataacttaggagaacaaaatgtttagtattgttcttatagtgcaagtcgaaaatgttgtttatgtcacttcgttaatttttatagataagagagtatttttagaaacaaccataagaattatatattttgataatgtgtttaatttaggcatttttttgaggttttttatttt

SEQ ID NO: 198060 - DNA, 2155 bp, Cannabis indica
gctgaaagaaagcaccggcatatcacagaaaccggtctcacattgcttgcacaaagtggtttatctatgcattactggtggcttgctttccaaaacgttgtgtatgttattaacagacttccaaccaagattcttggagatatttctccttttgaatgtctgtttcatcgcatacctgattacaccatgctcaagccgtttggatgtgcatgctcaagccgtttggatgtgcatgttatcccagaaattaccatccccacttctgttcctgcaattcaccataatatcccagaaattaccatccctacagtcaccccatcaactactcacatttctccaaccatgaaccaacacaacatgataaccagatctaaagccggtatccacaaaccaaaagccctcaattccacattacaccccttaccagaatccattttaccaaaagaacccaccactctcaagcaggccctctctgatcctctctggttcaagtcaatgcagcaagaaaattatgccctcaagaaaaacaacacatggacattagtgccttacacttctaatatgaatcttgtgagcaataaatgggttcatcgtataaaactcaaagctgatggttcagttgataaactcaaatccaagttagtagcaaagggctactctcaaactcctggtattgattacacagataccttcagccccgtagtaaagcctgcctcagttcgcgtgttgttgactatagcagtttctaataattggccaattactcagctcgatatctccaatgcctttcttaatgggacactcaaagagactgttttcatgactcagccaccaggatttgtggatccccaatatccaacacatgtgtgtcgattaaacaaggccctttatggtctcaagcaagccccttgggcatggaatgagaaactgaaaattacactatgcagcaaaggatttcatgcttcaagatcagacaattcattgttcatttcaggcagtggtgacttattaattcttctccttgtttatgtggatgatatcctcataacaggccctaatcaacatctcatctccactctcataactgaactcaatactgagtttgatgtcagaaatctaggatctcttcattattttttgggtgtggaagtggtccgaaccaaagctgatatgcatttatcccaatctaaatacattacatctcagtcggttaaaaatggatggagccaaaccttgccgagtccaacaagttctgctcacaaattatctctttcggttggagaccctttttctgatcagtcactataccgaagcacattaggtgctcttcaatacctcacacttacaagacccgatgtagccttcattgtcaacaagctgagtcaatttatccatgctcctacaactacacattgggatgcttgtaaacgattatttcggtatcttaagggcaccattcatgagggactcttcattaaaccagctgctagaatggacttacaagcatactcggatgctgattgggctagttgtccagatgatcgaagatccactggtggttatgcagtgtttctaggggacaatttgatatcatggtcagccaagaagcaacacgttgttgctcgctctagcactgaaagtgaatttagggcactcactaacactgctgccgaagtcaattggctcacatacttactgaaagaacttcaagttctcataccttgctgtccaataatatgggttgacaatcaaggggctgcctctcttgcagctaaccctgtatttcattcacgatcgaaacacatcgaaatcgatcagcacttcatcagagatcaactgttggccaaaactctagaagttcgatatgtgccctccattgatcaaacagcagatatcctcactaaaagtctgtctacagatcgatttctttaccttaaagacaagctcaaagtgtgtccctcaccatttcgcttgaggggggatgttagcaatagtcagagttagttcagatgttagttatcactatttctattacggttgtaactgttttgctttgccacctgtcttggcttttctctttttcttgttcttgttttctctgtaacaactctgtctctcacactataaatatcatcctctagttcaaggcttgctt

SEQ ID NO: 198061 - DNA, 666 bp, Cannabis indica
tgttagcttgcttgggtttggtccgaattatattgatgcttcggttatgggaggcgataaaggtaattggaggcttactgggttatatggggagccgaataggagcttgagaagaaacacttggacactcatgaaattgcttagaaatcgctcaacacttccctggtgtattgttggggatttaaataacgttacttctcagtctgataaaaggggagggaacccctatcccaactggttagtggatggtttttgtgagactttggaagcttgtggcttggttgacttggaattgaatggttatcccttcacatgggagaagggcagaggtacaaatgcgtggattgaagttcgtattgatcgtgctgtggtgtcccaaaactggttagatttgtttcccattgctaagctgctaaacttagaggtatctacatcagatcattgccctttattattgttgctagataatgtaattcaagtcgctgccagtcgttcgttcaagtttgagaattcatggctccgtgaaccaatgtgtttgcaaattgttaaggaaacttgggagagtagtggtggttgttcgattacccaaaaacttcaccaatgcggtgagaagctgaaggcttggggaagtgattttagtggaaattttaaaaagcgaatcaaaga

SEQ ID NO: 198062 - DNA, 1028 bp, Cannabis indica
aaaaattgtgcatcatgtaactatcccttatttatttattattgtatttgagctctatctctctcatgctcatcttcttcttccctctcctattcatattcttctttattttttttttcccttttttttcccaattgtctacaacattactcaaataaaatctaaccctctccttttgtagtaggtaacttaaaaaaaataataataaaaaagagtatgtgaaggaggaagaagatttgagaaagataagagtgtagttgtttgtgtgtgagagaggtgaagagcttgcaagcccaccctctttctcccacttatcctatcagttattgatttattttgttattgttttaaggttattttaatgtttttttcttttatttctttatcacatttatctaaatattattgtacttctctatttttaatagtaataagaaaataatgaaacttgtatgtaagttattttcttcagtatcctatattccaatatatgtttagtttttattatgttgttctactattattttttagttgttctgtttcttttcatttttgatgtcttctcctgtatgttctcttgttgtgccctggctcccttattttgttgcatttgttatgttgtttcttttcccagccaatttccatcgtttttctttatctttaagatttcacaattttaatgggaggtaaaactattattgtatatgattctttcagtctggttaacttaaacaaatattcagtggttggtttaacctgtgtaatttgaaaccaacatttattaaacatacgaaacaatagtggaacaacccaaaaacaacattataaaaactataacagctccagtattaatggatttagtgtttctgcttcacttcgccgaaattaatagtttttttctagctgttctcgtgttgctaaggtggttctgtctgtgagtatggaagataaagactttcgttttttttttatttttattgttactaagtaaaaaaaaaaaaaaaaaaacaaaaaaaaaaacgaaaaag

SEQ ID NO: 198063 - DNA, 1144 bp, Cannabis indica
ggtccgagttcgggtctgtgtccatatttggggtccgggtctgagttcggggtcgaggtccagccagggtccgggtctgggtcgaagattggtgttgaccccaaattctttgtaaatattataatacaagctaatacgaaccatttataatgtattaaataatacaacatacattgtattaaaaaatttggtcgtaataattaatacaatacattgcttaatccaaacatagtgttatttattatttaatacaatatgacctttatacggcgtaccaaacgatcccttaacaaattatttataccatgatagaattagttaggatattttttttaattcttttttaagaaatcattgtaattgtaatagattctagaatgtactatattttgcacttgacactgcaaatacaatattgccaaccttattacatttgagttgagctttcaaaatttcccttcctgtttattttttaacttggtatcagagcaatccttggatgtgtgtctccaatggcagatctagagcagttcataacactcaagcatcttcaagcaatgttatcgctcaagctctgggagctaatgttcctcttcctcaggttggcaacacactgaaaaattacttgtttccaatgttttatctggtttagatattgagtatctacctatagttcttatggtcgaagctagacagttaacctcttggcaggaactacaagatatcttgttgagttttaacactaaaatggagagattaagggcaatctcagggacaaataagtctatggacatttccaatattctctcatcaccatctacaagtttggcagttaatgagatcctttggtttctttggtagaaggagctcaaactcacatcaatctgggaatgaaaatcgtagaaatgtaaactacaatagaggtgttggaaattctaaaaatcgagaacgtggtcgtggtggtcgtagtggaggaaatgctaaaccaacatgccaagttgtgggtgttatggccattcaacagccttttattataataggtacgatgagacatatatgaaaaaaattatctatttagaccctatacgtagccataaagttccccgcaaattactgcaaattagaaaggtaataatttttatat

SEQ ID NO: 198064 - DNA, 735 bp, Cannabis indica
ctaaggaattgatatcttgtgatcttaagaatttggaataatattccacttttattaggtaaataatgtttaaaacaaaacctgtaccttagttgagcagtactgcacttttctgctaaaaattaattaatagaaaaattatttgaaacaaaggaagcgataaagttaccaccttgcgtaccttttcttatgcagaagagtaaaatactttatttctgaagatacaaacttgattaatttccagtcaaacactccaattaatgaatccctgcaatattaccagacaagagttggacctgcctgacattttttgtccatatgtgtcaaacaataaaatttggttttcgtggcctggaaaattcagcagaggcactcaaactaaactagcgggagaaaagattggtttcttcattttaatgaaataagtaggccccttttagactttgttattaatttgtcaaattttacatcaagtgaagggccagtgtttgagagtatataagctaggtttgacaagtttttcatttccaaagaatataaccaatatagttatgtatgtgagcctatattattaataggtttaacatgatcatcgatcttccatgaagtttcaggtacggtgcttctcttaataataataataataaaacatgcattttctgataatataataatatactatataagcattttatatttgtcaaggttattaatattaatataaatatggctgca

SEQ ID NO: 198065 - DNA, 1054 bp, Cannabis indica
ctcaaaacacatctatatcaatatgtacatctacggaatcaaagatttttctgcgccaaaatatcaagccgaatttccacaaaatctaacttcttaataagcatcctgctgaaaccaaagaaaaaacctagggtttagaagttctccctttcgggttcttctgtaagctcgaaaaaacgactgaatggatccaaatgaagagagagatggggacaaagtgactggaaactttcaggttgacgatctcttaagcttcttcaccatgcgatcgattagagagagaaattaatagtgcgagaagtagtggcaagcaatcaggcaaacaaacgccaaaaatgggttttttttttttctgcttcttccggaaaatagtttctccatcttgacggagaaaatagatattatactgacgcctataacttccattaatattacaataagacccccaaactaataataattatagtatttcaatgtgtacgaaaatttagtgcatattttttttaaactatgttatacatacaatctaaaagatatacatcctttgtaatgttatattagtaaacatgtcatgtaacgagtaaagagctatattttttgacattaaggtgttgttgtctaaattttttaaggtatttatttttatggtttcatgataattttaatattatggttaataaattggcttagtaactcaatttcaataaaattttaatacatgatatcgtattttgacaaaaaaaaacatacatctttagataatgcatatatatttaaacaagtttttaatccatcaaaaagtatgcacactaattcataaacgacaaagattaaacatattcttgaaaaaattggaggacaaaacttataaaaaaccttcaacatagatcaaaaattaatgaaattatatcaactaaaaaggaaaaagtaagatactatgacaacaatacagaaagatttggcgaaataatctaatcaatcatcatcgtcaacacgacacgcatatcatacaaactaaaaatctaaaaaataacaacaaaaaaaatataacttc

SEQ ID NO: 198066 - DNA, 1369 bp, Cannabis indica
ttagaaaaccaaaaactctgatgaatacttacagaatctaatagaaggaatgaggagttagaacgagcaatggatgcagccagaacaactccaaatgatgcaccgccaatatctgtccgacgaccacgaggaagacccacaggttgcaaactagaggggcacaaggacccagtgtcgataatcccacttattcccaggaataatgaccagggaaataagagaaattcttgttgatgaacatggtccacaaaatcggggtgccactacttcgaggcaagcacaaccaaggggtcaacagtcgtctcatagaaatgacaaagatataaatgatcagccacccaatccatctgctcaccctccacgtccaccgtgtggaccaagaagggaagaaagggacagtatgtatacttacttgaataaggggcattttcgctaatgtgtttgaaaggtgaagacccgtctgaggagaacctcaaggatcagaaacaaatacaacccaaagtaggtcaagaagtcaggggcaaactcaatcctcgagatcacgtgcatggtaaaatttgtcgcgaaatgagagaacaccacgtcgtgaatatcagaacaagcaggaaagtgtaagtaacttgcaaatttaccagtcaaaacgtgtttccccaaatcgatcagtgagtaattatgataataaacaaaattgatgtcaaaatgtatgtgattagcctgatttgcgagatcagtggaattaagggcgtcctgacttacgcaagcagataaatataaatgtattagatcttagagagagattaaataaaaatgctccccaagcacgtgaaaagtccaatcaacctgctgataactctattcaacaaagagtcattcaactgaaggatcaattcagaaaatatcaagatggagaatatgaaaagcttctaggatatgattcaaatgatgacccaaaacatttccatcctgacatattgaattcacaattttcgggaggatttaaaaatccacatgtgatactttatgatgggacgatcgactcatcataaaaaaattaacacttataattttctaatgagtattggttgtgattgactagcgatattccttaaaatttattacatttgattatatgagacccaatacttaattagatcaatagcaatattaacacgtaaaaaaatactaaacattattagtgacttttagcatttctcctttctaatttaataatttttactacaagtatagcataatttatgatcattgattttgtaattattattttatctatatttttataaatagtggttgtatgattaatcagagactataaatgctacacgatgctccatatattccctttgtacat

SEQ ID NO: 198067 - DNA, 500 bp, Cannabis indica
ctaaaaggcacaactagtagtagtgcctagctataccgcttttgaaagtgtcatataatattaatcaccatgtgtttaatagagtattgatattagagtatcaacaataaaagcaatctttagtattgtttaagtggatccaatatcagtttttacccaatcaaaagattttcatttcaaaaaaagaaaaggaaaaaggagagtaccgtatctacataacagcttcttcacaaatcccttatgtggaagtattttatgagatcacggattgtgaatgattaatgatgtttgacaacatatattaaagtcaatcatataaaaaaaaaattgtaaaaaagtgtaaaactactaaactatatttataattacacaaaattcctgttagtaatctgttttttaaaattattatagtacgtaattaattttcttttggtgagcatgtaaataatttctacgtggtgtggatattttatcactaaattgtcatgaccccgattaaa

SEQ ID NO: 198068 - DNA, 376 bp, Cannabis indica
ttagagattataaaatatgagagtctcctaatactaagaacaatagagaattaataagtctcgatatgatttttattaataagaaggtaattattattttattcatattttcctctgttatttattttatcaattattaaatactcaatgtgtctaccatttatcctatacaggaaaacctagctaatgtatgcaacaaaaagaaaaaaaactagtttctaagtttaagaagttattgaatgaaggttttttgtactgtctgcaaaatttaaaaaattgtgtggtaactacaggtgagtacataccactttcgaatgactataaaattttatttttaattacaacttcagtggagagactagaaaaaaaaatagtt

SEQ ID NO: 198069 - DNA, 1381 bp, Cannabis indica
  modified_base (29)..(29): a, c, t, g, unknown or other
caggtctcgagtccgggattcaagttcgnggttcagggtcaggttcgatctcagtccctagatcaagtcaaagattgaggttgactccaaattctttataatattataatacaaactaatacagactagttgttatttattaaataatacaacttacattctattaaaaatttaggttgtaataattaatacaatacattattttatatattactacttttatacgaactactattccagatataagtcatgacgtggcattatatggttgaatgaagatccacgtccataaaaaaacacaacttttttattttttatgagacataatatgtacattatcacaaataatttttttcatatgaaatggttttgaatttcaatgaggataatttaaatgttagacccatcttgggatgagataaaatactaataaaaagtaaaatgtacacactacatgttatgttccacttgtgagaaaatatggctatagaaagtaatgtttttggacaagtgggatttactctaaaaggaccacaaaccaagaaagaaaatacaagtaaaggattcactttacttacttgaaacaaacccaacaaaaacaaacaaaagaaaagaagtatagttttgtttttgatgtcataagtgttttgtttttggcttctaaacatagtaaccgtttccttacaagtgttcaaatataacacccatattttatctctatttatgcttctatatcaaaccttgaaacccttttatatcacgagtattgtaattcaaaccgggggcggacctacgtagaagcaatgccccctaaaaagatcgaaaaaaaaatatatgtattttagttaattaaagataatatttataaatataatattagttttagtataataattaagttaaattatatatgtatatagaggctaatgattcaaattttattatgcttctctcattttaagttctgagtccactactgatttaaattataaaaaatataaataatttagtgttaattattaattggagtttgtataagaaaataggctgatttatttaagaaaatgaatcgaacctattaattaactataaatgttatcattaatctcataatacaatttcttagtcagcttccatatctgaaaatatactaaaatatttttttttcaatttttctttttcacaagagtgtttgttatagttacaacatcaatttgtaatttttgaaaattttcaataatttacagtaccgaaaataaatttaaaattttctaaacacacgcagtaaactaaaatatcaaaaaaaactcgactttaatataatgttgaggataatactaaattgaaaatactcaataaaatactaaaacaaaaaaaaaaa

SEQ ID NO: 198070 - DNA, 576 bp, Cannabis indica
aattgaagagcttgagcaattgtagtaggaatggatgacacactaaacaccttaggtttatgaatgccagctttggccctagttgtcataatgtgactattttgaactatggggacagtagtgacaccaggttgttactgtggatgagtaggaggaagtggagtaggggatttggttgagttatcagtagctgaaactgatgttgcagtggtattgacagggataacatgctcaaaatcaaggggtatggtgggtatgatagatggactgtgttgatgagttggtgagttgggaacagagactggaaatgttgatagaataggagaaagggtgttatgtgaggaggcagagttggtgccattgctcaggtcatggacactaaaagctggtgtaagaacagatgagatttgtgcagggatgtgccattcttggggagaaatagtttttggttcactatgggctttgctgtatgggaattgatgttcatcaaagatgacatctctagatatgtacatcctaccattagatgctagacatttgtaccccttgtggttcaaactatagcctaagaaggtg

SEQ ID NO: 198071 - DNA, 1188 bp, Cannabis indica
actgatggcaatacttgctgagttgcaagtaatttatctgataagacagtttatctatatatattcacagggacataatcaaaacaaaatttattttaatgtcaaatttactagacgttattatagaaacatatggatgtataattttactataatgacactactttcaaaagtcaaccactttttttttttgtaaaacattataattgaaaaatgttacaagattggtcatttcgttttggattttttttgtttttttttttttttttgaaaaatatgttagtagtttctagaattgtgtctcagaattgttgatttttacttagtagggaaatcagataaactttggatagttgatgtcttgtcttttgttccagatgttggaatcagctttatcttacatgtttgaagggcgtaacatctctgaaacggctttcaactcgttgaaaatcgatgatcccaaattgcattctaagttttggggtcagttgcagatacttttgagaaatatgttggcttctgtactttcagtaggtggaaacaaaccctcttctcctcaggctcaaccagctccatcaccctacatatctggagatgctgttaagcttcgggagctttatggaaagtctctcacgtcctctgatttcggtcaattaaatgccatgtacttattgtggacatcctaagcagatactgttcttcggtagcggatcccaccatcatttcatggttgtaagttgtaagagaaaatgatatagcctttagattcaagtcaatcagtgccttgataggaaaacattaatataggttgttttcagttaatttgtggttccatttgagcagttgttccttttattattagaaaggagtaaatataagtaatttaacaatgaatgtatggacttactgatgcactgtgtaaaagaatgaatataactaaataatgagaatttacagttagtggtctcaaaatcaaatgagtgaattaggaagataaatgtcctttcattagaaattatagcaaaatgacaatagcggatgtttttagttagcatatattatgattatagcatatgtttcattcggtctttttttctttctttcagaaatatctaactagtttgattttttttttttttaaataatttttagtgccaaaattataatttaaaacagtaaattgtactt

SEQ ID NO: 198072 - DNA, 845 bp, Cannabis indica
ctttggaacaccacttttaaaccattgacaacatcacatttggactattattcttcggaccatcaggccatagctgttcatgttcactacctctcatcaagttaggaaaaactaccaaggaaaataagattcagatatgaaaaaatctggttaaatgaaccaaatgctgttgcaataatccgtgagcattggtcaactaatttaaatggtggaattgatcttttcatgcagaatttgcaatcctgtatagaagcattacaacaatggcatgtcacaaagtttggaaatttcaaaacagacatctcaaaaatgcagcagaatgtttctctgctaaataatgcagcaaatagatgtgattcgaacatgactgagttgaaaaaatcagaagctattttggatgaattacttgaacaagaagagaaatattagcatcaaagatcaagggtcgattggcttcaatgtggagatcagaacaccaaatgttttcaagctcacgctacatccaggaagtccaaaagcgtcatcaaatccttagtgaactcacaaggaattactgtcacctctaaagctgatatgccaaatgctacttgttcttactatgacagtttgtttgcttcagaaggtgttgatcctcactccctacaggaaatcctctctgctattccaacaaccatcactcatgacacgaacaagtccttaacagagcctttcacaagcaacgatgtgtatgatgcccttaaatctatgagcccagataagagcctcggttgtgatgggatgtttgcatatcaaaaatattagaacattggtggcacatctgtcattaatctggttcttggagttct

SEQ ID NO: 198073 - DNA, 5211 bp, Cannabis indica
tttcaaaaaaattatacggaattttatctctatattttgttaactgtatatgtcgcattatgtattacctatatatcacatatatatagtatttcataatttgatataatcctttaaaataaaaagaatatattatatttaatttaaaattcaattcaaatataatatcgtaactgaacatctaaattcaattaattatttattattttagaaatttccttgccttttcttgagctttggcctattgttttttcttttttggccttagtcaaagcaaggttgtagtattctcgtgcagtcttttgattgcctttcagacaacctactctatttctagttagaaatttaacacacaaatggtaaattgaggttaattactaccttcaaatcatataagagtgatcgacctaacatgatactaaatgcacaaggtacatcaattaccaaaaattgtaccatgattgtattagcatttggaacgttccctattatgagcagaaggcgagtgtgtcctagaagagctacaccttggctggagaaaccatatacgagctgtgtgcaaggaaccgggtctttgagttgaagtcctatcttttcatagttttaaaaagaatatttgaagaagctccatcgtcgatcattgtccgagcagctgacatatttgtattttgtaattcaacgaccaggggatcattgttcaaatatatgacatggtcagagtcttcttcactaaatgagatgactagttcttctctgcatgccagttttttttttctttccacaaccattatttcatctttctcttcatattgtagggttcaagcatacatctctctagctttgtttgagtatccaacaatatgagggcacccaataatcacttataaatgtccgtccgcaggtgggagaatcaactggttctgattattatctggttgggcaaccctttggtcctagtcggcctttatgaaccttcgtaagtgacaattattcttcctgatgaggaattctatttcttatttcagattattgcactcgttggttttatggttgcagtccccataatacttagtagtgtctctcttgcttatgtcttcctagattggagggggtctcttgtacgataccacagactaagttgctgtaaaaatagtttctatttcttcaataaggatagtgaaagaagtctcgaggatgctgtttttgagagatattattgaattttcctttcttcccattatcttgattattgtcttgttcgatcttttaccactttgacccgaactactattattttgaggctgggagttctgattatgttggacgaatgtattggctgtagtggtgtgactctggctggtctttttctgaccaattgtgtctactcgtcgaattgcttcttcaagctttataaatctgcctgctcgatctaaaaactctcccaaattgaccccattgcaagtattttaatatctttctataattctcccagaggttccctccctcctaggataacgactagttttccttcctcagttaatcccttcactttcgtagcctcagtcataaacctactgatgtagtctcttaaaggctcccctagtatttgttttacttcgaccatgtcttctaagtgagttgtaagttttctagaagaggatgttagggttatgcaatgaaaaacttacaaagatatttttgattattaataaagagttaaacattttgatatatacatgaatattaaattattaatatttattattgaataatttttatataaaaattagaaaattccttattcatatatgaggctgtgacttatagttgtacagagaactaagatcacttagctatgaataaaatagtcagattaaagttatggaatctttaattagtggttggtagtatggttcactaatacccattcttcagtgcaagtaatctcggttcaaattacgaatgtagtataacatcaaagtgaaggtgctgtatataatagagattatatatgacaaggaccgatataaatgaagttgtttttatctaacatgtcatttactaaaagacctaatttatatcataatgatgatcgatggtagatcggcctaaatcttgagtaatcatgaacttttgtttatgttattagtttttttaattcactcgttaaagtttctcagagacaatgattcttacaacttctattttagaaatttaataatgttgatggctgggaacatgatctacaattatggaatctttactttcttaactgatcgaatgtttgttccctttaagtgttagttctagaactagaatattgtgcataaatttagaagggatctaaattatactttcattagtgaattaatggttctaagagataaagaagtaattataatggtaaaacagtaatttaaccaaaactaattacgaaccaacacatgaatgacgaatcactggaattgattatatcaatggacactgtagtaaaactcagtaaatataattctataattactaagagttcaattctatatttatattggagtaatcatggaattaataaataagattatttggttgatgagacttaataaataatctagtttattggagtttagaattagagtcaatgatccctgaatcgctacattgaaacactgtcaagggaagagataaagagttatataatgttgctcaaaaaattctattttgaattagaaaaatagtaattatttatttttgtaataaataaataatttttcaaattgttaaataggaaaaagacaaaaattgttaagaaaaaatttatcaagacaatatctattgagataaaacttgtcaggacaatagacatcattcttgtcttaaacaagacatggtaggtgcctatgtccctatgggtttgtattttttggttgattaattaattaattaatttaattagataaatatttgaatttgaaaagtggttaaagatatttcaaagtggttgagatattctctcaagtagttgagagattccctcataaatatcagtaactgaattcagttatagatatttatttatttaaataattaaatacgatttaattaatgagatttaactactataaacagaatcctaatttgagaaattagacactcacttgcatcaagaagtgtatgttttaaacttatattttatgttttgatttaatgtttatacatctagagagtagagatccattgggtacctaatttagtaccatcaaaaccagcagaggttccatgaaataaactttggggctaacttgaagtaacagtgctgctcaacctctgccgaggtagctggaaaaattctaactcgtacatcaccctttatagcccgtaaatccattttcatctcatagtaattgatgtgagagagcatatcttattttcccgtatacatcttctatgtaagcatcttaaacttgtgcggaagatcaagggcatttatttgtggtgaaaatggtgaatctcgtgtccgattaagctttaggtcgatgagttttggattggtcaggctttgcacgaggctcttaagttgatctatttagacttgcaccactggatcaacttaacatgcttgttgatcgacctgtgtcacctatggaccccctaaaacttcacctagcacgtaattgttcaaattaattggttgaacatttggaggaaagtgtccatcctgtcctctttagtgatttagatcgtctcttaaatcgtgtacgggtcccaacctattgaagactgattcacctagtggccttcttgtcagattgttatcagcaattgattggtttggtataaccttttgaggacagaaattatactgaccattcccccaaagataataggctggaaaaactttctcttctatcgtgtggcccaccgtttgatcttgtggcctcagattggacggtctattaccttaggtctgctaagggtagttggttggatgttcttctggcccatactccggtctatttgggatagaggtttctttccctctgttcggatcctgtatgattaaaaatcagcacggtcgcctgcctagagcgattatcaatcgctgcatgttgagatctcatgatctccatctattgatccatccactcttggaattagaatttttgttgtttgaatgcaaaatttacaactgctcgggtatcctcctaatcatggtaaagagtgttagtatggtcttacatctaccctaaggaatctgtaaggttttgcaactcagtatcatcattgatcaccactcgagattttctatcagatggatctccaatacctgggccagtctctccattatgagtactagtggttctagtttcctgtgtacccgaagtgaacccaactagaggagttgtcattgttggaattttatgccatattaaataaaatctaatttcattataatcttatttactttcaataaagatcaaaaatcatttattgaccttgtcatatgcctttttcatatttttttatacatgattatttatttataagttattttaaatcctgaacatatagttattcacaattataatgatgtcatcacagttgaaagtaattgtgattatatgcttcaaattattaagtcccacgatttataagtgcactgaatttatactgatgtgataataatcattgatggggtttacttacacttggataagtagaatatcttttccaaggcattagtaaagtaaactaggatcagatgcatcgactatacaccagactggaccgatattaacaataacaaatatattataaacttatcatcatatcttttctaattcaatatcacttagtagatcatagatcattttatttcaatcttgagatggataggttctagctcaattgtattacacgtgttatttgacttgtttgttacagtttaccagtaagatttgcccaatacttatatcttgggaacacggagtgccattgagtgggagcgctaatcatatatatggaatctatagcttctataactatttagaattgaaatgatattttccttagagcttgacttaatgcagtaaatgatagagcgctcatttcagtaattatattagtttcctaaaaattatttacaagtagctaagtgatttaaggataaaatacactgaagggtaaacaaatttccctattcaatgtaaaccgtct

SEQ ID NO: 198074 - DNA, 896 bp, Cannabis indica
atcccattctcctcgattcctcaggaggaaagtattgcactaagcctcaattcaaatacgaaatgatgtgggaaagagatcctcgggtgttctgggtggttaaaaaagcatggaatgagtcaagtcatgcgcacccgatggttaacttgtaccgcaaaattaagcatacgaaggcttctcttaccatatggaataaatcacattttaggagattgactacacaaatcaatgaggctcgtgctaaacttaagattattgaagagacccagaatcttgatgaggaggctcactccgaagccagagcaagactagacgaggggttaagaagagaagaaatcttttggcggcaaaagtcgagagtggcctggctaaaagacggggaccgttcaacgaaattcttcatggctagtacgataacaaggagacggcgtaattatattcaatgcctaaagaatgacctgggggagtcgattatagcccagttattcattgataaatttaccagtactttctccaagaatggatcacggctcaagtttaatgttgaggagtggactcattcgaagatcgatgacgctgctacggacgacctgatggatactccttctgaggaggaagtcttgaaagccttcgcctccatgggaatcgacaaggcacccggaccagatggtttccctgtggccttctatcgctctcattgggacaccataacagaggattttctcaaattcatcaaccactctttgcaacagcagaactaccccgatacatcaatgatactaatatagtattagtactgaagaaggactgtccatccatggtttgtgattttcgacctatcgccttgtgtaatgtgcactataaatgtatttcaaagattattaccacccgtcttc

SEQ ID NO: 198075 - DNA, 1080 bp, Cannabis indica
gatcatggccaagagattcaatactgataaacagttattcaaatttactagtgggagcaatttgttagtggcataaaaataatatttggcatttgaatatttctgagagaaaaaggttaatgatgattgcctcaattattttcttcatttgctgagaaatgactagtttgacttttacaaatttctacaagttagcaatgcttaacaaaggtaggatgatgggtttaaaattacagagttagcagacgctgaacatatacaggggaaaacaagcttcacatttctggtgtggagaacattattgatgcaaatgaggctttaaaagctaatttaaaggataagggaccttatgaaactaactttgatggacttcgaccacatacaaacttgaagcctcttgagattgaaagttactgattatgcaacattttctaatttagtatccatcagtttgagaaattgtgaaaaaagtgttgcatcaccactcggacaactagcttctctgaaagatctcacaattgacacttaagcttaaacttgagaagagaccattcgaagtgtcataccatactattgttgatattaggaagtggaccagtttgaacacacttgaactaattctcaacatgatcaaacttatataaacgtgtacaagaaaaataatataatgtgtctatatagtaatagtaacagtaaaaaggataagaagtgagtgaaccaaaatgaaagagagaatttacattgaaaattcctttgttcagctgttatgttacatgaaaggaggtctcacaagtcactaataagaagagtacatatatatgatatatagttcattgtatcacaacaatattacatcaacttcatcactttcttctattattactttgctttctagttctatcttccttcacttcaggtgttgagttttgtatcatggcagccgaactggtagctggtgcttgtcttctgcattgaaattgcatttataaatggtatgcacctatgtggctgcagacccgtctcagtcaagtctcagaagctagcgtgtctgaggctagctgttcattcgaagaagtctgt

SEQ ID NO: 198076 - DNA, 1805 bp, Cannabis indica
ataagtatcaagcaattctcataatgtttgtttgggtggggagtggagacaagtattagattaaatcaagtacatcaaaagcagagctacctacctaatcaatatttaattattatttatttaaaagaaaaaagaaaatgggaaacatttttgcttaaaaggatactttactttaggacctaataagaaattaaagaagggttagtatatagtagtagtgatattaataaagaaataagaagcacatgtttagagaaagagagtaggtagataacatatatatatataaataaaatatataaatattatatataaaatggaataggacacctacattgaataaaattaaaaaaacacacatatacataatacatacatatattaaataattaataattaagaaccacttacctattgttgttgtctttccttaccaactcggtcaaaactctccattaatcaatcccctgatctttaatttctttgtcttgtctttattttccttctactatatataaatatacaagtatataaattccttattgttacatataatttgatcatatattaattgatattaataagtatggggagatctccttgttgtgagaaagagcacacaaacaaaggtgcatggactaaagaagaagatcaacgtctcattcactatatcaaactccatggtgaaggttgctggagatctcttcccaaagcagctggtatatatatatatatatataaatttatatacatacatatatacttcttattcatatgatatggtatgaataaagactgctcataaattaattgtgcatgcacttaaaagtctgaattagcttcaattgaagattttctatctactttgatttgaaaaagtatatatatattaattatatgtacatatatgtacaggtttgcttagatgtggtaaaagttgtaggcttagatggataaattacctaaggccagatttgaagagagggaatttcacagaagatgaagatgaactcatcatcaaccttcatagcttgcttggaaacaagtaataattatttttcatttaataataataattgttaaataattttatttattgcacttaactatatatatatatatatatatattaaaattatacttatagaatctatatgattgtgttatgataggtggtctttaatagcatcaagattgcccggtagaacagataatgaaataaagaattattggaatactcacatcaaaagaaagttgtatagtagaggaatcgatccacaaacacatcgaccacttctactcatgtctactactactactaataataaaactagtactagtactagtattcttccagtaacgaaaactagtactagtactaatagcagtagtagcagcagcagcagcgatcatgatcaccgtgatcataacaaacttattatgtttgagaagagtaataacattcccaatcccaacaccaacttactacttcatcatcataatcatcaagttgggataattgaaaggagtagtagtaataatagtagtgatcatcatcatcataatcataatgatgttattataagtgatacacaacatgggctcatcaacttggacctctccataggcctacaaccatttgggctccctactcctactcccactactactactactagtacaagtacaagtacagagcaaaaacaacaacaacaacaacaacacttgtttactactcatgtgtgtttgtgttacaatttaggattgcaaaaaagccaatcatcatcattatgtaactgcaatag

SEQ ID NO: 198077 - DNA, 1126 bp, Cannabis indica
ttctgacatggtatcagagccaatcgacttcccatggcatcaatagagtatactagttctaccccacagatggaagatgaaaatacccaaaacccccttcaaaacactacaatcataaacccacaaaaccctagcaatgtcgctgccacaccctcctcttctcctctgcctttcacaacgtcatcttcttcatcttctctacctacattcttcccttccttcaaccaaaccatctcagtgaaacttgatgattctaattatctagtttggagaatgcaattgcaaaatattatcattacaaatggtcttgaaggttacattgatggtaccattgcttgcccctcatagttcgtagacccaacataaaaccagaccgaccctgagttcacaacttggcatcgctacaacctactgctcatgagttggctttacacctctatctctgattccatgctcggacagatagtgggcttcaacacggcttcataaaatttggggttctcttgaaagaacttactctgctgcttcgtttgccagaagctcagattttcgagctaccttacagaatttgaaaaaggacgggttcactgcctctgcgtatttgtagaaactcaaaactctctgcaacactctggcctccgttggcgaacccatatcttcacaggagtatttaacctatcttttaaatggtctacgaccagagtacaatgcctttgtgactccgatcttagctagacccgtgaagccaaccatcgaagaagttcatgctttcctcctaagctatgaagctcgccttgaatgtcaaacagccactgcaacacttagctcccttcaggccaattttgccaatctctcattcccaaaacagagacccaaaacgccttcccaacaacctccattcaatctcgttactcacctcaaacacaccaaaatcgaccaccatcccttccctcttttaataacccacagagtccatattcctccaatccaagaccttcgaacccttggataccgtctggttctcatccacaaaccagaccacctaagtgtcaaatttgctttaaattaggacacactgtcgtgatgtgttaccatcgcactaacgtcaactttcaaccatcaccac

SEQ ID NO: 198078 - DNA, 832 bp, Cannabis indica
atgtattacacgttattaattaacttttttatgcattacacgttattaattagtttgtttaaaatatttattgtttaataaaattagttagatatattttattataaataaatttaaaagtaaattaaattttatatgtttgaaaaatataattaaattgtattaggtttaatttttattattattatttaaactaataattatgtaataataattttaatataagtaaatatgcatattacttatagtattgtatcgtatatataacatggtgtgtttaattaaatttttggacagccactaattaaataattcatgaattccttctttttttttttttttttttatttatttttttttaaatgtatgcgtgaatttggaataattgtaatttgagaatctttgttaacataactattatatagagatgtcactttcttcattacctagcctataattaagtccatgcggtgggacctatggtcaaagtaaaatgttgttgtttgttttttttaaagaaagtaataaacatataaataaacaaactatatatattaaattaattattatactattccaatttcttatcttattttctgtccgaatctattaatatatatttatgggtgttgttgttccaaaatatatatttgtgggtgcttacttatgtgagattctgtattttatatctaattaatacatgtttgatatatactctgtgattttaaatttgatcaatatgtatataatgaactgtcttcaatcatatgagtcttcaaattcaaatttaattacgataaatttaattgaaagcagttgtgtctaattctca

SEQ ID NO: 198079 - DNA, 1701 bp, Cannabis indica
ctccccaaaacctgacactggagcgcaaggtaatgtggaaagagaggttaaaatagaggaaaaagagctaacaacagagggaaacaaggtaactctcctggaagatagaaagccaaaactgaaggcaagcccatgcgagagtatgaacctcacttcacaacctattatatactcttggccccaagagaagagatctatacgaccacctaatcaatggtgtcgtaccacaaacctcttcccttcaaataattagggaggagggatataaataaattctgtcactatcacaaaaattacaatcatgatacaaataagtgtaatcaattgcgagatgagatagaatttctgatcagacaaaagcatgctacttttgagcagtatgtatgacctgaagctccaactgggggtaatgcacctctccagcctgtgccagtttcaagcaggcttgagatcgtgattggaggccctgacttggcaagaaactcaagaaaggacttagaaagatatgaaaggtctttacaacatgatccaaaggcagaagtattggaagttgtagaacatcctctgaaatctcagtactaagagtgtgatccaatcacatttggagactctcactcatatcatgtcaactaccctcacaaggatcccttgttgttgaggtgaaaatagccaacatgatggtggcaagagtgatgattgatgatagagcaatctcaaacatcttattcaagaaagccctaatacagattggtttttcactgaaagatttatagccgtgcaagcaactaatgtatggctttagcggaacatgcatagctccatgtggtcagatcaaactaccactaacagtcaacactgtcccaaggaagaccaccatcatggccacgttcataatggaagatgtgatctcttcgtacaatgtgatgcttagaagacagactttatatgacctttgagctatatcatcaatataacacgtgtccgtcaaattcccaacggtggctggtaaagggattgcccgcgagtgttacaatgcctcattaactcttgccaacaagacctcctctatcgctttggcaccgaggggacgagaaaggctctcctaagtgagtaatcctccctaatggaggaacgttcattagcaagttagcaccgtttaatctcgaaagataagtatatttgtaagttttttatattagtattgatcaccctaatggtggcgactgtataagacttacaaaagtatgaaacaatggtggaagtgttgggttttatgccctaaataaaactcatttcaatataatcagatttacttattaatatagatcagaaataacatttaatgttgcatggttcacatgatttatttcatgattatatgtacataatgtataaattcatctgaaacccttttcacatacttgatcctgtttattgtgtcgtcaacacattggaaagtaaacatgactatgtgaataaagtttcctagatttatcagacacagggttttactgatatgataatctacaacagagtttacttgtatttggagaaatactatgttctttccagaacattggttaaagtaaagctcaggttggatgcatggagtatgcatcggaagggaccgatattgaactttgacttagatttattaaacttaccgtaatatctattcaagtcaatatcgcctaaacgttg

SEQ ID NO: 198080 - DNA, 1066 bp, Cannabis indica
atatctaacatcctccttcctattctcaatcaaacgcgaacccgacacactacgaaaaacacttattttttcagacaaaaaacctcacgtacggtacacctatttctgttctcttctcagtattttcctcaattttttttacattggaaacttaaatacattcattaaaattatttatttttttggttttgagtgagaaaagaaatagtgattgtgagtggatattttgggggttcgaaaatttgaagaagttttggattttcaccaaaagtttgtcaattgatgcttgattttgagcttaaaatctactctctaaatacttgtttccttaaaataggtgttagtttatgttatttttgagtcatctttttaagtgtttttaattagctagtttcctttcatttaattctggtgaataagtcattgtattcattcttgatcaaacattactgcattataaccttaactttgtgaactaattacgtacatgtatattgcagattctcctttttcatattttccttctttaacattacaacattacattttatattttccttttttaaatataaaaaataatcaattttcggcttattatttggtttataggcgtttggttataaataggaaaagtttatttatatttaagcattttagtttttttgttttgcttaatttttattttgtcagagtttatgggtatgggttagggtttcatctcttttacgttgattctctagagtttattttgagttttagtgtgtgctactctttaagagtgttttgagtgcatcattttggtttctcgttacttttgtgcttagttactgttttgatttttgagtcttcttattccatctatacctaaagaaatggttaaaactcgttcttcaatttctccttctgaagatcaatgaaggcttgatttttttatggatttgaagtttaatgaattgaaggatgctattgaaaatgcaaaagttgccaaagttagaaatgatagtcgagtggtgagaaggctgaatttttgagtgtatacttatatgtttagtttaattttgttttt

SEQ ID NO: 198081 - DNA, 1712 bp, Cannabis indica
tttctttaaggcctcagatgtgttttgtgtaagattcaagaagttaaaaaactggtatggagcagccttatggtatggagcgggcttatagttggttaagtttgaaaagactgcagtttgttttagtcccaatattctgagttttgagacaaacaaattagtggatttgttgggtgtgaagggggtcaattgcctcgagaattatttgggactttcttgttttgcgggacatagcaagaatggtttttttgataccatttgagacagaatttgaaagaagcttaatgggtcaaaatcaaaactatattctatggtcggtcgtgagatcctcatcaaagcagttattcagtctatccctacttatacgatgaatctctttaagtttttgaaagcttttgtcaaaaatgttcatcatatgtgtgctcgtttttagtgggtggtaatgatgttaataaaaagatgcactagtgtacttgggagaaactttgcttacataagaaaaatggtggtatgggctttcgagatcttcatctgtttaatcaagcccttttggcaaaataaacagtaggtggtgactggtttcccttcccacccgagagtggatgtgcctcatggaggattggcagtgacattgagttcagttccaccaatctccaaatggacgctcctccccgtcctggcttttttcaaagtgaatacagacgcttaaattaattcgacgagcaagtgttgtggtttgagtatggtgattcctaatcatttggaagtggctaaacttcgacaagttggcacttggaaggttgttttgttcttgaagtcactgaagctttggcaatccaagatgcttttattcaatgcctctccttgggtatatgacaacatcatctttgagtctgattttttgaatgttgttcttaaaattaaaataaacgattcgatcatcacttctttgggttttgttttagatgatatcattggtctttgtaataggctccaggtactagttttgtccattgtaatagatcctgtaatggtggtgcttataccctagcaaaacttgcttttttcggaacgtatgtagtagtattgtttggtggctaagtaatcccagttgtattctgaattgatagctaatgctatcattaaataaatgttcttctccactttaatatagtacttcttagtttttgatggctaagatttttctaaaaaaataaattgtttgagatgttttatttttttatttttttagtaagggttgagatgactaaagcatattgtttccatgtaaattgaccatttttgacatcgtatatctttcaatttcttctctattttattttgttacgtttagcaaacattaaaatattaagataacattattagaaacttacaaaagaagagtataataaagtacaattgacttatgttcaaaagaaaaaaagaagttcaattgactcgactaaaattaaagtcaacatacatatttgaacatagtcaaataataatacaaatataagattgattttaatcactaaaagtcacgattaatttaatcaaatcaaatcaaatttaaagtaaactaaactttgattaatgaaacaagataaaaacaaaacttgccatacataacatcataactgctttttgcctaaatggaaaaaaacccctccaaatatatttatagttaattgtctccctcataaatatat

SEQ ID NO: 198082 - DNA, 1532 bp, Cannabis indica
gtccaatgtagcatttaacttgccaacttgtatcactttaataattagcatatcagcatgattgagctttgtggccattttcacccgttgatgagtcccttgttaactatttgtcttacgaaatggagtttggtgtcaatgtgttttatcctttcatgaagtacattgtttttagctaagcgtatagcattttgagagtcataatccacacttacatccctttaatcaaactccaactctgttatgattccctttaaccatagagcttccttgaaaacttcattgagggcaatatactctgcttctatagtggataatgccactaaatgtggaaatttgattccaactaactatatatctctccaatagtgattatgtagcttgtcaatgatcttcttttatcaaaatcaccgtataatcagaatctcggtaactagtaattgtgcaatccatctgatcatgtttgttgtagtagatcttcaaacttgaggttcccttcatgtatcttagcagccatttcactgcttgccagtgtttaaaacttgatttgcccattgatctactcactaaacctattccatatgcaaggtcagatctagtagaaatcatagcatacattatgctttcccacagtattagagtaaggcactccaagctctttattttcttcaaaagtagcttgttgatctatcagtgccttgagtttgaagtgagcaccaattggagtgtgacaattcttgcatccttcttgtcaaaaatgggaagaattgttggatgtacagccaaagtctcacattagttagaaatgggaaggatcaagggtatgtaaggacgaataatatctccatttgaatgaggccttttggaaaggttcccaaaaaaaatctgtgagggcttacgctcaaagcgaaaaatatcataccaatgtggagatagatggcagatgatgttcggatgccaaagttatccaattgaatgaatcctcagaatgccaaacaaaggagataagcctcactaatctcacgatatatataggatctttggatgtgcttagttagacaggtggtgtgctctgaaggagttggtttgaaaaaagagcaagaactctcgagatagtagttgtgctccatgtaaggcacgtgcgccaacatattggagggaagtacaatagtttgtggatagttaacggaaagatcatatgagggagagtcaagatggcgttttttgtttgagaggaggattgttgagtatgcaaccagagtcccacattgactagaaatgggaaagatcataggtatataaagatagacaatatctctattagaattaagcattttgggaaggtgcccaaaaataaatacgtctttatatttatttttaattttttaagaagcgaaatattgataaaattaactacaattaaaattaatgtataaaacaacaatatcattatacataatgtgtcaacggaataacatgatgtttttttttttgcctcaaagactacagataaatgtcaaaaaaaaaaaaaa

SEQ ID NO: 198083 - DNA, 750 bp, Cannabis indica
ctgttattattcttttaacattctttattatatcggtcaaagatggacaaatgtgatttcctgatctaatcaagttgttgttccttgtattatattgtattattggagtatgtaatggtgctcattaaagttattttaccaaattaaggtttgaatttttattaatgagaattagacgcggtcagtgtcttaaactgcataggaaccattttactgataatttcaacttgttctttgtttatgggattaggatttaaaatttagaacctaaacgtcgagtctcaaacatgtttaagacatacgtaattaccaaagattatacttaattaccaatcatattatgtgtgaagagaggatgctattgtcaacctctcataaataaatgttggaatattttttatttcttttgtagctcattataattacaatatcaaacatgtaaatttttaaagaattataaataatttacagtattaataaagttgttaatattaaaaaattactataaattatttagaattttacaaaattttacaatattatacctataatgaataccattataaaagaaatatttcagtatgtatccggaaattaacgaattagcactctaaaattcgttctttggatcaatcatttctttaattagttggaccgcattgaacgtttgccaaacttttatgatcattctcaactactaatgagctgacaagaaatgaatcctggtagcatttacaccctcaatctcaa

SEQ ID NO: 198084 - DNA, 1078 bp, Cannabis indica
cttattattatttaataaagtgggttgatttggataattcagctaataaataaataaaaagttaatattattatttaaaaaaatgagttgatgtgcgttcaataaaaagaccttgttttttttttaattgccaaactaaacatagggacaatcttcatacaataaatgcttaaaagaaagttattattattattataaacaaatgtgtttacataataatattaaatcaatacaaccatttttttaatgataataacaaatctataaataaaataaacaataattgtttcatgcctggtattatgacaaaattagccccattttttctactcaactcactcactcactcattctgtacaattagatttgggttgcaatgcaattgcatttatatcaatctaaattaagtactgcaaattttgctcaaactcaaatggtaagccagccagccaatacagcacaaccccaaatcatcaactaacaccagagattcattcctctgtagttgcatcatcatcttcatcttcttcttcttcttcagataaacaaataagatatatgccctttttttcatttatttaattctatatctctaccattcttcttaggaacttattcaaatggtttatatataacctgcctcctccatttgccaaaacagcaatttcaatattaagtaaatctcttcacctccatgatgtagcaactggtctgccttgaatgtatacacatggttttttatcccaatccaactacattcaaccgtttcattcatacagtgacgtttcatggcttccctgactcgaatcacactttcccatctccctcttatctcataagcttcagccaaaaccaaataaggtagagatgattttggctttatttccatcatcttttctgcaacactttcaaccaaatttaagtccatatgaatattggaacaacaaagaaccgctctccataacataaagctcggttcaaatggcacttctgctataatattcattgcttcctcgagttttccaacaccactcaacaggtctattatgcaaagatggtgctcatactcgggtatgat

SEQ ID NO: 198085 - DNA, 2544 bp, Cannabis indica
aaaaaaattatgattaattgagcaacgtataggcttactcaaagaaatgatttcagatccctttttgagtagagttgatctactattaatagaggatgttcaaaataggattcaaactcctcgagttatcatcccactagttttagggaaccaacgtttttttttttttttttaaattctaaagaaatatatcgtgattcccttttgaatggacattaaatacatattcaaactaagattgttctcaactgcatttatgacatgtgtcttccctttggccggcctgtatgagattcatttcctctaaccaggtgtgtgcgtcttgaaattgtacaacacattgcatttaactcggcgacatccctgctggctggaaaacatcttgactgactggcttctgagctcttttatcagcacaggccccatagagatacgtgtcacccaaaggaacctgccatgtcacacgaccaacttttggaataataataagcatagatttatactgtataaatattcattcatacaatataaaataaataaaaatggctagctcgaatgtatatatatatatatatatatttagcgtatcatgactttaaaataatttgagatcagatataacaaacactattgtaccttggttagagactcgtactgctaacgtattataaaatattataatttagagaaaaaaatagagaagaggagaattttcttagtatcttattctaatcggtcatctcctatttatatatatacgagagtcaaagattagaaaactaagaaaagtgaatattaattacaattaatggtaataaataaaaaatttagatatttatgtatttattaatcattagacctataaaatatgtttttttttttttaaaaaaaaaagaggtaaatcataagaaattgaattatcgtcataaacgtaaataattttaaccaaaaaataattaaaattttaattgtctatattgttaatattaattaatttaatttaataaaatatgaatattagtattaatattaaaattaatataataataaatagtaattggatgatcataattataaaaagaaaattataaaaaaaaagtatacaattatacataattgacaatatataactaagaaataagaaaactagaagtttgaatacaaataatttttagctaaaaagaagtaacttctcaaacttcaaaacttttatctttatttaattacttatttattttttgaaattcactttcatctttatttagtatatgtattatatatacgtatatttgacgttttaaattattaaaagagaaagacataaataaataaaaataaaaagtcataatccaacttaaacttattcaaaaagaacctagaaacaataaatatattatagtcttaaaatagtaatttaagaaagggtaaatatcattttggacactgtattttataaaaattattaattagaccctctgttttgttaaatgacaaaatcaaacttatattttctaaaatggtaaaaataggaccctgagctcaattcaattttttaataattttattttttaatataaccaactttaatacaatttttaatacgaacagatacaaaaatgtaactagttttgtcataacatctgtttggggaaaaattacgaacagaattaaaggcccaatgaaataaaataaaagtacaaaggcccaataaagtcgatacccggaaacccaaaatccaaataaattaacaaaaaaaaggaaaggcccaacgctgtacgacccagtaaggaccatctcctgatttgtgacgataaggaaaaaatacaaatgttgacagaaattaggatgaagaaagatgagggattagagcttaccgtctcagaccgacagaggaagacctagacgacagatatattaaagaaagagagttttccgtctaactcgccgacagaagactcacttcctaaaaagtataaggcaacatagagcgcgagcagttcaaattgtcaaacaaatgcctctatcggaaagaggcaccaaaataaagatcagcattgcgatctttcatttacctcaggtattaaaagagttccgtcgaaaaaaggccgttgactgaaaaggtaagataaacactccaagaacgagacacaacacagctggactcggagaagataaagaatagtagtgattacctaataactagacgagtggcaaagtagggagagcagagagaaaagacacacgtcaggaagagaatagataaaaaaaaaataggccatccatgcaatcatagaatgtactatataaaccagaaaaagactacgtaaaaggggtaagattaggaactgaaaaagagaggactcacataaaaaaatttcgactgttcttggctaaaacagtttggcgccgtctgtaggaactctcactgtttctttttcaggagaccttctcattacacgattcacattcagacaaagaaaaaggtggaggaaattctctgaagaaagtaagtggaaagacatgacgaatgaacaagaagatctc

SEQ ID NO: 198086 - DNA, 1978 bp, Cannabis indica
tgcatgcatgaaggactcgggggaaaagaaaacccagcaatactagaagcttcagtacatccgcaggaccagcagagaagggccagggatgaggtggcagagataacagaagcagaagcactccgcacgacaccctggtagcgaactgcaaaaccagcggttaccgaaaatccatcgatggtgaataaagatacagaaaagttgcaggaaatgatgtggaataaactactggacttggaagcaaatagtcaaatgggagtacacagtgagtgggcgcggacggaaggatcagccctctcaccttttggaaatcatattttacgtgcagaagctccacaacattatgtggctccaaagttaccagaatataacgggacaagagacccctcagagtatgtatgtcagtttgagcaaaaaatgttaactgtgtcggtcctattggaggaccttgaggcaattaaatgcaagaacttcactgagggattaaggggtcccgctctacgctggttccacaatttgacatcaggaacaataaactcatatcaagatttgatcttaaggtttcagacaaacttcgtgataagtgtcaggactgtaaaggtagacataaatttaatgataatacatcaaggaccagacgagcctttggaaaagttcatcaacagattcagcgaagaatacgtcagtatcccaaagtgcactgattcagtggcaacaaaggtactaatgcaagggttactgcatggctcggagttaaaaaaggcaataatagtagaaccaagtctgtctctgacaagggccctgaccatggcacgagggtacgtggctttagaattacaagaaaaacgacatgctaaggaggtatcacgggaaacatcaatgctgggggatgcattcatattcgagacaaaagattgaatgccggtttcacgaccacacaataaaaacgaggggcggcaagctaatgacagaaataccaaagggccgtgatgacgagtatgggacaagcaaggtaaccaagtggtcaacggagcgaggaggagttacctcggatgaccattacactaactgagttaatgaggcgactgaggggaatgaaggaaacaaggtggcccgccaagatgaccattgaccccgaaaaaagggacaaaaggcggtactgtgcctttcatggggagcatggtcatgccacctatgaatgtagacaactgaagattgagatcaacaggctagttagagaagggttcttccaggactgcctgactgtggattcaacgctgcatgttcagcaaggacatgataagggtcagaatcaatccctacccccatacatcaagaagattgtgaacgtgatctcaggaggatcagacttaagtgggaattcggtccaagcctcattggcccactttcgtcggatccactccatcaaggcaatgacagtaatgataacgaggacctgacgtgctaatatcattcaatcaaggggaggcttccgagctagaacacccacatgatgacgcccttatcattaccttagatgttgcccacgttcgtatgaagtgaatgctggtagataccgggagctcagccaatatcctatttgctggggttttaaaagaaatggaaactgaagacctaaaggcccaagagacacaagttaccttagtgggattctcagggaaaagcgccgtcgcctgaaattttgttcaactacctgtctacgcaaatggagtaaacaagtcggccaaattcctaattgtggattgtccctcagcctataatgccatcctcagccgaccatggatccatgcaatgaaggcagtcgcttcgtcttaccattaggtgatcaagtttccatgcaaaggaaaagttagagaaatacgaggagatcagttgggggcccgcgaatgctacacctcatccttgagaagcaaaaacaaattatatagtcgacagatttagggaaagaaatgttttt

SEQ ID NO: 198087 - DNA, 1268 bp, Cannabis indica
gtgtgaaaatatgaaaattttggtttttttgaaggaaaaagatggtcatatttttgtaaacattgccaaaaaaaaaacataaaaatgaaaattccctagtgttacaagaatgtgaaaatatgattagtgttttataaaaatttgaattagcaaaataactttacaaaaaaaattattagcaaaataatcataagttatattgtgcaacaataaagttatgctgtacaactattatggctgtataaattaaatcaaatatgattattttataaattttactatttttgaaaagtttcccaaatatgattcagaaaatgaataaaggtaaagaatataatgagagcaagtatgaggtttcacagtagctcatagactagtagtggtataagtttgtacatattatcaacagtgctgctggctcaaacatttaagaagttttgagcaaaaaattaaaaagggccggccctctttaaaagtgtcttctttctttcttttattttatctttggaaaatacacacgtacgtatctaatgtcaaaattaaaattgctcaagtgggtgtgtgttggaggttctaggttcgaataccaagtaaaacatggttgtaatatataaacgcttaaataaaaaaaaaaaatgtcagaattaaaattagacttaaaaaaaatggcaatatcttaggggcttggctaagagtcagatctgattatctgacaaatgtgagtacgtaggttgttctacagatgaacttaagttatcaaacttaatggaatgaatgaccaatgaagtttgataataaccttaaaacagtgtttaacaattctctaatcataacaataaaacaacaaaaagtaaaaaaaggcacaacaccagccctggtggattaagacttaacattataatcataacaacaacacaagcctaaacactggcaaaagacaagattttggctcgtttagatttattctagataatgaaaatagtacataaacaaaacaagtcatttggctattatctaataagatggtgacttttcaatcaggtaattaaagaatattcagaaattcacaaaagatctattaacaaatgtagatacgtacctggacgtgaacgtgttcttggcttggccccccaaatcaatagagctccaagatcgataccacatacgtacagttgattaaatataggtattattattttagtttttcttaacaatgtatagttatgtttacactctgttctgcaaaactttaatgtaaatttgttatg

SEQ ID NO: 198088 - DNA, 2193 bp, Cannabis indica
tcaagtctctctttgatcttatcaactttatgcggacttttaattcaagtgaatgggtcaccttgaacaggcaattcagacaaataagaatggtctaaagcttgcctaaagtcctccatttgagactcatttctcaaagcttttccttgtttgttggcagtatctcattaaaatccccaatcactggccacggtaaaagcggagcaacatcacgtaacctcttgaatgttgtccatgattgacatcgattattttgctccggagaaccataaaaaagcagcgaaatacatagtaggactatccccaaaagccaaataacattcaaacagacttgaactaaaattcagtagtgttacattaacatcatctttccaaagtaaaagtaaaccccctcccagacctaccagtgggacttcgagtccattattaaaatgtaaagcattatgaaaacgagaatttacattagaaataagtttagtttccataataaataatacatgaggagattgctctttgacaagcaaatgaagatgacggaatgcgctcggattccccaggcctcgcgcattccaactaatgattttcatggctggttgtggggctgtgagccagtcgccgctgaattgtcaaagaaacctgagtgatccacttctagaccagaaacactctcatttggctcaactccaagtgacaaagttggattggacaaggcgttgtaggacccctgcattgcttcagagttttccgcagagagagactatcagattgtctcttgatgattcggtttggagacgtgttccttatctctagactgcttgacagatgaacataagacaacatctgttgctgcaattatggacatttacaacgtcttgaaaccacgctcatcacgtggagtgttagttatggatggacttagaggataagtggcaatggtgccaacatctggcatgtagatatcagagagatcattaacatcaacatgctcaaatgatgttttatgttgagcaattatagaagcggatggccatgaggtttcatcttttgcaccaatattcttgttagtgatattagttaagagtgctagtgtaaatttcacaatagtcggtggtggtgtgatagcatttgcacataagttagtgtccatgactgctacactttgagcagaagtactagaagcatcagtgtttatcaaagaagagattacacttacgagaatagtggatttgacagataaggcttcagttccttcattatgttgcttctcaaaagattctcctcacaaaagtggccttggctgtggtggtgttctgctagagaggcctagtaccgctgaaacaagtgaatttctagccaaacgcaaaggccatgcattctctttagaaaaatccgttctatacctatcatatccaaatgtgagcagtgcaaccccttttaattcaggaccatatagtatttcaagttcaataccattatacttttcatccataccaagcaattcgggaaaggatgtccaagccttccacactccatacaccattctggtaacctttcataacggaaatccacccaaaatttgtctctagtttgtttaagttgtatgttgcgacctcttaacaacggtttggtgacatcacatttaacccgaaaccaaagaaaaggacccaaccttcttccaacaaatcatcatggacttcaaggaattcaccaatgatgtttcccaaagctctagctaatattttcgacttactaagaaaaggaagtctataacattagacccaaaaaagagagaaaataagatcttcagagactttcttcagaacacttggtatgtataacactatatggtgattttggaagtgatagggctccttcagtagaacccttggcttgtctctttcacatcccaaggtaagaacaaacagatcaggtggtttttcaaatattgttgtgtggtaccttccattccaataatcttttatttgcctttgtaatgtagagagaaagacaaatttggtggtgagaactctagcaaccagcacaatatccaaattactattttgcacatcaacatcatcaaggataagtgttgattcatcttcttcagcaagagtcattgttcctttcattttatcagtcagaggattcatgtttcaggtggaaaaaccacaaatttttggattgaagggagca

SEQ ID NO: 198089 - DNA, 566 bp, Cannabis indica
ttagtattgtgtccactataattagagaaaatagcttttatttatgatatttctttaaattttgtcaaacggtctacaaacaaagtaactcatttcttagcaagaactactggtgctatttttgatcgtgtttattgagtgagtaatgctccttcggagttcatttctgtaatgatgaacaatttattgctttattgaagtttttttcttcttgtaaaaaaaaaatagtttttcgaaaatattgctaattaatcgtgatacgccatttatagaaagtgttggacaccactagttctcaataataatgctcaataattaaatatacgtcatccgtatctagctattaattaagtttatatgattagttaatgagttagttggccagtacgagtatattctaccacacacacaaatatttattatttttgtaggaacatggaacatgcatatatttatatatatatatataatatatatgactcgtacataattaattatatctttgtcaatttatgatatctatgactcacacttgaaaaagttgctatttttactgataatttttt

SEQ ID NO: 198090 - DNA, 1062 bp, Cannabis indica
ctaaaatttgactcccccgtccccgcccccattccccatttagaccggggaatccccccccattaagggcgggttcccgcagggcaccatccccatgaaaaaaatgtgcatccctagtcatgattttatataaatatgaacattgattcacattaaagaaaagaaaaaaaatttgaaaacttattcaaggtgcactaaatgcccctttaatctatacaagggcctcttcaaaataaaaaaataaaaatctctacaagggtcaacactaaattatgtcaaggatgaataacacctcattatttatctgcattaattatatgttaataaaaacaaatttatatttatatcattactcttatggtgtttttgcacctaattggaataactaataatatcctccattaagtcttgtcttttgacatggtgagaatgttttcttagaatttctgtcatctcttagaacgtttgtctttgattgtctatttcgattatggcgtctagcagttattcagtgaatgagttggaagatctctatgctaatattgagattgaaggggaagatgatgttgccaatatttttgagtttgaggaatccgaagctgaggtcactaatgcagagctatgtatcgttggaagatttcttacagccagggcgatcgactatgatgttatgcgccatataatggcatctctttggcaaccgagaaagggtatgtatgtgaagcaactggaatcaaaccgattcttattccaattttaccatgaaattgatttgaatcgcgtcattgaaggaagtccgtggactttcaaccgcatacagtttatctttacaaaattgaagccaacagacgatcctcgcacagtacctctcaataatcttgatatatgggtacaagttcatggcctccaatatggatttaaatccgagaatgttcttagaagagcgggcaactatataggaacatttgttgaatctgatcccaaaaatttcagaggtatttggagagactatatgcgagttcgagtcacattgaatgtcactgttccattgaaaaggagaat

SEQ ID NO: 198091 - DNA, 1894 bp, Cannabis indica
tatcattttcgaccagagcatcaatatgcgaaaccgtaaaagattgaattcgaacattgaatttgtcattccaaaggagagccaaaccaccgcttttgcctttagcatccactgtaaaacaaccatcataacccaacttcacacgaacaacctccatagcagcactagacaatcgagtttccgacaagaaaatcatctcgggatgataatccttgacatgggaattgagtgtgttcaatgtccaagggtttcccaagtccttggacattccaaaataaggccttcattgcgatcggcgacccagaaagtctgggtgcgccgcttccattgttgaatcaaggattaaatctgacaaggcagaaattcccctgaactcgtaccctcttcatttacattatgagttcccgcattagccatggatgaaagacctttgtttttgagtcttttcggagtaatcttccttctctttttcttgctatcttcctgtatgtgttcatttaaaccagtggcataacttatagggatatcaatcaaattaagatcatcattgaaaggagtttccttcccataaactgagatcttgggatcttgatcaacaatagggccaaatgaatcattgataagatctttggacatatcctccttccaagaaatgtggcgtttatttgatccttgacctgcttgtttaaaattctagacaaatctaccatctgacccagttactccctcagaacaagctgccaaagccaatctctgattaccattcatgtcaatcttgcccaacatttcctccttttgaatgacagacttagaagtagacttttgctcagccatcgtatctccagtgtctttttcaatgatcatcgaatcgaatggcctagtctcctctgtgttaatagccatcgaactggattgagcaccagagccattatttttaatttcaacccctgaattccaggaagaggatttaggcaaagcaacaggattatctaaatcaataaaattaattttcgaagatgagggaaagaaagacttatcattaactttaagccatgtcccaaaactaggaatgctatttccggaatcatctttgattgtttgaattggttcatagcaaccccgagcctcatgtcccaatcgaccacaattaaaacacataaatggtaatcgatcatacctgaaagggagccatatcttgcgaccatcactaggaaaatgaaaccccggacatagaggtttatgaatatcacaccagaccttgaaagtaaagaaacccttagccacaattctcagaatgtctgccttttgaatctcaattatatcccctgccaagtttgccagacgctccatgtttctttgagtaattgatcaagtggggagatggagtatacgcccagtaatctgaaatctggttaactcactctcccaattgattggaatttgactcattctctccaagattagagtaccattgttgagaaaccaagggttcttggttaaaattctgtgtagatcttgagttgatttaaaggaaaaactaagaacatggcttccttaatacatgtatgtttaatctccactccccaattcttttctgagattccccaaactcgaccaagaaatgtcctcaagagagaacgactcataggtcgattggttatcaggcgaccaatcgcacagagtttctcagccgcggcccttccttcatcattcacttcccatccgtattcgtctagaaccgaaaggttgtgagtttttgaaagctcatccatggtgatttcaggcgtgttaggcatcccttcaggcaggctcttctcgcaagagagcatttatccatggtgatttcaggcgtgttaggcaggctcttcaacttatattttattttttattttta

SEQ ID NO: 198092 - DNA, 1790 bp, Cannabis indica
agagactgtgattgaagaacactgttgccgattcattcgattccttccttctgccatttgcagctccaggatctgttgagttctgatgttgattgctcgagttgctggtaatgacattcgccattaatggtggaaattgctctgataccatgttgaagttccttcttgacatagctgcaaagattgttaagaacagaactgaaagcaaaggacatgaatgaaagaaaagagagaaaagaggaagagaaagatagaatcagagaaagataatgattcattgattggctcactaaaggagcaagaatatatacaagctaagacagaaagaatcggttgtaacaaccaactgtcagctaacaactttacaacagaaagcaactaacggctgacagctgtacaaataaactaactaacttctaactgtcttaacagtcttaacagcatggaatggaagaaaaaagattatggtagcatatctagttgttcattatagctagaaatgtccttaattatgtagcaacacttaattaataattatattatgggtttgtgtttgcctattaaattgtattatatagtattttattaaattatattttataatatcattatgtttagtattttttatataatattaactattgaggctagctaaaatagtcatatatacatgtgtgttggggttataggattgaatttcatgtatgtaaagctattttttttttttttgaaaaaaagaagtattatataatttgtaattgtatatatatacatatcaatataaaatattttaatacaaattaatactacatgatattatgtaaatatctaatgtacacataaaacataattaatgcacggaaatttaattagtaattaaacaacataattgagtgttgttatgagagtaactgaagatgcctacacatgtttattcatagagatcttatttagttgatcaataataattaagaaaaacaaaaggaaaaagtagaaaagaagaagaggtaaatttcctttcttttctttttttcattttttgccttttattaataattttgatcaaacttacctgataaagcataggtaggaccctatactgagagaggtaataagaccaaataaataaattaaaaaaatggcaagagagctttgttgggtatatagagttgtttaaatattttatataataatatacttatatgtaccaaatacagatgcatacacataattagttgaagcaatgtcgatagtatagttggcttatgtaaaagcatgcaccatgaggatgttctccaattattggcatgtggtaaacaaatcaaaaatggccacgtcaacattgcaacaagtagatcgatgagtccacttatatattctataataatagaaatatataggtatataaataattaataatcttatattaattgaaaagaatatataaggggaaaaagaaagttacaataataaacaccatgtaattaacttttctctacacagaaagattagatttaataacacttttataagtgtgattttctggattactggtcatatacccgacataagtcacattatattattggtaatatacctagctccaatgataactgctaaattaattatatatttatcatgatccacttgatcatgtctatatacatgtggtgataattataagctctacacacgttaactggtcgttaatgcagttctgatcatttgtcggataataattatatatatacatatataatatgtaggttggtatatatatatatatatta

SEQ ID NO: 198093 - DNA, 1548 bp, Cannabis indica
atatacatttattatgggtttgaaataaattttcggcataagtactcaatgtttgtaaaactgtaattttctctaatttcatccgtcagaaacatgtagtattagttacttacaaatgttcctttaataaatttaaaacggagtttgtactgacaaaactaaagaaaaattacagttattgaatgagtctgtatggaggagatttcttgtgaaatggttgttgaggtatgtgatttttttaattatttcttttattgttttttgtttatttttgtgttattttagagttatttttaaaacattttgcatgttgattttcccaagattggtcttgtaaatataggtgttctcagcattatcattctaaattaataacctctgggtattattcagttattaaagatattaaaaatattctcactccaatccaattgaaaatatttttccgaactgtttttggtcgcttcctttgtattcatgagtgcattattcatttccaactcttcttacatggtctgatattgaggaaagttcaacaatcaaatgagttagaattatgggtttctgttgctggaaagtttcttaaatttagtgttgagtaatttgcattagtaactggtctagattgtcacatcaagtctgatattttttaatacaagcaggataagaatatgcttgtagaacactatttaaagggcaataaaaaattattaagaatgttatccaagttgcctttactgctaacaattataggaataatgatgatctagcagtcaagttggttgtattgtattttgttcactattatttgttgggggtcctcctagtaaatgttgtttatattgaggaactcaacgttgtggatattggtcgttacaacgagtatgggtggggaaggagtgctttgagatgactattgaatcttttaagggcaagatcgatgctaatattaggacggttaagaagaaggaaaaggatagtagtttttgtaggttgttaggttttccgtatgcattgcaaatttagttttttgagtgttgtccttacgttgttgggaaactttctttgtaaaacattggcattcaagacttcttaactgcctaaaatgccaaatcttaaaatatctcaactaaaagtggacaatgtcaacaacatcatcttcaattggcctttataggagatatatgtgtgttgttttacttttgtttttttgttgttttatttttttgtttgaattatatatttattcactttcagtccttttttttgtttgttttgttacagttacaacttgaaaatatttctccaacttcaattgagtgatctagtttgaatttggctgattatttttccggtgacacaactcctttctctattaaggttaaaggtaaaggcaatcgtgatagcgattctaaatcagtgtccaagtcttctctggaaagtgatcgtgctggtccatcctcatgtaagatgcatgagcatgtcactcgtattgagtataaggatttgaatttgaaagtatttcttcaacttcaattgagagatcta

SEQ ID NO: 198094 - DNA, 1170 bp, Cannabis indica
ttcattgttggtattaggcctaaatcttaacagatatttatggcttgattttgagtggtttgcttgtagtttcgtaacaattgtattaccatttatgcttggatatatttttctcatttcactatttttattacctttttgtttgcttaggaatgggaatgaaaattccctatttttgatcatgaaaagatgaaagttgtgtctacttgtaattatgaagtgattagataagatcaatgagaatctttctctgaatgttaaggccttgtttcggtctacacagtttggtaaatttttagacattctatcttttaaattttactgtcaaaatagttcatggaattttattgagagaggtccaacagtcgaatgctaaggaattttaggcaaatatttgtgatcgttctgtgtgatttagtgttgaggagtttgcactcattacgagtgtggattgtatgggagattgtaacaaattcaagtttgttcatgaatcaaactactttattaactcacgcttccatggtgttaaacatattactccaaaatctattgaagatgtcgttttaggttgtttgtggtgggggggatgatgatgctttatctttaaaggttgttgtcttgtgttttgtgcactattttcttcttggtaacactaaggagaaggagattagtcgggctaatattgaaattattattagtggttgatgggacgagtaatcttgtggtatagagtctgttgagcttagattgcactctttgaagattaatgttgctcatggtcttaagaaaaagaatgagcatgtaggtgttaattcttatcaatgttggtataggttattaagttgcccttgggttttttaggtgtggttttacgagtgttgtgtgaggaagatatgggatttcaacaaacaacttcattctcatattccaagaattttgaattggggcagtggtgattatcttggccaaggtacaccaggtttgcaagatctaacattgaaaatttattatttgcctcttaagattgtaagggttcaatttctttgtagttgttttataattgatattacctttttttttgttgtgaaatttatattttacatttgtttattttttatgttattgttataggtccaagtgaagaacatgaggcccacttctgaagagttt

SEQ ID NO: 198095 - DNA, 1199 bp, Cannabis indica
gtgtttcttgcatttcagacattttggatatgatctaaatgaggatccacgaccctatcgcctacctctatttccccaaaactttctattactccccgatgatctagaagcctcaaacttctatttgtatcagggttaccaccgtcggttcccttactaacattaccaaccacaggaggattcgatgtcgtggcaccatcctttgcggtctgctctttaatcacatgttgctctgcctcttcagctatcaaggctgattcgaccactttcttataagaagtgtcatgagcggtggtaattttcaagtcccgactaattgtggcatccagtcctctaacatatttttgtttctgggtgaagtctgttggtaccagatcactagcaaatttagatagccgatcaaactccaaggtagactcggccagagtcatttttccctgagtcagcttcacggaatcatccacatgtgaagttcttacggtgatgttataacatttttcctcacacagactcttaaactcatcccaattcatggtactaacatctcaagtctgtctcacaatgtcccactagacgcgggcatgatcttataacataaacgcaacacaatttactctttctattcccgtcacccccatattatctaggatgcgggtaatagtactcatccactgttcaaccttaattatatcagtaccttccaaaaacgttggaggttgcagcttcacaaagtgctcaaatactgaatctctgtgtggcaatataaatttgttgttatcaaccactagcacaggatctggtggtaacacttattatgtaggagctgccggtgctgattgcctcaacccacacaattcatcttcttgacgaagtatgatacttcgcatttcttgaaacatctattgctaatcaacaggcagataagcattgccaacccccgcattatcccctgaattttgcggaggcacaggcagtgctggtggattggtttggtcaacaccaggctctacttgctcgccctgagatctagatgattgttgagggtccattttcacaaataaccttgtaatcaacaaccccggcgactcaaacaccaataccacacttacacacttattgccttaaaccctaactcaactaatttatttcttataaatgcatatttattaattaatcacactaatcatggctttcatatc

SEQ ID NO: 198096 - DNA, 500 bp, Cannabis indica
tctgcaaaaatgacagtgcctcctatggtattcctagtgttctctagagataaagaggggttacctatgtgtaaagatctaatcatgtgccagggcggtgcagagggatggggtatatttattgcacaatcagaaaggggattattgcaagagaggtcgaagagaagagagaatcgactagttgggtaataaatcacagatgggacaataaaccagaagttattgcagattagaagtttacctgtaaagagggacggatgaattgaaggcttgggtccgtctgctaacagtgttccaggccagaggtggtaaggtgtagatcgttttgaaaccgtcacttggtggagaaaccctcggacggacattaacgccgatgaacggcgacgatgacggcgattgtaacgataaaagaagtatctcaaaccctagacatactttctcagaaagaactgtccagaagaagagttaactacttgatgccttagatacttggaagccta

SEQ ID NO: 198097 - DNA, 1259 bp, Cannabis indica
attagttagtatttcattcaattaaatgaaagattcgtgtcctcatattcaaaacttcaaactctattgtagctcatgaggcctattattctgattcagctcacaaaaggttacccactctataaacatttagtgaagtgaatgatgaccctatattataaataggtaaaagatttcatggtgatcacataagcgagcaatgctgcaacaagatttaatacaaataaatacacagtataaagttggagatatgagaatatattatgacagaagtgaaactagcataacacaatataaaagttgttttcaaacttcaattatagagaatgctgtatttatttatacccaaaccaacccataaattaaacagtaaaaaataaatgaagaaaaacttgtatatattatcactggttgatccttaaagtacatcaaaggcctcaactagtgatgaccctttacttaatgatatttataatctctaccaaaaatatcactcacattaggtttaactacactcactaatcagcataaaacaaagaaaccagcttcaacacttgtcaaaaagcataagaggaaccaaatgacacttgtgtatttgaactacttgtcgttggcaacaaccacaacaagatgaaatttcttacctattctttatgctaaaaaatgagagagagccttgttcagacgagatgaaatttttgacgaaagagagagagagagagagagagtttcagatgagaaagaaagagctacataccgtgagaaagagaagggtggtgaacggtgggccgccaacggtagtggacgacacaaaagagaaagaggggcggtggacggtggacggtgggcggtcgatagtctttcgaaattgtggctggggcggctctgctgggtttcgaaatgggaggggagagctctgctagggtttcaaaatggccagggatagagaagcgtgaaatgaaattgtattttctgaaaattaggttttacaaaacataaaccttctattaaaatgaaaacttaattgttaaaaatttaaaaaaaaaaaaaaaaaaaacaaaaaaaaagaaagaaaagaagaaatttactaactttaaaaaaaaactaggatattagatgtaattagattactgttagttggttaatttagagtaaaatttcgtagtatacaaacactactaaatatgactttcaacgtaaaatactaaactatacaaactacagaagttcggaccgaagtcggaggacgagaaccttac

SEQ ID NO: 198098 - DNA, 950 bp, Cannabis indica
ttttttttttattttaaattatgatttcaatcaataatagatttaacacatgtctatttttagaagactctaaaagataggttaaaaatgggctaacaagaattggaagcttggagattactattataattttttgaaattatctacatcaaactaaattttttttggggacttacatcgtaaattttttatatatttgtattatcatatttaaggatgtatatataatttggatttgatatatatatttttttatatatacatatctattaatattttcttcacatagtattggtgcaattttttcttttttaaggagatttttggtgctttaactaaaccttaaagtttctttcaaaaaaaaaaaaaaactaaaccttaatattaaatattaaatattgtatatttacttttggtgtttgggtatagtgataagggtattcctagttgggtttggtgtattctagggttggatattctccccctatataaactaattctgtacactttatttcattcaatacaataaaatcatttttctaatatggtatcagatattttctctctctctctctcttctttgactagatcctcttttttccggatgaagatccagttttcacggatttgtgtctccctcctcgttttccgcgcctgcaacgttcatcttcttcatcaaacacgttcaaatggccagaacccgaagacctcccttagctgcaccttgtgagcatgtcgacgactccactgttcccatggtgccttctccgtcagaccctcccgtctccgtcgtcaaccacgtcaccgtcgactccaccactgctcccgtggtgcatcctcacgcagctccaatggaacacgcaagaaccagttccagaccacgaagtaccatcatcgacgattccaccactgttctcgtggtgtcttctcacgttcaagaaccggcttct

SEQ ID NO: 198099 - DNA, 639 bp, Cannabis indica
aaattgctaatttataaagatacatcaacatttaaattaataaaataatagaatgatagctaaatttctctaaatgtaaacattcagaattttttttttaacaaattgtatattttaagaaataaaatcaaataatgttaaaagtacacaacaaaattgttaattatttttttgataaatatatgatgtaaacgaatatatagtggtacaaaatatgatctataaaacctaatttagatcactaaattataaggaattgtttattggattaactttttttttttttttgtagatgattttattggatgaactttaatgatatcataaattatgcagcattaacactatttgttggagtcagttttcctttctttggagaccttcttggctttttcggcggatttggttttgctcccacttcattttttgtaagtatttaattaatatataacctgtcaaaaaaatattaatgtataacttagttaatttatatttaaaaaggtaatattagggacaccaaatcgcatattttatacccacaatatgtatttaatatttaccacaaataattatacattcggactaattttacttttaattatgtatttaaaattagggcttttttttttattttttttt

SEQ ID NO: 198100 - DNA, 2128 bp, Cannabis indica
acgaggagaagtgggcccttaacatggtactctttttctctccccactcctccaattcacgttttattgtttcactgcttaaactctcatctttgtatttatgctttcatgatatcaattctttcgtaaattactctattgcaacgaaaatgatatattttggtttttttgagagggaaaattaaaactaatcaaatagttaattgtgcttagatttatttttattcactatcttgatgtaataacattgttttggaatttcgggttctttatcctaaatcaagtgatgggtacttgctcctctcctttgtttagcgctgattggttaacttgatttttctctacgattttcatagatggggactaatcgtggttttcctatttgttgtgtgtcaatgaatagtataatagacacctgtgttagtttagctataaaaaattggccctttatctgccgagattaatcaagggattcggttcttcactattttggtaaggagaggtgtatatttgtgttatttgggggcaacttaagtattaaactgtagagtagataggtgtatttggcgtacaaataccttgttggtttataaaacttaggtttatcattattatgcatataccttgcccttcattaaccctcctcccattgttttcagactctggtttatatactctagataagtctttgtgtgcaagttgatatggggatctattttcactaaaatgttaactcgtttggatgtgaaaccatattagccttgtagtggtgtaaaatttgttagagttccttgctcgtgtagagtttaatgggctatactaaaacatgtttttgtgtctctttttgcagaaactactccgggctgtcggtctttttgctggatcaatagttgtgatgcgaaattatggggatcttatggcaatatgaggaggatattgatgcctattcttagttggttagttatttttgcaatgtagtcgttctgtttgtcatatggattgttgatttggaaattccattcaaagacaaggttttctgtcttgtttcgagttttagtaaagaagaggaaggtgatttcattgtgttcctggggcgtttcagtatgctctgagtctgtctcaatatttctatacatgaatgaaaggattttgatttagtgtggattggttataattttaattcgacagctcattttcagtcatatttatttttggggagactcggattacttatgaaatcaggtttttgatctgccattctcgtactgtctgcgttttgaactcgtaaaccacctcaactcaaggtactgagaacaatcaaatttttcattccttttttgcttttaaccatcaagacatttgtccttgtctttgtcggagttcatcattttaaaagtacagtaagtttatcccagagagaaatgcttatagttgttcatcaatcaatttgttccgttaaacaatgtcttgtttgctattcttagtaagatttggcaacatgcttatactggaacagattagtttgaggcctttgtttgacttgatactagggccaagaggtaaatttcatatatgttttctaaagcattgttttttctattggaatttggaatctcttaaaacattatcaccctatatggttgggagagtatgaatggaatgcaatgaataaaattatattttcattccatctctttataatttagcacttaggaatgtaaatgactttttcgaaatgcattctatgaagcaaatccttgtattattctattattattatcattatttgaatgctttgttttttgattttgctaaacatcattatatgcattcttgttctactattatattattattattaagaataattagtatttttgtctctgaactttcgacactatctgattttgttctttaaaatatatggctggttaaaaattcctcctaaaatataaaagtttcataattatgtctcttcggttagattttgttttttttttagtcgttaaaattttctcttttatcgaaaaaaattaattttaaaaattctaataatccaatttttttttatagtaattgtaatattttattaattttgaaaaaaatgatgaaaattattaaaaaaaaa

SEQ ID NO: 198101 - DNA, 1451 bp, Cannabis indica
ttattgtaatcttgttttacaaattaaggataccttctcagttgcattttgatttctaaaacctactattgtatttcaagtatttcaagttagtatctttttatcaaattaaatgacgattaaaatagtatttttgtaaagtaaggtaaaatatcgagacgtcacaacttgtctgctgactattacaaccttctgaagtgttgtggatggagttggatcacattccatccttctatgctcatttcttccgtcttgacaaaagtatttttggaatacttgcactgtagttgcaacattggctgattttggtgcaaaattgttactttcatttgcttttactatcctccttacttcgtccaaaatttattttcctctttatactatcgctattgatttctcatttgtttagagttctgtggtaatgctacaggctgcatttgatcagatgtttgctgagaatctgacccactcgcatgcccatggtcataatgaatttgagttctattcattttagcttgcatattagccatttcagccataaattttttcatagtgcgattaacatcctctcgatactgcctgctttagtcctgatcctatttacgcttttcttcagcatcacattgttcctgttggaatctttcctccgcaagatgtcacatctcttcgttgtgcttgtctcttgcggccattctctgattcatttctctcatctgtaatgcgaatgttttagttggatctaggactggattcaatgtatctccttcactctgagctgtttctttctctgatacctttcccatcttagttcatattcttaactttaactttttgttcaagaggttcccgcggacagcgctagctgttgaaaattagctaaacaacaaattgttattaagactttgaattctttataccaagttctatctagtcgaattatattctcattcggtttataaagttttcctctcaattctctcgattgggtatgagttgtcagctctctgaattcaagtatgaatttgagggtgtattctaagagtttcagctagtttggtgtgatcaagaattcatcgtccccctttttttaataatagggtcttctatttataggtggaaggaatgctcgattcattcttctttcctattttgatttgctcacgtgcgctaattttcatctgctgctcattgcaccttctcttcctttctaagctttgctccacatttcttcttatgtagagctctgcccttccacctcgagtttcctgttctattttcttttaatgaaacgtcgtttttctctttatgaactatgatactataagatcagctttttcttcttaaatttattttctaaaaattatttattgaccatttaggattattttttattctttatatatatatatatatattaacacttctcaatgtatagtacctattaatagtta

SEQ ID NO: 198102 - DNA, 1799 bp, Cannabis indica
ttttttttttgttctcaatttaggtgtcaaagtatttattatttatggtgcatttctttgttcaattaaattaattttatcacattaatattgtgtatttattgctcttttctatcaaaggaaataatatttttagttgtctattttcttattttggaaatttcttgtagaagagaataaattctcttattgaaagttagtttttatggaaactttgactattgtaatttcgattgtgtcttgataaaatcaaatcaagtacactatttttgccaggtatcaagtccatattcatgatcggacacctatttggcaagtttccttttctgttttagtttgctactgcagaactttattctgatgctaccaaataggattttcttttaggaaagtttgtacaattgtggaatcgattttgtggttgtctctagggttcttatattctataaatagaacttatagagcaaccaagtataatgcttcacattttgaggaacatttgttgccagtcggcaggtggattagcattattaaccccggcatcatcccggattctgcgaaggcacaggcaatgtcggtggattgatttggttattaccaagctctacgtgcttgccctatggtctagatgattgtggagggtccattttcttttaaatagccttgaaatcaataaccccgatgagctaggcaccaaattcatgcttacgcacttattgccttaaccctaactcatactatctatttctcttttaaaataaacatttatcaatataaacactaattatacttttcatataacattttattttttagattctcatatgctgcctacaacggaaagcggtaaacttttaatcacaaaagcagttaagcatttactatcaatatttattgcaccacgagttgagcttgtctctgatgatgattgtacatgttcagccggtctacaaaaagtttaaaaaccttagccctctgatactaaattgtaacgccctaataataggaacaccacaaacagtgactaaagctatatgaatcccgctaaatgggattactaaagctaagagcagaaaatttaaacttttaattaatactatagagtaaaactataacttgtaattaattaactttacaaacattccaaaaggttatatttgtttcgagatcctgtaaaaacttttgtaaaatcttacaagttatctttacacgccgacctaagcagcaaaagttgtaatacaaaatatttcttctggtagacccaaccctcgtggtctattatggcttgaacatgtacaatgcaccactaagccctcgaacttatggctgattagtaacagatttaccttttcctgcacaatagagcacctgtgagccaagcccatcaagacagcataaataacaatatgcaatataatcagaaatcacataatatttgatgccaccgcatctatcgtctatctacgcattacactcacacgtctaattacattaagaccttagaacagtttatctcggttctaattaccaagtctaacctaattatggcttacacgaataatgctttatctcaacatatacaatataatatagcattcaaaatcacttaaatactagggtaataaccctagaccacataaccgcttactttagggtaataaccctaatctcgatttctcacttaaatatgcttaataacatacataagtgctacagtgctttaactctacgtgctagcttagtatcttgcctggttgtaaagaccgctagactttaacttagaaattagtagataatta

SEQ ID NO: 198103 - DNA, 2347 bp, Cannabis indica
cgagtaggggagaagatgctgtcttctccgtatttaaaggcaagtaaattttgtgaatgacatgagtagacagtaaggcaaaaagtaagaaccaattaaggttaattaggttagttaacccaagaagattattaatatataaaagaaatactttcttatgtgcttcccaaaacaaaaacatatgttaccaaatgagtcaaaagaaacgtgtataccaactaaaggatgattggaaaaaaaaaaaatttcttccagcaaaaagtgatgctaaaaatatacaaccaacaacagatagagacttttaaggtaacctatttggtccagcaatacaactaaaaacttggaaataaactagaacaaaataagaattccaatctaggtaagccatacagcagcagtaagttgctgcttaatactactacaaaggtaaatgaaaacaagaaacttctggttacacctatcttcttgttttaggtcgcttagatggtgcagatctactaggaggaggagctctggactttccgaaagctttgatcttccttctttgcctttcctcctcactatctgattcgacacctttctccctgtctgcattactcgcctccttctccaactcctcccacgtctttcccttctcttcttctgagtcttcttcagtatcctcctcctcctcctcatctgactccaccagggactcactgtcagaggcctcatcttcggactctgattcaacttccacatcagatggctcataaccctggtcagactcttctgattgccctgattctgaatcagtagcttccaaattcaaaaattcccaaccaccatcgtcaatgaagctctgtgggtcatcagtgattgtcttcaatatttgtcgccagtttagattcagcctgctctcgtaatacttgatgtctgtcgtgtcaagccattctttgatgccatcaagtgctgtagaaggaatagaatcgatacgaagaacatccttcttgaagtccttaaatacaatggtcatgtcaaaattcttctgcccaaggccaactctttctaaattcacaatctcaatctcactcagagtcacaacaaggaaaggagtctctatcagttcaactaggcaagttgaggatggaacaataaatgctgaagatttatagggtaccccgtggaaaccaagctctctcaaaggctgatcaaactcaaggtcaaggccactgaactgaggttgcccccaaagatcattcacccgattcacaaagttttggaagtccatgttgattttattcttcctatccctctcccgctgctcctcttcaatctcatcagggtcataagcagacctctttccaccacccaaagtttgaaccacatccataacctcacaatagaattggacatctttggttttcttgttccccaccattatgtgattgtgcagatgaaagtgaaggagagtgatcatttcattctcagccggctggaagaaagcatgcttaatattcgcaaacattacatctacacgctcatcctgcctagtggtagagtagcgaaacccgttcacatgagcttcaagggtaccgggtaactttcttccacgaccgccaaaaacaggacgaatccaaaggtcagataacctgattggcttgaatctgttaccagctaactggagtttctcctgagtaacaagtgttgccctctcagctctctcagattcccttgcaacaacttgtcgtctaagtgttttaatctgctgtaccacctcacttatatgccttgggtccttagagcggaaagaaacctctttaagaaaaatagaaccctgatactttgacgaatttgcatcatgaggactaaaaggggtcccgggaacattaaaaataattctaatataacaatttctgttagtatcttgttggctggagactgtccttattgtagcaacatgaaaaggaaccatactcccatatacaggcaacagaacagcttcattcttctggtcaatctgaatcatcaaatctctgggaggaggaagatcattaacactcttgtaggcaattaggtccgctgaagttctagcagcattacggttgtctcctgcaccagctccaccgccagcaagtcgacgggcagtttcttcattcttctgtctggcaagctctgcttggtgctgcctgcggagctcctctttggagatctcatgattatctgacctaagagttgtcttagacatatagccctcagtaccattagcctcagcattccctttaggcttttcatcttcttcttcgtcctcattaaatgaatatgccacatccttgacagctttagaacttttactggtcactacttc

SEQ ID NO: 198104 - DNA, 519 bp, Cannabis indica
atgcatggcaaacattcacacatgaacatcaaatgtttcgatctcatggcttgcagccacaacctttcggggttcatggctcgtcacttgaggtccaaaactcgtcatctcgatgaggccaaggtttactccttaaacctaagctgactcatcaatggaggtattgtggactttttgatgttacaattttaaccaaaatttacaaataaatttaaaataaaaattacattaaaacctataccaaaaatatagtgtataatttttttagtaaaattgtaaaattcctcacccaaaattaccatgtaataaacgattcatattgatgcataaaaaaatttaattctatccattcataatatatcaacatatatatatatataaatacataatcatccaacacaatatttaatctatatcattatgaaaatttctctggtaccaattataggtttttatgatccatatcggagttataaaagtggaagttgaatttttgataaaataaattttatctaatat

SEQ ID NO: 198105 - DNA, 1805 bp, Cannabis indica
gtggaaaaactttagtcctatacaattgtttaatttaattaagtaataataaaccaaattaattatacatttatatatcaagcccatctacgttacaatgttctcttcaatcgtggtttatgatttatctgtctacttaattataatatataattaaaccacagtactaaacataagtcatacaatttgtgttctctcttccatttacaggtaatataaaagggaagaaaaataataaaatcaagaatcttttgtaacagtaatacttactgactaacaataatagtaaaattattactgaatgagaggctgattattaaataactaattaggtaataatattattattatgggcttttggggtgggtgtggatcccacaacatgaccatatgctgactggtcatcgcgaattcaggcattgagaagtgtaggaattaagttaggaacagatttctttatttttttatttaattatatataatttaatttaaataaagtaaattaagtagagtaaataattgccttacactcataaatatgtgattaggtacggattgaaaatttaagactacgactactctggtatggtagtactactgatatgtacattactttaatttctttgttattcttcgagcaattgattaactaacccaacacaacaattttgttttaacttcacagactcagtcatatattattggtcaaagcattggtattgagtattaatggtgctttaacaaacaccttttgtaacactttaagattgattatatcaataattaaaagttattttcttatagcactcgatacttattacaacaataacgacatgatactgaaaaaaaatgttaaaactaataatacctttttttttttttgaaggaaactaataataccttttagtaattctctattagtcagaaccatttgggtcttatcaaactatgatatttgacctgtaagaaatattattttgtttattgtttatttatttatttatttattttgaatatagaaagtaatttatttttcaacacttaataatttggtaaaagttgaacccacaaaatagtaaataaattaaagttgtttcctctctctgtcgttgccctagagggccggtcctgagttgatttaggttttaaaaaaaaaaaatattttagacttttactataagaataaatgatattttctattttttttatttgggtcccctaggatgagtgggctctaggcgtgggtctagcttgccttagcctagggtctgttgccctagctgcaggtcttcccttgtgagtttctcgactgaagctcacttgtttcttctttgaagctagtggtgctccattcgtggaatatttatcctttctttcatgccggcgtggtattagaatattttttatataaggcataaaattaatttattaattttaacgtgtatgagagataatgaatattttatattcattgcatttgattccaattgattggttgatattctatatattgtcggattacgatttatcaaataattcattttctgattttgattttctgaattaattattaaaatatcttgataactaatgtggcaaagatactgatggagtatctcaccaataaatataaggccttggtcctcgagctgctcactcgttctatgaaaatgctaaattccatgaatctaaagggagtagagagcttggaaaatttgattaccgacacaaactagtttcttttttcttttgtagatccaaagatcgtgtgggattgaagcttaaataatcaatgactggagata

SEQ ID NO: 198106 - DNA, 1473 bp, Cannabis indica
atttataatatcactttattaaacattaaattatatattgatattaaattataattttattttatttgttatttaaattgaaaattatttattgtaaaatttataatataactttattaaattttaaattatatatcaaatattatgattagggtataactttctttaattaatatttcaattacaattaattttctttaatttataatatcattttaattcaattttaaattacacattttatattaaaattaatatatatttttatctcatttattattttagtttacccagaattaatttattattaattaataattatttttattacatttaaaacattaattacttatattaagatttataattgaaaataatataatgtaatatttaacataaatttaacaacttattattttgaaaatagagttttttgtgttattaaattgtaatttaacttttttcctattctattatttctactgaaatttcggtagcataatggctttaaaatcataaattcaaaatttttaaaatttacaaagacataaacaaatattccagtttagtatatacacataaaaaaattaatccatccatctgaccgcagtacatttaatcacaaaatctacttcattatggattaataataagatatattcaaaatctactaataatcatttttaagtaaatccatagcttgctatatttgcaaataaagtgtacaacaattttgttctatggtgtatgtgcaagtataccaaagctatgtgcgtgttatgttcattgtcgtgttatgaggcacatggtcacgtgaaaaataagttcattgttactcggatggttagaaggctgaccttggcttagagaaataaaggtgtcgtactggtgttccactgccttaaatggtgagcacgtaacagttggtatcagagctaagttcatctcaatgggagatgaacctggttggcctatcctagaaaggacgtaggcgtgtggaaggatcgagatggtctgaatgctagaacaagatggcgttaagccagttagtctcctaaattaaattagtaaactgagatggagttgagattaggttacttttcttcatgggaataatggacatcctagagaggagatgatcacggttgcttcaaattaagttcagggatgctagaaagaaaactactacttgtaattgtagagaggcgcaacagaatgtataaaacttgttggcgtagtacaaggtttgattgagtagtccatactgtaagtttggtacactaggttgattttgcctgagtgacatcataagccgtaaaaggcttttttgttgaaaagaaaacttgttggaatgggtgtagaagtattgcaggggccgtcagattcttgttagttatgacagtagtcgagagagttgatgatcgagatagttcaaaatgggatagacattgaatgcttcaattgctacatgtg

SEQ ID NO: 198107 - DNA, 1191 bp, Cannabis indica
gttaagttttaaaggctgagaggcagtgggaatagaatgattaccagtatgagatatgggcaattgcttaccattaccaacagtgagggagtcacttccaacatagggatgctcattgtcaagatgttccatgccaagagctatgtgatttgtggcacccgtatctgcataccattcttgatcaatagcataatctggtagcatggaagaggagtatgcttggggatcttctgtttcttcgagttctgtcaagtatgcacgagaatcaccaacttttggtgtgacaaatgctttgtcaaatctgtagtgacatacggctgcagtgtggccgagtttgtgacaaacttgacagatgagtcttggtgcagtggaaacacctctaccagagtatcgtggaggagcacgattgttgtaattgtgataggaattcttgccagagacaggatatcgattgggagcatttgaaccagttcttgtagggccaagagaaagattccctgaaatcttgttgctggtgtcagcaagtgtgtagtgtctttccaatctactttcatgtgttagtaacaaagattgtatagattcaaaagacaaatcatctacaagacttgtgacatgaaccactacagggtcaaattcagggcctaagccattgaggatatgcattattaaatcatgttcttccatcggagatccaacaacagaaagagaatcggcaagaatttttaccttgtcaagataatctgtaatggaaagattacctttctgaatcgtggaaagctgagatttaatttggaggatgcgagctttcgattgactggcatatctctgttcaagagcccgccaagctgaatacgaactttgaaattgtgcgagagagccaagaacagattctgtcatagacgatcgaagccaactcaaaagaagctgatcttttcttttccaagtgatgaactccggattgggttgtccagagaccagcagctctggtggagaaacacctccaaggagaatatcatcgagtccatggccaatcacggtggggatgacttgagatttccacgccagaaagttagagcgatccaatttgacagtaagagatgaatggagagagttttggaacggattccatggcggattggttggagcaggggtggcgacggttgatgtgtgaactgtggagcgtggtgggtt

SEQ ID NO: 198108 - DNA, 1132 bp, Cannabis indica
acagtaacctcttctaattatttttcagtttactataattttaaactacaatgtgttagcaatttatatcgtcagtctacaattggctaatcattatgtaatattctttaatttttttttaatgttggcgttttagatatctaatggctaatcattatgtgtatattctttacttttcgattgaataaaacttttaattagaagaattatgcataaatatactggatcaataagaattatgctaatttttgctaatatactgatggatgttgcccacaacgcagtccgtaatgacccaagaatcaactggctctgcaaccctgttcagagcttcgtggtcttacctctgcaggcaagaaattcagaggtcttcgtggaaagggacacaagaaccacaagtatcgaccttcccgcagggcaacctggaagaaaaacaacactgtctctcttccccgttaccgggtcattttcaggataattgtttcgagaacgttgtagttgctattgtgtttgaaatttttggagattgatataatacttgagtcacgtttcatttgaaaaaaaaaatggatatatatgtaatatcaatatacttgtgaaagaatgtatatattaccctgttttgaagtttttatcgttggagcttcgcttacagagtatgtatataaatatatacttatatatagataggtcataagtgattatattttattttttggactgaaaatggagagattgatagcctttgtactaatgtttagtcaataatttcttccaccaatatatagttacgttaatttttattgtttcttttgagaattgaattgtttgttaatttttttagaaagcccccatgttctggcgactttaaaagagtctctgtagagttgaggattcctcccaacctttggcctactataagtttgagttttcccatatcaaattctctttagacattgattttagtttactattattttacatgaaaagatgtttttgtttgcttttaaattattaattcaatcaattggtaggattttgaatgcagttgtactcacttttcaagtttaatttgtgagtggatcctttaactctgatatttacgtttagattgtgaaaatcggtcatgatg

SEQ ID NO: 198109 - DNA, 950 bp, Cannabis indica
gttgtcttagcaaaagtatcttcaagacttactttgtgatgctcaaatgcaaggtgtcaaagtaaagaattctccaatgtattcagggtagagattatcttaatatggaagtgatccagtaacatatccattgtaggtactctacagtatgcctcaatcatttgaccaaacattgcctttagtatgaataaggtgtagtcagttcatacacaatcctctccaatcacactagatttctatcaaacgaatactaagatacttggctggaacattggactatggactgcatctcaccaaggcctcctcttttgatcttcaagcttattgtgatgctgactggtatgacgaactagatgacaaaagatcaacaactggtttctgcattttttttggctccaatcttattacttagcagtccaagaaacaaacaaccatttccagatcttcttcgaagacaaaatttagaacccttgttgcagtagtcactgaactcacttggttgcaatcccttctttttgaactcaaaatttagataccttcacctccatttgtctggtgtgacaatctaagctcagttatgatgactgccaatctagtactcgtgatgctcagtggcatacctaggatttaaagtgagggggcgtatttttttttttttgtaaggaaggagcaaaagtaaacttaaaaagaaaaaaaaatactcttggtgggatttgaacccttgagctaaatattatgtttataaatatcatctttttattacaaatgtatgtcgtaactaactaaaatgtaaatatattttttttcttaatttttatttcagggggcgactatcccgccttgtttctatgtgggtccgcccttgttcatgcttgcactaagcatattgaaatagacctctactttgtttgggacaaggttctccataagctaattcaagtcaattatca

SEQ ID NO: 198110 - DNA, 1727 bp, Cannabis indica
ctatttatttgaccttggcgtatcataaatttgtttcaacactattctacattattggtatagtctataaatagttgtcttctactaaattataaaaaactaatcatgcaaaaagacaatactccacccaaaaatgaaattgaaaattattgtgatgatcatcataatgatattgaaaaagctagtttgataatgtaataatatattgctgtggtggagccatatataatatattagaaaaaaaataacatcacgatatatatatataaatattaaaataatatatatgtatggaaaacgctgatacgaaaataaaaatttaaacagctgttcactatatatatatatataaaataactatacatgtaataaaatacttaaatattattttttgtaatataaattatttaaaaatttgaaaaaattaataagtgatctaaataattataatatataaatttatattgaaaaaagttatgtctgtaatctagactactctatatgtatttccataaaatattccaagagtacctgtcgatcgaaagggtaatataaattaagttttatttgagatttggttgatggaggcatcagcatcaacaatatatagttggaaaaattaaaatataatataatgttaaaataatgaatggcaaattcacgtggtgcaagtatctcttcttttaaaattaatattatttgtaaattattataattataaaaataataataataatagttaataataacttgaaggacaaattcacgtggtccaagcaaagctattaattttaagagtattacttttaggtaccttgcatgtttaatgttgtcggaagttgggattaattagcgattttttatactatttattaaaataaatagtatgagactcgatattgattagtataccaataacgatatgttactttaaataatgcttgaaaccgtaagagacattttaaattgccaatatcataggagatcatactgttgtgtattttaatatcagattccacactataattaatttaataaataataatgagaagctatttactaattataaggcgacccgtcgatattttactatatacatcttaaaatatcaaataagaatactgaattttaataggtgcatatatattgccaaataatagtattgtatactaacgggcttggttaattatacgtgataattttgtcctataaatagagaaagaaaataatctcatagtactcgatagcaattaaagaaaaagaaagtgattattattattattaagatggtagagaagtttgagaataaatctatattagtatatatttgaatatactattagaaaaaatatatttggtaactacttttttttttttaactttaataaattagaaagtaacatttttatataagtattgcctcctaaaatattgctaaaaatttaggtataaaacaatatttttataagtgttaccacatgttataaacttaagacacatataacaacactagttataaatatgttgtcatatcatctttttttattttaatatttataaaaaataaaattaaaataatcacaattttctttttgaaaacaattattttataactgcaaatcagctataagaaatagcttgcaaatcaatagggataagccccccccgcaataactacaatttcggtgtaaacaagcagctcttgctaaataattggcagcctttgt

SEQ ID NO: 198111 - DNA, 942 bp, Cannabis indica
gttatgtgataaaaatatttttttaataaatattaaataatttaatattaaaaataactaatccaaaataattaatctaattcacggattgaattggatccaaaatataaaattcacacttaaataattgataatgcctaaaaaaaaaccctatgtacttatactaatttcgtatataaatttgaaccttaattatgatagtataaattattataatttttttttatatgcttgctatatataaaaatttcatctcctcttgccaataaagttacaagacacacacactacttagattcagccttatctagctagtatatagaactttttactctatgtgtcaaatggattttgtttataatttattgtgttattagtttcgtttttgaaagacatgtttaaaattaacataaaaatttattggcttgctctgaatatattccagttttccacttaatataataaaacttctgtatttgattaaagaaacgtgggcaaatgatttactattaaatacataattataaatgacaataatctcaaaagaaaataaacgataatcatgcattactttacttgtagttgcatttaatttattttgaaagagttgactgtagctaagcaaaatattactaacatatatatatatattaatgttggtaagatattgccaaaaaccgaccttagctcagttggcagagcggaggactgtagttgggaaacctagtagatatccttaggtcgctggttcgaatccggcaggtcggatattttttttattttcactctctttaatcaagtattccaaatacttagataatgataaattgttctaacttagactggttaattgaaacttttgacccccagaattttataaataaataatttattacctcatcaattcttttaatttttaatatttaatctatatatatatat

SEQ ID NO: 198112 - DNA, 943 bp, Cannabis indica
ctaaaattttctggtccccaaatattgtaatattgaaaaattagggagtccagtttcaggaaaagaaaaagaatcatcagaaaaagtactaccgtgtgtggagttggataaagataaagagcatgatcgtagtgaggtcaatcaaattcatgtagaaaaaagatgagaaaactaacatgctcaaaagaatcttcagtttcctctgcagaagggggaagcagacatgaacgccgcattctgtacagcagatcctcacggaaaaatacaatttcctgggaaaaaaacttgactctgcatttggataatggaaaattttgacaggaaatgaaaaatcaattgctatattagaatacaacaaatagaaccaagccactgataaagacctcatgaacctaaaattttactgaatgttaaaaggatagagaataactatttaaaacaaacaagaatgacattcggattaataaacataataaatagattccaaatctagcagctgaagaaaacaaatttgacctgcaaggattgcttgaaaatatagcatttggaatgtgttctcgaagctcttcagtcaaatattttggcaaggcacacctggggtagagcctttgatggacctgaaatttcaaaaaaagagaattttctttaatggaataccagcatttagaaatttcttactatatgttctgacagaaaaatgagaataacatttcttgttatggcataccagcatcatcggggcctgggatgaacagaaaatcgactgttctctttcagccgttgatgcattccaatcaatttccctagctttccaaactgggatctgcatactcaagttgatcatcattttgctagtacaaggaacaaaaacatcatctgcagataagataattaaagaggaaactttcaaacagaatactcaccttagagtagagaaagaagg

SEQ ID NO: 198113 - DNA, 2974 bp, Cannabis indica
aaaaaaaaaaaagagagagataacaatcgtagtaatggatggtggaacggcttagtcaattcgaggcagaagacgaggcccactacactcctcaagcaaggcgtcaagccttttctttttctcccagaaacaaggaaggacttcctcaggtttaggataaaagtcgagcttgatattttggccgttggtctgccaggccatgaagatgccgtcatcaaagcatttagtgctgtgctcgcagacaagaggggccaggagctcatctctttgggctttcttcagggcctcatctttgaagtgcctgagctccctcacctcaacagtcaagttggtcgttgactgcaagtccgcttgataaagttcctccatggactttagcttgacagttagctcctcgaccgcctccttggcctccctcagctcaagcttccccttggccacggcctcgtcccagatcttcaattcttccgccttggccaatcacgcctcctacaaagcctcctggtgcctcctctccgcctgagcctccctctggtgggcctcctcccggaatgccttccaggagctaggtctttcaagaccttcatggcctcgtccatacctccgaactcaaacaggacatagccttgatctatcaaagtcttccagagacaaccggtctctgcagcaatctgccaagataataataataataagaagaaattaagtatgggagcgtgatgatatataaaaaatcccaggaagcacaagtaaagacttacggcggacatggcaacgctaatatcttggacctggtagatggcgttagtggaagcgtaggccgcatatctcttggtcgagagctgggtcaagtgagacacaaactggctggtcagctcagaggcaaaaggagcaagggtgggtccaatgaaacggttgaaccaatctaacagaggatccatgttcagatcccaagcgttcgagaaagccccctcgcgcatgaaattctgttgggcctcctgcagaaccttcttcaaggccttcacctccgcattacccttggtgtactcgtccatggcatagttgtacttggccacccgcagttgctgcctttcctcatcagcagggaccggagtaaggacgatgttaggagccaccacatattcctcggcctcaggaggaatccctgagtctgagctaaacgccggagtatccttcctcctaggcttcttggagggttcaccttccgccgcctttcccttgcgttttctatcgcttaaggccacgatcttgccttcttcctcctccacgacctcaccgtcctcgtcgagtaggatgatttggctaggagggccgttggaggaagatctctctagggccaccaaccggatagctgccagaggacgagaagtatccgggctataggtctgggcaagagttgctaagagatcctccattggcctggctgctataaagaaataaacaaagtgttagaacggccacaataaagcatgtactagaaaacaaaagtaattaagactattcctaccctgactatcaaactcagccctagcaaagtcttgtaccataaggctggcttcatcatccctgagaaagctgtccgaggggagaaaccaactggaagataagtaggctgagtgatccaagagaatgggcgcaggaggcccagaacccatccgagaccggcctaaaaagtaccctaagtgggaaaaatagaaatccttggcatgatccccccattgagtggaaggcatcctaaacttaaaaagacgctcatcaaaccctataggtctacacagggtatactctcggacagaggagacatagtgaattgttaaaggagacttaccagagccagacatactggcatcaggagcccgtgtattggggaccaaggccagtggtttaggcctagaaggcacccgctctgaacccacctccagacgaagagtcctcccagcggcagcttgggctttgatataggctaactcatgttccctcctaaagaggtacttttgataccagtcctccgccgaagcaatgatgtcgaaccggagcgccccctctgtggcaggagttcagacattggggcagttgaccttggaaaggttgaagtcatccactgactggctcccggagataagtttggccttccgacagttctccgtcgtgaccaagtcccccacattgaggtccttcttggagtaggtggagaaggttttggcacgttggaggaacagctgagtaggagcagtctggagaaagggagggatcctgacccactccgtgagcagctccgggcggtccatggcttgaaagccggaggagaagaagaagcggtggcggtactcttttacatttttctgaaaattaaaagtgacggggccctcatttaaaggatggccccggaggctgtaaaaaccgtctttaaatttgtcccctttctttgggacagaaacaagttcacagaaatacaaaattttcgtcaggctaggcgaaccccagcccctggcaacataaaaaatgaataagcctgaaagcaggcggtaggcttggggaattaattggtaaggcgcgaggccgacaaaaatcagaaaattgacgaagtaatcttgaagagggagcatggccccgaacatgaggtgggtttggctccaagctccgaaccccctgtaattgtgattgggcggctcctcatcccgaggcaggcgatggaaggtcctggaagtagatggcttgatgcctgccacagttacgatcttctcgagctggtgggcgcaaataaaggtggagtggagctcgtccgcctcgcagccgttagcgcgggaagtataattctcctgggccacgggacccctcatgacctcctctaaagtggccagtggaactgactctttcttcgaagactttgactcggatgtaggagcagacatattggctctgtaaaaattaagaaaaatccagcagttaggtc

SEQ ID NO: 198114 - DNA, 876 bp, Cannabis indica
gtacttgaggtccctaagatctttaagtttgaacttgttatgcagcctgattttcaaagcatttagctcagtgatgttattacttgcaagtataatatcatcaacataaattaatagtatgataaaactggttaaagagtgtcttatgtacatagagtggatctgttgctgaataagagaacccttcttccagcagaggagtagaaaatttttcaaaccactatctggatgcttgtttcaacccatatagtaatttcttgagtttttgcatactgtattttgtggtaatggtgtctcccccttaggactatactctggaggtagttatataaacctcttcatgcaaatctccatgcattattaacatcaagttgatgcaaatctccatgcaaattttcattcattatattaatgtctttataaataaatataaataattatttatttatttattttctaaaataatttttttattaatctctttattatatatataaggaaatatatttcaatatcattcaattttttttcttaaattagagtcaattactttattatcttttcttgaaatgtcaaatcactaattaaataattaaatgtaacaacacttaacaaaataggtaaatttctacacatgtattatatttaggtgtatttttaacaagtcgcattagtaaatattatttggtagtttcataagttgagacttaagagacaaaaatactaattattcttattttattagtactttctttttatcaattcctttagtttgtttttcttttacaattagggatgcacatttctcccacggggatgggtcccgcggggacccgcccctaatggaccgagaatttcccgtctaaatgaggaacg

SEQ ID NO: 198115 - DNA, 1642 bp, Cannabis indica
taatgttaacacagatgtttattaaccaaaaaatattaacctttttgtaataaatgaattataaaattaattatagaaataaatgaacaacacaaagtttttaacgtggttttgaagttagtttttcatagtccatgagtccatcttattatagataatttttggaatacagaatatatacaataatatcagttgtaataatatcttgactttttctctttagatttgtcgttcctttaagcatgagtttcgtctctatttatagatgtctagggtaaaagttattttcttagaatttattcattcataactgctcatgaaacgtggacattctccacgtttcattaatgtgcatatgggatctcattaaagaaccattcaactcctcttttattttatccataattggttatgttgacttttttccgtctttgtaagaaaactactaagtataaggatacaacgcttctcatgattctctttttccattttaaatggtattagtgaggcggttacttcaatgcataaaaagcgagatgaatggatgttgctctcactctttgaacatacgagtatgtaggtcaatgagttgcaagctcttactcataagtatgtaggtcaatgagctgaaaaggtctttatttactttgcttgaacaagcttcattatgtattttgttcatcccgagatgagcttattgtctccctaatcttattcattaatagtcattattcttatctcgcttttgcctatgtgatcaggagttcgaatatttctatcaactgcgattctcgagacaagttatttaatgtgtatttaataatgcactgctttattagttgattcaaatttcttcgctggtacacatatcagcttctcattattagctgaaattaaggtataacaaatagtattaataattatacatatttataaaattaattttacaaactatttttttatttttaaaatattctgttaaactaacaaaaactattagataattacattttatatataaaaatattagtatattattatttaattatttttttttgagtacttatctttattttatttttcctactatttttgtttttactaacaaaagaagatcgaattgtacacattctatttctagttcttttggcttaatagcaatcttggagactatcgaagagtttaaaagtaagatttttttataatactttattacacaataaattagagaagaataatagtcaactatatatcaaagtatacctaataatttaatacgtaataattagaaagttatatgaaatgtttatgtttgggtcaaatatggagttgatagtatcactctaacctcgcttcgggtatataaatttgcacttcaccccattccattacccattaaggcaagtaatccccgctctattcgagatgggtacacataggtatctgtccccgcaagtcaaatttccaccaatagttgaaatgaagtagaaatatatcaaaagaaggccaattcctatagtattctttcattattttataaatatgcaaaatatattagctttcgaacatgattctcatcatttcaaatagaaaatatggtacaacctgccaagagcatctaatattttcatcattaaatatt

SEQ ID NO: 198116 - DNA, 885 bp, Cannabis indica
agagagagagagagtaaaagtaagaaagaattctacctgctcatcaaaaattgtttgatgaacttgacgaagaagtaaatgtgtctctttaataatacattcatcatcactgcttgcatccttttcactttccctggagtgatgctgatctgaggtacggacttttacattattggtttcagtactatcacatgaatgagtaccaaaaaaaccaaactgaagagagcgacatgaatttgaaggtaaatttattgctagcatgccagctgggtcatgttcaacacgaaccattgacagagaagaagagcggtatacagaagctggatcatacaataaattgtcaaaaagatcaatggtgaagccttcatttccagatgatggagctgcgacacgctgccgtttaactttccagttctgctgcaatctatacactagtcaagacatgagaagggatatcatagaaaattatacatttagctgttaatctttcaaacttccttcgacttgtataaatgcaaatggagtaaatttaattattcaattacacatcttcttagaactaaattctatcatgcaaacataaagctaatgaattaacgattacttctaaaaatggaacaaatgaaaaataaattcccaaaaagaaaagagtaagatagtacatttttttagcaagacaagcagtgcctttggcaccatatttgttttgaaaactataaactatttagaacacaagttgggtgatgtttggcattgttttcagaaaacaatttaaaaaccaaattacaaaaaacagaaaattttaagaacaaaaagttgttttatggatttttcataactctttctttcaaattatcttatcttattattatttaaaaattttaa

SEQ ID NO: 198117 - DNA, 1579 bp, Cannabis indica
tagcttgatattcatgagattttaatgcagatgtgtaaaactctcatgaagtaatgtccatttcttctacagagcactattagttgatgtgtatatataatttattcttttgttggaagtacaccaaaattaattaatacatatatgtatatataaaggctgaatttgaattgaaaagagccaactatatatatatggctaatggctatatgtatgcatgagaatcatgagattaatatacacgtttggtggatcgaagagccacggttgcagccgacaaaaacatcatacacgtacacataacattaatactaaaacataacttatatatacatataaagtcaatcaaaaaattaatgtttttctcttcttattaattattataattacattatatagagtgcagaaaaggctgactaaaatctctggaaagagaaagatgtgttatgatatgaaatgtcttgcggaaagaaagatatatcaatgtcacatatgtaaacacaaaatttatgatcagcagagactttatatatattgtctttcctcaaaagaaaagaaaagaaaagaaaaaagaagataaaaataaaaattgaaacagtggcctttatgtgataataattattcttttgaggaaagtaagcttaacactttgtacgtattattattattatgatatatatatatataaattaattgcatgaattgtttcatctagctatagcgacctatccttcttcccaacatgccattcttcacactcgtctttttcagctttattataatttttcattggaatatatatcactagtatactagtatatggaaccttttttatgaatatatatataaagaagattttaaaaaaaaaaaaattagtatttttacttacaactacgtgggaccatatgcttcgtcttacctaaaaactatgtcactatatatgataacattatattttctctccactatgtattgtttttggtccattacaaacttatggttagtatgaattaatatattactttacattaacttgtatagactacatgacaaaggccttaaagctaagttgttgctttaagagaaggcatatatggtattggcatatgtatgtagtgaattaatatgagatttggttaagtgggtttttggtagtaaatttaattaattaattaataatgagttaagttggaaaagtattgttaattagaaagtgatgaaggtgggacccaccaaaagaaaaagaagtgtaagtgtagatagatgtgagggtcccatgttgtcggttggctacccctttgggtggcataaagatggaccattacgccatttgtggttaaccaatctctctctcatcacgtaaggtggacatcaacttatgcccacatatatctatatctatccatttatttatttttttatgtataaaagccagggtatatactataaggattttttttttcttttacatttcatttcaatctcactattaacatttattcaattaactaaacccaataaaccactcatgaataattgttatagttctttgaatgaactcttacaaaatgaacgagtt

SEQ ID NO: 198118 - DNA, 746 bp, Cannabis indica
actcatatattaatttttccttcttctttatttttataattaattaattccactcgttatgttcaaattttttattattagttagaggaaagtgaggagtttgctctcattatatttttagtacatgatcatataatcattctttcctataataaacgaaataataaattagcatttataccatttattcttttaatttggcaaaaacaaaaaaaatcagctttgattccttcacattctccaatatgcttattaataattttataaatcattttactttacatatttcttatcaaatattataaacaaaacactacttcgaaaagagaatttttattaataaggtactaatccttttatgataaacacaacaaagtttgtaaagctattgtcaaattaaagtaatgatgtaaacaaagtttcaactttttttttaaaaaaaaaaataaaaataaaaattacgtttcaaatcataagattttgtacttgcaatatttgcgaattatgttcttatagagaagaaaaaatccaataaagcttttatataagtaaagttttcatagatacacacacataggtgtagtaataatattaatatatgaagtgtgtatatttttttactcaaattaattttaacaagttatcatatacacagtattatacaggtctaacatgtatgtaggtatatatatatacattcttttaagaaacatttgtgtgcatatgtatatatgattagttcatta

SEQ ID NO: 198119 - DNA, 1111 bp, Cannabis indica
ttttcattttatgaacaatgatgataagtttcttggaattctatcatttttacgaaaaagtaaagttaaagatttcaagtttattaaggataggcttctagaaaggatcgaagggtggatgtgcaagctcttatctcaagctagtataataactcttattagattggtagccttgagcgtccccgtatacactatgtcgactttcatccttcctttaagtatttatcatgatttggataaggtggtttgtaaattttggtggaacatgatttctaacaagaatcagttctctttgaccaacttggattccatccaccttccgttggcggagggtggactcaacttaaaaaaatttgaggacataaacttggcattgatatccaagttcggctagaagttagctacggagctccaaactttggtgacgagtcttccttgctaaatatggaggaggatttaattctggaatattggtggcaatactacccaaactacacatttaattacacttaaccccacaaatctaatttttggtggtaaaaccctttgaacctcactcatgttttgctcattacacctccgccagaaaaccttaattaagtgcgacaatggacatcccacgtgttcactttgtacaagtaacaaatttttagaagtccacgtaatattaattattaaaaaaataattttaaatatttaaaaattttaaaaattagaaaataaattaattttaataaatatttataaaaaatatatattttatctttttcttttctttttcctttttcctttttccttttgccttttcttttcttttcttttctcccttgaaaccctaatcctctccaccctaatttcttccttattctccattatcaccgccaccatagtcattaccaccaaagccactgccagaaccaccaccacaaatcacaatagccaccaccaccttaacctacgcctaaatcacaacagccaccaccgagcttaacctaaacccaaatcatgacaaccaccttaacctaaagtcgagcttcaattggctcattgggacccagagatggcttaatcggagccatggagcttcggctctggcgaggtccaccacgaa

SEQ ID NO: 198120 - DNA, 541 bp, Cannabis indica
tatttttctatttttttccctataaatattgtaaattgtatgagtatttttaattgatgaaaccaattaatgtacattataagccaaataaaagatttaaaattgagagaattaaagagaaaaaaaaaagatgactttcaagcaattttataacgccatgtcaccgtctcatacttctcctttatatagatatatagatatagatcatttatatagatatatagatatataaatagaaagatactttatgaaaagaatacttataatttaaaacatattattgcacatatttttctaccagctaaattgaaaaaaataattggaccaaataaatagatcaacaacatatgcccaaaaaagacagaaaaatacatacaaaagtataaaatatattaatatttacaatacatataccactcctttgccgcttgcttatggtaaaaatgttatatagcttgggatagagcgtgattgtataggagcttgccaccttggagggaaggagagaccaagagacggtgaacaaatccaaagaaaaata

SEQ ID NO: 198121 - DNA, 1877 bp, Cannabis indica
ccatgaagccacttatttatttcatatttcttgataagtccagaaaaatctttagcacacaatataaaaagaacagagagagaggatcttcttgtcgaataccgtgtgtagatataataggaccaagactttgacccccatggccaatccagtaccgaactgttgaaatacatcccataatcaacttcacctaatgtcgaacccatctcggccatgtttcttctgttttaagtaatgaaggacctcaaaaaaaattgaaatgttgtccaaaatcaatctacttgttaaaatttatttaagagttgtttgagcatctcgaatagtactttctgttattttttagctaaaatggcaaaataaaaaaatagagtcatttttatattccttactttaataagtatttgattattttaataatattttataatttgaatttatcaactataaattaatcttataaaataatgaaaaattaatagtattttttattaaaatactattaaaaagttcagcgaaaatgtaagaagctccttacatttagagagttatttatccattctctattatagagacccattttttgtatgattaaagcttattttttcaagtttcactccctatcttaactaaagagtgtgtttagaaagcatggttaaagatgctcttactgaattatgtctcttttgtaattttcagtgtggtaacaaattgtatgtgtattatttgttcatgttaacgttatgtgtataatttaattaaatgattttatttattgatttgttatcaaatttttttacctaatctcacatgcgaacgcctaagtctgagattgggaaagatcccccaaggaaaggctttccaaagatgactcgccaaattacaatagaggaacaagtgttccatggattcctcgttggcactacaaatagggaaagtcatatcttcaaggtgcatgtgatgcccaattactaaccggatgaggagagcattcgaaagaaggctccattagagaatcttgtgccttttgtggattttactattccaaaaccaattccaaagagatgaagcaatcacaatttggggagctctttcaagggcttgaatcataggcatatttggttgaaaatctactattagcttccttagtccagatctagtaatcctagccttggctactaggtttccccctataaaatagctataattatggattggtcaaaaagatagcctagcttatggtgatctcactcttcgtcattcgttaacaggttagccaccacatttaatcccacggtggatcttccattagatttggggaaataatcaagactatgagtcactcaggggtcttcccaaatcctggtatccttgccatccacaataactttacaggcccattttgtgacaatatctttggccttggccacctcttttcaaaaccaagaatcaaagtttttacaagtacaattcaaaaagtgataccctcttaaataattggctttcaaaactctataacacaaagactaattgtctgagattaagtttcagtcccatttagttaaaaaggtctaattcatttcacaagtttttttagaccccaagccaccgtgagatttagaaagacagagtttatcctgggctttgagataaattattttgttactttttttatgacctcactaaaaatctcgcaccatgtcatgccattaatttcagaagccaacttaagcaaacataactcttattatttacttgttaaaaaaaattatgaggtgtatgaattttatgtacaaaacaacattatttattgtaattattattaatattgtaataatcaaaatgtgggtagttattgaatagaaaatcattaagttgat

SEQ ID NO: 198122 - DNA, 1224 bp, Cannabis indica
aaaaaaaaaaaaaagcctaaaacacattttaaatacttacaaataatataaataaataaaaatttgcggtgcaatttgaactaaaaaaaaataaataattctttaaatcacactgtgggagcaactttcttgtttttggacatgtacaagtgacatggacataacataagagaaaaaaatgattccccaatatagtgattaatatttagtgttctttttgttgtacctaacacgatgtaataggcaaaattattattgaaatatttaaaatattatcacgagtctatgattttgaaagaaatattgcttataataattatagttaatggatgcttcattatagtcctcactactcaacaactcacccttagccaacagtgtttttcttagttaaattttaaattacattaaacccaaatttatatatttaattagaccaatacataatagtggtatcacttttatctaaaaatatttaaataattttctatattataaccaaaatttaaaatagttaattgcacacatttttttatacacaattgactattttgagctttgttttaagcacaataaataactttaatttttttagtaaaaaggtgaaatttctctacaatgtataatcataagaaaatttgagttataattttataagtgcttgaaataaacatttttaccaacacaaacaaaattaatactctcacagtaaaatttcctcaaaactatatattcattttacaattagatgttcaaatacaaaattagtaatgtattgtgttgacataaacaatctctaattctaaatctcaaattgtattcgaacggattatgattttgtgaaccggttaaacgattttttagttgcaacattagtattagggaatggtctttatgtattgtagtagtctacttgttatattcgattaatgaccgatccaaaatttaaagtaagaggaaaaacaatgttctttatggaaattaaactattgacatatactttatatgtaatttagtttaatcattacactaaagtaatattatgtctataaatattattttttattataaatatatgtcataactaactaaattttacacatatttttttttgattttctttcaagagctactgccctgcctcgtctacatgtgagtttggccctgattagtgattatgatgatagagaaaatattgatatttgacttaataatttttttttt

SEQ ID NO: 198123 - DNA, 776 bp, Cannabis indica
agtttaacagacaatttgtgggagaagatgacaggattgaaggaagctgccgtgcactgagacatggccggagtagctgcagatgaatctgacatgatcgatgaacagagaaactagatgatcgaaaaaaaaattgagcagagctctgataccatgtgagagaagcaaaagagagagaaaacaacaagaaagagctgaatgattattctgttattgaacagagcaacaagctcagtatatatacagtgataagttagttacaaagtctaaccaactaagcaacggaagctacagtaaataactaactctaactgactatgactgtacaaaataacagaaataacagtatgtacaattgactcatacagagtctctaacatttatgatagtacatttgacttgggttcttgataaacgtggcacctgattgaatgaggctgggttgtgatactagtcatcctagtggcaaagttcggttatgtaatgatgataatcttttttatttttttgggggggtcgaatctagtttttagcttctcttgggcttcagtggcaaaatatattaaagagtttcccatctttattagaaaaatactagtgtattttttttcctactcgagtattttaagaaaaatggattatgacatctatatgtggtagttctgtcatagattaaacactgtcctatcaataatagtattgaagtgggtggtgtgtggttgtggttgtggttgtgaagatgatgtaaggctgatgtttgtatatgtatatattat

SEQ ID NO: 198124 - DNA, 585 bp, Cannabis indica
ccatataaaaataaactctaccctattttctcatatttatggaaaaacccttattatgatagttttaagtgtggttattttatatagtgttcttttgtttttataccattttataatattatattttataatatttattatgttatattttataatatttactatgttatactgttcacgtcatgttcaggtggagtggctgcaatttgtggcctaggtagtttgaagattggaggagttggataaatactcctagaacaggtgtggcagttgctgtgaggaatcttttgcttgctgctacagtcgatactttgtggaaaaattaaaataggtgcatccatgaagggtttacccgaacacccttatattcagttaatgaaatcttgggcataatgagatgtagattgtacaacttggctaaaaaaagctaagccttaaagatcaatgtttatatattttttttgaatgaaatatcaacttcattgaaataaaactagcattctgaatacaaaatattctgaagttcagagaaaattgggaaatcagaaatgctacaacccgtataaaatcgagactgcctagcaa

SEQ ID NO: 198125 - DNA, 1702 bp, Cannabis indica
ctttctctcagccactgaaaacttcaataacaactcgtggtatacagacattggagccattaatcatattacctctaagcctaccaatatgcaacacaaaacaaatctgaaaggtattactcaactcttgattggaaatggatctcccttatcagttactcaatatggttttagaaaaatttctaactctgcttgtagtcttattctcaaacatatcctttgtgtactagaaatagctaaaaatcttttgtctatttcccaactaaccaaagataatcatgtgtttgttgaattctatgctaatcattgtattgtgaaggatctaatcacgaaggaggagctacttcggggagtgcttagcaatggcctgtatcagttgcaacttactgcatctccatcatcatccagtgttaatcttagctattttaattcctccaagagcagtaaaattgccaaactttctcagttgttaggtagtcaagaaaaatcgagtccttcacagtcttttaattgtcatcagcccttgtttgcctactgtttttcattctgatgttaatgtgtggcacatgagacttggtcatcccaatgtcaatgtaatgaaacatatgctcatgaatgaaaaagtttctttcaaatctgacccaccattttgcaatgcatgtcatataggcaaatccaagtataaacattacagcacatctcatacaaaaactcattcaccacttgagctcatacattcggatgtatggggcccttctccaatcccatcaaaagaaggatataggtactatgtgcattttatagatgatttcagcaactttacttggattttccctttaaaactcagaccagatgtcaaaagtacattcattaattttcaaaggtttgttgaaagaaaatttgacactaaaatcaaaactctccaattggattggggaggagagtatagaaacttagcaccctttctcacctctattggagttcattttaggcacccatgtcctcatactcatgctcaaaatggcaaatctgagagaaaacaccaacatatcattgaaatgggtctcactttactctctcaagcctccatgccactgagattttggtgggatgcttttagcatttccacttttctcatcaatcacttgtccacaccaacacttgcactcaaatctccaattaatattttaaatatctcctaatttataaaattttaaggtttttaggtgtgcttgttttccccacttacgtgattacaacaatcacaaacttgattttcgatatgcaaaatgtgtttttcttggctacagtcctaatcataaatgatataagtgcttgcattctagtggtcgtatctatattccacacagtgtatcttttaatgaattagaatttcccttctccactggttttggtcatacagatcctttgcaaatgtcctcctctatttctgagtccacaattcactacagtcattggcttcctttcctctccacaccaaatattcaagatgatacactatgttttgcaactgatacatctcaaagcttagcaagcccagtcacatcacctcaaattggctcttcgaattcagatgcttccaatgatcagtaacaagtcctgcacatggtcattcttctcccaaaaggcctgcctatgttgcctcataccccacaattcccttggctgtccatttaccaat

SEQ ID NO: 198126 - DNA, 812 bp, Cannabis indica
gtatgtcgtcatgtctttccgtggctatgaagggtatactgagggcgggcagcctatcactgctcggggcgaagtcttagaaaaggtcgccactatacgaacacagagcttgagaaagcccaaccatcataatatcaagaggaatgtgctccaatgtggatttctcccccttccgagctaaccgagaagaggttgagaaatctagacaagaaaggactgctcggaaacgtagcgatctttcttcccttcaacaggcaactggcaaatgaccctggagagggcttgtgcgcgtggtccggcttgcacgctcaacagggtgccctcctgtcacttcatccatattttgtgaatttggctaactactacaaaatctgcctgacgcagttcacctaaaggggattaagtacctggctgcaatgtacgtcttgtacgcgcagcaggaattgggagagccttcgccccacgatataaattagttcttttatctaaagtctagttcggaccatggtcgttcgggctattttcatttttctcaacttgagtgctcgtggcggatcgacacaaaccactcctccgtcacgaagattagcgggtttcttcgcaactgctatatcgcccctgagatggagactgatcatcttgcctttcaatacgccaagatttatgaccagccaagttttaaacacagactatggaatagagcatgagcgattctggagatgtcaacgttttctcagaacatatcactgctgacaacaaccggaaaaatttattaagtatgggctttacggagatgagataccaaagaggat

SEQ ID NO: 198127 - DNA, 686 bp, Cannabis indica
tatatatatatatatactaatgggtcaaatctttatattgaattattcaaaaaaattatataatatattatatatatttaaaaaaaaacaattgtaaaaattattaattttataatatatggtacggtacggttttaactgcaactatttaactcaaaatcgttaattgcattgcattacgtggtttgtcaaacatggaaactacaattaaaccgaaaaagatttcaaattacatttttttgtactgtgtggacaatttgatgaacattacacctatatcctacccatatattttttaaaatagaaaaaacttagtttaaagtaggagagagtcacatttattttaatagaagtaggagaggagagagacacattataaaggcctcttggggttgctcatagaattgtttttgctagatatacaatgtggttatcattttttaatgtaattttattaatactattgtctatatttagcaatacacatgtgacattataataactttatcgttttcctttttcaaaaaaaaactaaaaaaatcactatggtactattttatagtatttaataaaatttaatcatttaaataatggcatatgagattatggtagataattttagagttgtctattgttaaagtaatttttttatgaaaagttatcatatcttaatgggtaaatactat

SEQ ID NO: 198128 - DNA, 609 bp, Cannabis indica
cgtacttttacgtttttttttttttttatataagtcatcagttagagtatattggttcaatcaaaacttacaacctatgcacaagtgatcatcaccctgctaacaaactagagaatacattaacaaattgtaaaccaacctactaattacattgatttaaataaaattcgtatttatcatgatacattggtgggtaacatcctaattttttttttttttgaaagcgggtaacatcctaattagaatgcacattgcttagtattaatacatgatcatgatgatacatttaagttagagaaatgctaaagcactttaacatgtattgtaagagatgacatatccttgaagcaatttaatattagtcccatccacacacatattttgatggaataattttttttaaaaaaacacaaaatacagatataaaataaaattatcaaaatacggtccataacgaatttttaatatttttatgagtttttcgattttatttaggataaatagacggcataagtattcaaagttttatgtttataagcggcataaatctaatgtttatttttagcgacataattaagtatccaatgtatgtaaaattgaatttttttc

SEQ ID NO: 198129 - DNA, 1493 bp, Cannabis indica
tcttagctctcctttctttgccctaattgtaactatattttctcttgtattcttcgctttgttacaattacatcccaaaaaataaaaattctatctttttaggatgggtgtagataatttaactgttttagataaggttgaacaataaaaagacattttggcttgaatatgctaaacaaaaacaatgcaaatactacaaatggtatatattgttttaattcagaataaagaaaacgaacaataaatagacacagatggatcaatacatatctattttcaaagaaattgatcaaaagcgaaacaatgatgggaaatagagagaagcaatccatagaaagatgaggctttacaaatctaaacatactacttcattaggatactattgatgacctaatcaaaacacatcaaaagaaaagtttgaactttgaagatccaaaaatctaacatcttttttcaatttctatactatagaacaataaatcataaaatctaaaactcctgagacgcagatccaatctcgtctttcccttttccgactttcttcggcaacaaagtctggtggatgttaggcagaacacctccgttcgcgatggtcaccgcacccaaaagcttgctcaactcttcatcgttcctcacagccaactgaatgtgcctcggaatgattctgctcttcttgttgtccctagcagcgtttcccgccaactccaataactgcatcaaaacgacagagaaaatttaggcaatgaattttgttgtgaaatgatattgaaaaaagcgcaagaaatgcaatttacaggaaaagaaatccaaacaaacctcagcagcaaggtattctagaacggcggagaggtaaactggtgatccagagccgactcgctgagcgtatcggcctttcttgaggaatcgagcgattcgaccgacagggaattggagaccggccttcgaagaccttgaaaccgatttgttagccttaggctttcctctacctcccttcttggttgttgctgcggcggtggaatccattgaatagatacgaagattagggatgcgttgttcaggtactcttggttgaaaatgaaatggagcaaatagagaatttggattgtgaatgtagccattgctgatggtttgatatttatatataaggaagcgaagacgcctatgagtagaaaaggcatttctattggttgaaagtggaaggggcggatcgccagcgtggcaaatttgggcccttttttcggaaaattgaagatggcgggagttaatttcgacaaatttctttccctcaaaaaattattattgaatattaaaatggagtacttcaacaaataaccaataaattaagagtatgtttgtttcaaattcaacaaaaattaaaaagataaattaaaaatatcaaatttcactaaacacaacacaatatatattataattttatgttattatatatttaatcatttaggttatatgtaataaaaattaaaaagtaaaaa

SEQ ID NO: 198130 - DNA, 1049 bp, Cannabis indica
atgatcgcattcatcattcatctcgcgccacaaatctaaaaatattattatgtttttatatagttgcattataattggttatcaatttaattaacactccgataataaacgtatcaataattacgaatggataatgctacaataattttagtcttatttgtagatattttatattgacaattcaacaaaagactttcataaaaaatatttatagtatggttagtattttcatattctaatattagttgagttaacgttggtttacaatgttattacagttgtttctttactaaatattcttaatgtacaagaatattttacctaaatttaaattgttttaaatttgtaagttgcatatacttccaattgtataagtttgtactttgtactcagttaatattttaaatttgtaattgttgaaagaagattgaaaaataactaatactaatattacatgtttctgatcatacctaataattttgaatttggatcttacattacatatatattctatttaagacactaacagagtctattaacgaaattgaacgaaaatgggtatttatgctcctaaaaaaaataattaagtttatatcagttacaaactcaaaactttaaatactgttgtagcaaatatcatttacacaattataataattttcatgatgtttgttattattataaatattgttgttgttttagaacaaaattaatgtggtagttgattcgttagctaaatatgctttaatagttatttttagtattgtttggtgacctgattttttaaattgtattagaagtcacattttggcaaatatcattcatcaatgataatatttctaattcaccatccctattgagtttcattggcattaagtattcttctaaaaaaaatgaaagtgatggtgattttagtaaaggcctaagtaagaagataattaaagtcatctttatacctaataatccaattaaaatatatccattttagttattttcccaaattcaactcttcctactaatatcccatattctaaagtaacatttatttt

SEQ ID NO: 198131 - DNA, 1263 bp, Cannabis indica
ggtgtgggtcatacccaaggtgggcagccgctatattcctaaaatcacatcagcacttcccaatttaattggcaaaaaattgtcccttacatcgacgccttgaaagtgaacatggacatttttgcacagtacttcattattcattgattctccattgtccataatcacaccataaatcctttgaaattttgagtttctctaccacttccttggaaatgaagttgtgggtcgtctcggggtctattagaatcacgacatcctgtgattcaatatggcctttgagttttgtagttttatttgaagtcaacccaaccaccgattgttgtaatatttcaacagttttggtaacatcctgttgactctggctctatcatgtcttgttccaggtgttcggagccttgctccaacaatgcttcgttggtggcctttggtatcatcaagacattgaattctctttgcttgcactggtaacccggagcttatttatcatcacagcgaaaacacaaacctctctcccttttttgttttatctgagcatcagtaaggcgtctcacctcaccttggacacagtcaggaggagtcttgatattgtgaaaactcatattggggctaggtctctaataagtcgtgcgtcgaatgttccctattttagggcacaaaaaagaagtacttcataatttctcttgaatgtcttgagcaatttccatcgcctcgtccacgttttggggacgttggacccttaattttgcctttattattggcagtaagccattgtagaaggtacttaattgaattttcggtgggatgttgtccaatggagccaaaagtcgaatgaaattcttcttaaattccccctattccttcctatttgactaaaagaaacaggccataaatggatcccatttggtgggtgtccctaaaattcttcaacaccaacctcttcagttcttcccaacaaagaattgttctcttcttattctcatattgatacaaaagcaaggcatctcctgatagagaattaaaagctgccttgatcttctcctcttcatcgtaattatggcacgtgaaaaatcattcagattgcatgacccaaccatctggattgttctcgtcaaaatttgacacttttaatttctttaatcactgctcatgcttgtaattgtggcccgattgtcctcaattgattccttacccctcaaacactcgactttcttaaatttctcatatcaccggttctatcacaacccttgatctttgttctag

SEQ ID NO: 198132 - DNA, 605 bp, Cannabis indica
gaaaagaataaaaaaagagagtgaaatgatggattgattgatagaaaatgaaaaaagagatggaagagagtaggatttgattgatgatggatggaatgatgactaagtggtatttgtgtaataaaaccaactttgtaagtaaaaatgtagacataggcgtgtatgagtaattgtgtaataaattgtgtaaaatggatttttcatgtaaaaatttcattaaattattagtatttttttaaaaaaaaaattacattaatgtaaaaaaaaaattaatgacattccatttctatcaaccaaacaaagtaatcatcctattcctaagtatcatcataacattactgcacaaatgaaacctgcatactaaataaaaaacatgctcttcaattttcttcttcctattcctcaaatctcaaatgcagagttctttgtctgtccgtattgtattgattgattattagggtttaaattgtgtagctgaagatgatttatactgcgatcgataccttctatctcactcatgatcaactccagaattctccatccagaaaagataatatagatgaacctaccgaaactactctcagaatctatggctgcgatctcat

SEQ ID NO: 198133 - DNA, 2332 bp, Cannabis indica
tatgccttagtacccccttagtgacttaaaaaggagtttttgggtcagttggcttaaatttatgcgggataagacatatactttgttcgccacatgttaacttacaaagtgtaaagatgaaatcaaatactaaaatcctaactattgatagtatttccagagatgattagaattaggcactatggatccatccatttgcttcaacttataggtcccagagcctattttatttttgacttcatatgggcttcccaatttggtccgagtacccccactcccagttcttgggaggctgggaagacccttcttaggaccaggtcaccagtggcaaatttcttatttttgaattcggagttgaaatattttgccactttcttttggtatgctgccatgcgtatttgagattcttcccatagctcatccactaggtccagtgcttctttaacaaggcttgattcgtggctgggtcgtaagtggttctcctatgggagggaattatagcctctactgggaccatagcctcgcacccgcacaccattgagaatggggaatgtccgctagtacttctcgcagtgatcctgtaggcccataatgcgcatggcaactcttcaagccaattatttttgtaggccaagatttttttcttaagggtgacctttagtatcttattgacgacttccacctgtccattcgcctggggtcttgcaacaatggagaagctcttaatgactccacgtttgttgcagaattatgtgaactcttcatgatcgaattgtttaccattatctgagactattttgtgaggtaactcatatcaacacacaatttttttataacaaagtccaaagctttcttaataattatggtcttcataagttcaacctctatccattttgtgtagtaatccaccgccattattgcatatttaaccctgccttttcctgtggggagagaccctatgaggtctatccccccacaccatgaagggccatgggctcatcattaaggtaatttcatttggtggggctcttgggatgtttacaaatttttggcatggatcgcacttgaggacatagttcatacagtctttcttcatggtaggccaaaaatatccttgccttaataatttcttggagaggcttgggcccccagtgtgatctccgcagaatccttcatggacttcttgtataatctgtctagctttaggatccgacacccaccttaacagagcatgtgcaattgatttccaagcatgtgcacacctagagaaagcagtagaatcaacaagttttcttatgtaaactttccgccactagaagggcattttagatggccctccacacaaatattttaatctttggaggtgactttaggttccaaaaaaattttctactaatcttgtacaaactaacagtagtttcttcatcagtttcttccaaagtggagtcaagtgaaaccctgacttcaccggtagtgttgtagttccatattgttgtaatatattattttttgttgtacactaatggaaaaaccctctaaataaaaaatgaaatttacattctattgaaattatcaatttaattactgttaaacggtataattaacttttatagcgtgtatattttttatttgtattatattcatttttaaagcttactttttactgtgttgatcagtgatatttgtcacgtcagtcacattgagtcattttttttctaagttgaatgcacgttacccctaccgaacccatttctcttctccattattttcaatctcactttctttttcttttattctttatttttttagtttttttttatttgtttgaaaaattcatccatattttttcaaatgtgggtggttacacacatttgataaattggtgaaatgaataccatttcggttctagtttttttttttttcaaaaatcatattccctctcttttctcattttcattggtcattgtttccctattaaatagttgtttcatctatccatggttgttacttgttcgtgttcttcttctccaatcgtaaaaaaatctcagaaaacttctcgaaaaactgtgaagagttcgacaacaggtaaaagaggtgttgctaagaataaattttttaaacatgatcccttagccatacatctcccataatttctaaaagaaagttagtagttgattcggtaggaaagaagaaatcaaaacattctaaagttatcattgaagattcaaattctgattttgagtttgaagatgaagatttcgagatagagaaagtgacaaaagtatttatctattttttttgggtgggtggggcgtgggcatttttaatcatt

SEQ ID NO: 198134 - DNA, 2347 bp, Cannabis indica
tgtctagttagctggcatggaaatgtagttttggtaaaggggaaacttgtcttgaggcttttcactaattagcaagaacaaaatatctgtctcttcaatttttgtggattaaaatggtgaaataatacttacagaaatatgtggcatgtctcgttttacaagtgtaataacacgcttgatgagaaacttccctaggttaatgcctgataagcctggctgcaaatatagcataagtaggtagattaaggccctttcaaccagaaaattaaaattagaaacaaaataatgaataatttaaagataacaaatgtaattacataaaatttggttcgattttaatatttgacaaaacatgcacacatgcgggtggacacatgatatggcaatcagaaaatgaagatcttttgtatcctatgcacttaacaatcttagaagaataatctttacagaaaaaaaggcaaatatataaatgatccttatagtaatgatatggcaattaataaatgaaaatcttctgtatattatgtgcttaataatctgaagcaaataacctttaaaaacaaaccaaatatataagtgatccctatagtattggtctgttaagactaaatggaataaatgggcgaacctgagttgatgatatggagtaaaataatgcgcaagtagcctcacattcaggtatgggaggattatcccacagaacttccagagagagagagagaaattacaataatacaggaataaaaaaacttacctgtattgtttcagcaatattcttcataagtgcaacttcaatgaaaataaggggttcacctaaagagaaacaaatgaaaaaaaaaagaaggaattttaagatacataaattaataaattagatgaaatttttgtatgaccaacaatcaaccaacatgaccccgaaaagtatgtactgtccaactcaaataatcagaaaattcatgacaatctgatatagcatttactacacaatgctaataaatccaaaccctcaatttaacatccacatatgaagttgcataatgcatactagtaatagatttcttaagtattcagcttatcaggcagataaaacaatatcaacttatctggttgataattgaagcaactttttacaaataaacttagacttattaaacattcaatactacaatcctccacttttcattagcaagacatattctctgatcaatttacagcacaaattaatgaaactaccgccaagtcaatgggaaaaatagcaggagatacatataatatttggatctaatacaacagttagactagtactatctgagatcagtgaatagaaaaagaactgctgaccaggtattgctggatgtaaatatccaaaacaacggcgaccaactcccagccttctcttaagatctataaggttgctgattgggtgcacagcctattcaaaatgagtaattaaaatgatatacatcccacgtagcaacacttatatctagacagtggtaaaagaagaaaaatatatttcacctcaaaagccacaatcttttcaagcaatgaggcagaatcatcccatgtgatctgatggagctctaaagctgcagggctcaaccatgtactaagcttctcttttaaataggaatccagtgctcgcaaagatgcaaaagttttcctctctattatgcaaaacattagattttaagatctaatagttcaagaaggggagaaacgaaaaccaaactcctagataaaatgtaccaacttgaaaaaactgttaagctcttgacactttattactgtattcaatatttgtttatcacttactaatgttatccccaccgttaggcattaacatactgatcataggagactaaatgggtaaccttacgcgataatggatagaatatctgatcgaagaatggacaagaacttcaaaccccccggatgagtgttgagacgctcaaatagaacttcatacattggcttgagagcatgtctcaaattcctttcaatacgataaaaagacgtaagcataccatcctcttctatgccacctgattgtgcattttcacctgcaaatagaaatttcttaaccaattgaaatatcaaaaatcctacatttttccttaagttttattcaaatgttttcttacttagtttatggttacttagtatgacctataagctacatatatgatgaaaacagaacctactcgttggaagctgaagtccaagatattgcttgatcaattcacgaacttgtgtcctattgagatcatactccttggcaagcacaagaagtaatttccggcgattttcatgagaaagactaaaatagccctacattaccaaaaat

SEQ ID NO: 198135 - DNA, 759 bp, Cannabis indica
atatatatttaacaaaaataagaagaaaagataaatcaataatgctaaaagcacttgcagttttactagtgaaattattctttttactaaataggttcttagaatatatgagtttaaggctatttaaatttttattttgaattccaaaaaaccttaaatacaacctaacttgcttatacttagagttaaccttactttccacacaattatataagaagtgaagagatcatcttcaaaataacatcaattgtttaccaagattataaggagaaataacaaaaaggagaataagttaagtgttggttctttgggcgaaaattacccagctaaacgcaacgagtaagaaacacacaagggcaagaactgtctcgctatgcaagaaccatgggacccctcttgcgatgtgcaacctcttgtgccatctcgtgatgcgatactcgcaacatcctcttgttatgcaagaagccaatacactttgctgcagacgagaccctcccgggtagagatcaacccaataatagtagagttactacttgtcaaattaaaaaggaaatagccttataatatccattttgtaaaagtataagttatcatcatatgtcaaactcgatgactactatctaacactacttaaggtattcatcaaatcgtttacatcgtaaaaaattgtttacaaatgcataattatacaacataaaattattcatggtatgattaagtaaaatacgatttgcagtattgaattataaaaaattattt

SEQ ID NO: 198136 - DNA, 999 bp, Cannabis indica
agagccttgacccaactaaaagtacaattgctaaggatgtcggtccccatatgaggtgattgtgacaattagagtcctgtgatttgtaaggataaatggattgatgagtactacatatatcaataagatccatattcgtaagaactctaaaattaagcgtgcttgatgacttagagcaatcttaagatgagtgatctcttagaaagttttttcaaggtgcgtgcgagtgagtgcaaagcacgttaaaaatatttgcgttggtttgtagggtaagttgttatttttgtaagtaattgaccaaagttacgtacttgtgtatactgtgtaggtatgtgactacacttatgaagcaagtccattacatataattataaggtaggtaattttgttcaagtgtaatacattttgtgtactgtatttaaataatattgtaggagagagaaaaagaagcttgtgtgaatttaaatttggagttgctctttaggagagaggttttctctactctcgaataccactaattaactagggtagttgtgttattttattggctttctacataggaatgtttaatatgaagattgattatttttctaattaataatttcgttgagaaataattcttaagggtaagatagtaattttacataaattattattttgaatataattgtataattacgaattaaataattaactggattaaattattttattcaaatttgtttaaaactatgaattagttaaataaaatattatttaattagttaaataatgtaatgagagatataaaagatattatttattagaaaataatatttatataattcagaatcaaattagagaaatattagaattatcaattattatttattagagaattaatcaattaaccccacccaccctgtgccggcatcctagtcccacacacctaccttgtcttactgaccacactgcccacatcgtcactggtagtcccccatcgcactgtccaccatcttt

SEQ ID NO: 198137 - DNA, 982 bp, Cannabis indica
taaaaaaataatttttttttgttattttctgtttaattatattttaaaatattagaatattattttaatagaatgttatttttaccattttagtaaaataactattctattttaaaatagaattaaaaattatttcaatgtaaatttaaaaaatatattttaaattttattttatttatatttttatttttatttctatattttcatttttaattgtcgagttacttgtaaaattatatatgccatagtacaattcttcttcaatgaaatttgaggtgtcgaaattttaaaaagttggaacataaatacaaagagtcataccgatcttttgttctaacttctaattaatgatatgtgcgatttgattgttaatatacggtgatcaggtacattccaccttacacttcctttctacctttaaatggtggtgaagaagataacgaagaatattgcttaaatagtggagttgaactgaggaaaagcaaaggaagaagaagtaataaagctatagagaattacattttgtcacagctctcatatctactcatctccatcattcttgtgtgcatagccgagaggagaaacatcaaagaagatccactaaatttcagtgttttaaatattgcatttgagattatcaggtatgtgattaattaattaataataaaaaactttccatatatatatatgcataaatatataaccatatttaattgtaattgattgttgcagtgcatatgggaacgttgggtttacgacaggttacagttgtaaacgacagatagaagcatctaggaatagtagttgtgaagacaagtggtttggttttgcaggaagatggagggatcaaagcaaaataatcttaatagttgtaatgctttttggaagactaaagaagtacaatttgaacggagggaaagcatggaagcttttgtaaactataaatgtagctatatatttgtatactagcaaaaaactacgt

SEQ ID NO: 198138 - DNA, 1341 bp, Cannabis indica
ggtgacatatttctttagcttatctaatacacagtctaataatatgtcaccacgtgtttctgaattgacacttgatggctaaaaaaaaggcacgactgcaacaaaattgtaaaataaagtacgctattttttttattaaagtcatattaacaattataaatattaaaagaatttcggtgcaaaaatccctaaataaacttcacatttgagacaatgttgattttttttagaattaaattagggagtgagttttttcccaaaaataaaataaaattagggaatgggattcctttctctccattttatcttcttttttttctttcttatcgaaaaatgaatgattcgctttattaaaagaaatctcattccattcctccaaaatcagaatcagaatgagaatttgattcctcaattatttttcttttccccaaattacccttttcattattaccaaatcaattctcagatcaattccatctcataataaaccctaattttcgctattttcatgatcacaggtacgcatttcttaattcttaattctgatgtgtttgttagctttctggggtatcttaaattgttgaatcaaattcattgcactgttaaagtttaaatttttagacttgtagagcggttggtgttcggagattatcaaaattgaatttctatgattttggggaaagacctaatttgtggaattgtgttatttgaaaattacgaaagagatatgaaaagttgttgatttagtacttttttggagttgggattgtaataattcagttttatatatgattttgattaatgagtttgtttggatgtgactattgtctctacccaactagttgtgagtttattcataagagttttaaaaaagaaaatttaattgcaaatttgggacccaatgaagaattttaattgttaatccatgttaaattatacttgatgttgatcattttagctttggtgattaatatgaaaagtttgcagttttgtgaactattttctacttagaaaacaattgtggattgtgatcatttttctacatcatatgtctcattcatgctgttaatcccattcttaattgcaaatttgggggctgttaacccatgttaacttatactttgatgctgatcatttttttgcttatttcgctttggtgattgatttatgaaaagtctgtagtttgtgaactattttgtactcagaaaacaattgtggattgtaatcatacttctacattatatgtttcattaagtttggggaccgattgatcgtttttgctttggtgattcatttatgaaaagtctgcagtttgtgaagtattctgtactcagaaaacaa

SEQ ID NO: 198139 - DNA, 1762 bp, Cannabis indica
accaagtgcatgcatttttccttgaatcccggaaacacatccacatttatagtttgatctaagaatgtaacaattaagtaaaaaaaaatattattcatgtaaaagaacttaattacaccataacaaaatgtaccaaggaaagaacagaagaaatcgtatttaaatatatctaaaatgttaaaataagaagaattacattcagtggaaaagtagtccagcctcttgaaataggcatacgtttatatgcagttaaggatttgcaataacgtaacctgaaatgagagatgaatagaaaatagtacaggtactagataataaattttttttagataatgaattgagtatttaaaaaaggatatataacgatctccttctcatatgtgtacttgaaaggtttgcaccgaggaatcggtccatcttcgccggtggtaattgcagtgcatctactcaatctacaaagaaaaggcggtaattcttacacatccaaacaaacaaatagaagataaataatcatttgaagaattgaataaaataaggacaagcaatgaccgatgcatacctagcaatatcaccacgtaaaatgttcaatagaactgtttcagcaatatcatctgcattatgtcctgtagcaaccttgtcaacttttaacagtgcagcaccacgatcaagggccttaaggatgtgtgtgagagaaagggggtcagattcaaatgactcttctcattagaaggattcaaagtaaaaagaatcataaaaagcaaaaaaagtgcccatgaatcatactcaaataacagttcaaaatatacaaaaacttcacattaagagcttcagcaatataaactgaactcccgttcacttgaacaggaggcaattcaatcaaagcttcacaaaatatttatgagaaaaaatgtaacaaaaaaattaaagaaataatatagatttatgggagttttctttctgcgatggttgggattcaagaagccaatgaatcatgtgtatgagtagcttgatgtctcactaaattaatcaattggaagcaatggaaaacagttcaatacttgcagactacatataaaaaaagtttgatgattctcctagtaaattacatatgcacaataaacctgtgtcccctaaattatacatgacaacaatttttctattttgataagatacactaatagggccttaaacactgttagaagggcatctttggttgtttgttcgaatttcgaaaaagcttccaatacccattcatatgcaaacaacaagatgcaagatttttggccataaatgtgacaatgtagcatatagtagttttccatatatagccaatagcatgtacatatgtttatggtccaaccccacttataaaaaaataacacctaagccccaattccattagagaggaactgaaacagaatatcagtatttctttagctaacaacaaatggggagatcgataagctaacccaaaaatacttgagagaaaaattaaatgaaattaataaatcactatttacctgccgacggaaaacaccgcaaaatgtgcaattatttttcagaccgatcacctttactatttcatccatagtccatccatataaatctttgtatgagacaactttaagaggcagtccatactaaaaaacaaattggagaataaagaaatctttcaggataatgtaataagacatacagatcaatatagttaactttttggcgagatggtaagagaaacaatatggagattgtttgaagactc

SEQ ID NO: 198140 - DNA, 1243 bp, Cannabis indica
aacaagcaacgaaacctcgtcaacacgtacataggaaaatgcattaagacgattagttgttagaatttcatgtgagattcgacgaaggtttcgccagtgcccattatagggtgatgttgcaagggtagtgtagttgtaagctataattttaccacttgtggtcccgagaggccgatttgcgaagatggcatccttttgttttaggcattcttcaattatagatggggatgagatgacgagaactggatagttgccaaaattaaggtgaaatattggaccatataacttggatagcttagtgagagttctgtgaaggcaactaggatttttaagtaggtaaatgtggccaataattggaagagttggaaaaagagttggtgggaaatttagaatcttgttgtacaagtgacaaacaatggcataaataaaaaagaagatctgtatgatgtagaggaacattgttcttcaaaaagtgaaaatgaaaaaagagtaatttatgagagatgattttttttcttatgtcttatgtcgaatgagatagaaatgcttgagcatatttttcttattatatagaagtgtgaattgcaaggaaatataggtcttgtagaaatttataaactaacctaacctaagttttaagctaaaagctactagttaaaagttgttgtaggtaagcagctataattgacttttgagattgaaatatcactaagattttgatgtttcatgtttagaaaatttacatgcattaaattacaccataaaaatttatcttttatggtgcttagcactttaagatatcttttagtatttttcttattatttaaagatatgtagagtgaaactacccaatttttcgtaagtgtgacagataaataataaaaaaaattatgatagggtttatgttatacttttatttatcaataagatgaataaatattagaattatttagcgaaatgtattgctacttatttattgatatgattataaatttagtataaatatttattaaaactagaatatatgtataaaataataattatagttacgtggtcacaataaaatataattgtgattgtatgatgaagtaaatttagtaagatttacactgacatgtaaatctacgatattatttacttatactctttataacggtatgtgtttttcaagacattggtaatgtaaatacatcagaggtatttattacataggacatcattgatattgattttggataagata

SEQ ID NO: 198141 - DNA, 1100 bp, Cannabis indica
ctgcagtaagtgacaatcttctacgtctcttatatgcttttattttcacagttctaaccttatcttatatgattgctagattgtcgcggaggccgatcgactttccaagactttgattgatcaaggattcatcgtgtctgagaggaccaaatggaagcccttcgcaatgaagcccaagaggagaaggcccttgtagagcaaaatcatcaggcagctctgaaagtgaaggatgacattatcgcctcgagcgagaagaaccttcgggactccagagaggagaaccatgagctccttatgaagcttcaatctttggaggtgctgcatcagactgacttggagacaacgactaatctgactattgaactaaaggagcttcgtgagttctgggacaaaactcgtaaaaaggctgccaaggccgagagggatgctttactagctccagttacttgcaagcactatgaaaagtgctttgaagatggagcgtgtatgtgctggaaggccaataagttcgaacctcgccttcacttcttccccaatcctgaggctgttatagcccagttttaggagaagaataaaaaactagaagtcgttctggttgagcgttgagcgtaggggtccccgtcttcctccacgaattgattaatcaagcctttctttatacatttcccctacttcaccctacttaagacactttttatttcttgaatttactctttattttaggtaaggggagactattatggcccatccctaggcctttttttttacattttggacaacttttattgtaagtttatatccattttgcttcttctctctttttttatctagcctatttctgcgcatattttatgccttggtaccccctaagtgacatgaaaaaggactttttgggtcacttaacttaaattcatatgagataacgcatatatttagtctgtcataggttaagttacaaaataaggaagaatgtaattattgaacttgtaactattgatagtacttgtggagatggtcagcattggatccgtccattcttttgagcttataagtgtcggagcctatttcatcgtcaatttcatatgggccttcctaatttg

SEQ ID NO: 198142 - DNA, 1858 bp, Cannabis indica
agaataaaataagtaaagggtagtggtttccaaaggcttagtttgattataataataacatttttaatatcaattatttatctttatgtaaatactttatgaccatcagctagatattttgtttctttttttctttaattattatttgtttatattaattaattaagcaactaacttgcataattatcttccaatcatgctgctatatatatgaaattattttaaaaaatatatattatatatcttaataatgtttttaccttttgctttatgatcgtgggttacattgaaaatgacaagtgcatcatgatatgggtccaaaagaggttgatacgaataataagaaaaagtaataattaataaagctttgaaattttcattttgttaattatgtgttttaattgattatatatatagttgattagtgactaaattcattttaatgcaatcatgacgtcatcgtgatgattgtaaaccataaataacttgtggcttaatatttaagttattacataataatatttattgaaatcaagctaaatatccaatatataatttagagatttttttaagaaaaaagaaacaatttcgaattaataatattttgttaagaaaagtaaatatatacatatataggatggttatgatattcaaatatattgttataattttaattttttttatattatgatgtaaattgtaattatttaaatattttgcataatttttgagaaatttataatagtttacaattaaaaaaaaaaatatgattcaagtaataccctatttatatgcctataacacaaaagagatatgtggataatagattgtttgaatcttatttttaatatgttaaattattttaaattatcaaaattttacaaaatatcttaattaataactacaatattatacaatacatactatcgtataaaaaatttaaaatacaattatctggacatcaaaaatataaaaaatgattaaaattgcttatcatcttatagaaaaataattaaaatactgttggtgtctagcgctttcttaattgttattatactgctattagtgtaattaagtatcgaatcttatataatttaattactaatcgatcttagcgcaccttttaaaaggcaccactgataatcaataacaattctctttctcatatatatatatatatataaagtaatttatgtaaatttatagatacacgtacgcacctcatgaccttgttattaaccacataatatatgcattttcagtcaatatataatctaaatttatgctagcatctttagtcactcatcccaaaatccatatatttatatataatacatatcatgccaaattattaattattggtaaatatagattccattaatttcctttttaaagctttgcctttatttttcttcttctcttttgaatgttctttgtcctttaaaaagtgaaattttgattataattttttctccatgtttggagtacatttttgacctatatagtacaatttattccttgcacaaatcatgatcatcttatcctctacctaggagagttcacatatataacaaataaaaacatatacatcatacaatttacaaacattaacaattaatatttagataattatacttatacacattaagtaatcaagagggaaacccctaattgaagtatatttaattttttttttaattttttctataacaatatgcttattgtaatacagtagcatatttcttacaaaattttaagaatttcctgttaacttatagtgtcataatcaaaatttaaatagtttgttacacaaatatttatcttttccaatacaaaagagtgattattttgaatttct

SEQ ID NO: 198143 - DNA, 1002 bp, Cannabis indica
aggaaggaggattttttgttcttcaaaagcaagggtaggatactaacacaatgttcatcacagtagtaaacaaaatgtatgttacttaatagctgatttctcctctatgtgttattattttcccatttgggtggtttaagtcgtttactttagttttcatgagtggaatgctaactgtgtttgtaagcttgaagttaaaacaatacacggcctggtagccctcacctcccttctttatgggaggatggtaacaatgaaccttccagtactttaaaaattgtttcattaatacctcattaatatgttcttattctcatttaggataagacagtttatgcatcttgatgatacatttggaatagggggatctaagtgcagtggagttttagagttttcaagtatttttttttttttttttttattttcatgagtgaatgcagggattctcagtttatgttctctcttttggtctgatagtacattggttggtctttattaacatgtctgatctatgtcagacttatatgttgtgaccaaggatttcagaacttgtatcttacagtttatatcttggatcgtcacagtttatatcattgtgaataacttggatcttcacagttaatcagcttaggtttcaacaactcaaaagttatggtcacttgaggattgcaaaatttgttggataggtagattaaatgtgtgtgtgagtggtccaaaattattgaaaagagaaaagggaaaagaagattatgaaagttgtgtgcagcatcacttggttccagaattgctaactgaatttttttttttttggtcaacatcaccctattggattgaaaaaataaaggagcaccataacagattattgccaaatgtacttttaatatcattaaaaagaaaagaaaagaagacgacaagagaaaagaaagaagctaactgaccttcattggtctttagacactttttttaagcaaaatttgtagttgtctatcttcatttacttga

SEQ ID NO: 198144 - DNA, 2185 bp, Cannabis indica
gaaggatcttgggtaaagtacctccgttaatcaagttttcttataataatagctaccaatcaactatcgggatcgctccttatgaaatgctttatagcagaaagtgtagatcacttattcattgggatgagttaggtgaggcaaagtttttgggtcccaaagttgttcagaaaatgaacgaggcaattgataaaattagagctcggatgctcagtgcttagagtagacagaagagtgatgttaattcaaagcgatagaatgttgacttttaggttggagatatggtattcctccgtatttcacccatgaaaggagtaaaaatctttagtaagagaggaaaactcagcctgatgttcattggaccatttgaaatcctagagaggatagggaaagtggcgtacaagttggctatgcccccagtgctagcagatgtacataatgtgttccatgtctcaatactttttacttgattttgagtgattaatccatggatgagcgagattatgaatgggacatgctaagttaaagattttgtgatgtttaaccttgttaaccaaaagaaatttaagttaaattctggttgtttaatattgtcaattgaaaagttgagtatgagatttcttttagttctctttgaaatttgaaattcaatatcatgaattggtaagttttgagcataaaggctttatttagtgttctttggatttcatagtatgaattgtatgattttgagccttattggtatgttttagttgggttttgtaaaccaaactgattttagatgtaaggttttattaattacgtgttttcgaagttatgaaaaaaatttacatttttaggttttcaggcctagccgtcggggcgaggattgaactcaaaataggggtttgccctttccctatctcacggcggcgaccatatggtctggttgcggtgaccccgcgatgacagttcattttagtctattttgtttcgggcatgacttttcactctgaactctgttttagatgctctatatatcgtcagaaagctcatcagagctctgttacttggtctagagttggagtcataaatgtgaatttttttatgaaatgtgtttttgggattaaccctactatgtgaaacccaagaattataactaggaataccggcacttggtcagaatcacctgtgaattggaatttcttctcatacgatggaaatcaggtaagacaacacatagagtatagcgcgatagggaggttatttattatgtaattattttaatgaaatcgagagctagggttattatcctaagtacatattgtaataaatatgtaataatatgttatgtgtaaaaatgagaagaattatgtgagtaagacatacctaggttagacttggtaagtaaaaccgagataaatcctatgaaggccttatatgtaaaagggacgtgtgagagtagcacgtagtctatgttatatagacattagatgcagcgacatcattgtatatgaaataatgtgatatacagtgcattgacacagttatatacgcagaggcgtaatgtatgatatgtgactattatgattgttcatactgtattattgttttgtcttgttgggccttggctcacgggtgctctattgtacaagcatgggtaaagcagtttcgggtgagtttgagggttttgaagatgaatttacatgttctggccaaactagatcacgagggttgggtccaacatagaattgtatagaaattctattttttcgcttaggtcggtttgtatgaaataacttgtaatattttgaaaatcaattttacgggatcccaaagatgtaactttaatattttgttttatagtaaagtatgcttttattacaggttatttatttaattaagttagatatttatttttaatcacttggcttatagatcccaattaatggaattagcatatttttatcatgacacgtgaagctactctaagtaagacgttacaactatattaataaccaaatagtttttttttcttttggaaatagcaaaaaaacatatgctccccatatcttgaaatgtgcacattgaagagtatatcacaatactattttgttagagttaactgaataacaaacgtgaccacaaataattttaaagttaataaaaagagggaaatagagtgttgaacgataaaattttaata

SEQ ID NO: 198145 - DNA, 561 bp, Cannabis indica
tgtacttattttctcatttgaccaggaaattaccgcaaattctatgacgctattaaaagtgcctatccagatattaaaataattacaaactgtgatggttcttctcaaaagttggatcacccagctgatttgtatgattatcatgtatgtttttacaatcagacctatttataattttctaacacaagtttttgtatttggcatgtaaagtaacagtgttgtaacaatatctcaattctttgttaggtttatacaagctccagtgacatgttctcgagaggccgtcattttgattctgcatcacggagtggacctaaggtttgttgatacttgaatcgatctgctgttttttattgttgatcaaaatacctttcgcctaaatcaatttgtcggttttcttgacattgtgttctccaggcttttgtaagtgaatatgcagttactggaaaagatgctggccaaggaagctttcttgcagcacttggtgaagctggattccttattggattagagaagaacaggtgaagctcgatcgctcttcatttaaaaaacattctgttg

SEQ ID NO: 198146 - DNA, 785 bp, Cannabis indica
tggagccatgcaatacttaaatcacaccagacctgatatcagctatgttgataccttaaaggaactggtactcaaggactccatctctgctgcggtgatagactaaatctcaatggcttttctgatgcagattgggcaagtaatgtcgatgacagaagatctgtaggatgctactgtgtttaccttggatagtcccttatatcccgatcctccgaaaaataagtagtggtatcaagatccaacatagaattctaatagagggcacttgctcatgtcagtgctgaaatatcctgggttgaatccctgctcaataaaattaagttccatgttcctacagctcctgtcacttggtgtgataatataagtgctagtgccctggcctcaaatccagtgtaccatacccgtaccaagcatatagagttagatatacactttgttagagacaaggttctgaataagtctctaaaagtcagatacattctttcaacaaatccatttgcagactgcatgactaagtctctttctcattccagatttcactatttagtttccaaacttggtgtgaaacactcaccctctcgattgaggggtggtgttaagaaagttgattaattctgcttagtattaattactgtgtattagtgcaatctttatgaagttgttatcttgttttcaaagttgtcactgctgttatagtgtgttcccttggtttcaacattagggctacttgtcattttattttgttattggtgtttgtactttcttatcaaagtataaataaaaat

SEQ ID NO: 198147 - DNA, 618 bp, Cannabis indica
aaaaaaaaaaaaacacattttgagtatctttattattattaaggaaaacattaaggaaaggtaataagctgcagaattaaaaagtattattattatttttattttaatatgatgattataaaggaatccgacacattatcacaaactataatattttaagagtgaaatttacccacacgtgtcctacacgtgagaaacaataatctacctaaaggtctaaaaaaaaatattttattgaaaacaataatataaaaattaaaatggacacccaagtagctccagataccattatttcataaagtggatccacaaaacatcaaaagtacattttagtgtatctagaaaaaagcgtagcggtagaaaaatactaaaataacatttaaaagagaaatagtgtagtatccccctccctccagtcttggagcgtgtttcccacgtcatccgaagtagcgtgacaaacgacattaatttaatttatttatttttgcaacgaaagacattaatttaattgacgaccggttttttagccgagcagctcagtgggtttggttgttcaaagtgaccagctacaaccgggtattaaaaagaaaaaactgaaggtattttttttttttcttt

SEQ ID NO: 198148 - DNA, 531 bp, Cannabis indica
aattttgttttgaatattaataactttatttttgtaaacaacagttacaaatttgtaagaaattattacatatttgttgataagttttataaatttgtaagcacgtgttacatgcatgcaaataaataatatttacacacttgttagctaaatgagaattggcaacatataatatggtatgttgcttttggtcacttttggtgaattttcataatcttttggactgctcttttttgtgctttgtgacagtttttttctttaatggtttttttagttattttccctttgtttcttcatcagtttcagtcagttattctttgttactagttttctgcaacttcatttcttatttctatggatcctcgacttgattggataaaatttgttgtatctttaacagaaacaaagcgctccgtggttgccatcgctgatggtggtgcccctaactcgaatgagcagcttgaacttgtcttggttgttcgtattctatctacacggaaagttttgctatcaactttacaaagacaaatg

SEQ ID NO: 198149 - DNA, 984 bp, Cannabis indica
tttagatgtcacaaagtgaagaaaggcaaaatggttaaagaaagactaataataacaagagagtgatttggaagaaaaaaaggtatggaaataggaataggaaaagggaataagagcatgagcatggtgggcgagcaattatgcgtggattgtggaatgagtggtgttggacatatcataataattatggcatgtatgtagtgcatatacaccatgtgccctctaccctttgtctaatacaaatttacaattctttgtacaattaataaaaataataataattagtaataatggaaaactataacatacaccgtccaaataacattagttatgtcaacaatacttaatgggagtgggtcccatataatggcctctaattctaaccctaagcgcgttcccttaccctatttctaattcataaatttaaccaaacaattctacatttgcgattattacaaacattattgttgtgaaaaacgtattaattaattaaagtaacgaccatctcttctctggttctataattttgattattttctgtgaattattaacttattaatttattattattattttgaacaaaatttgagattccaattaagattatagaagataagaccatcgttaacacattgatcaaattgtggctaatttaaaataaatttctttgacttggtgacacacataagatgtttgttccatttaaaaccttatatattatatatgtgttctaattaattgtgttattaaacttaattgtagatttttgtgtgaattctatgatctcatgaaaggaatgaaaataagtatgtacacacatattcattaaaaaaaataatctacctttagttttgtcacaatataaattttgtacaactaaatgtataacaaaaaattacttgtgattaaaacataatatttaaatataaattatgattaatttaattttaatcataattgttgaatcgacctctgagaaggaag

SEQ ID NO: 198150 - DNA, 2256 bp, Cannabis indica
agtccttctaggagtgaactgatatgggagttatctttctccaccaatcttctacaaatttggtgagggtcaacgagaagcacaaacacttgacatcatcgctaaccctggccacttgcatcatcttgttatacttggctaaatgggtcttgggatctgagtgtctgtcgtacaacttgatttgaggcattttgaagttctccgagagaggagcctccgtgatcctcttgacacaagactctaggtcttcatattctgaatcagtgaaggccccattatgcttttggaccaattttgttaaggtagctatctacttttctaatcgttttgtgttgctatctagaagatttatccacaagccttgttgtttaagtggttttcgaggtcatcatctcgtgacctcatatccttgctcttagctttattgtactttatgtctaaaagccttctgaggtccacaacgaaccaactatcatcggagtacttctcctctgccccattatcctggtttaccaaatcattagggcggtcattccttcctttaggttctagtacttttgtaccagcccctttcggtgccacatgacctttctaggctgaaggacacccaagcccaaagtcattgactgtcttttgcgcctaaaaggccttgttggcctaatttgaattttttttcgaggaggcttgaaagcacgagagttttttgggtcacccacttttgcctttcccttgtcctgtacaggagcagaggtttcgacaccagtggggttctccttggtgttctttctaacacattttttgaaatatcatcatcagagtctccttcgttaaatctccaaacttactttggaggcggtccaaatttttttacatcttttgagaaaatctttcctgatgaaccagcttttgttgagtttcaaacaactccttgaaaactctcgttaccttgggattgtgttcgtaaaggtggccgtgtttgtaaaacccatctttggtgcaaccctcgtcatcttcttcttcctctacatggtcctcagtatctttgtcattgccaacatggtcacgctatatgtttgggtccccctcttgaacgttcatgttggacgtgcccccacgtcccgcactgctcggctgggcgtgctcaggcaagagggggtttacctcctccatgatcgtcttgatgatgccccgaggagtccttttgtgaattgttttttgtgtggataccatgatagtaatagtggttttcgtctttcttcggctctcaatgaaagcacaaaaatatttaccgagatttttggaaactaaaatatttaagagctaaagaaatagtaaatgacaaaaattaagagaggaaagttatttacgtggtttaggtgttaaaaagccctagtccgtgagttagtctattagcctcgctgagcaacattaatgaatttacaatattatgcaagaaaccctaactctttttccttaagttcttttctaaaaagaagaagaagacataaaaataattttagcagagtttttgtagtgtgtttttggcttgacccctttgcatgaaaatggagggggtatttataggctaagtgatgggtgtgggtcgccccacgatccacctaggatctctacttaaatcccaatattggggtaaattacatacaatgtagagctaactagttggtcctgtgggtaacattacgctcatgcatgctacagctagataatggggaccattttataccactcggacatgtgtcatgcaaaggttcaacctttaaaagtgacggacacatgtcactctaagcttgctcctttctaagaagtattctataatgtccgtatggtagaaggatggtggcggtgcgcgcattggcatgtctggatgtaggagacaagatcagattttgtcaggaaaagtataactgtccgtttggtgacctggctcatgagaaaagtcgatattcgcaaacacccatgatggtcaatctccgcaataggtttctctggtgagcatgggagccatccgaaacgagcctttctactaggctcttccgggttcgggagaggcatttcctgtcccactcttgggaagcaaatcttgttgcgagaaggtttccctgtatctctttgctctggatgattcttcaactcagggaaatcttttagggattgtgcgccttttaaaggactttaactcacgagggatcaattgagtcttttcaattaaaaaccacgtgtcatgtcttgcataaa

SEQ ID NO: 198151 - DNA, 1125 bp, Cannabis indica
gcgttcttacctcaattgcaaacttttccacctcctctattgtatgacgagctcttgaatagaagttctcaagccaatcgaaggtttgacttctgcaattgaagggccagctttccactattcaaaatgggggtctctctctcaatctcagcatatgtggacaaaactgttagttttatggtactaaattagatacgcatgagaatgatttcgtaatatctcattatcattgtcccatagcccaaataattttcagatgtgtgtacattaaatcaaaatataaaataataagtttagaacatatacctcttgaagactatcagggtatcctcgaaatttttcgtatgttgtatccttaatccagttgatgaggatgatgtaatttgaactcaaaccagtgtcttccaaatcgaaccaccgcacacaagaaatattgtgggctattaggataaaatgtatatagttgttcttgttaagttctcaacacatcatgagcaagaacagttgagagaaaaattctttttcttttctctctatatttaaaaaatatatgtcaaagttaagtgttctgatttctcacatcaggcttctatttatagtagttaaattcttttgattaaatcatatttaattatttaaataaataaatatctataaccgaattcgattactaatatttatgagggaatctctcaactacttgagaaaatatctcaacaattttaaaatatctataaccacttttcaaatttagatatttatctgattaaattaattaaataattaattaacaccaaaaagacggcacaactacataataggcgcctaccatgtctgtttaatgatggtgtcttctgtcccaacaaatcttgtcttgataaattttttcttaataatttttgtcttttctctatttgattaattttaaaaaattatttatttataacaaaaaataaatttatcctttagtaccatatttaattcactagtaaatatataatttagatcccatttaaatttgtgcacaactttccagttctagaattaacacttaaagggaaccaacattcaatttgttagaaaattcaagattctttaattataaatcatgtttccagccatcca

SEQ ID NO: 198152 - DNA, 1951 bp, Cannabis indica
ttagttagttagttagttaaaaaacagttacaactatttctttgtaacaacttttctgttgctttaattcttgtttcctctctgtattctcccctatataaatgaaatcatttcataagactacttagcttttgctagtcttgaattgcaatctcatagattggattctgttagatttttagcatagataagctctttcatggtattagattgcccctgactaccgtctcctatggatccccgtaatcctgaaaatccatctcgttcttcaactcaaacactcgccaccgctgctcaagctccggccaatcctccatgaaatccgttccaaaattcacttcactcttctctcaccgtaaaattggatcgatgaaatttcttagcatgaaaatcacaagttataccaactataattggtcacggtctcgatgatatacttcttggaggtatttccccacctgaacgattggttaatggccaaaccaatcccgaaatcacaacctgaaagagaaaggattagcttctgcttagttggcttcgatcgtccatgtccgaatctgttcttggctctctagctcaattccaaagctcctactttgcctggcgcgctctggaacagagatacgccagtcaattaaaaacacgtattttatagatcaagtctcaactatctacaattcagaaaggtaatctttccatttctgactaccttaacaaggtaaagattcttgctgattctctttcagttgctggtactcctatggacaaaaatgacttaatcatgcacttgcttaatggattcgaccctgaattcgaccctgttgttgttcatgttactagtcttgttgatgatctttcctttgaatctattcaatctttattactaactcatcggggcagattagaaagacattacactattgctgactccagcaacaagatttcagtaaatcttgctgttggtcctgctagatctgcaactgggacccaaaatcgctacaatacatcaggaagaggatcaaattcactgtataaccaatgtgtccctcccagaaactttggccgaggtgcctccaccacaccaagattaatttgtcaagtttgtcacaaacttgggcaaacggctactgtgtgtcattacaggtttgataaagggtttgttacccgaaaaattggtgattctcgtgctttcctgacagagattgatgactctaaagaacatcagtcttcctcatcctcgatgctccctaactatgctattgatcaagaatggtatgctgataccggtgctacaaattacattgctcttggcatggaaaatcttgaccatgaacaaccctattcttgacatgagtctctcacagttggtaatggtaacaaactcactatctctcatcttggcactcactcaattcctactgtttctcaacctctaaagcttaattctattcttaaagtccttgaaataaagaaaaaccttgttagtgttttaaaactaaccaatgataataatgtttttcttgaattccattccaaatcttgctttgttaaggacaaactcacagggaatgtcctactcaaagggagagttaaaaatggtctctacatgcttccccaacaacccacttcagaatctgatctggagcttcaatgtcacatggccactactatggcttctgcctcagacattactaagtcacatgttcctagtttatagtctaagagttttctttcccattgtacttcagctgtttcaccagctgcaacatcttgtaatactattggtattaataaaaatttttttccagttttgcctatacactagttctgatatgaacctgatgttaatatatggcactccaaactatgtcacccatcacctaaaattttggccaagatcttgtctaaaatcaatatatcacacaacttaaaaactcttagattctgtgaa

SEQ ID NO: 198153 - DNA, 802 bp, Cannabis indica
ctatttttatggcagctcgaacattgaggaactcgaacacttggactgttatcatggaggctctcactttcaggtagccttttaagttaaggttgctcatttatttctctcacttatgacctaaaaattattgatatttcttgtttcaactgacgaatctttttcaacaggctaggaatcacaatagtggcacgatcacacataggaggatcgattcattcccaaaactcacacccaccacgacgctgccaatcaagaaatattggcatagtatagcgaagaaaaacctaaaaaaaaggaaaaaagaaagagaagaagagaactcacaagacttagagggtactttgcagatcttcttcctgggttcgaactcgtccacgaggtgtaacattttgggattttaggctactcgcaatcgcaattcctcctttagaccgtcaccattttcttctttttcgcacaacaatggcgcctagtttctttctctcctttcgatcttcttcattctttgttttttgtttatttatttatatttttattctattttcatttattttttaatttttatctaataatgaaaattaattagttttagtttcttaattttataccaaaatttgacatggtttcatatgacatgtcaatgttaatttagtgttacggaggagccatcaggcacataatggagccagactaatagaatttagctttaattttttaatttgggaattgatcgtgctaaattttaaaattttaaaaatttaatcataaagtacctaaataataataataaagggagtat

SEQ ID NO: 198154 - DNA, 978 bp, Cannabis indica
gtacacggctaaaattgtgaaggctcttcttacaatacaagccaagcttatccctgagattattaactcaacataaatatcattgcttccaaaattcgaaactctatccacatttcatacgtataaaccaaaacaactaatttaaaacacctactttttacaaaagaacactaaagtagaaactaggaaataaaataatatgttgttcggacccgcgctccattcggatattcgatccgtggcagcattagcatttggcaacagggaagtgtggaacccgggtttcctacccgacccgactccttgtgctgggagtaggactcggaggtggagcttgcgagtgagagcttcctctattggcgcggcggtggacaagagtaaggacaaccgcttttccatttgtacggctgacgagcttcactttgtcaagcctcccaactccgactggagcctcgccctatggcgcttcctcccctctccagaggtgaacagttatttatttatttacgaattatatatatatatttcgaatttctaagtcatatatattatttatatctggtgtatgaatgaacaggcggtggcaaagaatcatccattgttgttgctgtcagggatcgccacaaatgccattggatacgatctctctcctcaggtatatatttgtttactttcttttggggtctcgaactgattgtgacttgtaataaatatattttttaaaacaggatcaaagaggataactagcggctaatcactgtcgtgctattttttatttgataaagttgttgattactattttttttatctttgtttcatctgattcagtctccaatcgatccaattattgcaagttcttaaattttgtcatttcttgctcaattttttcatttttcacactcacttgcacacactatctacacacaattaaaaaatgaaaagtaatgtgcttcccgtatataattttatatatatata

SEQ ID NO: 198155 - DNA, 2114 bp, Cannabis indica
tacttaatactactttttagttttaaaaaataaagttaattatgatgtacaaatattaatgcacccattttttttttttttgaaaaaaactccaatttctttttcataaaaatcaaattattttctttaaaattaatttttatacttaaaatgctaatactttttttttggtaaattatcttaaaaaagctacattaatacatgacacgtacaaattataatcatttgcaacgtaattttataacatattttttcgtataattatgttagaatttggaatttcttagttaaagtgcatggggttttattattcgcatttttagtaagcgatacatggattttaaataaaagtttaaggctcatcagtgggctccaataatataaattgggtcgagcccagaattcattctgcctttagggagaacaacaaggtaatttgcctaggtgaggttttgctaagcttagtcagcattcaaaaagcctatctccgtgtatctagaagaggtcctcagcgtgtatccagaacattattatagttttccatttttttgccaaatcgcagaagattaaaaattacttccccaaaatctcagatagagaataatatcttactaaaaagggaaactaaatagctggaaattaggtaagtaatgtcattatactcatgaatataagacacagtatgaatagattatagctagcttcgtgataaggcctccacatcagtatacacaaggtgcctcaagggtcaggcttaaccaaataagctcaaagtcagtgtattatttgtaaacttcccattaaaaggaaaaatgtaactagtatgacatctataacactataaatactcactaaatctttcatgcaaagagttgaaaattcttgacttacttgctcaagcaaagtatagagtgctcatacttattataatctcaaagacttttttagccaacctcataataatattgactcgtggacaaagacttgttaacgccccaatcacgtaaaaactctggttgtcttcttcatatatttcttcttgaattatattttctttagctcttatatttaataagtagttttccaaaaaaacttggtaaatattttggtacttttattgagagttgaagaaagcagtgataccatcaaagattacgttcagtaattatggtactcacttgaacaaagtgtggtcttcactaccacgacacctcgaaggacgatgttgatcctaattccaaaatgagatttgatgaagatcccatcgaggtgaccagtcaccaaaaagggaaagattagcacgatgagacaaactttcatgatgatctcctcgataaaggagaagaagaagacgagtttgaggatttagattttatggatctagaagacaatgccgtcaataagaggatgagcaccatgagccaaatcctaggatcgttgaaatggcctaaaaactagaagcaactgaacaaacattggcaacacaagaagtgttttctcgattaatgctggagaaatttgtgatgttggaagcaacatttggaggaggaaaacaaaatcttcacagaaatatacctaatgatactaattctcagagtaataatgctaggaaaacgaaccttaaagatcctaacactcgtaatcctcctaaggataaagggatatgaaaaataggagaaacctccaaaaaactgctcccaatgatcaacaaaagagaatgaatcctgctagtcaacctcctataaaaagaaattaaccaatgcttcagggcaaggtcaccggactaattctagaggcaaaattgtacataaggaaaagtcttatgctgttaggctatttttagcttattgttcaagtcaattttagagttaattttcttctttattatcattttttggaataaaattatgcttgttttttttgttttgtttcaggttttgatacttagaatgtataaattgatcaaatttcagaaaatagtgatttataaaatagagaaaattttacaaaaaataaatgtgaaacttaaagcctaaattagactatgttcttattagaatttaaaaaaagtcataacataaaaattttagacctctttttatctttccaatgca

SEQ ID NO: 198156 - DNA, 795 bp, Cannabis indica
ttgctgctgaaaatgcttatggttcaggtattgtttttcgtgatgatggtggacggttgattgaggctgttgcaagctatgtaattgggggtactcaaccggaattggccgagataatggggattaaggaagcactcagttgggtcaagaggaaaggtattcaagatgttgtcattgaatcggatagcctactttcgatccaagcgttggaaagttctattcgaatgccttcggtgtttggtttaatggttgttgagtgtcaaactattttactttctcttgtcaatgttaaaatttgttttgttaagcgatctgctaacagagttgcacattgcattgcccgcaactcttgttttggtcaggttgtaatttgtagaagggacagcacctgctgctcttcaaactcttatcttgccgatttggcagtttaatggattgaagcttttttaaaaaaaaatatttcaacagtacacaacaattttgcaataaaattaaccaaaccaaaactaataaccaacacataacatccatctcaaagaagatgggttatgaataataatataaatgtgtcatatatattaattatgggtttttgatggaattggctacttcaaggagaagggcaaaaagcacatccggtgttgagaaaaaagggcagtgatcactttcatgaatagcaaacactttggatggtggccattgctttatcattttctcttgattctcttgcttgaataggttatctttcattgtccttataaacactcttggcactgagtttacatcacaactccc

SEQ ID NO: 198157 - DNA, 623 bp, Cannabis indica
ttatatcaattaattagaaaatataaaattagaagaaaaaactataagaagtaataaataaattttttcattgatttcgatgtaagtagaatatgtatgagtgatattgatttaattaactatataagtgaagaagtaagtagtatggtttgagtgtatatttaattcagatgttacaatttttttaatattattaaataaaaaaaataaaaaaaactacaaaataaaataaaaattagaagaagatcaagtcacctcatttatttttgtttcaatattatatgtagatttaaaaatttacaatagacagataacttagaagacaacttaaaataaaataataattgaaattaattattaataattaaaaatatcaaaaaaattattcaaataattaagtttatcaataacaaaaaaaattctcaaaataataatttgtttaaaagtcaaataattaaattaataaaaaaacatactacatatattattttcaatatatttattatatggtgtaagttataaaaataaaaaagcatcattaacattaatataaatgtatgtgatttaaaaagttaagataatgaaaacctaaagcgcaaaattgattgaaggagaaaaatata

SEQ ID NO: 198158 - DNA, 1362 bp, Cannabis indica
aagtttcatgtattttgattgtatgaaataaatttgaaaatttagtttaattcagattgtgttattattaacgtaaatttaaattttatacaattttgaatttaagtttttattatcttaaaaactaattaaatataaaatttgatgtatttaattaaaaattatttattttaaaaaaattataatattatataaaattgattttttatcttaaaaatattcatatatagcaacacttttaaaattagtgttgctatatgtctttattaatttataacatatggtaacacttttataagtgtttctttatatttatattttttgcaacactctaggagacaatttaatttctttagtttataaaaaagtgttactaaatgtatttttttctagtagtgggtcagaattcgggtagctactaaagacccaatccagcaaccggggaccactcatataaggaaaatgattccattgcctattcctattttcccatatggcccaaaggactttaatcacatcctcaaactcctctttagcaagcttctgctgaaattccactagtaaatccatcatggagtttcctctactatctttaatcagcttgtagcaaggcattaacttccatacagttttgaccttatcacaagtccaaagagcatgggaaagagactcaacgtacttggcacaaatactacaagtcgggtcaatcgacatacctgtatgatgcaagtttgtctttgccgagagccaattttgacaaagtttccatccaaataacttcattaggggaggtaatgtcagtttccaccacatcttccaccaaggatggattctatccatgtccgagcactaggtagggctatgatttaattccctagctactctatacccattcttcactaagtattgcccaattgtagagagaggcaaaatcaatgtatctttcgtgtgagtatcaataggggtccccaagatccaagaaatatcctctttgtggaaataaaggtgtagaatatccttgttccactctcaatcttcattaagaagattattaacaatggtatgggagttcgaatcctgatggtggtaaagaatagttccatttggccgggggatccacttatcatcccaaatttgaatgtctctaccattaccagctctccaacgggctccttctctaataatcttctgcccccacacaattcctttccatatacaagaagctctcagggggcatttggcattatgaaaggaggagttgggataataactatttttcaatactcgggccaacagagagtgaggcttatggatgaggcgccaagagtgaggcttatagactaggagctttgtttcctcctt

SEQ ID NO: 198159 - DNA, 561 bp, Cannabis indica
aattagtctggatgccatgctcgttgttaggtaaattacttaactaagattattgagttatgctaatttttccaaagtttctgatatatgagttatgcgggttgggaaaggcacattggttttggctctagatatggtcttctatctcatcctatgtcttgcaatgattaatctactaacgtggaaggtacaagaccagtagatggatgagatacatctgtaacaaacttgtaagaataccttgatattatttcgaagaacaatagtttttggagggcaacacacacggaatcttaagagattatttggtttcaacatgtgattttagtactagtattacattaacatttaaaccattttgaagctacgaaattgtaagatagtataaattagtgcttggctattcatgagtagaaatcttcatcttgtcagcatgaaattttttgtcttaaatcagatttagataaattgttagcttatattaataagcatgaaaaaatgctaaacgtgcattggatgttgctgccgtctaatatgtttatatatataaacagtagagcc

SEQ ID NO: 198160 - DNA, 1222 bp, Cannabis indica
aaaaaaaaaaatcaagatttgaatgaatacatgcagtttttattatcactacactaatgccaaattgctatacaatagaaagtacattatatgaaaaagttagaaattaagtacctaattgtgatatttgcatattactcgcataggcatacccttctgggggtcctgttaattgcacattcaagtttgaattcttgtggcgtggtggtaattccctagaagaagaagaagaagaagaagaagatagttgcagttccgtactaggttgttcttgttgtactggtaattccatattaggttgttcttgcggttttcttctcttgaaaaagtcttcaacaatggaagacaaatcaccagttcctctccgatcagtaaagttggattgtgcctcctccccatcatcatcacttctatttagatccatgtttttactttgaaaagcttattgtaaataatcttttccaaagcaaaagaaagaaaagctatcttcgttgattcagtaccgaactctagcttcaagaaaattttgactgttttcaaaacaacgtgatgatatgaatttggtgtctgttacgtacacaaatgtgtatatatatagtaattaagaagtcggtcatgtactgtttaaagattcaagaagtattgaatcttgttactatttaacccattccactaatcatgactatatagtgtaaaattttcaagaatctttctccgccaaaatgcactatttcaagagtaattcaactacttgtaagattctatatacaactactagttgaagtgaaatgaaatactattttaaacctgagtacacaaattctctagtcatttttaatatttaataaaataataaaataattattaacatgttaaaactaattatttgatgtgacaaattaattattatttttttttaataaatatattgaaaatttaattttcaaaaataacaaaataggtgataaattatttgcatctttattgtgacaataagtagtccctatatataaagagaaaatattaggtaagttgattccacaaaaataatctaacaactcttttattctattagcaatcactctagctaacacattacataaaaaataaaaaaaaataaggccgcaagttccccatcacaaagagttctttgggattgagaacctcatgtactagttagtgaaataatactaattaatagaccatatgattatgccctaat

SEQ ID NO: 198161 - DNA, 566 bp, Cannabis indica
tatttttgttttgatatatataaatttattattggagttatatattagtagtttggtgatatatacttaattggtccagttaataaggagggcaatcttcctctaacaagccatatttttgttaggtcgaatgactttcatgatatttacccataaattttaatttataaaggagagtaatatgagatggaagaggggagagagagagagtgggacacacaatgtaagaaataaccaacatgcagggattcgaatccattggccgtacagtcgtataactataaaggggaccaaattaagggtattaactgtacaacagtccacacatccatgtgatatgccctttatataccattcctttcttattattggctatttttacacacaaattttgacctaaaagataacccaactcatctcatcctcatcagtcatcactcctttcaatttaattcacacactatcatcacttcactagtggctgctgtactacgtacgtcgctttgtatgtacaacccacatgcaaaattatttatatatatcatcatttcttttttttttctttt

SEQ ID NO: 198162 - DNA, 630 bp, Cannabis indica
atttatacctcaaaaatatataaatattctttattttatcttttttttattttacataaaatacatgtactcttttttttaaaaaaaaaattatactcattttactattttacatatcactaagatcacatattacttgttataaattgaaatatttttcctctctgtatcatttaaattttcttcaatagaaacctaccaaccagtttgaaattaaaacataagaaagccaagccaatgaataaaatgttgtcatcttaaacaaaaaaagccaaacaaaaaataaaactatattacaaaaattaattaagctactcaaatttatgttaagaatactttttcttttctcatctatggccaattttcgtgtaatttaattatttaataataaagtataactcaatattcaaacttttttttttaacaaaatgtgtgtggtaataagatttgacctttatattatacatagttagttgtacgaaaatcaatgtgttaatagaaatcaaccagacttcttcaataacttaaaaagatatataaaaaaaatatatatatgttttagtcacacttatatttggttgtgttggaatatatttaaaattcgtttatttgaaatatatttttgcactg

SEQ ID NO: 198163 - DNA, 2734 bp, Cannabis indica
atgagaaaaaagctaatgtgctagtacgacaaataatgtaacgtatatctatgcatatccaaagcatgacataattggggtgatttgtttctgataaataaatgtgggtgatttttgattggtggcttaggtttggatttggattgtggaccttttctggctgttcactcagaaaatgcagtgaagaaagggcttttgagcgaagctgatgtgagtaatgcattgactaataccctcaatgtccaaatgagactgggtatgtttgatggagagccttctgcccacccgtatgggaaattgggcccaaacaatgtatgtactccggcccatcaagagctagcccatgaagcagccattcaaggaattgtacttctcaagaaccaaggcccttcactacctttgtctacccgccgccaccactccgttgccgtcattgggcctaattccgatgtaaacgtcaccatgataggcaactatgctggtacgatttgtaaaatatcatattctttttacaaaaaaaaggttatttatgataaattttaaatattatgggaaaccttttttctttttatgcaataaaaaaaaaatcatcaaatttgtaatttcttctctcttttataggccagcttgtttattcaaatgggcctctctcctaaaaaaaacctatttttttacattttttgggcctttataggtgtggcatgtggatacacaactccactcgaaggaatagaaaaatacacaaaagcaatacaccagcagggttgttcagacgtggcttgcactggagacaagtcattcaatgcagccatcgacgcagcccgtcaggccgatgcaactgttttgataatgggccttgaccagtccatcgaagctgagttcaaagaccgggccggcctacttctacctgggctccaacaagagctagtaacaaaagttgcagctgcttccaaaggcccaattatattggttatcatgtctggaggcccaattgatgtgtcgttcgccaaaaacgaccgtcggatcggtgccattttatgggtcggttatccaggtcaagcaggtggagcagccattgctgatatcttgtttggaaagagcaacccaggtcagcttacttctctattcaatttcttattgttgagatgtctctatagaaatataattgaaatgtggcttgaacaattgttaaaatcattaatcgaccatattttaaaatgatgttaaaatatatatatttatatataggtggaaagcttccaatgacatggtatccagaagagtacttagcaaacttgccaatgacgacgatggacatgagatcaaccccatcaaagaactacccaggaagaacatacagattctacaacggtccagtcgtatacccatttggctacggcctcagctacaccaaattccaacacaccatagccagtgcaccggctgtcttctcagtcccagtccacggccaccgcaaagcccaaaacgtcaccgtttttgacaaggccattcgggtcacccacactcgatgcaacaagctctctctgagagttcatgtcgatgttaagaacgttggctccagagatggctcccacacactcttggtcttctcctccccacccggtgggcgtggcaactgggctccacacaaacagttggtcgcctttcagaaggttcgggtcgtaaccgggtcgactcaacgggtgcggttcaatatccatgtttgtaagtacttgagtgtggtcgataggtctgggattcgaagaatcccaatgggagagcatagtctccatattggtaatcttagacactctttttcattgcaagcagctacgttgggagtgattaagtcttaattcatttttattttttttggataaaattatggatagtagaaggattttattcctaattaagcaaataaaaaattagatggcataaaaagttaggttgtgattttggttttatttttagacaaattccgttatacactttaggttcatcaactcaagatgaatttgcaaccaagattgttggaggaggcttaattttgatttgattcaatgaagagatggaggaatgaagattatgatcaatatgctaaatcttaagttcctcttcttttttgtaattctaattcttttattcttaatttgttggtgaattgcaattattatatacagtataattttgtaagcttgtgttccaaaggagctagctttggatttcttatatggatgaaaagtgtatggacatgtattaaataattcatttgatttgactttctgaaatagaatttattttatattaaagtcaaagcgtgatgagtaacactaaatttttcttttttcaaaagatagtccaactaatattataccactcttcaaagatggtccatgtaaaatcaaaaataataataatgaaaaatagtggaaaagttgcccaactcttacttgatcttgatgataataataataatacatatattccatttttgaaatgtcctttttttttttttgaaacagcatttttgaagtgccttgcattataataataattaagttctccaataggttcatcaaatgctcccatgctgagtggttataaatttagacaattacgggttttatataggagcactataatgcagttatttatttttttttatgctgaactctgatacagtgttgtcatatatatattccaatcaatacatatggaatatttggggttt

SEQ ID NO: 198164 - DNA, 1041 bp, Cannabis indica
tcagggaactaggagtaattaggcaaaagtttcttattttgttttttttttttaattttctaactttgtaataattatcagtattcagtacgctctgtttttctactgaatctgaatggtcattcattgtgatatgcatttcctagaattttatattatttgggtttcaaatataaatatatattatagattaagcatagttcttacccttcctgtattgattattcagctcctctactcaccccatctttgtgtccttgtaattacctattcttttaagttactaaaacgatataagaacaaagagatacacaagataccaagtaagagagaaacgttttcatttgccagtcaattcaaagtatctatgcttcagtattttatctattactttacatcaaaatgtactcgaatcagatcatgactaagaaaacttgcataaccctgtttatacaaataggatatgcatcaacttaccctgctctacttctacagtcatattaaacgcctacttcgtaaagaactgactcaagggtagaacaggcattcaaccacagaatcctcatacttgagaagaagtgcagtccctggaccagtgcccgggcttaccacatttaaagcatgtgccagaagaagcagaagcagatcttcctccaaactcagcaggggtgtttgatggagaaacagaacaatctcttgcccaatgcccatccttcccacatttaaaacaggaagatccagtttttgcagtgaagcttgtgttgtttgtgtcactcgagttataactaagcttagaggcagtgactgcacgaccagctgatgcagtttggtcattgcaccacttaaagaaaccacaagagcttccctgttatgaaaaccagtaaaccaaaaaacgattcatcatctatagaagaaacaaacactgaaatattacaaagttagaatgtcattgtcaggttaggagtataaactgctaatgtacataccaagcgtaaatgtgcattagcatccctttctgtgtccattttaatgagatctaag

SEQ ID NO: 198165 - DNA, 623 bp, Cannabis indica
ataattaattataatttttttatagaaaaattttttttgtagcgattccttgaaagctttgaagagagcgaagaaaaaataaagaaagagagagagagtgtccgggaaagagaaaaagagaaggagaaaaaaaggttaatgttatggagtgggtcctactccatttttatttcaaaaatataaaactgttcaaccaaataagtttcatgattatctatatgctcggaatttaatatgatctaacattaaacaataatcataaaattagatacataaccaagtcaaaataaatttttattttctttattaataataaaaggtcacaatgaattgaaattttaaattgggcataaactttacacgaaggaaagcaggaaaaactcaaaaagtggcaaaatacactaattaaggttccttgtatgtcaagtaaatcagtttagtggtaattctgttactatgcgcttgctaagtctatcctagtgctcgagtcgaagacttctttgattcttggtctgaaaggcactaaatataattgcttacgaaagtaaaacccatgatgtttatggtaggtgcatgtgttaaggattcacaatcacaagagcattataattggaattttgctt

SEQ ID NO: 198166 - DNA, 889 bp, Cannabis indica
atatgtatgtattaattttaatcttaattccaattctacgtattgggatattcaaattaatctcagggtctgaaagaacagacggaggcagaaaattgagtaacgtcaataagcaaaaaaagactaaacaatttaagaggggccgtcctttaattaagtaaaagtatttatacaaaaatactgtatatattttcgctaatgataatatgaattttgaggatttggcattattattaattgctattattccattatttatggacaattgggggcagagtcttgatgtgaaacccagaaccacaagaagacataacgccagactatgattgtcgttgactagctaggcgcaaataattcttatccaattttctatgaaaataataatatgcaatatttgggtttgagggtcttatattaaacaaaaatctaaaggaaaaattgaaattaaactgattcgcgtacgatgcgtgtgacatcgtgtctgcaagaggcagaatcccatgtaaccatgcaagtcttaatcacatgtatctgactaatcatcataacacatagcgatgagctgtcatatcatatttcgggattagccaaatttaacctcatctcattcccgcactccatttgactctcgctcgttttgccgacacatatagttaaaaaaaataaaataaagagcacattttaggtaactagatttttttttctttctaattattattattggaaacgagttggtcccgtcttatatcttttccatactatttttttagtgttatattattatttgtatgattaaatattaattttatataatttaaaaaaataattttgaaaaaatatcactcatcaaccataaaacactatagatagctagaaagtgatgctaatt

SEQ ID NO: 198167 - DNA, 3287 bp, Cannabis indica
aaggtcaccgtgagaaaagtgacattattgcaaatgaacctcaagggccatggaagaagaagtcaatattttttgagctcgagtattggaagcatttgttgttacgtcataatctggatgtgatgcacaatgtgttagaaaacttgcttaataccttgctcaatattcctaggcgtagcaaagatggaatcatattccgcctaaatttgaaagggttcgggattcgggccaatttacacccacaagttgttggttgacgaacgttcttaccaccagcttctcatgctctaactaaagcacaaaaacaatcattatgtggttctatctccgaggtgaaagtacctgaagggtactcctcaaatgtctctgattgggtagatatgaacaaattaaatttgagtggtctgaaatctcatgattatcaccttgattcaacatattctaccagtgagtattcgttctgtgttgccaaagaaagttagatatgtaactacgagattgtgtttgttcttcaaatctctttgctgtaaagtggttgatgtgactaagttatagaatctcaagttagaaattatagaagttttgtgttatttgaaacaatttttcccactttccttttttgacataatggttcgcctaacagtgtatttggtgagagaggtgaagttatgtggacctgtgtacttgagatgcatgtacccattcgaacaatacgtgaaaatcttgaagggttatgtcagtaatagaagtaggcctgagggttatattgttgaatcgtacatcgttgaagaaacgattgaattctgctcaaactacttatcagaggttaccactgttggctctcactctactcgggtcgatagggaaataagcagggggtaggggtttttctgtttgtggtgtaagtcgagctaattgtgaagaagagcaccgacttgtgttgcaaaatactgacgtggtccaaccgtacattgagtacatttaagttaattgttaaaacatattaataatattcaattgaaccaaaattaatcaattgaatacttgaaggaacattttaattggatcaagactaccaatccgactaaggcacggaatcaaaaatgggtacaagatgaacattatcaaaatttcagtacatagttaaaaaatacggtactattaatattactgttttgttatgcatcatatgttgatttaccttgactcactaatcaacttgtatgttcataggtatatgcagaaatgtgtgaatcttcgggtaatgtatccaacacactactttgtatatcacgaggtcattcgtgtgatgtactcaagtacccatagtactatataaatagtactcaattttgcacccaagccctaataaatctagaaaaaatacaaaatagcggtgttatgattgttgctaagactttccaaatatctagttaaaaagataaaaatcctattgaatgtgacatgtctttttacggtgtaattcaagaaatttaggaattagattacagtagatttggaatccatgtttttctttgtgactgggttaggagtgataatgaggttaaagacgatgaatttggattcaagctggtggacttgaatcgaatcagacacgagtctgataggtttataatggcgtcccaagctaatcaagtgttttacctgagcgacccattagataacgacgcaaccaaaagattatgataataaagagtctaatggcgatgatctcatgcttagtgaccaaattcattaaatcacctaaccacctaaccacctattgatgtcacagttggggacgatatcatatcatctcatgatgatggtggaagattattgttgaccaaatatatcaatacatgagtcatatatcaaacatgtattggtatttagtcttttctacatttagctattaatttacatatttttatatattctattgtatgattttaaatttgtgtaggattttatatcatggaaccaagtggagacgatgagtggagtgtgtggttagattatgatggtgatggtccatccgtgccagaatgatctagtgttgatcctgaacaaccatccatggaagaaggtaatggtgatcctgaacaaccaacacagaaaaatactcgcaggagaattaaacgaaatgatataacaaaagtgattagcgagggaaaaaagttagaggttgagtacaacaactacggacaaaattggggaaagggagcgacggcaaaagttacccgacttggagcatgggtgcgaactaatattctacttctagacatttggtggcctagagtgagttaggaccttataaaccaattatggaatcacataaaggtaaaatcaattttattattctagttttttactattgattataatttgtacttataattacgattgtcaatgtgatagaccgcgttcgatgtaccagatacaaataagaaattaagaatttctaaaggtggagataggtggaaatattggaaaaataccataacataaggtatttttacattcaaagatgtggctccccatcttctcgagaagccaccaaaactttatgaaaaaataattgatttgcaacaatagagagagtttgtggcctcgagattaagtccaaaatttgaggtgaagaggaagaaggcccaaaagagtagggcttgtaatatttacaacaattgcaccggatgaggtggtttaaggatgcttcaagaacaaatggagaaagagaccggccacaaaattactgaattcgatagatctgaaatctggaaaagacttcacgtaaacacgaaaagcgaggtggagggcccagctccaaaaatcgttaaacggattgtaagtttaaagtttaatttcatttgtattaattgttatgcttcataatttatttctaactctacttgttttgtttataggacgaattatgcaagcaagtggaagagggtgttgtacaagtggaaggtaaaagggacgtgatgaccatggctctcgggacagatgagcatggtggccgggttcgagctatggtttcagcatcacccaaaccaaatatttcaacacaccacaccctaaaaggaaaaatatcgatgggtcgaaccaggcatcatctgatttggagagacgcatgcgtgagacagaggaaagcaaccgaaaactgcaggataaagtggatgagctcatttgtcttattagttcccaacatagaagtgttgcgtctggttatggtgttggaggatcatcaaatgaacaactccatgctgaccttgcctccaatc

SEQ ID NO: 198168 - DNA, 1129 bp, Cannabis indica
agagaatacagagtaaccactttttatttataaacggcttatagaatcagttttgggtatttataattttaaccctcatcaaattacatattattttcataataatttaatattctttgatactaataatataatgagttatttatttttgtataatactttataataacatatatattatacatatgtgttcacaaataatattttaactcatcactaaaattatatatatttatatatatgtgccacatatatttatatctcataatatttttttacaagtatagtttgaggatgaagatgggatttatatgtctttatgagtaagtaccactcattgaaaatcattaggtcgacttgatatgatagcatgtcaaagttgttaaaatattttatatgtaataacgtaatctttacccataaaaacccttaatttcacccctaaaatacattttatttgtagtgaattaatatatttctctctaagtatcaacattagcgtataaggataactgtataaccggtattgcatatattatcatcagactataatatggacataacgtactaacatgcttggagcccatagacacgctctaaaatatctttgagtacattaggctaagacaattaattctgaattatattggacatctaggtctaataagccaatttttacttcttaaataaggattatgcccttattagatgtggtgagaaaaagtgtacatccatgtgtgcgtgaagagaatgttagaatagtgttcataatacccaaattctctttgtccttttgttgtgtagatcgttgaaatcgaaagattataaagctgagcataagggttagtagaaattattacaaggtaaaaacatttaacttatatctaatttaatacgattaaatatgaaacaattgagcagaatgatttattgattaatctttgattaaatattggttgatgttgttttcaaaaatattagttcatgctcaacataatttttaataattggtatcatgagcttgatcatttgattttaaggttcaaaataatcagttttatttaattagtatcttttcccaaagttttttttttttcataccctcaattttcttaaaatccataatttt

SEQ ID NO: 198169 - DNA, 614 bp, Cannabis indica
aattttctcatttcataaaataaacctattttctcatattaatctagtaagattataatattactcatttatccttttaatatacaaattatttcatattttatataatatgttttaattaattaattataattaatttctgaaatattatagttacctttatcagctcccaccaaaagtcatgcacaagaccatcgatctttgaagccattctattagtcaacatgtaagttgtaaccttaattactcaattctactaaaattgataacatgactaattaacttattcaatacatataaacataaatatagcaatgtaatctttaaaatgtacagcttagtttcttctctatacgcaaaattgctagaatgaaaaaacttgtattgcattttgcttttcagctacgatatttgccataaattcttgagagtttttgttacaaaaataaacaaataaataaatgctctcattacagatttcaagtactttgctaaatcagtgaagccgccattaaaaataaataagtaacccactaattcttataatcgtactctttgatctactccatttttgggtgaagccgtagcgtgttcaaatatatattacattatat

SEQ ID NO: 198170 - DNA, 1388 bp, Cannabis indica
ctcaaaaatttaattgcacataactcatcaccttttcgtttcttactttaaattataatgcactctaaaaccaataagaacattatcaatgatcaaatgtttctggaggaacccaccttgatcaagataattgatttgatttaaaaaaaatgacacatgcaataatcatcagaacacgttattaattcacagccaagtaaaaaaactaaagaattaatggtgaaattgaagaatagagatttgtttagtaagtttgatggtaatttaattctgtatgtattgattgtgtgtataaatgtgacagttagaaagagaaagtgaagttgtcgtttggagcaaaatgagattgagaagggagattaatataagaaactcagtatacgacaagacaattacttcattgttttataatacaacagcattgcatggattaataatcatcaaacccttcccttttccctagtcccacactccaacacacaattaataccaacactaatcaatttgcctctttcatcaaaaacgacactaaatataatgtaatatatatattgagctttgtcctattttcgttgccattgtataatattatacatatattttccactccctatattcaacactaccttcaaaaatcaaaagtcatacttttccaaaagagaaaaagtatatataaataaacaattcgtcatttcaatgtcttatcaaatcctaatctctcctacgaaatttctttgcttacacaaaagatacttactctaatttctatttaattaagaaaaatttggctaaatattatttaataaatgaatttattttgccaaaaaatgaaattatgatgaaattcaataattaaaaattaactcatttttttctactttagaataccttagtgaagtgaatttttcatttttgaagtaagaacttcaattttttttcttaccaaaaaaaaatcaaatttcaaagacaactatgtaggatatttctttttaattctctatcgtaaagaacaatttaagggaatcgaaagcgacgcacaaacacatttcgtccacgtaagcaggacattccgggccggctattcccgcggcccagcccactttaagcaaagaatatcaagagtgtctgctcaaatgggcccattacttgacaagtattcacccttagcaatcagccacctgtgggtcccacacctggtacgatttcgtacttgtacggattacgacgagttttattttctcttcttttatatgccgccacttactttaacggtaaagtacgtacatacgatttttttgggtatttatacggtgtattgcgtatttagttcaaagtatagggagataaacgtggtcaaattttttctgttgaaaattaataatgcgtgg

SEQ ID NO: 198171 - DNA, 1543 bp, Cannabis indica
agaaaagaaaaagaaaaaagaaaaaaaaaaaagaaagaaaataatagcatatataataaaaataaaaatatattagaccgggctcgcagctagacaaataataataataataaaaaataatgagaaaatgagtgtagattttagagagagatatgaaataataataaaattaaataaggaaaaaggggtagtagttatggaagcaaatgagaaactagcacgtcagtcagctcaatgagattggggagacaaagaccttgattcgtatataaatataaacctcttctttcttatatggttggatttgggggaggcactatatacatacatacatatatagcactctactacatgagccaaatcttcttcttcattattaatttggaaaaataatacatataaccatgggaagatctccttgttgtgatgagagtggtcttaagaaaggcccttggacccctgaagaggatcagaagcttgttaagtttattcaaaagaatggtcatggaagctggagagctcttcctagacttgcaggtacatatatattgcaattttaattattggatgaaattgggtgtaatcttatacattaatagaattatacatatgttattttgtattcgtaacacagggctaaacagatgtgggaagagttgtagattgaggtggacaaactacttgaggccagatatcaaaagggggaaattttctcaagaagaagaagaaaccatactcaatcttcactccatccttggaaacaagtaataatttttaattaataatatattggtcattttcttcttctcatttttctctgttttcacaatgagtgaataaatgaattaatgatcattgttgtatttattttttttttgaaaagatggtcagcaatagctagccacctaccagggcgtacggacaatgaaataaagaacttttggaacacccacctgaagaaaaagctgatccaaatggggattgatccaatgactcaccgtcctcgtactgacatattttcaagtttgcctcatctcatagctttagccaatctcaaggagcttatggatcatccttgggaagaacacgctgtcagaatccaagccgaagctgttcaaaacatggccaagcttcactacttacagtaccttcttcaaccacctaataataataataacaacaacaatctcaacacttctgacatcgaaaccatcaaccttctcaactccttatcttcttcattcaaagacaacaacaacaacaacaacaacagtacccaaactgtttttgattctcctcatgatctattccaaaacccaattactactaccaccactcatcataatgaccttattcttcaatctctccatgattcatcactctctttcgctcacttgcctgacttgaaaatcccatgtagtaatgatcataacaacaacaacaaccaggatgatgagaggtcaccactacacaacaaacaaatggctaataacgatcaagtactttcagtagacacggcaatgttcagccttaatactaataa

SEQ ID NO: 198172 - DNA, 576 bp, Cannabis indica
ggagtaaatattttcctttgatagatttttctaacaacaatagctatcagagtataataggaatagctccctacgacatgttgtatggtacaaaatgtcgttccccaattcattgggatgagactaaaaaggaaatattttggtcctgagttagtttagcaaaccagtgaggtaatagaggagattaaggctcgaattcttgcttcgcaaagtagggagaaaagttatgctgaccctaagcacaaagacatataatttaaggtaggaatctatgtcttcctacgagtctcaccattgaagggtataaggagctttgcgaagaggggcaagttaagccctaggttcattcggtcatttgagatactcgagaaggtcgggtaggtagcatatcaacttgccttaccaccaacactataagctatgcataatgtattccatattttgatattgaggaaatatgtgtcacactcgactcatgtcttgagttacaaagctctagaactacattcatatttgtcatacaaggaaaaccagtttaaatcctcaataggacagaaaaagttctttgaaacaaga

SEQ ID NO: 198173 - DNA, 2362 bp, Cannabis indica
agatgaatatgatgtgtaaatcaataacggctaaaatacaaaagtgcaagatatgatggatgtctctccttcctaaccaatgcaaaccataatttttgtaacaaaaatcttctttgccttggggaatgcatgtcctgtcctgttgtcttctcatgcattgatatctaattaataatctagtattattcttcattttcttctactttaaaaacgtaagattctatctaaattaaatgatatacaaatgtaatgtgtgtattaaaagccagcaattcttttattcttttcaaatagtattacaaatatttatttaaattccaatattttaatggctaatgcctgaaataaataacaaatcattcaagtttgtttatttatttacttattttaattggagtggttgaatattttggaaccctttagaacgaaaacaacgagaacaaaaaaataataagagccgtttaatccgttgaggaaaaaactaatgagtagggtccttggacagatgtagaatccgaggatgatatattaatattacaatttaaacacatatcatatactgataataatattaaatattttgcagaaaacacaaaagaaaataaataataataaagaaattaaaaaaaaaatagtatagtgacaatgtgacagggtggcaaaccaaaaaagatgtaaaaaaatagagaaacacagcaaaaaccaccacatggctcgtgtaatcagcctaggcccacacatcaagaacacacaacgtattatatttttgactcgaacttcccaaaatacccctcgccgatcccctgtatttaaatccaaacccatcttcaacttgccgcacatcagattcttgcaccactttctcttaccatttcttctccattttcttgttcaagttttttggagaaaaacaaaaaagcaatggcagcttctggtttatgctccaccgccttggttggcgttgttttggctttcttcgctctcgctttcgcttccattgctcaagctgagtcttcgtctccagctcctgctcctgccagtgatggtaaatctctctttctttatttctttgaaagattctggatctgattacgtattttctttaaaatatatattacattttctaaaaaggaaaaagaaaataatatgtaagatttgatattgaattcaatgtggttatactgagatctagttttttcttcgttaatggattcagggacctcgattgaccaaggaattgcgtatgtgctgatgcttctggcgttggtgcttacatatctcatccatcccttggacgcatattcttcctacttctagattagtttcaattttagggcgttcagatggatcttaacgattcttttatatttgcatatattattattattataattattattggttattagttttgggatattgtgttactattgattttgatgggttgtgtatatttttttgttcatttttcggtgttgttgagaaattcattcaatggtattgcttttctatttattttcctcttgccaacttttttatacaatacatcttgtgttttcttgggattaaaacaagacaataattcgcgtcaaaaaaaaaaaaacaagacaataattgcatccagaaatggtgaatttgagttaccaaaaaaggaaaattccaattgcaaaagctcgactgcttcagtcattttcttttctaacaataaaaatgaaaagaagttgcattcgcattatatgttaattttattttgtaaaagcaaaaaataagtttcagaaaatgaaaataaacacgtagaatttcaaaaagccacttgaggcatagcttgagattacaaaaaatggctatataccaaaaatttatatttgacatggcaaaattgaaaaaccttacttacatagagtgctccagaaaagcactttcttaaacaaagaatggttcgctcataaaaagcccttttttttacgtgtgtatgttagtgtttgattcctttttagatgtgaatcctttttttttttcttctctactttggattgttttttagacttctttgatacatagtgtacttgacaacttcatagcaagagacaactattccaactgaaggaccagcacgaccaactcgtggacttactcctgtaaacagtcccttcattcctccatccctgtttcaaattacaccttggattaaattgtattcaaaacttgaagacaagccttactctctattttctttcctaattgtgttcttacctccatatttctaccaaagtctttcttgtggtcattttcaaaactctcgaaggatccttctgaaatgcaaacaagaattgatttgtaaaaaacagttgctcaagttata

SEQ ID NO: 198174 - DNA, 1011 bp, Cannabis indica
ctaggaaacccccagccatttttctaggcactctattagttgaacagataggacttataccttgaggggttggctaggttctgaagatggtgggtgtgtctcaataccttaatattcatgtggcgacatggtcattaggctattgagagacacacagccatttgtagagaggccaagctaaccttctatattttaagcggtgtcttttatgctggtgaggtcacttacattgtttttgcacttacaccacactgaaaagatgttctatcttttagatgagcgaccttccaggcagccaaatgctcgactcgagaggtggggctttcgctgatgaactagataaaagcgacaacttcataccagcctcgatttttgaagaggaggtccctgctgctaaagctgcaactttgggtccactatcttctaaagagatagaaaggatggttcagaaactcgctgaaccagggacaatcgagattcgcaatactcaatccacggtgtcttcccgggtcgatctggtccattccaagcatgctcctgacatcgaagctgaggagatgggagaagattgggaagttcctgatcgcgagtcaggggaagaggaggatgtcgaggtaagcaagacagattcagtggacaatactcagctgaacaaacccttctcatccgaggatctggtctcacaagttaccaaatccaacctcaatacgtttacgaggtttaattttttgcgacttagtaccatacgtcctcgcacctcccaaaggcaacatcttccctttaccaatcctgcgataaaccccaaagaggatgtggttgtctcaatacccattctttgatgtggggtgtcgatacccttgcatcacttcattactgctatcattaaacggtacagtgtttctccctttcaactaaccccaaacagctattgcatagccctagggttttatgcaatgtatatggagtatgactagagggagccctcgaaggaggatttcagttacttttatg

SEQ ID NO: 198175 - DNA, 2254 bp, Cannabis indica
catttctctgtataatgtttataacctattgcttttcagatgttgagtggtatcatccctgaacttgaggataacagatgctataatagtgaaagaagtgagcctgtgttcactcccaggccatgagaggtaattgatacttaggaaaaaaaaaagtataattttcttttactatataaatacatatcatacatcttatatatgaataacatgtatgcagttactttcaagctcttcttgctaaaccttggagactaaactagtcgagtagtgtatttaaatttcctctattaatgtttttagcttatgttgcttttcagatgatggggcggtatttctccctgcaattgaatatatcaatccccataacagtatgactgaaagaactctatggactgggccagctagtgaaataaatcaccatgaggtctacttctcacaaggaatgagaggtactgattcctaccaaaagaaaatatttcctttttgttgctgaaaagtattacattatttgaataacatgtatgtagttatttacttctttctatacttcggaaactaaacttgccttttggtccatttaaattttgttacttaatttgtctataaattttattaataacttatttgctttcagattatgtgccacttctccctgcaattgcaaataacactcgcgataatagtagtactgaaagcactctaatgattcagccagatgatgaaatatttaatattgagggattcttgagaggtaacttatctcaccaaaaaatatttccttttactgatgcaaaactatatttggataatatgtatgtaattattactcgtttcatagtcatgaacttattagctatgattttattattttatttggtgggagtagctgctataatttttagagccttttttatttttacacttctaaacatttatttttgcatttttacggaatttttacaactagcgctgcaacctaaatcgcaataaaaaattgtatagaaactcctattgcaattagcgctgcaaccactttagaaatccaaacaataaatttgaaaaaaagttaaaaaaacagtatatggggtaattctcctcatttttattacgggtattttcatgttttccttcattcgtttattgtcagtttcagaacttggtaagtaactgaatcttataattgcagataatccaagttttgctccagtgtatgaattcattgccaatgtcttggaagaccctaatgaagctggtcacttgcagagactgagacaaatggatcccacaagatttagatcagtatgtcttttggttatgttgtttctcttttaatcaaaaatagaattttttagtctttctatctgttcctttgctctctaatttctgagctaactaattctttgatttttaatccaggcattgttaatgatgcagcgcctatcacaaaatttacaaggtcccaatttagctagacttgtaagctttcttgccatgcactttaagttttactttacattgtaataagttactatgttgttgacgcaatgcgaagttgcatcaatatttgctccatttttctgctgcattgcattgtattggtttgcccatttagtgatttttctctagggatttaggagtctttcttcttgggataagccttatttgtataaatcatggtttttcacccttggctagataataaaatataatggtacaaatttgttatataacttttggggttgctcattacttatgacttaaatgcagtgtcagattatttcacccgatggtgctactgctaatgaggagagggtaatgccatctgtctacccaaataacgtccaagggaatgccattctatctgcttaggaagtcgaccgcagatgttaatggcgtcactctttaagctttatttgggaaagaggtgttagatgtgtttggtaacaactgccaaggcacaggacactgtatatagtgtccgagtacacacatgaccatgtgaagaattagtcttagtctctctaaagtgaaagcttgtcaatcaaggtaaatatgatatggtagttttttttattcatttttggtaagtaggaattttagaaggttagtattagtacactggaagttaacttctaatttagtttagtttctagattcagaggctatttgttacagcgttagagagtattaagtgtttggtctgtctatattttgtcattagtttgtctttaatgttttgtctactttctgt

SEQ ID NO: 198176 - DNA, 2230 bp, Cannabis indica
ttaaaaacattgtagtgtaaattcaaaaaaaaaaaaaaacattggtgtcaattttttttttttttctaaaaaaaaacaaaaaagtactcaataaaattttaaatttgatgaaaaccgaatttcgctgctaaaaaataaaaattgatcaaaatcgatttgagatagttctatttttatttgtaggtatttttttttaaaaaaaaaaagaattttcattctttatataaaaaatagttttgatttttttctttcaagagagaaaacattagagaaaaacagagcacagaaacatacatatatgtaacttgcactcacttcaatctcttcctcattcaatatctattaataatcacccaataatatgctcaaatcaaccttcaatccttttttctcagcctttccctccaatgtcagaaccagaaaacagccctttcaacttatccttacttctttctcacaaaccccttcaactgttcgacaaaatgccccaacggccgaccctatccttctacaacaccagctctcccctgcttctgcttacattcaccttcccttctgtcgaaaacgctgccattactgtgactttcccatcgtcgctcttggctctggttccacccaaaccgaggacgaggacgaccctcgaatggtgaactatataaatcttctctgtcgagagattatggcgacaaaagcagataacaagaccaatccacctctaaaaacggtgtttttggagggggtactccttctctggtgccgccgaggcttgtttcgtcggttttggagattttgagattgcaatttgggttgagttcagatgttgagatgtctatggaaatggaccctggaacttttgatgctgtgaaattaaagcagctcatggaattgggtatcaacagggtttcacttggagttcaggcgtttcaagatgagttattgaagtcttgtgggagggctcatggtctcaaggaggtgtatgaggctattgagattgttggctcttgtggggttgagaattggagtatggatctcatctcttctcttcctcaccaaactccagaaatgtgggaggaaagtttaaggcttgccattgaagctcaaccctcacatgtgtcggtatacgatttgcaagtggagcaaggcacaaaatttggattgctgtaagtaatagagtggaaattgattttagaatagcttcattttgtatgcatatttggttctgaactttggatatttgcaggtataaaccaggagagttcccattaccttctgattcacagtcagctgaattttataaaatggcatcaagaatgctttctaatgctggctatgctcattatgagattagtagttacagcaaaagtggctttgagtgcaagcataatgtaacttattggaagaacatacctttctatggttttggccttggttcagctagctatgttggaggcctgaggttttctaggccaaaaagcatgaaagggtacaaggaatttgtggaaaattttgagaatgggatggtagattgccatacaaacaatcaaatcgatttcaaggacaatgctatggatgttgttatgctttctctaaggacagccaaaggcctggatttgaagtctttcggagaagcattcggtgactccctcgttgtttctctttgtaaagcttacaaaccttatatagaaagtgggcatgtagttggcttggatgtgaaaggaagagccttatctgcagaagaattcaactccttgctgcctaaagaggataaggagaacattcaaaaggagcttggttatattcggcttagcgatccagatggtttccttctatcaaatgaattaatatcccatgcatttggagtcatagctccatagtatccgatctttctaaaccgtcaagctcctgattaagaagttcagaaagaggaaaatgcatgtatgaccttgtgatatacagagattaagacacattgatgccaacttgtccatggcattaactcaggacaacctgattctttgttcccattctttgaagttagttggtggtgttgaaggaacaaaggaaagaaactaagacagctaagcatgatgagaaggaacacatacagactaataaacaatttcaatcataaaaagggtaagcctaagttactaaagaagatcacttaggtttcaacctaacgagtgaagaaaatgaattcaacttcagttacaggattagacatttgaag

SEQ ID NO: 198177 - DNA, 1534 bp, Cannabis indica
tatatatatatatagatatatattatatagatatatttgcaaaagtgtccgtgaaataattaccaataactcatgtacaacttttactaccaaattgactttttgaaaataaaatatcattgactctaagaaaaattattaccaaatatcaatgacaaaagattggggatttatcaaagggataattgcactgtaaatattttgggtaaacttgaataccttgctaatcttaattaaacaaatgtaatgaccatttagcattattatgagagttagtaaataattagagtttaatttagaattagactcttaattattatttatgcaattatggagatatatttgaattttaagtgtgttaattatgttctatgtgaaatttcatgatttttatattttgcgagtaacaatggaatgtggcgtgtggcctatagagtcactttattttaatttagtattttagatatagcagggtaatttatttagatatttgaaatgtcgagttatttttggaggaatgatctaagaccattttacccctaagtatgttaaataccatatgttttagtaaagggtaattaggtcatttcatcttagtttgtcttattaggtgtagataattacaataatcctttttattattttattttatgctgaaagtctatttgattacatttgtgttagttgattaaattatgttcattgcaatttcactaggtggtctggagagttggaaatgatttggggttaaattgagatgttggtgaggttttttagagtttctgcaggaaccggccagttaaccagttcgagctagttctgtagaaccaattaaccatttctcctggcagaaaccttgagaattagtttttctttttgagaattcgatttaccggttctagcagttttggaaccctagttttacatgttttagcgatacttagagtattgtcatgctattcatcatcaagaaacttctagttttgattttaagtcactgaaaagtgatttagcgtatcacttatcaattttacaaaaattgtgatttaggggcttataaaccatctagcagtagttccactcaagttgactatgttagaacttattttaccaggatctagagtcactaacatgtatgttgattataatctataatctaacactcttaatatgaattttctgatacgataaaataaacacatataaagtttagaaaaccttacattgatggcagcgaaataatatgtttccttccacttagatatctaacccttgttcctttttgttgcagagtaataaacagatctgagcttggatctccttctcctttagtttggttaaccaccatcttctgcactatgattgagtagttgacttgctacgtgtgggcttggtactctatcactgaatgcttgaatttgatagaagaacagcaagaggaattcgaaatcactatgaatgagtctctcatctattagttatctgacaaagttagaaaattaggtttagaatggttgaagtaggttggatgaga

SEQ ID NO: 198178 - DNA, 1567 bp, Cannabis indica
atcacctctaagattagtatatcataatgaactcgcacgtctgtgatgtttataaattttatatatctaaatctatgaatctaagaccaataattttcattccaattgcagaggttagttggagcttatgaatgcagaaaggtacagagaaagaaacccaatgattacctgactgttccctacgatcttccaaatcagaacaaaatagtgcactctgcacatatcagagttaacgagttacgagtgtataacaatatattataaaactatgcatacatgaatgtcaatgtcacaacaacaatgcataaagcctccaactaaccttgtcaccatgtgatacatcatgaaccaaatctgagagaaaaaagaaaagaaaataaagaattatgttcaaatcaccttgtttgataaaataagtatttaccatatcattaaaccaacaaaacaccaaagaaaaattctatttacctaagcttggaacactgggtttcacagccaacgtcaagccaagaaagcagtcctctggttcagaaccaaagtccgataatttcagctcaagatttggttgtgcccctgtggatcaaagggaggagaaagatacaatacatccagatgaataagacgaattacatatatgtcggcttagaatcaagtgtcaaaagaacttacccatgttactcagctttaactcaagtggatcacgtagtaaacgaggaacccaagtcacctatcaagcaaacaaatgtaaattatgttgattttattaattaataaggagtagcaagagttggaaaaacatatactttgaaaaacggatgctgtaatgactcatttgcagatggcctccttgatgggtcccatgagcatagttgctgcagaccatcatccaaaggaaaacaagaaatataacaaagttacaaagggtacatataaaaacgttgatatacgtagtaacaaaaggcattgcataatgacaacccaccaatattaaatcaatggcttccgggcttgcatttggaatcatatgagaaaggtttgcaggtgcaatctaaccaagcaaaacataaaacaattaaattaaggttaggagcatataaagaaaaccaaacacaaataatactacaatagtgtaccttctcatagttaacaattccaaataagcgagatatatttgtcccttcaggaaaagaagcaatgtctggtgtaccaagaacacaacatatcttgaacaactgatctatttcactgccatgtagaaatttgttctatgagataacactaactaataatttgaaattagactgtgtgtgaagagctatcataaaatgctagacagcaattgaatacaatcagcaaacatggtagaaattgtgaaaattgggaaaattacaagtgaacatgaatagttctttacaaacttgggatcataatatcacctttcaccagggaaaatgggagaaaaggtgaatagctcagctaggattgcaccaactgcccacatatctggatatattttcatttgttaatcacaaggcaagaaatactaggctcatacataatttaaacc

SEQ ID NO: 198179 - DNA, 1065 bp, Cannabis indica
aatgcagccaactggcccttgcaaatgtaaaaggccactaatgccattgggcttggacatccttctgatccgaaaggccaagttgcacaaaaagggccttgtgcaaaagtacttaggcccagtgcaaggaaaaatttccccagtgattccgttaattaggacagtgggatagtactctaataacagttggtccaccgtggaccttcaaaggtgtctcgatggtaagtatgaaaaggcaaaaggggaaaaggcaagaccatgtggaaatgatattgggaaccatttgaatgatatggctcgcgaacgtgaccagatagtgacacaaagaggttggaggagaaaattgttgccctaactaaacttgtccggaagtagagtgggaccctctcagactcagaagatgaggacccacaaccgtgtgtcaagaagatcatgaaagccccactcctggagaactttaagatgtcgcaaatcgagttatatgatggtcttatagatccaagaacccacctgttaaagtataataaaatggtgtaggtggcaagagtgagcgatgatgctaagtgcttgtgtttttcattaatgcttaccaagtccacaaatgattggtggaaaaggttgggtcccggatcaattcatagttggaaagagttaaaatctgcgattcagaagcagtatataatcgccctagactatgacatagaagttggatcgatcaccaatgtcaaacaataagtaggtgaaaacctgaagaacttcattcagcgaatgatggaggtagcaacaaagacaaaggtgagtgatgacatgaaacttgtaggccttcaatttggactcatagttggctccttgttatggggagagatgtagaggaaaatggatgagactttgtctgagtttatgtccaaagcacaaatattatcaatataaaagatgcttatcagcaatcctttggactccttctggctatggcaccttcccaatcttccccaagcttcatctcacaagtctcagtccctagataccagtactctctagctattatggaccttctgcatccgaaca

SEQ ID NO: 198180 - DNA, 968 bp, Cannabis indica
ttttgtctttttcttttcctattatttcgctctttggttactgttttacttggtatagatttcttgattttattgttttgttttgagttggttatgttttgtataaagtttttttttcattgagtttttgtgttttgttttaagttcttagtttgttgcttctagtcaaaagataacatctttggctatgaatttccttaggttttaattgagttttcgttttctttttgtagttagtttaatttaattcacttaggtgttttcaagtcgaaattttaactcttttgataggactcaattagagtggtttgttcagattcattttatctggtaacaattatcaacaaaaaagtattattttttaacgagttgagagtgctgtttgagaatattataggtttagtgtccaaattttttagggcagttttgtctcatgtgactcgcgatgagaattttgcagtttatagtttgacaaaacatacccttcggttattaggcgatgaactatcctaattcgaggatattctaccgccgattgtaaataactgtactattaatcatgagtaattctaattaccacataaaaacttatcttaacaatattgatatcaccattaaaagtaattgtagcaatgtttaatttagtgtaatggtaattacaattaatatttacaatcttattatttagtatggttttgaaaactcaactatatttggtaggggccgagctaaattggaaaaaaaaggggcggctattaagaaagtgatgcacaaatacattagcttatgattctctaatgttatttttttttcaataaatcacactaaatatagcacatcgtttaacttataaaaatggtaatataatttcataatattattcacacggttaaatcctataaaagaaaatcaaagctctaatattgttgtgggtaatgaaataacatttttagaggtaatattaagtt

SEQ ID NO: 198181 - DNA, 1328 bp, Cannabis indica
aaaataaaattagcaacatttccatgtgttaaacttgggttaagtttaaagttagcctaatgtaagtgtgaaaaatcaaaaactttcatataaatttgttttttaaaaaaattatcaatgatattttttttatagaacatgtgaattttaattaaatttttactataatatatatttttttaattttttaaaatggtaaatatgtatatcaaaatattttattaaatattattttattttcaaaattattattattattatttaatgaatatgagtgaattatatttgtcaaagaatactatttataacttacaaaacaccaaactcagaatttacttaaaggaattcaaagttttgaaccactctatcaatcctactagttttctctcttttaaaatgagaaaacctattaaaaacatctctttttatcttttcgactacaacatttacatattatgtacattttgttcctacaaatacatccccaacctctcaaatattatacaccaaagcattaatacaagttacaaaaacttctctacgaaactttaacattttgtatcttaaaatcaacttcaaacaatcctccaaggatctctatgttcgcatacccacccaactagcaatctaccaagccacttctattgtataacaacaattgaagtaaaggtgatggtgagattcttgctcttgaccacaaatcaaacattattagttatatgagatatataactccaaaacgagccaatctctctctggtacgtaaactttgtaaacaggcaagccaaatgacaaattggcgctttgaaccgattccagatgttagcaaaccaggccctgtgcaagtggtcctttggccaaagattcaaacacaattgagaaacactgaagtctatgcttgtaatcaaccaactctttcttctctttaatagaattttcacattcatatcttttttcagtaccagctacaacacgtgggatgattatagctccactaatctttgtcattaagatacatggaatcagtggcaaatccagaactaaagttgagagggtacttattttttttttgtaagggctaaaaagtaaactaaatattaaaaataaagttatttttgttagtcatttgaacccttcacctctataatatgtgtaagataattaatcatcataccaaactaatattatgttataccattaaaaaaaaaactatatatatattatgtttatatttatctacatttaatggcaaaattatatgttataactaaccagaaataaatatatttgtttccctgatttgtatgtcgctctgcgccctatataca

SEQ ID NO: 198182 - DNA, 1114 bp, Cannabis indica
gtaagatagtgcccaacgaaacttagcttatacataatatccccataaacttcatatgaccccttagaaactatcttttcataagcaataaaaatcttaggtatgtgctccaaaaatactcacataaagacacatatgaaaacaaagtgctatatctgtagggtctaatagtctcccacttttctctttcattttcccagcaataaaacaaaatcaatacaaaatagacctatgtaaccaaatcaaaagttatcatcattctttgtatccatgggcttattgatacttcaaaatggaggagtcagaggtactacatatatatgtatatatgtgatcattctacatcatccatgttaatgggtgccattaaaattttggatttagtattaactttctgaaaccaaatggggttcgaagccccaaaatacacacatggaagatggtggttacaaggggtttactgaagagtaatactacctagtaaaagaatatgcatattccaaaaatatttcggatactgtattaaaacaaaattaataattgtttatagtagtaaaacaaaatatgaccgccagatgagaacataaacaaaatagaaaattgattaataccaaatctatacatgttcgttgcaaaggaagcagcacacaaattaaagcaacttcttcatcattaaaaaggcaaacaaaacaaagaggtcaaaattagcataaacacttagtgagcaaaagttatatatatatatacataactatagtcatcaaacaaaatgtgaagccaaaaaataaaataaaaaaacaacaaagcaaacaaaaagtgatagagagtataccaatagaaatagcattctgaatttcagcaggtcgaattggagtctggtaagggcttgtttggtttcccagagatggcaggtcgaagtcgaaaagcttccgcatcgtcaagagagaaaaatcaagaaatgactttggcgagagagaaaaatcgaaaatttttggggtttgggtttcgccgtggttacgagcaccatggtgtggacctttttgaccaccgtcgaccagaggatggccattgtggcctagctgttcggatgagacaatgaatatatatatatata

SEQ ID NO: 198183 - DNA, 1558 bp, Cannabis indica
ttgtttacctttataataataaattatatttaggtaaataagacagaatttacctaataaaatgtgttgcttatcttttttaaggcacaaaatttaccaaataaggcatattatttatctttcttaagacacaaagtttaccaaataaagtgtgggaagtgttccaagatctaatataatgatcttgttttctagtaaataatagctgaaagtgtaccactagctagagttgatcaaggaactgagctattacataagcaggtacctataaaatacaaccacacactatagtattatagtttaatcttcgtctctaatcttttcataaagtgcacattgattaacaccatataaatttaatcttataaggagttaagatgtaatctcatttgaataaagtttggtctggtttggtcttgaattgttttgttttgttttttttatcaaatttaaatattaaaggcagagagaaatacagagcctttgattacaataagacattgacttgtggaataaaaatgggtagttaaattgtgtagaattgcattaattaagataagattagttgatttttttttaaaaaaaagataagattagttgaaaactctatttttgttgatgtgactttcggtcatcattttcttgatctatacacaagcttcatataatcgaattttggttagaacatgctcacgtgtttgagtgaaaatctcctagtagtggcgaaaaaaattgtggtcgcaggattaaaatgggcactagagatatgaccaacagagttaaccattatcatcacactcaataacatagaaatccttgttgacatttcaaggatcacactcaataataacaagcatttctctttgctttttgctatggttttcttctaaatatcagacctcaaaaaccataaaacaattacagagcaaaataatttatagtacttctaactgcataatttgaaatgaaatcaaacaattttagacgttgaattataaattgttcaaaacatattaactataataaaacataaccttttctaaaaaaaaaaacctcaaaaacgatattattttttccaccacaatgacttgatgaagagattttatcttttttattatgatgacttgatgaagctcttcgcactttcgtcatgggagatattttcatcatatctataatgataagacaaaacacaaatatatctacaatgatggcttggtgtttaatacaacattaggtgtatattgcttgaagtgctttgttggcagttagcggctgaaaaactaacaattataatatataccatacatacattctcatggtttcacaaaaaggtaggttcaaatgaaatatatcaatgaatattaactagaaaaataatacccaaaaatcacaagcaccactcttccaaagccaacacagactagctacagcctgaaaatccctaggacaccacactaccaaaaaatgaaattcccaattttaaaaaccgtaaacatggaagagatatttgaaatacactaccaaaaaaacagaattttttttttgaaattaaata

SEQ ID NO: 198184 - DNA, 1445 bp, Cannabis indica
ttgttggttttatcgacttttatttatttttataaaggtaaatggataccttaacaatgaggaggaaacacgttacaagacggccatctgggaagacttgtacagagaacatttggaggttagaatttcatttttattattattatccgattactaattcatttgtattgtaatatgatataacactaaacaaaatggtacaaatatggatcttcaggaacaggcagcaaagcgtagtggggatggcgataagagttcaaagccgaaaaaggtccttttctaaataacattaattctggcaatttggtcctataattatcattgcgattcttcattagttggtccaatttcaaggttattgaagtttttgtttgtattctaaactaggagaggagcaagaaacaagatactaatcccaatcctcaaactgctgcagaagcagcgcgccaaatgttaagtaaaaaggtaattcagttgcatagaatcaatcatatgcttgcctatcttttacttagtgaaatccttgttattattattggtgttgttcgggataatttatgctctttgttttttctggttcgtttttttgttttgttcttagtacctatatgtacggaaacaaattcttaaacaggacacatgtaaaattcatattctaaattattgggtctgaacggaaacatgtagtatcagttacattcaaatttttttttgagaaattcaaaataaagtttgtactaaaaaaactgaatgaaaattacagttttgctaacattagatatttataatcagattatgtcaaggtataatcagatttcatatttctctctgatttgcttcatctgtttcttaacagcgactactttcaaaagtcaacctcgatatgttggagaaggtcttcgatgatgtaagttgacattcatctctaagtctaatcgaataaatagtaaagaatcttgggagtttctctgttttttgtctcctgaattgtaattagtcttaaaattattgtttgttattgttaatcgattgtactcgtttttctcatctctcctcatatataggtaacccccgcaaataaagctcccaaattatcgaaggatgaagactcttacggcctcagccctaacgataaagaacacaagtcagatatcgaggacaataatgatgaagcaggttcagattttgaaaatgtgaaagaaggatacaacaaaggatacgacaatgggattcatgattggaacatggaagaagatggttacgagtttggctatgaagaagatgagttttgaaaattttgaatccctttcccaactagccaactctagccttggtgatgataacatattctttgtactttgtacttacagttttagtaattgttagaagaaaataaattgttatatttgctctctcctttgttgtgcttgtaaaaagaagaggtt

SEQ ID NO: 198185 - DNA, 1052 bp, Cannabis indica
aattttttttttacattttacgatttgactataagaaaaaaaaaactataataaaactaaataaaaaaataacattacaaataatatacaaaaacaacaaacaaaaaataacatacaaataatagaaaaatcaacaaacaaattaacaagagtacaacaataaaaagatcattattttctgtaaaataaatacaaaaaatcgtaaacattatttaaatttgtaaattgtattttgtaatttttttttgttatttttgtgtaatcccttttatttttatatttgcgtcactaaaggtaactttgttgtgttgtgttgttgtgttgtgttatgttaaatggctcatactaatttattgtgatccttttttgaaaataattgtcctcgttcaaatattttgattaaacctactgaaaaaaatttcaatagaaaaaagactgcgaagacaatatcacttaagaggaatttccacttattttgtttgtttaaatatagtatttttagatttgaccaatttatataacattttcttttatgtttaagtatttttacggtattaaatatgtcatgtatatgtatatgtaaattaggtatttaaaacccatatttaatgtttttatttatttttaagcaattgtatatagtaagttttccctttcactagacctcaaaagagtgtcatgaattgaagtccaaaatttgagacttttggtaattgaatattaataatatataatttccttaatttacattacacgttcatatatatactagttaggtgtacgtgcaaagcacatatttgttacatataagtgttataattgcaattgagaaccttttctatatataaaatgaaaaggcagcagtaataaaatatacatactaaacactgtactataaaaatatgattaacttaataatacttaataatagtaaccaccatataatcaaaatattgacaatcaagaaattgtaaaacaactgtagaaaataagtaagggagaaatatatagaaactacttaagtgttgccaatcatctaaaatgacagccac

SEQ ID NO: 198186 - DNA, 963 bp, Cannabis indica
atgcaccattcatgtagctagcaattgtccaaaggataagctcccaaaattttactttcaacattatatataagctatttattccattaattaattaattgcatatgtagttagcaaataacaattttgatcataatacacattgataggaaaaattgaagattttagtactttaatactacccatatttattacacattattttgtgtaataataagtatatatgtgcaatttgaatgtgtatctagtgttacacttattttaattacatatagtttgtcacttattcaccatatttagtactgctgtctcacaccttatagaccattttcaagtgtaaaaaatgttaaatttggtattaaaaagagtgaatgttatatttagcacaccttttgaatgtactaattccattacacatgcaatagtaaattaaacataaaaaataattattaatgataattaataaataaaatatatttttaaaaaaatgacgatattgtaattaaaaaatatatgttaattaaagtcacttattaatgctaaaagttaatattgtaaataaaaatgttcattattaattgacattgttatattgtctattaaatttggtctaattttaagtatgtgttaaattttttgtacaagttttaacataatattgatgaagtattttttacagaaacatcaaactatagtatatattattacaccattcatattttggcactccacgtgaggtctcttgtaatgtgtttcaaatataccatataagtagttcatgatttttattttaatattatttgtaattaataaaaattaaaatgtatagaatttgaatattaaattaaaaaattacatattagtaacaaagtatatataactagataaatgtttttttttttgacaaggataactagataaatgttggagacctatcattataactatgattaattatgtttt

SEQ ID NO: 198187 - DNA, 530 bp, Cannabis indica
agggcacaaaatccaacactatcaacttcatgtgggggacctgatggcctacgatctcgagtttgagtccttttggatgctcgcttgtagcttgttttcctaacaggtgattcctctgcttcaggaaaagatcccataaatgtacgtttctgagtcttagtctttttggacgctcgttagtagtccgcttccttataggaaatctcagtgcttgctgcttggtgagtagtggcgtacgtggctactaggagtggtagtgctgctttgcatgttcatggatgattttttgcttgaacttatgaattcattttggaataaagttcttggtagagaaagacactatgacttacaatttatactttaggtcatttaatcacaataaaaataatttcactattttattaataatactcaaacgataaaccttaaaacctttctttgtgtttaatatttctcggaatctaactctatttacaatatgaacactatacattaaatattgtataggaagtgtttgttctacctcttgc

SEQ ID NO: 198188 - DNA, 830 bp, Cannabis indica
aaaaaaaaaaaaaaaagggtgaaaatgagagttctattccaaggccggcatgttgttataattgaacaatatcaactttcaaggataagattcctcttaaaagcctttttaagcttcatgaggccctctcattatattacacttttcccctcttaattactgtagttttttcattatgtttcaatttgtggataatataaaaaaattttaccatgcacaaacttaattatctccaatggtaatatcttttaaatagaaaattgctataaaagatactaatggtgcctaatatttttttatgtgttaatatcgctattaatctaattaagtatcggatctcgtataattataatctcacacattattatttgatatattatttattttaagtataaatagagtaatttgtaccataaatattccataaatatatatttgcaactaagagtttataagtatttgccccataaattaatattataaatattttcacacttattatttacctttcatttttttttttaaaaaaaagatagcatcaatgtcatgtagtggcatcaacataattttctatgatagtacctatttaatttaattccaatagtacagtattcttgtgttttgccgaataaacaactcacataaacaaacatctcccaaaatataactatttgagatgttataaaagggtgtcatcgatacactcctatttgtttcaacatttgatagaattatttagtctaatttttttttttttatatttgtatacattgtaaatatttaagataatttaagacataattttgaaaaaatttaacatcctaaaaata

SEQ ID NO: 198189 - DNA, 639 bp, Cannabis indica
tgatgccttttagcaattctctaagttttattacagcaaattattcagtttttagtctttgttttggttggtagttgttgctgatggagcaagctttattctctacatatagcgaattagaacacggtttcagtcatgttgaaagagtttagaattgagagaactctcttgggagaggtatttagacctcttgaaatgttaggataggagagaaagcctctcgaagagctatttcttgtaactctttggtgattcgtaaaagcattggcttgggatttcaatatttctaatcttagaaaagtctatcagcatgtgctcacaaggtctgagatttaagctcgtcctacctacttggcgattcacatagttttttggttctaaaacattctagtttcttttaaaagaaattgtttgaagagatgataatactttcaattcagctagtgtacttgtttaatttgttttatttaaatctcttcagtgtacaccagaatttgtcaacaccttccattggtgtctatcctggttcctacattttcctttggcggcaggcgccatggctttcctgactcgatcctcagctcaccggattcccctccagcttgcatcagctcaacgagccttggccctccacactac

SEQ ID NO: 198190 - DNA, 599 bp, Cannabis indica
aaaataaaaataaaaaattctttctctttttgtagaatattatctcagttggatgttttctcactttattgattcgaatacactccttgtgtctccaaattcaaaagacagtccatccaattaacaataaaaaagtaaccaacttttaaaagcaaaagctgttatctttctattatgtttgtgaggacgggtcccactataaaactaacattaattagttaattaggtctcatcaaccattaccgtttgattaagatcaaagggtcatgatttttactaataaaacagtgagttacgtgtgtaaagtggggtcaattagttcaagccataattaggcaaaataatcttgattattattataactcgtgttgtacataggtacacgtgcaaaccggacccaacagtcaatagagtgtggacttgacgttcaaaggttttctttagactaattgtctgttcacctttgatgatcatggtttttaagattcgatgattataaatttttaatctgttaccaaccgagccatgatttggtaaaggagtatggaccatggagcctatgttagtttactcccaaaaaagaatgagctttaaggagt

SEQ ID NO: 198191 - DNA, 1895 bp, Cannabis indica
aaccaggcagaggtatgtatgtcaaagaactttctaataatctatttctttttcaattctaccatgaagtagatattgaacgagtaatcgaagggagcccatggacatttgattgtgtcccccttgatttttgaaagactagaaacaaggcgagaatccacgaacagtcacattgaataagttggatttctgggtgcaaatacacaacttatcaaccggttttatgttggagcgtgttgtacgtgacttgggcaattttgtgggaacttttattaaagctgatccgaacaatttcattggagtgtggcgagattaccttcggattcgtgtgaagattaatatcgactgtccgctaaaacggaggaaaaaggttgagaagcaaggaggagtgtattgctatgcgaactttaagtatgagagcctatccactttctgtttcatctgtggcatccttgggtcattcggagcgcttttgcgaacaattgtttcatacgcctttggtatcagatcaagaagccttacacgttggacttgaaagctgctccacgaaggaagaattatgcaatcggagagaagtggttaaggcccggagctgtctctagggccggcggaatgattttttctgagcactccacagctggggaggaatccacggccattactgagaatccgatcaacaacaattatgggaggcaatcatggcaaaatcgatatcctcctgttaatatgggagcatcatcacaccagccagctactgggagagagaataatcctgttttggtaactaatagttttgcctcaaatgaaggagaataatgctgtagttgtaaccaagacataatgggaaatactgaatgatcatgatacggtcatagggccaaataatttaaataaggaaacaagtattttggtgttggatactaagaggagaaggaccgaacttattgatgctaatgggacctgggctaagaaaacattctgaataacaaacacagatgaaaagatacaagatatgaccaatatggaaaattgtgatgaagtcaatgttggtaaatttgataacactgggcctttgcaaattcagagagaagatatggatactgatactttcaaaaataccacaaaaaacttatttggggcgggttctgtttcacaggcccgccgaggattatgaatgttctgagttggaattgccgtgggcttgggaaccagcgggctattcagttccttaaagagattgtatctcaaaagaatcccaatttcattttcctttgtgaaacaaaatgcaataaaaagaaaatagaaagtatgggtcggatgctaaagtttgatggggcttttggagttgaggcccaggggagttcgggtgggttagctttgttctggaaaaaccaagaggatgggcgggtgatgggttattcgaacaaccacatagaattcttagtagagtcgtccgagagaggtgtgtggagactaaccggtttctatggagaaccagaaagaattcatagacaccgatcgtggactttgcttcgaaccttggcgactgattcttctattccttggtgtgtaataggagacttgaataacattgtgaggcatgaagataaacggggtggaaggccttatcctcaacgtttgattgacgggttccaacagctttgaacgactgcaatttaacagatgtggaacttatgggccatccgttcacttgggagaaaagcaggggttctcgaaattggattgaagtgcgcctagaccgtgctctcgtcacaatgcttggtctcaactttttcaaggtgcttctctctcaatctgaaatatcatcttcggatcattgcccctatatttttgaacctgacttaatcactgtatgtgcctaatcgtaatttaag

SEQ ID NO: 198192 - DNA, 1852 bp, Cannabis indica
ctgcaacattaatatggcacaaccaaccagatcgttacccttgactaaaaaaagtcgaagatatatgttatcatactcatccactgttccgccttctgtggattagaaccaccatcaaacagtggcgggttttgcttcctgaactctctaatctaatttccttgctattgtattgtctcattcattgcatcatacattttcttccagttttgtggtggtggaggattcatatcctcaccaccagccttgagccaagaaagctttcgattaagcctaccaaatcacctcaggtgcgtagtatatatattcctattcataattcccattatgcatttctatataagcagttactcaaaatagataagcaagtagcacttactataccatgagtcaaactagtctttacaataaatgtacatatcaagccagtcttcaggacttttaaaccttgattgttctgatacaatattgtaacgtcctaacttgtaaaggctccatctctgtgcttttataaattactttacaataataaactagctttgtaaaggaaactgtggtttaataaaaacttgactaattacttttttaagtataacttacattgtttaaaaagttactgagttcggggatcctcatgttataaacttttactaaagtaccgcaaaatcatttcattacaaaatatttatactaaaccaaaatattgtgaaaccatcgtcctgttaacaaagcacagtatgttggcggagctggtacatacattcgcaaaaaaacttctaaatcacggttcatctactttttcttttttcctacttacaccacaaagtacctgtgagtcacaaagactcagtaagaaaaacgagacacacaaattcatgtacaaagtataacaataaggaataacagtcatatactcacacatataattagacagatcattccattatgacataatactaataattgaattatttttctaaagagacaaactattccggatacttcataaaatgttcgctaactctcatttccaaatgagacagttaatgtcactatcattacctaatgaggcaatcgataagtaagaagccaaacagcagtttcaagatagagttgtaactcttatgtaatactggtaattaccgtaacataattagccatgcaatgtggtacaattgacttttcttatctcaaatctaaattcaggtgtgcgtgccaactaaagtagaacaattttctacaatcttgggccctatatcatgacaacggtaaactggtaaataactcaattgatcctgctctaggacttaaactcaaaaataaaaaattttctatccataaatagcatggcaataccctaagtatcgataaaacacaaaaatctaggcgttggaaaacacccgaaaatggttcaccatttactaggtttcaaccctgggaaaatggttcatcgtctaaaaatggttaacagtttttccctacataaatggctaaacttagtttttcaaacccaactccttctaaacttaagcaaactcaaccaaacttcatagatcaatttaaaatcattaatagaacaactccaaacactcaaaatcaagagttatctcaaaattacaaaactacccttaaagttcaaactttagttccatgaactcaagcttgaggctttcactgaaacaacagtcataactattagaatcaaacataaataacctaaattaagcttgaaaatagattctaaccaacactatccatacagaaccaaactcaagcaaaacccataaaaaatctaaattttcttttaagaatcaaagaaaataaaagattaaacttaccttgatattctcca

SEQ ID NO: 198193 - DNA, 1241 bp, Cannabis indica
aaaattaattaagataacaaaataggtgattgaccatatataatactactcaagacataaaaatcttatcacactaaaaagaaaagcgtggctctacataaagatagtactagtcgaaggaccacttgtgcatttatctgcatatatttcaaacactaagaaagaaaaaacaccactcggcagtccataaaagaaagtagaggcaagactttgtccaattattggttagccgaaaactttgtccgattattatttgacaatattgctaaggtgctggttgttctagattgtttgaccaactcaattgatcgataataattagaggcaatagtgttttccaattctaaattaaaatatgttgtataatactactaatagttgtttaccactacaatttacaaaggtaacattaaatgatatcaagaactatatactacttcatagtaagttttgaatataactagtactcttaataattttttaaggacaaaaattattttacctcacaagtatagcatttgtagacttttgttcttgacatattttgcttaacaaaaatattccccacaataatacttgtgcacttttagccattttatccaaaataaaaaaaaaaaatcagaataaaataaagttaatagagtgctcacatggcagtaggagcgtaaataaattgggtcaaatttgatccgactatgatctgatctgatccagatcatgcaaggatctgtcccgccctgttccgctagatcagatactcggatcgaatctgatacgaccagatttttttaaaaaattttaattttatatctaaacttataattttatatccattttaattttgtattagtattatttaatacaatattatgtttgatattgacttgtataaatagattgggtccagattctggatccgggtcctagttccagtctaggaccctagacccgagacccacgactactcgagtccagaatcgggtctcaggtctcaagtctaggtcaaggttcgggtgccaagtttgggttcgagtctgagttcgagtcccaaattccaggtttgagttcgtgtctcagttttgaatccgggtctagggttcagtccgggttccgagtctacgtccaggtcacgagttctgggtccgagtccgtgtcccgattttgggtcccaggtctaggtctcggttcctgggttcggtgagggtcctagaatagaaccgagacccgaatcctgagtacgg

SEQ ID NO: 198194 - DNA, 512 bp, Cannabis indica
aacttccaaatcccagatgtcttttctagcacataatatatggtcaatgttgttgactcaatcgacaggtgagacgagcattttcctggtgtgaaatagttgggaaacgatttcctatatgtcatgtgcaccttgatgagaccattatagaggtctgtaaattttatggtcttatactattttatgttgtaatggtttctattaggcattggcagaaaaataattgaataagcttttaaattctcttcaattaggtttcaagttttagcacatctcgagatagagttggtgaggattcaagtcatgaatctccttttggctgtgatggaaaggattatgcccgttggaagaattgtttgcaacgggacttcactataaacgggttaattatatgacccttatacttagaagtttaattaatatcgatcatgatgctctcaccgtaactctgttatttatattacttttaatagtgacatgttagtgacagccattttccttgtctcctaatg

SEQ ID NO: 198195 - DNA, 1568 bp, Cannabis indica
tactctcaattcatatatatatatatatactagattgaagttacgtgcaatgcacgtatatttaatttatttttataacatattatattttttatttgagttttaaatttgctcatttcatgttaatatcaaacgagttccttttttcagttttaaccaaaaaaaataaaaatattacaaaaatactttcagctggccaaataaacaaatatactgccaaataaaaaaaaatttacacaaattccacttacacacaccatcaactcaatatctatgcttcttaggctactatcgtgcaaccacgcagcaacccaacacaactaaaaccaaaattgaaccagaaagagaaccactattaattccagtgacttcacctgagaagataaccagaatcaatcaaaacagggaaattcaactgaaaatctagtttaatttctataaaactaatgttctggcttcaatattcagatccatgaaaggcagatctcaaaaagttgaactggagtttccaaataatccaacttaagtataatccaaaaaaattacatcaatcctacagtaaaatatttatcgttgtgtattttcgttattttccaaattaaatcataaagagacatgtagaaactgtaacgtacgtggaaatactgttctgatttataatatttcacaatagttgcattacagtagaataaatattttgttaacaattatttcgtctgattgaaaccttcgtctaatgcaaccttcgaccaaccacccaccaactacccagaaactttcgtctgattgaaaccttcatttgatgcaaggttcggccaaccacccagcaaccacagtgcaaccatcgtttgattgaaacctttgtctgatgtaatcaccacgcaaccacgcagcaactatcctgtaaccatcgtctgattgtgtaagtgatagtgtaattggtattttggtaattaaaatcatataaaaggtataaatgttgtccataccttgtagaagtatttttgtaaataaagtgtaaatttatattttttatgtaataattctaaattaaaaagtagagaaagtgtagggtttttttcaccaaaaatgataatagaggagtttggagttcattttccatatgaaatacatgagctctcaaaacttacaaagtatataacgaaaatataatagaaaatcatcattttagcaaaattattttgagattcacttttcacttttgtactaatttcaattaatgacatggtgaaaagtgattgacttatcgtacatagagttgtcataacctttatgacaaacattttaacttgataaaggagcatgagcaagagaaatttatgaacactaaaaatgtattgatcaacatgtttcaacaaaacagtaaaaaaaaatgtcagagctacataagatatttagatcaacaataagtatacatataaacttattgaagacatattatgtcaaaaaaatttacaagttgttgacttatatatcaaccaaactaatgaaaaaatatgataattgagaaatagtaaattttttagtagtgctagaagatactccat

SEQ ID NO: 198196 - DNA, 2449 bp, Cannabis indica
attaatacaaataatttgtggacgaaggctaattaatgccttaaccacgtaaaaaatcctcttccactaaatataattaaatctaacttaataaaattaagtaggtgctaaaaattcccgtcaatattttggtgtttttattgagagttgtgggaacctagaaaattttccgtcgtaatggtgaagactagaaataaccaacgacctccaccaccacctcaccacctgatcctcaagaatgtcacgaggaagaggtagcttcctgagttgaaggggaagaaggcaacatcaacaattcaaattataggagggataaagttacccaaaagattacgagaaggatgattatgcagaacttgtttctttatgacgacaagtcgtggagcacaatgctgaattggcaaagaaaagagaggcaagcaaaagtttgcaagaaatcttgactgccgtgaagcgagctatggctactgcaagccttaatgtgaactttgcggccatactgcatatgcttgacgatgcgggagaaggtacttcccaaccacatggaaactaaaaacaaaaagggtgagtaccaagccctataaggaatcattcgaaagagcctcctccctcgatggctaaacctacagtacaacaaattgaggttttaagggagacaaatttataggcaacataaagtcgcctctaataataggggtatcaggggcaagaatacaatgtcaccctaaaggaatatgatttaatcttttgttcattcgtatatatttagggctcgcctctaaaaaatttagggaaaaatgtttaattaataggggtgataatatcacccttaataaaattagaatatacctgttgtgtttaggcgttatttttcccgcaaatagtattaggggcaacaaatagtgtgatctgacacacttttttaattaaggtaaaagtttgtctaaagaaaaaagaaaccctaggaacctcgatccccattctcttcttcttatctttctcgcatttttcatttttcattttctcagtgccgcttctcagaccaaaggcactcccccactcacgtatcaccaatgaaacctcttcctctttccttctcctttctctgttgttcattgtaaaggaaggatatgatgacaacccatggcatttagcaaaaattgtagcgagttttgacgttttaacgaaatttttaaggttcactaatggcaagctttgacaggtctttcaaggtacaaaggcacgatggtgtggcttaataggtgcggtggttcttagaagcaaagagctaggttctttgcgaagcttgtatcagatcacatcaagaactgggacgatgtcaactagacgcttagtgaaacaacatacaagcattttctctactcagattattaatagtctgagtctagaatctgatgctaacttctggattggtgtaaataccagtctaacttattattatacagaagcttggctaacaaatatcaccggtcaagctgagaattttttgtgcctgcaacatttttttggcaataagtttcaacaatttgttgatgtgataatttgttgctttgatgctctctctacaaaattgtacatgtcattttgttcaagtttattagagtttttaatcataaattaataatgaaaatgttttgaggactttatggagcccatttgcttcaaatcttattacaagttttatgcattttcatgaaaagcttaccttgtattacacaaagggaatgatactcaaaagaactcatccaaaggagttaaagttctcctatctactctcaaagggtgccttagaattcaaatgtaaactattacttcacatttactttacacatgtcatatatataaattatatttaaaatacaaataatgtaattataattgttatttataactattattaaaagttctaatatctccaaaagctaagtaattaaatttgaatggaaatcttgaagaattaagactatataaaaagataaatcaatgaacaccagatttacaagcttcttctgcattgaaaaacacattccgaccgagtagtgtttgggtccccaagaattgggtaaagtaacatctactataaaattatttcaattacattcaccagttctgattttacaaatcaaataatataatttgaaatgattttacacaatattacctaattcttgaatacaatcaagacaacagatctaagctcccttagatccaagaagaaaagctgcctttgcttccatcaagctgaaattcccccagcaattcaatctgaatgaactctcctcagacattgcagattacactccaacctcttgaagttccaataaattacaatttgcaaattacaatcaaagaaacacaaaaagatattttgtcctagcagagtaagaatcaatagaagattctcacaaagatgagagagttagttaga

SEQ ID NO: 198197 - DNA, 935 bp, Cannabis indica
aagtattcataaaatgcaatataggtatatatagaaaaattttaccgtttgaatatttctattattagtgtttaaaaaaattataacttaaattttcttatataattgtgtaaaatataattatagtagacattctatttattttcaaaaaaaaaaaaaattagaataatttatagtattgaaaatatttcaaaaataaataaatacatgtataattaaatatttgaactctatttttaatgttataaattatttagaaaaaaaaaaaatgatgagatgcctactattatataagtagagtgtaaatttttacataaaaatattgaattataattttcaaaataccaaaaatgatgagagatgcctacttataaaactagagtatagagacaagactttaggaagggtcttgatctctttgatgttataaaatgattcctcttcattaacttcacaatgattgagtgccctttaagcaacttataattatacatatgattatttatttatttattatatatatatgtataaaaatgtgttttaaggctctaaattaatgcatatattatgtcattaagttaaagggtgacaataatgtgtgtgtataatatgcatggatgtgtattattggttattgtgataaatatataaatctaggtaacaataaagaagaatagaataaccctagggctaatccataacataggatgatgtgaaattgtgccatgatcaagtaaaaaaatgtgacttgaaaatacttttgattccttatgttgtgttttacttttcataaaaaagttaacaatacaatatatgcacaaaaaagggtcatttatgtaaaaaggaaatgtcatttttagtaataattaattaatcaaactcaaattaatttaaaataaaataaataatgattctattatcatatattgatattg

SEQ ID NO: 198198 - DNA, 853 bp, Cannabis indica
gagtacacatttaacataggactattcgagcatttgctttgctgtttttccactttatattattacccaaccccctcccaactctacacaacacactaccatgcaacttgctccaaataattttggcaaaattctgagtgttgagtaaaaagaaaaccaaaagaacaattctcaatccatgtaaggttaaaatcaacacaaacaaatatatatatattcattttcaagttacactatctagttgaatcaactattattttccatgcacatctagttaatgaactctttaagggcattttttgtttctttttttaaattagacatattttctgtgtgcctaaaattatatatatttaaagttatatatattggatgtgattgagttggattctactcaagctatagtgaatgctgacttagcgatttctaggattgagctaattggataagtagattggcagagatgatcaagaacatgaatcaagagaacattgtgcacttaatatattattaagaagaataataaaatgttttatatataagggaagagaaaaacaatttcacccattttttttcttaatgaatagaaatatatataagcaaaaagtttttatataatgtaattacctgcaatttttgtcattaattcattgtctctccctctagctttgctttatcccttagatatattattccatttgtcatagtgtagtcaccatgacctgatctgatgcattatatattaagtctttatgaatgaagtgagtgtagtagtggtgaccttgctctcttttgtactgaactaaaagaatacactatcttttgttggatgacactttctctctctctctct

SEQ ID NO: 198199 - DNA, 1123 bp, Cannabis indica
gaggtttaattaaattgaatgatcagatgataatttccaaatctaattactaattggatttgatcaaactaagaaaaaaatataaatttagattaaatgggatgtctaactatgttttagtgaaaaaatataaaaataaaataaaataaaaaaaatgcaatgagtgcaagcatctcgaattgaagaaacaaaacagaagaagaagaagaagaagaaacaaagtatgctcaaaagagaagaaatgcaagaaagcttaattacattattgaatgattaagtgtttatacacacatgagaattacattcttttagaattaacaacccaagaagctaacaatagctttaactaacactaacaaactctaactaactgacacatcaattagttggttatcatcccccctcaaatgaaaaggggaacatacaactttgagtttgtctctcaagtagtgaaatcggtcttttggcaatgatttggtgaggatgttagcgacttgatcaacggagggcacatatctaacaaaaactttattgttgaggatatgatcacgaacaaaatattgatcaatttcaatatgtttgcagcgagcgtgaaatatagggttagatgcaagagcagcaactccttggttgtccacccatatggttggaacatcagctagcacaacgtgtaactcagtgaagagagagtgaaaccatttaagttcttttgttgtgttcgcccagtcagcatcaaagtgtgtttcaatagaaaaatgagttgctggtgaaataaacagatcgggagataaagtgccttttaagtatcgaagcaatcttttacaagcttcccaatgaacattggttggagcatgaataaactgggatagcttgttgataatgaatgccacatcctggtctggttaatgtcaaatattctggtagcctatgcttagtagccaataggctttaggcttgtaaatacctctcatggatctagtaaccatagagtgagttctagggagtgtagcatcaacattcgaaccaaatgaaactattggtgccaagatgttacatagatatctctccaatgtgttcagcattgtttggtatagggagacctgttgcaaatgagtgtgaattt

SEQ ID NO: 198200 - DNA, 1089 bp, Cannabis indica
ttgtgcaacttacgtaggcaaaattccgggccatgagatggaaaaccgatagtattagttccaagctcttaatgtactctatatcttacctagtaaaaaagaaaaaaaatacattaatactactaaaataaataaaataaatggcctgatttattatttcaattttgttcaaaccttgtatctattataagaatctatagctgtagaagggttacttccatcttcaatgttacctacacatttaagagaaattaaaattatgactcaataatagatatatcatttaaccacttgaggctagctcaagtggccatagggggtgcgtgtgtattggaggtcctgggttcgagtcccaagttatgctgatgtaatatataaacgcttaaaataaaaaaaaaaataatagatatatcattttaaatttagaatttaaaaggttgtgttacctgggattgcagcataggtgtcccaaacacttggtgttcttccacctttatttgctgatccttctatctgcaattatcacaataaaaataaaatgtaaatattaactttgtttaatcattttcaaagaaaacaattttggattatattttcattatccacttattttatgtaaatatttattgtctcaaatacctgtccagcagaagtagcaactccaaatgcaaaatcattgggaaagtcagatctcttaatgttcatttcttcattttcaagggctatacaacaaacaccaaaaaaaaaaaaaaatcaattgtgaagaaatatagatgtgatcacttagttcaacatgtttatatatgaaatttgtatgggatggctttggctcaaattatttggtactctattgtaagagttgaaaatgtgataacaaaccttgagaatctccaatgagaaaaacaatggcacaaattaaaataactctgtgaaaagttttaaaccgtagtaatgatgacagagatatcattttaaaaactctaattgttgttctatttttttcttaacagaaatatttctacaattacttaaccgatgtgtatatataatataaatatagtaaagcaagcacatcgaatcctatctaat

SEQ ID NO: 198201 - DNA, 971 bp, Cannabis indica
gaaataaaaattgaaaaataaaattgtcaatcaaaaattaaacagagaattagtaggaaggaaactgtaagaaagaaatgtcaagcttgtgtataactaatatcttccgaagctgtaatgaaaaacctattattcacaagagataatgttttaaagagctaaaacattggattaattattcactacccatctctctaatttcagttagactatggatctcccctacaactttgtcctgcataaattgtaaaaactcccataatcctgccacccaacctaatattttatcaactaataccatattcacattattctgtttgcactactctccaactatttttctcctccagtaaaattacccagctttcattacttgcccgctgaatccagcatcgccaagtactcgtttatggcttcaccttctttggtaacttcaatgtcatagtctgacaaagcatcgacttttgctagtccatctgcaagcacgtcctccatctcttcatcacgatcttctactttcccagcagtagatgaacctccattatcttcttcttccacaatatcatccgttaatggaactgaagaactcgcaacggcgtcagaggcagctggaggaataggcgccgattctgtattgttgttagcagcatcatctgtagggtttgatgcagattgctgttgtgacagcaatcgaagcatcgcttcctcgactgtcccaccagcctcaacagcttcacttgctgcagaaaaagttaaaatagcagcagagtatagttattaacctcaaagcaaacgttttttaggtagaattagaaataaatataatactctagcaaagcattgtcatgataaaaattaagttctttctcagtcacctcttgatctttcgaaacccatttgtacaagggtttcaattgaagcatcattagctttttgctgtctccttcttttccttgattcaatagtaaact

SEQ ID NO: 198202 - DNA, 1272 bp, Cannabis indica
ttttttaataaaattatcatagataaaaaatatcataaaaaacttaaaaactcatacaaaaattttacttctatgtattcaaaactaattttttaatgaagaattggtttctcgataaaaaaaactaatttctagataaaaaaatcaatttatgtggcttttctgatttatgctttaaacaaagagaacaaatctttaaaatattgaatgtggaatttagtaacatatttacaataataaacaaacttaagtccataaaaaagctaaaaaaagcaaaatcaaaaagctatcaaaaatagataaaattaaatatattatattttaaaaaaaagttttaaaatctcatattaagtgtaatttccacgtgatacacagtactcttttgtatgaaaggctaagccttattcatcatgcaataatgtaatttttcataagactacacaaatcctgtaatttagctacataaattggcacgtaatagtgtttaaaaatcaattttaaaaaaaaagtagtgtttaaaaatataggtcataacacgaccaaaaatatatattatatatacatcataataaccatctatatatagtttcaaaaaaaaagataaataaataaataaataaataaccatctatacttaatcccctcaaaagaaatactatatagtataatagaaagataaataacgaaatgggttcaagcaagagctatcaaataaataattatgtgtaataaacaataacataaaaatatatattctttgtattctatgtgtcaaatccaaatatatatacaatgaagagaagaaaatacagaagtgaaaaaccatatccaacaaaaaataatcttgggtcggattgaaaattaatcaaagccgaagtagtagtcattatagtcaacaaatggactggtctttgcagctatatatttagattaggggaggttgagactgaggagatgcaataaaagaggggtatggaagtgagaaaggtatctttatatttcgtatggacttgaattttatgaccttcccatacatactaatacaatcgaacttattattataaagtataatattcaatgtaaaattaaatgattgattattttctgtcacgcactaatatgtctaattaaccaaccaaaccagagtgagtcaagactcaagaaaaagaaagaaagaggttaccctaaaaaaaaggataaaaaaggtaattaaccaaaataaggtcaaccaaaaccccaaccctgatgtgacactctccacactcaaaagga

SEQ ID NO: 198203 - DNA, 1104 bp, Cannabis indica
cggcttcaaatgcttagggcttatttctgtgtgggttttgcatgacaaatttggagtgtttggttttcttgtcaccgatacgaataattgtaaaaaagtaaacacttttgaattaattttcttttgtataatttttataatgatgataaatataggtaggtattctcttgaatttaattaaatgtgtaaattctgtctcatattcaattggtttgttaagtgtttatggtcaattctggaatcatttggagaagaaagggttcgagaagtatattagaataaaaatattaaagttacatggaattacgagaaaataaattctgatagacaagaagtaacactaccaatatttcttatgaaatttttcagcaaatatatatacacgtttcttatgaaaataaaacaacataattggggaactaaaattttattcaatcctaaatacatatgggaatctaaaaatttgaagtaattttatttgctctccctgtactaaatttaagttagcaatgttttatttattgatttctaagtattttctgatctatatttgctccattcttcttttttttttttttttcaccagggggtaataatagcaatccaatggacaaagatgtcaaagagtggttaagcgacatgtactcgcaagtggtgtcgaactccattgagattattgataccatgtataaggtatttatttcctttccactttaatgtttcaatgctaattataattttttagttaatctacacgtttgaaattatgtcgaaatattttttttgaaaaattccaaataattcttaatatttcagtttaagtgttaaaaaaacttcaaacatgcactataaattatttgaaaaatttgaaaaattgatgttgtaagcgtgaatattgactaaaaaattataaaaggtgcactctatacttttcattctttatttattctcacccctctattttatcattgataaacttatcacatcgtgagacagtgaaactaaaatgaccatgaccatgcgcaaaattgtgtatgaagttgagagttatgtctctttttgtcagaggtggtgatgacacttgtacttagttttttttttttt

SEQ ID NO: 198204 - DNA, 529 bp, Cannabis indica
catgaaccatttcaaaagcaaccagtacattgtcagtaataaaacgattagggaggaaggcactctgagtttccgagataaccacaggaagagcatccttgagcctaagagcaagcatcttggagatgagtttgtatataacattacataggctaataggcctaaaatccttcatagtacttaggtttgtttaccttgggtatcagcgttaataatgttttattgaatgcagcagggttaccaccttctttaagaacatgtagaacaactttagaaactgaatcaccaacaatatgccaatgatgttgataaaacatcgctgacataccatcaatgctcagacttttatcggagcccattattttcaacactgaaaagacatcagcagccataaaatccttagataggaattcattgtgaacatccgagacagttgtgggaatagttgagagcacatggaataaagcccaaagatcttatataaaatgcagaatcacttagatttcattgcagaaattggaagaacaaa

SEQ ID NO: 198205 - DNA, 2097 bp, Cannabis indica
ttataatataatatatattaaaaaagtaggtgtatgaaagttttttttcaaggtgcttttaatttaatcttagaataaatttagaaaaataactttagaaagatatacaaaaaaagcttcttttattaatttcttttattttgttgtggggggagagagaaatataatcctagttttttctttttgaaaaaatatataatttctaagtggacagaaaaataagatataaccccaattttacaaaaatcagatgggttccacatgctccacttagcttaatttaggtacaaaaaggtgggtagtgcccttaggccgtccaaaaagtctgaccttaaagccctataaatatatgtcactattttttataatatgtgtgtaacaatcttatgtattatattttgtttaattatgaaatttcctaattaggggtatcattcatgctcttattgtaagaatgtattctatttttggaatattgaaaaataatatttctttttctgatgttttatatattatagtgataatagattattatttatttttgtgaaattttaaataatttatagtgttgaaaattttgttctaaattaacagcgtaacaaaataaaaataaacatgcatatatgcataactgtgtatgtgtttaaattttattattgatactaaacatttattcaaaatttttaaaaaacgaatacctactataattaaaatataattgatatataaaaatattcttcatatcctaaaaataataatacaaaaaaaaaaaaaaacaaactatagtagaaggaaaagagatgttttattacttaaaaaaattctatatgtattgtagctttatttagacccattctctctctttacatatcctgaaacaccgtcctccttacgtctcatcttgctctttcattgcccaaagaatagagaaaaatctcagataaaacaaaaggggaaagaatagagagattagaaatttcaaaagatgaaaaagaaattcaaactagaaatgaataatagtgagaataaaaccatttgcatgggaaatgaaatcatggccaagaaagtgaaagaaaaggtatcccaagtaggcaaagaaccccaccaccacatccatctctatatatcttctttcggtttacttatcctttaggtgagattagacacatctactatatttatatatttatttaatatttttttaaacacgtcaaaagtaaggggaaaaataattatattaattgttagtaaaaaatcttattttaattgggaattgggcactaatattatagataaagagtacgttataacttttgtaccttaattttttttttctaattaggttattgaagagatcatgggttatcttaaaaaagtaatatatataagactggttcatgtgattttctttttgttgcgtagtgagatagaaagtggcacggaattttatgcaatatccatggataaaccatgtttttggcatttgctacaaagaaggatgcctaaatttcaatacaaataatgttatttcttaacgtaataaataaatttttagagtgtgactcaaacttgtgccaatataacaaacatgtttaatttcctaaaaaaatattaaagaaagaaaagaaaatctcaaattttatcctgcataacaaatgaacaatgaaaaaaaaaaatctcaaacgatgcaacgtaattaattaattctttgatcacaaaatttactaattatatgttgatgcattggtcataaaaagtttgtttgtattcccttacatttttatcaaaaaatatatatatatgtatatatataaatcaacttgtggttcaggaaaaatatatcccaatctcaatttttagctaaattatatatagtatatagtattatatatgacccatgccaagaaatatatatataggggaccaatatatatagttatcaactaactataattgagattgaaattgtactttgttccgattgtatgaaattacagtatggtggtcacgaacaacatgtcaattagataagtcaactattaaggccaatatagttggtgagaatttcaatctgaattatactcaagtatatgacta

SEQ ID NO: 198206 - DNA, 671 bp, Cannabis indica
agtacctaataacaatattatttttattataaggtgcttttagtgccatctttaacttttatagggtctatagttaaattttaataatatatattttatttgagatataaaatgaaattcaattaaatttttaaaccgtatttttaataaaaatatttttagactaatgttaaaaaaaaaatcttaagaaaagagatcaacaaaaggggctttgagcaaaggccagccgccctatcctaaaaaggatcctgattataatgcaaaattcacaatattattggagtaataaatattagcatttaaaaataaaaagaaaatagtatatatataaatattatgtaaaagaaaatagtatgtacatatatattatgtacataaatataaatattatgtatatatataaatatatacttacacaatatgttgagggttccaaagaatagagtaagtgtggaaatgagcagttggatcaaaccaaacataaaactgttgctctctattgcctttgccttggctaaaaatatttgtgtgtgtacaatataaggctcaccactcacattccccaaagaactcaaaatctatttcatcccaactcgaaccttctgatctcaactatacatacaaaaataatataacaatcaagatgttattattcatatacatatatatat

SEQ ID NO: 198207 - DNA, 1543 bp, Cannabis indica
tatgatcatcactttcttcaaattcatcccacacgttatcttcaagctgtaaactcacagagagcaatttaggcatataatatgacagtcatggtaaaaaaggatacatcacaatagaaaactaacaaatttatttagatatagtagttccaaaataataataataataaagagaaacagacacgcacacacaccccccaaaaaaatggagtttagtaggattcagtcaattgagagattaaaacttataagcaagaaaaaatgaaatcaccatgagcttccctttaataatttataacatgtaaagtggaaccatttcataaaccagttatgttagtttaatcatcaattccaatgtacaattcttttaggtggcgtttggttggaggtaatgaaatggaatggaatggaaacaattttcattctattccttgtttggttgcatttaaaatcattggaataccattccgatgaaatgacctttctattattttggtggaatgactattctattttgaaatggaaggaaagaccattcaaatgcaagatttgaaaaaatttaataattttttatcaatttttttaggcattttaaattttattccattccattcctattccaattcccattcccattcccattcctattcctatattttcattcctcccaaccaaacatttttctctttagtaagcattcattacttcgaagaagaaaaacccatctaagaatcctacattaaaggtaagatttgagacaatgaatagcatttttgttcattgtgagtttgcaatgtccctatggtccaagtttgagacagagtggaataaacaactccaggatgttgtaattagtttaagaacagtgtgtaatacttaggtgagagcatcacttttgctctcattggtgagggcattttttcagcctttgatttttaagctggcagtaatggtttctttgcttatgataggtattttgtatgggattgttaacacttcaacccacgtatgaatccaaaaaaaaaaaagaaaaagaaaaaagaaaaaaatgaacccacgttcagcactcaattaaaaaaaaaaccaattcaggtggtacattattcaacatttcttgtcattatttattggctgtagagtgtgacagaaattcaacaatgataagtaggatgaaaatatggaatttaatacatataatgtgaacaaaataaatagttagatttggatgagataagtagaatgatcttttgaaagttggtgttttgcccaaaaaatattgtgaaaaagagaatagaggtgtggagatctcttataaaaataaaaccaaaagcaaaacaaaccaactagacgaacaataataagatcaaggatacatttttttttttagaaaaaaacaaattaaagaaaatagtttcatctcaatcctttgcaacatagagatatattttttctgccagaaacagagaacataaaaagcgatataaaagttgtaaacaaactccaattaaaaatttgacaacagaaacacaggaaaaaaaaatat

SEQ ID NO: 198208 - DNA, 1858 bp, Cannabis indica
atgtgtagtaaatttaaatttaattatactattttaaaaaaataataatttaattatgtaaccacatttaatataatataacataaatattcatgtataatttaaattttcataaataaccccccacgaagggcaagatgtttcttggtttacattcaaacgtgcggatattctaataattaacatggaaatcccatgttaaaaaaattcttccaaattaatttttcttaattatattagtagataaaagtagcatggtaggcaaaacatgtccttcggttagacaatgagttattatggtttagagaggttccaccgccgattgtggcgatttattgcattattaatcatgtgtaattctgttccgcttctcaaatttctttattaatgataaatcattcaatattttttgatcaatatagcttcatcatcgtttgcccttccaatttggtctgcaatacatatttacaccatgtacatacgtgaaaaatcttttgccttagttttcataaacaaaataaaaaagaaaaaagaaggggttgattttaggaaacttgttaagaagattagacaacatttggtaatagaaaatagaaaaaaaaaaaaaaattaagcttttttgcaaaataaaagagaggaaacaaagagtatgtgtgagataaaactatacctttatagatggtaccatagcaatagcttcttccacagtttcaggacagagattgccaagcacacaaagctgcataatcaaggagacattaaggcaactgtttgtaagaattaatcttcacagtacagaacgataattaaatccttaactaaaaattaattaccacaccacatattacttacctcaaattcagccaattgatatctgcttagaacttgtctaactgcatctacatcaggatttttgtagcggctaaaccgctttacatattgcagagacttctcaaacaccctgaaaagagataaaaaagccaataggacttaggaattaagccattaaaattgaagaacaggagataatgtccttttagaagacaacaacttcggttaaaaacccagtctaaggctacatactggtttatagataatttaactaaacatttgggttgatggtagaaaaaattaaggtctggtatacttactgagaaacttgatgatttagtggatcatcagacattttacgttcaagaatgagcgcaacttcacaattggtaagacattttgccttcaaaaactctaaaagagaaaagaaggaaaattgatctggttattaaggtcctttgaagttaaattttattttagagattaattaagagagagggttagaagaagtaccatctccaattttgagctcagcggcattctcttcctcttctccagacattatttattagtaaaactaaaaggtacgtacggaatttgattgattatggtatccttcgtagtctgaccgacgattcttcagagcttaaggtggtgatgaacgatttggagagagaaagttgtgactttgatgagtgtgaaccctatttataggctttgttttttaatttcatttttaattttataaatatattttcaatttaacaaataatttatatccaacaacaacagaaatattattatattaattttaaaatatcaaatttatcattttaatctttttttagaaactgtgatactcatcctattcctaaactatatatatatagatataaatatctcaaactaattagttaattagatatttccatatggtataattctctaccatgatattaattttaatttgcagattttttaaggggtaaattgatagctgcctgttaatacccacttttatcatgac

SEQ ID NO: 198209 - DNA, 580 bp, Cannabis indica
aaggttcgagtcagggtcagggtctgagttcggggttcaggtccaggactaggtccgattctgggttcgagtccgatgtctcggtctggaatttgggtccaggtcgggatctgggtcgcgctcgggtctggggtccgtgtccgagtctgggttgggggctgagatcggggttatggttaatccaaaattctttgtaaatattataatacaagctaatacaagtcatttgttatgtattaaataataggactcacatattaaaatttatggttgtaataattaatacaatacaaatataatattatttgttatttaatacaatacgacttttacacgtacgacttttgccgtgtaaaaatattttgataaataaagttggtttttgtatttttatttttatgtaaaaagttctatattttatctgaagatattttgataaatttgatttatatttatccttttggagttgtttgtcgtaaaaatgaattattatttaaaagttaataatagatatcggagtgaaggatatatgttagaacaaattcaagtaccactattataaaaaaaaaaaaaaagaaac

SEQ ID NO: 198210 - DNA, 1041 bp, Cannabis indica
atttcatttctccatggaaagagcataattgagattttttttcccgtatacttaaagcttaaagctcaaaaagagattttctttttactaccccatttgataagtcgaactgagtagaaactgcttggacataacatgagagagacacggaaagaaaaagaaaaggttatggtaccttacacaagagacaaaaagacagtaaagaaaaaagaaactaaaatcacattttgtttaatctattattttctttcttcctctgttaattttttcccaccacgtatagtccactctttattattcctacttaaattgagagaaaaaaaattaatataaaaaataaactaactactatttttacctagtcaaaatggagaaatcaatatatatatataaaaaaacctttacattaataaaaagaagaaaaaggaaaattaatgggaagtgttaagaaaaataagaaagttttggtaagttttcttggcgttaggagtgggggagttgtttaaatacagtgagaaaaagacgagtgaaaaacacggctacagacacgtcaataggggcagctggaacaagtttcccgcttttttatggagtccccacaaatatgacccacgccaccgtttcatgatccaccccacactcgatcaaacactatactaatagtaattcaccatcattattattatatttttcacacttttattacatctaaccaaaaaggaccatgatcatgcttcaaattaaaaaaaataaaaataaaaataaagacacatgttaatgatacatatattacataacaggagattccactctcatccctttgtctactcactctctcacttcgtgtaccactatatatatacgactcacacactttttttgtaacatttttctttctgcacaaagggcttttggggtttgggttgtgggtttgggtttataacctctttctcacacacactcattgagtattttcaaccaaacagccctttacagctctattgatcttcatcttctccatctatttatggttaaacaatt

SEQ ID NO: 198211 - DNA, 1821 bp, Cannabis indica
gtagatgaaacaagatgcattgcatttaaaaatatctgaagactgaaactacaaagcttgacaaagtatatttaaaatcttaagaatttttttcataagatgcaaaataaacacaaattcaaaagaagttactgcctcataagctgcatttgtatctcctcatttgagcaaatgtagttccatcgtcaataatattcaataaaacttcacatgttgcactaaacatctttatcaaactagaaatagatttcaagtgagaactccaacaagtatcacctgccctttgcaaagagccaattttgattaagtcatttcccactttctagctcatcaattttaagtaaataagcaatatttgcagcttgagcaactttaagttgatcgttacgcttacatgatgcaccaacactactaacaatagagttcaactttgtaagaaattgatagacaagaataacttctctagatgcaacaactaatgctaattgcaaacaatgtacaaaacaatgaacataataagcataaagacattcacttgaaattaaagcttgcaaactattccattgtccacgcatgttacttgcgccatcataaccttacccacgaatagattgaacatcaaggctgtgattcgagaggattgagaaaataccttgctttaatgttaaggcagcagtgtcttaacatgaataagcctgaaaaaatgctcttgcacacagccatgtttgtcaacaaatctcaaaacaattgatatttgctcttttttagattcatctcgtgcttcatcaactaatattaaaaactttacatcgatttcttcatgaattttgcttcaccctttatttctcatgacatgcaaaacttgtttttgggttgttggtgatgtatatgtgtcattttgtggagctttatctagaacttctgctaccttatcattgtaggaagctacgaaactccataaatctaaaaaatttctacgattaattgatgttttagattcatcgtgacctctaaaagggtaagcgtgaaacgcaagccacctaattccctcaattgaagttttcaaacgaagtctacttttagtaatttcttgtgatgtgaagttcgtaaaccttcttacaaaatgtattgggtggttccaagatctacaactgctttctcaatatttttatgaggtgaattgatattggttccaatatgtgctagaaatgcacatttttttcctctcacattttttcaggattgaaatctattaatagtaaatacatccaatctagagtgtgcatctttggtgtgaaataaaaagtatggtagataaaacgaatcatctactttaggagaatactccaaccaagatggaaatagcttaaaccaagatgattagaaagaacgtgaatgagcttcctctaatttttggtagctcgaaagtataatctgatatggaccaactatattataagctctacgaacttcatcacacttctcaggtggatagtcccatattagtggtcgtaatcctggatcacgctctaatgaattgatattaaatccctcttcaatgttaagtcttaaagattttgttgggcgattttctgaattttcatgatcaacatccacacatggatttgatgagacatcagatgttgaactatcaatattcttccttttaaagaatgtgtcaattgtagttagttttttcatctacaaatagaaaaaatacatatgtatatatatactattcatcaaataaataataaacacaactacaaatacaaaaacatgtcaaagttctatcaactatttttataatatatataaggc

SEQ ID NO: 198212 - DNA, 1747 bp, Cannabis indica
aagttacggaaccgactacactaacaccaagttagaatctaatatcccaataaactcgattagatctgttaactttttaattttcttttagaacaaataatccgtttgtaaagaaaagttgttgagcttagtttgtaatatagtggctttcaatttcatgttcaaagttggctctaagtctaatttatttactttctgacaaatatctttttgctgataattattcaattatgataatcaagaacataacatgacataataggttaggggtgagaaacataagtctgatacgagaaatttatagaatacatacactagcaccacttgaataaatttttgtgttgtgtaatcttggattgtgtgggtggaatgtaagctaaattgttattttttagtgtcattgtgtttgtgttgtagtttcttaatttattttagatgtttgatacaaacacgacttgtgatacgaaaaaatttataaaatacgaacacgagtcatttttggtcatgacttgaatttccactcctaatgatagttttcactctataaagaaagcaaatgaataatgttgggataaaatttgaagtaaatgacccttaaatgattgagatctttaataatatatatgattacaataattaagaagaaacaacataacaattttgattagataataagtccagtatgagtagcttcactctcaagaactaaagttttgtcctttgaagaaatttccatggctaaatccttcttcaaatcagtaacatcaacattataaacaaacgacttagccacataaagaaagaaaaagaagttaagaaagctcaacacagccaagaaagcataataataatccaaatgagaaacattaagattatccaaaatccaacctttacgtccacctcgtttagtataatccgaaaccgttgtcaaaacaaaactactcaaaaaatttccaatacccaaactacttgtaaaatacgaggtacccaagctcttcatactcaaaggagcttggtcataaaaaaactcaagctttgcagtttcaacaaaggaatcagcaacacccattaaagcaaattgaggaagaagaataaagatggtaagtggaacgatttggtgtttgtcattgatctcattttctcttgcaacactaagtcttttcctttcagccaaacaagctgttaccataatgattgtatgaaggattaaaccaataccaagtctttgtaagagagtgattcctctcgggttttgagtgtagcggcgaacaatagggacgaagcaacgatcgtagaggacaatggatatgagcatgaagattgtgatgaaggctgcaaggcaagctggtgggatttcgaaatttggtcccatggatctgttgagagttgtgccttgtttgatgaaaagtgtatggccttgagctatcattatgcttggtatgaatgttgccactaagattggaatcattttgagtatttgctttgtttcttcaacttgggttactggtgttaatctccatggtgagcttaatgaattggtggaggttttcactgctgctttgtctaaaaatctgaaaatcaatgtccaaacctttgatattagacaaatctactttaaagttttcatttttatgactttttttttaagagattacatattgacacgaccatgttactaaccttagtttatcactagagttaattcgtacacaaaatttatagtttttaggaaaatataataatttac

SEQ ID NO: 198213 - DNA, 1667 bp, Cannabis indica
tttcagtcaatgcttgtcaatttttcaatattgggatctttgacctatttcgaaattcacaaatttttctacgtgtacacccacaaattttctcaatttggccttgtgagattttttcaaatgtcacgtttaaccttgtggtctcttaaaggttgttcgttatacccacacttttcagccccaaacatgaggagtgtgtattagaaatagtcccacacatggaaataaaatatcatttataagatgaatgtagctactcctcccattgcgaattagttttgagatggaacctcatgcaccttaatcacaccttatcaaaatctaacatgtataaaacccaaataaaaaactttgttgtctcccctttaactttatttgggacctttcggtcaatgcttgccagtttttaatattggggtctttaacctatttcaaaatttacaaatttctcgacgtgtacactcacaaatttctcgatttggccttgtagaattctttcaaatgtcacgttcggtcatgtaatctcttaaaagtcgttcgttatacccacttttttaggtaggcctaaacgcgaggagggtgcattaaaaatagtctcacatatagaaaatatcatatacataagatgaatgaactactcatctcattgccaattattttttagatagaacctcatacactttaaccacaacttatgaaattctaacaatctcaacaaccatggtttaaaatgttgtggtcatatttgataaatgttaaaattaattatttggacttttttttagtgtaattgctatttacccattttgtacattaaaaatagcataataaaacgaccactggtatggtcatagtatatggcatatatgggaatggaatggaatgggagctgtcagagtaataatctcgtgcataacctcattaaagaggtataggtacagctcaagtgtcttaatatgtgggtttgttgttagatttcacttatttatttatgaaaattagagttcttttatttgaatttgaatagaaattaatgaaggacatatagtaattagtttaatatacaggttatgggtcaaacataaaataacaatgaattcaatatatgacatgggattacatattgagacattggtctccatattatgtagtcaattcaatacttaatatgggatgtaactattgtagataagtcatttttgtaagtactattagagatattcatgtgtcttccatatttagaataattataactttatttttattttatatgacgatcatcgatcatgtgtgtgcgcgttcgcgcattcttggccctaatttgaagtggaagagacaatagaagggattaggggaatcgatagaagagatgatagagtaaagatgcttctaatatggctagggtcgacgagagaaaaaaaaaatgaggcggggtgagggtgagacgtgcctggaaatgtgagtcgacattagaaagggaaggagacagatggaaaatatgttagtgttgatatcttatgtaccttttgctcatcaaacaaccgatattttgacaaaagtcttgttcaaatctatgtttgaaaataagattgacaagcttggattgcttaatatatactatttagcttgagaaaagtgttggcttggtcaagtgtatttaggcaatt

SEQ ID NO: 198214 - DNA, 1132 bp, Cannabis indica
taaaatgagtaggccttaggcgccggcctagcccgcctatgcctaggaccggccttgcccctcataccgaaaccgatggactcgagcaacaccaagacaacgaggcgtgatggttgagattaggcgccgaggctagcaccagcgccggctcaagagtggggcagcagcctaaggcttcctttatttttcaaaaatattatattttatacttttaactattatttattaaaaaaaatataattattttcaaataaaatccctattttttttttaagatactatattaatattttattaagataaaagtgtcaaccaattatgtttttaagttttaccattatatatataaaaaaaaaaaaaaacttaaataaatttttggtctaagacccttaattaacttgagacaaggctggctaacagagaatgttgagacttgaaggcagtagctacaacctaaatgagaaaaataatttctgttgtgagaatgagaagtgaatatggttttgtttcatttttaggtgggtcataggtgtgtgtgatcttgtaataagatttattggattgcattacatgttacacacaattaattggatgatgatataagtattggatctctatcggataaacacctctaatcttcaccttttccttaaagtttataatcagtcaaccctctactaataggagctaaaataggtgagtgatgaaaggtatacataaaacttatagtctacactatactcaataattcaacaaaattcaacaaccatgtttaatcatctatgtataataaggtgaggactctattggaaaaagatatatgataaaaaaaaaaaaaaaattaaatacaattctttaacattttagagtgaaatttatatttatgattttgtttgtgttgaaaattcaaaatgctacctagttgatgttatctactatctagttcaccacaactaccgtggactaattataaatttgtacatatattttctttttccattatgatatattgattgtgtaggatagaaatagtaatttatcgcaacaaattagtcccctagtccaaaaaaaatcaatctaaactatagagtcactgaagacaacaacaacatgattattgcctgtgagcacg

SEQ ID NO: 198215 - DNA, 544 bp, Cannabis indica
gtcatttaacaaaacacagagtctaattggtaacttttgtaaaacagagggtccaaaatggtatttaccctaagttaaaacataactatttactataatcaataactctactagagttctagtgaatatcatttcataattaatcgtgaataattgctacttataaaaaatgttgagtactattagtgtctattgtctaataataatgctcaataagagaaatgctaaaagatattactggtacttatcaccttcatctgtattatattgctattggtataattaaatattcagtcacatataaattattaaaataacttttaaaaaaatcactaactaatcgtaagaagctatctatagaaagtgctgctgagctgatacccaataacaattctcataaatataatatgagtgtaaaaaaaaaaaacccataactattttgttatcaaaaaagcataactatttcactaaattaaaaaaaaaaaaatgctaaaaagttctttcaaaaaaaaaaaaaaaaaactagctaaaaaatttttggaag

SEQ ID NO: 198216 - DNA, 992 bp, Cannabis indica
ttttttttaaaaaaaatacatgtagctaaaaggaaaggaaagaaacaatcagacttagcgaatcctaagttatagttacacaaacgagaggagaaaactaagttctccaaaccgaatccttatccaaccgtaatgcgtctcttgtattttgatgagctttaccgttgtcattcctagagatgtgaaaaagagatgcatctggaaattgtgatagaaattctcgaatcaactcgacgaggctggagagagctgaattgtccttctagttactcttaagctttaagaccaattgagagcactcagattcaatggagttaaggggaacgttgattgtagaacaccatctaagagcttccacggggcttgtgcttcaacaaagagaggtgtagaaacaccccattttggaattgataagcctacaataatctggttttgctaattcttgaccgttgcacccaaacctgttctaagttgctttgaatcaaggacaacatcaacacttagcttgtagttgcattgttggagaacatgtgttgatggagcactgactggtgaatgggactgatctgagttgatgtcctctaaagtgctaaacataggtttgagattttgagctgcctagtaatcttgcagtaaactacacacataatcctccacatcaaaagattattagaattttggttgaaaagagcattattcctcctgtttcaaatctgccaagtcaaactgataaacaatgtgaagttttctttgttaaggtggtctaaacctcttaagtaatattctttaatatcacttttatgattgtagtgtaaaatttgtggagtgaatatttccttcaaacagacttagctttgaggcaatctaaaagagcatgggtaactgtttcaacattgcttttgctaaaagaacaataagggtgggcgaggattttcttgttaaataggttcaagccataaatgaggacacgatttaaaggttttttttttttt

SEQ ID NO: 198217 - DNA, 857 bp, Cannabis indica
tttaattagattagattagatgttgcccacatttactgatatcttttccttcttttttatattttcaggacgagaacgtgaagcaaacagcacaactcatgtaccagacagcactcatcgagagtggcttcaaccttcccgaccccaaggactttgcatctcgaatctacaattctgtgaagtccaacctgaaaatcaatcccgatgcaacgatcgaggaggatgatgaagttgaagaggttgaggcagaaaatgagacaaaagaatctgctgccaccaccggagacgatggtgatgatgccggatctctcaaggacgaattgtagtttgcctgaagagggcaatggagtcgttttaatttttattgatagggattttgttaaagtttatttgtgtttcatggttcagtcaatgagacatgcatgcagcacaaacattaacgagtttttatttttatagagacaatagacatcattgagttatacataataaacagcttattagttacctaattaacttatatggtctaattaccactcacgtagctataattaacatatattattgatagccaattttttaaaagcaacataaaggaagaagaaaagaaaaaaggccaaataaataatgatgcatattaattaggctaattaagatttttgttctctcaaataatgccctaaggctgttaattttttttaggtagtcatgatttagcacatgtcaaaatttgcagggcgtgttttggtagatatcaaaatttaaagaatataatttagtacatagacaattattgaattaataataaaattgaatgaaattttacaaaattcattcaatctaacaattttaatagt

SEQ ID NO: 198218 - DNA, 785 bp, Cannabis indica
ctccatcggagtttctccgtcatcagaaatcaatcatgaagagtcaacgtaacgctctgttgatcgcctcggctttgatcttttactggcttctttactccgtaactcatcttgttgttaggattgagcagcttaatcagcgcgttgagcggttgaagagagattgagtttctggtgagagcttaaaccgttgattttaatgaaaggggtttatgatttgatcttgatcgtagggagtgggtaaacttgtgtttagtattttgtgcttttgaattgccttaatgatgattaagttggtttttttttctgcggagtattagtattttgttgtactgcatttgctttccctaatcattttgaattgaatttgctacaagtttcatttgaaaaattgctttggattggtggaatttgggtcttgaattcgatttcgatttatccaatgcaagaattcaagtgggtttggcccttgtattgtattctttcgaaatgatttggctttaactttatcataactttgattgattgtattacttgatgagatgtgctatataactagtttaatgcggattcttgataaaatttctttgatatatatgatttggtttaagttgtttgctacacttagattagacatgttcaagattcaagttttgactgaatttcataaattatttggcttcaacagattatgtaagaagagagtttaaccataatatcaaaaacataatttggaatctgaatgacatattattatggatttatttatctagtcagagttgatt

SEQ ID NO: 198219 - DNA, 1431 bp, Cannabis indica
taagtgcatatttaactatcacatagacaatactagaactaaatcaaagaatatggaccttttttattaaaataacatttacaattacacgtacattaaattaaataattaaaaaaaattattacgagtaaataaaaaagaatattaattattattattaaacaaataaaaatacatgaaatatatgtagttaatatagtttatcatcatcttgtacatttttggctccaaagctagctagaaagaaacggagccataactaggcggaatgggcagcgggcgcatggcggccgagaaggcgagctccggcgaagttcctctggttgatagaggcaggttgagttgggttgggagaaggaggcttgtttaggccagcttgcaaagaagatctcaaaatgttttattatgattattattattaacatcatcataattaatatctcttataattatcatcactctaccaccttcactaaaaccaatattaatattcataataatcacaaacacaatacccaaaaccaaactacccattatgttatttctcctcatcatcatattaattattacaatatttaattttgatatatgtaaatatgtaacaaaaatattgatgatttttttatgataattaaggctaatataagagaggtttgtaaataatatagactatagatttatatattttggtatgatatttctgtaagtgatcatgatattctatatatatactttgttttatattttttttatttaatattaattaaaagtttggccttgactcttgactataatattatatatgtggttcaaaaggtttaatattttgaacgagtcatataataatgcaagaagatttttattaacttggttttcattaattaatatatcgataaatatgaatattaattaagttaaattcattgttaatttgcataaacgagttagaataagctcttaaaaaattaaataaataaataaataaaatattagagcattttttagtgtgttccattaattaatttattttttctcataaattgttatcattttgtcactacctataaatatgtaattttgtattatgtttaattatttttcaaagtgtttacctacctaagacattcattcgatccatgataataaaagcctaatcgtaagtttgatcaattcttttttattactattaaattaatttgatcaattcttaacgtaaaaataagctgtttatatttgacccaaaatgttgtttttgttatattttcgttgttgaatatttgttttatttttttttatttttattatgttggtggccttaatttggtcttgttgtatatgtgtttattggaaatattaaagtatagtaatttcaagcttgtggaagctacttagtaattatagtaagagcttgacttgagatattgtaactaa

SEQ ID NO: 198220 - DNA, 971 bp, Cannabis indica
taaattccaacagcttcatcactgaacttgagcagaactaagcccatcgtaattctaaccacttagaacaattacctaaatgtccacagattgtgtttgatgaatccctcgaatacttgccattggatgaattgctccaaggaccatacaaattatagtccaacctccaatttttcgcttgtttaacaacctcatctggatcaatacgagctatcttgactaccatttttcatcaacggtttagtgtatttagcatcgagtcccttaaaaacgagttccccttctaaaaaagagttccaatgattctttttcgattcgtgaaacaattcctactccttacctaacttaatatatacttctttggcccaatcaaaacctttcagaggtgtacgatccactttcaaacttgattttagataatctctttctccatttgatccatttctggtgaattagccacttctgcaatcgggttcaatcctccaactgatcttgtatccttaatttcacccaatccgccttgcttctcttcattagacttctgaattgtagatcgaagaactggctttcaaacaactcttctcttctaatattacaacctttgaaattagaaaataaattacagaactaatctccatcgctgcaagggcattttgtaattttgtaagatcttcgtaagccttaaagttaattaaaataattttaattaataaattttaaataaaccttttatttaaaatatatcttaaacccttttaattagtttattcttaaataaaccctttatttaagataatactcttatccttctaattttatcttaaaataataacaattattatttatttatggttaagataactttcatcttaatttggttacacgtttgagttggaatttcaaacctaaaatcaattatattatttaattcaaaaatagttttaaaaataaatatccacaaatatatattt

SEQ ID NO: 198221 - DNA, 1954 bp, Cannabis indica
agttttttttttcctttttttaaaaaaaaaagagaacaattacattatgcctttcgaaaaaaaaaaatattacaattatgaaaacgaaaatgttacaactattctaaaagagttaacaaggtacattcaatagtattttttttaaaaggaaatacacaattattaaatgtgtttggaagtagctctgtaattactaggtagggtaattattaggctagtaattacacaatttagtaattacactatattttaaaatgcaatgtgtgtttggatatgaggtggtaattacatatgaattcctaatatcttgtttggtaaaatagttagtaactatataggaaaataatattttttaatagctaatgtttaatatggaaagtttttagtaattacacagtataattacattcctcatgggtggccatgagaattggagagtgtaattggaatccctcaattactttcaattacacagttacagtgtaattacatggttagacaaacatgtcaaattatgtaattacctccaattacattattactttccaaacgcacataaatttgttgatacataagaacttaaaaagtatagacaagtatttgtccatatactcttctaactagtaatagaggttgtgggcaatattatttgcaagtcgtgaaatggtactacaaaaatcacaactaacagcagctaataaagaattaatatctaataaaatagattgaaaactaaaatttgagtgaagattattaatctaactaattgccactgaagaatcaatattaataatggaaatactaaaactaaattggtgagaaagaattaggtccagtctaatggtaagcagctctgctacattgacagaaaattcacctaacacaccagatgactaagccatccatactacaccatcgacgtcccgtatcacttcacccaatctgacaaagcccctcccaagaatcattgaagcattagtcgcaagagaaaaagaatgagaaggaggaggcatccaccaagggttttcaatagggtttgaatagtgcaatcccaaatgaaggccccgccgatttgaattcaaaaaagtgattatgagcttactctagaacaacatctaatcttgacttcttattaccaaacactattgagtttcgatcataccaaatccaccataaagtaattattatcaattcaaaagactcacaggataaatttttaaagagaaagagcaaaacttctagcattggtccatgtacacaacgatggaacaccgaccataccctcaatcgatgtaacaatagaatcaaaacagagcaaaaaaataaagcatgttctagagttccaatttcttctccgcaccgtgagcaacaaagaggtaacttaacttttcgagagataagctgtgtaactattggtaacactaaatggaacatacgccaaacaaaaactttacttttggtggcatagcaagattccatactccattctaccaatgaatcaacttagatgagtcttctattctctcatcgacctgaagtgaccacaccagcgagtagccactcttaacattataaactccatctcgatcataatgccagtacccaaccatcctttacttcacaccttgttaatggaatagacaaaattatgtctacatccatggacaaaaaactgctctttagttgtgatttgagtaaaaagagaaagaaaatgcctaattatatgtatatatatgctagttaatagttgatagttgataggtacgtgccgccctttttattagaaaattaaattaataattagtgttattaaattacatttgaagtggataaattgtactaattatatatctcttttcattttttttgcatgtgacgttggagctcattgtccgccattatgaagcacgagaccatctccactgccttcgccctctctctctctctaaaaaaa

SEQ ID NO: 198222 - DNA, 1006 bp, Cannabis indica
tcgatatttaattatacttatattaacatttctcgttattttaaattatatatatagtaccgtttataaagaagttggatttatgtatacatcactcgccagctgttacattaacttatgtatttattatattaaccttttgtcatgtcaagggcaatatgtagattcttgactataaaatcacttctacatacaattttgatgtttggatttaattcatgtacattctttcttttatttttgtaagaattcatgttcaaatattcaaattttatttgtaagaattgttgttaaatttgtgttgtgtttatttattatcaaatttgtacactatataaaaattaaatcattacatagatatatagtagaccccgcatttctcttaattaattagattgttattattatataatacagtgtgtgattaattaatcatattataattaatgactcgatattgattgacataattaatcagttaatagaacttcttaaatctatcaaaaatatatatatgatttttgccactaattaattaaataaataatgtacattgacactgtcaacccttttttattctttccaactttttctgattaaaataaagactcatctgacagagagatcagtatagtgtaccatgtacaacatactacgtacgtaccacagccatatttcctaaattccttctaatgattacatattatataacaatattgtatccaattcagaaagaaaaaaaaatattgtatcaaacgccagtaaacaatgtaattaatcaaaaacataattaattcttaattatttgggaactgatcaataacatcattaaaatatatataatacattaattactaaaggaattaaagcttagaaaatatgattgttgaccgaggttttcggcaactattaaaatataattataataaggagctgtaagaaagtgagatggagatttttacgtggttggggcgttaatgagccttagtccacgagccactgctat

SEQ ID NO: 198223 - DNA, 1195 bp, Cannabis indica
aaaaagctccaatagtataaagctatcaaattgatgaaaacaaactaatgaagacggaataattgaaagttgaatcacaataacataaagccataaacaaatagcacagtaaactacaatgatgactgttaaataaaaatgaattgaaaagaaaaagaataaaacggtcatttctgggcaaacgaatagagagaaggctagaatgttcacgagtgcacagtagaagtaagacagaatcaatcaacacactcatcacgagggaagaaaagctcgaaacttttgcttgttttctgctttttattaggtgttttttcagtcatcctctttctgttatttgttctaataacatgaacaaatatagaaaaaactacatacatatcatatatatttatataaaaaagactcccaaatgtttgttaaaaaggaaaaatgagagcaaacctgggcaagttacaatctttgggctgccaacgccacttggtgtagaaagaatctaatcttccattttcagtacaggcgaaacctgggtctacaaacgagcaatttcgggactcatagagtggataactctcatcccatacccaacttccatcaaacacgtcacacttgtcaccatcctcatcaagaaatcccagccgttcattttcacaagaggaagatgataaagaagatgaagaagacaacgatgagtcatgccatctcagaccagttccaccagagcgaagctctctagccacagttccgtaatccaagtagaagaagctggtgatgaagataacagtgaccaaaacgaacccaagaagcccaagagatggctcaagaggattgaaccgcttaaacttcttgaatagctccaactgagttgttactgcctcatccgactcctctgatgaaggagagcccttccccattaaccttttcagtaaagatttttattttctttttgggtggttttgggaattgggttgtgattttaaaaatgtgggttttgaagagtgagcagaaataagagaagggtttctcttttctcttattattctgataagaacaaagattagagatggcattaatggctgaaaagctagtttctgaataatggtattttataattttgcccgctaactaaatacagatgaaattaaagcaagaaaatgaaatcacttcaatgttcattcagtcatagcctttggttttg

SEQ ID NO: 198224 - DNA, 587 bp, Cannabis indica
ttttaacagggaggttggttcagaaaaatggatttgatttgcctaatgggttcaatcagtggttaaagaggaatggactgttgaagtgtttgacaaggcattgatctcagaaggtgctaatgaagagagaatggttaatttgttgcttgttgctttgaagtgcataaatccctctccaaatcaaaggcctactatgactcaagtttctatgatgataaattgtattagagatgaggaagagagatctttatcatttgcattgtgatgtacgcatatctaaactaacaaattctttctcacacacacatatatatatattaatatatatatgtgtgttcattattggttgtaaggaattaaaatgcaaacatgcatgaagcatacataaatgattatgaaaaatgcagaatagttaaactataaaaatcaaatgtttatataaatgtatatgcaatgaaaggataaaaatatttccaggcattaattcgtagagtttagatctacaagcttagatctatgaagaggaacaaagaatagcgttctaacatgtattcagagttctaagctctctctaactcttttaaata

SEQ ID NO: 198225 - DNA, 1220 bp, Cannabis indica
gtttcattcttcgtagttgtctagggtggtttgttgtttgttaagatactaatctattcaggttcctttgcgaaattaaccttattaaatttatatttagtaaagccactcattttcaaactcttaatagtgttttcgaaccacaatccaataccatttcaaattataaaaaaaatatatttttttgaaacaattttaggaatgagcatgtaggggctcaaggatattcaagatttatatgtgtatgtgtgaattcagtgaacagtttagatttctgaagatcagtatttataaatgagcattgttattgggcatcagtggtgcccaacactttctataggtggcggcttatgattgattagcgttatttcctaaaagttattttcttaagttatatgagattcgatatttaattacaccaaaaaagtgctagattgtagtggtgccttttagaaattctctatgtaaatacttgtaaattttttaacagtctgatttgttgaaataggagccaacagatattattacatatgcctagacaacttgcttgcacttggaggtggtggtaactttgcattgtatttggatggagacctgtaagttgctttatgaaattactcattctgataaaattaaactacttaaaaaaagaacttcatttttctcatcatggttttaaacattggtttgaataggttaaatggaaccagtggaccatgtgaaacatttggaaacatgtgtttggctcataaccaagagtttgagttaaagaatgttgaggtacttcacatgtttgttacacttacaccataatatttattagtccataaaacacattggcttaaaatttggtcatataattgtctaatgatttttcttaacctttgcagctatggggtttcacgcatgcgtcgcaataccttcgttgacaagactctgagatcactctgttcatctccatttttctaattttatgattaattctttattccttttctttcacccttttttaccatttagatgctggagggatttggtattactctatgggtgaatgaattgttgttatatatagttttgttgtagctaattgtatttattgttacatgttattcttatttatatccttagaaacaagctgttagtcttacttttctccttgaaaaattgtattcaaattctcaattcacatatctcaaggcattctactacatatatag

SEQ ID NO: 198226 - DNA, 837 bp, Cannabis indica
gttaaacttaagtatttatgtcggaaattaatgttacgtagaatcactctaaaatctataagcttaaatatattagttactaaatttactcttaattttttttttttttttttttggtaaggaagtgacaatctttgattagattagcccattatttataaatttttggaattatttcacaaaacataaaaacaacaaaaaaaattacgaaaatacgattttacggaatttaaaatatttttacgattttttttattttatttacagaaaatatggtcttcttatgttgtaattttgttgattttttgttattttgatgttatttttatgtagtttccaagttgattttatgttgttttcgtgttattttttagaaaaccatgaaaatgtaagaaaaaaaatattctttgaacttaaaaatataaatattttaaaaaaaatgataccttatgtaattattcttaaatttttcctatacaaatgaaaaggggattattgattgtttccattttgggaacctaagatcatatttagttgcaggtaaggaaaaagaataaaatcttttcttaatcacttctgttagttattagtatgctaatttcttggaatatcttctcactaattcttagttattattctcatgatcatttttttactatttattaatgtcttttccttttcatactgattaaaaagagacaagccacacttggcaagtaaaattaatttaagtaaaatacaaaataaataaataaagaatgaatctttcttaatattcttgagaaaaatgaatattctattgtattaaatgggacttaaaactccccataaatatct

SEQ ID NO: 198227 - DNA, 739 bp, Cannabis indica
tatatatatatatacatttagatatatacatagatatttaactacatttaatataaattatagatatatttatttatatatattagcaacaaagtttcaatatttaaaatttagaaatttagaaggagaaaaaaaatgagttgcatactaaaattttcccacctcttctttataaattattctcacattatccattatgagtgctctggagaaaagcctcacaaaaaaacaaaagtgaaagcatcttgctctatccacttatccacatattggaataatatataaaaagacggggatggttgcttaatttagagttcaaacttgaaacatgatactaaattaatcatgcgctttaccctacaaagccaaatcacaaaactacacattatcctaaacaattctaccattttgtttaacaaaatcctttcttcactcaatgcttaaaataaaatctgaagataatcttgaatttatgtcacctgatttaagactggaataaaattaaccctcccattctatagactaacacaagccacaacaatacaaaacaaaggcacttcttcctttgcatgtaatcatgtcattattattttcattaagtttgtgcagctagccactaatctcatggaaaactagaaacgaagagagaattgcaggcattcaaatttcatttatttacatggttacgaaccatctactactgtgtaatgtaaaagagccaaaaaaaaaaaagaaagaa

SEQ ID NO: 198228 - DNA, 1237 bp, Cannabis indica
ttttttttttttcttatagttgaggtttattttttcaagcctcactctttattttaactaaagagtgtgtatagattatgattaaagatgttcgtaagataatcattcatttacatttgtttattttattaaaattaagaaagagagaatttgattaaataaaagataaaaaaaacacttcctcacttattttttaaaaaataccattaaagtttgtgacttttatttatttttattttgtaattttaaatatataataataattttgtatgtctttatttaataactaccacaaaaagataatttaattaatttgagcattttgattgagctgtcgtgataaagaaataaaatattataaatattaatcctaattattttttattaattctgttatatttctctattaatttattttgattctgtataataaacataataaaaataaaataaaaaaaaaatcatatcatttgagttccgtgcaaaaattagaaaatggacatgccatattgaagtttacactttatttggagtgaacgtcacaacaaataacaatagccgcgtaatacctaccaacacgcacgaacgtttccatttctctttagtaaccaaataaaaaaaatattaagtaatgatatatttttttcctcttaacaacaaattaagcaatgatcgtttttttagaaaagatcttgagaacatgattttgttcactccaaactaagtaatgatcttgagatcacgattttgttcaaattatttttctttagctctaatcttaaaacattatttcttaatcctaaaattagtttatttctccttacaaaaaatctgtctctaatcctaataatgtaatttgatggataattaaaatttcaataattatttaagatattctctaaatttttgataaatttaaaataatatattgtgttgaaaataaaatttaaagagtctattgcatgtttgcctcttttatttgaagtaagtgtaaaatagagtatttgaatcatactttttgtgctataaattattttaaacttatcaaaattaataaaatatcttaaataattaaaatttatactgttatataagaaaatcgtgattataatttattatttttgctttatatgaaactttaattaaacatttttgtgaattaaaattattttgatttgaatattattattaagtactttaagatatcatatatcatatttatgtgtgacattataat

SEQ ID NO: 198229 - DNA, 952 bp, Cannabis indica
tatatttatagaaaatatatataaatctaaggtataagacagtgacgtagcgctctaaaattactctaaatacatctatttattctatcattaattctctcattttttatgaatgactcagccttctctttctttctttacaattcaatttgtattttctacttttttaattttgtatttacaattgagtgtctttatgcattgatttgtgtttttctatttgcttaaatcattttaggattgatggtatgcaggattaatggtagacatcaaaatcaaaattgggaccaggtgatattaacctactctaattattattttttatatttctatttttatgggaaaatttatttgccacttctgtgtctttcaaaaaaaattgttggcatcagtttagttgggatttgaacaataatctcatttttacttatactagtgatccttggcttcctgatgaggacaaccctcatgttacctcatctcatcctactcttatcggtcaaaaagtgagttgtttattggaagtgaatgacaaaagatgggatgtggaagttattgctgatttattcaataatagagacaaggagttgatttataaaatacctatatctgccactaatgtgacagatagttggtattaggagtaaggaggtctcggggatctattcagttaagtcggcttacaagttaattcaagatctcaaaccttctttcggctcctctagtagcccaaatttttggcctgctttatgggctttgaaatgtcctccaaaagttaaagacatgctgtggagatctgtgacaaattatttgccaacctgtggatcacttttccaaaggcatgttcgaatctcctctacttgttccagatgcaacaggagtgttgaaacaattattcattgcctggttacttgttcgtttgttgtggcttgttggagatcagttggtttgt

SEQ ID NO: 198230 - DNA, 681 bp, Cannabis indica
aaatcgagagtcaaactcagaattgagctttttcggcctaaaaaagtttcaaatgaagatagttggtggtttacaactctgtaaataaatgtaactaaatagctatagcattgtaaatgtatagttgattatttaggcccttaatggatgctatttaggtgtatacaaactgtttttgagctaatacaacttctcattcataaaaaaattatatatagtatttaaatattaaatagagaatatatacaatgtaaagaataaaaaaatctctcataggaattgactctctctaaaccctaaaccctgaaccctaaactctaaacaatttctaaatttcttctataaaaatcaattgatgttggatcaagttatgctatcttaatacattatatatatgattgtgaaaatcattttcttcaagatcttgcctattatgatttatgcaaattatgttttagtttgcatatttttttttcgtcacgatttctttacttggtttgaaaaaaaaattgcaataaaggaggatgggtcttttctattcaaaaaaatttatcctttatctaaagggtatatttagttaatctatgagttacaacattaaatttgccactaacattagagagatgcataaaaaaaattagataataaaacttaggaaaattttacaatacaccctcttaa

SEQ ID NO: 198231 - DNA, 748 bp, Cannabis indica
atatatatatatacacacacaatcgaagagttcagtttcaaaatctcttaacataaacagataaccattaccctgttacgtacaatgtacccataacccacaaccagatcaaaataaacatagcagaaaaagatttgaaaatggagcttcaccattgagctggagagtgtcagaagcaacaccaccccaaaccatggcaccaaggcgaccatttccgattggaatcgcatcggtccagtgtttggcaggctgagtaaaagtaagctttaaaggcttggaatcatcgtcgttgagcgaactcgggtgccacatgtccttctccggcggtggctgaaccagaacccatccactatcctccataggtttttgttgtgggtttagtaattaagctgtagcagtagtagtagtagcaaagggtaatgggggagtagttggggaataagtagtgaccaaaactgagattagcttcgccattatttgattattttcagacgccataaacaaggccccacgtcacctggtaccttttgtagctttcctaattattattattatgtgatttttttaattgtttttacggtacggggacgtaaatgtaatccgtgccttagtcacgggattcactaataaaaaaagataattaaggatggtaaattcaacaggtaacatacacctatactttattatttacttgttatttttctattggaatatttaaattaattttttttataaataattaaaaatt

SEQ ID NO: 198232 - DNA, 623 bp, Cannabis indica
ctagttggggttattccagaagagttatgtcaactctctggattacgtggcttgaacttatctcacaatcatttgtcaagcaacatacctaacaaaattggtgaattgaaatcattggagtctcttgacctttcaaacaacaaactttttggtgaaattccacaaagtatgtcaaatttgttatcactaaacaaattagacttggctcacaataatttgtcaggtaaaattccaacaggatctcaacttcaaacattggatgatccggacatctattttggcaatgatcaattatgtggattgccattgcgaaaaaaatgccttggcgatgatgatggaagaaaaacttcaccaacaagcaatggccatgaagatgaagactacaaagaaaataggtttgaaagaatatggttttactttgtggtaacacttggatatgcagttggattatggggagtaattgggagtttgattttcaagagaaattggaggcttgctttttttgggttttatgaaaacatcaaggattggattcttgtgacaatacaagtgaaaatgggaagatttaagaagagcatcatgaagtggatgtggatcaactaataataatcatgtttaccaat

SEQ ID NO: 198233 - DNA, 1039 bp, Cannabis indica
gttcaagtctgtgaagtcgatacatatatgccatgttttgtttggcttgggtaccaggacaagattagccaaccattctagataatatacatctaagataaagatgttcgagagcattttatccaccttcttttccaaagcgtctgatttcacctgattcagtggttgtcacttttgttgtaccagaggcatgattaggttgacgttgagaaatgagtaatgacatgtgggcttattctagtcaagtctccatgacaccatgcaaatacgtctgctgattctttaatggtagtgataattttgcttctctcgtctagacttaatccatttccttagtgtatatccttggtttggtcttgatcataaattcctacttccttgatgtcttccacgtgctccaatgcaattttagaaccaatgcgatgatccaactcatcttgactttgtgagaacgctatcacagtcccatggatcataaaaatggacagctacactaccacattataacactgtcttgcttccccttgatttccacggactgttcttatcctcattgtctgagtaggaaatttgagaaacaagtgcctgattgaagttactgctacaaagtcgactaaatttgggcggcttgaaatagcattgtaagttgtgggacaatataccaccacgaacgtacaatatttgaatgtgctttgtggggtgtccaaacatagggtaacggggaatctcactttccccataggaacaagggtagtcccgttaaaccgtgtgagttgtgaactgctcggggagaggtctcgattagtgagtccaattgccatgaaagcctctttgaatagaaggttcactgaccttccattgtctactaaaatttaggcaacaattttgtttgaaataggagttacaatgaccaaagaatcgtgatgtgggaaacatacttgcttggcatcttcctccgtgaaggtgatgggttgatccatgagtcttggtctttggcctaagagctgaataacttcccatatctctccgtcatgatcta

SEQ ID NO: 198234 - DNA, 962 bp, Cannabis indica
gcgtgtaattcaaaactctcttccggtggttgttgcattttttaagaaaaaaatcctcagttttgtagcttgttccttatgttcacaagcctgggaatcgataggccatgcatgcatttttctactgtagtcatgctaaagctgtatggatacaattcaactttccaattgatttcaagaaggcacgttgtatggttagtggtgattatatttttcatcttgcaacgctactcagccaacatgaattagaaatgttgatttgcattatgtgggtgatttgggctaactaaaaaaataattcatggtgaaacaaagcatgatggttatgctctaactgcttatgctaggaactacatggagaattatcaaaaagttaaagaccattccaatcttgttattgaacctactacttcttcggccaatataaatctaccaactgaagagattccctggaaaccaaccgatttgtatggtttgaaactaaatgttgatgcagcggtaaatcctacatcaaaggtcttgggagttggtgccattgtccggaactataatggccaagtcattgcggctatgtcaaaacttgtttaaggctgtttcatatcatatgaaatggaggcgaaagctcttttccatgcacttaattggatctctcaagtctcattgcagattactcatgcggaaacagatgcctttcatgtctcaacttttttaaattatgaatctttggacttatctagtttctctgatttaatctttgaaattcattgtctttcatcctctttccctgctattgttatttctcatgtaaagagaaatgataaccaagcttttcatggtttagcaaaatatgttcttggattgaaggttgacacttattggatgggagaaatttattatcttattttctctgttgttgtaaatgattgttaattatagtaacagtgaatctttctaaaaaaaaa

SEQ ID NO: 198235 - DNA, 892 bp, Cannabis indica
gctaaaactcgagctgagttttagggattctttctataagttctctagggtgtactcaacaactcaagcttaaaattcattacactaatggagaagaaagataataataggaagcaagtccttagtttagctgaacttgtataaaaattcttgtgtctcattcatttatgtttcttgcttttaatctctgttttattttttggctcaattgttaattgattgtttatgattagattgaatttaacttgttgtatgttgtgtatatgttcttgattgagttctgtggaatatgtaatattaaaacatatctagatagagtgattataaaactattaatttggattattatcatttagtgctctgggtgtttttggtggaccattcgagtttgtctatgtgctttccattagtgaaacatgcatgatgataatttgtggttacttgttagaacttatatctacagtattctaattttttttaatgcctatagtattataattaaagaaaaaaaaagtcatgtgtatgctattgtttgatacatacactttttatcgttattgtttcagtgtgtgacactcacaaaccaaacaaacacacacacaatcttatctttcgcatcatattttcgtcatttaatttgtttgatttcatgtagtggagtgtcacatattcaaacagttttttttttccatttgtatcattatcactctttttttttagtatgggtatttacaatctattaatagcttaataggttaaagattttgggttcaaactcatgacctctctcttttttctatctctctctcaccactaagctagccttagtggcttatataactattactcatctctaatggcaaaaaatgaatggatacttgcttataggtgg

SEQ ID NO: 198236 - DNA, 815 bp, Cannabis indica
atcttcaactatatgtaagagtaagacttatactaaatgtaagggagactttttttttgctaaaagaagctttattagaacaaatcggtgttaactcctctaaaagaaggagaaccagtaaagttagagtgtctaactcaagaggctaagacatccgccaaattgttatcatttttgaaaatccaaaggaaattagaatctaaaacaccacgaccagaaaaaaaaagaaaacataatcaaaacaacaggctcccatcttggccattttcgatttttcgtagcccaacaaagctctttgcaatatgaaaagaacattaaattctctatcccaagctgaatgatctatggtactacaagaattccaccacaagtctcagcatcttaaaagcattcgagaaattgccatggagacctaaaaacatctttacacaataaatgtatctatactttcgcaaacaagaacatgaggacaccaaaattttctcactttaatgaaaaaacttgacatagattaggaaataaaacttgaaatactttttagcatttctctttctttaaggggtgctaataaagtatgttaatggaaagaaaatgaattaattttattttattttattttcatgataatattattttgttgactactatcttaagtatgatattttaattgtaaatctatgcctttatggtgtcaaatataccgacatgatattaatattttaataacacttagttacttcatatagtgtttgacaccttaagatgtgctctagtatttaatatcaaacattttttttttctatgtaatcttcaag

SEQ ID NO: 198237 - DNA, 1288 bp, Cannabis indica
agagtaaaaggcctttgagagatatagatgccttgaggtgatcgacttatttcaatgccaagaaaaaatctgagatgccaaggtcctttaatttgaatttattgttcaaaaaggttttaaactcaatggttgctgaggcattgctgctagcaatgacaatgtcatcgacatagacgaggacagccatgaaaaggtgattgttggatttgatgaacaaggaatagtcggattgtgattgagtaaatccattagagattaaggttgtgctgagtttggcataccattgtctggaagcctgtttaagaccatatatactcttttggagtttgcaaactgcatttgggggaagttttgtggcagatttatagccaggaggaagtttcatgtagatttcttcatgtaagtccccatgaaggaatgcattattgatgtccatttgatggagttcccaattgtttattgctgcaagagcaaggagaattttcaatgtattgaacttagcaaccggtgcataagtatcaaggtaatcaatgccatatttttgggtgtagcctttggctactaacctggctttgagtctatcaactgccccattggggaggtatttaattttgtatacccatttacagccaataggtgtgtatccaggaggtagagacaccacaatccatgtgtgattgtcttctaaagcttttgtttcaacatccatagcattgttccatcttgggtctttagcagcagcagagtagtgtttaggttcaaagatagtatgggcagatagaatagcactaagaaattgaggagatagtttatgaaatgacatatacttttgtatagggtgagaagtagggtctgtagtagtgcctatagaacaaatgtagtcttgtaagtgctgaggtttcttgagggttctgccagttttggaagtgggaatagttgaaccttctgtaggagttggtacactgctggtttgagatggaagatgagtaggggattgggaagagggaagggttctggtgtgaaacaattggtctaaatgttgtgtagaatggtatttagggaatggaaaaattgtttcatgaaagatgacatttctggattgaaaaatggaattggttttcaaatcgagaagagtataggccttcattccagaaggatatccaaggaaaacacagtggttggctcttggagaaaatttatgtcgatttctatcaagtgtagatgcatatgcaagacagccgaatgtcctaagatgttcataggctggctttttgttatgcaatatttc

SEQ ID NO: 198238 - DNA, 2123 bp, Cannabis indica
gacgtgatttcccttactaataagttccaaatattgtcatagtcctttaattttgtataataataaaatttacataatagtatatggtagtgatatcgatctaattatatatattgtgtaacaaaaacatttattttataagaatcttttatctctataatttatatagattacccaaaaaagaaaaaaaaaactatatataggatttttagtcattataataaataaaatctatcaaattgtataaaattcatcattattatctatatttgagtgcgattcactggtacctttttggctatataagaaagaaagaattattcaaagctataaggaataatcttttcaatgtggttaaaaaaaaacactcatgaacatgtggactctttattggatcatgatgatcatgtgggtaaggttttatatgatcataaatgttagtgtgaaacttatgtggcccaaaaaacttgatgctattggattccattaatcatattatacagttttaattatataataactttaaaggaaagactataaatataattatataattttgttggctgtcaaaatctaggtatatgcgtgcacagttttgattttgtttagttagcacaaaatgactttctttggccgaccaacaactaattagctagtggtctcaaaacaagactaatttatcatcaatagacaatgacaacaactccttaatttttttaaaaaaattagtatatatatattttaaaatatacactcttattatgcaagctgaaataaattatcaattattttagaacttaaatatattctggaaaattaattacataatttatataggaaaacaaatatttacttaccaaaccttttaaatatttcactatactatagctaataaataactagctatagtgacgaaaaataatatatgtataaagggaaattaagtagtacttttggattataatgattggaattttgtaaaagttgtgaacacaagaggtttttatttatctttatgaaaaagaaatgattataaatatatttatatatagacatatgtaaccccctttggtccatatgtctccaagaaaatataataaagaagggattctaataatgttttctttgccacgtgattatgactactgcctactctatcattagcattatatatgtattattttaaattcatattaattaaaaattagaaatttttacaccacacctaagttttatattgtgtactgtattaagttttcacaattatattttaattattttacttttttttaattattttctattttgttattttacgatattgctttaataaaaaaaaaaatagtatttttataagaaaacaattgtgttacattaaaattataattttttaccaaaaatttaaatttttataattcacaaaacgggaatagattagaaagagcgagaagaaagtactagtaaagatgagtataaatacaatatatatttcctatattatatactaaatagttttggtatagcatgcatagagatatatagagaacaaaactttttaaaaagtagaaagaaagttaattgttggacaaaaaagaaaaaaagtggtacatactcaaataattaaagttattctcaccatctcatgtattgtatccataaataatattaattattatatttattacagttttttttacctcttaattttactccctttctgcatgaaatgagaacgtatgttacgtacgtgcatgggcgtataatgtataaaaaaaaattatatattttcaattttgattattttaagagaattaatctggctggattaattattgagtcttgttttatttatagatctataactcttgtccagactattaattatatataattttggattatatattaccatactatatataagttcatttattttgtgtaaatatatgcctgtaaagtacaacaaacaatatatataatatatttatatttatataaaggtacgtataccgaaagccaatgaatcagttacttagtgcacatgatttaaaaaaagttatattttacgcaaaaacaaataataattaaatttagagacaaaaattgatgtgctatcaaccgag

SEQ ID NO: 198239 - DNA, 779 bp, Cannabis indica
aatgagagtactggtttattttgatttgaattcctacaagtcattcttattttgatttatcaatctgattgagggtaaattcgaatcctagttactataatttttagtcattctgattacgtgtaagtaaatacaccatcaatatatttttttttaaaaaataaattgctcatatttaagaagaaaaatgatattgtaaggacttgaacctcattgagaccaaagatttaattcttagtagcttgtttttatttaaaaataaattaaaattaactaaatacttattcatactacatgaccttgaattatatattttgacaagttggttctcaattatttttttttttttgtaaattaatctccaaatatataaattttaataagttgatccttaatcattttttttcgcatattggtttctaaatttttagtttcttggcaatattaagtctaaattgttaaattggggtagtttgttaacttttaacttttatattctttactctagtttttatgttaatttcaaatattttttttttattttcattttaataatttatttaaaaaataataatgtatatttctatttctccaattacacacatatataattattttaagtaaatatttaaaagatatttgatttatatatatttatatatattttcaaatatgaaaaaaagagcataagttgaaaacaaaccctaaaatataattgacttaggtaaataggtaaaaataaaagctattttatttttatgtattttttaaaaataaaa

SEQ ID NO: 198240 - DNA, 738 bp, Cannabis indica
tttaattttttttcattatttataataatatttaatttctcaaaccaaccctacaatatatttatagggcatatatatatattataattttaaaaagttattaaaactgcgcttcggtactatctattccccagttgtaatatattggagaatatatcattattagataaaatgaaaagaaaaaaaaaatacatgtaaatacagacaatggtaaaatagtcatatgacgatcagtgatacaatctccttccccaaatgtcaacaaataaatgaataaaaataacacctgtaataagtaaacattatttgatatcacattatcaagaccaatacgtgtcttgtacgaaaactaataaaataaaattagaaagctcagggctaataatgtaaaattgtttattagaaagctcaaagcttgaaatcattacaaaaaattccactataagccaaaaaaaaaaaaaaagatggaaggagtgggagattttacaaccatagttttgatctttctctgtgtgtttcttcttttggctcttatcaagatcttccacaaactatggtggattccaactcgattacagaaatttttgtcattgcaaggagtcaatggtcctccttacaagttcatccatggcaacaccaatgaaatattaaccatggtgaaggaggtcaaagccaaacctatagtggagttgtcacatgccatctatcctaaacttcaccctcatatccactactggg

SEQ ID NO: 198241 - DNA, 1002 bp, Cannabis indica
ttttatttttatttttttcaaatgctgttttttttaatgagttttaaccaccaccaccaccaccatttgattacataaaaactaaaaggcatgtcgactgtccgagcttggagtagcagcgccgttggatcaaaaggcacgatgtattgtattggacggttcggatttcatgcctgttgaaatttatgttcgttgaatttttatttggaatctaactttgtaaaatgattttgttttgacaaatggtaatatgtgttttttgtttttaaataatcacgaatttatagttgaaagttaaatgatacattaattatttaagtctaattagtatttttttctccttaactttcacatgtatcaaatcatggttcctaatttttttggcgttaaaaattctcctgaactattgagatggttagatttaaagatttttgtctaattttagtaaaaaaaattctaacggatgaaagtttagacgacatgatttagtacatattaaagtttgagggggcataatttggtagatatcaaagtctgtggtagtacataaagaatcactgaaacaataaaaaattgaatgaaattagacaaaagtccttaaatataacaatctcaataattcagggagaatttttaaccaccaaaaaagttcagggggcatgatttagtatatgtcaaagttcgggaggaaaaaatcctaattagtcgttattaaatactaagtaaattcttccaattaagaaatcttaattttttttatctgtagtggatattatcattttacattacatgtagaagatacatacgagaaaagacaaataacaatgacctaaaagatctaaaaaaaacaaccccaatcagagactctaagaaaaagaaatgacaaaatcaacaacaattcaacattactctctacaaaagaaataaaaaaacctaacaatgaacaactcgtaggaggaaaatcttagcagcataattatgagaatcttgtacttgtgagaa

SEQ ID NO: 198242 - DNA, 991 bp, Cannabis indica
attctggaacttttgtaggtacctgactattaattgttaagtaaattgccacgtggcaatttctaattggtccaagtcattaaatatttatttttttttaaaaaaaataattaaaatataccaataagaaaatgacacgtggataatgacataatattttaacggttaggtacctacagagttccaaaaatataacttaggtattattaccgccaaaaattaaacttaggtatttatttgcaactgggagttaaacttaggtatttatgccgcaaattactcttatatttttcacttctcttatattttatttttaactataaatagaaacaaaactttgacaaaaggtgtgatgagaaaaactttccatttacgtccactgcaataagttagaaaatgatgtaaaaataatatatgaaataaaataatttatttgaaagaaaagaaaaagagctcatttattaatcaactccttcccttcccttctcttctcttccccatatatctcgaatatatatttttatatacaaattgagactttctttatttaattgacaatagaatacataatatataattattataaattaagtacgagagaccaatattaattaatttgccccaaaatatataccaactcactactcactacttcttctcaacctaattatatatatacacacacatacatgtagttgtatataatatatatgagtgtgttgtagagagaagagaaatctaagaatgattaattaataagttgtatatatatttattgagtgagtgcaattaatagttaatcatatatatatatgtaatgatgatgcggaacatggggagcacaaacccgaatcgaggcattgcggcggttgtcggagttggacccaagctcggtcgatccatcgcccggaaattcgcccatgaaggctataccgtcgccatcctcgctcgcgacttaggtaagtactaatcgctctctctctctctctct

SEQ ID NO: 198243 - DNA, 1254 bp, Cannabis indica
gtacagggactaaaaaagctaatgccgcctagttgattaatttttggagaagtgttaattacaattttttattataattttttagttaatttttacatttaaaattatatggcggaatatgttttaattttttttatagtagtattcgttatagttaaaatattatccctgtaaatttttgaaaatttttgaatacttgtttacaatgccgaaaatagagtttttgatattccagtttactatgcgcgttcaaaaaacttcaaatgtattttcggtactgtaaactattcaaaaatttacaggaatgatgttgtaagcataacaaacaccatcatgaaaaaaaatttgaaaaaaaaatattccagcatgtattttctaacacataaattgactaaaaaattataatatgagattgacaatatcactctaactttttttactactatagtaatgtgatgttgtaatatctcataaatttaattataataagtaaaatatattttataaaatataaaataatatgcattaggaaaataattgagtaagattataattttattgggataaggaccatctcaaacttttaaagggtctaggaaaaaattttaaaatagaatctttttttttaaaaaaatcaataaatatttaaacattattaatctgtttctctttttaatcagctttttgtaacaagtattagcttaggtctcttggcaagtgaagtgagaacttatagttttataaattcatttaatttttttccttaggctttgtttaatcagtcctcacttattgggttgggaggttttgtgacaaaaaaaatgctttaaagtttgagtttcatatatatatatatatggattagttgtaaatggaaacgtcaccaccaatagaaaccaaaacatattattttatttgctaatgtggcacggtcaccaacttgctataacaagttttaacaactttgaaaagccaaattggtgaggtggcataatagaatcttctattttagtttacatttaattcgagattctttttttttttggccataagaaatggtgattccacccaatcaaaacaagctctccttttaatgtattgactatatatttccaatgtaatgtttgaatagttttaatttttttttcgtaattaaaaaggttattcaattctctataataattcaacttattattttcaatattacatgtaattattcatatttacataaatgaacaagaaaaaatatcatac

SEQ ID NO: 198244 - DNA, 1328 bp, Cannabis indica
tcttatatactataataattcacattgcagtattccatgtttggttctatagtaacaattggtgcaatggttggagccataacaagtggccggatttcagatttccttggaccgtaaaggggtaatatatatatatatatatgatcttttttttcattatgaagatatagtagtttttttttacttgtactaacaaatttataatgtaggcaatgagaatctcagctggtttttgcatcactggatggttagctgtttacttagccaaggtataaaattgaataattgttgaatattattgtcaattgggtcagtttatgatttgaaagaaaaaaatctggttcagggagcaatgtcacttgacatgggaagattattcacaggatatggcattggaattttctcttatgtggtaacttccttgaataccacaactgttaagattttttaagaataataatatatattcaaattaataagattagtaatgaatgaaaacatgaacaggtgccaatttatatagcagagatatcacccaagcatctccgtggaggtcttacaacactaaatcaggtacaacagaagattaatttcatcttaattctcttaatgagatgattatgtaaagttaaaaaattcttatatgtttggttaattatttgttcttcagctcatgattgttcttggagcatcatttgcattcataatagggacagctataagttggagatcattagctctaactggtaagatatattgtgatagcattatattatgtgcttgaactgaatttaaggtactgatttctgagtttcttttaatctgaaggacttgttccatgcattgtgttattgattggtctacattttgttcctgagtccccaagatggctggtaagaatttggatcaaaaccaagcttagaaaacagaaaaagagagacatataatgtatcttattaagtacttactttgatcaattttcaggctaaggctggtcatgaaaaagagtttcaagcttcactgcagagacttcgaggcaaaggagccgatatcacaagtgaagctgctgaaatccaagtaatttttttcacctacactacagaacagaacatttttttttatcttatcatgaatacagaaaactaagattgttgtctgtttatataggtatatattgaaacacttcacagtcttccaaaagccagtgtagtagacttgtttcaaagcaagtatattcgttctgtcactgtaagaacttaatgtttcataccttgtcctcagatcttgttctaaaagactttcatttttaacttgtgatcttcatgaca

SEQ ID NO: 198245 - DNA, 852 bp, Cannabis indica
tggtaaaataaatattctaacaagaacgactgggtagttatttagtattatctcacatgtgatttaaatgaaacgtggggattgtccacgtttcatgaatagttacatttaaatctatcctaaaaagaataactgctaacctatattcctataaataggtgcagaatttcatgggaaagaggacgacaattgagagtgaattattatttttcaaattttgaaattgtactttatattctaaaaagatccctaataatgactcgtggagtacgtagattttaactacaaaaacacgtaaaaatatctggagttataatttcttttattgtttattaatttatgtagaatatttattacgagaagactatttaattttggttaacaaaaatctgcgttagcaaaccataaagagagatgttgagaactttttcttaaggttccgtaaatttaaaataaattacataattgtattttaaaatttgtgtaagtctatagaacatcccctaaagtaacgtttcggtagacccccaaccggtttttactttcagaagagttttcagttcatttttttttttttttttatggattgtatacgtttttatttaggatcacatgtaaattttcaaaaaattattaatattttataatgccaaaagtaaagtttaaatattttattgaacgcacagatattttttcttatatgcgtttcaagtaactgtttgaactttatttttaggtattgtactacaatttttttaaaaaaaatttataagtgatcctatatagctacaatgttcacgatcatatgaaaaaagatagtaataaaaaagctctcctagatactgaaacgat

SEQ ID NO: 198246 - DNA, 1457 bp, Cannabis indica
ttttgaaaaaacacattgattaatttgaagaagtttttggattattatataattaataattttatttataatttaattatatttgtgttaatatttaggatcatcatcatgtttataaaattctaacaataaatttgatttttgcatatgtatgtagatttatatatgattatacacgattaacagataaatttatattaattattatgattttttttttttttatgagtaaaaatatagggagatgaaaagaatatggttggtgttgatggttttgtgtttgagttcttcaataatcaagaatggagtgatgataagtgcacaaccacaagtgtcttctttcttcatcttcggggattctttatctgacggtggaaataataacatgctttcgacgttagcgaaagtcaactacttgccctatggaattgactacccaactggtcaacctaccggaagatttaccaacggacgtactgtggttgatttactcggtaattcatcgttaactatatggtgtggttaacatattctcaactcttgaaataaaatttaacggatatttataaattacgtaaatatttttatgtaaaataatattattgtgtgtatgttatactgtgtatttaacaatacgtacaatatctgcatgcctataaatatgtagacgaagtgtacatatagttaattacacgatataattattacaaaaaaaaacttacttttagtagtaactttttggttataatatatatagattttttgtgactttgaatcataacaaaaaattactttttattataacatagtctatttagatataagttgtcactaatttaattttagtcacaacaagtattgtaagtaaaaatatatttattcaggctcgaccctaggctaacgcggactaaagcgttttcctagagcccaaaatatttatataggatacttttttgcattgaaaaaatggtatttttgtaaagttgtatgaaaagaggctcaataatactcacactttgcattagatataacacacacaaaaatttttaggcccattattacttagggtcggtctcctgcatttagtcacaacaaattgtaatttttgtgactaatatttttaattacagaccttttagtgataacataaaccttttcactcacaatcgtaaattctattgtgactaaaagtaaacaaattttgtaacgaattatgataatgtttttttatcgaataattacatattggattaaaaaatgtgcatttaaatctctatcattcattgagttttattttgagatcattagttaacttcacatataattaatgattattaatttgttattatttacatgcagctgaatatataggtttcaatgagtctattccaacctttttaacagttaataattctatggactcaaaattaatacttaatggtgtgaattatgcatct

SEQ ID NO: 198247 - DNA, 790 bp, Cannabis indica
gaacatcaaaattggtaccttttctcacattacaggcaaggaaattgtaatgttcacctttatgtggctacttcccatttggatttttttcacttctggttgcctctggcatcattaagctctcaatcgctaaccagcttctttgatcaactcattttgtgaatttgcttcaaaatcaaaatgcggttttcattacatcaaaatacatatatgatcagtttttgtacccaatgataagtctcattacaagacaacaataattaacaaactcatcactaaggcaccttactataaacaattattatatattaagaagcataaaaaatattaaaatatattacagattagaaaccaaatttagaatatccttatatgaaaatcaaagcaaaagattattgaatgtgaaactgtaaaatagaatttttaaaaaacgatttagcttacccgtcatactcttcaccactcctcctccttagcctacctgccatacacttcaccactcttcctccttctcttctcttcgtgatttcctagaccatggatgaaaatagaaagaaaattgagagagagagagaacaaacaatttgaaaaaaaaaaactctgttaggatttcttatcggcggcgtatgtgcttcgaattgggggagttcatcgctcaataggctagagttttaggaaatttatatatatatgatactgttattaaatagctaattaaactgatttaaaaaaataactaattaaacaattaattaataggtcaaaatataaagtatatttttaaatacat

SEQ ID NO: 198248 - DNA, 973 bp, Cannabis indica
aaaccacttaatttaataataaatgataaatgtaatgtaaaatataaactttcctgtcattttttttttaataatacaagtattttttctttgactaatacttaagtgattaaagatactaaaacaaataataaagtgatcaataaaaattagtgtgacgaaagctggcacaaaggtcagcagctcggtccaaagagaaatcatttctaagattgcttggtttggggttttctttttcttccattaatttacagaaattcctccatttcaacaaacaatggcgatgacaattgaaggtaacttctgaatttcccatttactttattttatttaaaggggttcgtagagaattcatggaagtttgcggaaatagtgattttagttaattattttattcgctgaatatcgaattagggttttaactgatttcggaaagggtgttgattcgccggtgtttagtgttgagttagggttttgatgtatttctggcagttgggtatgctcttgtttggtaatcgggaaaatattgaatcaggaaaaatgagttgaaattgcttcagaattggcaaccttgagtgtgtaattttcgaagactagaataggggtgaaaatgaaaaatgaaggttattaaagatcgaaaaaagaaagaaaggtaggaactttgaaatattgtattgcacaatggtctgaaattatgtttataaatcagaagcaaaagatgaaatttgcaaatggtaaaactaaagtttgaacaaatagtacttctcttaagaaaatttggcgtaaaatactttaaaattaggagaaatttgacttgttttttttagtttggagtggttgttaaacagtgtgaaatcatctgcatgattcagcacataaatttgagtgggttaaggcaaattatatagctgattgaagtagaaaatggtcaatggactctactgtcttttcttgtaattgaacacctattata

SEQ ID NO: 198249 - DNA, 1287 bp, Cannabis indica
tctaaggacagaatttgaaaaaagtcacgagcattgtcagttttttaatacttagatgtttgtttggaattgagtttggatcattttgtggaaattttggaaaatatgacttgtttcaaatttttcttttatgaggaatgttcaacttaggtggctgtgatcataaattagtcataaaaaccaatgtacctcactgatattttggattttggacggtccccaaatatccccgtgaatgagtgagaacgggtgagacggttgatgaggtcttggaatgaatgagtggcgagaagcttagagaattgacaaatatcactcctgaaagactgaggatttatattgacaaataggaatgggaataaatgtttaaggcacatgaaattagaatgacctaaatgattatgccataacatgattgtactaattttattagactgggttacagaggaaagagactgacactgagagagagagaacaatgatttcaatggtgagaaaaaatttttgttgtacccaaaaattggattttggtttgaatcattagcagaaataatcaaatgattctgttgatacattcgaatacgcaaaaaggaagagactcatagaatggcctgtggtattgttggaacatttgctaaaaattgaaaatagtgacctgtcccttgccatgtggtcagaagcacctgtatccacaatccaaagagagaggcttgaataacctgagtgttgctttgatgtgcaactgaagagatacaattgaaagtgatatagtcttccatggagagaaacatagtggcagatggaggctcggctagttgggggccgccggagatcgagacggcgcgaaggtgcgacgacgaggatgcaacagtgaaggtgcaatggcggatttagggtttgaacgctggaggaggagaatttgagccgagatggacagatgtagtgtctttgtttgaacaagatggactgatctagggtttgaaagttggagatctgagctggaccggtgcacctaagaagatgatgataggacctggtcgcctgagaagatggtggttagaggcgtgcgattggttggagttggtgactttacctgaggtgcgactgatgtgcgcctggttggagacgtgcgagtggtcttcatgtgactaggacgtggcctgaggttttctagaatggtcgcaaagagaatggtgctcgagtggtgcgcctgagaaaatgaagagatgtggctatgggtgtgcgttaaaaccctattaagaatttttttttgaatttgatttcatg

SEQ ID NO: 198250 - DNA, 3102 bp, Cannabis indica
acttagccgagagaaagatagagatattgaaagagagagtgactttgctttgttgtttatcctcaattgaactcttagttcaattaataaaatcagctcaaaatctacattttagactttagaggttgaactaccttttcttggctattaagtaaactcaaaaagttaagggtaaaatggtcataatcaaattcctcataatatttcggtaatatcaattaatatcaactataacttctcgataccacattcacatacttataccgacgtgatatttctagccaaccaattgagtttttatttgtcggacctgaaaatattttatttcacaaatagtatttatattgtttatattttttaataaagtttctgtaattaataaattttacgtattttctccacttctaatgatgatctttatataactaattaacaagagtacagcataaaaagaccgtattttctgtaaataaaataaaaaaaatcgtacaaatgtttaaaattctgtaaaacagtatttttgtaaattttttgttgtttttgtttatttgtgaactaatccctatatagtacctgtattttcttaaaaaatatatttggtactttagatttttaataatacttatttgatactttatattttaaaattgtacatatttagtatcctaaaataaaatttaattaattaatacaattttatcaatatgaccaaacagttcttgcttatatgtaatcaaataattacatttgaatttagattcataaaattgaagacaatttgattgtattgatataaatttaacaaataaatttaagtttagggtaccaaatatgtttgatttttaaatacaaattgtcaaataagcattattaaaaacacaagatatcaaatctgtatttacatgaaacacaaaataccgacagtatagccattataatatgtgcaatctactttaattattataccgatgctaatattatatctaaaaaaagtaaaaatatctatcttttattacaaatatcaattaccctatctacgttatagttatttaagacatcttacaaaatttggagaaatttggaataatttacaatagaaactgtgtttaaacaatctatttcacacgtgtacaaaataaaacaataacgcgtgcaacaaacagtttgaattctatttttgatgtgttaatttttttttttttgtatttctcaaatttttttagaacatcttaaataactataacttacaggaccatgagttgactaaaaatatatttcagataccaaaatagataagggtcaggggtgcatcagtacattcctttttaagtggtgcattataaaattttctaataatttttatagaaattaaacctccacaaaactaaataaatttactaaaattgattataagttttatttaaaataagtatgaatactttttataacaattaagcccataaatagcaaaaattctaagtctatctatgtgttttgtacatatttttgtaagctcaccctatactgaaccctaccctaaatgtacactttaacttgtaggaacgttacatgtgtggttttataaattagtttataataataaactatcggttcagataaaatttaaatttaattaaaactttactaaatatttttaaatacataaatcatggcattataactttcaaagtcagggatctccttaaatttcttataaaataataccaagtacaattttattccaaaatacacttataagtcaaagtgtcataaactaaaatttcgataactcatcattgtgagttggatgagatgatatgtacatttaccggagaagacttctaactcatagttttcctagcttattcttttccttacctgcaccacaaaacttgtgagtcacatatgcttagctcgaaatataataacactacatcacatatcagtatacaaacataagcaataatacacatgtaatcataatcaagtattcacatacttaatccataagtagaaatcactctacacaacataatcattcattaataccacatatttttctaataagacaaagtattattgttactttatacaagaaccattattatccgatatctaataaggaaccatctcttataacgttgcttaattagacaatcaatgtcagtactgttacctaatgagataaccgatatataagaaacctaacaacagtttcaaaaatagagtagtaattttctcttatatcgctgcctaatgagacaactaatttataagaaacctaacaacgatttcaaaatagagtaataactctctccaataaacgataattatagtatcacattttgacatgctaggtggtacaattgtacttttttttttactttaaatctaaattcaagcgtgtcggtcaacttgagtagaaatcgctcaacgatccggggccctatgtcacaacaacggtaaatcaataaataactcatttgaacctgtgctaagacttaaactcaaaactaaaaatttttctatcaataaatagcatggcaataccctaaatatcgagaaaacataaaaatctaggcacccaaaaaataccccaaccaagtaatcggatccccaaacagttcatcgttttttgggatcctgcttggagaaacagttcaccataactacaaacttgagatttttcatttcaaacatacctcaaacttcctcaaaacctaccaaactttctaaaattgtcctaatatgagttctaaacatgtgtcgcaactcaaatagcacaactatggcaaaaatctctattcaccattgttgagtgagctttgattcctaaaactcaaactcacccaaacacaaactacaacagctaaatctatcaaaattcaggataaaacttaacatacaaacaattgtaaacccaaccaaactctacaaaacctaatccacaaaaaattcatacaaaaccaaacttaacttaaaattcaaaggagatgaggagaacttgggttacattgatcattcctttcaattcaacactagtacttctaacaaggttaaatggctgatttattgaaaaacaagctctgaaaccctacttat

SEQ ID NO: 198251 - DNA, 1392 bp, Cannabis indica
tattttgagttttcaaaaaatatgatttgccacaatatggtagtaggttattcaatttaatatgcttaactactctgtctaccataatcttttctttggggctcaatagcttttataagcctttcatttagtgtttacctgctctttgtacccgtaattaggaacacttgtacatgctaatactattactatatatgcttttctaaaagtattttgtctcctttcaaagaaagaaaaaagtatttttgtccagccaaaatatgatttattttaacttttgcttcttaactagctaattataatttttaattatctattggccactacggtactaccacttgtgttggtatactataaattctttagtcttaatgattaaccagaaaagagcaaagttactcaccttccctttttgtactttacttatatgcactaattatattttcatttttatttttattatttcacaataaaactaatatttattgatggtataaaatccaaagaataatacatgtcctatactctattcctacttccttgactgagcatatataatacaaatattactataaaccctactaagtgatgttgaattgactattttttcaataacttgacatataacattcatctgcattattatcattatagatttattatttgaaatatggtatatttgttattcattattatcatttgagagagtgcaaactatttctaatgcattatctatatataaaaagatatttgcggctgaaatatgtagtttattttcttacacttaaatatttatgtaatttttttggtggcaaattcttctgtagttcatcttgttgtatataaattatttagtggtaaattcttttatataattcatatttagcagcaaaaattataactgttacacatttgatgcaatattaatctttaaataattaacaacaatgaaattaatattgtaacaaaagactacataagaatctttgccgctaaaaaatttacatgtgaattaatttaagtgcaaaacaaaatgaactacatataagaatttttgccacaaaaaactttaaaataattatttaagtgcaataaagtgaattacataaagaataaaatttgccacaaattttcctatataaaataattttaatacacaagtatgataaatactattttcaaggatgctcacgagttacaaacaataatgtgagagacatttttaaagatgtttattctatttataatcatgtcaatatttttaagtttctcttttgtaatccttttgcgaattatttagctcacaattttttgtaaacttattttattcttagatatgacaaaagtatggtggtcggacttaccgaatgtcttttgagtctttgtaacttg

SEQ ID NO: 198252 - DNA, 1329 bp, Cannabis indica
attttttttatataatttatatttagcagcaaaaattacaactgctacagatttgatgctatattaatctttaaataagtaacaacaatgaaattaatattataataaaatactacataataatctttgccgctaaaaaatttacatgtgaatttaagtgcaaaacaaaatgaaccacatataaaaaaatttgccacaaaaaattttaaaataattatttaagtgcaacaaagtgaattacataaaaaataaaatttgccacaaatttttctatataaaataatttcaatacacaagtatgataaatactatttttaaggatgctcacaagttacaaacaataatgtgagagacttagttttgcctgagtttgcgctaatttttaaagataatttattttatttataatcatgtcaatatttttaagtttttcttttgtaatcgtttgcgaattatttagctcacaatcttttgtaaacttgttttattcttaggtatgacaaaagtatggtggtcggactgaaggtcttttgagtctttgtaacttgtttggttttgtgccttttaataaaaaattcattctatagaaacaataacgtgagtaccttaaaaaaaaacccaataatgtgagtagtcatataacataaaacaatgcaatcccacaaattttttaaatgattgaaatgtctctagcattgtgtataatctgtaagtgtgtctagtagtactaatactatttcatgtcacaagaatttcaaaagaactcgtgcggaagttcatgtataattgctatgttgtattattattacttgtggaattggggtgtgtatgtatttgtatctttatatcaattgtaccttttttttttctttatttcttttttcataatatcaattgtactctgatgcataggcctagcctcactcctttaaatgaatattgagataaagttactcacatgcactacaacttagtattggcagtactatagttagtaccactacatacatatccaagagcattaaagttcttaccacatattctcacttaaggaccacaaaagaggtcgttagacttctcatgcatatattaaccctctatttcctcttgcttgcatctgtctctctcaaacctaactaccatccaaaaatctccattaaagatttccttcaacaacaaaacaaaatttaaagagaccctttgttgttttaaaaatactggaaatagtattgctattagtaataattatgaatcaatattattaactatttgataattattaaactattttcaaaaggataactgatagtgggcactattaatatctat

SEQ ID NO: 198253 - DNA, 1806 bp, Cannabis indica
tttattttatttgcttttattttcttattttttatagctacatttttagttagcttaaacaatatatataaatataaaacaagtaaataatgtgtaaataacataaaaatattaatttttttttcttattttaataaatttatatatttttgagtatttatgaaaacattttcttcccataattttggatagtctatctgaaataagtgaaggggaaaaaataaacaggtactgaagggaggggaaatgattcaagctaataataataacaataattataatggagttgagatgaaaagtggtgttagaaagaaagaaagtgagaacatcaacaaaggtggtgccttgaaacggtaagtaatttcaatcatattgtcttatcatcaaacaaatattagattacatgtcatagtgggttgaaatacttttagtttgaggtgaaatttggtactgaatgcattgttgttaacagagtgaaaaagatgtcaaagatgacagaggcattaagcaaaacaatgcttgatggagttggtatagccactggatcagttatggcacccatgttccaatctaaagctggggaaaaattcattgccactgctccgggacaggtcctattggcttcacttgatgcagttagtaagttttcttcttcaataaatatttgacaaattggtctataactgtcttacataattaattttcatactaaaagagtggtgcatattgcatcatatactgaaaaataatcaacagataaggtgttagatgcggttgaagtagcagaaaagcaagctcttttggccacttccactgctgcttcaagagaggtcaagaagaggtcagtaaagaaatgaagttaattacgagtgagtaaagtgaagagttttattccattgcaattaactaataaaaagtttgataattgaaaactcaggtacggagatgaggcaggggaaaatactgcagatgctctagcaactgttggtcatttgggtaatactgcttggaatatcatcaaaataagaaaagcccttaatccagcttcatctgtctccactggagtgttgaagaatgctgcaaaaaaataagactaaaagttgatttattaaactttaattttgattgtgaagtgtaaattgttccatgtgaacataacatgaaagacttctattgtgtaatatgtattggatcaaaggagttgcggtggattttccaaggcatttatgttgtaaaggaaattcaaattacaaagagaataaggagaagcttatatacttataaacgatatacagtatttatattttatacacttgaggtaaaattttatttttaacttgcgaaaatttcagcaccgattaggaaaagttattattcagactctaataacactttgaaattgaataagaaggaataaaataaggtaatgaatagtaaaaactaaggactggccttatttgggtgagcagttctctcaaatttagtttctattttttattgtcaggcaaatcttggtttaacaaaatgatcgggcggtaatgaaatattgaccaatgagaagtggtcaattagttggtttagttgttcagattttaaagcaatacctgctggaaaaataattgtttttaatattatattattttttgagatatttgtttaaaatagattgttatacactttattatctcaactttactacttaattcatgttcaacaatcagccaatatgactgcttataaattagttgtgagtaaatattaaacttaaaaggatggaaaaattcaatcttcttcttcttttttttt

SEQ ID NO: 198254 - DNA, 689 bp, Cannabis indica
acaaaacccaacactttgatcactttggcagctaaagagtgaggaaatttatacaatcgccaagcttgcttggccagcatcgcctggttaaacatataaatattttgaaagtccatacccccatcttggttgtgccaacacaactattttcacgtacactaatgtattttttttacatttgaaccacttcaccaaaagcgagcagacatcctatgaatggactgaattactgctataatcaacacttccctacccgccattgaaaagaattcagacttctagccattgagcttgtgccaaattctatcacaaactgaattgagtaaaccacttttagtactcctagcaaagaacagaagccctaaatatttttcatgacactctatcatagcaacccaaagaaaattcatcattctatcccggtcaacctgatccacattaggactaaagcacacaacaaacttgtacaaaaataacaaattgacttgacccttgctcataccaatctagtagaaccgtgaaccgagtacgtataacatctgacgtcctcaagaagagaaaactatgatcgaagaataataagtgagagatgatagtacccccccacagccacaagggaaaccttgcaaaagagacttcgcacagtctctctttactaatgaagaaagtccctctatacaaataaggaa

SEQ ID NO: 198255 - DNA, 1547 bp, Cannabis indica
ttttttttattattttgtaaaaactaatgattaatgaactaatttatgcatttttctttcataatttgtacatatatatagtttaaactttaatatctaaaaattaataaattaaattatcctaaattttattttaataaaacttttttatgaatatttattttaaattttatatacaatttagaatactttgcttaatttggtaattttataattaagtttattcatttaattctactaattaacaatgttgagtatactttttttattttttttcctaactatatataagaaaataaaatatattattttatgagcaagtattattattttcaagactattttatagttaagactcaaatatactattttatggtcaactatttttattttaagagatattaattttttcttatatataatataaaatttaaaagaacagaacataacatccaacacttaattaaattttgtatcattaaatatttaatcttgtttttttttttttttgtttgtacgggattaccttaataattctttaaactcaacaattatatacctttagcaaaaaaatataattacacatatagaaagacaatatagagactagagagtcttaattattgaatgtgtatgtaagtaaataaaatatgtcaagttaatttttttctaatagttttttggtttttataataagtaatatgtctttcttttagggatgtcacactctttgttgcttttttgaactaggcaatgttgttttttaattttctttattttggtttaatgaaatgttctaataataatattaataatatattttccttcaaaataattaattttttaaaaaagttaaatatgtcttacgtgcatagcacgagtgtcctaattagtaaatatataagtttggatgggacttagttttgctcttttatgtttttcaatatggagtaatataaatgatgttgaagtaatttagaaatataatattattttattaaaatagaaaacctactctatcgatttttaagggaattaaatccgtcctagatatttgtcaaaacaaaaaaatccgtcctagatgtatattttatatagaaagtaaagtataggtttgaattttttttttattttttttaggaggataagcaactattaagctagttggagaatacggtgtcaagagatggtcaactattgctaaatttatcaaaggtcgcatgggaaaacaatgcagggaaaggtatataactatttattccatattatatatcgaatatttgctgcataactttccaaaaattttgagtttgtaacttgtatgaacttagttattggaatttccaaaaaaaaaaaagaacttagttaaatgttagtaaaattataatttctgttatactttgaaaattttttttcaacaatttaagtctgattacaaatttgaagacactaatgtattgatgaaattataattttattaagattaggttcaaacttaaaatttttagtaattatatttatatgcaaatattattccgttacatcta

SEQ ID NO: 198256 - DNA, 595 bp, Cannabis indica
ccaaatctctatgaatttatacaacctctgtcaaactagagccaagacacaaagcgaaaaatacttgtatgcatgtaatatattaaaatatacagagcactcgagaaaccactcatcaaattatgagtgctagaaaaagttccaaaataacaaaccagtcccaaattcaccaaaacagaataagcctgctctatagcccatagatcgaaaaaagtgttttgcctcattatcagtaaatggaaacgtaccattgctacgcgtacaatgagtgcagatttgctacgcgaacaatgagtgcatttgaaaaggtaaagtaattaaaaacaaaagaacaatagagttttgagatgtggttttttaatgtgttatgacatgggtattgtgttgattaggcaaaatttagaaaacaatataattttataaacttataaactttaaaaacttatttgttacctccccttataaatatatattttttattttttaaattatttttaattggtcatatcaagtactatgcatttctaaccattaaaggctcgtttggtacgccgtattgtatcgtatcgtattgtatcgtattgtgttggattgt

SEQ ID NO: 198257 - DNA, 755 bp, Cannabis indica
gaacttgaacccggatgagttcatgtcatggtatggtagttaaaatattaatttttttagtaagaaaaaatgtaaaaataattttaaaaattttgtgccaaacaccattaaattttaaaatgacaaaaactgttttttattctcacttttgaaaacacaattctaaaaactgaaaactgaaaatactattttttttttttcactttttaacaaaataaaaatcaactttttttttattaacgaacaaataaatttatgataaataactttagatattttttttgcaatcataaataactagatattggggtaataaaatggaagaaatttttatatttttcttaattgatgaaattggaaatatatttataaaagaaaattgaaaaattcaaaatccttaaaaaaacatttcttacatttttaaggattttttcattacatatttacgaaataatcccaaaaatattactatatatattaacaataattttctacgtaaacaatcaacaatagatataatattgtttcttgtaaaaataataaatacattttttattaatttcttttaatgatatttggttaattaaatggtacaagcgaatgcagtaatttaaaaaacgaagtagatataaaatgacaagaagaagaagaagagagatttcaagcccaattgcatgaaatcaaaacccaactgaaaatctttgttgaaacacttaaaatcaaataggaatgagataagttgagaaatatatata

SEQ ID NO: 198258 - DNA, 2035 bp, Cannabis indica
caagtactcaatcatagtgcgaaagactgtgaagaatccaacacttgaaggagaatcgggctcagatcttgaaaatactctgcgacagaagggaataagggttagagatataagtggaaggagacattttattttgctgccaccaatgtaaggtttcttaactttatatgtgtttaattccattgttttagagaattcatgttttgggtgttcatcaacatacatgttagtaaatcttgatcttggtaaaataatccccaacacatagacctatagagccaccacctgttgctaataggacataccatgaccctacttggagcaatttaaataatgcaggaaaccaatctcctttgtcaaattatcctcataagtccaacgattctaggccctgtgaccttgaaagggggaagggacctccaatcaactttgggggagggacctagaggctctaccgtgaaactacagggtatgagattaagagagtaaggacaaatgaaccactccacacttagaattatttccaagatgaaaggggtattttgtgtaggcacttctctcacgaccctgatggctagctgtatgagtacttccctcgagttcatggggaaaagttgaacctgagcaatcaattcaactctccttgtacttgtgaccctgtggaagactattttgaggggaagactcactatagtgccctagacgaccactctcgcagtaaccaatccaaggacgattctgtcgtcatacaagagaaagccctagcattgccttcacaaccccgtggtcaagaggcagcaaccaaacctaggtcaccgaatatctacgatcaacttgggaaatagaaagacctatgtgacaccttgaacaaaagatgattggtggaagcaagagcttctagcggtgaccccatcaactaggcaactgaagacccaactgggatgcaaactaccacccgtggtatcaataggcccgagtttgattccctagctaccctagtgaaggaatcacaactgtaaagctatcaatgtttgaattagattaagagcgacactcaccactcttaaatcgaattagatctttggagatttgtcctaagtttaagaatctcacctgacatcaatacaccaggtaagaagacccattgtctcatatccactattttgaagtacagaccaatttgcatggagtaagagatggcgtttggtggataactttcttgccatgttgacacgcctagctcagcagtggtacctcaagcttgctcctagatttatcgattcatggaaagagcttgtggatgattttgtaagtcatttcgctccattctaaaaatgccagatcgaacctagtgatctagtagatgtaaagcaacaagacgacgaatccctcaaggactacatacaacagttcttagaggaagccactaagatcaaaatacttagtgaggatgcaaggatcatggctctcatagccggactcaaggagatgagtcttctttgatcatactttcgtctcaaagcagtctacaccagaacaactttgtggatagagccgatgcctttataaaactttaagaagctatttctcaagccaagagctcaaaaaataagaagaagaaattgccaaactctgctgctcttgacacttaaacatagaaggaaatggggaattagaaaagtatgggggaaagagactaagtaatggtgaaaaacaggctaactcttttggcagagagaaagctagaattggagatagatccattaaggagtatgagcctagatttacaacttactctattttcttaggcccaagagaagaaatatttgaggcaactctgtcacagtgtcgtaccacaagcctcttccattcaaagagttagtgaagagagacacgaacaagttcggttactaccaaaacaattacagacactaatgagtgtcattagttacaggataagatagaattcttgatttgacaaaagagtggtaccctctagtggtatgtgaggtcagaagtgccaacaggaggcaac

SEQ ID NO: 198259 - DNA, 1426 bp, Cannabis indica
aaaagttcaaacatatttttgtgtccgtttagcactgcaatagacacatgtgttggagatgaatgtctaagattgtagactatggaatagcacatgtttgtttgaatagaaatcggtgatgcatgctataatactaattatatataacatatatatttgtgtgttaaaataattaagtctgtgtgctttgattttttatttttcttttggagtatgactctggctaaagggatttgattatatataatacatatatgagataccccacttattatgatgaacagctaatcttacttaatatattaataatgcagaagaacgtgtggtccattctgcttataattatgttttatttttgttctttttataattatttagtactcaaacctaaaaattgatagccttaaactactgttttctgtttattaggcttgtaaattaatcttaaaaagaaagataaatctcacatgtcaagatcctcggtgaacttgtgtctgttgtatacatactgtttaattacttgtcggctaattttacggtcccatcccatggaaataatgtctgcagaataatataggataatttaaaatagggttattggcggcttttatattttgatatatttttacacttaatgttttgattttttttttcaataccccataactcaattttcgtttacaaaattgaggtatgagttaaatttatagttcaatgtcaattgaggttgtcattgtatatagatatgtataggtgatgttaaaatcccaaaattaataaaaatatgtcaaatatatacagatacatacagtgacaatacagttaatatttaacggtatgatttaactaatatctcaaatttgctaacaaaaataaaattaaaagggtttcgtcaccaattaccttacctttaagaattaatggtgacgaaaccctctcatgtcaacaaatttaaataatgtaatattttttttatatttggtactttctgttttattaagatacacaattactgtgtgtttttaataatatttatattgtacgagaataaaaatggggcaggtaataagcagggaagtattcgtatcccataaccattaactgtttaaatatccatcctcgcatattctatattgaggatagggcgtgaaatccttgttgaggtgggcaatttccatgggagactttattaaaaaataaatgaaattataaataaaaaagacatactatataaaaattaaaatataatatatctcaaatttataatatttaatattctctaaaataaaataaaaatatttaagaagtttctaataataaattacaaaaacatattaaaaaatacgtacaataattaaaaataatattacaaaataaataaattaaatcccaacccatttaacattagggatcttatttttttttt

SEQ ID NO: 198260 - DNA, 1603 bp, Cannabis indica
ttttacccatttcggaaggtaagactctacaagctgtaacttcccatgttgcatgaggcctcagacccattgccctggcagccatcatgacaacaaaccagttccagctactacacaataccataaatcacaatcaaatagtaagaacattcagatcatatatatatacacttatataagtaattacccaatatcaaggacatggcaaggtgctgttatagtcttgttaatggcctcagcataggctcgattcctaggaaagtcattaagcatatccaagtacgaggtcatagctaacatgggatgttctgagtttttgaaaatttcagttccttggtcctgatcttcttcgatcacaacccactctgagttgccagtgagtgggtcaactcgaagctgaaagacacggtggttcgaaaatggagctcatggctctggcggctgtgacaagggagagaatggtccaagatgaacgaactgagaagatgaagggaatgagcatcagtgtcacactatgtgctcaaaaccttaaaaaagatgaagactttacacaactcagttcccatactcttcgctaatatagtaaagaaccaatttttattcgagggttctctctttctctcaaaataataataataataataataataataataataaataataataaataaaaaaataaaactttaatttgtggggttataagttaagagttacatatactcaaagaataaagcttttactttctttcgtgggaaatggcgaattgggagactttctctgtattcacacatgtataaatacaaaacatatatttacagattagatttcattgtgtttggaacagggattggtgggtggagctaatggcgggtgtaagagctttacagccaaattgtatattctgcaagatcgcctccgactccagcaccaccactattctccattctgtactctctctctctgaactaagacaaaaatgggtttttggttttggtgatgttgaagttgtgaaatttatgtttttgtgtttgggtgcaggatgataaaatcgttgcctttcaggatatcagaccttcggctttcaggttccatttgtatcagattagttacttcattcattcatatgatttgttttattgttagcttaatttaaagatttgttttacggattgaaatgtcatcacaagttcacaaccatagtgaacacaatagcagattatacccttttcattggattatgcatcggattggattatcacagcaaatctccctgtttttactcaaattttgcaactttaatgagatcacttgttttaagtagagaatttcgtagctaaaacttagttgctttgttttgtaggcattacttggttattcctaaagcacacatttcaactgtaaatgatcttcagaagactgcagaagactactctttgggtaaaatagagttacttgactcagattgaaacattaccctcttgagtcttgagtcttgacagtatcttctttgtctgatttttcatcttttccttttagtaaatcacatgttagaagtggggcgaacgctattaagccgggatgcgcctcaatgccagtatag

SEQ ID NO: 198261 - DNA, 546 bp, Cannabis indica
agaagagcaagaaaattgcagagcaaaatgaatgagtattggttttttaagcaatcaactgtgaactatgagtattgagttgaccattcaattcaatgcagtattaacctatcaagggaattgagtataaagacacctaaagttgggatcactactaaaaatccctgtaaagatttttccttgttgtccccaagatgattccaaaaaaatatattgcaatttttctcaaagaattttattggagtggaacctcttctttttccctaaactatacttgtccatgctcttggtctacatttttttgtatggtgcaaatgtacccaattaattttgattgcccatttagaagttattattttatcagatattgtctaagttgattctaaattcttctcaaataaaggccagaaacattgatggaattcaaccaaaaacacaacaagtgttaatcaaatgagtaatttctatttactatttctcaaaccagtcaaaaaaatcccttttcttttgaagaaaaatggtgaaagtatgtaatctacaaaattg

SEQ ID NO: 198262 - DNA, 1865 bp, Cannabis indica
ccggacccggatcgggacctgggatccggacccagacctcggaccccagctcggacccagacctggacccagattcggtctcgtagttggtgttgggatcgagtgtattaaaaatatattaaaactttatacaatcaattaatacaagtcaataccaaacattgtattgtattaaataatactaatacaatacaatacaatacaatacaatacaacacaatccaacacaatacaatataatacattacaatacagcataccaaatgaacccttacaatatgttcaaaaaattatattaatagttgatagtagttctttttttaaaaaaaaaataataaaaaaactcgttatgtatatataatttttataaaaaagaaattggaggttgtttatattactgttatgtattattagagggtgcttatcttgttcattgttgtttggttatttgaagaataaaatgtatattagtaaattattaatatattaaatacataatgaccacaatattgtggattgatttgttggaagaattttgatgacaccaaataaaaaaaaataaaaaagtaattgtttaataaaaagcgcgattactcaacctagaatggcgagtattcaaagggggccacacagacaaattggaaaaactaatacacaatgaacacgagagaagtatagtggttgagtcagatcacggtctacttagtctattattgcaaataattctatcttgttcttattcatattgggtcactcctttatatacaaagcaagtgtcttttggattacacagtacttaattaattactgaaccattttacattaaatatcgtcattaaaattaaggaaaacgtaaatgaaataaataaaagacagtttcaattcgttttactaaatacagtaacgtacgcgacctctatggtgcgagttgtctgttcatatcctcgcacaagctcgcgggcctagggtgcgtgtaggactaatgagtcttgtgttaagatatatgtgtcctaatcaagtcgcatataccaatatcttgttcgtgttgacaactcaagacgtgcgagtccttatcgggtcatcgatcacgataggtcatttggaccagctcgctaaacaaagaatcgatctttactagttcgtaggagaagttttcatagacatcgcatatatcttggtaaatgcgagacttgaacacgtctttcttagtcctacatcatgcgaggtataataatgctacttgactctatcaaggtcacatcacctcgctaagtttggttcaagcgagatttattctcgagtgatctctttctaacggctcagcaatcctcgaaaagagtgagtccacgtgtcttctttacgggagcctaatctcgagtttctcgataaaaattcacactataccaatcaccatgacaaattaaaacatattatcatctttagacggcatgaatatattttgttgaccttgaaagaaacatccatacacatttcattttcatatagattcttgtcttttgaaagggacaaggaccacaaatggcaacttaatgtttatgtatcgactgctgctatacgcggtcaccgaattccttaatggctgcctacctacctaatttatacgaatacatcatttcactagttagtggacatttacgcgtggtggaaaatgatgtcaatatgggaaggggaacaatatgaggtgaattagaactcaagaaaatacatagatgccaagactattgactaactcaattactaatactagtgtaattatatatagcgtcatatatatacgttatcaaaacttcttaatgaggttgagtgtatagtgcttcccactttgggttccatcacatatttat

SEQ ID NO: 198263 - DNA, 557 bp, Cannabis indica
ccattagaaaaagaaagctagaaaaatatatatattttccattatatatagctacattttatataaaaatatatatattttacattatattactccataactacattatatacagtgcatatatttatataatttataaaagttgaataacggggcttagttcccgtgttaacaaataaagaaatagcctttgacgggagtgatcagtggaagaggagagtgacgtgagatttatggagaaaatcgcgcgtctaaattcaaatccattaaatattattagtttacaaaaccctagattttatttatcaacaatcccatcccattcccacacctggccaggccttccggccagatgatcccctaacttattggattgcatgtaatttctttaaccattttcctttgctacgcttctttctctctctgtctctatgattcatgcccttgctgttttgctttgtagaatcaaaaacaatggctgccccgaggagtagctccacactgcgaactattccagaagattctacaaaatcaatggctagtccgaggagtagccc

SEQ ID NO: 198264 - DNA, 555 bp, Cannabis indica
ggcttacctcaaccctctaatttctcttttctcaaaaccctaaatcttcgttgcatcatgtaagtcttctttaaatacacacgagtgcatgttctgtgtgtatattatatatatatatatatatacatatatattcgtatcctcgtatatgtttgggaaaagaaaacaaagaaagtgacagaatagagagaatttttttattttattttttttatataaaaagtagaaaattggggttttgttgtgcttaattatttttgagttattcttttcaattaataatattctcttacacttttctgatttattcgattaatcctttgatacaaattttagaattagaaagattggtactgtttagagaagactaatatattcttttgactgatttatttggctgaatttccctttgaatttgactaaattttgtgtaatgttccagatatttgtgtccggaaccatacccagaagagaatttgaagtttcttgaggctaacaatattaggctctttcaatttggaatagagggcaaaacagtatgatctctctctctct

SEQ ID NO: 198265 - DNA, 876 bp, Cannabis indica
gttattaatcaattattaatgaaaatttatttgaaaataataaataaataatgataatgaaccgagtaaaatattgagtatttctaattttacaactcttaaaaaaattaaaaattaaattataaatctaagctccatcatcttgattcattctaagggtaatcttgtaggattatcacaagcctctaaattaatttaaatattttgaattaattattttaaataatctcttttatttaaaataattttaaaacccttaaattagttaaaatatttttaattaattttttcgtaaataaacacttcattttagacaatataattatcactattattttgtctttaattatctttaattaaataataaaatctttttatcatttaattaaatttaagacaataattatcttaaacaattaaagtgattaaagatttgaatttaaaatctaaaactaattttatatatatttaatattcaaattaaatttaagaaatgaatattccataaaataatataattattaattaaaataattatgataatttatagtgcatatacagtgtatatacactatatgagcaccatatatatcatatacattatataatatagtatatattatacatatatatacatataccttatggcgtccagccaccatggccacagtgaggccatgagcttaaagtcccacacactaggcaaatcaaaaggatccatcaacctaaacaagtcaacttctcatacagacggacgaggtttgaacacctgtgtattgcctcgtgagagttgtgacactgatgagagcacgaagtaggaccgataagccttggacgaggttcatcctgcctagatgtgtcagaccgttgaggccc

SEQ ID NO: 198266 - DNA, 1133 bp, Cannabis indica
tttatctctacaaattaccatggagcccaattttatagtggtcatcactggggtcagtttggtctaagttttagaaattatatgtattatagtatctattaacaccaacaaacgagttgttgcaatatcattataataaccctaactttggtaaaaaaaaaaaaaaaaaaataaataatgcagggacaggcctccgacatttgttaaaagcaattaaattagcctaataccaactccatccaatgaccacttcttttagggtgcaaaataactatattttattcctttagcaaaagaagtaaatttcaagtaaaactaatcatcctaagttgatatatggaaattttaaaacagaaatgcagacataatccagggatgtaataaatgaaaacacattaaaaatgaaatatttggtagataattagaaacaaatgaccatgtctaaaaaagcaaccttgctctgatgaaagaacaatattgctccctttatacctttgaccacttcaaagcaaaaagaaaatgtaaatggtttaagataagttttggtatggaagattcagttttacacaagtgccttccccaattaccttgttttcttttataaaaagtgaccaatacattaacccaaatacggataaagtctatattcttttttaaagagcataaatgataatgaatacttttgcacacatatttcctaatgtatattatggctacaaaagtaaaattgaaatgatttgtttgtatttatttttaataaaattcaagatgaacttcactttatttattttaattaatttttagagttttttttttctaattgattggggtattgtagtcataagcataatttagtgggtttttttaaggattattttacaatttacataaaaataataaaataaaaaattacaaaaattctgttgtacggaattttaaatatttttatgatttttatgattttatttactagaaaatacaatatttttatgttgtactcttgttaatttatttttgtatttttttattatttggttgtttattttgaatgttatttttttgttgttttttattgtatttttcattattatttttcgttgttatttttattagtaaaaactgtaaaaaaataa

SEQ ID NO: 198267 - DNA, 939 bp, Cannabis indica
cttgaaaggataactaccatactatccctccttcatattctctatcttccctcaactctccatcctttatcctctccatccatctcaccaaacatagtgttagtgtgcaacggttcacttcccactagaagaggtaggatcggactgtcaagtgttttaacaatatcaagcacaaatggagagatagatcctccctctcggatcttatacatttggttcaaaactatttttaggcttagatagaaagattttttggaatggttctttttcaaatttgtctttgtaattgtaacctatttttattgctctttctttattgattactttacataaaaaaaaaaaaagtgaactaaaatagctcaaaatttaatattagtgtttctctactctttaaacaatattttaataattcctcacttttctcgttctatttttttcatttaatatattaaactttttgtttgtataattaaaatatattataataaatataatatttaaatgatatagagaaataaataagttatgtgtggtattgttgcttggaattttttccaaaatagcaattcaagagtaaaccatgtgtccatgggacatgataagtgtataaaaatgcacattataaagtaataattaagtaaaaaaattaagttttagtatttatttttataagttttaaatgaaaaatttgttagagatgaaaatattattctgacttaattttatttgtgttattttcaaaatgtgcaaggttttaaaattcaaagaaaatgaagcccacattgaaatataatgctcacgtgtcaagctttctttttcaaattatttatatgtatatggtctaaatttatgggttgggtccatcattaaatagcccaactaaagctccaccgattgtaaatgcacgcaagctccaacaatcctacgaaagaggaccca

SEQ ID NO: 198268 - DNA, 699 bp, Cannabis indica
atttgtaccaagagcaaacattttcatctcctctaactttaaggacatttcctcaatttgaacagactttctctcaatttcttcctgacccgaggttaccttatccttctcaattgcagcttcagattctgccaatagcactctttcaacaaggtattccatcacctttgcgaccatcttcactgatttaagcatatcactaatataagcttcatcttggacatccagagaaccataaagctgacctatttcagtgcaagtttcgtcatctagacaattgaaggaagaagcatcaacgtctttagaccaatctgacaagggcgtaccatttttgtcaactagccctaccccttctaattgttcaataccacaatacgtttgggctaaatgaggaacagccataatccttgctttatatttcaagtacgttaacaatgttgtagttgttttaactctatgccaaagaacatccaactctttttttgactcttcttcagactctttcacatttgctttcacatccataaatttcgactgcaacaaatccacttgggatccctgttcttccatttcctgcttccaaatttcaagtgtttggcatagctcagcctttacatttgatgattcagcatgttcccctgttgccatcccctgtacaaagtttacgaaagaaaggatcataaaatgtcagcagacaat

SEQ ID NO: 198269 - DNA, 797 bp, Cannabis indica
aaaaaaaaaaaagacttacacatcgtaccatatttggaactttatatatattatatgccattccaatcacgctttatgtatgggcagtgcaagatgatgaaaatgatcacgtgaatgtgtagtcaagtttgaaatagtaagacagtgtacgttagattcccattatcccattggtctctaatctctgctatctcattattgccttttcacactctttagccaccactctcaattgcccaacactttatcttctttaaaaatatatagggaaccctaaatttctcaattttagcaatcaacaaaaatttattttaattaattaattaattaaaaatattcatatacaattcaaaaaatcaaatctacaacaaaaatatctaagaattaacatagaaagaaaaaaattaactattcggacgttacaaaaaattattaaatttatcggataatataattttgttaaaaattggtgaactgtaaataaatattactggtttctaatattcaatattatattttttttgaaagcaacaagcattcaatattatatatattaattaatgtccatagaaaactaaatgcatgaaaagaataattaataattttgattttatatacttaaaaaattaaaaaaatttattattaaaccaaaaacctaaaccctaaaaaaactatgcttttttttttcaaaaccccaaaaatacccccctcacaattcacccattctctctctgcatcatctctctctctctcacatcccaaccgcccaccctcaccaccacctccaacctccatct

SEQ ID NO: 198270 - DNA, 909 bp, Cannabis indica
cacaggattacttcagcataatccaatcttgtccagtccagtccaatcctgcgtaaccaaacggaccctttatattaataaacaataaagggccttgtcactattgacttcctttttttggtttaaaattttgttttgaatgtgaaatcatcttcttttttcttaatgctttaataacttgtcttgcactttctttatgtttatgttgaaaattatacatagaattagaaatgtttatatgaataatatcattttttttattatgaatttgctttaaagaaacatagactagctttatggcacttcgctttttctaagcgaaatatatataattaaatactttaaagaccaaatgcgtaatgttatggaaagactgtattagattaaaaatgtaagtgtatactgtattaaaataatgatggaaattttattttggtgtcaaattaagcacaatgtttaacataacacattattagagtttgttatacattacaatgcataagagatttgactctttattagaatttcttttaaaaatctaacctcttgtgacaaaaatattctttagatttacatgctattttttttaaaaataatttccatatttttcaacaatcatgaatttagccctactaaagttttttacattttggccccacccaaacaaatttttcctctgtccctgcttgtaagattcttcactcgaagagatccattggccggcaaccacattctctagccactcattgggtaatccacactcctagtcctagccccattgttgtgtctaaagctgtacattcgagccgcctcgccccactgatctttttcttttatatgtttaaaggtcatgttccgatcggcccataaacacatattatttgaagataagttgaggaatatttcttt

SEQ ID NO: 198271 - DNA, 795 bp, Cannabis indica
aaaaaaaagagagagattttattttaatcaatgagtgacataagtacaattatgtatttataaaaaggaaattacttaaatattttgatttttgaagtgtggcatttgtttggaatctggacacagatgccaaattagataaattatgtacgttgttgggttaaaatgaaatccttcatgtagaataatgtgtagaattggccaaatggctggggcagtttgttccagcaaattttcttaaaaggttacctctgtgttagaattggttttccaatagacaaactagttactatttacacgaaaactaactttgatgcatgtggatatcaatatttgacacgtgacaagaaaaaaaaatatatttatggagttgtgaaatcttgagtcatagtagtcgacttgagagaggtctctagccttatgcccgaattgattccgagaactctaaaatgagtgtttagatcccaacaagttgtttctaatgcaccatcattcagtattctgaaccaaaaaggcaagaataatccaaatctgcgacctgaaaattgaaaagagacgaaacaacatcccaaaagtcaatccgagtgcctaggattttcatctaacgtctaggattttcacccagcgcccaggttgacattcctaactatagtttcagttttcgagtccatcttagtgcaaatagctcaaattttgtacttagacatgaataagacttatcacgaatcgatcagaatcagaacacttaccatttggagcatccaggcacacagtgcacaggccacctagtgatgc

SEQ ID NO: 198272 - DNA, 725 bp, Cannabis indica
ctacaagtccaaaagcactaagagcactagataaagtaaaatcatcaaccccaacaccaaccctcctcatgtcatggaatgtttgaatagcagcaaagccatcattgttatgagaacaacaagtgatcatggcattgtagaaaacagtgtctctcatggtcaatggagtagcaaagaacacttcccttgccaacttaagattcccagctacagagtaagctgcaatcatagtcgttctagaaatgatatctggtttaggaatttggtcgaacaggttgcgtgcataagtcaaatttgatgatttgcagtatatgtcgatcaaacggttgaggatatggccacgtagacgaaacccagaaacgattatgtgggcatggatgtgttgagcaagagattctgaaatggggttgtgaaatcggcaaaattgcaactgggttgcgtatcgattggccaattttccaacttccatggctgttgttcggttgttcccataagtataatcaaaataaaacttaactaaaatatagctaaacaatgctcttaactcttaagcttttcgggtttgtttattgaaattcaggaaccaaatttatggggtttagggtttaggaaataatatttcaaatttagaaggttctataataattattaaggaaatgtttggttatttttaatttttttaaatcacacaaataaaaatagaatttatttttgaaaaaaaaata

SEQ ID NO: 198273 - DNA, 696 bp, Cannabis indica
agtctagtggtgcacaaaatgtagggtgatctattcaactcagctaacttagactgaattcgatcctataaaattaaactactacaaaaatccattttcatgatcatcaaagttggacacactattacaaaaaaggtcttcctattagtaaaaaagacagtaattatggaaattatcagaatagctaagcgaaggtttttcctatcagtttagcaccgaaagaaaaaaattattgagatagctattgctgatcatgaagaactgtggacaatattaaatacaatttttttaaaaaagtgtggcccaacagtttataattgtcggaaatactaagtaacccgacgatttaattataactgtgggaaattcttagtatatttgatagttatacactatcaggaaagaggcttagtatacccagggccggccctgggcataggcgggctaggcctgtgcctagggcccacctagtccaggggcctaaaaaaaaattttgtccttttaaaattacacaatttttttgctgattttgaaaaataccatttttttctaaataaaggcccaaaaattaatttttaccctatagcccactacatttcagggccgggcctgagtataccccatttttggctcaaaaatttcaggtctaaacccatttcgcatttggctcaaacgaaaaagcttctctctctctct

SEQ ID NO: 198274 - DNA, 548 bp, Cannabis indica
attgaaaatcactaataaaaaaaataaattaaatttattattatggcacaattaccaccaaaaataccccaaaattgggccaataattcttttcatcctcacaatcaacaaccctattgggtcgacgagtttcttgatttcacggcggcgcgtagaggagcccaccgccggtcagccagcagcgattccatcgcctttctcgaatcgacgacaaccgaagaatttaatgccaattcttctcgtaattctgctgcattgatcatgatgcaaagctccttcgataaattagatgatgaacagctcatgtcaatgttttccgatgagttttccggcgccggcgccggcgccggtgacggagtagtttgttctaatccttccacgtctaattctgacgatagggatagtaataataatgatgagaagttgtcacagaagctgaaatctgaaccggaggaggttgaggaggagggttgtagcgaaggtgatgagcacgcgccgccgttgaattcttcttctaatgctgtttcgtctggggatactgtattcga

SEQ ID NO: 198275 - DNA, 949 bp, Cannabis indica
caattcccccaactctgcgatctggttctgttatgagaaatcttgaaaattcttttaggagttctagtgatagcaccagtaaagttagaattacttttgagcatattgaggaagaagtctcattctggacaccttctgttgtatgctatgttttgggggccaatcctccattacatgtgcttgaaggttttgtcaatagaatatggaaagataaaattgataaggtgaaactattggcatatggagtctttatcattcgatttagctctatagaatatagagatcagattttgaatggagggtaaattttctttaataggaggcctgtgataatgaagccttgggacccccatgaaaattttaagaaagagaatgtgaagtgtgtgccaatatggatccaattagaggagttggaactgaaatattggggtcaaggaaccctgtccaaaattgtaagtcaggttgggaagatggttatgcttgatttggttactagggagagagagcggttgagctatgcaagagtcatggttgaggtgatgatggatcagaattttccagattttctggaatttgaaaatgaattcggttcaactactacagtgaagctgaagtatgagtggaaaccagtggcctgttctcactgttctgggtttggacacacagcggatgaatgtaggaaacactctaatgggaagccacaatgggttataaaaaaggataataggaagaaggttgagacagatgaagagggctttgtgaaggtgactcgaaataagagtaaaactgagcagaatgaatcaaaagttactgggaagaagggggcaagtattagtaactcttttcagatttcggaggacaatgaagaaagcttgatagaacagttaatggagaataatcatgagacagaggggattgatgctagaaaggtgattaaaacaagagaggg

SEQ ID NO: 198276 - DNA, 1213 bp, Cannabis indica
agtgctttaagggacttcttttataatttgatccaaattcagaatcctatctggtacaacaaaccttgcccaatcaatgcagaaagttgatccaaattccaaaaaagcttaaactcaaataaaaaatggagtccttggttggtcaatgtacttagaaagtcctcgagtacttgcgaatttcatacattatggaagatatggataccaaatccttgttgagtgcagagccaccgacgatcttctttatgcaatcggagagtctggtgtagtagaggaggagctgagtcaatgcagccctcaatatttccataccacacaagaagttgctgaaagaggtgatgacatctttgtgcatcagctcaatggcaactttccatctactaccaaaatctttcaccagtggctcaacctcaccaacggttataggcttctcagtagtagcagttgggtcctccgctgttacacagtacaaaattggaaaatcagtaaatttgtttgatgattcaacagagtacatactagttgtcgattacaaacttacaagctcgagttttcacaaatttgatcaagtcattgaaatgctcaagaagcaattcttcctgcaaagataaacaaatgaaatcaagacaagctacaatgcgagtgaaagaacaggacaaaataatgcaatctaattaagaggtctcatagttctctcttgtgtgtgttttttctgttcactttaatattttatggccaaaaataaaaattgaactgttgtctttcatcattaaaagtttctgtgtgatgttaccacaaacaatgcagtgttactcttcaacaactcctcaaagtgcatttgaatttttccaccttctgggccagcttcctgaaatataagtgccaaaggttgtgtaatagtcagaggccaaaggatatagaaaaattcttgaccaaccagcaaagtatcagataaaaggtattttataaataagaagaccgaatccaacaaactcatcaacatgaatgccttgttcaattttatggtagcatagatcccctaatttaaaagcagaatttaaatgatccttttaccttcagcacagcaattgtcatatcatagttgttaatcaaaaacacagtttgtagcttgggtttcgggaatgtcttggcaagcttaatcagcaaatcatcaatagccattcgcaatctttctagattcaaatcaagctgc

SEQ ID NO: 198277 - DNA, 611 bp, Cannabis indica
actttctaattctcatggcctcccacgagaattgattgtaattacactatgtaatcactaaaaactttctattttaaatattatgtaacactttaatatctaagacaccttacgtgttttctattcatatataattttgacctcatatctaatcacacattatttttctgtgtaattaatgactattttgtaattctattatgtaattaataactagtttgttatataaaatattaggaattcatattttctttaacgctcaaaatgtgacttccactagtggtagttgtagtataaatcgggcggtcgattccataaggaggtgattatagacaaaatgctagtagaaaagtaaacacaaaaggttaataaaaaataaaaaataaataaccaaatgagtttgagggtttttgttttggtaatcaatattaaaagaaagtaaataaaggtgtaatcaatagtaaaagagagaaagacttcaagagttatccatatacttacttagctattttgtagttttgattcacaaagttcatacaaaagatgtagcattaaagattattatatttttacgtaacaagttcttacaaataaaaagaaataatttaatc

SEQ ID NO: 198278 - DNA, 562 bp, Cannabis indica
catttatttgactcattaactttattatttatttttttataacctaaatgaaaccaaaactaaaacaaagaagcaatcagttttggctatcacagaaagcacttcaagagagaaaaccagaaaaattaagggattcagcccataaagcaatcttatgagcatttgggttaacagcacggggaatccacacaaaattacaagaatcacatgtcttaaacaaagaaaacaattgcagaaaaatagatgaagaacggcacccatcagattctgaggtttaatgctaatgtttgttagttggattggagaatggtagcgatttaatgattgtcatgcttttaaggattttagatttttgattgtttatttgtgatttataattctccaattgatgtttttccatcagctagatcttggcacctgatatgctattcaattaatattgataaagctgctttgtataaattgtattggagtatttatgattggtttatgcaattttgttcccttcacgtcttgggctttttttttttttaaactgcttcttatttgatttgagtttgtt

SEQ ID NO: 198279 - DNA, 1392 bp, Cannabis indica
acacatttttattaaataaaagggcgattagaatttttgtccttcgaactttaacatgtaccaaatcatactccctgaacttttaaggtcattaaaaattctccttgaactattaaaattgttgaatttaaggacttttatccaaatttaagaagaaaaaagtctaagttcaagaggcatgatttagtacatgtcaaaatttaaggggcatgatttggtaaatatcaaagtctgggagcatggttttgtacataaacaatcacgataatagtaaaattgaatgaaattagataaaagaccttaaatctaacaatttcaatagttcaaagaaaaattttaacgactagaaaagttcagggggcatgattagagaaaaatcctatttagtctaaaaaatatgagaaatcgctaactaaccacttataatgcgtgatatcggtatgatgtttgaaaccttaaaaactcatttggtatgtcgtattaggtagtattatattgtattacattaaattgggttgtatatcataactacatataattttatatgtaaaaatattgtatgaaatataattttatataatactattcaatacacaataataataataataaggtgtactacaaccttaaggtgacaatagcaatgttctctcaaaatacaagagctgaatttaaaacatgaataattgagcaattggagatttcactaaacacatttattatattattattagtgtttattgaatttttggctacaccaaagtcaaagggtggggctctttgtgtaaatcaatataccaaccaaagtcatcttttcattactccctttcatttgtttaaattaagaagtctcaatttctatgtagacttataaaataatttagaataaataagaaattaagaagaaaaaaaaaagattagttgagttcaccagaacacttgctttatcttccaacatgacttaatcccccaaatattttcaatattaatcaagatgttatatatgaagaataagaatctttatagttgaagtaaatatttcttaatctggaaataaatcttttaggaagaaaaggggataaaactagcaaatttaatggtactaaaaatgttttattttggttataaaatgctatagtctctatttatatagggcgagtttatattcagaaaaatcacaatacatatttccaagccaaaaatgaaaagagagtttatcacctgaaatctgcacatgtagaaatcatccccaaagaaagcccttaacccatccaagaaactcatctcaggtttcctgggattgtaagcaacacctaagattaccatagcttttactctgtcaggcctgaacaagcttaagtaccaagcaatgaaagctccccaatcatggcc

SEQ ID NO: 198280 - DNA, 1121 bp, Cannabis indica
ggtgacttttataaaatacgaatataggattaacaaaaaacaataattctaatctagtaaaaaaataattgaaatcattaaaaggtggggtgcaccattttacaagtgtatataattccattttattattattatttttagctatttttttattacaagtgtagactaaattttttgaacgagtcttgttgtgcaacccaatttgtttaagctctatttttggcgtgttaaattttttgaatcttataaaattttgcaggatgttttaaataattacaacatacgaaatcatgaaaaaaattagacaaaaaatttctctcagataacgaaatagattgagatacattagtgcatcccttttaaggattgcattgtaaagattttcattattattttgaggaaaatgagattattatttgggtgcttctacaatgtactcccttaaaaggaatgcacagatgaaccctctatttatttcggtatttagaaaaaatttcagtctactttttttctattggtgtatggtatagttatttgagatatccaataaaattttaggaaattcagaataatttacaatataaaaagtagtgttcaaacaatctattttacacgcgtattaaataaaagagtcttgcatgcaacagaatgtttgaacactatttttagcgtgttaaatttttctaattctctcaaatttttgcaggatatcttaaataactacaacatagacaaccatgaaaaaattaattagactaaaaaattatctcaaatgtcgaaagagatagggattgcattagtggacccttttaggggtgcattgtagattattattattattattattattattattattattattattattattattattattgttgttggaaagatttggtgcttctacgatgcacctcataacatgagtgtattgatacaccccctatctattttggcatttagaagaattttttactttaatttttttatagtcgtgtatattatagttatttaagatatcctgtaaaatgttgagaaattcgaaataatttacaatacataaaataatatgtatatagtttatttcacgcataaaaaataaaagagtcacacgtgca

SEQ ID NO: 198281 - DNA, 1382 bp, Cannabis indica
tatggtagtatttttttttttttgatgatgcaatgtgaaaataataaattatgtatacatcaatatctggtcaataggcttgaaatgatgttacctattcggatttgggcttgtatacgacaacgttttggtgttgaagttttgaaaacaatgttctggaatagatcctgatttagccattagtaattaccatttagaatatttattttagtcaatgggtttgtttaccagagtttctcatgaatgaatccttaaagttccgatgcagactaaagtatgaaacatggcttgaaaaatcaatctaatctgtctataaagtaatggtcttttagttgatggtatctacaattactgtcattgtgtcctcctttttccgcatcttttctctttacaaatacttctcttttatttagcttttcaaaataatagtaataataagtgtatactatccttaattattgatagaaaattgttaaaaaatacgagtggtaacttacactatctttggtatcataccgataaatatcaatttttaaaaaatataactaattaatcatgatacgtattaagtacttttacatttgtttactaataagtaatgggaatcaatagtaaggtaatcattcccttacatttgtttacttacaatattaaaattaggaaatgaagaacttaattagataagagagaatttcccctactaattttgtaagggatgacattaggagtaatagattttaattatttttattttatttttaatattaaatacataatgacaattttattctttaaaatatgtcttacaaaataactattatataatataatttaacttaaaagagtaatttgatcaatgtaagtattttaattatattttttaataaataaatacgataaattacaactattccatttttaaaaaaatttagtaaataatatattacgaatattaattccgattattttttatttattccgttatatttttctattaatttattctgatagtgtacaataaacatagtgatccataacaatacccttattcataaatggcatttttcgttggatagcgagtgggactggaatttgtcatcccaatgagatgtttggcactttcttttggattggacaaattgcccaatgtaattccatttatgtgggatatattaattgcagtggtgaacagttggtagttctttgagtagaaaattgataagtcctcaacacctttaatcatgtctacagtatcacttttgcggcgtacttattaataattaaaagaactgaaagagatatggagagtaaaaatgaactcaacttgcaaattttgccaaagaaaaaagaattgagagcaggtagattatacatattcaggt

SEQ ID NO: 198282 - DNA, 750 bp, Cannabis indica
aaaattgaaaaacaaaagaaaaatttacacatcaatttcattttaaagaaatttacatttcttagagaattattaaaaggttaatttttgtgaatgatttttgttaatttttgtaaagtgaggccgaccatgtatacatacactggtgtaatatcgttattagtgtaattcaatatcagttctcacttattttaatttaataaaaattacagagaatcgctaaccaattataagacgtcatctcatagtggtattaagcaacttagtacacatagcaatgcttttaaaataatctttagtaattataaagaatcgctaatcaattataagacgtcatctcatagtggtgttaggcattttggtacccataataatgcttttaaaataatcttttagtttagtgttaaagagtcattttaacacacttttcttagtcccctaaacttatagtgtgtagttggcttgttagatgcttagactaagaggttaaaaaatccttcaattaataaaaaattatttaaaaagatgaaaatgtttgttaccataataaacagttccaaaacctccatgtccaagttctcttttagaatggaagttattagtagcttgagtgagatctttgtaagaaaagacaagaacacccccaagatagccacttgtccttccttgtacatcctctatattcatataaggatcatcagccatggtttttgtaacaacatgtttttgtttcctgcgccacataatgat

SEQ ID NO: 198283 - DNA, 1415 bp, Cannabis indica
aaaaaaaaaaaaaacaaataacagaactatataatagtcttcgaaaattggaacatgagagacacatataccactgttaacatatatataccaatgtatccagatttcaaaactaaaattataaagtcttcctattgttagagaacactatacttagtgtttgttaggtatattgagctggttgttagttacttgagtctattgtttaatttagttagttttgttattatgttatagaattagtttctaaacttgcttaatagttctctgttctatggctatatataatcatctactctatcgtaatctttcattaatgcaataataaagtttttcttttctatcacttttcactttcgttcatgctctttacaccaagttaaaggcatatatcatgtaatccattgtaaattatacaaacaaaaacaaaaataatttaaacttgcccattctaatcactcataacaacaacatcaacaacaacaatgcaataattgtccttaaatgaattttacaactgagttcttctatttagttcccctattcctctgaagagaaaaaatttgaaagtctttgccctttgttcaagaaacaaattcacacatcaaagataatcaaaaataaagaaaaattaaatataataatattgacaaaaattaatactaaccacgatgcggatctccgacgttacctacagtaacaaacactcgagagatattcaatctcaaatggtaactcctattggattgggctttacaagaagaaaagccctaaagcttttccttccttaaatgggagactgttccctttattcaatgaaaaaataagaaaaaaaagcacatcgtagtcctctgttttgcggatcacacaaattaacatttattaaacgatgtgtcacaatattatttgttcaaaaacaccccaatctaatggcatgtttagtttattgtaatcaacattgtaatggaatcatgattacaattctaatatttagtttgcctttaacctctagtaatgacatttcagtgtaatcactattacatttttttggctgaaaccaaaatttttataaaaactagaaaaaaaaatccagacagatcaatcatgagtagcaacaaggggtgctacatcccctgcacaaaacaaagagacccaacaattttatgggacgcagcccaagcaaccatattgtgagcaacaatatttttgctacgagaaatccaaaacacacagcacttagcatcaaaatccaaacaaaaaaataaatacacaaacagattagtaagcttccaagaggagatagaagaatctcgaacagcactaacaagagagaggcagtctgagaagaagaatcactattacattacttgtatgaaaagtgattatactccaatacctcatgaatcctcattaca

SEQ ID NO: 198284 - DNA, 1558 bp, Cannabis indica
aatttttttctacaccaccttatatatttgttttatataaaaattatttctttcaacaaagcaatttaaaaaactacatataataaattttgaatttcttaataaataattctaaataataattaataaaattgtgcatttaatttttaataaataaattattaataataatataaaataagataatatatttataattttactatatattagaattatatttttaagcaactatttattataatacttaaaatattaaattagtcgcgggaagagcggctatattgcctagttatataatattatcaaataaagaaagaggtgtgtagaaaaatgactcagctgagttttcattctttctcaaacctcccgatttatggggtaatgctataccgcacaaacaaaaatatgggttgggcttcgaccttgtctaacatcacgggataagttgagaaatatcttttttttttatctattaatcaaatatatttgtatattatattttattaaaatctacccacttttatgagtgagttatctaatatatccttaccctccacttagtgtagcacatgatttatattaatttaaggggtataatggggacatcatttataaaagtgggtatatcttaaagagcatagaaatgaaggtaaaaattaaaacaaataaaataaaaagggtatacaatgcaatttccaccaacatcgcatagtggattaggttcagcccgatggtttacatattaacacaaattcattagggattatttcacgggaatttttcgataatatacttaatatacaatctattaacaaaaataatgttaatttacttaatgcaatcctattaacatgacacgtcatcacccctatcgtgaaatcaaaataatcagaacctgcaatctcactcatcaacgcgccaacctattctattaatcacaggattgaatttcctaacagcgcgtgatatataaacaataaagaaacctataaatctataactcaaattctcacaattcaaaccaattctcacaaaaaacaaaccattaacgaacaaaaaaaagcttccttcgacaatcgatcaaacattctaaaacacaatttgtttatcaaactgcaacaacaacctgaaaaattgtttcactacaattataaaaaaatcaaaatcacaactcgaaaccttctctccaaaaatattccattaaagaacaaaaaaaaaagtttctgttacaaaaatgacacctagtcgatcaacaaaaattcagaatcgacgaagcaatcagtcattctactgtacgacagatcaaccaaacagtcgacacagcaatgcaatcaaaaatctaaagttaagcaaagtttacctttcgcattataattgacaacatgtccgtcttcatcatcgatgctttgcctttctcactcttctgaatactagtcgcaccaccaaaagctaccaaaataggtaattataaaaaaataaaaatacagaactgattattatacaaaaatactttattaagtatgtgagaaaataattttttatacatatacttgtc

SEQ ID NO: 198285 - DNA, 777 bp, Cannabis indica
aaatatgcacttacaaaaaaaaaaagaagataaaactttgtggtcttaatacacaccattttaaaattcttgcctcttttaaaatttatgaagtatttttttggaaaactaaatttgtgaagtattgattgataatttttttttttttaaaaaagacccaattttaatattttgtccaaggttcccaaaccgcctgggtcggccatgaaattatataatactatattttagtcattcctaactttttattgctactaaaagatatttagtcacaaaaaatttatgttgtcactaaagatagttttttttttttgtgtagtgataaacccgactctagcctaaaaatagaacaccatcccttcatgctaagggttcgaaactcatttcagaaattggctaaagtttagggttgtaagactttggcaagaacactctctgtaaaaatactttataatttttcaagcttaataatactagctcgtggactaaggctatttaaccccaaccactcttatttatttcttaaagcattttttcttagcttaatttattatcaagtaattcgatttccaaaaataataccaatcaaaaccatttgggtactattttatttatttatttatttgctatatgagtaataaattaccataatatttaatatttacaatgagagaatatcaattattacatgatatatatctttttttaactaaaatgacgttggagcggtaaaatagatcgaacacaataacacgacttaaaactcacacgaaataa

SEQ ID NO: 198286 - DNA, 2472 bp, Cannabis indica
agaggactgatttccttcattgtcaagttcttcatctatttaatggatcatgatagaaataggattagtcacaattcgttgagccatgaattgtttgggctctttttacgatagggaggatgcttgtggaggagaattatctaggctttatttttttcttttccttcttggttttttgttgttattgatttttgtcaagcattggtctaagttggagaagtgagtgttcttgtgaagagactaagaaaggtgatgtcagagaagtctttggcaatgttgaaaactaccatggcactgatattgtattttctctaaaaagcattatatttcctccaaaaagtgttgattgagaccctgtagagtatgcttctctttgaaaaaaatagcttttttaagagattcttactgggttttcacggcttttatttcagtttcctttcccaagaataataacatcagaatagaatttgatttttatgatagccatgagttcgtaatgcgtctgttgaatctttttgtcaacttttcaatgatcatgtcttgtgattgttgtttgaccattttctctgtgtgggcgattttttttttctacccattttaagatatggttatgggcaattatattttttgtttgccaattaaatacttcttctgatgtagagaccttttgtagagttccatcaatatttctagctataggattttgaatttttagttggtgggaagtggtaccttgctctttagttttttcaaaccacttgagaagagggaaatgtacatcataatcaatggatgtattggggattattatgtttggattaggaagtgattgaactgatggttgaatagctggtcctggaaatttttctccatacttcttcatccattttgcttgttttttgtaacaaggcaagactatttgtggcagtgaagctattgaagaatcatctgaatcccatctggtgggttctagtataggttgattgtagccctttagtgtagagtatttgactatatatagtcaaattttctgaatgattagcctaatagactgatgtttttgttgcccttttctagcttttgcttgagttgctttcctggagtgggatgtcctgatggcttatcatcttctagacaacttttgtagctacaaacatcccagcatttatgcccgtttgaggattcaaaagcataaattggctttccttgggaataagtacataatctcttcatctattggctggatgggtgtgatgccatattgggtgcaaaaatagctaggtagttttgtttggcttctgtcaaaaataatttcaacaaatccatcttcttttatgtggtaggaaggctcgattgtggtttgaaccatgggctgtggcttgtgaagcttttcatagttgctgacccacgatttggataaaagctttgtgagttcttagtggtcatttgctttgggacatgtcggtacttgtttggaatcaattgagaaagtaaagcgtcttgtgcttgagagatgttaagatcaagagcatgattttggagtcgatatggcatctaataatggagtgggtcgccaagagaagttggaccttggtctctcttattgttgcacttctactttaaaagcatcagtcaaccaattatctctgagagacatgttgaaaatgggaaacagagtgacgaccaatgttcctgcatttaaagtagtttcaatagtagctatacttgcatgttgatattttctcattcgagtatcaagaagaccaatacgagcgctaactggaagtcctttcctgccatgataatttagagcaaggcgaatagcaccaaagtggatgtgcgtataatcttgtgccatccattatggagagagtttaggtggaattttaagagtcacaaattggacttctggtgttggtgcaagttggcactggctgaatttggaggcttgaatatattcttttggagctctgaaggatggtttaataagtgctttaatggatctagtaaaggtggaaggagtcttagtgaaaggttgatatagatttaagagaggaagagaatcttaagtaattttattttcatctggaacataagaaagctctcataaaggaagtctaacttatttgaagtcgattttctacacataggagagggtgtaagtgcaagaggggtcgaaagaggagcagtgagtgagcttgaggtttcgtcgaaattagccatagtgtaaagtagagactcatccataggatagtatgagttaagttcataagttggttagtgatattctctaaatgttattaccttaagctatataagactcgatacttaattctatcaatactattatgaccaaaaaatgtgttagacacacatatgcctttttgaatttctcaataaattatggtgattcacatttctcaataattaaatattgaatttctattacatatttaattcaataattgctcc

SEQ ID NO: 198287 - DNA, 1159 bp, Cannabis indica
ttcaagtatactaggggatctttttacctttgtacatcttccaagttggcatcatgaatttgggcacagacaagacattgatgtatgctgagaaaggtgttactcttgacctatctagcttaaggtctgatggttttgggccagccaagcccttgaggatgtctcgtatttaatccgactgtgcttgcatagaaggatctgatgctgcagggacctggttgattgacccttcttgattgagctacaaccctatattggctagacccttctaggagagagtatgtacaaggccggccagccttgaccctaacaaatgttcatggttggcaagccctgtgcttggtagggcctggccaccaattctttcttgactggctggttaaacctatgcgttgacatggggtagatcacactaattgctggagttaagtggatccaagtatctaaattgattggtctcacttctcatgttgttattgccttgggtgttttcacctgttcccggacctacccgattaaagattggcctttgggttactcaatcttgaatgctctgaaataggagttcaccctattagtcaactagatgtgcacctctaaggtgctggctggccatgggtttgacaattggagtcgttgttgtgccagagacccctgactaccccacagaccaatggttgtcggggtctagctgctcttaccacctgatcttcgtggcaagacttgtcctccttcatcttgtggaaggtttgtccttgttccagaggaacttggttggacagattgtctacagatcctccccgatctttcaattattgtcccttgcggaggatctcaaatgagatcctgacctcttctgatagttctttcattaaatcaccttatcagatcacttgcttctctattacggtggtctaatgctgcctaatgagatcaaaggatgtactcttggtcatccatccatatcagaaattcacgtctctgttgtgcaaatgcatagtagccaacaatgtatggttcttcagtttagccgacctgatagacgacctctctaagtctggctaagtcaagatcttctccgaagtctacatgaggttctccaatggatgtctcaccaattcttggccctatcctctagcataatactggggaacagatc

SEQ ID NO: 198288 - DNA, 1237 bp, Cannabis indica
agaaaagaagactttaattagaattattttgactaaaagtatagtttgatatctctataagtattaaattttatgtcgttttaatcacatactttaaagaaattataatagatagattggtatcatttatagcgtgttacctctaaaatttgttttaagaaatatacattgtttactatagtgcttacatgttaaaatttaattcacttgtttgatcgtataaaatgagaattacagaatccagataaattatttaaaaaaataaaaatcaactattgggtctgaaaaaagtttcatatgaggaaggcttacatagataaaagaaaaattgggtgatttctcattttttgatcaatttagaattagtaagatttttatgttgggattttatacaaatctacaccactttctcaagaataaaaagcacaattgggtgctttagagaagaaatcagcacttcgttttcacccagccttcaaattaatttttccattgcccaagtttgtggcacatacataaattgggaaacgaaatatcatttgttagtaaggaattctcttcgagaggacaaatctataaatgtactttttaaaacaatatcaatctttcaattaaattgatttttttttttcatttcatatctaatagtacacagtaatatatttataaatttttgcactatttgtaaattactaataaatccttacactataaaatagtgtaacattatttaggtaaaattagaatatgagtaatggtaattaattatgcactcaaatagtatatggtggcgatacaatgctgtttcaaaacaataaatcttatctaaaataaatatataattggttgaaataaattatcaaatggataatatttagtgtgcatattattacccttacacatatttttttttatataacattgctataagacatactcaaaactttagatgaagtggtatactattattggtacacttaagccaattttttaatttaaatataaatatataagtattgggcagtgctctttcccttctttaagaaatgggtccatccactaccaaccaaaataatatcctgtggaagaaacttcttaacaataaagccaaaaacaataaacaaaaaaacaacacaaaactgaaaggtgtaattgagtaaatcaaaagaattaccttaataagacaaaactgtaacttaacaaaactgcacacttaacttcaatcagtttctttaac

SEQ ID NO: 198289 - DNA, 1104 bp, Cannabis indica
taaggtcatttctgtttgtatacgagcctgcttgaatttttgattgagaatttaatcgaatttgcagtagacataagagtgaaggcaaatttagttcaaaacttggcatgggactgagactttcccgtggttgataaatggaatgcctacggtttctactgtcatttgatcttttttctcataacttttgcattgttattaagacaatattttctgtaatttttagcctgatgtgaccaaagtggaattgtttggtttgttccattagttttagattgcaatgtgtatctatctgctttcttttttgatgaattcatgctctgttgctttctagttttgtttttaaatcctttattgttcctttcttcaggttctacaagtcactcccacccattagtaaggcttatggaactctgtgttttttggcaaccctgggcgctcagttgcaactttatgacaaaagaagtattgcattagattatggttctatcttctatgattatcaggtttggatcaatttctgtagaaattaatgatgtgtttgattaatttccttaagaaaatatttgattcttgtcttctaagttccgatttctaccattatatgtaggtgtggaggttaattacgaacttatttttccttggtgggttttctattaattttgggatccgtcttctcatgatgtgagtaacaatctcccagatttgtcattaaatgctgtaatcttggaagtgtatatgtttttttttttctgtttatgctgcctagtgggtgccacactttattttttgggagaaaaaataagtaggaaatctgcttaccactgaaacaagaggaagtttctcatgttttaatactttctccatgctgtttgtttagagcaagatatggagttcaactagaaaagggtccatttgatcggaggacagcagatttcttgtggatgatgatatttggagcgttaacattactggtttgtgccaaaattttataattgtcattgggcaatttatcttcatatagattagcattgagtagacttcttgaaaaaaattaggaagctcaattttaccttttcattttctcattatagtttgtatctt

SEQ ID NO: 198290 - DNA, 918 bp, Cannabis indica
aaataaaaatacatcagtagatccctttaaaaaagggtgcattgaaaatttttcatacattatatatctagtttgaattatatgattctctttgagagacaaggcataggtaaatcttattaaatgattaaagttgatgatattggaaagggattgttccacaaaaatagaatgtgtagcttaattataagtaatgtttatataatacatatagatatagttattattataaatagaagcaaatatttataaggatatggtgataagagagcacacgccctaagaatatgacccacttacctaacttatgcatgtacttaataagactatatatatatatatgacttcaatttaattaattacaataaaaaaataaagtcttggattcacttctttattttttttcttttcttctcgttgctaaaaataataataaaaaaataataataaaagtctcaatcagttaatctatgtcagctgttcatccttaaacagcagcaaaatctgtatcactatataaattatatcctatatgcatatatgatagttttaaaaagtatcatatatatacaatgtaagtccgtgatgatcattataatttatatgatattttttacttctaatcgaagcacttcatgcaaatctatataataagttatttatgaagtaagcatatatatatatatatatatatatatatatatatttatatgaatgtgatacattgatcgatgcatgcatatgtagatatggtaaatctaatttagattgagcaattatatctttagaataaataccattttgactttgtgttttgtaaaatttacgaattggaccttctgttttgttaaatgacaaaattgaccttgtatttcccaaaatagtaataggaccttcaactgatttttatcaaaataa

SEQ ID NO: 198291 - DNA, 650 bp, Cannabis indica
taaattatattttgcattatatcacttatttgtagctgtataaattatgtgtacatatataaaccttttagacactacaaagacaaacttagttaataatttttaaatgtatattaattaaattaaaatatactcaaactaatattctattacactaacaaaatttttgaaaataaaaaacacgaatacatcaataataatataacatttcataatattaaagattacatacttatacctttgacaatcctctataaatatacatttgtcaataatacccaaatatatatattattatatatattaattaataaaaaatatggatttggcattcgaattatgatccttgtagaatttttcttcaagaactattttttgcaataatttccattgaattataaaaatcgacaaatattgttcttcctttttttttatttaatttattaatgtaacagtattatgtatacaattcaaatttaaaactagcagtttataataaattatgataatatttgtatacatatttttataaaataatatattttttttgtttaatatcaataaattagatgttgatcgtagtttgaacttgttaaattatacatatgtgactaatcacataagtaaactaaattatttcaaaaaaaaaa

SEQ ID NO: 198292 - DNA, 1179 bp, Cannabis indica
aactcgtagcttatcactacacacctgcaccttttgctaaattcattaaataacttcctttctaactctccttgactagttgaaaacacattggatctaccaaccaagcattctaaaatttaaaccacctcccacttaccgccaatgcaaatcttttgggctttaacaaaataggactgtgatccaaagatgagtcttccaaattataaagtcttgccatatcaagttgacgtaactaaagcctgatcaatacgaatttccataaacttggaagtaaccctaccatgatcccaagtaaacagataaccaaccagttccatatctctcaaccccacatctttaagagctttattaaacctgtccactaaccacccaggatatggtgccccaccctgcttatctatttgatccaccacattattcacgtctccaatcacacaccaaggcaagctagtgctatgcaccaaagtttgaagcaaatcccaagtcttcccacattgtgctctaccagactcaccataaagcctagttaacctccaagcctccataccgtcgacctttgtaataacatcaatatggttttgaaaaaaattaattaagtttgcctaatcttccttatgccataacattgttacacccccacttctacctctcggctccaccataaacattccttcaaactctagtggtttacgaatccattccattttatctttctttcataaaatttgataaagaaaaataaacataggcctcttttacgaacaatgtctttaaggaattgaacattccattggtttccaagcccacgacaattccaactgaggatagatcatgatgcagggcgggtctaaccaacataattcccacaacccctctgaattctcacgaccaaagtgaccacaaaacttccacaaaagccctagccttcactcctaagaaagatcttaacaaaaaaaacccaataaaaggaacacacgcaacacacttgaatcacacgaacacactaggaaaaaacctaacgcatgtcaatagacaagactatttatagagaatacttaatctaattgtaatatgattagtgctaaaaaaaagaaaaaggaagaaatcctaatattaggatttcaatcaatgaaagatttccattgataagtcgaggagtggcataattgatcagca

SEQ ID NO: 198293 - DNA, 1070 bp, Cannabis indica
cgaatacatcaataataatataacatttcataatattaaagattacatacttatacctttgacaatcctctataaatatacatttgtcaataatacccaaatatatatattattatatatattaattaataaaaatatggatttggcattcgaattatgatccttgtagaatttttcttcaagaactattttttgcaataatttccattgaattataaaaatcgacaaatatttttctttcttttttttttatttaatttattaatgtaacagtattatgtatacaatttaaatttaaaactagcagtttataataaattatgataatatttgtatacatatttttataaaataatatattttttttgtttaatatcaataaattagatgttgatcgtagtttgaacttgttaaattatacatatgtgactaatcacataagtaaactaaattatttcaaaaaaaaaaaaaatatgagtaaatatgaagatatttgcaatcatctgtgtaatttagggagaattatttgtaacacaaaaagttgaaggtgcaaaactctaaattaatgctcacatttcaggctggaagtcctattcatgcctaaagaaatatagaaaaggattaatttatttgttttgtttcaaaaaaataaatgatttgttttggagtagaaaataaatgcaatagtaatcaatatattgttatcaccgcataataaagggcagttcggggagtgaattatatattattataattataaatgttgtgaagaaactgaggcactcatgtgggaagcaaacaggagatcatcgcatagatttgagagctcataagtatatctcttctctcatcactttttgtttttattttttttttacatataaatatatatccatctatttctatatctatatatatgagcgcctaattcagatcaggtttagcagaggatcaaagagaggttgctgggcaatacatactgtccttatgtatatatagaaagcagagaaataagagaataaaaagcctctagagtctcaatacccacatatatatatataagtatatat

SEQ ID NO: 198294 - DNA, 1373 bp, Cannabis indica
catgaatctccacctcaaccgtcaacaactacctcgtgttatttttctcaactatagaaaaacatccaacaaccatgatttatcaatttgtagtttgaataatgtattattttcagagatttccttaaatcaacttccctattttgccatgaattcattatcgaatgatcaattatgttctttatcatttataggcagtgataagggcataataggaatttctgatcatagggttaatatattctgtcccttgtattatttatggaacccaactactaatgagtctaaaaaacttcctcctttagattttattgaagataaatcttatcgtttacgtggacttggctatgaccccttaaccaatgatttcaaagtggtggttttcacatctcaacttaaagagggtcataaaattgggatttatagttcgagaagcaattcatggaaagcaattacaatgcctaacctatttccagaatttgaatctgttattgttacaccatttatgagcatgtccattaatgttaataacttcattcattggtctatttgctataaaaatggtaatacaagtgatgataaagatttggagttttctacaggaatagttgcttttgatgtaagtaaagagaaatttaatcttataaagttacctcaagttaagaaaggtaatgatggtgtggacatagctaaaatttttgggtgtctttctatgatatatgtggatgaagatacagtatttcacgtatgggttatgaagaattatggtgattctaattcttggtacaaatatttgtcttttagtttaaatgaacttattccaactaggtttagtaaattttgtcgaataagttttttgagtgatgagattatgttagttaatttatttttgactggttatttctgttggtataactccaagagtaagatgattgaaattttaggtgaaagatatcctgtgtttagattcaccacttatgctgagagcattttcaggttaaatgagtcataatttggtatatatgttttaaaaagtgaatttacatgcacttttgctgggtcacttttagggttagaagtggacacactacttgttagtttaagaagtggcacacattatatacgatgtggtgttacagtatattacatttttttatttttatataattttatttaaagatttgaagaagtctcctcacttatttgttgcatctttcacacttcatgcccttttattttatttatttattttttattttttgctgaattatcattttacttcttttatacctataccacaaaatcagtaagatgaaacttgaaaaatgaattaaaagtaattatggtacgtttgagaaaatgaggaagaattt

SEQ ID NO: 198295 - DNA, 2049 bp, Cannabis indica
agtgaatgaacttgatcggatcaggtttctctgaaactttttaatataaggctcaaaacttaaagaacaagagactgtgaaaaggagcgacgagttgtggaatacataggcgggaaagcaggtaagggaaaaagggcacaaggccttcaattttattattttttttaaaacaattcacaaattcattgaaaatataataataacatctcaaattcatcaattcattacaaatactacattaagcaacacatattttttttttaatggagcaacacatattagtaacactactaacaaatttttaaaaatttaaacaatgatcttaaaattattattgtgaaaactctaatagtaaaaataattacagatgtataattctcgtaacaaatttcaatctaatattatcatcagcgtcaagcaatttattttaaaaacttattttcctttctttaaaaacttgaaggtacttcattcaaaaaaaaaaacttgaaggtactttccaaaaaaaaattaaagagacattgggttaggtttatagtgcacataaataaattatacattagatagattaaacaataaaaataataaataattaattattgttgcaaatttaatgtttattttcacaacaaatcaatttacattcaattttttacaatagtttaagaaaaatactaaaagtcaacatcttcttatatttcaatatcgatattagtataattaaatttcgagtctcatataatttaaagtaaacttttaaagagtgtcactaactaattacaagataacatgtgtataagattttaggcactattggtgcccaataacaatgttcatcatttaactattaaattaagttaaaaaaaaaaactatacaaaattaagtattgtgttttaagtattagatggtgtatattttaggttaaatttagcccaaaatataccataaagctatatttggcccaatttttgtatttatactctaatgctcaaggtgcaaattagctataaaagtcaatattactattaatgctcatttaaaatatacaaaataattaattttattatattattttaatatcttataaatatatcttattcaaagttaatgaatagttttaataagtagcaaagagataattaaaaaatgcagtatttattgtgagctaaaatttagcccatgctattttttgtgctaaatttggcacaatttttagcttgggctaaatttcgcacacattttacattaccattggagttaaatttttgcaaaatattataaaaaatggcaatacatcatatttatagctctctattggagatgctctcaaaggatatttggtaatgtttgggctagtaccaagcggttggtgtttgctaatgctctttgtggggaagttgctgcttgtctgttggcgttagggatgctcataaaaatcaaaaaaattgaaaacgactatcaaattgaccagactataactgaatttttggtttcacgtcatcaccgaatttgatgattaatttcgattacaatttgtttgacatggtaatcagtttcaatttttgaacaaaaaaaaaattggttaaactgccaaaaattagaaaatccaaaaattcgctaaagcttatacagccagttttgagtggttataatttctcaacggttggttgaggttttcataaaataaaaatcgtcaccgatttatcggttataaaattggtaaaagcagaacataaccaattgaattttacctttagttggcattagatttagttgcgaaaaaagacttgtaatttgttatagtagaatgtggctcttgttattgtaatattaatcaaagattaaataatcaatcaaaaaaacactaatttatttaaggcatcaaacatagtgagtaaagcatatactttataataatggctatgaatcttcatacatcatttatactccttaactttgcaatatacactcaatgaaatgaagaagaaaaagatataagggtcacaactcttattcactctctaatatcttagctacacacacttcca

SEQ ID NO: 198296 - DNA, 527 bp, Cannabis indica
ttttgtaccaaccaaatgtcaaagaaccaaccttttagaggtcaaaggtgaaaaatatcattaaaaaacatctaaatgttgcacaaattaataaaccagcacacttcaaacaattactaaaaattcacaaatgcatgcatcgataagtatatatataaaatggttattacaaattaagatgaagcagtcatattcatattaagtttgagttatgtgtaaagaaattaagtatctaaaaaataacatgtggctcaatatatatacataatacatgtgtcacaattatatatgctgtactgggcgaaatatctcgaaggtttaaacctatattaatattttaagctttatctttatttattaaatttatttttctcattacttgtgttttatttaatttatacaggcctaataaatgcagatgcgcaaatatatgcatatgcatggaatctgtcttacaagtgaaaatgataatttacagttgttagctaatgaaattaataaatcattggcttattattattaattcc

SEQ ID NO: 198297 - DNA, 607 bp, Cannabis indica
tgatagccaagtattcaatgtttggcatccctagcttgattatttggctactgcgcataggagacgactgaagactaaggcggtgtgtaaagagtttatagcaactctcttggtaagtgaatcatctcgtgaattcctttcttttcgtaggactagttgctgatttgttcaagggaggagtatcaaattcattatattttttttacgattgagctttaactgatttgacgaatacaatttttttaggtatacatgtggagagcatgtgaatattatttttgtgataggtgattgtagtagtcatattgagaacttaaaaacgttatgggatcaagaagtatattaagtgtacatatatatgtatggggatggatattagtgggtgtgaatcatatgttatacattgggaataggtatgtttgcttcagtagtgtgattgacattgttgttgaagttgatttgttgttagatttagatctcctttactatattgttagaatcatgctttgtatttactgttagagggctcgcccaagcttgtagtggtgagattggttatataaaattctgtaagtgggagaataaaaataagaggtggggtcgcaca

SEQ ID NO: 198298 - DNA, 1399 bp, Cannabis indica
aagctatatttcacattgaaggtacattttagttttcatggcattactatatgctgcgctgtgaacgtgccaaaccaagtgcaacatatatctttatatggctctaatttttcttctcttgatctatcttttcagcgtttgtggccaagttcatgagcatttacaagtcttttcttattgcaacatttggctgagtaacagaatgtggaagtgtgttggaaatttttgtaacagttttaggtgattccatcgtcctagacttgactttgcacattgggggtgcaagatggcaactaggtcatcatgagtactcttgttttatataaatgtgaaaagggatgtgtaaaacctatttttgattaggaaaaatctgaaaatgtattaagctttcagttttggaagcctgaattcaatgggtagactcaagtgtcatacattatggaggaattatattcgtaagccattaaaaaaattgaatatgctctcttaaaaagcaattacagtgtagtgtactctgattaaaaataaaataaaattacagtgtagtgtaacaaaaggatcatcttagcggtgtaaggtagtgtttggttggacttggaggtagggctgcacacgggtcgggtggtcgggtttgggttttcgggttttgggtcttggaaatgcacaactgaacccggtttttgggtgttcaggtgcgtcggtatcgggcccagtcggtatcgggttgggcgtagtcgggttcgagtcttactggactgagcccgaatgtgtaaaatgaaatttaatttttaaaataccattttttttttaatttttaacattggacctttgttgggggaatttttaattatatacattattgtataataattacataaaaagctaacataaattaatcacgtatctccggtaaggattacaaaaattaaaaaatattgtgcctttggagtacgctctctaaggcctctcttctattcatacctttttttttccttttttttttccttagaactctcttatagttatggatacattatgtgactttttaattatctaaaataaaataaattatacacttctctttctatctactctcaaaagtatttattttctcttaactttaaaagtaaattctgaccgcattactaattatttggacttaaagtgttggaagcatatattatttttgttggcaccatcacaaataaccataactaagagtaacatttcagtttcatctataacaaataaagaactaaaatttaaatttcaacaaaatttagtatagtactaattttatgagttactataaatatcttattattttatatttaaaagttactcgatagtgtctaagtaagtctattttatctagtaattttgataaattaaaaaaaaa

SEQ ID NO: 198299 - DNA, 1525 bp, Cannabis indica
ttaacacatggtttattgattgatgtagatacatataaagtgtggtgtactgtgatgtagaatggtatatatgtgtgtgtatttatttatattattagtaccattgttgtttaattagggttgaagcattgtagtagctattatataaatataatacatatagataattatacatgattatcataatcttatatatatatatatttgtataattgataacttggtaatatgacatacatggctgcgttatgtaccataattaatcttttcttcttaacagttaatattgtattaatatgtttaatttcaactgatgagaaaatttacatatagtatcattttttagctcacccatgccgattgctttactctgaattatattaaagacttatgcatttaaatattatatatatggttaattcttgctcaatggaagtacgctcaatcaagaaaatttgatccccttcatgtgcctgctggtacttttgaagggtgcgagcgttggtcgaaatcggatgcaaataagctcaagattaatgtcgatagtgccgtgtttgctgctgaaaatgcttatggttcagggattgttgttcgggatgatggtggaaggctgattgaggcttttgcaacttatgtaactggggatgttcaacccgagttggccgagataatggggattaaggaagcactcagttgggtcaagagaaagggtattcaagatgttgtcattgagtcggatagcctacttttgatccaagcgttggatagttctattcgaatgccttctttgtttggtttaatggttgttgagtgtcaaactcttttactttctcttgtcaatgttaaaatttgttttgttaagcgatctgctaacagaattgcacattgtgttgctcgcaacttttgtttttggtcaggttgtaattttgtagaagggtcagcgcctgctgctcttcaaactctaattcttgttgatttggcagtttaatggattgaagttttttttttttaaaatatattatatatatagtgatgaatatatattgaattaattatattgtggggaaatttatccaccttgattaagaaaactacataatgcaatttctaaaacatacagatgaaaggctttataaattataataacttttttttatttttttattttttttattttttattgttattgatattatagtttaaatgactttgttgacctttaataatattgtattaatataagattgcaatccataatgttttttaataagaaaagtaaaaatattttgtaaaaacatgttctataaaactgtttttacttttttaatttaagaattatattgaaaacaaaaaagtaattactttcaaatttttttaaacagtttttttttttctttaataattattttgaactccgactatgacccaaacttggactttgacaccatggacctagaccttggccccgaacaccgaccccaattgatcagagtcgatccccggcctctgaatctgaccttgaccc

SEQ ID NO: 198300 - DNA, 524 bp, Cannabis indica
gatataaaagttaagctatatttgacgcaaaaagtaattttgtaatatttttacatcaacttttattagttttgtctttatggtagacatatagagtcatagatatttaatctaataataataaattgataagtgtatattaatggttaataatttagattattcataaatttattttttaataatattcttgaattaaaaaattattatttaaataaattactaatttattctaatctcctcaaattaattaatccattttttgttctctctttcattcagaaaccccatactttcaaaaatcccatatttcttttccattctactttggaaccatgtttataaatcagttcatgaatttctccaaatctattcacacaataaaaatataaaattattccttttgatagtatgatttttgataatattattataagattcccttcaataatactattttggcctttgaagggagcaagctctaatggcattgaggtcaagtcaagggcaacgatctcactcag

SEQ ID NO: 198301 - DNA, 1981 bp, Cannabis indica
gtaacttatttcaagactagatgtagatcatgaagagcaactgattacttagaaacctaactattaacttattagtgtgctatactgctattatttgattattaattaagaaatactatttcgtaatgttagtaatcagtaattaactcttgtttagttttgtcttgacatgattaaaggtaattatgtttggaagagtacggtatatcgatatcagtcagtttagtacttttcctagaaaacccaataattatcatgcaagtatggtatacatcatcatatatgtttatatatatatatatatattattcatattttaaaatgtttctctaagtatttcttaattagatattttttttttgtatagaatttttgatcaagataattagtacaagtagtagctagtatatatattatagcatacatatataccattgtattgtatacatttgaaaatatatatttcaaaggagacataggggctatccaaatcgaccatggaataattgaatatgttatataaagatatatatatatacattgaaatcaccgatattaagaacaaggacaatgctctacttactgtaaaaatttatatatatatatatatacatatatacgtaattaaatagataaaatgaactactgcaatgataatggtgattatgcagtcatctgaatgtaattatacttttataaacagcaataatattgagctttcacgtcttttttgtcatatcattatcaatattgtataatttgttgtaccctgcagagtgatcaaactcagatttaggcaaacatgccttggcatggcactagattgtgatcaaattaaaccccaaaagaagagaaaactaaaggtggaaattttaaccaaacaaacaaagattgaacaaacggaaggtacaagagagaaaagtcacatctataatatttgtatgaaaagtaaaaacttcgatcggataattctgaaaatctactttaccttaggtcggtcaccaagcctgagctcaagatctaattcttctatagaacaagggctaagttcatcaaatggaattgactcatctgaacatggctcaattcttcttctcttgcaactcatcagtaaaccctctttatctttattactattaccagattcagtttgaattgcatgacaaaccaccaaattcaaacttactgacaaatcagtactcttcacatagtccaccttagtcgttttgctactccttctacaagatccagattccacagttattgatgaaatattcttgtgatgattaggatctctcatatgatcatttttatgatcattggagtcatggaaatatttgtcaaaatttgaccaggactggtgtgaagggtttagagcactactattagtactattggaagacttcttagtattttcaactacaatagaagatgaaaagaaaggagggactaacaaggtttctgcttgttttccacaattctgttttttactgttattataagaagagggtgatgatgatgaaataaaacctacttctggagcagggtcagtaatattagggttaggatcataaacaaaggcacaaacttgagatgatgggccatattggctgggagggccaaatgatgtggtggtagtggtagtgatcaaaggattttgatgaagatgatgatgatggtgaagatgatgaagagccatattattattattattatcgttgttgatatgttgattttgattgacgatttcgcggtgatggagctccggagactgcttgagtctagccctatctctcctgtgcacattcatgtggccaccaagagcttgagctgagcgaaattctcttctacaaaagctgcaagagtaagatctcgggggccatatgcagccgccgagaggccctgcagcgtcttctgcgaaagcttgctcttcccaggaatcatcataagaagaagtagggtttttgggcaccataagatg

SEQ ID NO: 198302 - DNA, 685 bp, Cannabis indica
tgaaatagaaagagaaagtggaaagagagtaatgggccattggtgggcttgaaatccagctggataaaggggtaatgtgacgtggtgcataggcaacaaaggacaaggtcattgttttgtactcaataattggattaattagttatacttatacatacatacatacatacattacatacttgttcatattcaaccaaattctattttaggatcataaaccatatacatgtatcttttgttacaataatttatataaatatatattgagttacgtaatatgcaacatttagtagtttaaggagtcctaataccatattatactactaattattttttttaaaaaaattactactaattcatttgaaaataatgaattaattgaagtatagataatatgattgtgataaggtgagtcatctgtggagtgtatgactctatgtggtccccccaactccataatattttttaagaaaatattattattattattattattattattattattatttattttatatgtttgatattacttatataggtactattcctttttattttaaataagtatagtatatatttttatttttaagggatttttataaaaatattagattatgagtaaaaatttataattttactgttacactgaattgttttataaatatactatctttttataaaa

SEQ ID NO: 198303 - DNA, 1192 bp, Cannabis indica
agattgcagcaggatcgatgattgcctcactaaacacaaataacttttataatttagaatcaaagttatactgtaaactaagaaaaaaaaaaaaaaaaaaaaaaaaaaagaaagaagaagaaactaacgttagaaattcctgattttccataggcatcgtaagcttgtcgttgggaaggatcacttagtacttgataagcctccccaagaacctgaaacaaagaaaaatatttgtttctacatcttcttcttgaattcgagataaacttacaaaggttttaagttttacctgaaaattctgagcagcgagaggatcgtttgggttcttatctggatgaacttggcgagcctagaagaaagaaatggaataggtaggagtgagtatgatgtattgaatcaatggcggagagatctagataagaaagaaatggatcagaagattgtaccttgatgtaataagctttcttaatctccgactcggtggccgtcgggctcactccgaggacgtcgtagtattccgtttccttcaccatctcaattctcagttccgacgactacgacgaccaacacacaatccccgcgactttgtctaattcaacaaactgtttagtattttcccccttttctttttctttttcctttttattaaaatctactaatgcccattcaatattattattattattattattattattattattattatattaattgcggccaaaccccttctactattttgattttatagactattgttttttttttttaaatgaattttatagactatgttgatatttagttagaggtaattaaatgtaatagaataaaaagaaaataatttttattttatttatttatttggttgtattttaaagtattaaaatataaataaattttccattattttagtagaagtagtattttattttgtaatggaataatagactattctaatgtaatgtgaaaaagatttaatgacttttttttttcatcaatttttatgcattttaaattttattttattttattcttattctcattcttattttatgttttcattacttctactcaaacgtcactctatttttttttttttgtggtaaaagccttttatattttttcttttttgtaaatttgaagtgtcaactcgatattaccgttaaatactaattggattattattatatta

SEQ ID NO: 198304 - DNA, 1096 bp, Cannabis indica
gactcggattgagttatttcatgcatcagaaaataagtagaaatgataaggagtggttctttgcactataacacaatacaaaatgtatttgtttgtatagattaatcatgatatatatagttatcggcccttgttgggtgcgcataggatgtaaaaatttgtttgtgcaatacaactcattgatttatcaaaaaaaaaaaataaaagtattttttttatattcattaataatttatgttgttagaattaattttaaatgtataaccataatggttacattaatttagtcattaaattattattgaatgattaagattaattaagaaacgaattgaaaatatttaacatattacctgtaacttgatactaacttatatcttttaattttctaatatttttctccttataaaatactattattcatattctcagatgactaatacgtgatagtcacggaagagtaccactctcgactatccgtgattagtatatgattttcacttaatgacactacggaggctattatattacgaaagctaattaaaggtccccaacactggcgaatagggatagggctccatgactccaattattcatccgcaattggggaggatcagagtcacccggagctacaagtattccagaaaggtagtatgtcagtgtgatccgggaaggccttggctcgatgatctcggagcttatttaacaatatcttattcaaagctcaaagcgacagttacttatcctctgacatcgaatcagatcttatcccctacggcagaccatgatagtgtgcgtacgtgcctctaaagcctcctttttgtccaatgacttttctaaaaaacaacttttcaaggtaaaacctttgaatgatgtgttttcctgtccatacgagatccttcactgcagtcgtacaccacacgatgggaaagtttcctaccagccaacagttagatcgtcatgatatagtgacagcccttatagcatgctaagtacaaaatccaaggtgggtaaagagaatacccttgcccacatttaagcctataaatacccttatttttcatgtacaaagggtgagaaaattggtattagcgaa

SEQ ID NO: 198305 - DNA, 1492 bp, Cannabis indica
accactcaagatctttctcaatcattttagaaagcatttttttgggtctaaaatcttcttattaaaactttggtgtttattggttatgaatatgattttattgaaactttctgtttatttgaatatgatgcatcctctttacattttacattttggtataatcatcaaatattcagttattatggatgagtttatctttatttcttacattattatctgctactgacacatctactatgatccactccagctatggtgttttattttcttatttactgatttttcttggttattttctcacattgtcaatcttcgtctgctctctattcttgcaagaaaactcttgacctctaactcagactgttatgtttggtggcagcggtgcggagtatgtcagaaaggaagttcctctttatgtaatgcctacgtcaagccttattaagcttgattctcctttgacttcattcacggatttgcaacgtgtattatacgaagaggaacaagcagcatataaccaagctatcttgcaaaatatgaggtgctaaagatgatcacatgttactttaaactagaaagtgatttatattctgaatttgtgtattcttacttagggattggaaagttcatccacttgcttttgtacatcacacatcaacatatcaggcttccatgtgcaaattaattgaatattggtcagcataactcttacctggcattactgtttcacttttttctcctcctcccttcctgttgtcccttttcttttttgtccttatcttgtcttcaatctatgcagcttgagtccagccataagtgctctgcaggaccgtctaagagagaatgaaactcgggtagagtaccaaattcaaggcatttcttcaataggatgctctgtcttcattatcatcattttttttaatgacttagaaacctaatctgatgaactgagtgtttataatatgatgtaaactgcactcattctttggccctcttttgctgaaacagatgttgatactcaaagatgaagccaagaatttagaggctgagacagtgagaatgagcaacttaagttcgggatctcctcgtcaagttccatcacatggtccccgtggaagtgtttcaccaagttctagtatgtctggtgctggtagccggagcaaaagagggtcacaatgaaacttcatagtaatggtgttttcttttcctgttgtaatgattaggctagaatatttagttacttgcatacatgtttttgttttgaccaaaattagtcatgccttttggatggagtatgttgtgaagatggggtctagtctctcaggttttatttcttgatatcattttggcacaggtgactggtgatagaatcctaaaatcacacagtaagtatagcctttgtgggcattttgggcaagtgcaagcctagatgaaaaagaaaaagcgttataatttgtctatagtattcatgtcaatcattctgtatcggatcgag

SEQ ID NO: 198306 - DNA, 1832 bp, Cannabis indica
acaattcaagggatctgtagcagaggagagatcttgaattgtgagcttggaacgaaaggagggaaaccgttcactagagattgctttggtaagaccatcagcaagttggtcaattgctggaacatgtttaacatgaaccagttgttgcagtaccttttcacgcacaaaatacagatctaattcaatgtgttttgtacgtgcatgaagaaccggatttgctgtaagcaatatggtactgagattgtcacaccacacaacaggtggtcttggaaggtgaatctgaagttctgtgaagagagaatgaatccaggtgagttcagccacagtacttgctagacttcgaaattcagcttcagtgctggacctggaaattgtgtgctgctttttgcattgccaagctacaagattgttgccaaagaaaatggtgaatccagaggtagaacgacggtcatctggatcagtggcccagtcggcatcgcaaaatgcaacaacatcaagatcaggtggccttttgagatgcaatccatgagagatagtgctacttaagtatctgagtatgcgcttcacagcaagccagtgagtaaggagatgtttatgcataaactggcatactttattgacactaaaggaaagatctggtctggtgataagcaaatactgtagagcaccaacaattgagcgatatagatgaggttcagacattggttcactaccatgagctgagagacgaagtccactagtcattggagttgagcagggcttagcatcgtgcatctgtgccttggagagtaaatctcgtgcatactttgcttgagataaatgcaaaccagatgatgtgttatgaatctcaatgcccagaaaataatggaggtcaccgaggtcttttaaggagaatttggcattgagagctgcaattaaatttgataccacagtgggatcactacctgtgacaaggatatcatccacgtagactagaaccagagttgtctgagtggaagtgtgttgaatgaagagggagtgatcagacttggaaggaaagaatcccaactgaattaggcagtgatgcaacttgtcaaaccaggctctaggagcctgtttgaggccgtataatgccttgtgaagtttgcacactagaggaggtgtggatggtatttcgaatccagggggttgtaccatgtacacctcttctttgagatcaccattcaaaaacgcgttgttaacatctagttgtttgatacaccaaccacgagacaaagctagagtgataacaatgcgtattgtcactggtttgacaactggactaaacgtctctgtgaagtcgaaccctggctgttggtgaaagcctttggctacaagatgcgccttgaacttgttgtgagtgccatctgagttttccttgtgtctaaagatccatttgcacccaataggttctcgaccaggagggagaggaactagtgtgtaggtagcatttcgaattagagcaagcatttcatccgacattgcttgattccattgctcaatttgtaaagcttcctttactgatctaggagttttgacagccatataagccttcggttttttgatgccagattttccacgagtttgcatatgatgcgagttgatcatgggagtttgagtaacagcagcaggagagtttgcagtgggagcaatagtagcagatggagtaccagcagtgggatttacaacagcatttggaagtgttgactcagcattttcagtatcttgttgagacacaacacagccagtgttttcagtactgggagtatgcaaatctgtgggagctgagatgggtccagaggatgagatgtgaa

SEQ ID NO: 198307 - DNA, 1055 bp, Cannabis indica
aaaaataagaatttcgcattaaaatattagacgcaaataaacgtgcagagttgagccacgactgcatgggcatgtaacccgatccgttaagtaattagtggtccaatacgtgtgggccgatccgtttaacacatgtcacttgggcgcacatattgaggtactagttgtttaaaaatggcttatggccgcgtcatgtatataaatttatttattacaagtatcaataagtatctactgtctagggtagtactagtatagtagaattgagtagaacagggttgaagaagaaaaatatgggtgaaagggaaggagaaagtgaaagtaattataataatgataataataatgggaagggttcaggactagaatttgtgctagtccatggatcaagccatggaggttggtgctggtacaagatccggactctgcttgaaacttctggtcacaaagtcacatgccttgacctcaaagcctcaggcatagactcttctgatccaaacaccattttaactttcgatcactataatcagcctctcaccaattttatggcctccttaccacccaaccaaaaggtacacacacaaatacttatctcttacctatttattaattggctaattaggatattttaattttactaattttattattatttatgtattaaattatatttttcaaatttaatatcaatcaaattatgccacttaaacactttgatatgtaatcaattatattcatcatgaactttaatttatgatagacttttcttaataaaattattagaaaaaaaatttaaatttaacaatgataaatttttattttgatttaacaatgataaaattttaatgactttaaaattttaaaaatataatttagtatgtcaaatttaaacaaacaaattccatattaattaagaatttgatgaatatatatatatatattattttgattttgtaaggtagtactggtgggacgatagcgctggagggctaagccttacggatgcaatacacaaatatggtgagaaaattcatgtggctgtgtatgttgctgcc

SEQ ID NO: 198308 - DNA, 1109 bp, Cannabis indica
ccattgaatagtcacccattaaaaatatgtaaattgcacgtaatattaatctaattatatgtggatccaaatattattatatgcgaacctagatagaatgaaaagtgtaaaatacaaacattatagtattgtctctaccgaagcaaaagaaaattaaaacccaaccactaagagtattcctatttttcttttctcgaatttttagataaatgttatcttcaattatcaacaatttagagattttttttttattttacacaattttaagttgtgttggattatttgaacattaatttagaggtttatttttttaattaatttaagaacaatttataattagattatatcaagatttcttgaacacttatatattgtcttcagtaattacttataatttacaacaccattatttacattaaatgaatgtatacttaaaaataatttcaaaatataactaataatttttttatttaattatttattgtattatttttaaataaagtagaatgcacttaaaataaaatacaatatacgtgtctcgcacgtaactttcttctagtctatatacatacacgtatatgtatggcaaatcaaaatttttaatgctttgacatttccattacattttttcatgtaatctcttgatacaacttaagctttacgtgtatgctatagtatatatgattctttttcattttttacttctacaaaacaatctcaacaaattttttatgagtgattgagcataaatcacttgtaaaattttgacagtgtactagttctttttgtttaagatttttatttttcttttagattatgcaccccattgacttattttttgaagggtatggaatcaaagagaatataaaaatcatttacgagaaatttagcagaataataacaaaatatttgtattttttcttttaattatataccagatattgacttagtttttgaaatttagtaaatcaaaaggaatcaataaaaatatttgtgaagaattcattggagaagaaagtaagggcagcccgttaatacttaccctgtagcaaggccggtcctgaacaaagtgggctacaggaaaaaaaattaatttttggtactcttat

SEQ ID NO: 198309 - DNA, 863 bp, Cannabis indica
tctctctctctctttctctatttcgagtccttatctctctctttgtcttcatattttttgagccttatagtgaaagagtacattcccacccatagcaagtcaagtactcaatcatagtgtttaagattgtgtaagtactcaatcatagtgtcaagtcgagagtgatataattaattagtttgaaggtctaggagggtgtatgccttcatacaatcaggatgtcctagaaaaacagaagctcggcttctaggagaaaatttatgtctttgagaatcaagggtggaagcataagctaaacacccaaatgttcttagatgatcataatttggttatttgttgtgtaaaaggaagaaaagtgtttttcctttgaataggactgaagtcctactgattaagtaggtggggtttgaatattgtagggccaatatactaaaggaacattggattgaaagctcaatgcccgagccacatttaggaggtattcgtgttttctttcctcaatggagttttgttgtggtctatcgacacatgaatgatgatgtatgatgcctttagaggcaaaaaaaagttgttagattgaattctttagcattatctgaacgaatagttttaatagaggtagagaattgggtacatatcatgttatgaaaatcaggaataatggtctaaactttagacttggttttcagcatgtatatccaagtataccttgagtggtcatcaataattgtcaaaaagtatttgtagccctctacactgattatgttaaagggtccccatatatcaatttgaatgaggtcaaaattagcagcaacaaagttactttgggaaataaatagtaatcttttttgcttggctaaatg

SEQ ID NO: 198310 - DNA, 828 bp, Cannabis indica
cgacgtagacgcaggaagaaatgtgagatcaaaaggagggatcccgctcatccaaaaccgaacagaagtggttacaatttcttctttgcagaacaacacgcgaaattgaaaccacttcaccccggtaaagacagagagattagtagaatgattggcgaatcatggaacaagttaaatgaaaccgagaaagctgtaaggaacattacccaaatcgagcataattctaatttttttctatcacatgagcaatgtgggacaaaacacacacacagaagtctttttcgagagaaagaaagaccgacgaattaacatgactgttttgcaggtttatcaagagaaagctgtgaaagacaaggaaagatatagaagagaaatggaaggttatagggaaagattaagaacaggtcaagtgatcagtcatgcaattcctcttcaacaacgattccccgagcctcgtgctactatcactactactgctgctgctgctgctgctgctagtactgtggaagtaaatgcaaatattaatgatgagactgagtgtggagagtctcaaactttagggaatgagagttgttcaagtaaaagtgattctgaagttgatgtagaagaatttcaagagatagaaatggatactaattctaatatcattggcattgggaagattactcatgatcatggtcatgatcatgatgagctgaagaagactcatgatgatgacaaagctgctgagattaaagatctaaactttggactcaaagagaaggagacatagaaggaagaagaatttcatagatttttatcaaccaagtttaattttttgtttttttt

SEQ ID NO: 198311 - DNA, 1003 bp, Cannabis indica
aaaaagctatagtcgtatacataaaattgaagataagttcctcactagtgcatatcccacatttcatttgaaattcatactagtattcgatgcacattttcaacaactggaattaagccatcaaagtaataaataatgaatcatgggaaatggtaaacatttaatcatggagaacaaaccatatctttcctgaaactcaggtgtgctttgtagaaactctaaccctggatgagttgccaaaagttcacgtagcacaggcttaaagtcatcctgtcgtcaaagaagcatcgaaaaaatatataccgtatcaattaatcaaacaagagaaatactacaattttgaacacagttccaatccttagcaacaagaaattaaaaacttttaaatcttcaaagataattagctggctatgatgacataattcacatggaatgaatttaagaagacaaaataaaataaaagataacctgagtaaggtacttaagatccggttgctttagaataacatatatttgagtagccatatccatagtcaacatatttccattgatccaataatcaacaaaagcatctctacaaacaaaataattaatatataaaaactgatacatgggaactgtacaaacttattaatttcacgtgttcattttaacaaacatcaaaataaccattatgcaaaagagctcattcaaatttcatttaagcggatgtccccacttgactaaaaggattttaaaaaaaaattaccaaggacaacattcactcaaaaaagaaagatcaatccaccctaattccaaatttatcaactatacacataattccaaatttatcaactatacacataagctaaacgttaatcccaaatcacagagtgaaagttacttttagagtttctcaacttttgaagaaagccactatcactcaaacacaagcctacataccacaatactttcaaattctttatgcagatttctagaagaaaaaaaattgacaagcaagact

SEQ ID NO: 198312 - DNA, 1587 bp, Cannabis indica
agttgtgttaatatctctgaattttgaagaggaagaattcaagaaaggattggaaataattccatggttggccttgccatataaggatagtaccactgtgaaacttgcttgttactttgatgttacaactcttcctacactagttataataggtccagatggtaagactgtgaactccaatgtagttgaaatggttgaagagtttggcatcgatgcttacccttttacacaagagaggcttgatgtgcttgctgagattgagaaagcgaaactggaatcacaaacactgcagtcgttattggtttctagtgatgatgatgattttgtaatcgacaaaaatggttccaaggttagatcttttcttttttttcctatctttgtagtttatatgaatcacatagatttacatagaagcggagaggggtagtcgtcatatattttagttagttacgacatatatttataataaaaaatgatatttataaatataatacactaggtttggtgtaatagttatgtaagattgtatataaatgtcactaaaacattttattttcatattattattgtgctaactttgctttggtgcttcattttcatatttacatgagagattgttaacaatgattctaatttatgcattgacaggttcttgtttctgagcttgaaggtaaaacagttggactattattctcagtaagttctcatgaaccatgtgttgaatttactaatacacttgttgaggtttacaataagctcaaggatataggtgagaagtttgaagttgtcttaatatctctgaattatgaagaggatgagttcaagaaaggattggaaacaattccatggttggtcttgccaaacaaggataagatcatgactaagaaactagtgcgttactttgatgttttaaaccttcctacactagttattctaggtccggatgggaagactgtgaactcaaatgtagttgaaatggttgaagaacatggaattgatgcctacccttttacacaagagaagatttatgctcttgctgagattgagaaagcaaaacaggaatcacaaacactagagtcattattggtttctagagatgataattttgtaattggcaagaatggttccaaggttagatcattttagattatgtatcaagttttctagattttctccatagattattataactctcattttgttttttaggtaccaatttctaaactagttggaaagaacattgttctctatttctcagctcattggtgtccaccatgtcgtggattcacacctaagcttatcaagacatacaatgacatcaaaaagaaagatgatgcatttgaagtaatcttcatctctagcgattctgatcaatcctcattcgaggaatacttctccatcatgccttggttagcccttccatacggagattcaaggaagaaacttttgagtcgaacattcaaaatcgagggcattccaacagcagtagccattggcccttctggtcgaacagtgacaaaagatgtggtggaactcgtaaggaatcatgggacaaatgcttatccatttactgaagagcagttaaaa

SEQ ID NO: 198313 - DNA, 664 bp, Cannabis indica
agttcatcaacaaatttcaacatgttcgaccaaacttggacattgccttcttttgaaaccaacacacccttaacaaaagcgcatagtccaagcttgtgcacatcatctgctatctcgcatctctacaactagagcaaaagtgtatccaaatgcacaccactattcccttcaaaatacatcctcactaaacggtcaccaaacttggcttctatctcttccgctataggagcactacccataggtaagccgataaccatatttcatcttcgaattccttattaactttcattttctataatagtaggttatggaccaacacgccatagaaattcaaatttctagattcccagaatggaccgaaagggctggccttacccctccaaatcaacttgagtgcttcaaacttggtcttaatatctttaaacctatttgagccccaataggtaagacaacctgtgaaatgctctgaaattagaagtttaagttcaggaggagtcatttgcaaaaattttaagaaaaaaaaagagcaacatattaaaaccaaaaatgacatgtcgctaaatatcgcaaactatatcgacagcatattgctacttgtcgcaaactatatttgcttcctatcctagtgtagctaatatcgtgagaagttgtaaactatgtcgag

SEQ ID NO: 198314 - DNA, 1722 bp, Cannabis indica
caaagatacaacagtttctattcgtccacacagtgtacatggtcgccaaaacaactgaattgagcacctttttctgcaggctgttggaagagttcgaaaaccattctttgatgttagaaggccaatcgaaatggccacaccaagctgttatctcgataatcactctgtgagtgaagtagcagctaacaaataaatgatggcgagtctccttttccacacagcagaccagacaaagatcagagggaatagagatgaatttgctgatattgtttctggttagcagttggtcattcacaatttttcaacctatgaacctatgctttgggagaaccattctatcacaaatgtttctagcatagtcaacagtgtgagcttggatgtaagagtaataaaacaattttgaactgaatttacctctcattacggcagccatgattttggattcgttaacagttgaccgaagacgaaggatctttttaaaataccagctcgcgtcttgtttgaattcaactgtccaaaagctcaaccctctcaagtaaaccgcatcaatccacctaacccaaaagttgtcttgtttgtttgatatagcccaaatatacttcgccataagggctatgttccatttcttccctactctaaatccaagacctccggagttcttgggaagacagactttctcccatgaggagatgtgcattttgcttctatttccattggagccccaaaggaagtccctgcaacatttgtcaatattcgctgtgattttttagggaagcataaacaaattcatcaaatagtttctggctccaagaagaatcgaatgaatcaattgagccctccctacaaataatgaacagatttttttaattagatagaaaaattaagcataaaaactcaaaattttctaattttatccattcatgggtaatacccattaagagtgcaccctaatatataatatgccacattttaatcttcattatatatttattaaataacaaatatataacagacatagtcttttttgggaggtgcaatacctcatgatagccaacaaaccaacccaaggactgtcacaagctcaacccgatcccattaaacgtgattgatgggaccctcttttacacattgtcattacctttgtgtttgaactttgacgacttaccttctcctttgtgcttgtcatttgtttgagtgagttcccttttgacaacatgagaaatggtaaagtgcacctatggtgcctagcacttttatgaggtatagtatcgatattggtgcaatttaataacgtgtctcacttattttaatttaataaagattatagagaaccgctaaccaattataagacgtcatatcatagaggtactaggcaccttggtaccccataacaatgctctaacaatatgttagaatctcacattggctaagtatgagattggttagtagtatataactacttgggcaccgttttcttttaggctaacttttgggagtgagttctacccaagtggttgtatcaagtggtgtaagagccatgcaccccaaatgggaatcgagtagggcattgtagccgacagccgtcgtggacggctccaaaggaacggtgtaatgttaggatcacacattggctaagtataaaggtatgtaaattagtttgttttatagaagaaacaacaataattttataatgtacatgcccaatgatcaatacacaatata

SEQ ID NO: 198315 - DNA, 1484 bp, Cannabis indica
gtggattagttagaaaatttaccaagttacccctagccttatttaatgaaagtgttttattggaggggcctttgttgacgtagatgaagcagaagtggggtttgccttcaccttcaaggagacaatgtttatggatttgcggctagactagaacatgacccttgcaatcataggaggagatgcagatgccaaatgagacgagttcatttcctaggacaaagccaagagggaaattacaactgtaaatattgaaaaagtagggactattgaggcaagagcacagaatctggaaggcgctcttccaactcccactgaagccagcacctcaaatttgaaaaacaatcctctagaatagaattaagttgttccaagttatttttccttacttttcatgggcctctttggattccatttgtatctttgtaggcacacttattttgcccaaactgcgaggcttctttgggtttgtaatatttaaattatattttagttagtccttggagaccaaagacaatttattaaacttttagttagtccctgtgaggattccacatgttaacctccctagtagttgcacgggttcatctttgtaaaagggaaaggaaggtgaacatccacacagcatagagaacatccgatcatcagaaggaccatctggacaacagggtgaaaacacctcagataggctaaccaaggttcctagatctaaaacaacctactctaccagaagaagccattaaaaccttggttcttcatgttcatcaaaacccaaagtctaaaatgaagaataaaaatgctaagattaaacctttcttccataaaagtcttacattcatatatcttattgatcccatgcaactattgaagttggggtctctctaaacccatggtatggagcttatttgcattcaacaatggcgtgaaaggaaataaattacagaaataaaaaaaatccataaaagaacaagagaatagtcaaaaggacttactcactgaaggatcttgaaggagggactaaacggagacatcgatggtggtgatttctcctttgcccaatgatgggggctctgagccttcttaaggttttctggttttgtctctttgggaatgttctcaaaaaatggaaaatgaaaataaatacttgaaagaatgagaaatgccctttatataggcttcaatcttatttccctcaaaaaattaattaaatgggaaattaattcccactaaaagcattatgggaaagtgaaaagaaagaaaaaaaaaaaaaaggaaaaaacatggatatataaccatcagcacgtttcccacaaaatgtgctttaaaaactgtcattatgagagctgacaattaatggtcaattgaagagacagaagtgtgacagtccattgctgcacggtacaaccgtcaaagtactaactacatggacttcatatgcctatcagcagccatacaggtactttaaagtcccccatcccgtacacgat

SEQ ID NO: 198316 - DNA, 1962 bp, Cannabis indica
cttaaaagtcaaaggtgtttgttgcatttgatctattcatggacaacatttgtaaacaagaaccgaaatgacaatgtccaccctcttagttttgcttcttgaacttttttttttattacaaaagtttcattcgaattacacaattggttgcaaatattccattctttcattatgtttatttttataataatttacttatatagttatgagttacatgtataattgacattccatttatttatattaaatatacaaatattaactgtaaaagtatatatacatatttttataattcattattagactactatttatgtatttttatttttccggattcttcaataaaattaaattaacctcatattagtgttacatcaataaattgtttaagaaaatgaagacgaaaagttatttataacaaattttattttttcagaaagaaaaattgcaatagaaaatagtttacgaggcaaaactaggagacaaatcctatttattcttcttaaaatttgatattgtggtatatatgtattatgattgtgaaatgattttagtttttatcatataaaatcttcttaaaagtcaaaggtgttgttgcatttgatctgttctgttcagggcaacacttgtaaacatgatccaaaatgacaatgtttatatgcccacaagaactaattgaaaactgattaaaagtaactaaaattattcaatcccaatatttggattaggacaatgtataattcattcaaatacataatttttttttccattaaaagtaacactgtttgaaggaagaaccaaattcactcataaaactatagcagaacacatatggttttaacctctcaccatcatcaaagatctaatatacaactcttttttttggacttaaaatgttccaaaatctctacaatttcacattacgcaagctgctcaacaagattatatctatctaagctacaggggcaaccttaacattatcaagaacaggaccacaaagtgaaccaaagtcatctttcttagtgtggtaatatgagctgaaaaatgtaatccttgttctgtcaccaatggctttgaacttcagaattccagtcttgaaaacaccctttccttgagactcatgagtaactttgattgtgtctttggctgcgaaagcttccaccatcattgaaccgtggcaaccattcttggcatcaccaacaacgaaagagagagaatagaccttgttgggaatagtcctgatgacttgagcaatggcgctttctcttcctgcaacgagctcaactgcatacttccctgatgggatgttgaagtgtttggaatcgatgaactttacagctttgagagactcgatgatccatccgggaagtggggatgtggcatcttcttgtttaggagggatgagtactccattggaagagttaaagagtctgtgtggtccttcctcaaagtcagcatttctaaccaaattatctgcaaaatcccacaaactcgtatgatcaaaagctgaaattttggtgagcatattcagtgtaaaaattgtcattattaaaatttttatgattcaatactattttggtgatcttatttgtacccttttaaaaaatacaaaattcattttgtcattgacaaaatagatggtccattcggtaaacaacatacacacattcattatgtgatcacaagaatagttttctaagataccaaacacaagattttaatggcacaaactaaaagattggttacctcttgtagggtaaacaggcaaaagctccttaatagcaacagcatccaagagtgggccacaagcagggtcctcctgaacaccaggattgtggaatgttacagtaacataactggaagtggctctgaatccccatccataaacatcaccaccaaaactgtcataaagagtttgcaatggaagatcaccactctgagaaggcactgagactctcaaaa

SEQ ID NO: 198317 - DNA, 1589 bp, Cannabis indica
tcattaatataacatccaatctttactatgctacacagataatatataatattatgattttagtacacaatactataatactaaaaacatatgtacccccgaaatatataaaaactaaataaactcaattataatagtttaaactttaactaatactcacgttgttcgagagagtcatgagagctggaaattatcacacaaaatgaatatcatgaaatgaaactcatttcaaccctataggtcctgttcgaacctccagccacgttatattgtgggataaatatatagtaaaatattattgatcataacaacatgggttactcttatatatgatcacttatggaaccctataatttctaacatagtatcggagtcatatctcttacgagcatgtgatcctgtctcatctgtacatatataaatagtgactctagtcactttgataagattaattatgaactactctacttatcatcaattagttttaagatgagaactcataattctcaacatgttacaaaacaaattagccacacgccttaatcaaggactccgtcgtatatatagtgcactctcaaaaacttttagtatctatttttatttatatataatcatgtacgttatatttatttaaaatcatctataaatttttacaaaaaaaaattaatagtttattgtgtcgaaaataaagttcaaataattatttaattttcacgcatatttttttaaaaaaataataaaaacaataacagtcacacgtgcaataaaatatttaactttaaaactaattataaacaattaatttaaaactagtttaaactctttctttctttccttaattaaataagtattactaactaattagattttatttttaacagtgtaaactatttaaaaaaaattcaaacataagtaattttaaataactacaaacttaacttagtacccgatcatatgaagaaaaaaaaaataaaaaaaaaaataaactaaaaaattttgctaaataccgaaacaaataaagaatgtatcatataacaacttttttcaacccgagtaatatagaatttttactcatgactataaatattattaacttggtccattaaacttgtgctatatatataaattgcaagtgggattattggtgctgttttgggacagggtggggactggtgtactcagaagctgtagagtgtaaatcctataacgatgaaaaacatttataagtgttttactaacataacaaaaagaaaggtatcaaatccatgacaagcttgtaactttcatgaatcttcttgaaaattatgttggaagttaggtctgttggaatcccaataaaataatgaaaatataatattatgatggaaaaaagagatcgatttatctaaagtaataaattaaaattatgagataaagcatttgccctaatcttggctttctgaccccccaaaatgccaataatacgcatgcggtgttcactaatttaattaattactaatactttatattcaaggaaggaaagaaaaaagagtttaaactagttttaaattatgtgtttaatttaattctatactatttgtgttctcaca

SEQ ID NO: 198318 - DNA, 732 bp, Cannabis indica
cattaaagatgaccaaactaattagcaatggtcatcaagaaattaagaagatcaaaactgaatcattgggtttaacttccacactccaagaataaaacaccccatttcttaattagttatttagatttggtttgaaaaaaacataagaaagaatatatattagtattttattaataagagaccaaaaagaaacaaaagaaaaggggaaggagtagaccttagtaagtaaagaataatgaagtggcagaacttatttggttaacaaaagctgaaccctaataacccaaatcaaaccccacccaaaaaataaaataaaattgaaattagtcagaacaaaccaaaacattcttgtttgctttggcagacactatccctgaccttacatcaagttgagttccccatagattattattcaatctcatctccatgtttactgccatctccagctagctaaatcatgagcatttttgttcgttcggtaccagtaacttttataggtggcgtctcacaattggttagttatatgagactcaataattaattacactaatagcagtatgacaccgaaaaaattattatacatcaattgtctcttttagcaattctcctaatacagtacttatataaagaattaatggttttgagaacttttctctggcgaaaaaaatgtaccttacataatttacatcaatgtagagcttaaaagaaatgtagtatctttattattattat

SEQ ID NO: 198319 - DNA, 984 bp, Cannabis indica
aaaataatcataagcgtaaacatgaaaagtgtatggaatcttaaaacattaattaaagggaaaacactcaaccttaacattttcatcattgttttctctactacaatctctatcatctttgtcttgttcattatttccaccgcaatcattatcatcatttatattaagcccatgataatcatcatcatgattatccttttctttagactcatgatcatattctttttcttgttgatctttttcttcttcctcttctccttcggcttcttcttctttatttgcttcttcttctttatctacttcttcttcttcttcttcttctgcttcttcttctttatatgcttcttcttcttccttctcctcttcttcttctaaaacatatttttctcatgtctttgtttagttctcctctcattaaaaagagtatcattatgacaagaaggagattgggacaaatcaacggatgaatcctattgaacaattaaaatataaatttaaatggtgtgaactaaaaaaaataaaaatatgacattaatatgcaatagaggttgctattggggtcactggtagggttgctgcatataaatatcattttcttacagatggtttctataatggtggctgaaagggtatctatatgtcaactaagaaaataaaaaaatataaagatacataaaatatgctatgaaggttgctatttgcatagttattaggtttgctgcaaataatgactgttattttataacagatggtttctgtaaaagttgctgaaagggttacaaaaaaggtatttctatgtgaacttaaaaaataaaaaatatataaagatgctatgaaggttgctattggtgccattgttaggtttgctgcatataatgattgtcattttattagagatggtttatgtaaaggttgttgaaagaggtacagaaagggtatttgtgatccataattatttttaagaaataattgcacaaatcaacg

SEQ ID NO: 198320 - DNA, 940 bp, Cannabis indica
aaggcattgtaatatctgtagagtgaaagaggactcacaggagagttatcggatacggcgaatggaaaagcagatgaagaagaagatgaggatgagaactctggtaggaagcggagagcgtcgaaacttctgaagaggaagaagcaaccgagcaaaagagtggcaaagaggatgacgtggcggaggagtagagccggggattccaaccggagaagcttggcggaggagaatttgacggcattgttggttggaagagacatgggaagatatcgcctccgctgtaatgagggcaggtggaatgaacgcatatagggatggatttggtacttgggtaggttagaatcggaatcggaatcgaacaagaagaagaagtaaagtgtgttgttgttgttgttgttgttaagggtaagggtggtagtgatggtgggtatccgccattgtcagagctcagtggaaatggtaatggaggtggaaccgacattaatggagctgatcataattcataataaatcactaatttaaataaaataaataaatagcttaatttatttttttactttaaatctttatttatttatttatttatttgttttaacagagtgaacagaaattctacctaaataaatgcttaaatttggactactaactattttacattttggtaattggatatgcaattgaaaaaaaaaaacaaaactattttccttatttttggttttttaaacaaactttttttttttcttctttctttaatttagaaaaaagtttttctttgaaactataaaattagagtgtgtttaggtaaaagaaattaaaaacaaaaaattataaaagtaaaaatgtgtttagaataaatatttttgttatttgtcttttattattatttaagggaggtaaagtgagagtaagttatgtgaaaatgataagagagaattgaata

SEQ ID NO: 198321 - DNA, 1250 bp, Cannabis indica
atttggtttatttgtcactacttaaaaaaaaaatgtttagggttgggacaatttgggttgatgtcgcataaaatgtaaggattataagtaaatgctaaactcaaatttgtttaaacggacttatttattcattatgtcaaaaatttaaattcggttcaaatccggtccgtttataaatggatttgaccctccatgaccctttggcatatctcttcatttttgttctaccacagttaattacctattgctatccactctaaataaaaattgttgttacctttatctcaaattgggttatgaaagtgtgctattttatttaaaaaaaaaagaaaaaaaaaagttgggttttgacagcctaatgttgattgaccaaagaaaaagtctaccacgactgtactctgtcatactccatgagttatgttctagttgagcagccagcctatgctatttattatactttactttccaaataatataatatataataaatttttaacaggagaatagaaaggtgtgttaggtagacgaggggagggtgaaaatttgagcgagtgatagagattaatagagaataccgatggctactgcttcacaaattgtggcgaaattgaatctcaatccacatccagagggtggattctacttcgaaactttaagagacaactctgttatgctctcaaagtctcaactcccaccccaatgttagtcactctttcttatattcatctttaccatctaactagatcgttttgattttacttcccacaatatcttatctgggtttttatttatttttttaaaaaatttattcatatgatctgccttagatttgggttttttttttttttattattttttttttatgtttattttttcatgtcaaatgtttaatgttattgacttacattggagaatcatatactcctttttgccataatctgattcttatcttattaagtttaatgttttgtttctaagaccagaatgttaaattgatatctcatttgttagtcttctgttttcttagtagtatgaacttgtgaattgatactgtcttaataatgtattaatagataaggtagagcgggctgtgaattcatgcatttacttcttattgccatctgggaatgtgtcaaaccttcatcgaatcccatgtgcagtaaacttggctatttctacgttgggagagcctattacggttagtaaagtggctatacttgcttctccataacttatgcatctaagcattt

SEQ ID NO: 198322 - DNA, 1153 bp, Cannabis indica
aatccaaagaatcaatttatggctgctacagcttcatctctgccattatttctaagtgcaagaagatctgcatacccctcataccatgcctttttcttcgtccagaagaactacttccgtagctgtaaattattatgatcaatgcagatcaactgatcttggacgaagtagctacatctcgaaagtacaaaatctttacaaacctaagctgatgatgaattgaagaacatgaagtagctagctgctgcagcctggataaactgacagaaaatgtgacatttcatatagacaagaatataaatcatgataagaacatttcccacagtcctccaaaaagaaaaaaataccactttacttgtccagacatagaaggcccctttctttatttttcttcttgtagcaccttcagattcagcactatcagaatcctctgctgaaaatattttgccttctgctccaatcatgtctgttctcaagttcaagaatatactgagaaataaacgaataagagacgtctttgggtggcaaaagcatccaagtaaacatcaacaagctgcagatttacaaaagttaactattcagtacttactattattactatcattattatcacttaaaaagttaagtctgagtgaaacaggtaaaaatgaaatgaaggggtaagagaaaaagaatatgcctatctttcctgatctgtcgagaggcttgcaatgcacagctgcaaccatgaagaagatgaacctttctactattaattttagacagagtagtagagaggctgaacaacacatgttgttgttgaaaatccatgctatccatatatagagataatgaaactattttcttttcaatctatgggcatcttccttgctataaataactaataactactaaactataaattatacacgaaggtccctttaaaagattgagagtttagcagtataattgaatgtataaaagttgaggtatcagaaatcaccagaagaaattgatcaagcaacaagctactttttggttcttaacattccagtgctttatgataagttacttggagtcaatgcttcatgaaagaaaaaaagaaaagaaaaactcactgaaaaataagtgtaagtaaatctacataatagaatgcagcgctcccagcctataa

SEQ ID NO: 198323 - DNA, 3266 bp, Cannabis indica
tggcctcaggctagcacacgaagggtgggttgaatacctagacatagaccacgactcttaactagtcataggttatgtcctaggtgattttacagttcaatgcgaaaagatgatggcctatttaagctaatatcaagacttgttaagtcaactcaaaagctatattaaaagtcaagtccccaaaaaacaatgtaacagccgacacattcactcgaccagccagctgcaccttgacaaccaagggaaacttggtacccgctcaattcttcaaagagataagcatccttatttcaaaagaaatagacatgctagacaaccaatatggatgacacccatagcagcatacctccaaataaagaccttgccaaaaagtagggctaaggggatatttactgggtgtctaatccatgacagcataatgcacagacatggtatcccaataccacctctaagaagtgttaccaagaaagaagttgaatatctattgatagaagtgcatacagactctacgacaatcatgctgggggaagaagccaactgagtgttgaagggatctgactacaacatcgacttggcctctaagaggatggtcgaccatggcctcaataggcttgttggccatggaatcaacaacctgggcaaccactacctccacaggctagccgaccataacttcaacgaaattgataggcaaaactccgaagtggctagccaccttgtctataacttggctaacccaatccgctaatagtctgctctcatacttttggtctactatgaccaagaagtaaaccatatcttgctagtataatacgttgacgtaagggaaaaaggaggagactaagccaacttaaggtgacatttctaccaacaaaatgttactaggtacttcaacaaacaaatcaagaaaagaaattcttcgtaagagacttagtgctctgaagaatattttttgataataaagatcctctagcaagcatgtttggactaaactgaaaaggtcggcaccaagtttcatgataacagtaagagtgcaaagaagccaatagagtacaaaaggaacttggaattggctcttctacaaaaatactataatagagaacatctcggtaagtgctctcactatccaacttgtatagtggttcctctaaggtttcaccacacaagattccataaaaagagctagtacccattgctcttcagtgatggccttttcacggtaaagactacagaggtagccaaatataaaagagctagtaaccagtgctttttagcatggcctattattaatcttcaacggtggcctctgcccgacatctcaagtagaggtagccaaaatgtaattttaaaagcaaacattaagttgtaagcttttgttacacataagaccaattgtgtctaaaccatttgataacaaagataatttctgaaagttattctttttcagttccacatgtgtacactcaatagcacccccaagaaaattcccaagcaatttctatgaaacttggtagattgcaagtgacaaagagactgtaagtttgcgtgcttacttgtgggcacccacaccgaacaatgcatcgaactagcacagagaacttatggaaagaaattttaacgcttagtataaactactaaacctgcctctaagtcaagtgcacgcatacttcagcttggcataaagaaaagtaaatttagatacttagatgtcaaggaattaagaagatagccaagacgattatatgtccattgttaaaggctttaaggctaaacaatagtagtgttcaaaaatagagtgcctataggccaaaagcaagaacaggaaagcctcaaggccgaatatgaataaaaaattggttcaaatgtataaagccaaggctccataataattgtacagccacagaagaaccggacagagttcttataggaagcacataccaggctaaatctctaaggcaaggtagagttcttggcaggttttaagccaaaaggcagagttatttgtaagttttaagccatatacaaaactttgggcaaccgtacccaagggtacttgctagacaatgtcattgtacaaggctgggtatcagcaaagtgaaagtctcaagtataacaacgtggacaaatgttgagtcgtaagttgagcattcgactataaaaaactaaccattaagtttcatatagagtttctaaggaatccacgcatgagactaaggttgtatatgcctacaaggccatgacataattcttgtcgaggtcaaaagaggatagaaaacttgccatccacttggaaacaaggtttaggctggccaaggttcccaagacatgagagggtcggccagggtgccatgactcagccaagaaccagccaggatcgtaaaaccaaggcatgaactgactagcttcctagggtgaaaccctggagctggccaactctcatgattgaatcctagggcgggccaactctcatgggtgtataaggatgcacactactctagtatgaagccttttgggaaggtgcccaaaattaataccgtgagggctaaggcacaaagtagaaaatatgatcctaatatgggagttaaggtgaggtggtagcccaataaggtgaaagagtacggcccaaataattgtatcagagccaagtttgtgaagaaaaaaatgccaagtggaggaatgatccccttccaagttccaatgctcaccaagagcaattatgccaattggagtattaagatgaaggccctactaatcgctcaagatgtgttggatattgttgagaaaggtcataaggagcaagacaatgttgctctttcccaaactcaatgaaaggccttaagggattcaagaaggagggacaagaaagctctctacctcatctatcaagaggtagatgaagatgcgttcgagaagatgctaaatgcaactacgactaaagaagcgtcggagaagcttcaaacttgtaacaaaggagtggagaaagtgaaaaagattcatcttcaagctcttagaggtgactttggaactttatttatggaagatactaaattaatctttgattatttttctaaagcattatcaattttcaatcagttaagaagaaatggcaaagaaattagtgaaataaaggttataaaaaagttcttagtactatgcaatgaacctttgagtacattgatacaatcattgaagagaataaagatttagaattcatgactgttgagcaactcatgagttcttgacaagcgtatgaagagaaacaaaaa

SEQ ID NO: 198324 - DNA, 1388 bp, Cannabis indica
tttgtcctcatgggacctatgggaaatttcatcagtagattatttattccaaaagctataatgcagagaaaaagatggtccaaaacagttaatcaaaaggacataattagtcactgtctggcaccaaagatggaactcaaagacatgtttagttatctaaacaagtatggggagtttgaggttatcaaaaggattgtctacaacttttcttactggaaaccagtggataatcatcttaagaaattaatttttgaagagctgaaagataaatccatcaaggcaattaatttgagagaagcaatagaggcatgttcacaaagaggagaagctgctctgttacagaatccttcaagctatatcaaactgaaatggagcataggtgagttccaatatgctgagagccttcttctttggcacttagctactgagctctgctactatgatcaggccaattcaacagaagaagatcaatcattctggcaactctttgctgaacgttgttgccgcacatgtgtttctctaggccacaaagatgatgaccaatcaagtgaaagtgattataggaatatttgcaagctcatttcgaattacatgttctatcttctagtcaccaagccagtgatgttggcaccagttaagggaaattggaacatggtttttggagatacttgtgcagatgccaacagatttttcgaaaagtacaagctttcgcgccatggtaaggtgtgtgagaagattctatctgtgaaaccgaaaattaaatcgacagctgtgaaaggtaagaggagcaaatctgtgttctttgatgcatgtattcttgcacaacaattacagaatgagaaatcacaatggaagattatgagtggagtttgggtggaaatgttggcatatgctgccattaattgtacgccatttgttcatgctaaacagcttagtaaaggaggagagctcttgagtttcacatggctgctaatgaaccacttgggcttgggaactcaatttgccgagcaagatcaccatgctggaacaaagatcatgagcagagtcatttgagaaactaattaattacataattctatcatcaataatagttatatgttagttacttaattgaggacaaacaaatttggctatattaatcaaattttgagtttttttaagttacgaagtaaatgaatagtttattcaccacttttcaaaaaaataatatattatatttactttttttcagttataattttgtatttttttcaaaaatattattagaaaaaatgtatataatggctcctctcaaattatttatttttcacttttgacctcccttgcaaatactttatgcctcagtagtcctggcactatgggaacacataaactcaaataatttatct

SEQ ID NO: 198325 - DNA, 960 bp, Cannabis indica
ataattaataagagaaataataattaattttcagcttagcacagcttgggggattggattagtaattggtccagctcttggaggtttcctagcacaggtatacaaaattcttcttcttattaattattttttctttataataacactaattttataaaatgaaaccaaattcattatataaatccacaatgattttttttttttcattttaatgataaaattgaattatagcctgcagagaaattcccagaaatattctctaaagaatctatatttgggaggtaagaattaatttcaatttttttttaaattgttttttgtttgtggttaaaataaataaaatattgtgaaattaataatgacaggtttccatactttctacctagcttgttcatatcagtatttgctttgattgtaacttttttgggccaatggttaccggtatgttcataataataataataataataataataatgatgatgattttcatgtttattaatgttattaattatggatgattatatatttttacaggaaacacttcactttcataccaaaaatgatgaagaaaaagaaaattatgatggtccaaaagaagatttattggaagaagatgagaaaaaatcaaaacaaaatcttttaaagaattggccattaatgtcatctattatgctctattgtgttttccaacttcatgacatggcttatgtagaggtaattaaactaactaaataatgaaaaattcttccattataaatttgatcaaattaatttcatcattaaatctcaattttgttagatttttccattatgggctgttagtcctaagaagtatggagggctaagctattcaagtgatgatattggtgaaattcttgcccttgcaggtacactaccactttatattttttagatatcttaggatcttttatgtaattatttcaagtcgattacgca

SEQ ID NO: 198326 - DNA, 781 bp, Cannabis indica
ttattttaggaataggagttatatttcaagtctggtgaaatgactcaagaataaatcatgttattccctaatcaagataacgatgtggttaaaaatatcaattccaacttgaatgaaattcaacgtaagattttttttatggtacttgctttgttcaatttttagacatgcatcctcttgcattacaatctcaagtggttcataatgctttacatagggagaggtgcatcataaaaataaaagaaatgtggtttaggttttgtagtgagaattttagatttagtttggctgagtttgcggttgtgactggtttactatgtgttggtgatactaatttgagcaagtatacaaacagagataatgcttttgttgataaatatttttatgatcggacagtcactgttagtgttgttgagaagaggtttatgtatagtgagtttaagtctaatgagttggatgttaagatggctattttgtaccttgttactaattgcttgattagtatactccaaaaaggttccagttgagattcttaatatcattggtgttgatgagtgttgactggatttttatccaaccgacgcggattcgtaataaatgagattcaaaccaaaaaaataaacaataaatataaataatgacacttgaatctaaagaggttcaggcaaggatgtcggtaatagcctactcccctcgtgttttattaattagagttgtaaaatcaagaacaagctcttgcatgcaaaagataacaatggcaaagttcttttttttttttttt

SEQ ID NO: 198327 - DNA, 1075 bp, Cannabis indica
tagcttattaatttttacagccttcggatgttatcaatgaacagtaaccttggacaaatttcaactgtagagtagatcctacagttgacaattacaaactagttaactaaactagttaatctgcttagcaaactggcttaggttggttcacaaacaaagtggcccaatacaacttgggctaccttaatctgacccattttgtttagagcagatcaaaaccttgcttcaaaaatcaaaaccactagaggtacccaaagtaacattcactaaggcccactgattggcataaattagcaacatatacagttaaatttcatgagtgatgagttgtaaatacgtgtgtattatgtcgttccaccccataccttgaaatgcttacaaaaatatgagcaacaatagaatgtgcataaatcgattaaatccaataacaactgatcgccaaacattagatatttaattatgatcggatcggattattggatgaagtgtctaaaaatccattacatccaacatccaattaaactaattagtattttataatgtaatatgtaaaatatatatatacataaaaattaacattaaaattttacttttttttcttagattggatggatccagtctaattcaatacatattggacttaaaatattagatggatccgatccgatccaaaaaaaatactagtctaaaatattgaataaatctaaattgaaccaataaatatatatatgaaatacatccaacggatagattggattttaagtctgggtactgacttagtggcaatcttctttctctactctctcttctaatattcttcatatttgagatgcgaaaatcagctggatggaaatctgggtactgacttagtggcaacgacatcacaattaaggagggggagatctcgatgggttgatggcaacgaccatgctagcagatctgggcaacagtgatcttgtgaatgaatttgggcgataatgacagagatcaaggcagtggcgataagtattgatccttgttatgttatcgattttgtaaagattaattagttaattttttctagattagttgtttt

SEQ ID NO: 198328 - DNA, 1137 bp, Cannabis indica
atgacatcaaatttctcccaagtagcttcaaactccggcatgtccttccaacgaatcaaaacctcgacgacttgatccacggaggaggggtcttgtcgcacgttgagcagctccccaggttcaacaatgagttccaagtcagaggacaaagtaggagggatagtcggggaagaatgggcttcaccaacagcagctcgcagttgtgacacatgaaaaaccgggtgaatggcagcggaagggggtaaatccaaacgataagcaaccttcccaatgcgcttcaagactgaaaatggaccattataccttgctgccaacttctcattcttccggacagcgagagatttctggcgatagggtcgtaatttgacaaagactctatccccgatgttgaattccacctgccttcgtgagccatctgccacagccttcattttctgttgagcgcgcaagaggtgcattttcaaatcatccaaaaatgagtccctctcttcgagccattgatccacggccaacaccgacgtggacccggtcgaatagcgaaccaaagagggtgggtcacgaccatacaacactttgaatggggtacaacccaaggaagaatgataggtggtgttcacccccgacactgccgactgaactcccgtcaccgccacttcgacttcttcaacacgagattccatcctcgtaatcaccggcatcaaccaagagcgtcaagctctgataccaattgatacgtacctggtacttaattaacagcaacaacagtaatatatcaatgtaacaggaaagaggaagaggaatacttggaagctttattgaaatgtaaggaaaaaaggagactctagtctcatacaatagagagaaaagttcccatgatgcagagaactttctcagtacttgcataacccaaaacaatagcttcccttggctctaaaaggccaaacaaccaccacaattcccaaactaccctctaacaaactcacccagccaaaagactccacctacccttgattaaccttccttctagcataggtgaaacggataggaggcttaacattcctatcagcgacatcttaaaatcacaaaattacattgtgaaaatgtggtacggtgcggtacaatttgagcgatttatac

SEQ ID NO: 198329 - DNA, 812 bp, Cannabis indica
cataacctataaaataatatgataaaacgaaagttatgtcatttcataacctataaaataatatgattatttttctgtagtaaaatgaaagttataagttgtcacaagttaaatttacactttaatattttcaccttttcaccaaattcacatacgtctgttcatcaggattatttttgttagtagagtttttggaacttttggatagcattcgcactgctcacacttacaaacgtagtatacacaatctttcttcattgttagtcaaaagtattcttattgaatgatcttcttgaataaactttatctggatgtatgatctctacagaaatttttatgtattacaagatttattttagtttcggctatacacctcagaaatgagatatggcacaccttaattttttttttttttttgtaatatatgtattgtttgaagaaggtgtcatttaagatattttgtggaaaaatctctttttgaaatgaattagtattttgcaatgtgctgggctttttgtccaagttttaatgggatcccatctatttacctggaaattacattgtatggccattttattttatttgttttaacttttacttttattttctatattttttaagtacatacccacttttataaaaattgttcttattatacccattagattaatgtaaatcatatgctatacttaagtggagggcaagggtatattaggcaatctactcataaaagtagtagattttaatgaaatataatataagactatttttgattaatgaatacaaaaaaaagtaattcttcaacttattcc

SEQ ID NO: 198330 - DNA, 1850 bp, Cannabis indica
gagatttgttatgattacgaaacgtcatgcactgtagccgttgcttctccggctggtcccgactcttattgaagaataccaactccatttggaggtggttttctcgccggagagaggttgttaatcggcaagaaaaacgccccgaaccataacgtttaggaaatggctctattttacacaatcattttgactaaaaattcgaatattcaagtgcccgtgtggggtctgttgcagtttaatctgttattttctttttaactgttctccttcgaatattcaaaatgaattctatccttatggtggttttttccctctttctttgtagttaactgcctgttcttgttctttttgaatttttttctcatgctcccatccttctctgcactttgattgcctaccatggatcctctttcgcattctttgcactctacactatcactcactaatgaagaaagtaatgtttttgtaatccctgactccattcccacttcaaacaattcttcatctactcatgtccttctcgcccgtgttctctgttctacaccagtatacaaaccccggttctgtgatcaaatgaatggcctatggaagggacgtttcccagttaccatatcggattacaatgacgaaatcttccatgtttcttttgcttgtgcaggtgacaaacttcgtgtgcttcgtaaagaaccatggcatttccaaaatcatctcatcgtcctgcacacaccagatgctttacaaaatgcctcaatggatgatctgatttttactccgttctgggttcagatttatcgccttcctttcttgagtaaatctgcacaactggctgaagcattgggtaatcttattggtgattttattgaggtttatgatgattcaaccaatgagggttggggaccttttctaagagttcgagtgaagttatgtgtcaccaagccgttaccaaggggtcgaatgattaaactccccaatatacgggatgaattttgggtggatttccgatatgaacgactacctgaattctgttttgaatgtgggaaacttgggcatccctttgaacaatgtgtttcttttatggaaaggatggataatggtaatgatgatgatctcccttttggtccatggatgaaaggcgcaaatttaccttcggatagttacgatcgttaccgtactgatttttcaaaagggaatgcatggccccttctcacccgattggctaggaaatcaatttcagcaactctacctgcttcctcctctcggttcacacctcaaccaaacttgctatttgcaggagaatcttcctctgtacctgctctataccaaacacgcactcaagacaattcctcaaacccaacacatactctgcccactctctctcaaactcacacaacctcccagccaccatcacacttaccataccaaaatcctgctcacaccagtcctaaattgaagggtattatgttagactccaacttatctaaatcctccctctcacccactgtgtctattgtgaagaactcaagcaaaactaatcccccttccttaattcctccatccgcccctttgtcctctacttcatccgatgttgctgtgttatcccatattttcactcctgacttgggacacatgtctttaaatacctttgccacttatcccccatccactaataccttgcagtcaacatataactcccacatcaataataccatctccaccaaaggcaaacaaattttcactacgactccacccactatacatacctccatccatattgacaaggaaaacattgctcctaacccagtttgtaagaggcagaaggattccttatccttgcggaacaccttgaaacg

SEQ ID NO: 198331 - DNA, 1322 bp, Cannabis indica
gctgatacatcttctatctattttaacatttaaaagaatttttagtttaattttttttttcatatttgtataagttagatatcttataaaattttgagaaattcaaaataatttacaatgtagaaaagagtgttcaaatattcaattttacatgtgtataaaataaaatagtcatacgtgcaacatactgtttgaacctgtttttagcgttttaattttttttgaatttcttaaaactttgtagaatatcttaaataactgtaacgtacatgactaaaaattaatttcgaataccaaaatagatagaaatgcatcgatacaatttttttaagagtgtatattgcaaaattttctaaaaaaagacccatcgactacttattgtgttttcggcatataaatagttataattctaatttttttttatatgactatatattataattataagaaacattaccaattttcaaataatttaaaacatatatcaaactttttattgcacatatgcttattttttttatacgggtaaatgtaataaaatatttgaaacttgattttagtaccgtaaattatttgaaatttctcaaaacctattagaaatgtttgttgtaactgtaatatgtagtcaaataaaaaattgaaattataactatctacacggcgaaaacataaaagggtacaccggtgaaccacttgaaaactacccaaatctgaattcaggagcattgttgtttgttatatcctttcaacttgtgtttcaccacaccaaaccttcaatagagtgtcaattttcacttctataatcttaatttatgcagattggaaaggaaaattctgcagatggagcaaatatagggctgatcaagaggctgcaatgtcagtcatcaggaaatggatctgtcgtcgcaagtacagaacctgtcaatggtatgcatagtaacaacatcagaaaacacaaagttaattgtagctctttcgaatgtttttagatcagatgattatacagaagcaatacaaccatgtatgggcaatctatagggtaattctataattcaccttcaccctaaaaatgaccgtttcggtattcaagagagtcttttaatctaatttggtatttcatgatcgtgtatcgttgtagttatttagaaccacgtataaactttcagaaaattccaaacagtttacagtaccgaaagtaaggtttaaattttattgtacaggtgactgttttaagtaactgtttgaactttattttctagcattgtaaactattcaaaaaaatttgaaaatgtcttgaaaaacgtacatgattatgaaaaaaa

SEQ ID NO: 198332 - DNA, 2094 bp, Cannabis indica
tccgaagcgatttgagcaagatttcgatcaagctaaaaaaccgtatggaattgaaatgaaagctcagatgagggaaaagaactatctcattggagcacaatcgctaaagacaggaaaagaagactttcagccggttagtggtggctcctctcaccggagtgaggctgaagaccgatcaaatgagatggctaaaatcatggatgtcgatcccatgatatcagggagtaaagggagggaggtgattacggccaaaggaaatcaggggagtaatggagttgatattgtctctgataactatatggggaatgttactattaataataatggtgacaaagtcaatttacaaaataatgagctggtcattgttttggtaaaataaaaagaaggcgtatggagtatgagagtgatagagaattatgtggaggtggagaaggagtgtgatggtagtgttggtccaaaaaacttaatgcaggtgggtcttggttcccaggcccaccaaacattatgagtcttatttcttggaatttccatgggcttgggaacccatgggcttttcaattcttaaaggaccttgtggtccaaaagaaacccaattttgtattcttgtgtgagactttgtcaagaaaggatgtaattgaaagagttcgtgtggcaatcggttttgaaggagcgattggtgttgatgctcatgggaagagtggaggtgttgctttgctttggagaattgcggatgaagtgcaggtgcttggctgtggtgtcaattacattgatgctttggttaaaagcaatgatactggggattggagactcactggcatgtatggtgagccaaatcgtagtcttagacaaaaaacatgggatttaattcgaagcttaaaagaggagcaggagcaaccttggtgcataattggagaccttaataatgttacctctcaacaagacaagcgtggtggaaatgcttatccaaattggcttattaatggcttttgtggaatgttggatgattgtggcctacacgacttagacttagaagggtacccttttactttggagcgtggtagaggtacggatgactggattgaggttcgaattgatagagcacttgtctcacaacaatggcttgatctgtttccgactgctaagttgatcaatttggaggtatccacttctgaccattgccctcttattttagtccctgttaatatggctgctgttactgggagcagagtttttaggttcaaaaattcttggttaaaggaacctctttgccataagattgtggaagagacttgggaacaatatacagatagttctataatggagaaaattaagaattgtgccaatgttctagctgattgggggaaagattacactggaaattttaagaaaagaattaaagaatgtaaagcagaaattcagctttggaagaagggaagggatcctgtggctgtagctaagtattaagaagctcaaatacaattgaataacatcttgatgcagcgtgaggtgttctggaaacaaagaagcaagcaattatggcttcgggagggagaccaaaactctaaatactttcatgccaaagcaacatcgagacgacgacataatttgattcagaatttcaagaataatgatggacattgggtcggctgggatgatgagttgcctaatgtggtgactaattattttcatcagcttttttgcaatgaaaatgtcgactatggggaagttgttgattgtgttcagcaacggatttctgaggagcagaatggtaaattgatggcggttgtaacagcagaagagataaaacaagctttgtttcagatgcatcctgaaaagtctcctgaacctgatggcatgactcccgggttttataaaaaattctggcacattgtgggtaatgatatcgttagttttgtaaggaacttcttcacttttggaacgtttccttctaatcttaatgaaactaatattgttttgattcctaaaaagaagttgccagaaactatgagtgatctccgtcctatctctctttgtaatgtgttgtataaagttatctctaaagttattgccaataggttgaaaggtgctttgccg

SEQ ID NO: 198333 - DNA, 1334 bp, Cannabis indica
ctcttcttctaactcttgcttgaacacccagtgcaacattaagttaatgattcaaggaatcctatgaggaatgtaaggatatcccctaaaaatatatagcagatggattatatatacatatatttgtgaaattgatgacaataaataaaagatagtttgtgtgaataggtgcttattgtgaatagttgtatctatatgtgggaggatgcaactcttagtaatttgtatttctgttaaaattaactttttattggagaatattctgttaaaaaacataacaatctgttaaatgcacaacaaaaatggttagatagacatttatataataggtaagatatatatatattagtgtattgctatttgaagtttggtctaaaataaagtgatcattttagtaattgtgggtcattgggtattagagtgtcatgggctaaatgtgtagataacataagcgatatttctaatttattgaggaactaaattagaaatacttaaaattaataacctatgaggttacaaattggtagtggtcgccaagaaacaagagcaaatttctattctcatcttcccctaagagagaaaattagaaaaccctaagtcttgttttcttgaaagatcattcccaaaatcaccacaaaggtcatctctacaagatggattaagatcatcactatctatggattaaagtacactgctatttggcttcttctctttgaatcaagaaaggtattctataaataaaaaaaaaaaaaaaaaaaaaaaaaaaaaaaaagttactctaaagtcttgtcttttgacatgagtgttagccgtatgtttagcgtgctgtgagtctttgtggtttgtgagtttactggtaagggtgtttttgacgttggtttttcttgttcgtgcgatctgatggcttcaagtagacaaaactttgctaatatgactgatcaatatgacaatatacaactggaggaagaagaagagggggagttgttatgtgatatccctgaggataatggtcaacctattgatgatcgatggtgtcttgtcggcaagtttttgacttcaagaatcatagatttcgactcaatgaagaatactttagcatctctatggcaacctggcagaggagtgtttgtaaaagaattaaaacataatctatatattttccaattctatcatgagatagatatacagcgagtcattgaagggagtccttggacattcaatagattccaactaatctttgaacgtctgaaacagggggagaatccgagaagtgtctgattaaatcgtcttgatatgtgggttcaactgcacaatcttaaaacagggttcatgac

SEQ ID NO: 198334 - DNA, 821 bp, Cannabis indica
tagagtgcctcttcttttactctattaaaacctcagacccatctctaatggcttccacactctccaatctcaggcactccctttcactcactctccaatacttcctccctcttgccgggaaactcacttggccaccaacttctccaagacccaccattctttacaaacccggtgactctgtttcgttcaccctcgctgagtttactgtggatttccaccatttcacaagaaaacatatccatggagctgcagagtctcgtcccctcattcctaacttggttataaacgacgtgtcgtcttccataatggctctgcaaatcactctgtttcccaacattgggctctgcatcggggccaccttccaccatgctgttctcgatgggaagtcatcggccatgttcatgaaatcttgggcttacatatctaaaaccagtacaccattgtcaccggaacttacccctttttacgaccggaccaccattaaagacccggacgatctatacactacgtacttaaaccgatggttagccaacacggcctctgttaaggaaccagaggccccgtccgattgggttcgagcaactttcgagctgaaacgtgaggaaataaacaatctccggagatgcgtttcgatgcaatgggaagaaggaaataaatcagctcgaaatctcaatgcctctcctcttcgattgacctcgtttgtcctggcctctgcttatgttttgaccaccatggtcaaagccacagaaggtgaaaccaacaggagagtttactcatcgtcacggccaattaccgacgacgtttagatccaccgttgccgg

SEQ ID NO: 198335 - DNA, 1371 bp, Cannabis indica
aagtcacatcatcccactgagtctaggtcaggcaaggtttacactcaagaggtctcttctgacatctcagccctcctcgaggagagtgagtccacgtgtcatttttatgggagtctggtctcaagtttttaggtgaaaaattcacactataacacatgtccctagtttcgcgattgacagttgtgtcatgagggaaactataagcgagaggcaggtaaaaggttgtcatgagatggtaacttttagttgtccaatcgagggtttcgaaaagacgactataatcatcatttttaatccatttggggtgccacgtcatcaaaacttttcgaagtacgtgcaggcgtggttatggataaccgttggattgtgagaccttaggaattcccatgccacgtgtctccatcccactaaatgagggatattaatatttaaacttcttgatacgaattgatcctttactcatttctctcttattttccttttttctcttttttttccttttgaatttcaaatcctcaaaaaaattagtttacattttttctgagttttcatcatcagagaagaagtttggagttcttgatatcctcggaatcactagaaaaggagttacttttcaaggttagtgaaaaaaaaactttaggtaactgtttttcttgttctgagaatttacacttattatgtatctttgggggtagaaaatgtatgagataatgggatatacgtatgagaatttatttgtttttgacaaaatacatatatattttttttttaggtaaatatgtacttaaaacttgaataatcacgggtttcaggaagaacaccttgagtgctcgcatatttcctgctgagtatttcgaatactcgcaagttttttgatgaatatctcgaatgctcgcatacacttctgaatatccaaaaactgactcgattaaaaaaatgactcgattaattgttacctagctttaaccttttttttttgctgaaatttaatgattcttaggggttttttagccttcaggttatatatacttttgttatgaaactttcgcatgtaaccttcgcatgttccttgggtcactgtgaaacacccaaccatttgagacatgcggttagttttcatttttcttattttgtagtcgtttataaattattaggactaactaggttcttcgtaatggtgggtgtgtcccataactcaatgttcatgcgaggaatgcatgacctttgggatacttggatacccccagccatttcttgaggtacacagttagttttaaatttgcgacttattttttgcgaggattgactgaattctcaaaatggtgggtgtatttcagtaccttaactttcatgtagcgacatgatcattat

SEQ ID NO: 198336 - DNA, 694 bp, Cannabis indica
aagagtttattataataattaatgatagccacaaatatcagttcaaatggaatttgtttatttttattttattattttattatatataaataatattttattattttattaaatataaataaaaaatcacccataaatttttcataaaccaagaattcaattatatagatagatagatatatgagtcagtaatgttgaattgattaaacccctgaaaaatagatatatgagtataatattttatatataatatatgggtttacattttgtcgaatatatatctcttatactttaattattatacatatgttgaatgcgatatacatatatatatttatatgagttcatggatctgacttggtcaagaaaattataagtttttttaaaattctaagagcatgcctcaaaatcaagaagtaaaaaaagagaggatatatatatacgagtgacacaacgaaaaaaaaaaattgataaatacttacttaatcgtggcactgtagtttgaaaaggaagatcaaggttttttccaatggtttttttcaatgggtgaaataaactcatatatatgtactgaaatcgtacatataccaatatatataatatgtatatacgtgcttcaccagtgtacaaagttaaaccgcgtatattatatattatgtttcaaatatatgattcaaataggaattgaattata

SEQ ID NO: 198337 - DNA, 1104 bp, Cannabis indica
aaaaaaaaaaaaaagagaaatcagttcctacgacactaagacataaattaaatacaatcagcttcacaataaaatgggtaaaaacatacaacacattataactaaaaaaaatatatatatataatatatatattatgttggtcaaattatgcacacagcatgaaaaaagacacattcatcataattttgtcactccactaatattctaaaaattattactcaattaaacaacaaaaggcaaggaaagaatgaaatgatataaaggtattattattattattattattatggttaatcatcgagcataattaacccactaaataaattacttttttcacaagataccaaaataacaatgcaaaactaaataaactactacatgaaaaaagtgaatacaatacaacacataagaattcaaatttgtgattgacaatattcaaaaacaaaacaatacaacaactaacaacaaaattaacaaaaaacaaagtgagaagagcaatagaaccaaaacaattgctaaatcattacactgaacatacaagcaccaaatcgaataatcaataacacgcacaaacaagaaatatcgcaggaacaaaagcacaagaaaaagtggagtcaagaaatgctcatttgatattcaaatctcaggccaaatagttgttagaatttgggataaaatgaatggggttctatctcaaaattaactttggtagctatttttattttttgggtcactattcttgaataagatgaatggagttctattttaaaattaattggttatgagaggagtagctcatttctcttatatattctattatatttctacacattagtaacgtaggactatctaataatagttggacaaaatatgatgaatgaattgtaaagatgcacgagtgaaaggctctgcccaattagcatgaattaaaaagaaaccatcttattatgtgccttaaagcttatgcatagattatacaaaaaaaaaaattacatgttagttttttcttcattgtgactttctcactctccaaacacatgttagtaactaaggtttcattatacttgtgttgcattgccattaaattattattattttttttt

SEQ ID NO: 198338 - DNA, 1615 bp, Cannabis indica
gggtaaaattgggttttataaaaaataatcccattttacaaatgttacatgctattagtttagaataataatttttaggtttattaagcatgatatttaaaatttcccttacaaaatcagctgaaagtggaattgaaactgttatagctccaaactatatctatatctgttcctagagcctttttagctaaagtctgtgtaattacattattgtgtcgaggaatgtaagagatcttagctctaggaaaagaagataaagattcaataattttccaaatcatgtctgataatggagatctgtccttcgaacggtggtttattttatttaccaagcacaaacagtcagagtgaatggagtgcactggacgatcaacatcgatgcaccattgaatagcttgaaaaagagcatgagcctcgactagaagaggagaaagaacaactatttttgaggaacaaatagcagttgtagtgtggcccgtccagtcttgaacaacagccctaaaacccatttttgaatttgacgttgaaagtgctgcatcagtatagagcgtgtacctgcctaatgggggtaaatgaggttgatgatctaaagcagaggaggcagggcagggaattgcaagatgttgttgacaggtagagtattcctgcaagagattaactgcataactttctacttcttctgttggaaggttcttggattgaaatagagacaaattgcgcctgttccaaataatccacaaaatggtaaaacaaagacacagctgatcctttgacaagccttcataacctgtaagaataaaatcttttatatcctgaaattggtgatcattataaaaatcaattaggctggttttcttccatattttccttgctctggagcatcctaggagagcatgaatgactgtgtccaaatcagaagaacaaaaagaacagttaggggatgggataatatttctactgaaaaggttagaagaagtagggaggatatggtgataagtacgccaaataaagtgctttattttgggaggaacaggaagatgccaaagtgttttccaccattttttagattggtccagattggaggatgaaggtgcagaaacattaaaagaggctcgagatgaggctaggtgataggctgtgttaacagttaggtttcccgaaggatgagaactccaaataagagtatcatcttgggagggatcaatagggatagtgagaatggcagtaactatatcatgagtgaattatgtatgaagcttttgaagatcccaacacactaaatcatttatgaaaaaggacacagtgggaacaggaggaggggaattaattttgaaattaagggatttgagaccaggaacccaataatgctgaagagtagaaaccgatttaccattaccaattttccaaataagcccctgatatagtaaatccagaccccataaaatactactccaagagtacgaaggagtgtgacccttagaagctgtaaggaagtcattattcttgaaatacctggctttaagaagtctagaaactagaggattaggatttgtgaagattcgccaagcttgctttgcaagaagggcttgattatgaaggacaaagttacgaaatc

SEQ ID NO: 198339 - DNA, 967 bp, Cannabis indica
ttattgtttttgtgtatttataagtatttgtatgcattcaaatctttattcagattctgtccaagtggcactatgatcattactatccttactttgggctgcttcgatacttaggcctaattgggcctaccttttgcactttattgtatctggatttttttttatttgggctctgcagtaggcttattgtgttttctattttgataattttttttttttaaaaaaaaaacataaaaataataaaaattacaaaaatatggttttacaaaattttaatatatttttacggtttttaatattttatttacataaaatatagtatttcgatgtatttttatattatattcttgttattttattgttaatattttgctatttgtatattattttttatattattttgatattatttaattagttattgttttgataaagtgtaattttacaaaaaataacacaatttatgtaatttttccttttatttttcccatcaacattatatgaaactactaataacataaaggaattgcataaaaaataacaataataacttaaatacgtattcctagttctaaaaaaaaaggaaattacatacatttttagataatgtgtaaaaatatgattttttttttttcaaaaaaaaaaataaatataagttaaaaaaaatgtgaaaattaatttagggtaacttgttaccgcttaaggcaaccaattaccccttgacttatattgtttttgtcatatttttaagggttaattttcacaaatgcacaaaaacaacaaaaaaacaacaaaaataacggtttactacggaattttaaactaattttacgtacttttttacttttattttactataaataacggtacttttattgttgtaaatttgttctatttgttgttaattttttgtttattatgtatgttattttcgtttgttttttgttttgtttattttgtatgttac

SEQ ID NO: 198340 - DNA, 1112 bp, Cannabis indica
gcaacacagcttgcatttgcattcgcattgcaggtgaaatgcatgcaaaagtacacagtgtcttctacttttaaattggcttgacacgtactattatagattaaacaataaaatcatatattagcaaaaacatatcagaatccataaaatctattttaaatagtatgattttctaatttttacatcaaaattttactctttaaaacttgagattttttttaataatgaggattcaaggataaagatactttatctgaagcgatgtaaaaaataaggaataatacctgtttattaataatggaataaacattaaattaatttaactatttttaatttagcccctcatcaaattaaaaaatagtctaattagtatctacatattaaaatcataacaattatgttcttaagttataaactttattccaaaataaaccacataaatttaatttatttatttaatgacccaacacacatttttatatatacaattatgaccctaataatttttaacacttataaaaaatgttatattattattgataataagtaagtaatgaattgtatagaatttaaaaaaataatttttaaaaaatatcactaaacaatcatagagtatcacttataaaaaaatactgaatatcatttgtccttaaaaataatactctttttcaaattttttattaccaaaattcaaatataacatttattaaattactaatactgtatcgtagaattaaaacatatagctactaaatctaatataacaatattactagctcattatttagtacttatttgcttcctctctaatttcctttctttctaagtacaatccacctttctcaaattacaatggtaactctttctttttctttattattttcttttctattcatgttcatcgacacattaatacataaatatgtacatatggttttcattcatttctaatttgtaagatagttttttcaaaaatttgtaatttgaagatagttttttaaaattttcttgttggatagtttcgcctaaaggagttgaagagatatctttgcaaggccacacattatttttttttcctaacaagacacagattttctcatatatatatatat

SEQ ID NO: 198341 - DNA, 700 bp, Cannabis indica
aaaaaaatagataaataagttttctttctttttcttaaatggaatagataaatataagtataaattgattaatagaattaaaaattaaaaaactaataaaattaagaatagaagaaaaaaataactttgagctgtatcaccacctcatgtctataatagtatatattgtagttataatctacatcctacttgattttaacaaattatgttatcgattattctaaacaaatattttcttccacaaaattacattttctttaatgaatacgaattatcaaaatgatcaaaataatataaattaagacctagatgacttagaatagtatactttttattgctattattataattatttgaacaagacttagcataatattttctttatggaaagactatagatgagaaaactcttaaaaaacactcaaaattctatttcaaatatcaaattaacaatttctcattatatttacaccaataaacttacacaattctaataaataggagatgtggatataaaatgaaaaacataaaacaaattaaactattttagaacaaaagtaccttatgttattattattctaaattattcacaatacataaggatatgataagactatcatttttacttatttttaataaaaatagaatcaatgttacgagttgacttagaaaagtgggttgaaattggacgagttgagac

SEQ ID NO: 198342 - DNA, 3667 bp, Cannabis indica
actaattataaataccaaaatagtatattgtattaaaccgggatgccgctttacaaaataattacaaacgactcatagtaaatgttccaaaagtttgtcgcctagcggcgatacaaaataagctctactgtcccaaagactgtacgcttcaggcataaccgccctgacatgtacaatctccatctgctcgctctcatagttgcttaaccttagccttaccctgacctacacatgcatacaatatttgtgagtcgacagactcagtaagaaaagtataaataataacatagcaataatttagattataatcaggcgcccatacacccaaccataatcctaactaagccatgaacattctcaacaaagtatgactaactgcgaatccagcctatactcagtactctaatcgtactgatgtggtagcagataactcatactatctgctagcctagcatatatctgttggcatcttggtgcaactctatgtacacctcactgatgccctgatatgccaatctgatggctatagatttgcctagtctgatggcaactaacatgtacgctaaacatgtatacctacatatatgcaaccattatactaatcttacctcatttttgaatttaggtgtgccggccaatttgagtggaacaactgctcgacgaattacaggctcctaaatcacattatttacaaaactagtaagtgacacgctcaatcacttttcagggacttaaaattgaaactagaagttttcctattgataaataacatggcaataccttcaatatcgcaaaaatgggaataactagggttctaaaaaataccccaaccagaagatcgattccccaaccagaattcgagttctgtggggtttcctagggaccaacgagaattcccattccaacaggtccccctgaaccagaattctggttcagtgtaggattcgcacaaaaattcactacactctcaattcaaccccaaacttaaccaaaccttctaaacctgcttaatataccccgaagaacatatttcaagcaacaaaacaagctaacatgctcagaatcaaaaatcaccattaaagaccaaagtttgagttctaaaacttaaactttgtctaacaaccacaacaagtcctaaaataacttcaaagtagctcatcaaacatcaaaataactccagaatacttcaatgaaaaaaaatcacaacaacagcaaccccaaatcataattcatgcaaaattcaatacttaaagcttaagaaaaccaagagaaaagattctaggagttaccttgagttggacacactcaaaacttgctggaaacttcttgaatgggcagaaaaatagaaaaccctagctggtttttctaaggaactcgagagagagggagagaaaggtatagcttttcacttattatcttttttttttattatttttgaataataaagtaaactgaggtattatctaaataaaacaagagataatatcatatttaatatgtttactaataattcacttaagacaaaatttcaattagggaaaatatattttcctccccacttaaccaaaaagtctcaaaactacctaagggtaatttggtcaattctaaaatctcgactattcttgacattcttaatgtctaactatattgtcccgccatactaaaaatacaaaaatgtgattctaatggccaaacgccgcgttccgatgttaccaggcataaaatattcatatatgacatatataatgcattatgaattcaattaaatttccataaaatgataaatcataaatattatgcaagtttcataattaaaccctaattatctgctaatttttaaattaaagctaagaagtctttacagttatgatagttcctaagactttccatatatctagttcaaaaggtaaaaattctattgaatgtgacatgtcttttttatattgtaattcaagaaattaggaaagtagattacagtaatttttggatccttgttttcctttgtgattcgattaggattaataatggaggttaaagatggaaaatttggatttaagttagtgaatttgaatcaaattggacacaagtccgataggtttataatggcatcccaagccagtcaattattttatatgagtgatccattattagatgcacgctggtcagttgtcttgatgacgcaacaaaaaaattatgataatcaagagtctaatggcgatgatgtcatgcttagttacaaaattcatcaaataactccaccacctattgatgtcactgttggggatgatatcatatcatctcgtgatgatggtaaaagattataggtgaacgaatctatcaatacatgagtcatcaaacacgtattgttatttagtctttttgatatatttatttttaactatcaattttcatattttgtatattctaatgcatgttttcaaatttgtgtaggattattcatcatggaaccagatggagacaatgagtggagtgcttggttagattatggtggtgatgatggtccattcgtgctagaaagatatagtgttgatcctgaacaaccatccatggaggaagaatatagtgttgatcctgaataaccaccatagaaaaataatcgcgggagaagcaaacagagcgatataaccaaaacagaaagcaagggaaaaaagttgaaggttgagtataataattatagacaacactggggaaatggagggatggcgaaaatgactcgaattggagcatgggtgaggacacatcgtggcctaatttgagtgaggatattaaaaactaattatggaatgacataaaggtaatattaattttcttagtaatatgttttactattgattatgatttatacttataactatgattgttaattttttcagatcgtgttcgatataccagagaccaacaagaaatcaactattttaaaaggtggagagaggtggaaggattggaaaaatatcctaaaaaaaggtatttttacattcaaagatgtttctccccaacttctcaataagccaccaaaactgtatgaaagcataattaatttgcaataatcgagagagtttggggcaagtaaaaaaaaggcccaacaaagcatggcaaaaaatatttaaaaaactatcgcttcagacaaggtggtgtaaggatggtttaagagcaaatgaagaaacaagcaggcgaccaaattaccaatttttatagaagtgaagtatggaaaggacttcacatgaacataaaaggtgaggtgggggtctagctacggaaattgttgaacaaattgtatttaaagtataattttatttataatatgtttcataatttatttctaacaatatttgttatgtttgtaggacagtagcgggagcaaatagatgagctcctttgtctagttttttcccagcatagcggcgttgtgggtatatcccatgcgtctagttccagtgttggaggagcatcgaatgaacaagcccatgatgaccttgcctatgatcccgtagcacaacccttgggtcctgccaatgtctctaatccaccggatcccgtatcacaaccattgggtgctgccaatgtttctactccattaccaccaccatgttccagaaaggtttctgctccagcagcagcactgccagctactggtggtgttgggttt

SEQ ID NO: 198343 - DNA, 1566 bp, Cannabis indica
ttttttctagctcatgtatatatttttttatgaaaattttatataattttttattttaatttttttgtcataatattttaaaatttatttttatttgataagcatattttttaagaatatgaattgaaagaaaaaaacttaaaaaaaattagtataattaaaaatataaattttatataaaataaaaattattggaaaattctataatgtaccctcttaaaatggatacgttgatgcacccttgtctgttttagcacctgaaataattttttagtcaaatttttcatggtcatgtatacgttatagttatttaagacatcttgtaaaattttaagaaatttggaaaagtttaacacgccgaaaactacgttcaaacagtgtgttgcacgcgtgactattttattttatacgcgtgtaaaatagactgtttgaacattgttttctatattttaaattattcagaatttctcgaaattttgtaggttattttaaatagctataacttagatgaatatgaaaaaaaaattagattaaaaaatacttcggaatatcgaattaagtcaagggtggtatccgtacatctcttttaaggaaatgtattgtaaaatcactaaaaattattgatattaggtgtttttaaaagtttttgaagtgtaaatataattttcgaataatacgtgagaagcactgatgagttagttgaaaaaaagtgagggagagagagaagaatgagtgatggaatttgtttgtttgttttttttttttttttgacaaaagtagctagaatttgtttttgttataaatttagaccaaagttataatttagtacgggtgttattatgctcacgtgtgggccgagatcgtatacagttcacactattatttaatatttattattagttttttttaggaaaaaaaagcaatattatttttaattttagcctgttttgcctgatttcttaggattcttcttcttctatttttctttttcctaatagagtttcaccgactatgacagtgactataattttatttatacaatttattgtataataatatatatagttttgaaggaaaagcaggtcggcatgttatgttatgtagtgcatgttttattgaactacttgcacttgtatcaatttataccaatttaaatatatatacacgctcttaaaacaaataaaaaaaaataacacccaaaagatagtcttactatctcaaaaaaacaaaacaatagaaaatgatgagtcatacgacacatcacacatttgtattactttatattgaattaatattatgtataaaagatgatttaagatttaaccactcctccacacacacatctcactctcacatactccaaacttgaaagtagcatatacataactactttcggtatacttaattagaatttagatgcaagttactttatatatgttgttgattgaagaagaaaaaaatccaaagaattaatgatagcgtagtagacttgattggatactttcttttgttttttttttttgtttttggtagggatttgactagattctttcgtttagacttgtc

SEQ ID NO: 198344 - DNA, 1183 bp, Cannabis indica
tcagtttttgaaataaaaaaatggttaaaccaaaaaaccgccaaaactgccaaaaaccgcaataaaccgtccaaaactgcccaaaattgccaaaccgaaaaactaccaaaaatcgtacggtcggttttatacgtttatagtttctaacggtcagttatgaaattgtaaaaactgaccataaccgaccaattttcacccctaccaagggttattccaaatttgaagattacttgaaaaacgatgttttgtttcattttcaagtaaacatcctgcaaaaataactagttataaaaagatttagacaaaatgcaaaaaataaaaaaaaaataagcaaaaaaataaaaaaaacaatgattaaaaaataatctggttccataaataaaaaaaataacacataaaagaaaacaatatatatataaaagaaaaattaaaataacttaccacattagaaaaacttgtggttttcttaatagattcatcagaaatcgaaggcccgatacccttcgaagccacacatttaacgccagaacgtattacacgacgtactggttgcttcgaaacatcagtatcagctagcccagcttgaaaaaaataacaaaaatgaaatatatacataaaaaaaaaaaaaacaaacatacaaagtaaaaattaacacaaatttataaacatctaataacatttttcttttggcttcgggttttcctaacaataggctctttcttatcttcgattggaacatcagaacttgttccagttacaatgtgatcaatgaaatcatcatcatttacatcagcagttgccttgaaaaaaaaaaaaactggtcataaaaagcttataaaaaataaaattttaaaaaataaaaatgtcacaaacaaaaaaaaacagttctaatactaaaacaagccttgaaacacaaaagatttgaaaaaagaacggttataaaaagctataaaaaactaaattacaaaaaataaatatttgaaaaactgtttctaataaaaaaaatcagttctaatactaaaagaagaaaagaacttaagaaaaatactcaccttctttttcttggctcgagtttttttaaactctggctttttagagtcatcaactggaacctcaaaaccggttccaaaatcaccaaacataggaggaacatttacagaaatatctacctcaagcttttaac

SEQ ID NO: 198345 - DNA, 504 bp, Cannabis indica
tttaatttactacaatatattaaagggaagaagatagattttctaccgccacatgaagtcaactagagtaagataagcaagtgagtacttggatacatttactacaagtagaggcctacttagacgtcctctttaatttactacaatatattaacaggaaggagatagatttgttattgccacatgaagtcaactagaatatcctctttgattggtgttgacgctgaaaagtggacaacaccaacttactagattgacgagatgtataatgaatgtaagcaaataatttagagagacacacaatttatagtagttcactccctatgttgcgatggtaatggaactacatggactttgagtttttatttctcacaagattactagaaaattagctaagtgcgaaagctctagtttgtagagagagatgcgctgaccttatgtgtacttttttgaatgtgaaatatgatgtgacagtcagtagtcccgtgatccgtaaggagaaat

SEQ ID NO: 198346 - DNA, 1692 bp, Cannabis indica
aaaaatatcatcacaactataatgcaatgataaagcaaccatactaaacaaatgtattttttgtaaatataaaaatttaaaacataaaaataatttttttaatttgtttttttaaaattttagtcatttatgtaagtttttatatacttaattctcaacaactttttttttttttattacaacccaatcacctttatacatcaattccgaaaataacttggtacattaattcatacatctttcccactccccaaaaaaatgaaaaaaagaaaaagaaaatggattttagtgaatatcgaaacctaaaatgtctgacaccaaacccacttttcactattctttcaagtcttttaccaaacgacaaaagtccaacacaacttcccctgttcgtcatttaccgtaaacaaatgacgttcttttcctcgtaatgcttcatctctgcaaatgggatacctggtaattacactattttattttactctcaaagtaatttccttttccattaaactttactaatttaatttttaattttgtttttttttcttctgaagctttgatcatggggtcattgtaatcatctgaaaggagagtctgtctcgactgatttgagcactggggtttggatttttttcttctcaacccaaagattttgatttttgaagctctgaaagaaaaatgccaagtgacccttcggaagagagtgaaaagcccatatttttatcaaaaagttcacacttttacaagataattttgagagacactcttgaagagaataaacttgtaagccctcaatttcttagaataatgtatatgataataacccttaatttgttatgctttttcacatgcaacattataggtggttttaagttttaactcaacattaataaattgatgaacattgaatgttatcactagtactacttgggagttgttcaagtagttgaaattttgttttgtagaaacaaaaggggttattttgtcaaaaaaagattggccactttgaccatacttgtaaatttgtgtagaagagtgttttactctttttgtaatggttttagtacaatgaagaaagtgaaatgatagtgcagatgtatttttgaaataattttgcctttttttttttttcaggggattcctcattattttgtgaagaaatgtggagaaactttaaccgaaacggtttatatcaagcttccatgtggttcaaaatggcaaatgaagatagaaaattgtagtgggaagttttggttacaaaagggtttctcagaatttatgaagcattactccataggtagaggttatgtgctaacttttagatatgatgggaattctgaactttatgttgccatatttgatacaactactatggagatagactattcctctttccctgctcattttgataagtctaacaatgatgagaaactccaaattcccaagaaggaagttattgatgatgatgacagcattgaaatcttggatgatatctacccttgtgacaattcaggggtaacatctcctagtgctcagtctcctaagagaataaaaacaagtcctacaggtaaagctcaagcaacttatctcatttagaagttgaagactcactcactatagatcctatccagtttttgaaagaattagaatataggaatcctattgatatcaaaggaagaattacaaagttccaaa

SEQ ID NO: 198347 - DNA, 1209 bp, Cannabis indica
ttaaatatttttgtgattgtcttccagaaccatatatttagcttagtcgcaagaaagtgattatcagaccctgaatgtttcatccaactttgcttatgggcagattgatcgatctacttggacccagtgaatgggtcatcatttttaatgggcttatttgattatacatgtgtcacttatccataaacctgcctttggggctcaggagtcatagaggcttgcaaccgccatccgaatttgttatcgcttacatctggggatgtgtattatttattactacatgtgttattttattcaaataggcccattaagaatgataagcccattcacttggtccaaatagatcaaccaaattaccaataagcaaagccaaatgaaacattcaggtatgatagtcacttcctctcgactaagccaaacatgtggttcaggaaggcaatcacacatttagttgaaaagtttagctaatcaaataattttaaatttttccaatgcacaaaataaaaagataaaaaaaatgtatattataacctcataaaaaaatattcaaatacaaataaataaaataaataaacaaaacaaaatgataaagtgaatatataaatgattgaactaatgtcactttactaaaattaagaacttaccaaatgtactacaataacttagttatatcaaaagattcttataaatttatatttatttagtttttttgtaagaatgtaaatttatattttattgtccattacatataaatactaattatgaataatactaaaaagaaaaaaaaaaagtaaaaaagaatttaaatgaaaaatgaattatgtattgtcaaaatgtgatagtttagacaagtttagataattatgaataaaattattcagttttgttgataaagtgatccaaaaatatatttgttgattggtgagaaaaagatatgattaataatataattaaagtaaataataatataattaaagtaaataataatataattatactaaaaatgtgtactattttactagttcacgcatgatttatattaataatataattaaagtaaataattaattctatctctaaaaattttaaatttattgaatgttatgatttcaaaaaataaaattatagaaagtaaaattttaaattaaaaatgcaaaaaagaaattaaaagaaaatatgctattgctaaggattgaacccatgcacttt

SEQ ID NO: 198348 - DNA, 1424 bp, Cannabis indica
aaaaaatggctatggtgtgagtggaggtctaccttcctagattggctatggcttggcctttggataaatataaaattacaagaatgccactgtcatgaattgtgcagaaaaagacggtttgtaataatcgagacaagtagacaaagctcatcgtggggtgtttgccaaaacaaatccaggtggctctttggtatggccgtgatttcagctcattctgagactttcttcctcatttccttccttatatcttagtcactctttctcaacctaagcccttgtcctttctgctataaatatagccactaaagcttcttctctctccacacacacactacactacacccctttcatttctcagctccctctcttcttcttcttctaagctctgaagacctgaaaatggctacattatactcagctttgtttgcagtttctttgttgtttgcaagttcagcctttgcagcaaaatatgtgccttatgaaggtaatgcttcaaatctgaactacccttttggctgttagtgtagactatcttgtccttgatctattatactatgcttaatcctttgctaatgatagttttagtaagtacaacagctcatttgttggaaaacaaaaacagtattttcatttggatcttgtgaactcaaatctgttttaaagttgagatctttgtctattgctctttttcatttttccttttgaaagtttatgactttatttttgggttttttttgcttggtaatgaagggtttggtacaataagagaattatacaaccttgtactctggatctttgtgcactgagcttttggtttttgagcttgtatctttgtttgttgtgttttcatacattaaaaaattcttttttctctagattttgttaactctaacttgagttcttacaaagttgggatctttgtgctttgtcgattagatgttgttgtcttaggttcttataaagttgggatctttgtgctctgtttattcagacattatctttgtttgttgtgttatgttacattttaacaatcttgttcttttgagattttgttaactctgtcttaggttcttataaagttgggatcttttagcactaaacatcattacttaccaacccttttgctcattttcttcaggactcttggccaatggcaactttgaagaaggaccaaaaccaaaagacatcaagaaaactgtactcattggaaaaaactcacttcccaaatgggaaattaaaggctttgttgagtacatctctggagggcctcaaccaggcggtatgtacttcccggtagctcatggcgtccacgcagttagacttggcaatgaggcttcagtttctcagaccataaaggttaaagcaggagctttttatgctctaacttttggtgcttcaagaacttgtgcccaagatgaggtttt

SEQ ID NO: 198349 - DNA, 1328 bp, Cannabis indica
ctataaacctccctttaataaaagcaccttgagattgtgatattattaaaggaaggatgttattgattctagaactcaaaagcttggtagcaatcttgtaaatcacattgcaacaagctgtgggtctaaaatctttaacagagttagaacatttcaccttaggcaccaatgtaattatagtagagtttatttctttcaagatgttacttgaattcagaaaagaatgaacatcagcacatatgtcctctccaatgagctcccaattgtcttgatagaagccactagaaaagccatctggacccggggatttatttgcaggtatgctgaatacagccttttttatctcatcctttgtgaattcctgtagtaaaaaatcagcctgacttgaggaaagaatagggccattcctgagaatattgttttccactaccttcctcttctctcttttggttccaaggagacttttataaaagtctaggaatgctgctgtaataagttcaggatctgtaactctgctgccctcttggttctctatggataggattcggttttgccttattctatgcttaatgcaagcatgaaataaggcagagttcgagtcaccatcttgaatccactccacttagctttctgttttaaaaataatgagtaatcttgctgcttttgacttaaatactcacgggctactctttcctgctggtgtaaactttcctcaagagactgctgttgcagctggctttggatactgtcgagagaagcctttgcctcatgaacctgctgatgcaaatcacaataagcttccctgtttaacttcctcaacctctctttgaaaagcttcagcttacaaacggcttgatacatttggttacctgaaatttccaagcaccaactgtcttttaacatagagtcatacttaggatgggatttccacatcctaaaatacttgaacagccccccccccccccccctatttgaggatgcaaagaaaggatagctggagaatgatcgaataatccctcattaagaaatacagcttcagcaaactcatacttcccaatccaagcttgattggccataatcatgtctatcttgaaatatatcctatcattccctggttgcttattattccaagtgaaaaaattcccactatctttaacatcttctagcttgcaaaaattcacacaagtaaggaaatcagaatcaggataagaccttaccctgtaccccactctttcttccttagctagaatgtcgttgaaatcccccatcacacaccgattctcattagaagacagatcacacaagtccttccaaagacctttcctctc

SEQ ID NO: 198350 - DNA, 1344 bp, Cannabis indica
ataataattaaactatttttattattttaataattaatactatgggaaccactaaaaatttgctacgtgtgtaaacgtaaataatcaatgtggcacttaatttaagtttttaaatggaagtgtaaagagcaaaacgaaataggagttcaaaatgttttaccttcaaaaattaagtttatgtcattaagtattacaaaacgtaaaattcaagcgattttactttcaatattcttaatataatctatatataataaatataatattggttggtgtgtattttaaataaatcgtctttgtgtcatttttagtttaggcataacaatccaaaaagtgatttgtttagccgataatttaattgtgtcaactcgaaaatgattcaaacctatttaaagtaaattcaaacacgtttatattgtgtcttatatacatattttgctaccaaataatattctcaagttataataatttatggtctattttttttttcttttttgagtgtagcgcaatagtatttttacaattaattaataatttatagcttaaagatcttggatttgaacccataatccctctcttttcctattcctcgctcaccacaaattttttcattattaataataagttatggtccgtacgttttaccctatgtacatattaaatttcaattaatattatttaatatttataattagtgtttgacatttttgagaaacgtacacgataattaaaatttaataatgaagaaatttaatcaaaatcatttaaacacacgtgtttttattttttattttataacatatgaaagtatctattaatgtaatatgtgatgatgtagatctcacatatgcaaacacattttttttaaaatgatgtacttaatttcacaaactttgttgttggttattgaacatacaaaatatagaaaatgactctagtacacccctttaaattaggaatgttctactagattttcttatcgtatctataaaaaaaaattaagtttatcttttcatgatcacgtacgttgttgctattttttaaaattttttgaataatttatttacagtgtcgaaaataaagtttaaatagttacttagtaaatgtataagaaaaaattcgcgcgtacaatataatatttaaactttatttttgatatttaaattattttaaattttcaaaaatttactgtaattctaaataactataacgtacacaatcatgaaaacaaaatagagtgaaaaaattttgtggatactaaaacgtataaggaattaccaaagtatatgaaaatgaaatcaaacaaatattgctataacaaaattatgtaatttcgaatgtaaaaaa

SEQ ID NO: 198351 - DNA, 3141 bp, Cannabis indica
acttttgccgcaaatatccctttctggattgacgagtctttccagagtgctagcccatcataaaattatcccagaccaaacacgcttaattatggagttctttcattataacttacctgatatttctccttaatgattacgggactacttactgtaacacacattaccacattttatttaatgggataattatataaattattttttgaaaaaaaatattacatttttaaattcaaatatttctttttacatttttaattacatagtaacattcaaataacattacaacaataacaaaaactaacatacaaataacaaaaaattaataaaagtacaacataaaaatatatcaaaactttctataaataaaattataaaaactgtaaaaatatttaaaattctgtacaactatatttttgtaattttttttattattttttgtgtatttatgaaataatccattatataattactctatgaataaaagttttcttataaattcttttttgaatataatctgttcgatagtagtcttatcctagtagatctagataatttagtattatgttcctgtttgatgttgtgatggcatggttttctagtatttttttttttggtaaatgctaattctattgatatttaacatgttcctatgtgtcatattgttattgctcaaattaagtattgaatcttataaataaagttattcattgttaaaaaaaaaaatagaaattaattgtcaaaaaaatagaaattaaagttaaaattagattgtaaaaaaataaaatctataggccgaaaaatacttttttaaatttaacataataattaaaaaagcttttatctcaaaaatggctaaaatcaaattaaaaaaacagagactgggtgtaaatagaataataacaaaaaaaaaaataataacattattattatttatttttgtgaagaaaaaaaaaaggcgcgcaagagaattaaaattccgttagaaccgttaactagtttttccaaaatttataggcgaatgtgtaacactatggaacaatgtatccacacacagccgcacttgaaggagcatcgtcatttatcaacaacaacacatctaaaattttcccatctaacaaacaaaaatacccacaacacattcccggaaaatttaccactttccttctgctacaaatttccactgatgtggggattatcgtcatcccctcctcccctttcaaccatgctttagttgattccacaaaccgggaattcgatctcccccggtgagattttgtgacaattctttttagaatattcggttttggatcatctcttttaatattcatatggaaatgtgggactttgcgaaattttctttttcaaatttgtactattctgtttgtttttcagattagatttcatcttaaaaaaaatggagcaatttcgtcagattggagaggtgttaggaagtttaaaggcgttattggtgttccgagacaacattcaaatcaatgagagacaatgctttctgttatttgatatctacaactctgcttatgattcaatagcagaggagatgagacttaatctgagattcgaagagaagaacacgaataagtggagaattcttgagcagccattaagagaggtctatggagtttgtagagaaggagaagcttatgttaaacaatgcttagaaaccagagattggttggcgaaagcccttttactccatcataactccgattgcgttgagcttcatatccacaatttgctttgttgcattccaagtgttttcgaagcaatcgaaatggttggagaaatatctggttctgatcaagatgagatacaaaagaagaaacgtttgtaccatgggaaatatttgaaagattacagagattggaagctttttcagtggaaatttggtaagcaatatttggttagtcaagaattttgtaacaggtgtgagatggttttgaaagaagacaaatgggttatgctcaatagaatcaaagacaagaaaatcttaggcttgagtaagaatgagcagcgtcttttagattttcttttcgaaagctttgatgggtcggagcctttcaatggaaagctcttaccactttcaatcctactaaaatccaaagactaccaagttaggagaaggttgggtggtcgaagtcaatacaaagagatcatttggtttggtgagagctttgtcacaagacacttcttaggtgatcctgagcctttattgcctgacatttcttcattgttgtctctctcacaccccaatataaataactttctttgtggttttgctgatgaggaaaagaaagagtggtttttggttatggagcttatgagtaaagaccttctcagctacatcaaagagatttgtggcccgcgtaagcgaattccattttcgcttcctgttgcagttgatctaatgcttcagattgcaagaggaatggaatatctccacttgaaccgaatctaccatggagatttaaactcttctaacatacttgttagagcaagagcaagtagtaatatcttcacagaagggaactacttgcttgcaaaagtttcgggttttggcttagcttctgtaaggagctctacaaatcagaatgaaacttttccattcatttggtatgctccagaagttttggaggagcaagaacagactggacgtgctgagaattccaagtactcggaaaaggcagatgtttacagctttggaatggtttgctttgagcttctaactgggaaagttccttttgaggatggtcatctccaaggagacaaaatgagccgaaatattagagctggagaaagaccattgttcccttttcagacaccaaaatatgtgactaattttactaagaaatgttggcatgctgatccaaagcaaaggccaagcttctcatccatttgcaggattcttcggtacatgaaaaggttcatatcattgaatccttttgactacaacaaccagcaagaccctccagtgccacttctcgattactttgacatcgagtcaagccttcttagaaactcaacttcttggggatgccctgatcagttctcatcaatatcacaaatcccatttcacatgtttgtttatagaagtttggagaaagaaaaaacaaattcaag

SEQ ID NO: 198352 - DNA, 555 bp, Cannabis indica
gctcgaccttgggcatagtcagcgtagaggtgcctagggtccacgtcctagctcagggcccgaataaaaatatttccttttaaaattatacatttgtttttattgattttaaaaatattatatttttttaaataagactctaaaaatattttttttcctatgactcactatatttccgccctacaaaaactatatatatttatattttttcttttatagtgttaatagtattttggaagttcattaaaaataaaactaaaaaaaagtgaccaaatttggtaatgagagaatagtctacaaagggacatattccactgaaatgatcctagaaacgttacaaagcatagtccacaatgataccctgaaaacaaaggcacaagctaagaaaactcagagactgcattattgatttctcaagaggaggaaattttcttgaaagcatggacgacattttgggagtctccattgatgatgacattagaatgcactcttatgatccagagtgtggagccagattcatctcgagccaccgcacttagcatgctcgaatttgtc

SEQ ID NO: 198353 - DNA, 1287 bp, Cannabis indica
agattttatgttttataaaaattatcgattcgacaatttattttgttaaatgataaattgagccttatattttttaaaatggtacaaaatagtagttcgaattaattttttatcaaaataaagcttaataataacttgatctattgatgctataaaaagactgtttacattttatatttttatttgtgctaaaaattatcttcaagttaattatattaagaaaataacaaaaattgagtttaggatatatattattttgtaccatttttaaagggtccattttataatttaacaaaatagaggatccgatcagtaatttttacaaaatacaagatccaaaatagtattacccatattcaatttactaattatctttaatgataagaaaatatatagggtaagtctacagtacatccccctatgggttgtttcggtagactccatatctatttcgacattcaggtgagccatttagtgtaattttttttctttattgcgtacgttgaaactatataggatcacttgtaaaaattttaaaaaaatttggaatagtttgcaatattgaaaataaggctaaaatattttgttgcacgcgcgactattttttcttatacgcgtggtaagcaactgtttgaactttattttcagcactgtaaactatttatttttttaaaaaaaataaaataaaattacgtgtggtcctaaataggtacaacgtacacgataatgaaaaaaattagactatttttttttttggatactgaaacagatagggggttaccagaacactcctttaagtagaggtaatgtgcataaatcgatccgatctaattacaaccgaccacaaaacattagatatccaattgtgatcggattgggtattattttttttatatctaataggattggatcatatgttggatggggtatccgaaaatacaatacatccaatattcaatcaaactcattagtattttcgtttaggttggatgagtaattaaattttatgttgttatatacttaaaatatatattcatatatgaaaattaagattaagattttactttttctttcttggattggatcgaattggattcaattcaataaaaataagatctaaaaaattatatggattcagttcgatctaaaaaatactatgtttaaaaaatattagataattttgaatcaatacaataaatatatatgaaatacattatataaattgaaccgatctaaatctaacatctaatgaatgttagatagattggatcaacattcaatatataa

SEQ ID NO: 198354 - DNA, 1292 bp, Cannabis indica
aatttttctgaaaatcttcatatgccaaagattcagaggcaaaccttgtactccaatccaagagtccctgcactctactttaatgttttccttttgtgactcccagctccatggagaaaatgacactacagtttgtgcccctggaacactcactttttgaatcttgattaattcctctttatccatctcgtccatacaccagacgatgcatctgtcatcaaataattggctgaccaccagttttctccctaactccctagagaggttatagaatatgacactccaagatacatgactgttgtcacgggtaaggatagtggccagctcccaacttctgatttgagccctcgacctcatatattcaaaaagctttggttggtggaatctcttctctggataaaatttttttggtttaaagctaggattgatggctgggtataattccatccactcaatatcaccttttcttcggccaaactttttagcagtaacaagcttttttgcagcaacattctccacctgaatattctgattggtcatttgtttccgaggctccttcactacatttgcccacgatagctggttcaacaatcgtccattatttgtctctgctgtctgctgaactctattctcgttaacaattgcttgttctctcttcatagtgctgttgagacaccttaaaaattcagaccacccgtttgccttctcttcttctggtatgatgactgttttcatcatgttgttcttaagcactgaaattttcaaaaagcttccttttatattcgagtagtactccacaagatagcagctagaactatttcgaaacgatcttttgaaactgactcttcgcctttcctctttctgctgaacttccttcacggtctcaatgatccaatccacagcatcaatcgttacagcaacttcatacccaaaatgtctagtcctttcacaaatgcgtacagagccgccatcacaattcaaagtcatcatgaacaccttgtgtttagtgtggaaactccaatattttcggagtttcggattataagtcgaaacagtactatttttccagtcaaaaccagtggggtagtcaccttttttcttcccaaaaccagtggggttttggtgctttccatggccagaagggccatgaaaccccctcgtgtgcatggcacagttctcaatcagaggagagagaagagagagagaatcactggagtttcagaccataaagtgctcatacaacagtcactaaaaaaagaaactttattccagaataaactatattgaaacac

SEQ ID NO: 198355 - DNA, 957 bp, Cannabis indica
ctacaaaaaaaagaattcattccatgtctcttttctatatgtcaaagcaaatatagtgttagacataaaaaaaaaattaaatgagattttatgtccaacattaatgaaacataaaaaaatttaaattatatatccaatgctgctgaacatatataataaaagcataaattggcgttaaatatattgatttttatatattaattgttattaatttttacgtccaacaaaactgaacatgacatctatatttgtcatgtccaatataattagacgtacccttatttatatatatatataattaaatgataaaatatgtaaatcgtgtgtttattttttttcaatcttttaatacatatcaaagtttgctatatatatacgtgtggccttttaatatcaatatttcctactctttctttttaaatatatctaatattttaacttgtcttccctaattaatacatatcgatactctttctccctcacaaaaaatttcttgcactccactctcagaaaccctagccgcaccagctactccctcactcatcctcttcttcctcttgttcaaactagtcccaaaatattcctaaagttgttgggggttcgatagggctcgtggttaggcttcctaaagtttagttcttggcgtgtggggtgaattagagttgcagttcagggaggcatgttgggttggggtaaaggttctcagcatcgatgtgtggtcgttgtagttctcggtgtcaatgcagtcatcgtagttctcagcatcatattcttcttcttcttcaacgatgagaacgcaattctcaacgtcctcttctttttcctcgcagatgggatctcaggtatcttggttaattatctcaccttcatccttccagttcacaaattttaagtaggaggaatccgactggagcttagaaagagaagcggcgggcaaggaatcccctttggcggctt

SEQ ID NO: 198356 - DNA, 1509 bp, Cannabis indica
ccacctaatagatatatgtagccggaactagattacctattatctcggcatcccacaaagtcggagttagaatatctaatgatctcaaagtgatctgacctcctatatgtgagcatgtaatattttgttctcttcaaatatctcgtaacctttttggctactttccaatgactaattcctggattgcttaagtatgtgccaatattccaacaatgtatgctatatacgaacgcatacaaacttgagcatacattagaatctcaacagctaaagcgtatggaatcttttgcatttcttgaattttaaggcttgctttagggcattgtttaagactaaatttgtctcctttaacgacaatggtatcgcctagtctacaatcttgcatgccaaaccttttgagtacattatcgatataactctttcgtggtaacccaagaatactcctagaacgatctcgatatatttggattcctaaaacaaaagaggcatcaacaagatctttcatctcaaaatacttagatagaaatctcttagtttcgtgtaataagcctatatcattagtggcaaacaatatatcatcaacatatagaaccagaaatatgcacttactcttactaaacttgtgatagacacaatcatcaacaacattcatctcaaaaccaaatgagagaatcacttgataaaatttgtggtaccatcagggccgaccctgagttgaaatgagttataggcaaaaaaaaattttgggcccttactataaagataaatagtatttttaaaaattattaaaaaaatatgtatattttttaggataaattgcggcataaatacctaatattttagattttatacacttaaataccttatctttatttttggtaggcaaaaatacctaatatcacaattctcttataccgttacaaccactttcgtttactcataaatatgaacacgtggtggactcagatgcattacatttcttttaattttaacacttaatatttttaatatcagaaattaaatgctatttatttcaacaaaaaaaaaaccacgttctcataataattttcatataatattcaattcgataatcatattttatatattgcactagtttactcaaccattaaaatttaatattgtatctccctttttcccatctctctcagcactaaactatttttggtgaatttatcaataaaatgatacaatataaacatatacgatactgcaaattcatatatgaatgctgtaaacaaatggcataaaagagagcaccagtaaacgaaagcccaattcaataatttaagcccaatcaatatcttgccactgatataaccaaaaaagtatatacttatatattgaaaactaagccactaaggttagcttagtggtgagggaagtggtgagggaaggatggaaaaaaagagagaggttatgggctcgaacttaggaccttgaaactattaagctattaaataaattacattaccctaaaaaaaaaatata

SEQ ID NO: 198357 - DNA, 738 bp, Cannabis indica
ttttttttttttctttattagttcttgcttatggcatttttttattattatttatagtactgtaccatcgtcagcttaagataagacctcaaatgaggtttttgtactttattgactgtaatttaaccccattttttgttctttgtcgacaaagacactctctctagcttgtcaaatagtattatttgagtattgaaatttattcacattgtaccaagttagtacattaaagaattataataccatggcaatgttatcaaaacaaaattgaactcacaattatttgtgaaattgtttttgcacaaaaattctcttttattctttattaaattaatattttattctgaagacattaaataatcttatggcacagtgcagccatagcataagaaaagctgccctgagacatcacctttgttatgtgaaaagaaagcaatcaaggtactaagttgtgttgtagggtttgccttttggccctacatgtctagtaattggaggattgatgaaattcttctacaccacgttttgctcaatcttaactttctttatctgtacttcacctttccaataataaaaggaaattatattcttatgtcatttttgatccattatgactcacctacttcctaattgaatttaaaataaaaaattaaaagtgttattgtagcgtgttactaatctcaatcaagttaatcccatttggtgaatggtgtgttttttacttttccaactaaaaga

SEQ ID NO: 198358 - DNA, 554 bp, Cannabis indica
aaaaaaaattatgtaccaaactattatagacacaactttttacacaaaaaacgtatacacataataacataactcaaatttgtttaaaagttggtcaacatgtaaatttattgtgttaataaatgctacaaggaaaatttccaattcacaattaatgtttcaccttctatatttcagaaggtgtgggtctaagtgagttatatatctgacatgattaaattgaaacaacaccaaccactaccaataccaattttgagaccaagaaaaaaattcatcctcaatacccttttttttatttcaatagagatgttagccttttcgttcattgattagctaagatatcttgtcaaggcatctgctaggtggaacggggaattgcctatgcttctcgtcatctcgctgaaattgacttgttcttcttctattagattttccttttgaaaaacaaataaacaaacaacatttttaattgtcttgaaacctaaacaccatattctaatattactattttactattcttattttgattctatttcaccacctaattagtttct

SEQ ID NO: 198359 - DNA, 1004 bp, Cannabis indica
tttccagaaactcaaacggaccggtaactttaggacttaactatttttttccaatttatgagttcccttcattgaaaacacttgaggaaaggcataattcccaacctagaattcaatatctctatgctttggatcagcatagctcttttctatgggctcactcgttccttggactacatcaggtccaaggtacctctgctcaccagcttcatctcaatgaatgggtgaacgacctttctttccgtagagcattttgtacggtgccacaccaatagtactgtgataactattatggtatgagaactcaatcagaggaaaatacttattccaaaaccctcaaagtctaatacacacgcccgtagcatatccttatatatccgaataattctcttagactgatcatcagtctgagggtgaaagattataccaaaatctaacttgatacccattactcgttgcaaactctctcaacacttggatgtaaactttaggtctcgatttgaaacgactgaccttagagtaccataaagttgaattatttccttgacatatagattagtgcattaatccaccgtatacattgtccgcattgataaagaaaatgtgttgactttgtgtatctatccccaattacccagatagaatcataaaaccctactattcttggtaatccaaccacgaagtctatggttactttttctcatttccactcaggaatctttagaggttgaaatatttccactgatctctgacactctacttaaacttgctgacaagttaaacatttgacacatatttcacaatgtcatctttcatacttgaccactggctttaggcttttcattatactcgtgtagttctagatcactttgttgggttgtcttgattctccctaacaaattaaattttattgtaatattgactaactttagaaaggttttcttcatttcatagacttgccctagaccctttttcaacttggagcatccgctaccacattttct

SEQ ID NO: 198360 - DNA, 999 bp, Cannabis indica
atgatctgcttttagtttgctcattcctgttcttctcatctttggttttacttgttttggtagtgctttaaaggatgggtttgagcttccatctcgccttggagtggctgctgctgattgtcttctagttctaactgaatatatgacaaaagttgtcacggttccaagcaacaggcagaaatcttctgatgcaagtgcaccaagtcaaagggttgagctactagctaccgatggcgataagaaagcaatccattctcataaatcattagaaacatcgaacaaagaagtggaacatttactttgggatcatttggaggaagttcttcatctggtgcagaaactacttgctgtaagtttcagtattttttagacttgacaattaaaaatgtagacaagtttataatctgaatgttctaaatcaataattatggtgtttttcatgaaacataatgattatagaaactacatttttccttaatattttggtataaggttcatttcactacaaactgcagtggagccgaaaaagtagacccttacatgcgaaaggattggaacaagtgcttaagtggctgcaagacataaaagatcgctctgatcatcttcaggttgatgcaagttctctaaacaagatatcctcttactctattatatcttatgttgtctaattgtcaatgcattgtgattttcttgtttgcaacatcaaagtcaggattcatgaagacgggaatattgttgctatcttcctgctggaagcattacagcaaactacttcgcttggaagatcgcaaaatgtcccaccaatacaaggagttattggaacagtacttatcgggcctccaggttagataaagctattgctgatgtttattattgctcagtagttgagtttattcaaacgccaaattctggctttctaatccttcccttctcatatggtgtctttagagaacagagttttttttttaaggtattaacaatatttttcacacacaaaaa

SEQ ID NO: 198361 - DNA, 1697 bp, Cannabis indica
ccactaaaatagacaatgtataaggtactccattcacatagaggagaatattgttatcagaaacacaaaccatcactaacagaaccaaacaaataacactgcattaaccatgaaacgacaacagccaataatgaatggatacaattgagattgttccgttttatacacacatatataagtatatataaataaaaaaaaattagttacaactaaacttctttcttttagataggagaaaaacaataataaaacatgttatgtggtgtgtatcctatacaaaataaacttaataattagtttttatacagctctatataaattcacagatagtacaaaatttcaatttaaaaatccacacatatccttctagtttgctctttaccattattctattctaattattattattactgatttaaccaagtcgtcaaatatggcattaataaatttaactacttccattctgagcttggttattattttctcatcatcaaccctagccaatgctcgctttcttacagagaaattattagaaaacaaacaaggcaatgagaatattgctaaggaaagcattatcgatgaaaagtttccatccatccccggaatgccatccattcctaacattcccggattaccatcaattccaggattctcatcaattccaggactctcaaactcaccacctttcttcaatattcctgggatgccctccattcctggaattccatccattccgggcatgccgtccattcccggaatgccgtcatttattcctggatttccatccattccaggaatgtcatctactccaaattcaccatcaccaccccttacttttccaccttctcctcctacttccacacccattgaatttccttcacctccttcttcttctactcctagtttttcaaccccgccttctccttctcctactagtccaaccactccttctgttgctcctggtactgaaactccaaattctttttcctcgcctattgtttctcctagctctgaaactcccagctctttcccatcatcaccaggtccaacaaattactaagaatatattatagtaataacacatatatataattgactagtaacatgttgttttagcattcactctgttgattcaataatatatataagtatatccacacggaccacacaaatatatgtaaatgtgtgtaagaatatgtacgtatgtagctatattaatatgtactatatgtatttatatgtaattgcaagctattgcataataatataaatatatggacttttaaataacatgataataatttgtattgtatacaaatcgggctaaatgttcaattttgcataactaaactgtacataatctaattgtgtttgtcaaggcattaattgaatcactacatcaatctataaaatcgtatatcttgtataattttaacttgtgtatgacattaaaagttagattgagtttctaataaatttattaagatgagaagcatttcacacctccctaatggaatagacaaaattatgtccacatctattagcaaaaaaacctattgtaacttccccacatcccaagtaccagatggacataattttgtctatttcattaacgaggcgtgaggcagaagatagttggtgctcgcactatgatcaagacatgatttctaatgtcaagagtagctattcattggcgt

SEQ ID NO: 198362 - DNA, 1170 bp, Cannabis indica
atatatatatatataaagaaaaaaggataagtctttactcaataggggggagaagaggttgctcgttccacagaatcagtttccattaaactgacaattccaatttgtttaacacaataatagaagacataataacacttccaaccatgaacactatctactaaagatttgaccaaaatttcccaatatgttcaatattctggctaaaagacagactttgacaacatattaatacgatcacaacttgcaaatagttacatacactgctgcaaactggaatgcagaataccaatgacaaagaccagcaaccttttatagcaatcaaacaaaacaaccaatgctgctgtttatggacaacatgacaccacaaaccataattgccaaattctttcatgctttcttccctccccaataaactgaagtttcattcccttttttatttccatgacaggcgtcattcattcggagctctctacatgtgtacatcaaaagtgtgtccctctcttttgcatcaaacctccactgctgctcttggttctggcgcggaagttgggtgagtttgatcttcaaccacagggttatcatcatctgccgagggctcagtttcgcttagctttgcaacaggagctctctcctggtcttgggtgaaagtttcggttttgtcacttgcattaaagtttgacttctcttcagtagccgctgcattcgttatgatcttctcttggtttgcattggatatgttggttttcacttcatgtttccccttggacgcaatcttgcgcccctttattgtattggatatagtggtcttttcagatggcaaggtgggaagagatttacggtgtggcttccttactggtacagttggtcctttggcaggaatttgagctactttttcatcaagacttagctggctggattgattagttgaattgttgtttcctacagactctgtcggtggtaagctctttcttcgtcccagctttggagatttggctcttgttgtcggtatctggcacaaaccaatacaaacactaaggccacaaagaattggaaagcctagtattttaaaaaaactaagttggaaacaataatgagatatgaagaattggaacatagtacagtaatgagatagcaatagcagttcgttttttttttaaattaggcagc

SEQ ID NO: 198363 - DNA, 936 bp, Cannabis indica
aaaaaaaaaaaaataacgaagaaggtgcatagtgctcctatttttagagtgcaagctctctattgttttttctttgagttgagggatctgaatttagaactactctataaggtaaaatgtattattattaggcattattaagtgaaaaaaaaaaattaaagatatattatgtcctgaatttaagaatatactattaaaatattgagtacttgatgatgcttattaataattgagagcaattttgtagaagtgtaaataagtagtgaaaagttaaaatatagtttatttaacaaaaaatgtgttctaatagtgtgccaaaaaggaatgtaaatttggcacatagtaaattttgtgccaaatttgatacaatatttgctataatgtaacatttacaccacaataaatgcactactttttcatttatatttatgtcatttttattattttattagtatatttaactatcacattaagttatgaaatatttatattattttctattgtcgtacatattaaaataataataaaattgattataaagtttttagattttatattttttaataaaatattaattagatattaaattttatattaaaaaattttgcaattgtttattggagtataaaactaaaatttaatgtaaatttattacaaaactaatttttatgctaaatatagcgcaattttaatatctctcattggagttataatataatatcaaatatttatttgtgtactttcccatgtaacctatatataattttaagtttgcatattcgtacaagtgctaggaaaccttgagtgataggtatcctaaaactttaaaactgtgataaaatatattatatagtcaaaaaaaacctatttcaagggtagaatataataactctttcaaaaaaaaaaagggtagaatataataatactttttttttt

SEQ ID NO: 198364 - DNA, 727 bp, Cannabis indica
tttggttgaatcgcggggaaaaatgtgggaataaagttgatttttatatacacatttttttattataagatattgttgatttatatatatatttttaaaataaatatagaatttttttttttggatctcaatatagaatttttattaatttagctaaaatacaagattgtaactcaacagcaatatcacctctgttggacactattaagaaaagaaaaagatgctctaacaaaaagaagaaccatattagcatatcgtttaataaaaataaaaagaaatattatttaaagatacaacatatatacgctaatcttttataataacaaaaaaaaaaatagcttaaattgctaccaacaatctcactgaaattttactttttccgacatgattgaattttaatgcatcccaactttatgtatttatagatatattcactttttgatggaaataaaaaaaaattactatatattaaatataaaaacatatatgaattatatagctcccattattatgttataatgttgaataactctaatatgtacactcatgttagtaggaagattagaaagttaaaatgggtcatagagtaaaaaattacatataatgcacaacttgccaaatgcaaatactcattaattatttataatgataattaacattacaaagttaaaatgggccattacaaattggagaaaaaaacaatgagaaaataaaaaataaaataaaa

SEQ ID NO: 198365 - DNA, 786 bp, Cannabis indica
tctaaataatagtaaaacatttcctagatatacgtacaatataatatatataatggaactttgtgtctactactatttaaattaaaatatataaaattcaatatttaattacactagctaataaacgtacttgaagagcatttctcatatataaatgttactggtcgatgataattcagctagcaaagaaaataataaggatgataagtactagaaaacaacgtgtgatggtggtgccatgtccagcccaaggccatgtgaaacccctcgtactcttttctcacaagcttgcccaacatggctttagaatcactttcgtttacaccgacttcgatcacaaccgaatctcgactgccatgaaagacgacgaggacgatgatgatgacaatactattgagtttgtgtcaatcccagatgggttgaggccagaagacgatagaggtgatctaggcaatttatgtaaagcaaacttggagactattcctgcagagcttgaaaaactcattacaaccataaatggtagttcgaataattacgaaaacaatattagttgtttggtttctgatgtttatttaggatgtgctatggaagttgctactaagttgggtattaaaggagcagtattctgtccttcctctgctgctcttcttgtccatgccaggtatataccaaacatggtaaaccaagggatcatggatgagtctgatggtacgtacctctacattagtttttatatattaattatagtttactcattcttaagctacgtacttttttttttttttt

SEQ ID NO: 198366 - DNA, 601 bp, Cannabis indica
ttatatcttgtgccaaatttgacgcgacttaccgatacattacctttttcacactccattgaaaaagttttaagagcaattaattagagttattttacttctaacttacttttcatattagtgacatatacatactacttctaactacttctaactacttttcatattattatagtactatatatatagatgtcatttttcttcgattgcccaaacaagccattttcttgatcaaccaaaatcaagcctaaacacccattaaaacaaaaaggagccaagccaaaatattaatcatgtcaaatcaagtcttggcttcatctcaattaggtgaaaaaattcttgctcgaccaacaacaaattttcacccttctatttggggcgaccgattcctccattacaatatttcagaacaagacttggtaagatcaaacacatatattgtaatcatcattatatatgcttaattaattaataatagttagttttacattgaactaattaattattaattaactactttatgcaaactattaactcaggtttgtaaacaacaaagagttgaagaattaatacaagttgtaaggaaagagatattatcttc

SEQ ID NO: 198367 - DNA, 614 bp, Cannabis indica
ggtatggttaaaaacacaatgaaactattacagtgagttgtataatagtatcaagctattcattttaaagtaaaacgaaaaaaaaaaaagtattcatttcacaaaataaagaaagaatgaatgaacaaacaaacaaaacaataaatatgattaacagaaaagaaaagggtaaatggtaagagaaaacttgtacctcggagaactgaggaggacgaaatccttgggcatccatggatacacaaccagaagaagaacccgcgggaggtgactttaccgccaaaatgactatataaacaaacggggagagagagagagagagagagagagagagagagagagagaagtacttgaatacagctgaatgctagctcctaaagggagtgaacctttgagcggaaagtattagttggattattgtgattattttagatagattttgtcattttgaggtgacaaaaaaagtgcacgaacgaggagtttatgatggaagaaaaggaaagcagtagacaaatgagctcaaaactattgtggaattaaataggcagacgagggctgtgggatctagccacccaagcagatctatagtgtggaagagaacgtagttgtacgtatat

SEQ ID NO: 198368 - DNA, 1012 bp, Cannabis indica
attgttttaggggataaggcgggcgtccagtgggaggaatccgacgtcatccatttttattctttgattgagaaagagccagggcgttatcatcttcgccccaagaagaaccgggctctcattactgatttagagacctctcataaagggtggaaggaaaagttctttttcgccagaggcctcatcgaatttgtttccgacaaccctacgacctcgtttattaaccggagctgggggctcctggtaattcaattacctctatcgttagggcgcccttctactcgactatcttctcttttctattttcaattattcaactgtattattatttttattgtatatatatattctcttgttttcagttttgaatgtattgatgttgattttaatgggggtacttttgtgcaactattgccaacaacgaggagaacgttatcggggatattttttctgagaaggtccgcaaagtcacagccctagaccccaagcttcgatcaatcaagtttcttgtttctcgtgaagccttaatcgaatcctccgcctggccttgcgaactcaggatccccctaggtatccccactccttatccttcttactttatttggcctgatttctgaaaatgcgctctgaaacacttaaatcaaacacccgagctgattttaatagagttttctgaggatcattcctgccttgcagatacctatccccatcatcttcccaaaatgaggctatctgaaatgactgttgaggagatcgaggcctaaaacgctgcccgacagaagaggcttatgtcgaagtcccttaagcgcaaaagcaaagagaagaagagcagcgcggcgaggcttgaggaagctactcagtcggactttggcatgtcatctcagcatgattcgaccactgacgacgccattgggaccctgcttaatgccctccccgagatttcatcaggcgtttgttagggcaagtgtaactccgcggggttggcctcaacggggcctcccaatctggaggg

SEQ ID NO: 198369 - DNA, 778 bp, Cannabis indica
gccgaatttcgggtataacagcgaccatgacacaaattaatgtaacaatttgaagcaggagattgagttcctaagtagaaaaaataacccacacttcaaaaaaaatgtcaaggccgacaaagaacaaagagccacccaggcagataataaccaaaaccaactgatgcctccaccaatggacaagcatctttatgtaatcattgggagctcgcaccttgttgaagactcaggcaaagcaagagaaaagtatgctcgagccttgcaatacgaccaaaatgatgcaatcctggtcgtggaggaaagaaaacctaaagtaccacgtgtaggggaaccaataataacattcaccaaagcaaatgctagccatgatatttttcttcataacaaccctttagtcgttgaggtaaagattgcaaacaacactactacaaaaagtataattcccttcggttttaagtgtcatttaaagaatttacgtcggttttctataccatagtcgcaaatagtattttattagcatcgtttttgaaataatgcaaaaaaacaattatctacatttaaaaaccgacacaaaatatgcaatcttcttttttatctattgcgtcggtttagaaatgacacaaaattgtttgtgacatttccaaaccgtcacgaaaaacttgttacgtcggttcaataatgacacataaaatgctgaaatacttttttttttcacctattgcgtcagttataaaatagagcataaatgtatgtatgggaaaattacaaattttcatgc

SEQ ID NO: 198370 - DNA, 854 bp, Cannabis indica
ttgggtattcatgaagcagatgataacactacttatttggggttgtctaatattgttggatagaaataatagtaatattaggctttcttaaagataagacgcagcagcgtgtgcaaagttgggaagtaaaaacttttgtcaaagtctagaaaagaaattctcgtcaagacagtagcacaagcactttctaattatgccatgtatgtattcttgctccctttagaaacttgcaaagatttgaaatgaatattgtattaattttggtggcgttcctcgtcaaaaaaaaaaaagtatccactggatgagttgggaaaggctatgtcatccaaaaacaaaaggtggtatggggtttcataatatgcatgacttcaacgtagctcttcttggtaagcaaggatggagattaatgacgaaatctgatgctttggtcagtaaagtgtacaaacctaggtattatccacatggttctctcttgtctgtcgagcttggaggtaatccaagcttcatatggaaaagcattttcgagtcccaacatctcatcaagaaaggtgcagcgattcagattgggcttggaaatacagtttaggtgctacgtgatccttagattcctagtgaggtcgatccttatatccatacagttagtgaatccttgattgatgttacagtatcaagcctcgtggttccggaccaatttcaatgggatcttgagctactcatgatattttcattgagtgtgatgttaatataattctttccattcctttatctaatggtgagaatgattcttggtactggagatttgaaaaaaatggacattacttgtgaagagtgggtacagaagcttgcaagaagag

SEQ ID NO: 198371 - DNA, 1851 bp, Cannabis indica
aaagatccttcaagttcacaagactcctccaataccatcttccctgggcaggggccttgtaactccaccactcttgatcatgaggttctttgcaacaagttgttgtttgtttcaggcctctttttccttctccataagctctaggttaaatggatctttatttaactcttcttggtatctcaagacatcctgtaaagttttagtatgagtagctgagaatctacatactccatcttattaaagtcgttcaacatctttttgactttctttaacttttgtaccacaatgaatattggagtcccactaatttgttccttccgaatcacttcaactcttcttaagaaataagcatggttagacgaccaattaaaaaaaaactaaaaggacttttccctcctcgcataatcaaataaactgtaagtacacttggactatgatcaaagtccccatctagatgaaaattccacactagtgtacttatccaaccaactttagtttactaaaaccctatcaagcttagcataaactctaacaacaccaacttgtttattattccaagtatgaaacttaccattatatttcacatcctccgatttgtaatttttaaagagctgattcatgactttgaaatctttggtagctcatttaaagctgattctttcttctagttcactaactacattaaaatttcctgaattgatccacggtctcttatatttccttccaagatccttaaatcttgccacaaaacttctcgccctaaggcctcattgtaagtgttatttgtgtttttgaacatgtgacacatgtcatataaaggaagagataagctcataatttcattaattaaaatcacccactaaagacacagtcacagagaagcttcacaaaactggaaacaagtcaagactaagggataagtggaagtctacctcgccgtatcttagctttctggacacggaagacatgttgtctctctcataatagctaggagtggtctaaatttagagcctgcatgcccaactaatacccgggtggatacttatgaagtgtctattgcagacactgactaaccagagtgttgcgaatgtctacctttggcgcaatctggatttcccaacattgattatgctttttctgacacaaaattaaatcgtcccttgtgtccagtcattgtagtgtgtgcacctcatccatctttttaccaaaaagttattttagacctctacttctaaaggttaagcctttaagcgacatgtttcctccacttttaaaggttagaacttttggtgacaagtgtccactatgtacaatgatctctgattatccaagctgctgcactcacgagcacaattgtttctgagggacccaatagtcagctttattttgcatgtaatttaccccattagtgagcttttagtaaatacttttggcgggtcatgggcatgtccatactcgcccttagtctataaatacccttccatttatatacgaagggggatcagaaccataattgccgaagctctgcctttcttcttcttcaagagaaactaagaacacagagttagggtatcctgcaaaataacgtaaacacatcaaacacgccctcagatgccaatagactgactcgtagactaaggttagttaacaccatgaaccacgtaaaaatcttcatcttatttattaagaattttactatttctttagctcctaaatattcatttttcaaaaactcggtaaatattttggtgctttcaataggagttgaaaaaaaacttaaacctatggttttgctgctgaagactactttatgggaagtatccactaccactacaagaaatcatagatttc

SEQ ID NO: 198372 - DNA, 541 bp, Cannabis indica
tcattaaattaattcatctatgcttgtatcatttttgagttttttattacaaaaatattaaattaaatattaacaataaataataaaaaaatctaaaacacactaatatatactaatcaaaatcccaagacaaaaataataaaaataactctatctatatcgtagaattaaatatagttgacttatcaatttattaacatatgtctatgacaagtttatcatgttaattattatgacctatttaactaatttaatgcattttacatgtaatgaacataatgaatacaaatgtatttagtcataggttaatattgtgttattttcaagttaagggagtctaataatgtttaataattaggttatataggagcccaaattcatttaagaaaaatttaaacttctgaatttttaatcgtattatcatatctgactcatttttgttgcattttcgtgagtaatattccttttcgttgagaaaacaaacattcgcttttcgacatacaatagacaaaaataagtgacttacctcttttgccatatc

SEQ ID NO: 198373 - DNA, 985 bp, Cannabis indica
caaataaataaaaataacacaaaacaactaaaagaaaatcatgaaagatttctacggaggggctgggctgataggaactgcatgtaatggttatggctagaagctcatgatcgatgaagatgaacaatatttaatttaaaaccatgtaaatagctatatagctaactgatatcattaatctcaattatatatgtaatttgttgtacgtagtatagtacattaattctgattgatattaattattagtcctatatatgatgatataatgacatgaaaagtacttatatataaccaatatatatgatcatcattttgctcattagtatctgatcatcatgattatacatgaatattttatgacgtcgtatatagagtttatacattcatgtgtacctactttttacatgtgtgattaaatatttaaatcttatttttcattgtataaattattttaaatttttttcaaaacagataaagtgtctgttttcactatacaccgttagagcaaaaaatctgaccatagtttatctaaatgattatccttttagtttttttctttttttttggtcctaaatttgtttcatttcagactgtaaatgaaaaaaaaggaagagatactaagatagtatatattgtttttatatgtaatgaaattttgcaattaagttacgttattaattattaatttttagttttgtagggaatttaatacttaagctgtaaagacacgtttactactaatagctagctaggtatatattattggtttaataaatatatatatatatatatatatatatatatatatagatttaaatagatagatagagacataaattcacattctttgtctatgcttttcatgctggtttgcttcatcaataaaacatgaatattcatgtactagtgattttacataaaaaccatgatattaattaaattgaaatcgttctttttttctctttatttttttggtagtacatat

SEQ ID NO: 198374 - DNA, 1596 bp, Cannabis indica
aaaaagaaaaaaaaaaagatgacatgtttttgcttggatatcacaattgattggatagaatacttggacatggaggtttcaaaaagtaatctcagtaaaaatcttcatgacaggtcaattttgcttatagagatggtaagtagtcttgtcttgtcttggcccatcaagctgtttgttgttaagtgttttgctctacttcttttttactatacatcaattcaattcaacaaatgagtttgtgagatgactgggatctttgcataaatattagaatatagagagaaaataaatgaaacttaagaaaccaactaactaattaaacagtggctaacacccagctatacacaaatctaaccaccaacacatcttaaagctgaaacagagtagaaaataaggatttgatgaaaacaacattttgctgaggcatggattttgatgtaaaatgccaagtttaggaaatagctcaaacatgaattgatttaaattaaaaccattttcataacaattgatttaaaaccatgttcataagaattggtttaaaaccatgttcataagaatttgatttaaaatgccaagtttaggaaatagctcaatcaccaaatgagtcttgctcctattacaaaccaactctctccccagaattctctatcaaaacaaaactttgagtacaagtgcttccacataactaaacttcaacagatacaacgaacaactagtgaaagagtctaactgaaaataactcatcacaagtgtcatgaactgtagccacacaaaaatcgtaatccttttctatcaaataaattaatcttgtttgattgatttgaatatatatatatatatatatatatatgtaaatagttgtgatgactaatagattttggactattagttattatttatttgatttgtaaatgcagtattctaaatttgaaccatttgacgcttggattccgtacctagctgtaaatattttcaatctctatgtctgtagagaaaaggtacttcattaactaaataataccatgatgtagctacctactcgttgcttctcaagtcatgttaagtgctggatgtaattggtttctattttgttgagctattttcaaaaaccaaacaacaagttacacttagcagctacattagaatgctttgttttacttttaacatttttttatttcttaggttgaccatgaaaatgaaagaaccattgatctcattgctttaagttgtctttccattgtttggaagtcaagggagaaagatttctccatccttatgcataaggtattttattaattagttacttacttttccatccatttattattactaaaacgattttatcgaacaggcaaaatataaagaactccatactataacactaaatatgtgtttagatatggagtttcaaatcttggatgtcattggatgtactccgaagagcataacaattgtgactcctttaaatcttggaaagtatttcgaatccatacagaaaatgaacttcgattttgacaagtatggtgctttattttgtaagaccataatacagtgtcaaagtggtaagtcaaattaaattattaagtttttaatttt

SEQ ID NO: 198375 - DNA, 768 bp, Cannabis indica
caaatttgaaattacaaaagtaccccatttacagaatgattcaaaatacaaaccatccaatgaaataaaaaagcagtgttctacctgaaaccttaaagtcaaaaaagcaaatgaaaaaataacaacattataagtttatgctcaccaactttccctgcttttatccttggcttctttttcatacttctgaatagtacgatcgtccacctgaccactaaggaaaagtatctggcctccagttgtggacttaccagcatctgcaaacaatcatagtgtaagttaggaacatcaaatatcaaagttgatgacggcaacaaaacgagatcgaccaattcagagacaatacaacctaaaatactatgacaaagggcaaaaacaagggcaaaacaaaaagccaaggatagcaaataaaagtagattgtgaggacaaacttttatgcgagaacacaaattcatgctggcaattcagacacaaaagaatttaataaatgatttaagtccaccgctatagaaatgtatgatttatgtacatcttttaaatcgcataacaagggccataagatacaggaaagcagcagagtatttgccaaatgaaagtgacaaaggtagtcttgcaacctatgatgttgtaatgatgaggactcgcaaactagtcgcaagaaaaaaacattagatttcaaatcaatttagagaccaaaacttaaaacaaatttggttaagctttcaaacgttactcctacaatgtacaacagtgatgtgaaataagta

SEQ ID NO: 198376 - DNA, 357 bp, Cannabis indica
agttagagcatttttgtgtcaaaattttattatttttgaatttttgttgtccgatggccttatattattattgaaaaatgtatgttgatgaattttattcttgcataattactaagtactaaaaaaacaaaatttattcacgccgaattaacacagccaccaagaaaaaaattgtaagagggcgggagagagagagggaaggttgcattttgagatgaagatattttttattttttctcaagaaatataggtggcgtttggtaacacttttttaatcagttttctgtttttaaaaagtagaaaaagtgaaaaatatttttcaaaaaacatgttctataaaaactgtttttacttttc

SEQ ID NO: 198377 - DNA, 1066 bp, Cannabis indica
actttgaactaattttttttattaaaatagaacttaataataagtattatgacaaatgtagttataagtgaggcatatatttttataagtgactattctaaccaaacatatatcaagtgcactcttgtggagcattgctattgacactattacacattctataggtgacgctttctaattggttagcgatattctttaaagttattttcttaaattatatgagacctgatacttaattataccaatagcagtatgacaccaacgagggtgctaagtactagtgttgccttttagtaattctgtgtatgcacattcttttaaaaaaaatataagagaattgctaaaaggtaccactcactctcatcgatgtcatacttctattggtataattaagtatcggatcatatataatttaagaaaataacttttaaaaaatatcactaactaattgtagtgcgctataaaaagtattgagcaccactaatactcaataacaacgctctaataaataaatataggagtaattttaaaaatattaatgagatatctaataaaaagtattgctaacatcaatcaaactaatcatatgacatactcaaaaagtgtgcattgtataatcaaaataacaaaaaaaaaaaatatatagcattgttagaaattgatgacaaaaagaaaaaagaaattgatgacactacgtacaataaatatagcattgttagagagttagtaatccctctctcttattcttctctccaaacacaatgtaatgtataacaattcttggcatttatgaaagatccaactgcccaaatataacttaataattgaccataattaataaaatatacaaagaaaataaaatgttacattttaatagattagtagtatccaacaaatattataattaatttatttaattttaataaaatgttacatgctactatgcactgtgcttataattgtatcctataaacagtagttaataattaaaatacgtgatatttgatattgaattactttatatgacccctcttaaaaatattatctaggtacggttatcatttag

SEQ ID NO: 198378 - DNA, 1152 bp, Cannabis indica
aaaaaaaaagtacaagtacctttgtcataaatattttcttttctttttggttaaaagtaaagcatctagccgttgatatacaagcagtggttatgtacccctaaacctaaacaatatgttgaatgaaattctgaattcagttcaatcttgtattaccttttttatattccttaaacgatgattttgaagaataatttaattaattgtaatacatcacagttttaaaagaggataaataagcatgccaaattaatatggtagatactttgttgatgctgaaaagtactgaaaattgcaaccaatatcagtaactctgacagcaatataactctatgtaaaaataacaaagaaggaaatagagaaatcataatccttaccacaatcataacaacactttaaaccaatgtaaaataacttatgtaaaaataacaaaaaaaaaaaaaagaaaaaggaaataaagcaaccctatgtgacaataacaaataatgaaaatgaacaatcatcacaacaaccccttcaacaaatttatgtaaaaataaccaagaagaaaattgaacaacccttacaacaactacttacaacaatcctacatgtaaaaataacaacaaatcaaatagaacaaccctttcagtaaatttttttactaaatttacaaaatcatatacaacaactcaaaattaatcttacaaaaaaataaatccaacaactttacaaatgagttttataacaatgacaacagcttattattaatcgacaaccttatgtaaaaaatttaacattaaataaagcagccctttcgataaccctaacaacaacattataagaaaccatgataaaataagaaaaaaaaaactaagagaaccctaatagcaacagttacaacaactgtacgcaaatagagaatacaaaaacccttttagcaaccatagcaataacactaacataaaccatacacttaaaataacaaaaaagaaaatacaattaatttttactgtaacacttttaacaaccccgcgtaaaaagaaaaaagaataaaatacaataacctttttagcaacacttacaacaaccatatgtaaaaaatcaaagaaacaaatacaacaactcgaacaacaatacttccaacaatactatgtaaaaaaaaaaaaaaaa

SEQ ID NO: 198379 - DNA, 697 bp, Cannabis indica
acgtggatcatttttagacatgggcggagtatccttgatatgtagtccagggtaaattattcatgagatgcaatatatttggagaacaagacaaaggtagcgcgcagggtaaaatgacaccatccacccaacgtcaattttacagcaactccgcatatgcctccaaggtaagtgcaacggagaaagccttaaagatatattttttcctttatttatcaattaaatccttatttttaggagattttcacgtaataataatataatttaggaaagtaactagttttcctttttatttcttaattattttgggaaacctaattgatgtaatcctttcctataaatagtggagtcatttcactatttagggatccactagtacaagctctgtaaaagctctcgagagagatcaagagttcttgcttcttttctccaagctaatacaagtaaaagaggagtaggctatttccaccattatagaccaaacctctataagaaatcggtgttcttatttttctcctttattattcattattgtttattatctctaatcgctttaattaactcaacgttgttggctaaaaataagattaatatttcagtgctttcattgagagttgaactcaagaacaaggtggttgttttgattctcttaaaaacacagaaagatggatgtaactacaaggaggggcaatcccat

SEQ ID NO: 198380 - DNA, 1100 bp, Cannabis indica
tagtagagcccaccaactgagatggagggggagatttgttggatcagcctattattgttgggcttgtaccatttaagggcttaaggccaaattttgtttggaacaattaaaagaaaaaaaaaggaaagtggttgtaggtatcgcgagcaacaggcagccacagaaaaagaaaaaaattaagagggaaagaagagaaagaaagctagagagagaaagaaattttgccactttgcattgaagattaagtggctgattctcatctattttagttcaaattttgggtggttaatccttgcaaggtgctcttcaaatctactagttccgatttggcgattgtcctctctaaggtgcttttctacaatacccacttggagagacccaatctttttctatttgtgcatccatcttttgagatgatgatgatgatcgtattagtgatccaagattatttaatcttgatgttgttgtgagcctctagttttactagaaaagaactttgtaattccattattgaactttggtgatagtggatgatttgagcagactacggtcctgtggttttttctcatattgggtttccacataaaaatcttggcgtctcacttttatgcttgatttgtgtattttatattgtttgtggtgctttggttgatagttgatattgcatattatggtgtttgataaatattctatttttgagatacaaagagggaaaatattgtggttaattgcaataggtttttttccaacaataagcctaccacaaagggggcagcttcccctagagtaaactcttcaacgtgaccagttggcaacaaaatgagcttggccattaaaggacttagctatgaaatgaaaattacactcaagaaaatgagtagagcagtcaattatggaacaggttatcacaataatcttccagtgaggaatgcctacatcaccattaaggaagtccataatcgcttttcaatcaaagatgatagtaatgtgcttccaacctcccttacatgcaagtgaacaagctttgagatttaccaaagcttctgattcaaaggtattcatacaagtgtaatgtagttaaaaattttaaataattaaaa

SEQ ID NO: 198381 - DNA, 999 bp, Cannabis indica
aaaaaaaaaaaaaagctaagttcttgagtcaaaaaagagatgatgctgaagaagatgagggaaattagggtttgtttggctatggtgaaaagctttatctttctcagagtttcttctctcacagattttgtttcacagagaaacaaaagtgaaaaaatgagtaaagattaaaaaaccctactactacaacaactactgctctctctttttatctgtgaactgttaaaataaaatagtaaaaattcaatttttatttctcttaactaaaaaaaaacactttttttcagaaaacagggccttttatataaaaatcgtatttttatttttgggggacaaaaattcagggagtgggtaataaaataacagctaaaatctctgtggattttgtctttgcaaacggcgcgtgtgtcttacgcgctgtgttgtctgaacataggggtattttggtaatttcccatagggtagttgagagagactggtttggaagggagagtgggaatggaagaaatttagaattttttttggaaaaaaaataaaaaggaatgatttttaaggtttttaatagggaagttgtttttttatatatataaaaatatattttttttttatatgtgtgtatataagagtcaaagtagttgtaaaaaaagaatggatatattgaattattaggtgaggaattatgtctcattgtctgtcaataccaaattatttgtttaattaggttaaaatttaaataaataaataaaaatactaaaaaaagaaattcagatttagatgtgttttttagtcaattggaattgactttcatagactcaaaataataataataaaataaaatagtaagacaaatggtaatagtggaattgtattggtcattttttcaaccaatacattgcttaatatgaaaacactaattaatatgattttgattttaacatatgaatatgagtatagagttgaaaataatctcaataaaaagaaataaattaaaaaaaaaaa

SEQ ID NO: 198382 - DNA, 1334 bp, Cannabis indica
caaatttaattcacttcttgtacttattctaggtgtttcacctacagaggagtgcacacttgatctacctacgatgacatagagactaggtcatgaaataacaatctgcacaaatcatgatcaacatgactttcattagtataaccaaaaacatacaaataagaattaaaaaaaataaatattcccttttattttagaaaagcataactgttgtattttgaataaacgtaaaaaatcataacctgcttaaatatttgtataaaaatatatttggcactcactgtccgaaaacagtccagaaaaatatgtaaattaagttttttaattttttaattattttataaatcataaaaatcagaatatgtctaataatattcaatacatgcaaaaattaagtccaataatcaagttgagtccctacctttctcaagtcattaaactttgtccaaagagacaatcctaagctctcaagtcctgagctccaattgtttactccaatcttaaatatcacttttcacttatgccatcaaatggctaaataattatcatcattgcattctacattcaaaattaaatccaacgagatataacatgactatactaaaagtatggagctctgaaacctcacctaaatggtgtacattaactatcagtggcgatagaaatcggtgtaccgaaaacattgccaaaaataagagtagtatatatcaaaacgaccacatcgattagtaaattacacccatattaaccatttgtcgaaacggtatacggtattaccataaggttaccagaaagggacagagctacaaaaacgtcactaaaaaagtatcaaattgggcaaaatgacttagtacatattttaaatagataagacttttcaattttcatgcatgaatgtggagtacatatttttttttattttttaaagtatgtggcctacgtactttaatattttgtttataattttatgataaattttcttattaaattaacttttccatgaagcaactaatgaattaatctcagtcataaatattacttctacatatacatatatattattaattgatggtcaatatttatgttaaatgatgacaatatattttatattaatgtataggaagtggagaatattgtgcaaccttggctaaagagcaaaagaaataaagaaaaacaaacaccaaaggatttattcaccaaaagtcacacgaatttggcaaaagaggcagaaaaatggatgaaggaaaatgctgaaataagtctaattgtggcaacaattattgttacagtaatagcacaagaagcttttaacatatatggtaacaataatcaag

SEQ ID NO: 198383 - DNA, 1238 bp, Cannabis indica
gcgtggaaaagagcatataaaatatggtatatctaatcagcataaacacccttgaagaaccacattaaatagtatagtggttaggaaatacattccagtggttactgaaaactaaatgcatattatgacaaggtaccctgaataatccactaatagattttaacaaacaaaaaatccaataatatttcacatttcccgtgagcatgagtcaatcaataatagtaaggcaataattagaatactctatataagtattggagtagacaacaatccaaaggtttttatgataatgtcaacatgcaaaatcaacagtagcgtagacatcatcagccacaacagagccaaagcaggaaacatcacatatgttagaagaacgttgttatgactttatgacaaacagtatttgttatgagctatgatggggtccgcatttttttcagttaggacacaagtgcttatactagattataacacatcaatagtgcaaaattaggtgaaaatattgtatctctatagcatcactcaattgatagtactatgatgaggggtcgtaattaaaatttactgcacctaaaaggatcatcttgacaattggtcataaaaatgaatttggtccgaaaaagttgtaatctcttccaaataaccaaatcctcacactgaaaataataaatattaagggaaaaccttgcacaatctgcagattatattcattggcccaaatcatcaagctgaatgtgctaagtatggtatatagctgaaatttttgtaataaacctttcaaaatagctggtttggagagccaagacactagcaaaaggtacaattagagatgattacctgttgctcactgtgaacctttcctcatcttgattcataacaacatgatccagagggcagtacttttcccctgtttcctgatcatggactacagaatgccgatgactgaatgtgcctctttcaacatcctgaccactcaagcgaacatggttaccttccactatcaatgtagcaaaggcaagtgcttcagcaactgcccagtcaatgccttcacctgtttcaatcatttgatgacgcagttcataaactttcttcactgctctgtgaggcttaaaattttctgggagtaatgtgattgccttcccgacattcttcaaaatctctggttttaccctgcatgataacatacaactaaattagaatagagtttgaaacattagatgaagccaaaaaccaagtaa

SEQ ID NO: 198384 - DNA, 2391 bp, Cannabis indica
aacaaaccaacgtgagtacacctgatcctagcacttcgagaggtaactcaggtataattcttacctatgcttcatctaagttctttgacacatcatggataattgattctggtgcaaccagacatatatgtaataatcctaaaatgtttcaaagtatcacttgcgtgcccacaactaagttgatcttacctaataatgaagctcttatggatagaatgcatactcactgcagcatatctcataaatcgaactcctaccccaatcttgaaaataagagcccctatgaaatcctttttgataaattgcctaagtatgatcaactaaggaacttcggatgccttgtttttgccagtactcttaatgctcacagaaacaagttcacaccaagggctagaacttgtgttttcattggatatcctcaaggcgtaaaagggtacaagttgtatgatattaatactaaagagatttttatctctaggaatgttatttttcatgaaaaaatatatccttttaaatatcacaaaaaactacattgaccctttttctaacatggttcttccttctcctaatatatctaacactaatgttgatgactttcctgatcttgttaatgatagttcctacactaatgactttcttcaagataatgacagtactcagaatacgggtgctgctgatgaacatacatctactgaacaagacgctaagaatgacaatcctccaatacaaccagaagaaacacctcctgttcccaggcgcaccagcagaatcaccaaaaggcctgcatatttctgtgattatgagtaccattgtatactccaagacaaaaactctacacctcatatacttgaaaattctttgtcatatgaaaaattatctaacactcataaaacctttatctctgtcataacagccctttttgaacctgcaacttacagccaagcttctcaattacgaatatggaatcaagccatgcaataagagttatttgcctactcaaaaacaagacttggacctatgttcgtttgcccccaaacaagaaggccataggatgtcgttgggtatataaaatcaagctcaatagtgacagttctgtagaaagacacaaagctcgtcttgttgctcaaggatatactcaacaagaaggtttagatttcttcgacaccttttctccagttgccaaaatggttactttcaagctactattagccatttccaccatcaagaaatggcatactttgcaacttgacgtaaataacgccttcctcaacggagatctcaatgaagaagtctatatgcaacttcccaaaggtcttattcttcacccagaaattgctacagattccaacatagtatgcaaactgaacaaatcaatatatggcctaaagcaatcttcaagacaatggtacaaaaaattgtctgatgctctattcaagaaggttttatccaatctcaagctgactatactctattcaatagaggttctcaagacgatttcattgctattttggtctatgtggatgacataatcctaacgggtccaaatttgtccctcctcaacgagttacaatctatcttgaatgacaaattttctctcaaagctctcggcacactcaaatattttctcggatttgaaatagctcatggacaaaaaggcttggttttatctcaaagaaaatacactttacaactcttagaagacaatggcttcataggcagtaagcttgccaaaacgcctatgtacccaacaatcaaattggatgatcaacaaggagaatcacttgaagacccctcaccatatcggcagcttgtaggaaaagtactatatctcactctatcgagacctgacataacatttgctgtaattcctcagccattcatgtcatctcgtcgaacacctcacctcaaagcagcacaccatcttctacgatacttaaaggaaccccaggtcaaggcttaatgtactctactgcatcgtccctcaatcttcgaggttatttcgattctgactaggcctcatgtcccattactcgtcgatctaccacaggtttttgcatcttcatcggagactgtttgatttcctggcgcactaagaaacaacccactgtttctcgaagttctgctgaagcagaatatcgagctcttgctgcaacaggcagtgagcttacctggctgcaatacttacttcaagaccttcaaattccccaacatcaacctgccttcatatgctgtattaatcactcagctatccatattgcaaacaacctaacttttcatgagagaacgaaacatattgaactggactgtcactttatccgtgacaaaatcaacaagtccaaacttcgtctcaaccttgtaaacagtaacaaacaacttgcagatgtcttcacg

SEQ ID NO: 198385 - DNA, 392 bp, Cannabis indica
atagtaaaatcattggaaccagtaaccaaaaagaatatggattttgataagtgattcttcagatcggttggatttttcattcttggtctcaaaaattcatggactgttttattgaacatatctgtttgttctcccaagctcataacacctttctgaaattaataattaattaatgtcataataaaatctatatcatataaagatataataacataattaatttgaataatgttcttataatataaataccatattggtgcctgtatcaggaagaattccagaggaggaagaagcataattaaaaccatgatcacaatcgtatgatttgaaatcaacgcttctgattgcaggtgggatattcaatccaagtgacaaagctgcattattattat

SEQ ID NO: 198386 - DNA, 513 bp, Cannabis indica
tataatggcaaagagaatttagtgtcatattcttcactcttaaaagtcaatagagaagaaaactgttttcaactttccaaaacatgtattcaattcagccaagaaaattttcttagtgaaaatgacatactgatttgaggttttgaagtttgaatctttcaactttctttatttttaatttctaggaaattagtttttgttgtcttagaaagtttgatcattttgagaactgtatttatttaatctagaaaattatgcttaaagctcaaatacaaattggcattagtatcaataaattatacaagctataagagagtggaatattgtgcataataacaatatctttagcattcatgatcatgagtttcttttacgcatattgacttgttgaatgaaaatgataattcagtaaactattgtttccatcgttttcattaatattaccatttttctttctttagactaatttaatatactaaactagacatgaaaaatatgagttttttttttttt

SEQ ID NO: 198387 - DNA, 1286 bp, Cannabis indica
tctgagaaaggaaggaaaaactcacagctaaggctctatgatctgagctgaaataatcaagatgatcaacagtgggtaggtgaaagtgagacgaccatttattattgatgaagcaccaatcaagacgttctttaaggccatgaggagtagcacgattctttgtccaagtgaaaggatcaccattgtaaggtacttcttgcagaaaacatttgtctaatgatgttctaaacgcatccatgtgtgactcacgtctcaaacttcctccggatttatcattgttagataatatttcattgaagtctccaattgcaagccatgggaggagaggagcaacatcaccaaaacgctgaaaaagagtccaggaggcagatttactagcaagatcgggagctccataaaaccccgtaaaatggaagcttggactgccatcgaacttcatgtagcagtcaaaaaaagtcggccccatattcagcaaagtaacatcaatttcatcagaccaaagaagcataattccaccacttaacccaatccgagcaacttccaaaccgttagaaaactttaacaaatgacgcaatcttgtaatagagttatcagcaagttttgtttccataagaaacaaaacatggggcgattgttgttgaacaagcaatcgtaggtggcgtaatgcactcgggttccccaaaccccgggcattccaacttatgagtttcataatgagttgcggggttgcaaagcaacctccgcatcaaagtcgattgaggggttcgaatccagtgtaatggaaacttgatcctcttgaacatcttccattgacaggttggaagaagttgaaccatctaggccacggcatctcttgagcatttttcgcaaggagagattggaacttggtcgtttgggagtgatgttgggctctgaattttccttatcaacagtagcatagtcatgtgtttgttggaaaaaactagaggtatgggagagtttagccggtgcaaaggtggataaaggggtggttggaatgtgggaaggaagtggtgttgtaggtggaatcatagtatgagaatttatggcaggggggtaagttgcaaagagattaggggccaaaggagaaggacccacataaggtatatatacatgggataagtctttaacagttgggttagattgattaaaagggtcaggtggagggttggaatttgatggtggcaagttggaagtggttagtggagttgaattatgtattacatttgaggaggcaggccggcaatgcacaggggtgatagtggggg

SEQ ID NO: 198388 - DNA, 747 bp, Cannabis indica
aaagccacactgaaggaactttatgaactaaagaaagatccactagacaccctataattgattagcagttctttataatatttattaaaataaaataagtgaaattcgatattgagttgcactgataacgatattacacctcaaaaaagtattagacactatgagtgtccgatattgagttgcaccaataacaatattacaccttacaaaaatgttagacactattagtgccctttagtaacacttttagtatctagcactgttgtgagttgtaatattattattagtgtgattgaatatcgagttccacttgttttactttaataaatattatagaaaatcgctaaccaattatagaacgacacttcatcgtggtgctaggcaccatggctgcctcatagcataactcttctctaaaaagtacatgtggtgtctaacaccctcttaatatcgttattggtgtaattaatgtaataacttttaatatcgttattggtgtcatataatttaatgtaataacttttagagagtatcgctaaccaattacaaggtgatacttttagaaagtattaggtaccactagtactcaataacaatgtccggtccggtcttttaatagggaatcactgatatttttattgatgttgatgcaaaattaacgattatttcttctttaaaagaccaaaaagaacggcttttcatagattatcaaagacattaatctccttacctaacaggatgtgatga

SEQ ID NO: 198389 - DNA, 941 bp, Cannabis indica
attatattctccaaattattatctttattaatgttttaattgaccttcatttcaacaatggaaaatcatataattaaaaatatttatcaaatcacccataataaattacacgacatatattttctaaaaacaaaacatacactacaaaataacttcttttagtcacatgatgtaaaaaatttatactaattatgaattctcatttctaatatgtgataaaaaagtctgtagttaaaagtattagttaaaaaaattacaatttgttgactaaatacgtttttagtcacaataattattgtgactaaaattaaatcagttacaacttgtatctaaatattattaattatgttttagtcaatatataccaggaaaaaaagttttaggggcgacattataataggcaaccttttgtgcctccaaataataggttattagggccaactttctttcatggtcactcctagtaattgtcttatatttaaaataatatttcaaaatattgttgttgcaacatttattacatttaggggcaacataaaaaatattttattaaaaaaagtataaaaaatacaaacatgagagtaataattattattaggggtgacattttggagtttcaggagcaactaaagtcgtccataaaagttcctttttacatgttcaaattcttaacaaagaggaaaaaaagcaaaataattaagacaatattagctcacacaaacaaaaaacagagaaaacagagaagaaagaaacaatgaaccttttattgagattgaaggaattaattggttacagatacaagagaaggcaagctttatatagctacaaaaaagaattagttacaatcataacgaccataatagaattaactaacatgacagctaggaccaactagcttacaactaacaacttctttgataccccctcaagatggaccatag

SEQ ID NO: 198390 - DNA, 948 bp, Cannabis indica
ttcgattcccggctggtgcactttgagctgtgacgattattagcgcctttagagatggggggatctatctcactcgtctgattaaaggacgaaatatggtgcttccgagctctgttttttttgagattagttaaaaactacttatttttattacacattaattaaatatgactttaaaataatttttattgataaatattcagttttaattgataaattaaagagtagtaaaacaaaagtaaaaattaaaattttttaattttttttttatttctttttaagaaagaagtccacatatgcactctatttgtgttttttttcttttttcatggtagtagggtgtatattgggttgggtaggttataggtgttttaatggccaactcaatgattacagttgcataagctataagttattacaaaaatgttgaattttggaaaaaaaatttataattttactactacatgaaattttttataaaaatattatctttttgtacaataataaaacagaacaattaaaacaacagtggaacaataattaaaacttaacacaatacacaatataaaaaatatacagtatttttggaaaaaaaattctatctcacaataaaaaagtaaaaaagttaaacatttaagtatgtggtgtaaaaacattttttattgtataacccaaccctatttagtacactagtatagagattgggttagtttattgagttgagatgaataatttaagctttgatatttatgttaatttaagctagtgcattcaaaagaaaaaaaaagatacatgtaaattaatttaagtttaattattttcaaccaattaacttacacaaaaatatagttattttataaacaagcccattgtggaatactaaggcggcccaatagtccaacggcccatatagatttcagcccaggcaaaaaatgaggttggcattac

SEQ ID NO: 198391 - DNA, 1917 bp, Cannabis indica
aagaggacatgagagagagtcaatatgagtaggggaggaatggtcagtttggagtgggacagtaaagggggaggagttatgcacggtaggtggtccaggaggagtactttgggttaaaagttgtatggcagtaggtaaagtaggtgagtgagtgtcattttttgtggaaaaagcagcatgtgaaaatgggaaaatgtgctcatcaaagagtacatcacgtgacacataaactctaccctccttagacaagcatttgtaccctttatgagataaactataaccaaggaaaacacatggagtagacctataattgagtttgactctattataaggtctaagattaggatagcacaagcatccaaagacctttaacattgtgtaatcaggtttaacttgaaaaagtgtttccaaaggggtactaaaatggagtttgggtgtaggcattctattaatgagaaacacagctgtgcgataagcctcatcccaatatttgagaggtaaggatgcttgagctaacaaggttaaaccactctccactatgtgcctatgtttgcgttcagcaaccccattttgctcatgagtgtgaggacatgacaacttatgaataatcccatgctcatttaaaagttttgtgaaagcttgatactcaccaccccaatcagattggagctttttgattttgtatccaagttgtaattcaacttgtgctttgaaagtgataaaggtgggtaaagcttcacatttggttctcaacatatagatccaagtatgtcttgaataagcatcaatgaaactgatgtaatatctatagccactagatgagacaataggggcaggaccccacagatctgagtgcaaaagttgtaaaggttcattatattcagtagtggaattagagaaaggtgatttatggtgttttcctaaacaacaagcagcacatagatctgaaaagtttgcatcagttttattgctcaatgtgatattacaagaagacaaagcactttgtacaattttggcactaggatgtcctagtcgattgtgccatagagagaaaagagaatttcttgtgggtatagtagtgctattacattgatctgttggactaagagaagtgtgtggtgatgactcggattgggtattaagactccttttggtgtgtgcaagactttggagttggacagagtcaaatttgtagagaccttgatcaagcttcccaaccaacaagatcttctgagttacctgatctttgacacaacagtgagaaggatgaaactcaaaatagacttggttatctttagcaaattgtgacacactaaggaggtttttggttatatgaggtacatgcaaaagattactcaagacaagttgttgagaatggaaaggggaaagaatgaaagtcttaccaatactttgaatgttgagtcctgtgccatcccccatatgaatttgttgatctccaatgtaatcatttgagtagatcagattgtgagcatttggtgtgagatggtgtgtagcacccgagtctgggtaccaactgttgtcttgaacaacttcaggagaagcatataagtgtgaacactcagcaagattagcacttccattgaagctttgaaaagtttcaggaccagtgaatgacttatcaaatcggtagaagcatttttgtgccgtgtgacccaacttgtgacacaattggcattgaatcttttgtccccatgcagaatactgaccacggccttggccactccctcctttttgctggtgcatttggccacggccaggaggaccacgaggctgaaaatgttgatgatgagatccaaagccagggggagggtaatttgcagcatatgaaccaagagaacccctgaacattgaagattgagatgtaggattagaagatggataatagtgagtggagaa

SEQ ID NO: 198392 - DNA, 844 bp, Cannabis indica
ctatgaagaaccagatattctgtgcttaaatattttcacaactggtgtgcactaatcccattttctaactgattaggttcatatttacagatttccacaaaaacccaatttcaaaactttatactcgtcataccacatttgatggcgatgagaccaggccgcctagactttggggtcgtgatgtcgggattggcttcgataataatgaatcggattggaattttgggtgtggagaaagggcttacagttgattgggagtgggagtgagagatcctgggataatcaaattgtaaataatgtttcagaaaatccaaataatgatacctttccggaacgagtagatctataatgtttctctagttgttgatgtctctgcaattcaatctcttatattaccattacatctaagctttcatagccaaactcacaaaattgttttatcacatcctgaaatacaaactatacatatgttatacacatagaatctattaattctgattcagaatcgaactcctagcgggtagtggtgcgatttgggatttagttagtcggtagagagtggagaaagaggaaatgtaatggaaataggacctgactattgagagaaagactaaatggagatagctaattgttaaatagagatagctaatcattgtcccgtaaagaatcgcaatatggttttgttaaagacgaaagatgaatcgcaaaatgtattttggtttgaatggcattaattaaaagaggcgatcttctactgttaaagttaacagaatatttcttttttatttttaaagtatattctgctaaaccaacaaaactggttaaatagccacttttatatata

SEQ ID NO: 198393 - DNA, 894 bp, Cannabis indica
aaaaaaaacacacattcccaaaaataaccaattaaaataaaatttaaaataaattatataataaaatttaacgatttgaagatatattctctcctaatcttacgacttagaatatttaatataacaacatttacgactgccggagtaagcaaaaagtgagtcaatttgggcatatggaagctttgcgattggtggtggagttgataatttgggcctaccggagtaagcaacaagtgagccgatttgggcatatggaagctttgcgattgggtgtgaagctgataatttgggcatgccagaataagaaacaggtgagccgatttgggcatatttaagctttgcaattggggttgaagctgataatttgggcttgccggagtaagcaacaggtgagctaattttggcattttgattgactcttctccttgctttatcatttgcttcacccgtctatttttgacccatcgatagaaatacatagcgtttaatataactttgcgattggagatgactccaccgaaaatgttcttcacccattgatttttggaaaagatcatattaacgtctggctaccgatatctccaccttcgaatcaatacgtcttaatttttctttcccttcttctctctaaatctctcgattgtgcagttttttttaaatgctatggattgtatacccactatccaaatttaatttgtgattggattctttacctttgatatttactttaagatattgaaaatctgtcttaatgttgggagtcattaaggggattggaagatattttacaggtttctaactttttttagttaatagcttgattttttttttcttaatgatttcatcagtcatacataattatcatttttcggaattatcttcttctttttttat

SEQ ID NO: 198394 - DNA, 704 bp, Cannabis indica
tctaacccatccaaccacttgagatatcatcaagtgtcaccagacacaagcattttgagacaaaagatcccaaaaagaataaaacaaacaaacaagagagagagaagtaaaagaccgttttatttaattttatttcaaaacttaattcctttctatcttgaattgcaacccatcctctaagctaaaataaaaataagcattcactgagggcaggaagtgaaaggattgtacctacagccaaggaagatttaatgaagttatagttttgcttgctgtagacctccatgaaatggtttaaatgagctgcaataaaagagggaagatattaatgacatagcaggactatattattaaaaagtcaaaagcagtgtaataaagagaggacaacatggattgcattttaggcaatctaatgccatataaactaaagctaagacctgtaatatataactttttcaagaaaatctatgaatgaaaataagtacacctattgaagttgtttcagtttttcactcattgcaacatgtaatttcaaagaagaaaatgagtgcctttaagccaaacttactcaaactacaaattttaagtgacatagaagaaaatcaatgtatatatataatacacatatcaatctaagtgaagggtatcgagtcagacagtcttgctcatcatctatacaattttaaccaatagttggtaaggcc

SEQ ID NO: 198395 - DNA, 1524 bp, Cannabis indica
aaaaaaaattatatatagttattttaatttatcttccacaaataatagtttcacacctaaccccaattttatatttttttttccctttgtcacttcaaatcattttaccctcatcttttctcacttgccaacctttacactttcccttcactcacctagtgttgtaaatataagtcgtactttttgacacaacatgagcccaaaaagtacgagcactagcaggcaagcccgaccttgagggtagacgagcgcctcaaacacccaaacgcttaaggttgcaaaattgtgaaaaaaaaaaaattattaatatatagataaaatattaataatgacctcgccaacgcctatgactgtgctatcaataaatttttgacattgatcgtttttgttgattctctacttatatatcaaagttgagagtttaatcacactaaatatatctatcaaataatctttgagttgggagctgaaacaaggaagacttcgtatgaaacgacaaggaccacataaaacgacaacaacatcaattaagaaaaaacgatgttaagtttgaaaaccacatgaaaagtactgaactggaatatcaaaaaaaaaaaatactgaactgaaaattggaataagcaaagattcttgtacttttttttatctcatgcttcctgatttcctttaccatcggataccactttgactgttttctaactatttaaatttaaaatagtttatgatatttaaacgtatttttctttacaaattaatattaatatatctaaataaaaaaagaaaatatgtcagtctttcagaaaaaaatgtcagtacaaattgtaacacaattcttaggacatctccaacagtacatcagtacttttatctacaaaacactatctattttttttttaacagaggtagtaaaatgggtttcaaacactatctaagcgttgatccaaagcagatcgacacaatttgacgcgaaataataatgtgtcaaacacaacactatcagtctatcatgactgccgactttggaatattgctattttctcagactccaggatttggtggctgttgtttcaaacaaccatcgtattaacgactttggaatattactattttctcagactccaggctttggtggctgttgtttcaaacaaccatcgtattaactactttggaatatttccctttcaattctcaagttggttaatgaatttgacactttgtaacttgttttttattagtcgatggattaatgtaattgctgatgggatagttagaagcactaaagagtctagcctgaatgctggtgttatccaagaagaggagggacttgtggtacccattttttaatgaactggaagttcttgcaaaaaaaaattctatccacctactaagaatttgtcacatttgtacatatatatatatatatactagttagaaggtaagtattagttttatttaaagtttataattctttgttttgtttgtaattttataactaaggtatgattatgagaatgatttgttgta

SEQ ID NO: 198396 - DNA, 1774 bp, Cannabis indica
tgagggttcacaaatccttttgaaaattacaaattcaatatatcagggttgaaaggttctgggtaatcatctgaatcatacacttgaagcttcccatactaaccatcttgatatttcttgaaccaatcctgcagctaaattatcctttgttgaatgaattatccttacagtggacgtggagggcgagcagatcagttaggtggttgatcctttgtgttttttgttatttttgtgagacttttgttttccccaaggtcgtggcaccctaattctatggaccttgacccttgacaggaatgtcttttgtctcccttggtttttattcctaggggtgagtgggattattcaactcctattcattggtgttgggtccgtgtgcccttctattttatgaatcacggggttttccaagtggtcgcaaaataggttgcttttcctatactggcggtgcatcattttgagttgctctggctgccgccatggcccattctaactccctttttcttcagttggactctacgagtctctaacggttgtcaattttctaactctaaaaggggaatgtacctcgcacggtattatgcattagactctctactttcaagaacttctttctcagtgtcactctattagagttcctcttagtaggaccccttccttcgttagtttgagtttgtgctacctggggttcttttccaagtcgacacattatttcttcttccatgataggttcataacatttagtgttttctaagatcaacaagtctggttatctaggggagatgtgtttcgagttttttttttatcaaggcacccaatgaaagcaccaaatttttaacttagattttcatcaacaataattgtagccttataaattaatgtttcctatttatagttaataaatataaataaaacacaaagaacttttacgtggttttgtagtttgaaatgtacataccccacgagttaatattattttgtagtaattatttataatgtctttcgattaaaagagaatttgtgtagatattcactcaatctcatagggtttttccacccaaaaaaatcaatccttttcctagtagactttatacatatttatgggtattttaggaatgtcaattactctctttcaatcttttctaggtaatttcatgaaatgtggacaatccccgtgtttcatatttacaacatgtagataaaatgaaataattgttgattaccgctttttattcttattaggatatagtttgtcgttgctaatgtaaaatattccaaccattgctcgcaatcttcaattgtgtttaggaatagttggttgcattccgcgagatgctagttaagaggtttatccttgctactgccttttactgcaattcttttacttgtctttaggagttttgagatcagtcgctcttgacttatttttgttagtctttgaacatactcacgagtatgtggatcaataaattgcaagctcattaaagaactcgttatctcccatttctaacgatatagcttcagttcttttatttttctaagctatcctggttagctttcgaggtgatctcagaatatcatcacctcgcagttctatgttatatcgtcactgtcattgtggcacagtgcgagacagatatttgtttattactgcttctcttgaggaaatataatctttagattcaataacctctactaatattcgagattattattaatgtgtcatttccatatttatgtctcaaaatatggtcataacaataactaataaaat

SEQ ID NO: 198397 - DNA, 2192 bp, Cannabis indica
aaaaaaaaattatatatatcttataaatgtaaaaatagatatgtgttattttttaggtctaaaaaggattaatctattaaaatcttttttccatcatcatcactctcagagttcttactcatgtgttgagaataactaagaacattatatacaaacaatgtcctactagcccatactagtccttgtgtgttgtcaaaaattcagaagactacagtgtgagttcttcgtcatcaaaggacataacttacgaaaagaataatggtacactgataggcttcaagaggtaacttttatttttatatatttaatttcaaattttatgtatatacatatgatgatcctaaagatgtggtatgatgataattagaatatattattctactgcgtacctgatttattattacaaaaccaacatatggtaccaaagtaattccattatgtaaatatattaaatgttgtctaggttttatgtatttatatatatgtgtgatacatatataaatggatagttatgatattgtgaatgtgtgtgagatagtgaatcgttatttatatggtaaaaattgggtgtaagctttgcttttttttttttgttagaaaaatattctaagccattaatggggcataggtattttttatgtaattttatttttttgaaaaattatttttatgttataatgctttcgacacggagctcgggttcgaattgaaccccgactgtgctatgcctcaactgcacgtgtgtcgggtcctcgttgactctggttgttactcgacgacaatcatcacaagccatcactgtctaggatttcgtgccctttcactaaaatgccttgaaggtagttgacatgcaccggtctttcttgtgattcgatcccaggatccgttgccagtctcttctccacccaaacgaggccatggtagttcgatcaatattcgacgagttgaaggaccttcaaggctgttatttcctgacctgggacgaagcatgtaaggcatgcatggacctttcagtcctttctagggctgtacataaattttggtaaaccgtccaacccgaataacccgcccaaactaaaccgagataacccgatgaaaaatataaatagaaaaatcctacgaaaatataacccgcccaatctttatattcggcgggttgaagataatactaacccgcccaattaacccaaactaaccagaccaatcctattaagatggttttttttatatataatatttatatgtttttattatatatatttatatatcatataatttatttgactattttaaaaatataaatttaaactaatatattttttggtggttgatttgaatattaaattcaatctatatatatatatttgtctcattattacaattaactaaaatataattattcttacgtaaaaataaaaaaaaactattagtggtcggtttggacgggttaacctgaccaaacagacaaatttcattgggcgggttactattttttcttttctttattgggcaggttgcacttagatttttgtaacccgacctttacattgggttgaataaaatatagcataaaccgaccaaatcgaccgacctacacccctagtccctttctcacgttttttagacccatactaggtcttggtttttctttacccgctaggtgttgttgctgtcataattcttgtggacttccatggccatggtggctctccagatttggtggaccaaggtggcctgacccgaaaaactataatatatatgtatgtatatatttgtatatatatagtacatatatagtgcatatacagtgtatatacactataaattatcattaattattttagtcaataaaaatattatcttgtggaatatttatttttcaaatttgattagaatattaaataaatagtaatttggttttagatttgaaattcaaatttaaattttctaaccactttaattaattaagacaatttttgtcttaatgccttaaaataataaaacatattttatttttttaatcaaagacaaaataataataatattgttttaaataaaatattaatttcagaataagttaatcaaaaatattttaattaatttatgggcttcaaaaattatcttaaataaaagagtttatttaagaataattaattaaaagtgttttaattaatttaaaaactttcgatgat

SEQ ID NO: 198398 - DNA, 574 bp, Cannabis indica
tagagtatagagagaaagatttatgtatataagattaaatatcaaagctcaaagatataagtgatgaaattgaatgagatgatgtgttataactctaaggcatggcctttaaataggtatatgtagccacatatatatgaagcggccaatgagggtgcacatgtatgtaccaaatattttagtaataaaaataatgggtggatataaataattcattattcatgcatatcaataagatagatagggagtagtgtacgtagggtgaattagtggaccactttcaatgttcgaccattaaagaaatgtctcattgtcgagggctttgctattccaagcaaagaaaaataatgttacgtacgtggagatccggagataaagaaagaaataaacactatgtctgatcaccaaatggacattatattattttcaatattaaagtatatataataaatagttaatattgattatggaaaaaagaagatctttgacttggattttccgggagatggatatcttgatgatggggtctccatcgttccacaaccataattaatatatatataaataattaaat

SEQ ID NO: 198399 - DNA, 500 bp, Cannabis indica
ggccgaccacctcctcagcaggtaggtcggccatcgcttcatcaaattgctctgaagaagatccctctggctagacagtggtctggtccgcttccaacctgctttcgaatagcgcttttccttaggccagtgtgctctctaggaaaaaagcatccccgattatgaaagatcagtgttagggttgcatagcttgaactcatagatgagttacgaagataagccagtgtactcatgtcttttatggcatgctggccatcaagggctgccctcaaattctcctcacaccttgatgaggtcagtcttcaacctggcaatgttagcagcttgtatggtgttctcttgattcctggtgccaagcatggtctccaaaccataaatcatgttctggttttgcaagccaagaacctccatcttagctaaagcttggcacttcgccaggagatcaacctccttcgtcaggagatcagcccccaaggtttttttctcaaaaaatttagatt

SEQ ID NO: 198400 - DNA, 581 bp, Cannabis indica
aaaaaaaaaattgaatgtaaaaaatttattttttacatacaaaataatactttgtgtaaattttccaagaactttaaaagtaaagaaataagatttttaagtggttcaagtattaacgaactctaatccttgagtcagtataattgtcgaggcttacaacaatggcataattactttctattacaacaatattttttaaaaattaattacacatgtgatgctgatgtgataataatttagacaatcacgtcatcattctgtttgtcatgtgggataaaatctgatagaatgattattttacaatactgtgaataattcaagaaccatatttaataggtttaaaaattcaaggggcacaaaatgtatatgttatagtttgagagaaaaaatctaaatagtattagtttttctgaaaaaatgagaacacaaaatggttttaaattttctaaaaaataaaatttttataaaattaattatatatttataagaagataaatattttaaaattttgtaataataaagaaatgaaatggtttcaaagaaaatgtaataaaaactccaaaactaatatatattttttt

SEQ ID NO: 198401 - DNA, 2567 bp, Cannabis indica
ctttgtgttgccaatagttcactatctgaatttgtatatattacttttgactttttgaactacgagccaagtttttactacaccactgctcatcaccctttgttgctaaaggatgcttgcaatcattttgcaggaactcaaactatatgggtgtcagatggatgccattccttgcacatgatggaagcatcagacatggacactgtggttaatgaaaacgataggacagataacgaggaaaagctgatgcaattctcaggtttttttgtagtcccgttgtttgctagttaaagtcattaaattaataagtctaaattgtgttaaacaacacactcacttgaaacctatatgcttattgctacttttcttttgcttatttatctccatattctctgctagttattcgagcaattttcactagtgaaaagattgaagatgtcattccattggctgcaaattctactttagttctcggacaaggtaatatatagtattcttttaacaaaatttacttctttattcctgtttatttttggacttctagtcataattataattatcagttagatttacttgttaatcaattgaaaacctcacccaaagccaccacatgatggaaggaatgagagtttatttgttagatttgttatgttaatggaagtatttaataatatgttttggtctaccagtaacaatatataacactactgatcacggttgctgaaatttgatgtccatagtgtagtgcacatccttactcagatcttataaactgatataggggcaaatgttttgaacagtaattcaatttcctaagatactcctttatttagcagaatatcaagttaatcctccttttccatttatgcatcatgcctcatttgcgcctactgacatctgtgctttccatcctgtggtccaggtagtttatacacatatgaaatttcttgaagttgctcagctttcagttcttttgcaatggttagcacatttacataatatctttctttcatgtagatgtatatttcagctgctctgagctaattgttatttttgtttttaatcttagaatcttaagatgaggccatactagatgtttatggcagtttgacagaggttcttggttgctgttgtttttttaaaatgtaagtgttcctcttgtcccaccaatgagagtgtgccaccaaatcatactttgtactggactaattatcatgtctttattctcccaggtttcccttcacgtgttctctctctggttattatggttatgtgtgctattttgttgccaagtccatgagctacagtttcttcataaatctagttgtgaagaagtggttgggaagtacactgagctcttggaggtatgtatcttaataatgtagaaaagcatgttgaaatgtttggacaatatgagcttcgtatataccatagtcaacagattgcctagtcctataaatttgttttaatcattttacccttttcacattcaggtaatagaatcaagaggaccagttggatactacttatcatcatcatcatcattatcaacatggggtagtgcagtcagagttgaacaactcagccgtgcaatctgaatccaaacactactactttgtggtgtgaatgaatataatatggacttttttggccgttgattcgtgtgatcatcatcttcatcatcatattgtcttgtcccctcctttgaagccctggtttaaattttctgctggagggaccaatcagcaattcagctaaagttgataaccaaccaacgacttggaattttagatatacaagctttgagttaatatttatgcaatgcatggtatgtaacttgagcggttagtagtcttacggatactaataatacattataagacttgatcaatttattttttcatgtgaatttaaacttgatacaaaaaattactcggataccaaaatagcaatcctatcttttacatattttttttctttgagattagaagataagaaagagaacctttagataataaatgaaagtcagatggacccttacaaaggaaagggtgtgtgtgtgtgtgtgagagagagagagaagctttccctttcatgaaacctacattgcatacagatcagacaaaatagacggccgtgatgggttgtagggggtggggggggccacctatttccatgagaggtgggtcccacccgcaacacttctctttcaacaggatgatgataacaaccccatcacatgcaaatgcactgccacacacaatctcctagcccagccctcactcactcactcactcactcccccaatttcttgccatccacactttttttcttctttgtttctctcccatccaacccacactgaaaacaacttaacattgatatatgtggtaagatcaacttgtaagaatccatatacttcttaatctgactaatcttaaatcatatgggccacacctctgttggcaatgaccatgtggaaaatttggttactttaaatgaaaaaatatagctaaaaatgtcaatattcactcgctctattaaatatggtatataccctgctattt

SEQ ID NO: 198402 - DNA, 2072 bp, Cannabis indica
aagtaattgaggggtttcagttatattttttttatctttgtccctttgaggattgtgtgtaattattaaaatattatgttttttaaaattatttattaaacaatattatttttattgagtaaattgcggtcaaatcccctaaagtttcactacactagcaattattttccaaaactgatttttttactgtaaaactttctaaacatgtgttctgttatccaattttaattgttaattgccatgttgaattttccacatatacactcatttgcacgtgacaaatttatattagtccagccatttaattatttagaaactttattaaaaatttaaaaaattaatttaacttaaaaaaaataaaaattgtttaaaattatttaatatttaaaaattctaaagaatatataattaaaaataaaaatttgttataaactttttaattttttttttattttttatcttcttataatatcacctaccgctaccacccaccactgaaaccatcattacccatcaccactgtaaccactgtaaccaccaacaccactaccaaaggaaaataaaaattatatatataaattgaactttaactgttatattgccatttcttcagtagctccatgctcacttcaggacttggatgatgctaaaaagtggtgtttaaacattgaggtttcaactaaaaaaaagggtaaaatcagaagttaaccttgtcaatattgactagaaaagataaaataagtgtgtaaagtcagaaccaataaattcaaccaccacaaataccactgccattacccattaccaaacaaaatttaaacaacccacaaatctaaatcacaaacaaaaaaaattagatttaacaaatcatgagagagagagcaccaccattagtaggcttgtcttaatgatcatcttcaaatgtgtcttggggatcatcttcaacatcgtcaggactattctttccaaattcttcatcttcgattataggatcattacgattttggtctttgtcacgttgatctttgtggtggtatcactgtatggaatttagatcttgataatgctctactacagataggaatcaagagctagagatctaaatgaaatgagtcatattattcagttgttatcactgtaaggattttttaatcctaatgtgtttattttctagtttttaagaacttcatatttaggatgttagattatagaattataatcagcatacatgttagtaaatctaagttctagtaaaataattttcaacaatctaagggtacacccgcacactaacttcatgtgaatcattacttttgaggtaggggtaatagtatataccccctagagtgatttgactcttgtggtgtgtggtgatcgtttatcccatggtaatgcattataggtctctcgagcctcccacctctccctatcgcccttccttcttttatgtgggtgctagtccactgccccctgggggtagtcaccttgtttaagctaggggaaaggtgactatcaaacttctcttctaacggtcatgaccctaggggtagtcaccttgcttaagctatgagaaaagatgaccgcctgacttctcttccaacggtcatgaccctggaggtagtccccttgcttaagctaaggaaaaaggtgactgtcagacttatcttccaatggtcacgatcctggggtagtcaccttccttaagctaggggaaaggtgatcgtcagactctcttccaacggtcatgaccaacggtcttgactaacgttcataaatttacatatttttcatcaattcaaccttagtatcctcgtgccacgtgttatcatttttttccacatcagtatcatcaaaatttgggtaaacaatgggtaaccatgtacccttatgctaaccagagaggtaaccagttaccataagggggtaactcaaagtcggccctaagttaatttagaccctagaaaaaatagtttctttggccctttttataaaataaatatttgggtccctgataggagtagacctacgccttagcctagggccgactctggaataaccatgtatctttttttttt

SEQ ID NO: 198403 - DNA, 2623 bp, Cannabis indica
tgctgcttggtggaatgagtcttttttggttcttcaacaatgattcctttgcctttgtcttcacaaacgcttgaagttccaagattttttggatgtgctttctctgggacgtcagttattggagatacttgtacgttaggagctatcttagtcagggcaatcattacggcctatattctagtcatcttcatgagtaataactcgttgaattgatcttgccgagctaacttgctttcggccagttgaagttgtcttgccatgattaccacggggtctaactcatcaggttggctcttctccccaacatcatcattagcagccttgtcctaaaggtcatcttcttgcatatcctccggtactttctcagcattaacttcaccattctcaaagctagtttctgtagattttgcgtctttaatgataagatcttctcgattctgatctttgtcccatcaacctttttgatgactattcaccttttggggatcactagagtctccaaatttggtgccaagacaagtggaacaaagacaaaactttgttcgggtgagggccatgattactagaacataatctacaagtggtctcactacttccttcaactcttaatggaagcaccaaaatatttattgagattttcaaaagcataatataaatgataagaactgaagaaataaataattaaaatagaaaaagtaaaaagagacaaacagttttttacgtggttggggtgttaattcgccttagtccacgagtgagtattattcaatagttctttagcttgaaaaagcctttaggaatacaaagaatatatgttcttaagttttcctgagaaaagtttgcaagagaattcaacccttaatccatatgattccatgagtatttgtagtagttttagaattacattcagtttcccttttccctctattcgggggtttacagtaaatagtacacttgtgtcatctcatgaagttcaacccacaaaggaaaggatctactgactaggtggattggattaagcttgatttggtcaacaccatgtgctttgattgtgggcaattaatctgtgaattaattgattgatgctcattataggaagtttccccatttaacctgatactatactcggttgcgatctgtcagctataatttccttatttatgcgtaggaatcaaaagggaaattggaagagtcttctaggaacacgctgtctcatcctttcgatatcatcgtatcgaacatcctttcgggaatagtttaccgaaggcagaaggttttatgattgcagagctgaatgcattcttggaaggacttatccaaatgggcttggcccactttacctttgttgagggacccactgatgagccttggatgctgacctggactccacgtgtccattgccaaaaatgtagataacagtcattcaggttcaatttttctcgatggacccgagggaagtactcatactttcggccatcagggccacagaaaagtaacgacgccattcacctctttcatcttgaaagtacttctgagtttaaagtggctcatttgtccttacccactagattttgtagcctctagttttgaagtatcatctcctactacttcgttcagcttgagtagcatgtccatttccccttgtagggtctcatggcctggtttcttgagaacattgaggagaacttagtggaggagtcttgttggttctctcattgttgtaaggtcattcaacatcagcgggagagcccattggttggtgctcgcaagcttgagtcctctcgggctcttgctcgaagataccttccctctgggaggtctccacacctagtgtttgcctagtgcctgctcagtcaccaagtgcagtaatggtgttatgagaattaaggattttgtcttaagcattagttcccacgtgactagcttgtcaaaggggtttctccctcacaaactcagaaagacctcttcgggaagtagttcctcgattagagcaatatgcttctctaatccgttgagataggttagctcttcgttgttcctattcaatgtgttggctttcaatattcttcgagttttccatgaaccagtgttgaaactattcatgttgcttatcgagacagtctcccagctgttcttgcaagtaagccatagtctggttgagatgagcaacctgaggatcaacctcctccaggtcatctatctccacatgtggctccttaggtgggatctggtcatttgtgacagtacgaggagtaattatggtggccttggaggatgaattgaggagctagtttggaggcctgctcctggcacctgcggcaccgaagtagtctcggttccaactctattcaattagcgtgccccagttgtttagcaagctgctggagtctatctgtcaacacttgtagaacgtgttgcaaccatcttgtttagtaactttcttgagctatggctcaaaatgaaagcaccaaaatattgactcaaaaatttggactagacttttaagccaaagtcgctcattagattagtgagaataagaaaagtagttaagtaatataaagagacacatccaatatataatagtttacctcctatattatgatagtaatggggctacatctac

SEQ ID NO: 198404 - DNA, 1780 bp, Cannabis indica
aaaaacttttaaaaaattcaaatgtgaatataccttcttatcagcccctaattgaatttcaatggaggtatgaaattaagtttcatttccaaattgcaatttcttttcaaaagtcagaaagacaaaaaatattgagtttcttcgtatgctgcaatctcacaggttcccattatatgttatataagatcataaatgaggctctaaagtaatggggacatatatcttttatcttctttaagataaatgctaaaatggtaagttatacaacactacaaatgagtgatatcttcttattttattttaattttttttttttttgtataaactccaacttgggatgggacattttgtttacaaggagtattacatttttatagtgtaatttaatgctaaatttctcaaattttaatttaataaataattaaaaaaataaattatttgtgagatgccacctcttataatattagctaataaccgtgagatgttttatgataattaatatgcaaaataaaatagttaagagctcaatatcatgctacattaatattgtacttggtcccacctttttagtcttctaaaaaaaatctattataaaactatatttgtatacatatcgtgacaaaaacttaaaattcactttagcatacttaatttattttctttatatgaatgaaattcaattatgttgagagagtaaaaaaaattatcatcttcatcatgaatcttgattgctggtaaaaaaataaagaggtatttatataaatataaaaaaaaaataataataaagctagtttacatatatatatatatatggtgaggaaacttagtaggaaaaaaatatggcatttaaaataaaaaacttaacatataagcgatatgtgtcactttaaattaccataaaagaatattaaaattcccttcatgtatttttttttttttaaaaataaaataaatgaaactacagtgatcgtcggagttgtcactagggccggaaagtcatcggagtttgctgtcagtgctgaaaaaatcaccggaacaactacaagtgtcggagaagttgtcggagttgctgtcggtaccgaaaaagtcgtcagaattagtattatcaccggaaaaatcacaaagaaacaagaaaattgtttcttggtaatttttccagggacaatgccaattctgacgattttttttttaagtttgctgttggtattggaagagtcgtcggaatagcggttggtgatggaaaagtcgtcggagtgacatcaacctagtataaatatatacatgattaacttgtttgttggattttttttttttttaaaaaaaagtttcttaataattaaaccacttgttaaaaatgggaaaagtttattttgaatgataaataaattcattttcaaaaaaaaaaaatgataaataaataaaattgaagagcacattctcaattattagtattattataaataataacaataatgaaagtaaaagtgatattattctaatacatatagcaaaattcaccaaccatgaatcatgatggtattgggtttgttctcaccaccaccacatccacacctaacccaatcaacggcggccaattttgacctgacttttaattaaagtcttgatctttatatatagaccttcttcaacaactccttcagctaatctaattcatctctttttcccccatttccgatccgaaccccaaatcctcaactttgtcttctcaacataacaaggtcacacacttcaggtatcgattctctttatctctcgtctg

SEQ ID NO: 198405 - DNA, 756 bp, Cannabis indica
attgtatatatataataaaaaaaggtaataatttcattaattttcccctgaaaattctcatctccaaacacgtgatacacacctaacatatcagcatattcctctcttgtatgaatgagaagaaaacgcttgtagctaaaggaacaatcttttgagtaaaaaaatggtgaaatttcagagagccaaacaaacagaacaacaactatggagaaacagagctgacccacaaatcagatgaaaacacaaataaatgggtccaattcaaattcaataataaaaaaaagttaaaacaaaaacaaaaagaagaagaagaagggttcgtaccttatctgggtgaagataaaccttatcccggaaaagaaggataacgccggcctcatcaaggattctggcaaaagcggcggcctcatcggaagttctagcgaccccaatgctttcacacgcctctaaaagctcacaatacgaaatcacctctttcccttctgaaccaagtctcgctttcagtgcctcaacattcaccagcctcattagcttcttagcctccgagaacgatatgggatctgattcaccgttttcttcttcatcatcgtcgctgttttttcttcttttaccgttgccattggatgttgaagggtcaatagacgatgaaaatgccctagccgacccaatcgataacaagggaagaaaacagaggttttttgagattacataatcttgggaaacgaaagccctaactcctccgaacaaagtagaaga

SEQ ID NO: 198406 - DNA, 589 bp, Cannabis indica
aaatattttggataggtgtgagttggaattggaaatggagacctagatgctacttaccgttataattataatttttttaaacgaggttcatttcatagattccatccagtcaatttctatttttttttatttaccacagtcaaaagattaaaagttagttaaaaagacagaaaggggtttgggtgaaaaaactttagagaagactttgacggtaaacgttaaaaggagtacggcttgagttaagaagtcaatgaggcaatgatgttaatttggtagatagtagagaacgccgttatgtctcccaggctcccagctaccgtacagttgagggtttagagaccaaaaccgtgagattgtcttacaccgtcagatcactcgcacgcctccccacttttggattacataattattacccacagatacgggcgtggtgaaactcaagattcacctctcccatatattaattatattaactcttcttcattaatttactcaaataacttcataaaaaataactcaaataataaaagaaccattttattggattcccattttgttatattaaataggataaataacggtataagta

SEQ ID NO: 198407 - DNA, 1068 bp, Cannabis indica
aagcatgactggtagacaaggagtaaggttgtttgtgtacttttgcctttttgacatgcaatgacaaattgtaggtcttttaaagttcctatatgaggtatatttgttaatattctgcttaaaattgcagaagaaggatgccccaatttttgaatgccaaagatttatgtcttgattaagacaagtgaaagaaacagatggagaatattgtaaagagtaatctgaacaaaattctttattaatagttggcatattacaagatgtcactgatgaaacagtggagtcattacagcaactatgacaagtatgagcaggggtaggttgagagaatgaggtgagattacattggagggtatgtgagggttgacttgaatcaccaagaacatagaggccatccttaattggtcctttgagaagaacagctccagtgagtttgtccttaacaaaacaacaattcttgtgaaattcaagatacacattattatcatgtgttaatttagagacacttatgagattctttttcatggcaggaacatgcaaaacagaatttaagtgtaaatttggtgaattgttggaagataaggaagtggaacctatgtgagttatgagcaaagtcttaccatcacctacagagagtgtttcagtaccagcatagggagtaggagattcaagggactcagaaccatttgtaacatgaacattggcacctgtatcaacaaaccagagatgatcatcaccaaaatcgggtagaacagtagtgttatgtacctgattctcattgtccacttcaagttcagtaagataggcacgtggaggggcaggttttggaggaacaaaatttttgtcaaagcggtagtgacatacagccgcagtgtgcccacttttgagacacaattgacaaattaatctgggctgaaacacataggaactacgagaattgctcctggcaccatttcttgaagaactctctgtggcatttcctcgagcaggtggtggaatgtaccttcctgagttatatttgttattgccaacaacaagattggcatgaagtttcatggagatgtcagt

SEQ ID NO: 198408 - DNA, 2466 bp, Cannabis indica
atccccatttaacacatccttatcttggtaaccatgctaacatccttcctttttaaggagtcgatcctcatgttggtaaccgcacaaatattcctcctttttaaggagccgatcctcgtgttggtaatgacgtcaacattcctcctcattaaagaactaatccacatggtggtaaccattccaaaaatcttcctctccctacaagagttgattatggtatactaaatgacaatcctcgcataacaatgcttgaggaacaactccaacaacttttgaatacaaaaaatgaaggagtatgaatctgatgaagagacagagtatttcgtgccttatatctttgcattaccttaccctccagagttttaaatgccaactacaaccaagtatgatgggactgctgaccctggggtccacataagcgaattcaatactctcatgaaagcacactaagtggttggagatttgaaatgtgtgttattccctgctacattatctggagccgcattcttgtggttcaaaaaatttaaaagactccatagtgtcatgggaccaactctcagatgctttcaaaaaggagtttcgggctgtgagaacctgcaagctttaaagttcctccttggccaacgggagacaatcaccaggagaaagtttgaaggcatacatttagcgcttcaacatcgaagttactaaaactcatggtgttgatgatagtgcaagactgatggcactggtggcaggtattgcccatggttccgtattttggaacaactttcaaggcaagagcgcgcgcaccattgacggattcatgaagcgggcacaaaaatacatcaacattgaagagactaggatagaaaatagagtacccaaagagttaaggcccatgccgataacttgctcggactagcaaaatgcaagccaccattggcaacaattaatgttatttttaaaacctcgtgttacaaagataatgagtatcggaataaaataagcacaaaaaagtatattatacttaaaattctaaagtcaccaagatatggaataaactaagttatatatgcttaaaaagttctaaagatgtgaaacagacttgttagtcctaactaataagcactccacgacaagtggacatatacaaacccacatatgtggtgacaacataaatgcacaacgaaaaagtgtataataagaacaagagaatttaactctgttcacggcaaaccttacttgccaaccaacttgagcaagagatttaattctactcaaggatgagtttaagaaagggatacaactctactcaacgctcaaaacttaagcaagagattttaaaactccataaaagttttaaatttaagcaagagatataactctacttaaaattaaaaaacttaagcaaaaacttttaaaccttacaaaagtcccaaaatcgagcaagagaaataactccactcgactaccaaatgagatatgagatataacccagctcacattctaaggagaatccacgtgctttaaaaactccacacatacaagtccaagaacattggtcgtgcccatgcacacctcttcacaacaattacggacattggtcgtacccatggattcctcttcataacaattatagacattggtcgtgcccatgcacacctcttcacaacaaacaaggacattggtcgtgcccatgcacacatcttcagaagagaagttacattcattcactctacaaagaggtattttcttgcgcaagccttgggaaaagtgcaaaagcattgcttgaaggctgacaagcaaatacttttgggaggcaaatgttatacctaatatttgcaaataaaataaaataaaatggctactctagcacaagggcccacatgccaagagtaccttgaagacactaaagtcaaccttgcgattttgaccaatgctcataaatgtcaaataaatcaagacatccttcttaagggccccatgacacttcttgagggctcgaaaacgtcaaccaaccatttggcgccgagactcacacacccaagtgtgcccaaactagggctcatgggccctcacgagcgttttcaccctatggacctcaatccggcaaggaaactaataaggagttaacttgtttggtcatgaaaatgacttgggattatgaataaagtcaaaatagcattaaaaccacaggaaaagaggaataagtgaccactaccacaaggaaatggtagtgctctccagttttggagaccattgccgtagtagagtggcacaggtcactcctcgcaaaccatggaaggaaattagttcgaacgggttctctcgacaccaaggagtaaaaaccaagtgagaaaaatcatttcttacctaggaattgccttaggtgacctctgccatatgaggatggcagtgctccccagtgtagaccactgccattgtggagtggcagagatccgctaagaaggagggaagtaagat

SEQ ID NO: 198409 - DNA, 814 bp, Cannabis indica
tcacttagtgtaaggaaatgaaactctttgttcattatctcaaatggaaataactaacatttacttactcatcactggtgagaatactgagcttggtagcacaagctgcaatagttagaatagcccaatagacatctactggcatatggtccaaggcagatgacaacccaggaatgcctttaacatcataaccagcagtgagtctctcgaactcgtcaaagattgcgatgactcgcatggcgaccatgatgaggctgctgagctcgaaaactgcttgccggcgtttttggagttcagaagtggttttgatgagggcaggcactcgttttaggacagccaaatgttgggccaaagggtccgaatggtaaagctgagccatgagccagagatccccaaactcaaaagcgaatgccgcaagtgccaaaacagcctttgcttcccatgaatagttcgacaactttcccagaatcgccattgttgttttgtgcgcagtttgctcgttcggagccttgaatgaaagctgtaattcattttgttaagacaaattttggttccctaaaaggatgttgtaaatccttcattacaaacccaaactcaaacagatcaacaaaatagtagacagttgtaaagatttgacagccatcaacaacaacaaatataattgtttttggtccaagatgcaacattcagttttagctatagaaactacaaaaatcaaactctctcacataaatacctagtttctactttgagaacaacttgatcttttgcacaagtttaatatttagccaaggttaacaaaatcccaccattt

SEQ ID NO: 198410 - DNA, 1627 bp, Cannabis indica
atatttaataaatatagtaaaaacaaatatattaattaaaatcaattaaaaaattatttctttattctttttttttctttctattttttcttctttctattttccttttctcttctttcttcttcaccttcttcatcttcttcatccaaatgcaccctaaacccccaccagccccaccctgcctccaccccccaaccccacccccacccccacccccaccctcagccacacccttaccccctacgacgcgaagtcttgccataaaaaaatataagccaacgattctatgatttctcctccgttatggtttgttgaaaatttctccctgttttttctttgttcttcttattctccttcactctcaaccttgatttactttaattacaccactaattagatctctttttctctatcgaagaaaggtgcatcgattatggtttcctgagttttttttctttttcttaattcgttttttgaatttcttgttatggaagttttttgggttttggtcagataaagagatgaaattgagagatgagttttgcttggcagtaggaaactagtaaagggtatggtggtaacttaattttcgggtgaattgagattgatgaatgaacaaaaaaagatggattgtgagaataataatttgtgttgataataaaaatgaaatagaagtggaggggtttggttcaaattaggagagtcaccactgttttctttttcgatctaattaagcttatgaatttctgggcaactagaagaacacaaagaagaagaggaaagaaaaaaaaaaaaaagaaagaaatattagtttttaaaatgatttatttagttttttttttaattttaaatgttttaaactaaaatttaaatacatgacatatttaataagtaatcaattaaaaaaaaaactaacggaattacgaaaaatgtcaccttaaaaattgttatcgctatattttaatattaaaaagttatttacattaaaataaactttttgaaaatttttaccccaaatttttcaaacttaactaaaaactgagacaaccaactgcctctatataagttaattatgattaaaatatttagacaatcaattcaacttcctatactataatctacacacattatagaatatataaataattttttttttcaatattgtttccgatcttcaaaatcttgctggtgattggtgaaccaatcaaataaatgttaatttgtgattgttattttttttagaaaaaaaaatgcacatgtattaatgaagttatcaaatataatttaccaactatagatatatatagttatatatataaagcttttcacctaatattatcaactaataaattcaaggctcgatgtgacttctttttgtaaaggtataaggtattaatggtgtttcatttccttaatttattaactaattaataaattaatatagaaaattaaggagtgactaacacacaaaaacctaataatctcatcaatgattttgcaaaaaaatatatataaatgaggaaaataaggtacctacttagttgattattgaataatgtggaaaacatgtgcctttaggtagttgaaaatagtaaatgcactataaaaaaaaattaactaattataa

SEQ ID NO: 198411 - DNA, 1009 bp, Cannabis indica
agaagttggttaaactttttctgttattttctttttcctgtgtattgcttgaagtatataaataagagctgttatgagaggatgcagttagttgcattgttactgtcttgatttttcattttcctctgtttttactttggttctctgcaccagaaatcttgttcgtgtttctactcttaacatggtatcaatcgccaactgacattcttcaatgtcatcttcaacctctgatcctggaattactaccgctgctgctatggctacgcaatcttcgattcctgcttggaatccgttctcccattctcttacatcgaaccttacgatcaagctggatcgtaacaatttcctttcttggaaatcccaagtcataccgactgttattggtcatgacttagacaaaattctcttcaccggcgaacatccacctcagaatcttgttaatggaggtgttaatcctgagtatacgttgtggaaaaagaaggaccaacttctgcttttgtggcttcggtcttccatgtccgaagtgattcttgcttccgttgccaatcatacctcttcccacactctttggcgtgctttagaacaaaagttctccagtcaaaccaaagctcaactacttcagttaaaaggctagttttctcatgttcataaagcaaatctttctattgctgagtatgcggaaaaagtccaaaccattgcagatgctcttactatggttggagctcctattcaagatcaagatcttgttcttcaagttctaaatgggttaggacctgagttcgactctgttgtatccaggattacttcaagaagtgacaatctcaccattgatgaggttcaagctcttttactctctcacgaaagcaggttggatcaccatcaacacatgaatgatctatccgtgaaaatgcaggcaaatcctgccttggctcaggaaagctcgggaggttccagacccctatcctcaaacagatttggcaatcaagaaggcaatctcaaactcaaaatc

SEQ ID NO: 198412 - DNA, 1139 bp, Cannabis indica
ggactaaatttatgtaaatgtaaaagttcatgagaaattcttaacaagccgtatattttaaggaaaaaaatcagtattgtcgaaaatttagggagcaaaattgctaattattttaatataaatgtaacaaaaagaaaataaaataaaattatataaattattattattacgattatcggttttgaataattttggtttcctcctaatcttaaaatctagatatgttatttgagaaaatttacaaaaagtttttttttttttttgacaatcaaaaatttacaaaaagttctatatatgaaacctcacaaaaattcatgcttcaacaactgtaattagtgctaaaagcctaaaataaccgtataaataacatatcattatcaaaactcaccactcaaaaattatgacatgtattaattcaacccttaatattttgttagaaagaaaatcctaatatatggtgtgtattcataaattactcgtagacaataaaaaaaattaattgtttatattttttaatgtgcccaaaatcatttattcattatacacattttatataattgtatgtgcatatttaaacatataaagaatacaaacattaaaaagttatatagtaaccaaataatccagttgggttcaacttaaacttaagaataataacaggggtttttttttataaatctggatttttataaagtcaattagaaaaatatggatatttaaggaaataacttaaaagctggaaaaaagaataaaaaacttaaaaaatggaaataataatatactttttccatatttagattcaacaatctaagttaaccctaacagtccacaattttctctcttcttcttgttttctcacttctcctctaatttcttttggtgcgattggcattctcgtcaaatttctttggtacgattatcattctcctctaattttctttggtgttgttgtacattcttcttcctcatcttcatgttctaagcaaattaataaatatttatttgatttgattgaaaaatagagaaaggtaatttattgattgatttttttcaaccaattgtaattttaaattctattgttatttccactattgacactcatacatatattttgattatatccttgacttattaacatg

SEQ ID NO: 198413 - DNA, 1097 bp, Cannabis indica
aaagtgacatttcttgtattggtggttgtgtcaattaagaatcaacactacagaaatttgtgaccctatcttcaactgaaggagaatacatggcttctacacaagctattaaggaagcattatagctgaagggattcacaagtgagcttggtctaaactctgaagacatcacataacattgtgataattaaagttctctggactttataaagaatcccaagcactatgaaagatcaaaacatattgacatcgggttgcatttcatcagagacagtgtctcccataatcaagtcatagtaaaaaagataagtacaaaccacaacccaattgatatgcttactaaatgtgtgacttatgtgaagtttaagcattgcttaaacttactcaatgtgattaaaaattgagtcacaacttttcgtcattctcttctgagcaaactagctttcaaagtcttatagtttcttaattaaggtagaaattgttatactacattatcaaactaactaattcattagttagttatagaactgaaactagcacctatataaagtctgctatttctcattagttgttaagtctttcgttctgtaatttgagagagatatagtgattaagaaccaattacagagtttgtgtgatggaagggattttaaggggattgttcatgcaagaggtgactttccttatgtgagattaatctataatcaagtctagagtagtctagaggctcgagttcattatatattctctgtactggtatttaagtcgatcaataaagctttatgtttgctctagtagttatgatcataaaacccattttttcatagattagtcttctcaaattcaggtgttattttctgtattgttcataattttgttgttggtcatttcagttattgtttataattacccttctttgattattgttcttgttgaggtgtgatcgaatcacaaaaatacatatgtagtttatagcatagcctatttattcatacatatgtagtttctagcatagtcgaaaggcttgatatctgggtcttgtatgctgttggttatatattattcttgtggctcgttaatctttacatatatatata

SEQ ID NO: 198414 - DNA, 2929 bp, Cannabis indica
ttacatgataatggtgaagatgatgacgatcatgatgatgatgatgatgatgatgatgagccaattacagtgcaactagtgcatagtaatagcaaagaagcagctggtgaagtagaagatgaggcatcagtagttgaatccttgcaacagaataataatatgaagccacaagaggtaaattaataagtaataattttattaacttcaatttattatcatcatcatcgtatcatgtgcacttaatctataatattataatatatatatataattctcctttgctatagctactaaaactttccatctttccctgtctttctgctatgccataattcttgcatgtaaatctatttatatatcgagatcattaaatatgacaattatattttcttatataataactatagtattttgagattatttgataatttatttataggctttttatacatatacaaaatcgtaaaattgacaaaaagtctcataagattctgtacatatataaatacataaatacttattattagtttctacctggatcctcgttaatttctcactgatcttttgcgttctgtatatttttctgtatatatacctcatgagtttcacggtgcatgtacatgaaatcatatatatatttatatacgtacgtcatatgtatatatacatgtccatatacttaatttgttttttatttaaggaggataatatatacgtatacgcttccaattaattgtatatttctggtgtagtttacgtacataataatttaattatgctccttctgagaagaagtaatcataaaattatgtatgtacggttttcaatatatggatgcaaatatgaaatatataggatgttattaattatcataaaaattgacaattagatcaaattaagtctcataaggcaaacctctgaactgaccttaattactgcaaattcgtgactacaaaaagatatagaaccgatcaccaccgtagatcaagaaagagaaagaaaagctatttattaatttatttatatattttcgtagggaaatatatttatgtatttgattcttttttgcatgtgtaataattatctagcgagttcttaattgagctaaagcaaattaaggaaacttcgtagtttcgtacgttttatataatatatagcactgatcttttttatatgtatactatatataacttttttttgaggaatttaatctagcgtttggaatatttaacagatgaatgctgtaattaggtcctcttaaaagctcaagcattaaatttgtcatctgcaatattaatttactcccaactttttttttttgttgttggtttagcactatacttttcaagatttgaattcctgggtatatattgattatgatcatgatcaaccaactttcatcactttggatatattgaacttttttttttcataggctgctacaatatacattttatgtaaatatggatatatataaatacttcttgttcgaaatatagttcattatatatatgtatatttatattgtctaatgcaatgcaccaaatttcgttatatattggtgcagcaagcacctaattgaagtatcctaatatcacacaatagacttattgtaactttttcaaaattttctaatagttcactatgccaaattagagtttaaactgtatatctaattctttctatatagaagtaataaaatcttgatttgggatctgaaatttgccaaaacatttcggggtttctaacacagtactagagtatatttattatgcatttttaaaaaagtcaaccaataaatttaaaattctgttatatagatacattttatattaaatatatatgtaactggtctcttttgtaacagttatcgaagctacaaatggaaatgaaccgcatgaaagaagaaaacattgtactgagaaaagtagtcgaaaagacgatgaaagattattacgagcttcaaattaaattcgcctctattcagcaaaacaaccctaataatattaaaaagcaggtacgcatatatattagtacccttatatattaaattattgaaggtatatacatggagcatcactcttgcttttgttgcaggggtgtgatcttattttttctttataaaattatacctcaatgtttttttttatatgaagttgtatattgtaatcataatatatgcattttgcacctgtgtaaaataaaatatgtatgtacaattaaaatgtttaaattttattttctgcattgtaaattatttaaaaaaaatttaaaaaatacctaatataactaaaatcttgcacatcataaaaaaaaaaaaaaatagttaataatttctccatataacctatattattggagcaaaactgatcctctcatcaaaaaaatttccaatatatatttatacatattttgattactcatacataattttccctacatttatataggatacattagcgttcctttctctacatcatgacactactcaacaaaaaactagtggtactactactactacagtactactttcaaataaacgtaagtctccatcgccggcgccggcatcgacggttgaggaagacagtcatgaattagggttgtcactgaggctacaatcgagcactacaagtactactactcagaataagggagaacataataataagaaagatcaagaagagatgctcgatcatggtggttttacaagttataataacagcaacaacaacaacaacaacaacaacacgttattggcaatgcaaaacaagttgcttcaaagaactagtagtagtactgatcataatcatcataataatcaacaccaaattgctgggataactaaccacgtcaccaatggtaacccacctaacagaaaggctagggtttctgtaagagcaagatgtgaagctgccacagtgagtttttt

SEQ ID NO: 198415 - DNA, 933 bp, Cannabis indica
tttttctttttaattcttgtcttgtttggtcattttactaatggtatctgcatatagagaaatgttttataagttgcaatacctttcatgcgcagaagtgtaacagtgtagctattattttcagagaaattttggtttaagcacaactgtaataaataaataaataaagtaggcaaattctgaggttttggtttctgttcctttcaaatatcaataattagcttttttatgctaattattattgttatgacttttgatttgagataaatccttgaataatctagttctatgagtgagcaaggtactgttattctggtttgaaatatcttgtgggcctattgtgacttgtgagaaactttggattttctgcaacagatacaaaatctttagttgtattgtattgacacactgagtttttaaaagttgatatgttttgagaaagcattgaaacattcaatcaagcttccatggtaactttgagaatgcatgccaaaacatagttaaataatttgttttcttgtataaaattaacatgctcagtttggttaaataaaagaatttgataaattgtagtgaaaagttatataaaattagtagtatattaaattcattgcattaaaattaaagaaatatattttgaaatccaccttttaaaaaaattaaaattgctctcttttgaattatgtaatttcacagtatagtttttctgacttaaaatagaaaaatcacctagcaaacttagaatatttctcattaaaattataccatactaagtggaatcatgagtgttttatcaattaatctttctggtgagattataagcgtcctcactacatctttttaggattttacccttagtttgttcaaatcttccaccatttccttcacccgagggatgagtctcaatcgtacttgtcctatgggaattctgat

SEQ ID NO: 198416 - DNA, 1181 bp, Cannabis indica
aaaaaaaaaaaaaaccaagtaacagtgtagtcaaacttcaagctagcccttgggagagggatgggcatggcagaccatactatcaagtgggtttcaagaaaattttgccttttttccacttctcatgtgtaaaaaggaataagcagtgtgcactcaaaatgggtttagatatttttcgttttttttttttaactaagaaaaaaaaaaacaccaacaacgaaagatttccttccagctatcattagctaaggctgcttactagaccaatttaagctggaattgcaaattgcaatgttgcttgaatgagaaatggggcaagttgctttgagcattaattagaagtgttcctaagttcagggatccatatgggtcgttgataccaaattttgggtcttctttcacaataatttaggtaaagaagaaatatctgtatctgtacagatcaatcacgagggagaaaaaagtggaaataagaaagaaaaacattttgacctttcaaactcccaatggtcgtagaaactataagaatgttacattattatgaactccaaaagccatcatagaaaacaaaaatccacaaccaaatatcgaaactctaccaatcaattcaaagacacaaacattttctttccagaagctacgaaatatacaaaccaaatttttaggcataatattccttattctctgattataatatccaaaacacattaataaaatctttactgtgctcagtttggaaccagtttaatgaatttatttggtgaatttgatatttttactgtgacgaaatgagctaaattacataatttttttctaattttcttttttgttttataaaagggtcactttcagaattttattttaccaaaatcccaaacgagattttcttaaagagagagacggaaagaaataaaaactgagctgtccatcaggagataagataaaatatcattgaaataatcagatttaaaattcaaaaaataaatgataacttcaaccaaagaaaaaatttaggtaatcataaattatcatttacaaaacgacatgctatttttttatggatatacgaagtaaaattaaattaaatttaacatatatattatatataataatttgtaacaattaaactgtacaccagaagaggtagtattagctaatatagaggcaccggaaagcgtggt

SEQ ID NO: 198417 - DNA, 1167 bp, Cannabis indica
tctttcaaagtaggattacataataccatagttatagtgttcttgagaccatagtttactagcaaaaggagtccatcacagttctaaaatgatccctcttaccatcatcatcaccaacaccaccaccaccataatcatggattatagtgacatcaatttcatcatcatcatcataataataataatcatcatcatcatcagcaccagcaccaaaaccatcatcatcaccatcaacatggattatagtgagcaatggatttgcgaccaaacaatgatctacacgggaagaaggctgttcggaacaaagtaaggacatagaagaatggtttttggtgatgaggaggtgtttggcaacaaattttggatcgttgatgagagtagaaatacaagaataccagaacttgttcacagatttacactctactagagaatctgcaggcaccaacaacatgattttctccacaacatcacttggcaaatcacaaaatctcaccatttctgtctccaattagagatcaaactcaaaaaaaaatatcctatcagagacaaaaggaaacacttcaaatacagataatgtattttgctcagttaaaaaagaaaatagtaaacaataaaaattaataatcaagtgagtggctgaccttaatttttcctcttcttccttttcaatctggtttcttacccttacaaattaaacacaaaaaaatgcatgtaataaataaaaagagttctttactacatttctgtaaaaaatttgtatgagcaaatcttacagaactgccaaatatgggcaaactaatacattgaacccacctataccataactataataattattacctagaaataatacaccattttcaataccccaaacaatcttagtacttcccaatacaagaacatcaaaagattacacactcatttattgttttctcaatagcacagttcagtttctcaataatcattttgtaacccacctctgtttttacgtgtcgttttctaatgtttgtgtcgtttctcttaaaaacaaaaacaaaagttttcttggcacaatcattgtcgtttttcttagctcacaaaaatcttaataaacataacattttgggctacaagtctagaaaattatttttggtgggataattaatattgggaaattctataatgcac

SEQ ID NO: 198418 - DNA, 384 bp, Cannabis indica
taaattattttgaattttacaaatattttaaattgctataatgtatacgaatataaaaaaattaaaataaaaaattcttctaaataacaaatcagataaataatatatcagtatatttcttttaaaagaatacgaagctcatatatatatagtattaataattatgggtacatgatttggattaatggggaaggaataaatgaatatattataattataggttaattaatttgtttgtccggtgatgaatcgaaatggaatatagatttgaaacattttggtgaatttgtacatatgcacacgtgcaaaagaagattatcaatatatgagaatatactttgtgtttagataatttatatttatgtacaatgtattgtcttctca

SEQ ID NO: 198419 - DNA, 983 bp, Cannabis indica
ggttttttttttttttgcattttttgagtttttttgtgccttttgcttgcaagaaagtcaataggttcaatggttactcgatacttgatataagcatgctcttaatgttagggttgaattttcaatatatattatgctaattaataatattattatgttatttgatttaaagcattcgttgtactcgatagtactcgatataattgtacttgatataatagtactatcgagcatttgataattatgttgtttgtttatttttaattgaaactataactctctaaaaccatcgtgtacgggtcctaggtttgatgtttgggtatatgtttaaggttcgggtctaaaggcagtgtttggggccaataaggtcgaagttttgatcggggtccaaaatattaatagaaggatatacatatagattataattaagaaataaaaactatttaaataatttttgaaagttgatttttttcaaaattttcaaaagtttgatttttatttttaaaattaaaaagtgaaaaacttttatagtaattgttttttaaaatatttttatttttctaattaaaaaaattatcaaacacattttacttaaaatatttataactgaaccaaaccgatcgaataagttaaaccctactaaaatgtgacaaatgcaatgcaccgaatgtgacattactagaacatgacaattaaggactaattaaatattccatcacacattcttcttacaatatatatttattatttatatacaatagatattccatcacacattaattaatatcattaaatactgtgatagttaatgcttttgtaacaatttatttcacaagattcttgttaattataattttgaaatgcaaataatagtaaatacgacttcattcaaaggttcgaaaccttaattgaagatgtgattcggcaaatcacacaaagcatattatcataaaatagatccataataacataaactattttgc

SEQ ID NO: 198420 - DNA, 583 bp, Cannabis indica
gagacttggcaaattatgtatagtcgtcgtcgttgcatgtattttgttttggagtgatatttccacttctacgctaacaaaatcattatcaatgagactataaactataatctatttgccctttgactgtaataacttgaaaattcaaatatttaatttataactcgtaattttcatccaaataataataataataaatttataactcgtaatgaataagtcgcacaattatttaggttgccccaacatgacatgaaaaatatatagttatatatatgtaaagcgcaggtgacaatgtaataataatcaataatttcacatatatttgcatatagggactaatattactgaggccaccacttcttttatatatgtaaaatcataagcaacagaaaagattttttttattcaaataaatcatatttacagcaaaattaatttttggattaattgcagtagatattaattaatgtttttgacttataatttacttttctctgaacttgaacaaatggtattaattaatggatctcttttctattataagtagtcgatatgtattgcataacaaattttattagat

SEQ ID NO: 198421 - DNA, 3547 bp, Cannabis indica
tatcatgtcagtctaaatcaaatgaactgacaaatcaagaaagttaaaatatttaaacatataatcacgattatattccgctgtgctgacgacactataatcatgaacaaatctacatatgttctggacttaatagaatttatacatttaacataatcatgaaattaatcatttgaaccatgcaatatgaaatgatttcttatcttttattaattagtaaatctgattaaattgaaatgtgttttatttagggcacaaaacccaacatgaagatggggaaaaactaaccaaggaaaagaaattatgaagacataagaagaatcaataagaaaaaaagagtgtatcacttactgttttgatcaaaatttctgtacagagaagaactttgcgattgaagtctcaaaaggttgagaagctgggtcttaatgatttctggaactagaattgtaaacaaatgaaatgcgcaggaaaaaagtaagagataatgagggcatgcaagattggaatgaaagtggttatatttttacaaaaagctcgaaggtctgatagatgaaatggcaaaaatgatgtgcaaacttcaatattatacctaatatgtgatcactatttgatcaaaagaaatctgatctaacggatgggaactatacaagaataaaatagttagaacactaaatgggtaatgatgagcctcgaagttctgaaccgacaaaaacttaaagcatgcaatttttcaaaacaggttaaatgcgattatacccgtaagagcatttaaaatgttctttttaattaaaaagcacttcttagggtgtaattgttatactcgaaattcggctgatcatcagagactgacacttgccctacaaaaggaatatgaattagctcgaagaatattataattaaattttattttaaatgcgattaaaataactcgttccaattaattagagttgataaaaatattcaaactcgctgactacttagtcatatgcgagataagaataataactattaaactaatataattgatgaggcaatatgtccatctcgagatgaacaaagtatatgataaaaagtttacaagacaatacatcaagaagcttgtaactcaccaacccacatgcatgagcagggtgaaaataactacgctcaaaccatctcgctttctacgcaatggagaagtcatctcgcatcatcactacagtatgagagtgctgcgagaagaagcatgtctacacttaacatattttcctccaaagacggataagaaggataactcattctaagcgagaaacaaccttcttaatcagcataatcgttttaaggataaagacaaggaacatttgagtagttattagatattatctcatgtgcaaataaatgaaatgttcacgatttatcagcaggtgtaaataaatcaatcccaataaaaataattattaacctatatacctataaataggggcataatccatgggaaaagggacagagaaaaagagacagagaattctattattaattattgttgagatttatactctgtatttgaagaaatatccctaataatatggactgttggagtacgtagattttaattacaaaaccatgtaaaagaccttgtgttcatattattaaattctgtagtaaatttattacggaaggctacatatttggttaatgagaatctacgttaacataaagaattacccaactcactaaaaattattcaaaaaatctccattcagctactttctcgatatttctaactacaatagacattttagccaagtgatgtgattattactcgttcgagaagtatattgttacagagatttagagatgtggtttgttgtgaatgtgataccaatctgattctcattgattgagtatgctttcatatctggactgaaagttaaaagtaccctaaaggttgggaatctcaaactaagtcaaaatcattcaaagatagtcacttttgtggaagaccttcatgcatcatcattgacgacttaaagaccaaattaaaataattgtttgaacaaaacaaaaagaaaagaatcacagaagaagaatgaagttaacaaaaaaatattaaagatagcatgactcttaataatctttgcaatcttaatgtacggagataaaaaaaaaaataagctaacatcgacccaaaattattggaatcgacagacgatgtccaggtttacctatttaggctttcctcttccattagcagtaaataaattttcctaagtatagtacaataatattaaaatactttattataattttttttatttgtgtgtgtagattttagtgtattaatatatcccaacagtagtaacacaagtatgtagagattagatgtcacattaactatttagtatcgagaatttgccagtggaggacaactaggaagtgtaagaaaggtccctcttatagtggtgtagtagctttaggtaattcaaaggttaacatcttatttattattgatatttagtttttttatttattttatatttatatatatattaataattttgtatccaggatataaaaagtatcctttcactactaaatgggaaaaaaatgtcacacatgcaagatttcattcgtatctctgaatcaaagtcaaacaacttgattgatatattaaaagctgtgttggattctgaaggctcaattcattggaccaatgatactgatagacatgagacttgtgagaacgtagattttgttggtcttagtgctccaatggatcatagtagtcaagtggatcgatgtgatttttagtcatcaactcttcttttgaatggtttggagttggagataatcctgttgtgcttttcttaagatgatccacaaatttacaaccgagattaacatcactttcacttggtgcaaaagcaatatcacaaataccttcaaagtagaattcacgatcaaagtagttacctactaagggttgctaaatttcttttgtacagcttttaatctccttttcacctatgtctttatttataagctccacatgtagtgcagttctgcgattgttctctccacagtctaaaagataagctccaagacattcttgcccttgtaaaataagtggagacatgttttctccaagtgttactggtaagtaacttatttttaatttgatgtcattttgattggctccaaccttcttatacaatttattcagtaacatcccaaacgtagtgctcgaatcatcgataattatagatataacttctttattttttggcaaccacttatatggcccttgttcatccttccactccccatcgtaatgaacatagataattatttgagtcattcttgtatgaaaaaagatggttgatattaaaaaatagttaaaatatgttgaagttaaaattatagttaacaagtttgaatttttactaaattcaattaagttttatcaatatgtccatcaacaagagtttaacaataattgacctttagcactatgttgaccatgtttggtcgaactagttgagctttattagaattatcatatttattg

SEQ ID NO: 198422 - DNA, 1455 bp, Cannabis indica
attccttttttattttagaaaatccaacagcataacaattgtaattttaataaacctaaaaatcttaacttgcataaaaaattatacaaaaatatatttggcactcagtgccccagaatagtccagaaaaaaaaaaatcaggttaaattttcaattttttaaatattttataaatcataaagatgaaaatatttctaataaaattaaacacatataaaaataagtctatatattaagttgagtccctaactcattaggattgtcaaactttctccaagagacgctcctaaacccccagttcttaaattacaaatagtttattcacacaaaagtaaatttgtcttatagtatccaattgagtaaataattgccattattataacgtactcttcaatacgaatccaacgatatataacatgataccattcaaagatggtcaaagatcttaccttagccacagatagtgaccatttttggtggccaaaaatagtgttacaagaacaatgactaatcttgatatagcatatattaaaatgaccatcttgacgagttgatcatgaatgtacaacccattagctcaaaaaagcatcgaccttgccaaaataaatgcttccaatggacggagatacccaaaatctcatcacaaaaaagtagtgagttgacaaacatgacttattgggtgatcctcttctagtgacgctgattctaatggtaccaaccattcatcaaatggttgccagatttttctataaagtcacctcaatttttgacgtcaaaacctcgctccacccgtacaagtgcatcttagctctaattgtcaccaaagttgaggtgtgtcatccttgttggctagtggttgtgtacctctggtgcatttcgaaaatgatggaccaattgtggttggatatgggcttggccatgttaccccaagatatgttttcaagaaggggtgaattgaaaatttaaaataattttggtaatttaaaacttaatgcacaaaatcatgcagttagtcaaattaattaagtaaatgcaaatagtatggaaagctaatatatatagcaaataatcaaacttgtaaagtaaagtgtttgacagataagaagttgcaaactctcaatttttacaaggtttggtagacaaggccacctacgtccttggtttttaaagctatgggcctagctttgagttccactatcgagccaagttaacggccttgactaatacttacaatcaggaattttttactaatgtgttttaaaacctcttacaatagttttcactgccaaagactatcaacctcaatcttaaattattatagtaccaatctcactctaatcgaattgtttacaataccggtgccaacctcacctgaacagaatatgaaaatgtgtttatgattacaagaaaattcactctagaaatgtaatgacacaataaagaacctagggtgat

SEQ ID NO: 198423 - DNA, 981 bp, Cannabis indica
gatgttcatgttctcctagtatttggctacatctacaagctgctgtagatcttttacttagagagaaagtcatacaaagtgttaataataatcgagttattccaagacaccttaaagctaaattatatccttactaacttcagtgatgacagcatattctaccatggttgtggagagaggagcaatctattgctcgagcaatgtttggtttggtacaaataataatagcatacattacacttctaatggcattggcatatggaaccttaacaatgtattcactatcagtctttgatgtttgttccatggatagtctgaaatgaacatctaacagtgtactcaatcgcttaggattctgcatattgagcttgtagagtgctttgctgatgtactcaaaatgtgtcaacatcaaagtttagacttcatagatctcttgatcctcattccacgaatttgttttgcaacacccaaattttgttacaaactgcttcaaattgataatctcttgcatgttggaattgacaacaagcttttcatccacatacaataacaaaacaaggaaactacttgttgaaattattgatagaaaaacgttgatctgcttgacatcttttgagatcattgtttacccatgaagttattaaacttcttgtaccatttcctatgagcattgcgaagccatagaaaagccaagtcatttttgctttcttttatgaatcattgttttgtataaatcccgaaatcaccataaagaaagtttatctttatatctagtcgggctgtaattcttctacacctaaaattatatcagtaccaatttgattgtagctagtgtcaatactagaatgaaaatatatttttccttttgctcgaagcctttaatacctggtctttatggtaactagtttccatcatgtcctactgaaaatccacttgctatgtagtgctttcttgctttgaggtaattcagctgattcccat

SEQ ID NO: 198424 - DNA, 859 bp, Cannabis indica
ttttatgtaaaggtaattaattgttttcttatcaataccactagtaaccaactttttgtttaaaagaacacaagaaaattactataggaggacacgtgtaattctaagattgtttaattcagttattgtacgcctaaacataggtccaatcaaggtaaatgaccaaatccattactaaagtcaagtcattcgaatgatgggcatatgttccgtccacacaaataagtatccagctaagtagatcttccgatagcatcaagcagtgtttcaggaagagtaattattgagtctttggatgtcaagcttagtatctcactcatttattattatatcctataatattagaattttatttctaagatcatgtcaaagaatctaatattctgaataagaaaataagataattctaatcaagcattaatgtatctttattatctataaaagtatgacatgatttgacaactatcaacatgatgtgggattcacgtcaacagaagatcaatcctcatgggctggctttcaccagatgggcccgagtcaataagttatttatatttaccccattagtgggtaaggtttacagacaagaaccctaagtataaatataagaaaacccattcatgcaaagggttagaatctcgatacttgagagttagaaaaatctcgatgatcataaacttggcaaccacttgtgcaattcaaacatacttttctagccttaataatattgactcgtggactagagatcgttattccttgaaccacataaaatctcttatctttttctttgtttttgattaagtttttttagctttaatataattatttccgtcttcgaaaatcttagtaaatattttag

SEQ ID NO: 198425 - DNA, 522 bp, Cannabis indica
aacttaaaacatttaacgtgtaataagtataagcgtattttttaataggtcatagtgttattttttggttaggcacttgaacctgaatatttaataaatcgattagttctctcaactcaaaaataacccaaattcaattaaagaaaatcatagccgtttatatcgtgtgggtttcaagtcgtatttttgtgtctaatctatttttccgctcctatgggtcccctgttagttttcaattttttttaagtagttttcaatgttgaaaatagaatttattgtagtaatggtggacctcctaatgtttgttgtagtaatagtgaatctcctatcaatataaataaagaaaaataaagtagtgattttttttaaagggaattaccctatatactatttttttaactttttttttttttttcttaaattaacggtttgggtttctaaagtggtgtcagcgctagttgcagtaggggtttctatgcgatttttttgttgtcaatttaggttgcagtgctagttgcgaat

SEQ ID NO: 198426 - DNA, 890 bp, Cannabis indica
taaactcagttctcaattctcatcaagtcatcaaaacctaaacttaattaaaaattcagatgcaaacatcactacttgcatatgcttaattattacacattttaattagttaaagtaataattaagtcatatctcacaattatattatatgcaaataatagtttcaaaaattgtaattaattcacatatatatggttaaaaaaaacacagcacaagtataacactgagaaaaacaagaattataattaagaaagagatgtgtcaccatacattctagttgtcaaatattttgcccagattaattcttattattataatttatttttattttattttattttatttttacagtctttgatttatatcaatattaatattcctttatgatcagaatatataataatgcattctcaaattcatggttatcatttctgaaatatatatatacacacatcacattcataaaagcaatgaaaactctatatcacaatttatatatttaattatataataaaaatatagctattttccaaaaaaaaaaaatggtcccctaattgtatttttgtgaatttcacagctgtgtgtattactattatttgttcacattcaaaggattttatttcattattatgtggttcatatgtatttttggagtcaagaataagtggaagaaggaaaaaaaaaaaaaagagtttaaactttatatataatgttgagtgtgacattttcatatatatattttttttttcatatgtacggaaaaatcatcataatgttggaaaagtttattatataaaaaaaaaataattagacattagggtttttttattatatatttatgcgttatgaggattttcgagcattcgaatatactcggattagcaaaataa

SEQ ID NO: 198427 - DNA, 3219 bp, Cannabis indica
accaaggaatttcacttccttcctacagaactcgcatttctcttgcttaatgtacagcttttcttctttcagccttatcaacaccttccttagatgctgcaagtgttcttctaaatagttgctataaatcacaatatcatcaagatatactacaacgaaccgatccaaaaattcgtatagcacatcattcatcagattgcagaatgttacaggggcattggtcaaaccaaaaggcaccactaagaactcgaaagacccatacctagttacacaggttgtcttcgcttcatcccccactgcatttcgaacttgccagtaccccgcccagaggtccaacttggtaaagtatgatgctttcgtcagcctatcgaacaagtcttccgcatttggcaccgggtacttgttcttcactgtgactttattcaaagccctatagtccacgcacattcgtaatgacccatctgacttcttttgaaacaataccagagcaccatatggagttttagatggcaccatatatcacgattccaccatgccgttcaattgcttactgagttcttctagctctaaagcacccatcttgtacgttgccttggctggcagaactgctcccggtactaattcaatccattgatcaatcgccctcctaggagggagttccttcggcaactcatctggcatggtgtcaccaaactcatccaaaaacccagccacttcatcgggtacttatacccactgatttggttttatctctatcaaggcagccacatacgtctggttgcctttcttcttaatagagtttgcaaattgggtcgttgattccaacacaacgcccttttccttgttctgacttgaggagattgattcaacaaagcatgggcactcatccacacaaatcattacccgtctcaaatggggtgcaaccattgccttggttgcactcataaattatactccgagaatcatatcaaaataatccaatgggaccaccatgagtttgaacttagactcccacgccccaacctttaacatcaccgtagcagatccttgaattggtttcgcttctaagtttactgccttcaaccgagttgaacttttaatcacttccagaccaagtctggtggcttctttctgtgccacgaaattattcgttgccctcgaatccaccatggtcgtcacttctctcccattgacaaatgccttcacttacatgaaacctttgaatagacttgatttctcagtagtgatagcattgagaagttgtaagggattcattctagaagtggtttcttgctcgctggtatcagagcgggaatcatgtagggaaaatagcagaaatcatgatgacgaatgttgaactatctactcgggttgaaagactcgaagagttggttggttctcctaacgaagatgatggcatcagtttgtttgttctcggtgaacaactctctgaacaactagagtcccttgaggtgctagctcgagactttttgaaggaatcatcggatcaagttgcgagttgtggcacaaccatgatgtatatgcagagggaatttgatgagaagatgaagggggtgttggacaaactatagaatctgtctaattctgtgaaagagagattcatgactctcgatgcaaatgtagcagtaaataagagggcgatagcaaatccgtcccaagaaaccgagtcatctttagcccattccttaaaaattaaagtccctgaaccaaaagccttcaatggcagtaggaagtcgaaggaattggagaatttcctttgggatgtcgagcagtacttcaaggcaacaagaatccagatgcggatagagtgaccatcacaagcatgtatcttcagggtgatgccaaactatggtggcacactcggatggaagaagatacacgttcgggaaggcccaatattgagacttgggacatgttgaagaaggttgaaagatcagttccttccatgcaacacggcatggattgctcgtgagtccctgaagaaactcaagcacactggttaggtgcgagagtatgtgaaagaatacagttctttgttgcttgatataaagaacatgttcgaggaggacaagatgttcaacttcttgtcaggattgcagccgtgggcacacgctgaattgaggaggcaagcggtaactgatttaccctcggcgattgtggctgtcgagaaactggtggattacaagtataattcgaatcagtcacggtgataattcaaagaaatccacgggggaaataaaacaatcagaagccttcctcatccaagggtgggcaaaattatgatggcaataagaaagaatgtgctggtgggaataaccagaaaagatcactgacaaatgacaagaaaggtgttgggtgtttcatctgcaatggtcctcacatggggagggaatgtgctagtcgagaaaagttgaatgccctaatcgcacaagatggaaaaattggcaacgagcaagaaactacttctagaatgaatcccttacaacttctcaatgatatcactactgagaaattaagtctgttcaaaggtttgatgtatgtgaaagtgtctgtcaatgggagagaagtgatgaccatggtggattcgggggcaacgaataatatcatggcgcagaaagaagcaaccagacttggcctggaagtgatcgaaagttcaactcgattgaagacggtaaactcagaagaaaaaccgattcaaggatcttctacagtgatgttaaaggttggggtgtggaagtctcagcccaaactcatggtggtcctgttggatgattttgatatgattctcggagtagaatttctgagtgcagccaaggcaatggttgcaccccatttgagagcggtaatgatttgtgtggaggggtgcccctgctttgttgaagcaatctcctcaagttagaacaaggaaaaaggcgttgtgttggaatcaacgacccaatttggaaactctattaagaaaaggtaaccatgcgtatgtggctgccttaatagagattaaatcagatcagtgggtagaagtactcgatgaagttgctgggctcttggatgaatttgccgacaccatgccagatgaattgctgaaggaactcctcctaggagggcaattgatcacaagattgaattagccccgggagtggttccgcaagccaaggcaccgtacaagatggctccttcagagttggaagaactcaaaaaaca

SEQ ID NO: 198428 - DNA, 1092 bp, Cannabis indica
actccctttataaaacaaacaatctaaagagtggctgatacagaaatgagtatcaaaaaccaaacacatcatgggcactaacttggaaatgagaataaaaaagttcaaaatgactgatgtaaaatgatactttggcaaaaatttatagcagaagaaagttgatcgtaaatattctgataacattcaatccaatccaatccaattcaatcttgaaacatgataaagggagacacaaagaccaaccatggtatttattttattcccccaactaacacaaataaataatagtaaaaattaggagaataataaaaattcaaccattaatttacaaattcagtgccatcataacctgtattggaacaaataaaaaaaaaaaaaaacagattctaaattccgaaattctgaagaaaattgatatgggtcgtggtcaaacaaatccagcctaaaggaaaattatatgaattatcaatatcagtaaaaaaggaagaagaatgaagaatgaagtgtgaacctgaagaagaccatcttccaagagcgatctatcctcttcaagggaacccatttctcttctctcgtttctgaacttttttgttgtttttggtgtaacaaagtttgggacttcggatacttgtatacctttctttcctttaaagttctttcttttaagtaatatctatatatttatttatttgtttatcggtgctttgaagtttattatttaattattatttattagtttgtttatttgagttgaatatgcttactttgaaatgaggttagggtaagaaagaaggaagttgtttggaagtgatgaaatatctatccatctatccaacttagatgatgtcatgagccaaagacaaaacattggaagttggaaaaagatatacatgttttttggggtattcaaaattggaccatactatcatcatcaatttatgacacacccaacttaaataaaaatgatttctcaaagaaatatttgtagcacaaagtgtatagtatggggaaagtccatagtaaacatttttaagagggtattttggtagatattttatcgttcaataaatatttttttttaatgatcgttta

SEQ ID NO: 198429 - DNA, 1684 bp, Cannabis indica
gtcctgaattccttgaaaaatgtgactcttctttggccctcctttgctttgttacgatcagtctttaggcgcaaagatccgcatcactcaaaccttctacattgcgaacacaaggacttggctgaggccgcatattgccaatccaatctcattggccccagcccctcactatcgactacaacagcctttagtcctttctgaaggccttttcaatgagcctacctcagcttatgggatacaacatttaggccagccgcacactacttctgttggattctatatggctagttcctctcacaatgttcccattccccactctcatgatcttaaccaacctcctcttcctacttccccatggccttatcctcaagctgctcctactaccacgatggctgcaccttcctatgggacacccacacttgccaatctgagccattccatgtccaccatccctttaccttctcactcagtgaccacggttgagcaactaaccatgccactctcaaaaattatatcgaccacatttgctaccatcctggctacaactgctgcccctcaacatgttgtccctgtttcccaagctttttctactattctggcggaccttaactccactcaaccccttcgttttactattggcgctgcaagcacctcaactcctgctccatctaccaaccgcaggggtaaaccaaagcgccctgactgccttaatgctgctgaattttagaaaattcttaaacgcacgcgcaatttagcgaaatcccttaaggaagattcagttgaagaggcgggtgacgcttagcgtacccgcctagagccatgagtatcatcagctggaatgctcgtggattagggagtaaacgagcattccgttctctctcccttttagtgaagcaatatcgtccaactgttttgtatataatggagtctaaactccctgttggtgctttaaataaatttgcttcgcatcttaaatttcctaacggcctagaagtcccacgtgtcgggcttagtggtggtcttttgttgctctggacacatgatgtggatgtaactttgctttcttataatataagtcactttcactgttatattaaatttccaaattttactacttttacttttactgcttttacggggcgccaagctcccaaaataaacctcactcctggcagttactcaatcgtcttagctctaaccctcgtccacccgcttggctcgtaatgggtgactttaatgattaccttactttatcggaaaaaattgggggtgacatgtctcgttgtccgtccgctcaatttcaatcttttgttgatgactacgagcttcaccctcattatcctttgggtagtcccttcacttggtcaaaccgacaaaaacaaccatatcacacccaagagcgtcttgactggtgcctttccaatgctgattgggatgcaaacttccctaactctcgccttcttcatggtgatttctttggctctgagcatcgccctttgatattaaccctccactttcaagctgaccagcctactccaactcccagatttatctttgataagctttggctgtctgaactggggtttgaggattgccttcttaatgccttgccgttgcctaaccaatctcctagtcacaaccctttgcacggactcactaagaaattggaaaattgttcttcatg

SEQ ID NO: 198430 - DNA, 861 bp, Cannabis indica
tatttttgaattaattatttaaatcgttgattagtgtgattttaattcctagcactttagaaggctaattacatgtttcaaatattttggaacggttttagcacactttggtggaaaatgataattttgaagagattgattttacaaggtagaacttatttgtagattacgatatttttaaagacagaattggattttgagaggaacatgaaagttctagatcttgttctcagcttttcgaaacattttatgaccaaattacaatcagagtatgtgacgtgtttttacagaggccgttgtccaagttttttaggccactgctagtgtgtagcaaaataacagtcgcgctgcgggccacaggggctgatttgtcgaaacgaaattcaggccacgacatgcaattttccagatcaaagcccacgacgttgatttcagtttttagttcagtttttaattgcaatttaagtgagaatataaaacagattttttttttagaattaattatgttttttaattacattatagaagagaaatactgagaatgagctatggaaaaaaagaggatttcatcaaaatcatcaatctaggtttttttctttcatctttaactcttagttatgattacgtcaatagttgtgattatctttagagtagtttttattttaatcccctgatcatcattgattaataatattttgatttctttcattccaattaattaaattgctcaaatgcttttaaattgattgtttatgattattatcttattcttatttggatggccattgaatatgatattgtagtgattgattgttattcacctaataatctacagttctaattattggtagtaatttcatg

SEQ ID NO: 198431 - DNA, 669 bp, Cannabis indica
ctaccagcgtggcaccactgaggatcattagcacactttagctcgaagcaagcaccgcagctcagcccgttgttgaacagcgccgtgctcagcgctgccgtgttcacgccgtacccttggctgtaaaggttcccgtatccacaagccccacctgaccatttaattttcaccacaacaaaacaacattatcaacccaaaaccacaaccattttaactacaaaatgtatgtataaaaattgtgagaggtacccattgtgccagaagcgtcgctcccgccgtaaaatgtagcgtgagcactttgccacgccccaccaccgtaaacgccagggattctggcgtcgacggtggacgcaaatgctaagagacaaagtgttagaaggatactcataatggccatagttgatttgggctttgactcactcaatgaccactacaagagacgaaaaagaagagagtaatttttgctcttcaaaggggcagagtgtgaggaaccaaagtagagaaacgttagctatttatacaaagagaagcagagagagaaaatttaaaggattagaattgtcaataaagtgaaattatcacccttaattaatgctgtttggtctcccgtttgttagttaaacatgaactctttttttatttgtttggcagtaattccattcaactccc

SEQ ID NO: 198432 - DNA, 1029 bp, Cannabis indica
ctaaagtcataacttcgtgtttcttaaggttttttttttaaaagatgtttcttaaggttgatcctaattaaataatttcataatcttttattaattctaatgtttgacacgtcttaggatctacttaaagtggaagaatgattatttgttctggtcaaaattttctttgactaatctatgttaacaaaatgttacaagttttaatgattgatttttgaaaataaatattggtaacgcttttaaggttgaacttgaaataaagaggaaaactaattgagaattagttcaatcagtaagaaattaaataggatggcttcgttattggttttgttgttaatggttgtaaggagttacttgtttctttgaaatatgttttagtgttttttttttgttaaatgatctgctaatgtaatagttcatgactttactaaagctgttatattatttcctgatcgtcgattcggtttggagatgttccaaccgatttgctaccatgtttggtaacggaagttatagattaataaagcggattttctattaaaaaaaaataggatggctttaattattacgagaacatttattgtggatcacttgtgcaaaaaaaaaaaaggtacaaaataattatgagaagagaagcacatattaataatgtaatccaattatatgactaaaatattttattgtaattctatagtacacaacttaaaaatatcagaaatatatttttcttctcagctatttaggactgttgaataatttaaaagtttaaacacaatcattttagttcttcttcaaggcctaacaatcgattctcattaattaatataaatattttatatttgatatatatatattgacatcaaacaaaatctcaacaattacaattacaagattatagactataattccaccactatcacacaaccacacaccaaagaaaaaaaacagcagcataagaatcactgttaatactgtaacaaacctaagatcaatcaagctttcaaattctatggtttttttttttttttt

SEQ ID NO: 198433 - DNA, 581 bp, Cannabis indica
tttacgaatttataaacatttattagagcatatctctaagggtactctatttttttagctaacaaattaaaatatagaactatttttaatgttgttattgttacttcaattatgttccttactttagtatttaattattttaacaatatttataattagaatttgttaaatataaattaattttataaaataataaaaaaaataatagtgttattgattaaaatattattaaaaaagttaaataaaaaagtaaggagatcattacattgagagagttccttatccattttcgattatcaaaagttatttatgtatggttgaagttcatttttttcaaatttcactccctattttagctaatgagtatggctagagatgctcttaaagcttgtaagcatttaccatttgttacaagtatcaaatttttgtaattattttttttgtaccgtaaatttcaattcttgttttaaaaatattgcagtatatttcataattttttatatcacataataattgtttccagagtaaaaaaattagtttaatattatatgttagaggaattttaacaacacaaaaaaaaa

SEQ ID NO: 198434 - DNA, 1349 bp, Cannabis indica
tcccctctcaaatgcaggggtgaaatcatcactccaagtttgtcgattaagaaattgaacctggaactggacagcccctttgttaagcaatctgcaacttgatcggatgatggaacatatctgatgtccaactctttacttaagactttgtcccgaatgaagtgaacatcaacttcgatgtgcttagtccttgcgtggaacacagggttggatgccaaggcattagctcccatattgtcacaccaagtgatggctgttggtgttttaaagttgagttctttaagtagtgattcgatccatgaaatttctgctgccacatgagctaaggcacgatactctgactccgtacttgatcttgcaacaaccggttgcttcttggaagaccatgacacaagtgtgttaccaaagaagacacaataacctgctatagatcgtctgtcatcaggacaacatgcccaatcagcatctgaatatccagtcaagttcagtggctcatcacaactgatatgaagtcccttgtgcatggttccctttaagtatcttaggactctcttggctccattccagtgaactgtagtcggtgcttttagaaattggcttagtttattgaccgcgtaggaaatatctggccttgtgtgggataaatattgcagcccaccaattacacttctgtaaattgtgggattagatagtagttcaccttctgttattgacattggccttcctgcagttgcaggtgttggacatggcttcaggttggttaggttgtgtcttcgaagcaagtcttctatgtattttgtttgtgtcaaatacaagcctgttacatccctatagacttcgattcccagaaaataatgtagagacccgaggtctttgagagtaaatcttctattcaattctgaaatgaagcctttcaacttgttgttattgttccctgtcacaacaatgtcatcaacatatatcaacacaaagattacatcagtaccatgtttgtagaagaacaaggatgtatctgattttgagttcttgaaattccagctagccaacgtggattttagcttgtcaaaccacgctcttggtgcttgttttaagccatacaatgacttatttaacttgcacacatagtgttctttccctggttcttcaaagccttgaggttggagcatgtaaacctcttctttgagagtgccatttaagaaggcattgtttatatccagctgcttgatttcccatcctcgagtgacagcaatggtcaatatgatcctaactgtggtggctttaataaccggactgaaagtctctccaaaatcaattccaggcctttgatgaaaacccttagcaaccaagcg

SEQ ID NO: 198435 - DNA, 870 bp, Cannabis indica
acatgaaaataatcatcgtacaacagataaatcattttcgaaaacaagagagtaaaatactatatatgtacgtaccaaaagttgcatgggaaagttgaagatatctgcagtaacgtatcccagtttcgggagattcatgaagttgtacgagtaagtacaaggtgtaaagctgccatttgaatgccacagccaagcatataattccccatgtcctataatattaaacccatcgatatatcaacgttttattaattatatatatatgattatatcttaattaataattaccagccaagaatggtgaatgcaactgggagaacaagtgcttgaataccaatgccagaacaaagagtgtgaaaagcagcgtagtaggcatttccattccttgactcagtgattggaagccaagcatcttgagggtctagcctagtgagtttcagagcccttctaatagggcttcctatgggagtaatgaaccgcggagttctaattcttggtgtcaacgattttggtgttttcgaggtagtttctatcttgtcaccgccgtcttctgccgaggtagggatgagagggacacgtgtcaaagagggagagtggtattgggctggtggcgcttctaccggatgcggcaccgaatcggcctccgccgttggaggtgttgtagagataggcatttcctccatagtagtagctagtttcaacccttttagcttctcaaatttataaattacaagtatgagtgtcactttctctatttagtatgaattgtctacaataagcaccttagctatatgaaacttcattttcagtctaatgtaaatgcggaagatcaaagaaaggcggagacaaagcttaactattttttctacc

SEQ ID NO: 198436 - DNA, 671 bp, Cannabis indica
aacagagcaactatcgattttatcaatatgaatttcaaatgtgttttatagctgccaaacatcattattatcacactagtatatacaagtgaaaaaacaaatctaaatgcagaatagtgtcccagaccaaaaaaaaaccatgaaaaatagcaactttgttaactaatgacatcaaattaatgcaatctgaatactgaaaatagagggaagacaaaacaacataagaagtcaaaagaatcacaaattaaacaaaggaaaactttctggtggcgttcaattggaggtaatgaaatggaatggaatgcaagtgaaacaacttttattccattcatttgtttggttttattttaaagtattggaatgtcattcttattctagctgtgtttttatttcttccagccaaacgtcacctaatggagtgtttgctatgtgagtttgagttgatgggagtagacttggagataatatgaaactcatgctttggaggggattaacattaccaccattttaatttgaaaagtgagacctacttggaaacacaaaccctttgatcattaaaatttaatttaatttttatattctcatttccatcaagtctaaacctcatatcaaacgctccatctaatcacaactattacaacaaaattatatcagttctctcatacagcatg

SEQ ID NO: 198437 - DNA, 1207 bp, Cannabis indica
taaacgtgacatgacaaggcatacatgtaatgaaggcttcatgcctgcaaaaggattttcttttctacaccgaaagtcctaaataattataattaacaccgtcatataaaataagcgtgtgccaaaaacagagacgcttctaacattgggacaaaaatcatgctcctaccaaagaattttcttaaatatatatatatatatacacacattgatatagacatataagaaaagaggaatgttaataataaaagtgaagggaaaatatgaagatgtcatccaataataggattcaaagaaaacatcccaactcctaacaagactaggtaaaacattttactaaaaggaaatttgagtttctatgtttaaaagggatccaaacaaccaaaataaccaattattggaccccattacaaacttatgttaatctttcattatgtacctattattaatataatgtgcacccatactctttaaatgttataagcaaacttactcagttttatcaaggcaaaaaaataaattgcaccactttaattatggttttaattattgcatacgagttgaagaaaaacactgaaggcctacaggtttttgcaatcgaccacacaagtagaacctttcccagttaagtatgtcctgaaccaagttgtgcatcccaattacaccatatttgaacatctgcgaagagttaagaagttgacatatttcaggagtagcagatgcaaaaaggtgaaaaaataatataagaactaaaaactcaacaaaaaccttaataatttcagtgtcaaaattaccattaaaaaaaaaaaaaggcagtagaacccatatcttaaaaacagtccaacttatcattagagctgattgctcagtaccttgtcattccaagtaacataagggttgaagtgagctccgacaccaatattgtcagcaatgtcagtgatctaacacagtcatagatatatagtgttagaatcagcaataagtaaaagtgtgaatgaagactaaaaaattacagtagcacctcgttgtaatgaatgattcagtaagtgtgaatgattcactgttctgtttggtaaccaaagatgatttgtcatcttttgtaattatccttccatgactaataaaacccaatatgtttctcatttttcttttttttgtttttagaaaacgaaaaaaaaaaaagttaacttcattaaaaaggtaacat

SEQ ID NO: 198438 - DNA, 798 bp, Cannabis indica
aacagaaaacaataccaaacatggtcttagagtctcacgttgcaacaaaaggtaaaagtaataatggtggttttgtatattctcatatttgtttagtttatatcaatgccggatcaacgatacgatgatcatagaagaacctcagactttatgagagagtacattttcccaggcggatgtctaccttcattaagtagagtaacatctgccatggctgcttcttcaagactctggtataatatatatttacaggtcatattgattttgttatgtgtacttatttttcattaggactaattactgatgtttattgaaagtacagtgtggagcacatagaaaatattggaatacactactaccaaacactgaggacatggaggaaaagtttcctcgagaagcaaaggttagtggatataattgtgtaatgaaatttagcattgtatatgataggagttttttgttgggacattaatttgagtttgttttaaagtgaaatcttggctcttggatttgatgacaagttcattagaatgtgggagtactattttgattatgctgcttcagctttcaagtctcgaactttcggcgattaccaggtacaatggatttttttttgctctatcatatacaatgtaaagtattattgagaagattggttcgtttggtacgccgtattatattgtattttattgtatagtattatattaaattcaatataatacaatacaatacgagatacgacgttccaaacgagctgtgagtagattaaacttaataaggtagttttttttttttttt

SEQ ID NO: 198439 - DNA, 645 bp, Cannabis indica
tttttattccttccaactaaacgacatcttaaagtattggaatgtaattttaatgaaatagtttttctattattttggtggaaacactattctattttgaaatagaatgagaggttatttaagtgtaagataagggaaaatttaataatttttttttatcaattttcttcatgcattttaaaatttatttcattctaagtttttcctatttttatacacattcttttttattttagccaaacgcaaccttaatatttcattttaatgtagccaaagtgaaatgtgattaatgacatttcaaatagaagttcaaacatgtcacgaaaaataaataaataaaataacagaaatattaaggagtaccttaagatgtcaagcaccacaagaagtggcatattgttattggtgtattttaatattgaatcccaccattttaattaaataaataatatgagaaactattattcaattataaaatgttacatcaatgtagcgttaggtaccttaaggcgccaaataacaatgctcataatataaaataaaagttcaaactgtgtcgaaagaacttttttggctttcaatattcgtttttaatgtttctttctctatgttttatttttattgtttttcttcgttttttttttt

SEQ ID NO: 198440 - DNA, 729 bp, Cannabis indica
gtgtttaattgatagagaccatctttaattattccttgcagaaccaccttccctgttggttgctccttcacacaaaaaaatcagagaaaaattccattgagacattgttatcggctgttagcttagaaagacttatcaagtttttttaaatcgtaggaacatgcagcatattgtgtaatagcagtggtttatcaatttcagaattaataaaacctgttccaatatgtgagataggaagcttactaccatctcctatggtgatttgttccttatccctatactccatcttattttgcaccttgtttggatatgtagtgaggtgattactcgcacccctatctgcataccagttgtcgccattaagcatctcaggtgtagcaacaagtgttaattatttgtctggtttgtgttggatctgcaaaaagctccagagggattcatgttgtttgaaccagatggcctttgagcaaagttagcagtggggctgttgacctgcttgttgttgttcaaaaaggcatttagcctctcaagcctgccatcgaaaccaaggagaatattctgcaactgttgccaagttgtatgctctctagactctatttgcacaacaataaacagatattctgcatctaaaccagacagaacattcgatattacatgtttctcggggtaaggattacctgctaaagccaaggaatatgcccaaatccgtttctgcttgaggtattcagt

SEQ ID NO: 198441 - DNA, 1145 bp, Cannabis indica
atttcccctgaatcaagagtagtacatgtatttttaatactgcatctaaaatgtggactgtgttaaacaatcagtttaaccaaggaaatggtccacgcatttttgaattgaatgaaacactaacctatctcaatcaaggagatgattctgttagtgcatacttcataaaactcagagccatgtgggacgagatcaaccaattaaggcctcgaattccatgcacatgtgctgctgctgcacaacacttaaatcatcaaaatatgatcaagtgcttcaatttctaaaaggtctgaatgactcatgccaggctgtgcgtgatcaaatcttacttcttcatccatgccctcctctgaataaagtcttttctatggtaattaatcaagaaagacaaagatcactaggccatcacatgataccccgaatggctacctcgacttcttctactcctcaaaaacctatccctgcagcaaatgtagcatcgaaaaacaagaggccaagacctcactgtacaaattgccaaaaacctggccattacaaggataaatgctacttcctaattgggttcttcttggctatggcactcaaaaaccagtagactccaccaacactagaaaatttgatgctggcactacacccaaaaacaatccacaggcttctcaagtagcttcatctacacctgatctttccaactcacaactcataccagcacagtgccaacaacttatttcaatgttggcacaacaattgtagcccacatatgcatcaacatctattgacaaggctgttgtgaataatttttcatgtatctctaatcctttctcatggattatagatagtggtgccacacaccaagtgtgttgccatcttgaatgtttttcttccattcaatctactcctactggtttttctgttcaattacctactggtgcaaaagttaaaattcatatgattggcattgttactattaactcacacataacactcatcaaatgttttgtttgtgcctgactttaaatataacttactttctgtcagtgcactcacacacaacaccaaatctacaattttcttcaatactaacagctgctatgcccaggacccttctttgacatcgaggattgagatagctaaaagacttggcaacc

SEQ ID NO: 198442 - DNA, 1115 bp, Cannabis indica
tcgttttgtagtgtcgtggtagttttattgtgttctttttttttttttttggtcttttgaatcttacatttaataagttaagctttagaagcatatatattttattaaaaataacgttaaaattatatgcccctgatgctaattttgatatacaaaaagcatcaatttgataaaaatgccccttcgtacgttttacgaattaattagaataaacatgaccaaatattaaaataaaaataaatgaaaataaaagtaaatatttttaatttaagggtaacaataaacatgactattgccaaatatgttacaattatttttttataaaacatattatatgtatctgaataacaagatgtgtgtactattaaatatgcaacaaaaatttacacaattacataatatttgcttttcttcacaaaatgagacttgctattattttataaaacatgcatgtcatatactttagtgcatattttttatacatatattattaataatctatatttaaattatatatatgtgatataaaagcacgagtacaaaaaatctaccttttctttaagctatatatataatctctcaattttaaaatagtagtatgatatatagtaaaaaaataatactttattaacaattgattataatgagaaaataaacgaaactaaaaaataatttttgtcaaaaaaacaaaataaataactaatcttgtttaacatatgtggacaaaatatataaagggataaatataaagattatgtcaaaagtgatgagcaagataaatataaaaaattcaattacgtacgaaaattctctttgaagaaaaattaaattatgaaattacatatcaataataagtccccttttaaaaagaaaaaaaaaaaaaaaaaaaaaaaaaaaaaccttatcaaacatgattatatttccaagaaaaaatatgcacacatatgtactggttattgggtttaatttagccaggtcgggaaaagaagataaagtatggagaagttttgcctattatattgatataattttatgtgtatatatagtagtaggtaaagtaaagtcttttccgtttatataaattatattgttccacttccaatcgaataaggtac

SEQ ID NO: 198443 - DNA, 960 bp, Cannabis indica
caaagaagaatatattggcaatatatagtagagagagtacgtgtgtgtgtgagaaagagaaaactcgtctttatgctttctttcaagtactttgatatattttttctaaaaaaaaaaattgatctagatttatccaatggagataaatacgcatatatccttgtaaaatattatataaatatatatttattcaattacatatgccattaaaccgagtaatttacgtagggccactctaaaccatgatgatttatatgtacatataaatttaattgagaatatgttctacactcataaattttatatatggtcattaattgactaagtatttgaaaccaacatgctttatcatatatattatatatattagaaacacttctcatcacaatcccttatatgtgtggtcttttttgtttcgttgataaattactgtgaattggtgattgattgttaaataatatatataaactgaattattaatggatccaaagaaagttgtatatggcgataatgatgatgagtacggtgaaaaagagataagaaagggtcggtcatggacaaaagatgaggactctatactcgttaattatattaagaaacatggagagggtcgctggaactttcttgcctatgcttcaggtaattattataatattatatatatatatatttttttttttcaattatatatgacaatccattatttagttactaaatattatagatatatagtagagggatacattgtattaacacttgttagaattattacaggtcttaaacgaacagggaaaagctgtagatatagatggttaaactacttgcaccccaacattcaacgtggaaattttaccctccaagagcagcttaagattcttcagttccaattctcgtggggtaaccgggtaactaaatatatatatatatcttatattattatattatatgatattacaaaag

SEQ ID NO: 198444 - DNA, 807 bp, Cannabis indica
gtctttggacatgcatttgtaacatttgtgagacatactatatccaagaaagacacaaggtgtggatctatattggagcttgtttttattgtaaggtcttaggttgggatagcatagacacccaaaggtttgtagccttacgagatgaattagaaaagggaaatttccacgactgccaagaaccttgcaaagtaatccttgagtgagaaatgggcttcagcagtaatgtggcccacactccacacaccaaagtcgtcctagttacgctcagagttgctcccctcgtggaaagcctgatctagaataggtaggggtattttggaacccataatcttcttctaggtctgccattttgtagtttcaaaacttatcgagatgttgtccatctcccatgacatgcccacggcatggtcctcctccactggcgtcggctcattactaaggtcccagatcatgtcattgttttggttctcttctgacatggtgaaatctggaaaaaaatagataccaagtagttaataccgaaactaagaaaaatagatagggtacaagagattcatccctgatatttgattcgaaaggttctcgccagaccctacatccagattaaaattcctcatggaacataacaccagattaaagattgggaacacaattaaagaacaaaaaatagaggcactattctccaatatcgaaagggtcctaaacaaattacatgggttgcgaaaagatccttaggaaaatttttggaacccccagagcggacactcatagaaatacagaaaccttgaaaattcctaattatga

SEQ ID NO: 198445 - DNA, 556 bp, Cannabis indica
attaaattcataaaaaaatattaggctaaattaaaatataccaaaaactatggttttacaatatttgagtaacaaaagcacaaagttgatggaaagtcttgtcgtatgacatgttgccttatgttttttgagtatttctaagttattctctgtttggtgttttgttcgtgatggcttcgagtagtcgcaatgattttgatctcaatgaacaatatggacaaataagtttggaggatgaggaggaggggattctaattggtgaggaagatgaaggggatgaggctttgtttgatgacagatggtgtttagtggggaagtttcttacgagatggacctttgattttgatgctatgagacatatgatggcctctgtttggcaatcgagaaagggtgtgtatatcaaggaactcgacaccaatcgttatctttttcagttctaccatgaattagatatacaatcggttatagatggaagcccttggacgttcaacaagtgccctcttgtgtttcatcgtctgaaaaaaggggaggaaccaaaatctgttgttttgaataa

SEQ ID NO: 198446 - DNA, 4346 bp, Cannabis indica
gatttttgggttcagattcatggcttaaaaactgggtttatgttggaaaatattgtgagaagtgctggtgaatatgtgggaaggtttgttaagtcggattctaaaaatttcaatggtttatggagggattatctacgtgttagagctacgattgacatagacaaaccattgaaaagaagaatgaaattgtgtaaagagaatggtgattggatatgggcaaattttcaatatgaacatcttccaacattttgttttgcttgtggcataatcgggaactccgaaagattttgtccaagaaggtttgatcaacctctggaacaaattgctaagccttatgggattgggatgagagctcaattgaagaagcaaaattacttgatcggtgcttagtggcttcgaacggggaagaaggacggtggagccgatggtggtggcagcttttccaggcggatgaaagacgttggaagagattcaatttcgcctagaatcatggacattgatcgatttgactctagagttaatcatgatcccatgagtttaggcaagaataaaggcattattgtggaaagggaaggtgtagttaatggcaaagatgttatgggggctcaaacaactatggctggaggtgatgaggattccgttaatgaggaagatttgctagtggctctggatagtaagaagaggcgtatgggggcagaggaagctatacatggggagagtttggtggggccaaatataggttctgatgttgaggaagtaagtggttcaaaaaatgttttaaaggtgggccatggtacttcggcccaccagttatcatgagtgttatttcttggaatcgccatgggcttgggaatgcatgggctcaacaattcattaaggatcttatgatccaaaagaagcccagttatttgtttttgtgtgaaactttatctagaaagcatgttgtggaaaggttacgtgttgcgattggttttgagggggctatttcagttgatgtgcaagggaggagcggagaaaaagctttattgtggagagttgaagaagaagtgaaggtgctggaatttggaaataagtttattgatgtggtggtatgtaggaatgagagaggtgattggagattgacaggaatgtatggtgaacccaatagaagtttaaggaaaaaaatatgggacctcatgagtgagctaaataataaactgaacttaccttggtgcatcattggtgaccttaataatgtcacttctcaaggcgacaagagaggaggcaacccttacccgaattggcttgtgaacagttttaatgaagctttggccgaatgtagtctacatgatttggagttgtgcggttacccttacacttgggaaagaagtcgtggttaagtggaatgggtggaggttcgtattgaccgtgccttggttaatcaagcttggttagatttctttccctttgctaaactttacaatcttgaagtttctacatccgaccattgtcctattcatttggttactgtcaacagtatggtgattgctaataaccggggtttttcgttttgaaaattcttggttgaaagagcctttgtgtattaagattattcaagattgatggagtgttgatcccatgaagtcaattattgaaaaaataattggttgtggggaggtgctgatggagtggggaaaggattattcagaaaattttgctaaaagaataaaagtttgtaagttggaggtgaagagatggaagaaaggtagggatgcaatctgtgttgaaaattataaaattgcttcgggtaaactagctgatgcgctactgcagatagagatgttttggaagtagagaagtaaacaactctggctgcgtgagggggacaacaactcgaagtactttcatgttgttgctacagcaagaagaagaaataattttatccaaaaattgtgtgatgacgctgggaattgggtcgactggcaggatggtcttcccacggtggttactgaatatttttctcagctctttacagcttcagcagtcgacatttctggtgttatgcagtgcattccagctgcaatttctaatgatcataatatgaagttgcttgaaccggttatggaggatgagattaggcgtgctctctttcaaatgcatctggataaatctccgggtcccaatggaatgactcttggattttatcaaaaaagatggaacattgttggtggggatatcgttaagttggtccagaatttttttgtctcgggttcctttccaagagacttaaataagactaacattgtgcttattccgaagaagaaacaaccccaagtgatgaatgatcttcgaccaatatccttgcgtaaagtggtatataagattatttctaaggttttaacgaacagaatcaaacaagtattgcccattgtcatatcggataaccaaagtgcttttattctgggtcgcttgatttcagataatatcatgactgcttttgaaattatgcattatctgaaaaggaaaagaagtggtaaggagggttatatggctcttaaactcgacatgagtaaggcctatgatcgggttgaatggccgtttattgaaaacacgatgcttcatatggggtttaatgctcattgggtgcaactcatcatgttttgtgttaccacaatcacatataatgttacccatggggggtttactatgggccctattaatccgagtagaggtttgcgacaaggtgatccgctctctccgtttctctttttaatttgtgcagagggcctttcttcgttgctgaattattatgagaggcatcatcttttgactgggtgtcgtgtggcgagagaagctcctatgctctctcatatgctctttgcggatgatagttatgtgtattgtaaagctaatgaaagggaagctcaaaatgttatgcgcttgttgcatacctatgcacttgcatctagccaacaagtcaactttgccaagtcttctattttctttagtaagaacactacgacagatgtgcgtagcaggatgtgtggtttaatggggttgagagaggcatcgaataatggactttatttgggccttccttgtattatgggtagaaacaagaacaccatgttggggttcttgaaggagaagatgaggaagagaatttttagttgggaaactaagtttctttcaaaagcgggtaaggaagtgttaattaagtcggttgctcaagcattgtctagctatgctatgagtgttttcttttgacccaggatttgttcgagtcttgaaggaatgatggtgaagttttggtggaagtctcaatctaagaacacaagccaaggtgtaagttgggttagttggaaacatctttgccaacataagaatgtcggggggttaggattccgtgatcttcgggattataacctctcttttttgggaaaataaggatggagattgctcagtatggaaaattcacttgttggtaagatttataaagcacgttactacccgaatggctcttttatttctactgaattgggacaaaatctcagctttatttggaggagtatttgggcagctcaggtgcttgttaaagcgtgtgcaagactttcaattgcagatggttctcgagttaatgttcttaaggatttgtggctaccccatgactctaatccttatttcagaactgagaatcaagaacttcaaaataagtatgttgatagtctcatgactgtaggggaaagatcttgggatattgagctcatttcagacatgtttttggagagagatgttggtttaattttgaacattcagctaagtttttctgtggaaagagatacatggttttggaacatggaatcgtcgggcttttactcggttaaaagtgcttataagcatcttcaatcgagtagaggaaattggctttatttggaagataacaactgctggaaaaagttgtggcgattggtagtccctcctaaggttcgtcatttcttgtggcgagcgtgttctggtagtcttccaacgaaggttctgcttcaaacaaagcatatcaatgtggatcttctttgcacgttctgtaacagagaatatgagtcgatttaccatgtgttgttgggctgcaatttttccaactcctactagttttttgctgcagcaaccgtgcctcctgctggtgcatcagaagattttgccgcctggttttttggcttgctagaagggaatcaagttatgttacagtggatgctgctatgatcagttggagtatttgaaaaactcgcaatgagttgctttggcagaagaaaaatcgagctacttcggatgttgtgaattcggctagatcagtccttgcaaattggaagatt

SEQ ID NO: 198447 - DNA, 1564 bp, Cannabis indica
caagagatatcttaagttcgaatctctcttttacctaataataaaaataaaaaaaattaaggcacaaatcgacaaacatatatatataattattgtttttttcttaattttatttcaaaagttatattttattttttaaatgaagaaaataatttagaacaattaattattttaagaaaataactaattatagaggttacgcgataataaacgagtaattgattacttttaattttcttttacataatttattttttgtaatttttttataaaataatttttagaaaaaaaaaaaagacttattttttatataaaaccccataaaatatgatttccatttttttttttcaatgacaatttttcaaaattaaaattttgcaacaaaagtttttgaatttcctcctatcctatcaaacacctagtacgataatgtataaaattggacggttggagcatagcaccatggcaatttgggaagcatgagaagaaaaaaagtgcagtttaattaaaagagattttttaaatttgaaagagagtagtggtgtggtgtggaaagtaaataaaaacaaatttcctactagatcgacctgcttctatcacattcacatatatcttggggttgcacctactcacctaactctacaaaagttatcctctctcatgtatatatatacaaataaatagagataattttagctaataatttggagctttgtttggctgtactgcctagctagctaagtgggagccaagtcatatatatacagaaaaggtggttcagactgggtcactactaccaatctctttcacatttgtcaatgattatgatttcgtattacccaattccacataatcatcatccaattcagaagattttttttgaaattatcaaataactactcgttgttaataaataaataacatatatatatttttttaattttaaacagagtctcttataatctaggccggcaaggcagtgaccttttcagcaatttggtttaatttaaattttgatattcaaatattttttattataaataaaccatttccataaataaagacaaaagaaaaaagagaatataaacatgtttaattgaaaactattaattagtggtagttgctatacttgcttcaaacaattatatgtatagaaattatataatcgttcatatttttttctaaaacgttttattcatattagtggtggacgaaaccaaaaatttagttttttttttttttttgaaagaagctctttaaccttttttagtttgtgttatttgttggatttttttttttttggtatatataggacaatttatattgaactttttataatatatattaaagttttcaatttttttactttttggagcggaataagaatatggttatatctagagatactgaagtctataatgtctccttggtatattaaaggctttgacaatttttttttaaaaagttaataaaagatatttaataaacagctaaaaaagagtttattaaaggatttatagaaaaactacaaattttataacaaattattttttataaaaataaa

SEQ ID NO: 198448 - DNA, 633 bp, Cannabis indica
aaagagacagccttatcttcatactccctccatcaagtcaagttagagaaagataaagcaggaagaattaacatgtgtcacccatcctaccaacttaacggcagaataaggtcacgtgcgagcaaatggttcccacacgaacttagggggcaaatattatcctaaatgccacatagggtgatgtgatctctagcatggtgacacatggagaatattcagcccagccaaagaactctctacttaaaactgtccaagttacatcttcagcagggatcatctgggcaaaacttgtacgtgattgcccgtacagatccacattatccaaaaatgttgactctctcgtgtagggtaattcaccgtaaaactatctctagagatactttccataaatgttctaacatttacatctcgatcaaatctatgattttgtgggattgacttccaccaacaagaaataataggcaaccttcctagtgtacctttttaattttatctgttttggaaaactaaatgattgtattttttttttcctatacatagtggacccattccattgtatagggatttgaaatcatatattcttgagagctcttatactatcaaattattgtaggctttttactaagaattgtt

SEQ ID NO: 198449 - DNA, 1979 bp, Cannabis indica
ttttttatattttactataattaccattacctacgttacgtatattctatctctactcctttatatatgctaatacctttttctctcgtttatatagaaagaaaagcatcttgatatcatgagtataactataatatatataaatttttacctatatatattatgcaaaaatcataataataataataataatgcaagcctatatagtaattactagtaggcaatgatgatctcaatattattcccgttaagaatatggaaaaacaatgcagggtggggtttgtttccagagaaatgaaaatgcaataatttcattttataccaatcaatatatatttatatatatataatattacccaacttagtcctgtataattaattagcactgctactccataggctatacatataggctttgtcaaatctcatcataaaattgagtggggtcaaaacccaaattattaaacagtttctccactatatatatattactgtataatatcaaccaattctagactctaaccacaaatttacaaaaaaaaaaaaaccacaaatttcataattacttggcttcaaattgattctgttatatgtattggccttcatgtcaagctcgaatcatatgcaatgcagtcgattatatatatatatgtttagttcaaaacttgtacgtgcgcgcgtatttgtctaaaataccaatattgtttataagagcatctttagtatcattaaattaatgtgaaatcttcaaacagttttactatgatgacatacgaaattgtacattaaatactataaaatatcttacttttagtgtttgtggttaaaagtaacattttattacatgcaactaattataaatcaatatcattcttatattatgactaaaagttttataattaaaagtattagtcacaaaaataataatttattgtgattaaatatatttttagtcacaattttattgtgactaaaattaaattagtgagaaattatatttaaatactatattttaattataagtaactttttgttgtgactaaaaaattacatttaatcacaaaatttatattgtgactaaaatattatcattagaggtagctcctttttgtagtggaattacaccattaatagtgttagattttgagtctataccaatttagtgttatttttttatttatttatttatttttttttttttgcattctagctcttattttactttattttaaaaattaatgttacatcttagtcctcaaattgaaatttatcacaaaagtaataattaataatttaaaatactaacataaagaaaaatataaaataacaataataaaaacactaatattaaatagaaaaacataacataacactaagttttgaaactaaaaaagagtaatataaataaaaatgaacatcaagtaaaataataatttaataaacattagctttgattttatttaagttttttttttctcttaaaaaatgtgtaatgtttaattaatttaattttattaagttattttaaaattttaaatttttactagtagtcatgataattatatatcataaataaactattttgagttattataatggaaataatataaaagacgagatcttttaaataaaatgcatttatttagtgagatatttagtgtgatatatgttgtgaatcattagagctgttgcaccaaaagtagaagattctacaccaaattggtataaccattggagatggtctaataagaattagggaataagtttacaataatgtatattttttgcatctaatttacaataataacattactactaatactgacgtgccacgtcacccaaatataacattttttgatgctttttgtatgttttgggttttttttttttaatttttaacacttacgagaaaccaactacctttagtgataactatattttttttaatgttagcattaatatttttacaatcaattaat

SEQ ID NO: 198450 - DNA, 1018 bp, Cannabis indica
cgttatggcttctaaaggcaatggaggttatcacaacaacaagaaaggatatggaccaggaaactagtctcaagagttaccaaaaagagttgcctcacttcctattagatatttacatattttgtttgtatatagtatatatattttttttgcatgtactgaattctgtgatatatatttattttcttggttgactgtattgtttaaaagtatagaacattctaaaattttaattttagatcttttattgtatgcttttgtttagtttagggtgggagaattaatgacgatcgtgtctatatcggaagagaaaaatgggtgaatatgactgagtctttgtgagatcgttaagcatatgattgtttactttacggtggccaataggatggttgaacattatagtctatcagtggctgtttcttcacttttgagtcttctttgtgaggtgtgaaggttgtggtatgattagcattagtaatcatagcaattgtcattcatagtatttattgggtgggtttgtgggtttcgggtcaaaaaaaaataaatttggacccaaacccaaaataaggtcggattggcgggttgatcagatcaacgtgttgacctggtcaactcttttaaaaaaaattatttgatcaaattgttatatgcattatttaatgcatgattttgtccttcgtattatttttcatagagttataatcttgttagtttggtatttttattggagcactaaactcactactaacaacctttttagtcgcaaaaaattagttattctcaactgctaatattgatttattaatggcgagtcattgaagaataaagaagaagcaacaacgaaacacaacaaaacaaaaccatgtcacatagacaagactagaacactcaaaatcatgtcatatagacaagactaaaacattcaaaaccatgtcacacagacaaaactaaaacattcaaaagcatgtcatagagacaagtgttgtgatatttggcacacgcaagtgcacgtatcgtg

SEQ ID NO: 198451 - DNA, 2609 bp, Cannabis indica
tcaaaaatgttatatcgaatcaaattgaacaataaagaaagaaaaatacaatgttaaataaaaaagaaaaagaaaaaaaataaattgttggaacttaaagacaaaaaataatagatctcgattccacaatattgaagtaactcaactcacaatattgaaataactcaatttataaatattgccattcttgttagaacaaatcaaatatgaaataattatgtaatccgaacttattatttattattttgaaagtgaatatcacaaagaattattaaagaacagtgcttttgaaaagtaaatgttaattatttgtgtgaatgaaaaacaaggtttatatatttttatattgaggtatattttctatgagacttaaaaaatatataaataattataatttaaatgttatttttgaataagttaggtataatgtgtttttaataatgttcatttagtactttgtattttaaattgaaaactgtctaaaattttatggtttttaatttaaataaaattatttaattacgtataattgagatttgtttgattatattaataaaattatattttaaaaaactatatatacaatttaaaaatataaaataccgattaaatattattaaaaacacataatagtgccaaatataatttttatgaaaactgagaatatttcttacaatgttttatgattaatctctaagtaattaggtcacaattgtcctagctagatatccatgatgttctagatgggaattttcattggttgaaatataatccttataatcatgcttatattcacacattatatatattgatatatttatgtatatttatatatagtactatagctatatatacggcttagtgctcattatccaatacatcctcttttgcttttgatttacatatatggacctttttctttttcccttttttacaaacttaaattataaataaaagaaaaatagattaatttagagccgtccaaatccaaagactctactaaactaaaaaagcatatgtacattgatatgtctaatccaaaaaaacctttattatattaacaatcttaacttatttattgtaattgacctttaattatttgatgtttcagttcaagattatatatatacataacatgactctactttcaacttgataatatagtcacttctatatttatataaatcaatctctttttcaaacataaaaagttgagaaaaaaaagtaatcaattatatataagctcaaaattagacttgcatggaagagagttaggtatcagattctatatctctttacatatatacatttatatattagggtaagcctatatttaagatgtgtttctgtttcggtatttagataaatttttttatgcttcgaatattttgttagatgtgtgattaattttgtttatacacatggtaaataattatttgaattttatttttagtattgtaaattattcgaaaattttaaacaaatttataaggctaattaggaattttgtcccctaaactttgacatgtactaaattatgcctcctgaacttttaaggtcgttaaaaatacctcctggactattgagattgttagatttaaggacttttgtcaaattttagtaaaaaaaagtctaatatggatgaaagttcaaagggcataatttagtatatttcaaagttcgagaggtatgattttggtatatatcaaagtttggaaagcatggtttagtacataaacaatcacagctgaaatagtaaaattgaatcaaattgaaaaaaaatctttaaatccaataatcttaatagttcatgagttttttaacgaccttaaaatttcaagggacatgatttagaatatgtcaaaattcaatgggtaaaaatcataattaaccaatttataaataatcttaaataattataacgaacacaattaaacaaaaaaaaatcccgaataccaaaacaaacggagatctaccatattaccccgtaaaattaaaagggtatatttaagaaattttctatatttatatatttaaaattttatataatcaatatgtgaagaaaaagaaaagtaagtctatctttctattctatctttttctttctttctttctttctcttttttcttttttccactttgattttgatatgattttcacctcgggtttcgtttgatttttgttttggttcctaaagccaaacaaaagactaaatcaaatctacttgggttcttcataaatatttatattatatctatatatattattcttcttcttttttatatacatattttttttaatctaatcttataaaaagaagtgaaaagtttttaaaagggggtccccaattattcaactagagttaatttattaaggaataaggcaattataagatcatgatttcttgtaagttgcaccaagaagactcaatagatagtttattttttattttattttttatttttgtttttttattcccatgcagaataataatcacactttatatacgttaataattttgataaatgtgtcatgcatgaacgtctttttaaccccttaattacttctttttattatcatatcttcttatacttttttttttttttttt

SEQ ID NO: 198452 - DNA, 1214 bp, Cannabis indica
acaacaaactggtattagagcaaggtttgtaattaaggtttgtcgtacactatctatctccactcttggtataatattattcgctttaggcataagccttcactattttgttcttggatacttttccaaaagacctaaaaaaaaaaagcctcataccaactaagatagtatccatttttatatacctataatctttcctattgcacactcaacaatttgatagctgattctatttaatgaagtaggtttatttgttttttttttttttaagaaaaacaaaagaaaagaaaagagtttctttgccaatttttatgcaatcttgaaaattttatttaatggtgtttagtattatgttcaataataattaggattaaacatccacatacacacattaaaaatattatatgtagctccggtgaatctggaaaaagtcaataataaataaacaatagaaatttttgtaatgaaaaatgataataaaagcatgtgcaaattcgacaactcctttaaattatgcacttttgttttgaaactgttgaatataaagctcttcacatttttcacaaagtcattggatatgaccttttttttttaataaagaaaaagtagcagaaagtatagtagaaaagaaaaattagttttaaataaaattattttactatatattaaatcaatattgccactcaaagtagtgtttttattataagaaaataaataaatgagtaacaaaaagaaaaaataaataatataaagagtattgaggatggtgattactttgctcaacatcaaagatatgttgtctgggtttatggtgacactttgcattatattatatggtttaatatattacttgcaaacatataatgttttgaaataataataataaataaagaataaaaaaactaatggtgagatatggggatatgatttaattgaagagaaaaaatattgtacctctatgcttcacttttccatgtactattctcttcattttaattacttcttttcatgtattattatctagtatttttttataaatgtactaattattattatggttctttaaatttgactatgcttaaaaatttacccattattaaatttgaaaccccaaattaatttataccacatatacctatttttacctcttttccctattataccaccctcatataacaagaatgataaaaaaaaaaaaaactctctctctctct

SEQ ID NO: 198453 - DNA, 2567 bp, Cannabis indica
cggtggtcactgacccaagcctgataaaaggagaccatgtgcaaggaaagaaggaggaagtccgcctactcgtctattgaggtccggccagaggtcaggagcgtgctggtcaggggtgttgtcgagagtaaaggcctacacccttgtccaaacaaagaaagtacagaaggtgaacgcatatggtctttaaacgttcgttgtactcatgcttgttcctaaaagctcagatttggctatccaactctctgggaagatgatcggccactggcatcctcaagctcgagttccctactgtccactaaggcataactaccagacacaacgaggtgcaagagacgttggggccaggtggagaaattaagaccagttgcgtcaacgatgaacaactgacgaagggctattagatataatggcctcgtctagctcataatctcaacccctcaacctccggtctcagcaccaatactgatgtcagtgccagatcagccgccgacgactacttccactaccttttcgctgagccgtgaagttgatcagaagctgatattgctagattctgcagttgaggccgctcgggatctcatcccagtgtagtcaccaccttcttagcttctgatcaggtccagttatggtatcatggggggaaagtgcactgtcaaggcaaatcacttttggcaaagtttgctgagagggatttttgtcattatgatgtagctataactctgaagttacatcaaagaaattaactcgagacattaaaaaccagttggaaaatctctgttggagttacactcatccagctgaagatctgagcctttgcctcaaaagctactaagtgccttgcaatccaccaaaagaaatagactgcccaggagatcctagggcgcacttggttgcatgcgtctcttagagctttctgaagctcaggagacgaatgcacgttattttctatgagtgaaacatcactaggggtacaacacgtcttcaaccctccttcccagaaagaggaggactgcttgaagtgtgtcacatgcccaacgatgtttcagcctttagtcttttaaagcgaagtcatcacttgaatttttatacaactttagccttccctcgcaaaagccaaagttgcttcatgaaaattcaacatgactctcgcatgcacgttgatttttgtgcgtgaaagattactgggggtacggcacgtcttcaaccttatgttttgaccaaaaatggtgacaaaaaatagttcattattgatcaaaaaaccagtcaaaaatttttagtttttagagagccctttacctcctgctcattcttgatcttctctcagccttcccctgatctagcccccacttttttctcctgccctcacttccatttatactcctcttttatccttggtgtcaatttctcaaggtatcatttgacatgtgtctattattacttatgaggtggcattgcatatcttgacaagtgtcttgtataaaaggtgagtcataagtttgaggtgcgtgggtcattcggtccgagatattgagatcccatctgagataagtgagttatcttgtttgggatatgcgagtcatcccatctgagatatgtgagtcatcccgcccgagataagtgagtttgaactaactgaggtaggccatatctcagaacgaccgtgataggtcatatctcggactccatatctcagaacgactgtgataggtcatatctcggacattatatctcgaaacgaccatgataggtcatacctcagactccatatctcagactgaccgtgataggtcatatctcggactggtccaagatgaaacctattttgacctaatttaagtaagagaagtccaaggctgaactgagataggctcattccgatctgagataatgtgtttctcatcacgatttgagatgagaattatcttagattaattcgacttagatattacttcggctcatccaatgaggttaccttcttagttatattcccgtatctcagctcctaatttaaactttatatctttcccaatcttttgtgggttttacctgtattcatttattgggcctttcttatgtttctaacaccatgggcctcttgttgatccactgaaatttcccccaaacaatactcttctagtttcttaaaaaagaattttataagaaactcctttaagaatagtttattgcccgaacactagatagtgtactcaagtgatgaggatgttgttataccttacctgacctgattcaaatggtttaaccaatgtaagttgcataatgtctgagtccgacgacttttcctaatttaaaggatttgccttgttttatataggtctttaggattttacaactactctctttcagtttgctcctttatactttactcggccatatcgagatatgtactatattagtttgaatgacccgagatatgtaacatcttggtttgaccaccttattattttgcatatagtatctttagctatttattatgaatttcgggataaattattactttttattttacttattactttatgtgtttttgtatatctttttaatcc

SEQ ID NO: 198454 - DNA, 688 bp, Cannabis indica
tgttaggacctagagagcattactgtcacgcaagttcacaaaatagaagagtacagtaaataaactttctctgcaaaaggaataaagacaatacaaagagcatgatacaaatgatgatattggagagaccctcctaagacctaattctaattcatacaatttataaccttcttcctgtttttttacactatttaaatatagtcattctagaaagtgcattacactttcccaaaaccaccctgcacctactatcacaaggttacatcttgcgagtggttgcgattttgcataataagtatttaaatgaaaatgtagaattgatacttaattacaccagcagtggtacactttagcatttctctttaaaaaatctttcacactctttagtgcccttaagttaaactatttcctttttaccatttattgtgtgttttacgcaatccacgttgtctaactgtttgagctacggctacccctcttggcttagtgttttgttttggtatccttcattggtgtgattcacatggtaaactcggtcattttttgaaactcttctgccctttctcccttcatgtttctctacattctatgattctcccttttatgtttctcactggatgggaataagaatgtctctggttttgatcaaagcatgtttcatttaatttctctttcttcatggtgaaag

SEQ ID NO: 198455 - DNA, 1376 bp, Cannabis indica
gtggatatccaagtagaatacaagctttagctcggggagagagtttatggctggtatgatggggggatgcataagctaaacatccatagtttcttaagtgatcatatgatggaatttttttatttaaaatttcatatgaagttttgtctttaagtaagatggatggtgttcgattgagcaaatatatggcagttcgaactatatagctccaatagatgagtggaacattggattgaaatgtaagagcacgagcaacattaagaatgtgctggcgttttctctcaacaattgcattttgttgaggtctattgacacaagaggtattgtgtaaaactcctttactattgtaaaaggatgttaaggtgagttccttagcattatcagtccttacagatttaattgatttattgtaatggacagtgacataagtaaaaaaattttgaatgtgtagtatagcatcagcttttgatttaaggagatatatccaagtatagcgagaatgatcatcaacaatagttagaaaatatcgatatccttctattgattcaaggggataggggccccaaatatccatgtgtataagatcaaaagtatcattagcaaagctggtattagaattaaatggtagcttcttttgttttgcaaaatgacaaattttacaatgagaaggatgagacaaatcattgttacaatgtaacagtttattgattttgttggtgatgatgacagaggggtggcctagacgagaatgccagtgattatggtgcctctgtttggtagaagttgcagcattgcagctgggattattgctgatttcttgctgaatgtaatagagattgccatgtttattagctatcccaatcttcaaggtctgagaaagttctgaataatacaattgttagaattaaattgcatgagatgagaattatcagtgagaaaggagctaactgagaacaaattgaaatgaaattggggtacaaataacacattggtcaatataagtttggagttgatgatcacagtaccaattttttttatttttacagattgaccattaggtagggtgactgctgcagcatgaggtttattaacaaagaaagaaaaacatctaacatcacagcaaacatggtgggttgccccactatcaataatccaaaaattgaatggaaaggggctaacattaccagagaaatttgtaattgcagcattggtttcaggtggagcagatgttgatggctgcaactgttgagtaagcatagagatgatctgttggcactgctcaggggttaactgaggggggtttgaatcagtaggcatagtggatgtttgcatggtgtgaggagtgtgtcgagtagtgtttggtgcatcagatttgg

SEQ ID NO: 198456 - DNA, 1378 bp, Cannabis indica
gatctatataatattatgaacattgtagtcttcagattttcatttggaggagttataccacacacacaaatgagaagatgatgtcattaattagatattatttcccaatatttctagtattttctgtgacaatttttgccataagttaagtactgagaaaacgcattaatttgataatagcattagaatttagaaggtagaaaacgtaattagaagtcatattaaattcttatggcaaatgacggccttctctttattgccggctgaggcaaacaactagtgccactcttttgataccagaagtctatgcatgactatatcataaccccataaatttatatatataaatcaaaggctaagtttgctttttgacttttttgaaaaatcaaatttgagcagccaagcaagtagcaactagtaagacaaatacaactcttgcctataattaaaaatgttcgtggcataattcaacttagtggaccactttcgaaagtccaaatccctcttgtttatgctaattaaacaatagttgatgaaatgatcttgtcaaaggtatagtatggatattattttaagggaaacaccatttcagatatatgttaatttcagtcaaatatgtgccccaatgaacaagagggtagttctatattcaactcgagtgggttttatttacaattcacgtgtagtcaattttatcgaatgtatactatcgctaaaatacgtaacaaatactagtatgaattagtcaatttgggttctctagtatttatagttataacttatacattagcctttttttctatgttttttttttattattaaaaaagactcataaatgatagaccacatcataattaatctagtagtactctctacttacaaagagagataccgacttcaattttccttcctcaaagtaattaggtaactattttttttttttcaaaaaaataacctaagaaaaaaccaccaagagcaaagaacttaaagaggttgaagactacaatgtgaatatccagactaccagactttatttacagttactgataaagcgaacttagaaagtgtattgacaacagtatttacagttctagggcaaaaaataaaattcacataaaaaagattataaaaggctttaatatcataaaagactaaccccattgaagaatctaaattggaagaaatgttattaagcttgtcaacgagacctttgcaatcatattcaaacgaatgttgtgaaaactaaaagattacattgagttactgcatgtagcaaagcaagagcttctactattttgggttgaaaatttccttctagcttccaaataacggtagccaaaaccacaccatggaagtcacgagccaccatgcctaaacc

SEQ ID NO: 198457 - DNA, 1983 bp, Cannabis indica
tatatatatatattaaaaaaaagagtattataggattcaaactcatgatattgtataatatgtcgtacacctcaaccaactaaattatgaatatttgttgtttataatacacttaattttacttaaataaaatcctaatgatattttttattttttattttggattctcgaaaaatgtgggtcctaggcacgggccttgcccgcctatgcctaggactggccctggcgtcagtgcacaacaaaagcaaaagatgtcatagccgacgtgaaagctatgtcattacacaacccatgcaaactttgcccattaattaattgcatcggttttataatatttctaatgtatgtcaaaatagacgcaatttcatgattttgtagttgtgcctttggtcggtcaacttcacatttttcaagagagccattttttaagcccaacttgcataagtttaacttttcaagaccattttcaccaagtttgatcctagaactttaaggattataattgatgcctaaatgattttagaatgtatagtaggagtcgagattagagtgttggtaggtttttgtttattgaatcatttatccataataatagaaagatagagagaaccagatatagaaccagagagccagaaagagaatgaaatattgaacataatgaattgttatccatattacattgaaaatagaggtctatatacatgactgagcttcaaaaccaatccatcacagaattgggagaaagtggctaacaatgatgacaaggacaaaaacccaactaactaagcttaaagacaaacaaccttaactgtctattgtaacatcttccctcaaactcataattgaatgatcatcaattttgagtttgtgtctgaagtctaaaaactgttggctggaaatggttttagttaatccattagctatttgatcataacatgtcacatgtttgatctataccatcttattcatcaccttttctctcacaaagtacaagttaagctctatctgttttgttcgagcatgcaaaatgggattccaagtgagaatcacagtactcaagttatcacatcaaattgttggagattgaggcaattgaatttttaccttagagaacaaataatgcagccaagttaattcaatagtaacattagcaacacttctatactcggcttcagtacttgaacgagatgttgtttcttacctttccaagctattagatttaagccaaagaatataacaaaaccagtggtatttttctgtcatttggatcggatgcccaatcagcatcacagtaagtgaccatatcatgtgaagaaggttttgtgagatgaagaccaaactcaagtgccacttatgtacatgaggattcgttttgatagccatccaatgagtacgtagtggtatttacataaactggtagaccttgttcacagtgaaggacaaatctggtcttgtgatggtgaggtattgtaatgctccaaaaattacttgatacatctaaacatcttctagcgacatatcctcttaacgagctgacaaacgaagctcacttgtcataggaattgggacaggtttagctccagtcatctgtgttttttcaagtaggtctctaccatatatttggcttgacacagatgaagatcatctattttcttaactttaattcccaaaaaatagttgagaggtcccaaatctttaagagagaattgacagttgaggtcaagaatgagagttaagatcactccctgttattattatgtcgtctacataaactaagacaagtattgtagatttaggagagtgattaataaacagtgagtgatagattttgataatatgaatccaacagaaaataaattgtgttgtagcccttcaaataatgccctaggagattggttaagcccatagagagtcttgtttaacttgcatacaagatgagttttgtccaggaacttcaaaacctagtggttgtgtcatatacac

SEQ ID NO: 198458 - DNA, 1641 bp, Cannabis indica
aaaaaaaactctcaatgctttgagtcatgtgttctcccgaaacaactttataagagatcaatctccccacaaaaattttagcgaaactatctttaccaacatcaatgaaggttgcttcaagatcaccttctaaaacatcctcatcactaccaacgtaatcaaacgagtcgttcaaagccgtccattcatcacgattcatgattaaaacaaaaacatcttcaatatccaaacttcaactcccttataaaccgtggctgacattaaaagaatgagggagagaaaattataaaaattctgctatttacacacataaattttcatcatcaaacttttttctatttgactttttcactccaaattagtacctcatttttttaggtatcgactatcgagcagcaacttaatattattattattattattatttattgaatgaaatactaatcaactagttagtatgaataatcaaaaagcttgcaaagtttttatgatttaagaattgtgattattttcataggccattctaacataatttaagagtaggcgaaatcccttgctaaaaaaagtatatcacactttataactaaataataataaaaaaatttaaatcaaatgcccataatcccaacaactttaattacaaattcaatattatattttcttaacattctaatatttttcttctttaactatattacatacgtcatgtattatcttaatggcatgtttaccaacaaacaataagaataaggtaatgattcccttatatttattcacttaatttattaaaattcctataataacagttatcagagtaaaataacgatgactccctatgagatgttgtatggtaggaaatttcgttttctgattcactaggatgaaactggggaaaaaagtatttgagtcctgaataagttcagaggaccagtgatgttataaaaacagatcaagcctcggatgcttgcttctcaaagtaggcaaaaaaagttatgcagattcaaagcctagagacatagagtttaaggtaaaggaccatgtcttcctactttaggaaagggagaacttgattaaataagaaaaaaaagaaatggaatactttccccactaattttttaatgaatgttatttattgatctagcttttagcaaccgatagttaggcaagtttaagcgattaagaataattaaataataataataaggataaagtaaagaaaataccaggattgttataggggttcggcgtgatggtagtataggctactctcattttacttgtattgacttgtgagttgagaaggaaaaaagcattgatctctctctaaagctctgagtaattctctaaagatctgagtaatttactcataaatctagatttctctcttgagtattatctacgaatgaaattcatgtccctcaatagtgagatgagtccactatttataggaattaatttcatcaaatcagcttcccaaaatcaataagaaataaaatgggaaatcttttcactttctataattagaataaacgaaaaacgaaactaggcaggtttcctttcttctttaatgatacgaatctatcccataaatttaatgatagcattgtatctttcaagtatgaagatatataagatatatct

SEQ ID NO: 198459 - DNA, 1100 bp, Cannabis indica
ataaatattaatcactataacatataattcacatatagagtttagaatacacttacaaagtgtgacacaatggaatatgtctccatattcgtattattttcttgattagtaaatgtattttcactgtctcttttcatttacttgttaatggtcaatttactgaaactttttcaacaactagcggtattatgtagagtgaccctctctcttcttacacatttcttcttgtttctaagggcttgtgtgatgctattagaatgaaggagcagaataagtgttttaatggtattgctatttgtctttcttctcccgttattttctattttctctttgttgatgattttattcttttttctactctctcttctcagtcctatgtagttattaggaatattcttgacattatagcaaagctacgggccaattagttaatttttctaaatcctttgttttattttcttctaatactaattctactaattccaagtatgtttacaccactatagggcttcaaaataagtcttttattagtaagtaccttagtgtttctcaatgtttttgaaggtataagaaatctagatttatttatatcattcaaaatgtgagctctaagatcaattcttaaaatggtaaattgttttctatggctggaaatgaagttcttttaaaagctctgatccaaactattctttctttttccatgtcttgctttagagttcctatctttatttgtaaaaatattgagtctctaatggctaaattttgatggagatctataggtaaaattcattggaagggttgggctcgtttgtgtgattctaaattttttttggtgggatgaggtttcattctatgtcttcataatcaagctttacttgctaagcaagcttggctcattttatcctttcctaattatgttattgttaagttgttaaaaactaagtatttcaacaataactcctttctaaatgctaccaaaggtcattgcccttgtttcacttggcagagtcttctctggggaaggggtctgcttaataaggggctttgttagaaagtaggtaaagttaatctatcttaactgttaattctttttgggtact

SEQ ID NO: 198460 - DNA, 956 bp, Cannabis indica
tccaaatcaaacaagcaacaatttaatttgtaaattgactatatttatacaaaaataagttttttcctcaaaattattttagttttttataatatttatttattgattgatattgcggaaagtttatttttatttttatttattattattttttttaatcgtgagaaggggatttgaacttaggatctcttctttggaaggagaagtgtgaaattattagactatatctatgatcacaatatttatttattaatttatttctaataaagagagaattcatctcagcagcatataatgaaaacaaaggtaatatttattttattttatattttgagaataaataatgtatttttttgttgttgaaatatagaataaagcaatgtattgactatgtgaatatgtgttgtcctaccaatatttttcttgaaaaaaaaaaagaatgtgttgttctatgtatgatactagtattaaataaaaaaaaataaaaaaataaaacctctacatgcagtctacagccacgcccaccatcttggcgattttacatacccatcaatttatttaatttttttaaaaaaattcataaattaaaaaaatatatacatgtaaatgtaatatttgactttggaagccaccattgtgataaaaattttattcaagttgagttcactccgaaatcaaacaaacaaataagtgggacacataataaacattttttttttgagggccataatatacactttaataaaggttaagctttagggtcattaaaataaacttgttgcaccaatatatatcatttgatctaagaaaacaacttaatttgtgggatatcaccatcaagagagctttttgctgtactaattgtaaaaggacaaacgccaaaaggtccacaatatagtaaaagatgtagcaattaattttattattattttgtttaatagaaatatatagttgcc

SEQ ID NO: 198461 - DNA, 642 bp, Cannabis indica
aaaaaaatcaaggaacaaaaattaaaaagtggaactggtggagctgctgccattttttctgcaatataactatgctcaagaagatagaaaggaaaacttaccatgcctctgcctcctgtgtcattgtcggggctgagtagctaaagaaaagagccaaaaagcagagcttctgtagaagagagccggagctagaggcggcggactcaaacggagcaaagagcaaggggaatgaacgaagtgtctctctgccactgccacagtcgtgagaatgttagagcagaaaaagagagacaggagagtaaagcggtgccctaataccataaaaataataataattgaaataataatattcaaaataataataataattaataataaatgatttattaataatgctatagttatcgtggtcacgcgccaacactttcccctttatttctcgtcatattttcttcacaccaaataaaactgttattgcaatttgaatccctttcattttcattttcattttcttacacacacttctttctctctttcaatctctctatcttcaaattaccatagcaaccaaaacctgaaagcttttctccatcaccggaatttttcttttattccttatccagatccctcttttttgcttat

SEQ ID NO: 198462 - DNA, 1023 bp, Cannabis indica
atgtattcatcagatagatcttttctgttattagtttgaatataataaattatggttgaaatataaaattttcttatatttagataattttgaatccatttgacacgtagtttgtagactcaatatttaaatacatgcatgcatatgcatgtgacagttggtgcatgaattaattttgacacgtttattttgaccatatattatatttcactgacccgaccgatcgatcgaattgccttatattttatatatttgattcaattttgtattggaaatgataacataaaatattatttgtcattttcaacgaataatattaattattgacttctaatttatattattttcatagagtcttattttcaattaaattactttcttaaataattaatattaactgtttgattatttaaaacgtattaataatatggttgttcatttatctggcataggtacttagtattatatagtgatcgtattatcctaattaattgtattattagaacatgcttaccaattttcaatgaattcgcgtccttggcccatgggaagttattttattgagtggtgcatggtctttctttacaaaaataataataataataataataataattctttgcattggatcccctaaagccaagcatatcatgtaatattatcataaaaataatattgtaagttttgtaattattattttgatctatatcttaatcatttgttattccttatatatatgtagtactgattatttcatattcaaacacaaataaagaaacatggcaaaggagagtaccaccaaatattttttccaatgaagaaaataataatggcgatgaatcactagaatcgattatatctcagctacctaaagccaatagttggtcaaaatatggtataaccttataccaaaattgttggtttccatccaatatgattcccaacatcatctcctttcaaaaacaattcaaagccgaagatgaagatataatcgtggcttcatttccgaaatcaggcaccact

SEQ ID NO: 198463 - DNA, 1284 bp, Cannabis indica
gtaacacatcttatattttattatgagatacatctcaattctcaactaccctcccaattttctcccatgcaaatttgagttgtactttggaaaaaaaatgcaaatttgagtattattaacttaatttaatttattgctgagaaaaaaaacttaatttaatttattatattaacagcttgcgtctaagtattcagtttaatctggttaatgatttctgttttctaggagggaataattttatctttgacaaaattttgttgtgttctaattagagacaaaaaggattttgtcaaaacaaaaatgacattaatatttaaatttgatgccctacaaaaaaaataatattaaaaaaattgatgtaccttttaacctaaggttttgttgtatcattcttaaatattggtaggtattaggtaatttattttcgttaataaaaatcaaactttaacaacgaccgtaatatcattatcaaaataaaaccaaccaccgtaataagtaatgtatacttttcaccttctagttaatttcccattataaatttttatattagataaataaatacttagaccgaaaattgtgttatatttaatttgagtggcaatttagattttgacaccataagactatacgaaatacaaattattgcgggtcatggaaaatagatttaggttgaaattgggtcgaccgcaatgacacaattattatttgggttagattaggattaatgcatgtgacacaaaatcgatacgaattgactcgtttatacattattaaaattattaatttatagttaaactagaaaataagttgtgcttcgcgacgattgtttaaaaaaaaaaataaaattttaataataatcaagccataaaattatatcaatctcaaattttaatatcttttatacaatataaataactagtctgttagtatttaccgtaatttttggaaaccaattaaagagagttaagaataaactagcaaatgatggagatagaaatttttacgtggttcaagtgttaatcaaccctagtccacgagtcacttgtatttggccaaatggccttaatgtattacaatgggatttacaagctcaagtctagaataggggtgttcatccaatcaaatctacactatttcgctcataatgtatcatatccgcactaagtgtagattttatattttggatccaatctaatatgcacaatagttcaaatcgaatacaatctaatttgcaaaagtgtggattggatcaactactttggattgattacttattaatattaa

SEQ ID NO: 198464 - DNA, 1725 bp, Cannabis indica
cttgcaaaagtaatatatttttttcactatagtaattggtgctttgaaagtttattatagtgaggcactcaaaataaataaaatattaatgttaatgaaaatatttggtactatacatttatggaaatagtcgaaatattttcgatatccacaaatatttaaaaaaaaaaaattataaatatcatatatatttgggtaataaaaaatttctatgaagtttaaaattattttaaaatatagacaatttatgaatactaaacatcgtttggagagtttacatgagtaatgtatttttttttcaaatgtataaaatatttatactcaagtaccgattaaaattttgtggcttttaagtcacttttccaccgaaatatctaattatttgattttttttggaaaaaaattgaaatattaccccgtaaaaagattaaaaaaaaaacccttaaaatatattagaactactcaattttttgatatttttattgaaccaaacacaaaacaaaatccaatttcttaaccataaaatctaatactccaaattattttaaacataattatgacagaagataaattaaaataccgactttatttagttaaaactaataagaacttaaaatttcatcacgacataaatctaaaggagatcttgttcccattttgcaaaattatgccattaacacttagtttttagtattattgtcattaacgacattaactttcacatcttcatcgttgaaattctcattcattgcagaagcctcgaccttagccgcaaccaccatttgagtggttgagttggtgctattattcttggcagcaataatatctatccacttattaatttcttccaaattcttgtcaatgatacaaacgagatcatttaaatctgtagcagataagccaacaagattagccttacctgacaaattgaagtacatgagttgggttaactccttctcgcgattctctttcctcagctttttcacttgctcactctctactttgatcctttttctagagaaagcttcttggttcaccatcttgttattttgctccatcttcgaaatcttactgaacttctttagaatatgattcaccccaccgtcaaagggaataaccacaactacagccaacaacctcaccaactccctcaccttccttaccaaatattttttcctctttttagtgtgcttttcttatcttctttgtactattatttatacataaatttaattaggtatgtgtgataaaagggtatttttccgttaaatattattgaaacgtgtcaatatttgtttaaaaccgtgtcactgtacatggtatatattttactgtattttaatatggtatctcatatattttaatttaaaaatttaagttatttaaagtatttaaaagtaacacaacataaaatgacactttatgagtgagtgtttcattagtttttttttttaattacatattaaattaaaatatgtaaaactaatttcactaatatataataataggacacttcatttggtgttaaaaattaatttaaaaattattagatatcaagaatgtccaacaatatcatcatagggaagtatcttatgagtagttataatattaatagttattatattaaaaaattggaaacactattaggcagtgctagtgcatttttagcattattaactatttatatgatacaaatatgtgtgatttaatattaaattatactaa

SEQ ID NO: 198465 - DNA, 1318 bp, Cannabis indica
tcatcttctaaaaccctttttctgaaccaactacagctttttcttcttcttctctgataaaataatcttcaacaaaagatagaacttgaacctgaaaattaacgaaatagaacatgaaaagttacttttttttttgcttattattattacctaccaaacccatcaccttaaactttacatatgattaatatatacatatgatgatgatatataagatgggatatgtatgtaaggatgataataatggtgacagaagaagagagagcacactcccaacattggcaaagatcccttttaacccatctcgggttgtgctctctctcttctgtcaacatatcctccatctcatatatatatatatgtatagatattatatatatatatataacacaaagaaaagaaaacatgggtttcacatatgtaacatatataaatcttcaatacatagcatggaaatacataacataacttcatcaatacataacataacttctacattaaattttatatagatatgtatgtgaggatgatgaacacataatatatttatataacatataattattcaaaagaaagagaagaattatatgaaaaatgaaatacccttttgggatcttagttttgcctcctctggttttttttttaaaaaaatatatatacataaaaaagagaagaaaacagtatactataaatatataaatatatgttatatataagatatattgtagctaataattatgaaaaaagaagggtaggcactagaacttgatttttccttaatttacagaagaaaaacttaaaaatgaaatgaaatgtaaatgagataataattaaagagataattgatgaattgagaagagagaaacgtataggctaaaaacacttgaaaaaattatctcaatgaaatgaaatagtaaggttgcatctcaatcactataaatacaaaagactaaaatgagtgaccggctgcagccggtcacattgttcattatcaccttgttttttttatcaaacattatgaccttcttagtaaagagaaatatacttttttttgtggtaaatttttattttgtaaagttattttgttaaataataaattgaactatgtattttttaaaatgatataaattaatactcatttaataataattaatattatgataaaaataggtatattttttgaatttattcgtgctagaaattgtggttatgttataaattgaaatgggaaatttgaatttttatgcatcttttaaagcatattagttaggtaaacaaaatacgactatttacttaaactccaaaaatacccctctca

SEQ ID NO: 198466 - DNA, 3466 bp, Cannabis indica
gataatgacttgatatttaatagctaggtacacagagttctataaatataacttaagtattattaccataaaaaattaaacttaaatatttatttacaaccgaaaattaaatttaagtatttataccgtaaattatacttttttttttaatctgattgtatttttattccacgtggtcaccaattttttgtgctcttacatctcttgtcttttttatgaataacaataaatatccatttgctgtcatgtgttttataaaaaaatatataaaatcatttttatacttgaaagaacgatatagaagtgaggaattgaacaaaccatttctagtattgtctctttcatgctaacttgctaaggtaccctggagcacacactactacaaaattgagaattcctattagtcctcaaaatatttttttttttggagaaacgttgctaataaaattaaatgagtgttttaaattatcgggaaaaattgagtattttcgacggtttagagcactcacgagggcaattcgcgacaatttttaagagtttaaacatgattttttatgtgggtaacacccaacagttttaaactgtcaggtatacccgaccttgaataaaaccctcctccccatttcattattcagtctctctctctctctctcacacacacacactagcagcgcaccgaaggaaactgcaaaaccctcgaagatgaaaccttcctccgtcttcttcctcccacgaagctcatcttcctccttttcttatttctctcgatctcgtctctctcatctctctctcactcgcactcaccattccttcctcctccttcttgttaggtatatatatacacaactaaaaataagctttagaggcagttttttaggattttcagcattaattttggcaaaatttactatcaacgctatttcaagtgatgtcgtagggaggagcattagccgacggtctaaggggagcctatgtcgccagttattatgcaataaccgacagcatagggggtcctgttgtataatgcagcctctatgtcatcaactctttgctaataaacgacatcgtaatgttgtatggtgtcggttattagcaaataaccaatataaggggttctgcatatttgtattttttttttataaaaaattttctattttcacatatttattttcattaatttatttaaattaaatattaatttaatataactaattaaattaaccatataactaaatgtatatatacataaataaatatatcacacaaatattttaaaattagtcagaattcttacaagttattatctaactaaacatagaaaaataagagaaatatttttacaaattatctaattaaacatagaaaaaaaaagagaaaaaaaatgcgtatacaattcaacatcattgcaagccttcgtgcatcactgtaagtttttgtgaatcaccgcaaataattattctatccactgtcgttgtaacactacgactcaatttttgcatcgtgtgtcttcttttccccaaactgtaagaagaaaaatatttttattaatatatagattatattatttattaataaaataaataagataattaaaacttacaacttttacttcggttaagtatctgtaaggatttgcatatatgacaatgtcactgttgtatttcaatacacaaaaaccacatttttagtttttaggttgttttgggtaatttgctactgatattcctgaatatgcctcaatgaatgcatttgacctccctaatgtctcctatgctctatttgtacaattatattaccaattcaattaattaacatatatacttaactaattaaacatcattttttggaagagcttacgagagttctctgggcatactggaccacaaaaacaactttaacaaggcacaccttactcatggatgcgaaggaatcattccagttaaaaacaccattccttcacacaaacgagaaacctatgacctaacctagaaccatgctctactccaagagtatttggacataatcgaggagctctgggaactgtctcaagtctacctaaaaatgtatcaagacaagattaccaggaacttcaattccaaaattaagagtcaaacatttgaagttagagatctcatcttaagaaagatatttccaacttctcaaggaccaaaagtagggttcttaggagaaaattaggaaggattttatgagattcaacataaagtgaataatagaacgtaccaattgaaaagactagatggactagagattccacgagcatggaatgcagaccacctgctttaatagtattagtgaattggggtgtttggatccaaacatcttcttctattggctgtatttttgtatttttccttctttatgtatgcatcgaggcacaataaaaagaaattagaagaaaaattcaaaaagaatgcactttattttgttttcaagctgcattttatataattgaccagcaatttagagacatctgaattctcaactcaattggtaggatatacagctatgtacccctaaaaatatagaatacctttttatttttgtatttagattttgccatttatttttattgtcaaaaaacttatggaatgtggaagtataaaattttgcctaaatttatcatttttagctattttctcaccatattctgagacagttaaattcatcatgcatcattttgctttgttaattaaaaatatgggaacataaatctcgcctgaattttagaacatttttagtctttttcttatgactttttaaattaacgaaccttggtgaaattgcaaattaatattaaatttagcgtgaaaaaataagttatgcctggaatcgggagctttaccttccaggaagaaagcaactttattacttcacctacatgaaataactcgctaaaataggtaactcgagtacgaaaagtataaactcaattttgcgagtgggtaatcctcagaaccgaaacctcagggatctgaaagtaagtacaacttctttaatgctactcaaaattaactaaagtatacatgcctttgaagggccctaagtcctgaagacatatgctcattcggaaggaaaagctaaaaataaatcttttggagtactaaaatttttgctaaactttctagagataaggaaggagagctatcttctcaacaattccagacgtcaaacagacttagaatcggtcctaaggaaaacttaagtttcgaagctttggctgttggcaccagaagcttaagatattttaaactacctactgaatggctatacgacaaacaaatatgcaaagaggcaagataataagcataaagtagcaaatgaaatagttgttacaaagcctcccagttaatgaatttaaaagtgtctctgcatatatcaaaagggggcaaggacccccaaaaagaaaaaaaaaaaaaagaagaaaagaaagaatagagaagaaaag

SEQ ID NO: 198467 - DNA, 2142 bp, Cannabis indica
ccaaaatccttcaaattgtataacccttaatttttataaccctaaatttatccagacaaataaaatcaaaatacccaaacagaaaagcaatgcatacaaaagaaaacactaactaagaaaaagaaattgtgagaatagaaggagaaatcagtaagaaaaagaaagtgtttcacttactgtcttcatgagaatttctgggcaaagaaaactttgcgattaaagtctcaaaggttgagaatgatttctagatctgaaaatgtgatcagatgaaatacgccagaaaatgtgagggacaatgagggcatgcaagtttgaaagaagacagtcgaaattccttgcgaaaagctcaaaggtttgaagaatgaaaatggaaaaataaatgatcagtttcaaatttatacctaaaagatactcaccgtgcgatctaaataagacctgatttaacggatgagaattttttttacaagaatggaatagttagagcattaaatgagcaatgatatacctcgaagctctgaactgccaaaactcaaagcatgtaatttttcaaataggtaaatacgattatatccctaaaaacatttaaaaagttcttttttatagtactttttagggagcaattgttatactcaaaagtcggctattcatcagaaactgacatgtgtcctacaaaaagaatatgaatcaattcaaagaataaagtaattaaattgcattattaaatgtaatttaaaataacttgtttcaattaattatgagttgatagaaatattcaaactcactgccacataagcatatgcgagataagaataataactattaaagtaatatagttgacgagataatatgttcatcttgggataaacagagtatattatataagcctactagaggagacatcaaggagcttgcagctcgttaacccacatacttaagaataaaagcttgcagctcattgacgtacacaattgtacatggagaagatcacatatatccatctcgcttttaataccacctcgcgaatagctttacaatatgaagagtactacgagaagaagaatgtctacactttaatattttttcctctaagaaagtatcagaaggataactcgtactcagcaagaaataatcttcttattcagcataattgcttaaggataaagacaaaaagtggttgagtagttattaagtattatcccatgtgcataaaaatgaaatgtgggcaatatccacgtttcatgatcaattgtaaatgaatagaactcaatgaaaaataactgtcaacctacacacctataaatagagggagaatctagaaaaaaagaaacagcaaaataaagaaagggaattctattatttattattattgagaattatactctgtgttcaaattattatctctaataatatggactcatggagtatgtaaattttaactacaaaatcacgtaaaatatctagtgtttgtgattataattaaattctaaagtaaatttattaggtacaaaaactataaatttaattaacaaaaatctgtgttaatagtaatataataaaaattaaaaaaattaatatatattacttataataaaaatatcataataaatataataataatatagcttaaaatattatacttaatgataatatctctttaacaataattttattatgtcattaatgataatttacatgacaattatcatcaaaaatgattttttgtttataataacagtttcacaagaattttttttgaaaaaagtaattttatataagtttgtatgacattagaaatcaaatgtcataaatattttgtcgtgaaaaataatttgtgttatagtgtatacaatttattattactcttatctcattatgtcaaatacacttaacaatctgagtaaattgtcctaaaatctttttcgctatttagatggaggaatatcatcaacaataagattttaaaatttggagcttatactcttttgatgtgaggaatggattttagaattatattattagcttcacattctttactaatttcatcttcacttgcaataatgggcattagtggaattcaaatttcaagaccaggtatcatatgttgtttcatggtcagaaaaaaaaaaaaaaaaacgtctgaag

SEQ ID NO: 198468 - DNA, 1064 bp, Cannabis indica
tcttaaaatgaaggtttcgaaaacaccagcaataatagttggtgttatttgtaaaaaaaaaaaaaaatactcttggagctcaaccattttaagcccagccccataaatgttgtgattgtaaattgtgggctatcgaatgggcccagaaaaagggccatagtggaggtacagtttttccaagcttaaagccgacgtctcactccacttctaagtaaattatatgtatatccatttgtttttttacctttatttttatatttttaagatatataatatcctcattaaactatttaagttaatgtaaattatatgctagacttaagtagagaatgagagtatattgagcaatctactcaaaaaaaataagtatattttaaaaatatataatataaaagtatttttacttaatgaaaacgaaaaagaaatagaaatatttttcaacttattcccctattatttgtacaaaaattattatagaatatagaacattccaatatacatgtaattttctagagctactaaattagtcaaattcaacttattctagtagttcattagattttcaagccgacacgacattattcactagttggagaaaaagttggatgaaaattctccaccccaagatcatagtgtgtacagttggtactttaaaacgagagctgtatatattgtgaaatagaaaggcacacttgtctgttttcaaaaataaaagacctcaggataaaaagagaacattgccaattttgtaatatcacacagtatttctatttatttatttatttaaatcttactaaattattggttgaaattatataattgtttactagttagtggcaaactaagaaaaaaaaagaatatatttaggtatatggacatatgattgaggaggtagtgtaagaaaatgacaactagtaatattaaaatttagtgaaaataatatatatattaaggtaagcaataaattcgagtgaaaataagaaaagaaatggtaaagctgtaactattagcagaggtctatatatatacgtacgagctaattaacttattagggtggtcctttt

SEQ ID NO: 198469 - DNA, 766 bp, Cannabis indica
ttctttaatattaattcagtaatatttaatcaatacttaataactgtacgtactcatcatattataatttatattatattacacatttaagtttgagtttaagtattttgtatgaggcatgctgcactctaaacttgctattattatatcatgttttgtcacgacaaaaatcttactttaatcacaataaaatttgtgactaaaagagaaaaaattgtgactaattataaattattattcctatgtgatgactaaaatgtccgtgattaaaagtattatcttgttgtgactaaaactaaattagtgacaacttgtaactaaatactaagttttagtcacaagaatattttgttgagactaaaagtcacatttagtcacaaaagattatgttgggactaaaaatttgttactaaaagtagcagttttttgtagtgtatttgaacattttagttacaaaaatttgtctacaaactacattgttttaagagtattaattgcatttttcatatttgtcactagatgaattttctaaaacttattttttcaagttatataagacacgctatttaattacaccaataacaggatgatacaaaaaaatgtgctaggcaccaataatactctttagcaattcttttgttttaattataaattaattgatgttaattaattataaagaaaaaaaaagtaatgtaactaaaatgaatatttactattaaataaagattaaaaaaaaccaaactaaatgaaaaatcttaattgtact

SEQ ID NO: 198470 - DNA, 1112 bp, Cannabis indica
aaattgcggtaattgctatggataaatcatgtatgcaaacctaatttttgtacgattattattgtgttgtaaattatatacaaatttatttcttgggttatttaattttctattgcatagtcactacaaaaaaaaaaaaaaaactacctctagtgacaatcttttagtcacaacataatttttttgtgactaaatgtgacttgtagtcgcaacaaaaaattatttgtgactaaaacatagtattttgatacaagttttcaataatttagttttagtcataacaaatattgtaactataaatacatttagttacaacaaattgtgatttttgtaattagtacctttttagttacagatttttttagtaacaatataagaatagtaatttataattagtcacaattttttcacttttagtcataagttttattatgattaaaagtaaaaaaatttatagtaggtgccaactacatgagccttataccttagccaaccttaattgggtcatcggtatcacctcaaaagttaccatctaaaggatggcgccaccacaataagctttagcttgcaagggccaagcaaatctctttcaagagggattatgtatgtgggttgcgaacttttgatacaaacaaagaaaaaacaatcaataccactaataatattttctaccatatgtttatatttattttattaagtgagttgttgcattttaattattaattgaatatatatagagataaaaataaaaattttggtataatcaacacatagaaagacttcaaagaggaggagtctacaaagaggccatacatacaaagaggccataatattttatataattatgcttgaaaacattttatttttgagagaatgcttgaaaacctattttgatcctaaatgacatctctttctctcccaattattccaccctctcatatattttactttttctttaaacaaagctagctatatgcaaaatccttctcacccagctcactgctcacactcatttcatcatcagttttttcaatatattccaactaaaatattgaagatgtagcacatcaaaccacaaatatatcacattttgcgcttttaacttttaaatt

SEQ ID NO: 198471 - DNA, 778 bp, Cannabis indica
tatatttaggtatatggacatatatatgattgaggagatagtgtaagaaaaatgacaactaataatattaaaattttgtgaaaaataatatatattaaggtaagcaataaattcgagtgaaaataacaaaagaaatggtaagctgtaactattagcagaggtctatatatatacgtacgagctaattaacttattagggtggtccttttaaattaacacacatttatatacatgatatatatataaaatggacctctttgaatgtgaatatcctcatggctttctttttcaacaccatgccttatgaattgactgaaacatacagtgactgactgtgactactatattgtgtaattattattaataaatataataagtacctgaacaaatatatattgcaaagatcttaatttttgttatttttcaaagccatgctttttcttttattttgtcaatatattattcagcgatcgaccccctttaattaaagctctccctttataactctgattgctttaaaattacatgatcaaatcaaattgaaaactctctcaatcatatgaaatgataacatgtcaatagcgatcgatatatataattttcttcagactgattttgatagtaagtgcgtttgaagggaaaccttctttcccgtaattttttgatgtagaaatatcgtgggtctcacacatatggcttttaattagtgagtaatataattttttttgttattcttgagttttacattttccatatttgatttccacaccccatgcat

SEQ ID NO: 198472 - DNA, 1792 bp, Cannabis indica
cattcagatttatttgataagggcatacctcgaagtaattggcaattgatacgaatcacgggtgtagacgcaagaatgcacttgcgttcatgtgaaatcttcaacaagcactacaataaggattttgagaactgttgcgacacccaaatctaggtttcctgacaatagtttcaggtagagagaactcatctcgaatcaattttatttggggttgagtgacggaactaaatacaagaggtcttagttcaaagtcttgatctctttggtccttactttcaatagcagcagtgactaactcaatttccataacctgccctccacgggccttgtctagcttcttagactttggtactgtgagctttgcacaaatgaattgggtcgtgtgttagttatattcctcaggttttttgctagttcttctcacgcgaggctcattttctttcagctaagttctcctcaaatttgattaataaaatatcaacttaattcaacttaaaatagatttttttcaagcaaatttagacaaactgcaccttgcatgaatggataattttagctcaaacaactcacataaaaatcttacttttatttttatttttatttttggagggcttactaatggagtttaaggatttctaacatgatctagaatccttaaaatgagatttacaagaggagaagaaataaaaaattcaaaaacaattgaaaattttgaaatttacttgaatttgaagaacacttgaagaaaacttgaagaactgatggaagaaaaattctcaggctctcaattctcctttatgggcatttgaagtaagtgggaaaggggacaaaggagttatctatttatatcaactgatctcctttattcttaagctgacaaggactggatttaaatttaaatttaaaaagatagataagagagacaaaaatctgttatcttttctcttttctcttcgtttctttttatctttaattttcaaattcattaattcaaaagggaatagaattcgaaattcctagtcacactaggaatcattgaagaagagagaagaattgcagagattatcaaaattgatgcctacttggtagtttcgagagaaacaaacttagttcacatcatcaagtcagcctcacacaagtgttaagttaacttggcggcaaatgtttacccagaatttgaccctggtaacttggacatcaatgtttgacatgtggcaagaaataaaacatctcaaagttgagtagtctcgagtcatagcactcaacttgggaggggccctagccatatgcgtatgttgactctgggaacttcggaatggaaatttggatccttccaaatgttttctaactcaccatatttcattattctgaaccaagaagacaagaagaatccaaggcttggaattttaaaagagatgaaacaacaaatcggaagtcaacccgggtgcctagggttttcacccaacgcctaggttgacattccaatagggtttcagttttcaagtccatcttagacaaatggctcaaattttttactttgacatgaataagacctatcacaaacatatttgaggcatcataatcataatcaagacactttccattttgagcacctgatgcaccaagcgccctgggccagtagtgcacatagagcccatgttgacatattgtcaacctagggtgcttccaaccacaatattgaagaaataacccaagctttttattcgtctccatcataataaagaatcaagtgctttcaggataaaaaaaaaaaacaagatagacctagagg

SEQ ID NO: 198473 - DNA, 1077 bp, Cannabis indica
aatcagtgatgactgtaattccgaggtttttcagtgcagattcttcttttttttttttacttacaaataaaaatacatttttttgataactaataaaaatacatattgctttccggtaatatattggtttaacaaataaatgataagctattcaaaaaacaaaaacggaaaaaataaatatgacaacctagaacgtgagaataagcagctacttatccaacaatatatgtcatttgtataaatattatatcgaaacttaatagacaaattaaacctccattaattaacaagcccaaaattttgaaaaatatcattttgtatgccaatactataaaaatacaaaattatgagtggctcagattagttatcggccgatcttgtctattcactactaataaatcactctagttatatattttaagttctaatgtgttgtccttcataaaattaaatctataaaaagttctaaggtgttgtgtatcctaaattacaataacattttagataaaaaaaaattacatttaacatttaatttttatttatttaacacgtgaaggtacatatatattatataaatataataatgtaattaccgtggaatttctcaaactatattagtttaataattagttttgtcaaaatcgttcacctgaacctgatcatgccatatatagtggatcaaataagacagatttagatttagtctccaactaatactccaattaacttaacctaattaagtaggtgccaattagttaatttataagaatccaaatttattatccaccaataaaattgttttcagtattttcctcatatattattaggtggattatcaataacaaaagagtactccgtaaaattttgtaaaaatagctttggtatattttaagtttttaagtcctaaataagatctcgtggacataaattaatcaagagaaatctcatctcaagaactatatttgtaaattctctattaattagatttaatttacaagcttggtcaattgcaaaagttagcaaatggaactttcactagcttagctatatataggtaaacattttatatatatatat

SEQ ID NO: 198474 - DNA, 627 bp, Cannabis indica
ctcaagttgtaaagatgaccatatagtagagacatgaagtagaaattccttcaaattcatgtggtgtgtgagtaaatcttgtatctcaaaagcagagcaatgttacacatgtctagcacacttacagtaaaaaagtgcatgagtaattgtttgctctattacataaaaaacatgtggttgtatctgaaatgtgtcgattgtggagaatatcagcgacaagaagacaatcatggatggcacgccacaaaaaaatagaatttttgaagggaatctcaatgtccaaaattgtttccaccactatagaaattggatgccacttacagtaggcttgtgctcatcgagtttagttactaaggagtaacctgatttaacagtataaacacctttcaattcgtgatgccacattaaaaggtcttggtgttcaaatagtgttaacgatatgctttgaattttagcaacatccaaagtaagatacagatttacaagttggtcataatcccattggcaagaatctaaaatgagatctgagactttcatagctaagtcatgacccctaaaaactaatggtttaaaggaggtgatacctggcagccaagggtccgaagcacaaaggatattagcaccatt

SEQ ID NO: 198475 - DNA, 1904 bp, Cannabis indica
ctcaggatttaggccgatctactattgatcatcgttacgatatgaatttggtctttataataaatgacatgttaataaatacagctttattcatatataatgtctattatatacatcaccttcactttcatgtcatactacatccgtaatccgaaccaagattacgtgcaccaaaaaataggcatcagtgaaccgtactagcaaccgttgattaaagattaccaaactttaatatgttgctgactgttttattcatagctaagtggtcttagttctctgtacagctacaagtcacatcctcatgtatgaataaggaattttttcgatatttaatataaattattcaataataatattaataacttaacattcaagcatatatcaaatgtttaattctgaataatcaaaaatatccttacaagcttttcagaacataaaccctaacaactttctcccaaagtaagcctttgacaagtcttctcctaaagacccttctcttgttcaatggagttcttcaactcttttctaggtttttacaaaagaaactctctcctcacaaagataaaaatatgaaaaatgaaactagaagaggtaaaaatatttggctgctctctaagtcttatttatagaacatagaaatcttaaaaatagccacaaacacgttttcaaagctatacaagaatttcctaaaaaaatacctaatttgcaacatcaagattgaattttgctatagcagatcaggaccaaacaggaaacttttcaaaaaggaccaagattacaatttggtcttcaatatcttctaaataaagattatttgattttttatatacatagcaaagccaaaattaacatttagaaaaagaaaaagttaacttcttaaaaatagacaactttttataaagatactacctacttttgtaaaagagttgcctaaacaaaaaattccagttgtaaataaaactttccttaaagaaaaagagcaatcaatgtcacgaaattaagccaaaaaaacaccatataattcacaaataaattaaataatattttgacaaataaattgccaaaaatgacctaacaatcttctcatttgacactttagataatcaaaatattttttaattttcaaatacctgcaaaataaagttagtaatatcacagaaataaactcttcctgaaaagcacaccattgacacaaaacacaatgctaactttaataaaagtttaacacataaaccaaactcaactttctctgaaaaaaaaaatatccagagttgaacacacaaaccaaaaattaaaaattactactctctctttttgtttatctcgagggtcaaataactcaaagatgaactcgaagtgtcgaataactttcaaagaaactgtccctcatagaaaaaacacttttattttttaaaattatttttttaatgaggtcacacgaaaataagaggggaaataataaaaaatgaaacaaatgggcaattgaacaagatttctcacaacatatgaaataagtgctgaaatagaaaaaaaaaaccatggtcaataatctcataaaccacaattaataagagattatttataaaatacaaatcaacacttatcaaaagaaagataattgacaaattttcctagcccataagtcaagtcacgcgactcccccccctcctttttttaatattatttttttcaaaataaaaagagacaaagaaactaaaatattttatacaaaaatcaagtaattctagtgcatgcatctttccaagtttcataaaaaggaccaataaccatgttatgctttcaaagaggataaaaatttagtatctcaaatacaaaccatacttaccagatattatgaaaaaataaacaagttacatgaaatattatgtgaatcaattttttaa

SEQ ID NO: 198476 - DNA, 2319 bp, Cannabis indica
ttttgatatataacaaatttgaagtaataattacttaaaagtaaaatagaaaataaatttaattagttaataatataataatttataaaataattaagtaattaatattagaataataataatataaattttttttgaataataaaatttaatatatataaaaaagaaaagtaataattaaatgtaaaaaaaaataaatttaattaattaataatataataatttttaaatgatgaataattatttttaaaaataaataatagtacatgatttttttttaaaatatcataaaatgacataaaacatttaaacttacgatatcataaaaatgtgtcactcacttttgtctttatacaataaaatcttatatgtctttataaaactttagatgacaaacgactagtcttggaccacattgcgaaatcgtagatgtccacaattttggaatgggtctaaatgcatttttagagatgaccttgaaatgtaaggattgtgatcgtagaattaggtgctcgtgtatacgatgtgtgaataataggcttcaaactttaccttttgtaaaagcacacatattcgattggggatttttttactagttacgagaagtggacttagcacggtgaagcagaatcaagcgttactaatgtagtcaatgaccatgatgacgttgatgatgaccatgaagttgacgagatgattctgatggttgatgacttccttcaaccgtcaataaaaatagattataatcctaatgcaaaccaatggcacgacgagttattttaggagattaaggccgagttgtattctggttgtgattggatatcttcctttaactttttggtaaagttatggcatttgaaagttagaggaaagattcctaacaccatatttgatgaattactgaagttgttaaaactagcttttccaaagcaaaataaatttcatcaaactactatgatactaagaaaagattgaagaaattagtattgggctatgagtcaattcatgtgtgcaagcataatttctgtttattttacaatgaacatgcaaataaagatacatgtccagtttgtggcagtagtagatggataacttcagaaaattcaggagcaaaaaatgtgcctcataaggtgatgcgttactttccgttaattctacgattgaagagactatattcaaggaatacgaaaaaatacacggtatggtaccacactggtaaatcaaaaaatgatcgggtgattcgataccctgtggatggtgcagcgtggacggactttgatgcaaacatcctgattttgctagtgaacctcgaaatgttagtctaggtttagttgttgatggctttaatccatttggcaacatgagccaagcgtaaagtatgtggcctgtagttttggcaaactataatctttcacgttagttatgtatgaaggataataattttatgttgcattgttcttcctgaagaaaaatcatcgagtatggacatagatgtatttttaagacccttggtggatgagttgaaggaattgtgggttaacggagtaaatttttagagatagtcgaaccaacactgtgttcaagctgcgcgcaactcttctgtggaaagttaatgatattccagctcgtagttatttgtctggttggagtgattagaaatacaaagcttgtcccacttttaatgaagatacctcttcaattcaagtgattggtaagacatcttatgttggtgagagaagatttttgccaaataaccatcgaatgagaatggatactcaattcgacggacaaattgagagaagacctcctccgagacgtttcacttgtgaggaagtattagaacaagtaaacaaactcctaccctcccaggaaatgatgagctatttggtggtgtgaagcataggtgagtttcagaaaatcaaaattggaggaaaaaaaaaagcatcttctacgagcttgactattgttgttcaaacattttaaaacacaatatcaatgccatacatgttaagaagaatgtttgtgatagtttattgggcacaatcttggacacaatgataaatctaaggacactactaatgcaagacatgatttgaagaagttaggagtgagagaatcgttgtggatttatgaagatgatgtaaaaataaaagtagaatctagatgaggccaccaaaaaaaatgatcattgtagatagaaaatgaattgagaatttgtcattgtttagaaagtttgatttcagacccttttttattacttggataatgttagattgtaattaaaatgtttggaactcaatacacacttagctcatttat

SEQ ID NO: 198477 - DNA, 2156 bp, Cannabis indica
acgttccaaacgagctcttaatacacactatactataattataaatttgagattaattagaactatctcgatgctaatatgtattgtaatcccttaaaaaatttccaataaatatcatatatatccattttgttttaacaatattcatatcattttttaagaatagatagagaattaggtgtgagtgtttataaaatagctgatctaatttaatttgcatgatccaatctaatctaattcgtagagtatgaatatccgtacttgtacgaattgggttaaattggaaatttaaaatctgcacttatagggataggatgttgattgacatatatataaaagtaaccgatctaatccaatcaatacatattataataaaaaaaaaattaatacattatatatacaattaatattttaatgtaaagaaaatagtaatttaaaagtctaacacacataatacaattatatttcaataaataatagattaaatatatattccattcttatatataatttttttctacatacaattttaaaaaaattaaacatttctttatacatacaatttttttttcttactttgaatttgttatttgttattttatttattttaatttgttattggagacataaaataacaataatttgttttatattgttgctggttatgtgaatttttttcataaatattaaataatttaatattaaaaagaaactaatctaaaatgaccgcacttttacggattgaattggattagatttgagctattatgcagattaaattggatgaacgcccctaaaattaagagtatgtatattccgaacattttttatgagttttggtaggttccactttattgaaagatggaagacaccaaaacataatggaagatagatatcttccaaacaataatttttttttgtctatcctaaagacaagatgctatggaaaaactaaacaataaagctaatttaaaatctgtaattgtaaaagtattcatcttgctttcttcatcacaccaaaagaataggtcacataaactattaaataaattggtacgtaacaaacttttaagaaagatgtttgttgagattaaactcacttacttttaagaaagatgcatgttgagattaaactcacttaattctgtcaaaggtctatcttttcactcatcaaacgaatttaaagaaagttgttgttagttataacagttagctttgacaccaacttaaagagagccccactaatatatttaaagagaagtacctctactccttcaaggagaaatctccaaggctcatatatacttcatatttcagagtcaagtttagagagagagtctaagatcacaatgaatgtgtgtgtagagggatataatgaaagtatcactcttgaagtgatttatctcattgtgagatatttctttgtaattgttcattgtgttgagttgtattcttggacatatcttattgtatactactaactattcaatcaataaagatacacgattcattcattctcgaactaagtttattcttgcctaatttcatctaagttctagtttttaattttgtgattggttctagttgtgtttgtgttcttgaacatcactactattgtaacagtagtgttttgagggtgatcattcaccacaatgtgaaaactaggaataataattagaacttatctcatataaatctttggatatttgcataactaagtgagagaaatgaatacacctgtaggaaattaaatgcagcccgaaactgcccctacacccaacaccccaacagtcaaatactaggggcaaaacccactttctcccttggtgcggatcacaagggaatattcctttctcaaatccggatatgcccttttgaatattagatctcctttttcaaaaccctattgcatttaatagcaatataaaaccattcttttctccttcaaagaaaacctagctgccacaattaattttcttcacagtcggcctccttcatcttctctccttcttctcctttctttgaacagcaaaacaacttccttcaagcttttgaaaaaacgcagcagccaagtttacttcttttctttcttttcttcttgctgcaacccagccaagcctctaatcttcttcttcttcttcgagctacagcagtag

SEQ ID NO: 198478 - DNA, 1996 bp, Cannabis indica
gagaagtggtctggccaaagtgtgagtaaagcaaaaagtggtgtggttttttccccaaacactagtgcccgatgtaaggaggacattacgaacctgctgggaatggggtggcttaaacaatcggagaagtacttgggaaacccattcttcttttcggctaacaagaggaaggattatcactttttgaaggagaagattcttgggcatttggagggctggaaagctaggcatttgtctcaggcgggcagaactgttctggtgaattcggtgcttcagagtatccctaactatttcatggccaccatttgaatcccctcttcgctttgtgaggaacttgatagtctcctagcaaggttttggtgtgttggcaacatggaaaaaaagaattattttgctactaaaaggtggaacgatatctgtcaacctaagagatgtggagggctgggggtgagaaggttcaaggacatgaattctgctttactggcaaaattattttggatggttttacaggaaatggataaaccgtgggtgaaggttatgttggagaaatactgccacaattccaacccttggatagtggagaaacagagtagggactcttggtgctggaagagtattctagatacgagaaaggtgtgtcttgacaatgctggtattctaattgcggatggagatagcgaaatttgggacaggccgtggattccggaagtggatttgcaggctataaaggacagttttcactatgttaacaaccaagctctatggaagtttagagacttgttcactgagaattcttgctgctggaatgtgaatctgattaggaaatgttttgatgaccacattgcctctgaaattctgaaaattcaccctattcaagaagggagggacattgtattctggaaggttgctaagtcgggaaatttcagtgttaaaagtgcttattgggctggccaggtgcataggttcaaggtgccttctggcttctggggtagattctggaaaagcaagatccatccaaggctgagactattctgttggagacttttctccaacatgctttcaacgggggaaaattgagcttttggagttatgacccttatctctgccccttctgcttgtctgctgctgaaaatggcctgcatttgttctgccagtgccctgttactaggggaatctggtttttgagagggataagccttgattgtttcgggtggactaacttggaggagttcgggagatggtggagaaatttaaaggattctgagatccaaaccttcattgcctgcacctgtgatactgtgtggaagtggagaaatgagatggtattcaaggaaaaacctttgaatgttaacttacttataagagattgcttggataggtgcaacgaataattgagaatatggaacagctgcgaggatcctgaggcaagggagagttccttggatatccctgaggaacccccggacgaccactggcgttgctccgtggatgcttctgtggctggtggcagggcggggtttgctgtcttccatagacaacaagagctggagaagtcctggttggcagtgggagttgggaatgtcgagggtgtccttgaaggtgaactaagggccattgagttggccttagagtctggtttgaagcaccaggtggtgaaaatctgggttgaaaccgattcgaaggctgctgctctagcttttaaaaatgccaggattccttatgggtggagagtcttccccttgttttctaagtgtatgaacctttgtgagcgttttgagtctgtgattgtcacttatgtgcctaggacttctaatgtgcacgcggattcccttgctagatgggctagagaattcaaattgcgctgtgtcgggtttgctaaggggaatggccccctgttgtggtcactagttgtgttgtttttcaataaaaaggttctaattatcaaaaaaaaaaaaaaaactataagttagtaagttgtaagtagagagagtatatt

SEQ ID NO: 198479 - DNA, 1975 bp, Cannabis indica
caagcagctaaattgcatttttgaaaagttgctcaagtttgagtgattggggcattttgcatatctctcggaagtgtaactacatggctcataatatcgcacaatgggcagttgcctcgaagtctgaaggctttttcaatccctttgatttagatgtgacagtgttagatgattttgagtgagaatcaagttatggttaacatctttttgagtgttctgtttggtgatgattgttttttattttttctactaatgtactatgttttactttgtctactttcctgctatttgtaagttgattgttgtgggcttctgccctttaatggtatggtgtcattggcacccccttctcataaaaaaaaataatgtgagattattacaaaaagtaagcttagttgaataatatattttcttagtatcaagaccaatcttgagttgaaatggaccataggcaaaaaaaaaaaattgggcctttattataaagataaattgtatttttaaaaattattaaagaaatatgtatattttttaaaaggtattctttttatttgggcctctaaaatgagtgggccttaggcgcaggcctagtccaccttaacctagggtcggtcctgcttagtacattaacatactactttaaaaaaaattagaaaaatataaagaaaaatttatagaaagccacctacacctcttatatgttcttttatatttaaagccacctacacctttatgtgttttcttaagtttgagttagagtaagaaaaataaaagtagtgttaaatataaatatatttttgttttagtgtgaaaatagattttttttaatcaaatagtaaaattaggtaaaaaaattaatttttctttattattaatcttatttttaaatttaatatttaattataatatgcttaagtgttacacttacatatctatatatctattagcaaaaagctacgtgcgagacacgtatactaaattttatgttaattttttttctacgttatttaaaagtgatacaattaaaaattaaaggaaaaatattattaattattaagtgagattattattatgtgtatctaaatattatagtttataattttgacaattaaaagtaaatactgcaatatattaatgtttaataaagcttgataatttaaatatgctcttaaattctggaacttaacataattaccacccataagttagaaatttatcacacattttttctcaaacaataattaaaaaaaaacaaacaaaacaatttttgcattgaagaattaccttctgtgagcacgagcaatgaaaagcttgacatccaaacttatttctataagatactattctaattcttacagaatagttatatctgtcaaagttacaagttttggagcaaagaatttaccaaattcacatcaatcattggaacatctgaactcttacagtttatcacaagaagctgataactctaggaattagagttatttttacattttttttaactaaaattggcttagttcttaagtttttaattaatttagtaagttttgaatttattggctttattataattttatatgtttttgtgtgtttttataattattttattataatatgttatgtggtatttatttttagtttttaggtgtatttggtagaaaaagtatgaattaaattgaagaacaagtgaagaatgaaaaatcagattagcctttatggaagccccactctcagtcaaagtcagcatccatccgagtcgtccatttgatgatcagagggtccagatggcgagtggatctcaccccggcagcaggagcgtgagctccccttctttttctctcagcctgcacgtgtgggacccacacgcaggagctggtctccctcctcctcccgcctcttcggctttcccagccaaccagccagcgccacacgcaatttcgtcagcttctcctcctatcccagctcgccagctgccacc

SEQ ID NO: 198480 - DNA, 1399 bp, Cannabis indica
tttggcgccagttcctttgatgtcgttacgaattagcgccgacccacttcgcactggtaatattcaaatccctaagcccgctgtttgtttcccgagaaaatttcagtagaaaagaaaatattgctaatcctagaagttagatagagtagagactctagagagatgaagttcaaggcgtttttgactgagaatggtgtttgcctactggaaaagaggtttttaccagctcttgacaagatggggaagatttgccatctctacctcaccagagaccacgctatattcctccataatcttctcaatggcgacggaattcaatccatcgctcaattccgtaaagaagctctcttcgacgattaccgtatctccagccagaacgaggatcgaatcgccttctctatcgacgtttcgctcttccaccgagctcttcgtagtagtgtcagcatctgtacagagttcggaactgggccaacggcgaatcgcctccagattaaactcgtaaagaaactaccagtgaattcgacccagccgatgccattcctcaccttcgaaaccaagggattcaaatcggcggtgattcaagatgttccgatctcgaaacctttgtctagagctcaacttctcgagcttcaaacggctctcgacatggcacaggatttgcctcagactcttgttcaggtacctgatatgaatcagttgcagagtttcgtggatcgaatgaagcacttaggggaattgcttaatgtctccatcaccaaatatggggatttacatgtacagatttcaaggactctaatcacgctgggagctgagtttcggaaattgtttgttataggagctcaggcagaggctccagctgaggatcgaaatctgagtgctcaaactcgatcctctagagctattgaaagaggagacggtcaatcagttcaagttagtgtgaaacattttgctaaaagcctttgctaccacttggccaaaccagattgtgctttctatggtattgctcctcaaggtgcttgcttgacagtgatcttccagttcttcattcctggttcacgtcaaatggacaagtcaatcagcttgcattgcagacttcctgtgcttgacccaggtaccacttgaagcttcttcggattttggaccagttgtggttaaccatcagtgtaagacaactgctactactattagatattataattgtcagtatatatattggctctgttcttgtgatgtattagatttctagtattacccttataaatgtaatatttaccgaaaaaaaaaacccttataaatataattgctttcttgattagtggtttgtgtaacaagagtgctctaatgagttatataatctgatgatggtagaattttgttaatgagttatataatctgatta

SEQ ID NO: 198481 - DNA, 818 bp, Cannabis indica
taatttaaaagttccaacaacctttattatactaatgataatatatccaaaaagctattaacatgtcaaatttcaacttaaaaaaagacgtgagtttaaaaatttccccaaaatactctatgagactgatatttaggcaagaccgacaagttaacaataaacttactaaaataatattccttaatttgaacattgataccacacaaataccttttattttatttgtttatgtaaacaacaaatatgaaaaaagaaaaaggacataatcttcatgagtaacgtggataagctgatattttaagaattggctacgaacagaaaggacaacaaaaaaactgaaatgatacctttttatgtattttataaactaaagttctctaaaaaaaatatataataataaagaaaacactaaagtattgtatttaagattctcttaatacatgagattaatacagttgcaatttatgaatactcgctagattttctgataccacacgagttcaaaagatacgagcacgattaaagataaaaaaaatatatgtttaggtatagtactgtacgacactataaattgacatgataccgcacgaaaagcacaacacggcatgagaagcacgaaaaactaaacacgtaaacacaaatagactagcctgaaaagtacgacacacgacaagcccaaaaaacacgtcacaacatattaaacaaccctaaaatttattttttaataataaatatgtatttatcaattataaataaattaaaataataataaaacttaaatttaatagtaaatattataattctataatatttttttt

SEQ ID NO: 198482 - DNA, 705 bp, Cannabis indica
tttttttttttattgaaaataaataaaatctaattcagaagcaattgctacattttttccattagaaaatccataaatccaagaaaacatggtttggagaaaaagacaatataagtgtggtgacttcaacagaagaaacaactatattgcctattcctcatgcttattcaactccttcaatagaaaaggtggaattaagtgagattgagaatgaagagagcaagaagtcttactctatggccccaattgcagaggtggctgtttttgctgatcaagatgttgccgaggttgtttgccttagtggtttgccttggtattatggattatcaaaagaggagattgcagctatcaagattcagaccacttataggagatacatggtatgtcacatgtcttagtttattaaagcatcttcaatgaagtgataaaatagtggtgtagtggtatattttaatatttttgagaaaattgtagttgtttagtttcataatttaaaaactgttttctgtaaactaataatgattgtttggcaaaatcttttaaaaattgaattttaaaaaattagaaaacaaaaaatatcaaaatgttgtttttaaatttttaaaacgattttttttttgtctaacatatcatactgtatatttttgctcacatactcggatcctaaactcagaaccatactcgaactcgaacccgaataggttc

SEQ ID NO: 198483 - DNA, 863 bp, Cannabis indica
tcgggtttggatgtgggggacaatttgggattgagaaaatcatggcaatcagaggcgatggggtttgcttaattagatttaagtattcccaaaaaaatgagaaaaaattagaacgaagatgagatccatggtggtttcgccactaaatctgacggaagaagaagaggccaactgtagatgaatactgttgctgtggatggatcatggggggtggggtgaggaacagggagtggttaaaaagaaaaagaaaaagaaatcatttttaaattatttatttatttatttagaccaataatatttcgacacgctacaatttttaaaaaataaacggctcaattaaaattaggactaacagacaaataaaaagtatgaccttgaggactattgtcgctatttctgaaagttggggactaatatgcatcaaagtgacctttttgggaacatctaccgcaaattttcctaatcaaaacttcaaataatcttcaaaatctaaatatcacaaaaaggagggatatctcatctctccaaataacttcttagttcatccaaagacgattcttttgccacaatggttgtccaatatagaggcaccatttttttgagggtggatctagactagaggcacgtttaatgctacgaaacattggcggtaatacttccaagctacatatttaattatacttaaccccacaaacttaatttttggtggtaaaactctttaaattcctattttgttttgattttgtacttttccatcgaaaagattctgttaagtgctaacttgaattgccaagtgtacacgtagcaaattttgagtggtccacacaatattaaataagagaattattccatatacaattttt

SEQ ID NO: 198484 - DNA, 1109 bp, Cannabis indica
ataacatttgcccccaagtccttgtgtaaacacttgtccggatggggacttagtcttcgctcaaaaggcaccacatgtttaactgccatgtggctgttttggcaaagtatatatgcaagggtgaacggtcaacttttcgtcccttaagctatcccttaggagtcagctatcataatgatacctttgtgtcataaattgtggggagacatgctgacagctgcacactttcgcaggttttaatcttttaggcttttctcttccctctatgctaattttataaaaattaacttcccatttaatgtttttttttggagaaaagatcatttcaaagcctatataaaggtctctcccttttcactccagtttccactttcttcttccttaagaaaaactagaaattttttaaaatcttcaagaatgccatacttttgttgctgccatggagctttttgtcgtgtggactaaaaatcagagagtcttgattcaccattctactcaatgggtaagttctctaaaactcctctctttaaaagcttttttcatttttatttttatgccattgttggaggtagaaacctccatgtcatggttttaggaatatccaccctccgtggattgtatggttgcactaggatcgatgaatgtaggggttctgcctaaaaaaggttgaatctttctgctgacctcagattcggccaaccaatatcagagtcgtatttaatgttgatgcttgtcacgtgttacacaataacaataataaagtaaatgaacataagattttatagaggttcgacccctttagttagcaagtaatgacctactccccttttagttgtattgatacttagagataatactactcagatcactatagtgatgagatctgaagtagctctctaaaggttacaatgtaggaattagagtttgcaaatctcaagtatgagtatagcaagtgggcgtgtgagagagagagatgagttatcagacttagagctagggtttccgacttgcacttaatgacttcagacttagggttttagggtttgattaaggctctttaagagatcttacacccttaaaatccttaaaaaaatgtaaaataaactgtt

SEQ ID NO: 198485 - DNA, 1965 bp, Cannabis indica
gaggatgtaaaccatcgataaatttgagacgctaaggaggatgaagtgatgttgtacatgatacaagctcgtcaaatttttggttgactgtggatctaggagagttaattctgcaaccttcttaagtggcgacaataattgatactacacaaaatttaaatgttaatcaagctgataaaaatattgtagatgacgatgtcaacaatgcaatagatgataaaggtgacgagttgctagttgatcgatgtgaagacaatattatttctcaaaatgatgagagtgatagtgactattagttcaacttatgctttaaatattttgtagtaattacataaattgtgtatctgatgatgttgattttgattatgatatttaatttagactaattataatttttgaaaatttacatgcatactaatttagtgatataatttttcattttaagagtcataatatcagctgatatagcctcttatcatggcggggacggtggtggtttagatccctcaaatcctagtagggtaccctcaacttgcgaggtatctacaccgctaaaagaaaaaggtcgtggtgctgctagtaaaatagtattggaaactcaaaggtaggcaaatcagagaccattgccatttacgcttgatcatgcaatgggaaaagtttttagcttggagaaccaagattttatctgcgagttgggtgttgaagtgagtattaaggaattacttaaattttattgatatacctcaacatttcaagcaacaagttatgcaaagaataaaggtaaagaattgatggtcgaaatattttttatttataattaatcgaacacccaactaatgattaatttctttaaatgtagtattatcatgatattgatggtcacccagatcccaaaaaagtgatgaagactctctattataagatgggcaaaagatatcgagaaagaaaaaatattaggcatacttactttcaaaaatattatggaggtaaccctcgtaatatagaggtggttatcaatgctaagccttagcatgtaaaaagagagcattggaaagaaattattgataagttttttagtccaaaatttatagagtgatccaatcaaaataagaaaaatagaaaacaaatgaagtacccatcaactcaaggcacaaaattaatggcaactcagcgttacaaatttggaaatgaattatcatttcatttaacaaaattatattttaaacacactaacactaatataaatacagaaggagccagatcaatatgtcctccatgcttgaaaagatagtattactagagaaaaggataaaacttaagtcaataacgctgctaaagaaaaataggtgacttacaataatattttattttttttcttaaaattatgacattgttgaattttaaacatttttttatctatagttaggatgaattgacccatgaaatggaggaagaaattgccagaagtagacttgaaagccaatctggcagtaattctagatcctcgaagttgtcgcctgacatcaagtacaaggttatgtgtaaggtaattagatagaggagtgactatatatgcgaagttggttagagcttagaaaagaaggaaaaaatttggcagtatctttcagatcatctaatgatttttaggatttgagagagaaacttaaccaatctaagatctaaattaattattttattaatatttattttagtaattttaaataaataaattctaaaattattttatttaattaatattatgaataaaaatagaatattaattattcccataataataaataattattaaagattataatccaaaaaaaaattaaaattatttatgtgaaattatgactttttaccagcgcaattagtgagatgcattcgtaaaagtgacttttactaaagcattacttttgccaacgcaaaaatacactggcaaaaaatattaaggaaaggggg

SEQ ID NO: 198486 - DNA, 696 bp, Cannabis indica
gtcctttacgactacaaactgcttctggaacattgactgcatatcatttcagttttggatagagccagacgataatcttttccaccagtcctcgacaaatttggacaacgtcaatgaaaaatacgaacatttcccatcttcactgacttgtgccacttgcatcagctgattgtacttggaaaggtgggccttgggtgtccattttgcctccgtacgactccatttatgatattcagaaattttttggcagttatgcctcaatgattctcttcacacatagttctggagcctcatcttctgagtcagatacgactccacatttcttccaggccaaatggtctgtgagttttgttaatgcaactatgtgatcttttagccacctaatatgatcatctgggagctcacgtccatggattctgtcgttgatattgttctagagatcttctccatgaggtctagccttttcacctcttgctttttccttattttgcatttagacggtccctgaggtccgtcgttaacattctgtctttttgggtctagatcttccacaggtatactctggttaacagaattgctgaaatagtttttccatcgctaaacattgggcctttatacctaaatacccaacctattgttctgcacgactctaccatgcagattgattggttggcctagccctagggctcgatcatc

SEQ ID NO: 198487 - DNA, 1236 bp, Cannabis indica
ttgaagagggcgtttgcttcgctaagaaagactataatttggcgaagcacccagaaattgatgtaccaaatctacaagttattaagctcatgcagagctttaagtcgaaggagtatgtccgggagacctttgcctggatgcactactactggtacttgaccaatgatggtattgagtttcttaggaactaccttaatcttccttctgagattgtccctgctactctgaagaagcaggccaagcccgctggaaggcctttgggtggtggcgatcgcccacggtaaataactcttgcctcctttggttttcagttttgctttgtttaatattttagctgcatttatatttttgatgtatttagatttttgtttttgaaaaccagaacaaacttcattaatatcaattggaatctgaatacgaaagaaacagtaacagagattcatataattagatttaagttttagatttgcatacttctctaataggggatgttagtgttttggttggtttatattgttgggctcaaatttgatttaagttttgttttggttgttgtcaatcagtggcccacccaggtttgatggagaacgcaaattcggtggtgacagagatggttaccgtggaggtcctcgtggtcctcccggtgagtttggtggtgacaaaagtggagctcctgctgattacagaccttcatttggggtaagtttacttgttgcataattgcattgcattgtcttgttgtttctgtttagtttcttttatagatgttattactgagtagtaattagttcacttcaaatggcaatatatgtacatttcaattggtggaaatttgattacattagcctttatatttgtataatggcttttacttaatgaaattttcttctacgtttggattgatttaggtttgtttgatgtaaggtttttattagattcaaggatttatttttgttattgtttgtttggttattgggtgtttgaattgaagtaatgagtttgttattactggttactgtcctagcacaactgttgcttgtttttcttttagctatatgaattgaaataatgtactattcttctctattggctttagtgtagattctcattcgtgtttcgaaacaaatttgcagggtgctggaagacctggtttcggtcgtggtgctggtggttttggtgcagggccagctacctctgaacaatagaaatttcatctccggtctttgtaagcttcaa

SEQ ID NO: 198488 - DNA, 1418 bp, Cannabis indica
tatttttgaaaaataatttcaaagaacacgaccaaagaacatgaaactcaaatggattgagagcttgggagattcattaataaatgagattagctaggatatagtttttgatacaaatagaatataatttacaccaccagactgtgctagcaacaactataaaacaaatttagtaagagaatcagttactacattaacaattttggagcaatgactaaaacacacaacattgaaattaatgtttacataaagctttaatgtcatctagaattatccaaaaataaatctaacactaaagaattattaagtttatgaagcaagcttttgcaatcatattcgaactgaatattatgtatgccaaaagtgagacattgcatgcccatttcgaatagcaagggcttcagcctactctcatgggagaacactgtcgaccttccaagccgccaacgcgactgcctccccatctaagccacgaaccaccattcctaaaccacaagaacctccaacggagtcaatggttgcgtctgagttgactttgagctcaccgtgagcaggggaagccaatgaggaggagaaccaacactgaatttcgctggttatcataataggccttgagaaattagtccctcatggaccaactaactcccgtaggatgatgattttatcatgtacttgcttgtttcttcgatactaaatacgccactaagtgattaaaaccgattcaatttcatgttgaggaagttgttgtacgtacaatactgtaaatgaaaccatgaatatcactaacaatgacagacgagtcaccaagcttaaaagtgcacaattttcaaattgaaacaaaattattacaaccccaaagagcatagtgggtagtttccaaatcactaaagcagaggccatgattatgaagattaatcatggtaagaatccacttagatgataatcttcaaataaaaatttttactttcaagggcattttaaaaaatattgaatattggatttggattatttagttttatattttagttaactcaatcaattattagaaaaaaaatgaattgagcataatagtgtttggtgtattaaattgagcattatagtgttgatgatctcttaatttaaatggctaatggcatggtccccaatccatggttgttgtcgagtcaatatttataggatctgtttggcatgtagaaattggattaaattaaattaaataattttactagttcagtgtttggcaataataaagaataaaaaatttaatttacagatttaccatcaaaattttatttatcaaaattagtgtaaacatataatattgagttatcatagatagtctattaaaattttaaaatgatattaattaaaaaataaatatttgcatctaagaaatatattatagtactttataggat

SEQ ID NO: 198489 - DNA, 4079 bp, Cannabis indica
attaataaataaatcttaaaatctctcttttttttcacaattaagtcattgtttagtgaaaatttataaataagacatagtctaattttaaaattataattgattaattgagtcttacaagcaatattatttcaattagtgtgaggaccattgatctatataatcaagcttctaataagtagttttagaatttaccaagtaaattctttaacttattaatttcttcttacaccactatagagttggaattgcactcttaattatgtagagcgctgtatatgtttcacgatatagatacgctataaattatctattgttttaattctaataattaatgatcttctatagatgatttatattgagtatgtacaaatttactgctacattattcaatgtattttatatttaaaacacttagctacctataaataatattttagtaaattaatataattattgaaatgagtacttaatcatttatctctattaaaccaagctcgaagaaaatcatcattttacttctatgttcaaatagaagctatagattctgtatttatgattagcgctcctactcaattgaactagcatgtccttaatccatattcacgagaaaatccattggtcaacttcaacaaacagattgaagaacataaataatacaattgaacaagaatttaaccatcttagtattgagatcatttgatctaagatcaattaggtgatattgaattaactaaatattacggtatccctttcccttgagtagaagatgaatgctaccaaaattttgacatgttttgctctagatctctactcacatccaaaggtaataaaaacacacatatcatatcgtaggagtgattgagccaccatttttatcaacccatccttccgtacgaaagaaagaagcttcacatcccacccgtgcagccttttacaaatctgatccttcaaaaaacctagaatcaccgatttatttcctcccatcatgtttggcaacccaaaatacatactattctcatcatcttcatgaataccaagaatctgacataagtgatcgttcgccacctgaggagtgtcagtacttaaataaagaagacgacttggtcaaattaactagttcactagatagaacctttaataaatgcaataatgacatcacattctgtgtttcctcaaacaacacatgagtcacattaagagcaatgtgagccacctgaatcccatgaagacacctctattcttcataataattaatcatttcctagaaaccctttgcataaagaatacagttgtaaggtgaaatctgatcaccttgacgaatacccctcgtaggattaaagggacccatctctatacaaccatgactgatcttatacataacctgtaacgccctaatgattaggcatgctacaatactcttttgattattatgcactcctttactaatcaaagaaatttctcaaaaattgtgataagataaaacatttttgaataatattaaactttaataactatagttttatgaccaaagaaatatgtctggatcccactttttaaacttgtttacatgttcaaaataaactttataactatgtcgcacatcgactacaaaataagcctatattatcccgagaccgaactttccaggttacaccatcttgacaagtacaatcaccttcaagctccggacttattgctgctcagccttagccttttctttacctacacatgacattgtatttaggcgcccatacacctaatcacaaggcttaacaaaggattaagaacgttcttaacaaaagtgcgacttttgtaccacatgcactacgtaccgctattgtactagtgttggtagggtttaaatcgtaccccgagtaccgttaagtgttgtatcacattcactacgtacccaattgtactagtgttggtaacaccgaatcgtactcttaaatatcatgtgctatactacatgcactcagtaccctttcgtactagtgttggtagtatataaatcatataacagcatgtatatacacatatacatatatacatacatatatattctatgctattaatataacaacatgcatataatatacatacatatatacatatatattctatgctaatcttacctcgtttccaaatttaaatgttctggtcgacctgaatgaaaaatcacgcgctgaacagaggccttatgtcgcattcacgtaaaatggataaataaccttctaacatcttttcagggttctaaacttgaaactaaaagtttttctatctataaaaagcatgggaaagccctaggtattgagaaaacacgagaaaaacaatgaaacgggaaacctgccagcaaaatggttggtcgttttttgaaaaatgacaggtcgtttttctgggtctgcaccagtaaaaatgctagaaaaatgctgggccgtttctgtagaaacggcctgccgtttttcactgcagaaaaacaaaatttccccaattcaaaacaaaacaaccccaaatttttcaaaactctccaaaacacctataaacatcaatataaaccaaatccaagcaacaaaaccaggtataactcgaaattacacaatttaccattgttgaaccaagtttaagttcttgaactcaaacttggtcaacaccacatttaacccataaatctatccctaataagctacaaacaacttaaataaaactcagaaaacaacctaagatcagctagggttaagatagaactaattactaaaacttgcacgctcaaccaaattaaaaagcttcttaagttcaaagagaaaagattctaggatttaccttttattactccttcaattaatgttaagaatcactaaaaatctatgagaaatgatgaaaaattcccctgctttcctttggtttcttggagccgaagtggagagagaggacaaaggatgaattgatttttcttatgattttcctaaaatgaattaatctaatattactttgctaaataatgtttagtggaataatccacaacttcagtaaaaacaaaactaactccttttaggcaaaatacctaaaatgccctcacataataacctaaatggtaaaatggcttagggataaaatggtccaaaataataaacccgcctaatcctgatatttcaagtatcatcttacgaacatctcgctagtaaaaggttctaaactaacccatgtgactcagttggccatccgtcgtattttccatcatcgccgagcaaatcataagaattataaattttgcatataatctaaataatacacttagagtttaataaaattttcaaaatcaaattacaactctaatgcctatttatgaaaatagggctcacaataaataaaaaattataaaatgtcaataattaatgctaattgcctttattaatccataatataatcatgcagtcattacaattatcccccattaaaaggattttgtcctcaaaatctaacctgaataactctagatattgagccctcatgtcaaactctaactcccaggtggcttcttccaccttggtattcttccagagtttgactaaagcaatggtctgttccaaagaactttttccttcctatcggggatttgaaccgatcgttcttcataggatagatctagttgcagttctaggtctttttaactcaagatatgagtcagttccattagatatttcctcaagatagaaatatggaatacattatgaataggtgacaacgttggtggtaaggctagtcgatacgctacatgcccgactttgtcaagtatctcaaaaggccctatgaacctaaggctcaagttacccttcttcccaaagcgtcttacacctttcatttgtgaaactcacaggataacatggtctcctatctgaaattcagtgtctctacgcttaggatctgaataacttttctacatgctttgtgaagcaagcatacgagcctcgatcttgcctattgcttcactgggctgctgaactaactcaggacctaaatactttctctccctagtctcatcccagtgaatcgggaaacgacatttcttaccgtacaac

SEQ ID NO: 198490 - DNA, 1289 bp, Cannabis indica
ggttgatttgtcaccttgtcccatccaatttcaaagcttcaatggagacacactcattccaatgggaaaggtccacctcccaatcacactgaaagaggaaaccaacatatgcgcctttaagcaatacacctttgtggttgtgaattttcccatagcttacaattctatactaggatgttgagtcttagtctattttagaaccataacttccttcaagcacttgtacatgaagttccattgtgataatgcaagcgttggagtggtcagaggtgactaaagaagtgtaaggagttgttacaatgtgtctgtttggtccatgtttgctctcgaaatagacattcaggaagaagttgaagctgtcagggaggagtatgaagatgaacttgatcccaaagttgggatagaaagaatggtagaaccgctaaaaagatgtggaaggagttataatttgtgacacagaccccactaaaaccatcaagattggaaaaactttacatccaacagtgagagaaaagattatgtctacggtcaagaagaatcaagatgtgctagaatgaagccattctaacatgatgaggattaaacctaacacaaatttccatgccctgaacatcaatgaaagtgtaatacccatctacaagaagagaagatcattagatcaggtgggggcggaagtcgtaaaggcagaagttgataagttgacttctaatggcttcctccaggagtcattgtatctagcttggttggcaaatctagttttggtctaaaagccaaatgacccctggacgatgtgcatagacttcacagacctcaacaaggcctactgaaaagactatttttcccttctacggattgatcaaatggtagatgccacatcagggtatgatttgttgagtttcatggatgcctactccggctacaaccagatcaagaacacaccagcttccagacggataaaggtgtgtactattatgtggtaatgccattcaaattgaacatttcagagccacatatcaatggttggtcaataagatgttcaaggatcaacttaggaggaacatgaaggtatatatagataacatacatcataaaatccaaaacatccacagagcatggtgataatctcgaggaggccttcatagtcatttggaagtatggcatgaaacttaacccaaaaagtgcacattaagagtttccttcgggaagtttttaggtttcatagtcagctcctgaggaattgaaactaacctggagaagattaaagccttcatggatatgccttctcccaa

SEQ ID NO: 198491 - DNA, 2475 bp, Cannabis indica
catcttcagaattttcatgcataaaatcatcttcagtggtgggagcaaaacctacaagatcttggtcatgatccatatcatctgtcacagcctcagagccagcaaaggactgcacagtattataagtctcaatgtgctctggaggcacagaatcatacaaggattgagaaaccgcatccattgattgggatgagttaccaacattatctgccctcccagattgactttcatcagggtgcttagcattaatatcactctttactgcactggaatcagtagaatggacatgttctttactgacaacctccagagccttgataagacatgtaacaactttaggtgagtcaacatggtccaggtccaacactttgagagttcgggtcaatgaaccaactagaccaacatctataaaggtagcagcagcttctgttgatatatatgaaccagtaggtgtacgggcagccaaaacatcattgagcagatcaatgaaagcctgtatgctattgttgggtgacctataaccattacctgagccaacaaagtcaataaaaatgtgaccaatctctgtaaaaacccttttccttgcctcagaagaacgaacacatgctgccactaaaaattgactagctctgcttgccagtttctgcctccaatcaccatcaactcttttttccttttttgtactacgagcatatgggagaaacttaagaaggatgtgatgaaatattccaccagtgcatatggaagtcaaacccttatgatgggaaccccttgatgtgctgacttcagcatctcttcgaagcaaaacatgagcagaggaagcatacatcaataaaatctctgtcagaagcttcaagacaaatacaaccttagcaagagatgcagaagcttccttgttgatggtttctttatcttcagaagcagtagcaattgcttttcctttctcttttcctttaacagcagcaacatcaatgtccatatctgttactaatggattatcaagaggtacatctgtgactatgtcatctttcaagggaggtacataagcgcacacagaatccaaaagaagctcaatcacattgacaaaactctgaggatattttctatgggctttgacactttttatatttgaatcattaactttgccattcccatagccagaactcgctgtatttatattacccaaagcattcttcccatcactaagaatgagtttttctttctccacagatttatccttctctttgcttttatccttgtcacgatccttaataaatcaacgtatggcctttcaccaccatctccacttggcaaacagactgagatgcacgcataaaaaaactcacaggatcacgggaaatggcagaacttaaacttgatagaaaattgcgaggagaaaactcttccattggagtgcctgtttgcagcagcgacaaggctatgccttatctcaaattccatagcctgctgaagtgtttgaggatcttccaagacatgacgaatgattgtagcagcaatattgtcaaaccctggaaagaggctactagttggcagtgatagcagtaaacttaaacctccagcatcaagaaaacaaacagctacagaatgtgttctggtaagagtagcgcatagctgcaaaacagcatgcattgtttcagacggaagctggttcttaatacaagcacatgcaatctcaatcaactgtttctgttccttcatttctatatacttaaaagatactcccaatgcagactgaaacttgttctgcttatcctcatcaatgctaatggacccctgctgaccgctaataccatcctttttcaactgctctggaatttcagaattcaatttttgatcaacctgcaacagccgatcaatagaaagaaaagctgttgtaacccactttggtacttgacacttcaacctacaatctaaatcagtaccagattcccattgagaaagcagatctgaggcaacttttaccaaaccactctttgaggcaatttctcgtgctgccacatcatcttgaaaaattaaagcaagaacatggaaaagtgcagataacatggtgccatttccaacctcagcagtcaaactacactcctttactttgtccacaacaaatgatacaatatttgacctatattgaccatcattttgggaacacatcattgccagcagatctcgaactggaaaagctagaggttccttcatttgcaaaagctttgtgcatgtagataataattcttcaacagggggtagctggaccatctcctcttctagctgaggaacacaatcatctgtatcagcttccttagtgtccgtatcagagttcccaagagacatggcaagtgcacgtgcaagttcatcatcttcttggacctcttctggggagaatagccactccattgccaactcacactatttgatccaacttgtcttaaagcttcttcagctctagacctagaaaacccc

SEQ ID NO: 198492 - DNA, 821 bp, Cannabis indica
aaacatgtatttattattaaacttataaggatgcacacaggacgagaaattaacgaggagtgtccatcccattcccattattcctcatgggagaggagacgggatcccacttacattcaaaaacaaaaaaaaaaatgatcaccatccccgcccgttctccattttgatggaagattcccgccctatttgcaggcctaactctataacataggcgggctaggctcaaaaatacattttttttttttactgattttaaaaaagagattatttcacaaatacacaaaaattacaaaaatacaaaattttaaatatttttccgattttatttaccgattatactattttttatgttgtactcctcttaatttgcgggttatattttattattgttttgatgttatttaaatattatttttacgataattttatgtagttttattattgtttttgtgttgtttatataaaaaatcataaaaatgtaatttttttttttaaaagaaaaaaatagtgattcatgtaatcatacttttaaaaaaaaatactatattttcttctatataagaatctaaattttttttttttcttatggccccgttatattggctgaccctgactatttggatcccccatctgcatggagaaattgtgcatgaattttatatgtatataaaaaataaataaataaaacttaaacacaaaaaatttgttttgaagtacatcttttaatatagtatatttaggtatcaatctcaggtggtctaaatagaatataataaaaaagataacatacttcgccacgtaataaatgcctcataattaaa

SEQ ID NO: 198493 - DNA, 1747 bp, Cannabis indica
agaagaaaatccaagcagtcagcaaccctaactacctaacgtagaaaaggagaagagggtcctcccccatgagctacttatagaggacccaactagataactatccaaaaataataactcccaggagtcattcgttttacatatgaagtcaggaacgatagagaggaaaagcacaaaggagattaatggagaaccaaaaacctgaaggattttggatgtttggaaatttttttctagcatgactactgtagcacgatcaattttatgaaatcctaaattcagaaaacaatggtttgtgatgcctaaacctatgatgataataacacaaatcaagaaccctaatctcatcctaaacaaaaaatgaaaagtttatagcagcaaacccaagaagcacagttcaaagacaaagtaccacatacgtgatgttgaaattgaagatgtcaaactaatcgttgttaggtttgcttgggggacttgattgcacctttcacagagatgagatgttagggagattaacgaattgacttttgcatcaaaatatagattcgtgccttcctcttctggtgtgaaacttatgagcactgggagttgacgatgcggaatttctcgtgcttgaatcgtctatagaagatgaatccagaaatcaactacaccttctagtgtgaacaagaaagattagctctggattttgttctggttttcgaagagcgttgacagagttggaagctttgaagggttttagaagttttaacattaggaaacgaatgaaaatcggtaactggagtttgttaaatgtatttataccaaaaaagggcaatccatgtgagaaggggtggatggcacacgatccaatctccataaacacaagtttaatctgacagtcagggggttccacaattcacgtgcatctctacaattaaggctccacaagatcgaggtgcaaatcaatgatgatgatgccctttttcaatttttgcaccaaaaagtgaacaattgtcaaaatatagccatttctagaaagcgactccttgatgatcgcactcttccaccatcatgtgattgacacgtagatgtactacagccaaagattgaagccacctcctatgatcgagtagcacttagaaattcatgagtttatccctcaacctccacatgtccatattgaaggagtgtagcaagcttccaccatacgcaacattctggaagcttggggataaatgttatccgtgtttctgggagtggacacgtggaatctaggtcaacatctaaggcccatcagtgggtcctttagcaaagataaagtgggtaagcccattaggacaagtccggccagccttactacaaaaaggggtttttacatcggtcaacgcttcagtcaaactagttgaccgacgcaaaagtcaaccctcactttttttttgttcagttgttaaccgatgccaataataactaatttgcgtcaattaatattctgacactaaaacatatacaaacgctaaagatgattttttttaaaaaaaatgtgggctcaaatttgcgtcgattttgctcagatgcatcatttagcgttggttgaagggttttgcattggctataaatctatgaaaaattcgcattagttcataaccaaagctaaattacataaaaaaaccaaaatagggcttcgacccatcttaaaaaaaacctacttatataccccaacttatataaataaccctaatttcttttcacacacacacacacacac

SEQ ID NO: 198494 - DNA, 852 bp, Cannabis indica
caaaagtgtacacgtaagtagttcatgttgacagttaattgtaaaaagtagatcatgacaacttaaatttgctaaggtttagtagcaaaaaaaatttacataaaacaatattttttgtaaaatttttatatttttactttaaaagatttttttttataattttagggtgttataaataaataagaaaattatattaaaataatatataaataataaaaaattaataataatacaatataaaaatacagtatttttttaaataaaattataaaaatatttaaaattttataaactgtattttttataattttattatgtatttgtgatataataataatgaaaaaacttatgtcaaaagagtttaaaatataattcaaaaaaaaaaagtaaaatataagtgtgagacgaggcatctctctaagaaccctattctcaattttcttctcataaacactaatctcatcgtgatgctcttctctctctgcatctcgctcattactttgaccatttggtatgcaatggcttagattatttctattatgtacccacaaaatgttcttcttcaatacttcattttaaaaaaaaaatatatattaatttggggatttttcagtaattttagtgttcttgttctatgctttcgttagtaactggctgaggtttttactcaacctaatcagagtccaattctctcttttgacccaaaatacagatcataaggtggtaagtggtgagcaagtaactcaggaaaatcagaaatgagtccttctccaactctgctcaattcaaggtataacaataatatattctcttatattattatcttttcttacatttgggttctttaaaatt

SEQ ID NO: 198495 - DNA, 542 bp, Cannabis indica
aaaagtttgatgtgtaaattgttaaggaatattttatttattttgtatgacccatgagaaattgatacttaatttgtattatttaagtctaaatttgcatagaaatatattaatttagtcttgagagctcataatatataagaaattatatgttttggttgataaaatttaattactaatacattcttccatgacatttacattaaatttgtattctaagagaatttaattgttctagctcatcacttttcccctttactttcttgttatatttactttattatttagtgctggtttaattcaaatcaactctttattgttttacctaaattgttagtattaatttttgtataattgattgttaatcaattcatgtggagagtggagagatactcatacttatcactttatctaattttaacacaacaacaattcaattctagtaaaagttaatagccaaatttttgactttcccctcaactttttcatttttctcattctcatttcacttaaataataagtaactttagtctaaagtaatt

SEQ ID NO: 198496 - DNA, 1294 bp, Cannabis indica
gggaaaagtttggtaccttttggtttgagaagctcaacaagtacacgtttaagtttaacaatccaagaggagatgctctcctaaacagatgtattttttttttttttttttaaaaaagttaattttataaaatttataaaaaaccgtttcaatattttgttatttaccatgtaaaaaattgtttacaaaaattataattactaaaatattatattattacaattatttttttttttttttggcagaaaaataaaccctatatttaagattatatttccttggtatttttgtaattgttttctaaattttaggcgttttcaaaaatctccccttctaaattaccattttactttgaaatattctattttaaaatgaatatagcttcaaaatataagagtttattatagaatcttctaataaacgatgcaactaatgtaaaggaaaatttgcttaagattgttataaagcatagaatggtctatatatttcaagttttattatgtgacatgtttatcatggcaaatttgaataatattaaataacaaattcttttagtacagatttgtatcttgacaaatggagttggtttgggtaaggagtttgaggtccagtgggccaaggctaaaagcctaaaagttgctgttgggcttgggcttgaattttaacctacgaaagtcttcttggttgaataggtagccaaggcttcttttctttttcttctctataatataatattctttacatttttttttttgaaaagtattctttacattgtaccaacacaaaatttgttacttttattccatttacaaataagagttctaaatgtaattaagaaaagggataattacaaaaaaaaaaaaatacaaaaatacggtttgtactgagttttcaacatttttacggtttttagattttatttacataacatatgatcggcgtatttttatgttgtattcttgttattttattgttaattttttgttatttgtatatcattttttttatgttgctttgttgttattttgatgtagttttcttgtcactttcatttaattttcttgtatttttataaaataccgtaaaaatataaaaaaaagaaaactttcaacgtataaatataaatttattataaaaattaatatttcatgtaattatcccttaagaaaaattacaaaaaatgacctaaaaatatgacatcatttagtccaatatcaccatttttaaacttgtactaatccttttttaatattaattactgattttttatgtttcatgtgacacttcatataaa

SEQ ID NO: 198497 - DNA, 1714 bp, Cannabis indica
aggttgtttacaaggtgtgatctgatcagtaatatatacatacaaatatatatatatatatatacatgtgttgttaggactaattaagaacttgtttgtcctccctctctttgtttgttttagtagaacttataatcttgtagaggtcgggattattatgtatctccttttcgctttttattttacttacgggagtgaatgtatacttgtttatgatgttattaatatacacaaagtaatgtatgtgttaagctttttctttattacctctttgtatgtgtagaatatgtataaaaatatttaagagcactgcaatatattgaagttgaagctgtgaaagaatcagaaatgatgacatccgagtatacaaaatgaataaaaaatcttgaatcattatatcacctaattaagcatacaattttcgaaacgagattcactagtttatgtatataacttttaaatttcatatatatatatatagtaatgttggaaagaagagaacgaaagagaaagagagaattgaacagatttctcattattacagaaatgagcaaaagctctgtttatatacaagataagtattctttccaaaaaaaaaatatacaagataagtaaatataacaaataaagagcagctgtcaaaagttataacataactaccataacagaatggaaaacagtctaactaacatcctaactaacaccccccgtaaattgagctgggataaggaagccaagctcagtttatctctcaacagagcaaatcttggtgtagataaaacttttgttagaatgtcagctatttgatcttgagctggtgtgtgtttgacaaagagttgtcgattgataatccgttcacgcacaaaatacaagtacaactctatgtgttttgttcatgaataaagtacgggattggcagacattaagaccgtactttggttatcacaccatattgtaggagttgggagcttagagagaccaacttcagctaataaggattgcagccatacgagttcagctgtggcattagctaagctcctgtattcagcttctgtactagacctggagacagttttctgtttcttggaactccacgatacaagattagaacaagaaataagcagaaaccagaggtggatcttcgatcataaggatcggaggctctatccgcatcacaaaatccaataagattgagattggagcaaggcttgatgtgcagaccataatccaaagtccctttgagatacctaagaatctttttgacaaccttcaaatgtgattccaagggattatgcataaattgagagactttgtttactgcatatgctatctcaggtctagttataacagcatattgtagagcacctacaatacttatatactgatatggatcagcaacagggtcactcccatacactgataatttttcaccacctgtcattggtgttggaaaagaattggcaaattccattttgcttctgcataagaggtcagtaatgtatttcctttgacacatgtgaaggccactgtcaagatattgaatttgaatgccaaggaagtaatcaagaggaccaagatccttcaatgcaaaagtagcattgagatccgaaatgagactagtgattgctgaagtggaactgcctgtaagaatgatatcattaacataaaccaatacaaaggttgtgtgagaggaatttattcgaaggaacaaaga

SEQ ID NO: 198498 - DNA, 780 bp, Cannabis indica
agtttcccgagtaacgcccgtgcaaatttgacaaaattgaatctacgtgagtactttccacaagaaagaagatcaagcatcaaaaagattagttccaagcatcttcaatctagacccatcacccaggttgacatgcctcgactaccggcacctaggttgaaatattgttagcctgggggtgcttctgacgagttttccaaagatgtttgttttgagcattttctccattttcatcaacaacatagatacaagtgctttcgaacaacaaacaagacaatctggtagccaaaatccctagctagcacctaggttgacatggggactagcttcagcagctaggttgacattcaagctaacgcgcgtggtttcggtactcaaatgccaatttcatttcgggaatttcgtgcattttgacccaaacaagggagaagccctcatgttcaaaccaattcatcatcaaagtaccaagaagactcttaaagagtcccaaaaggagcatctagcacccaggtatacatccaacccgacgctagtggtttcaattatcgaaattcagttatgccaaggaatctatgctatttctccatcacaaacaaggtgtagcaattgtggattttcaaatttatgtatttgatatttcaccttatgctaaggtagaatatcgccaagctagtcgcaaattgacactcaatttgcaaatgagcgaaatctccaagaactggtgaagggctgcacatgatataataatatcacataaactttgcaaactatgatttcgac

SEQ ID NO: 198499 - DNA, 1210 bp, Cannabis indica
aaaaattgatggattatatgttaaatatccgttaatatattaatccaatgcaaagggttggatttttttgggttatttctctgtatatattatattatatatgattgctaactttttgttacaattaataatctgaaatgtatgtgacaaaatttcattaaaatacaagatcaagtcgtgtacaggcaaatcaacaagctcatgaataagggcaataattaataattagaagaagaaaacaccttatatgtatgtaagattaggaaacaatattacaagctagatttggttttatgtaatatacaagaacgatatcctaattggtaaccataattatcccatataactatatatgtgttacatgttttgataatcaacgttggtatgtaattggttggaacttgatcatcacctaatcacttatcaatcttattatgtatgtgtaattaatgtattgataatgttgaagattccactatatttaattgtttttgtcacatcaaaatttttatataactattaataatgtttttcaatattgaacatctccacctaatataatatagatcacacctaatcattcattcgatcaaattatattaacataaaaaccaaatcaaatagtgttaatacagagtacaagaagaattagagctatagtactagataaaatttaggggaatattcataaatattatttttcaatgttttctttataattttatattttaaaatttaattataaaagacatcttttaaagttaaaaaaaaaaatacaattttgcttaacaaaagtaaaaaataattaaaaaataacgagatattaatattacaataattataaatcaactataaataaactatataacaacaaaaaaatgatcaaaaaaataatttcatgataactataataagcaattataaataaactataaaataatcaaaaaaatatttattatttttactgtatttttgtaaataaattttttctttgttaatgtacttttgtaagtttaaacaaatttttagtctattatgtaattgtaattaggatgaaattgagtgtagttggtatataaatatttaaatataaagtgattgcggtataaagtttaattcttagttgtaaataaatatttacgtttaacttttagcggcaataatatataaattatatttttggaactgcgtaagtacttgccaattaaat

SEQ ID NO: 198500 - DNA, 733 bp, Cannabis indica
caggggctcaccctctctggttttgtgcaaggtcgcgaccaccataaattggtcgcgactactaggtttaaaaactcaaaaaatgcccagaaaatcatatttttaccaaaaccaacatatccaattcaaaaccagacttgctacaacttaagcaattgatttccacagcaaatcaaagtgcttctcaacatcacaaacattaaaatacatgcgcaaacactataaacaaataatatttaattactccaatacatgctttaggaattcaagaacaccataaaaaatattctcatgctcactcaacaaattaccaaaataacaacatacaaagggtaacttgaaattcattctcatactcaatattaatcagctcaaaacataaatatatctaagttcataatcaagaattcaaaacacaaaaataaagaatacttaattttccacctataaacttcatccaaaccaagcatgcaatactcaaaaataacttcaatttcagaattaaaaacaaaaaaaattagagggaagactaccttaagtatttcatcagcttgaataacaattttccctaaagaattaactccaatcactactaaattcaagcttttcttcacaaatttgaacaaagcttcaaggtaatattgagagagagggggttggttttagagagaaagaaatagatcagaatatgttttgtttcaatcaacacttaaaaaagaaatatttaattcaa

SEQ ID NO: 198501 - DNA, 1107 bp, Cannabis indica
attttgaatgcagtttctgtgttgatttaatccaatgcattttcaattcgtattgatctggatcgtctttttcaagctagagccttcaaaatcatttattccatacttcttattgttcaattcggtagtactctaaaaaatcacttcatttctatgaatttttctatattagttttggggtatctgaagattttatcaagaacttttggcaacttttggcaagtgtgttctctatgataggatgatagcatagaattaattattacgctacatatctgtggatgggattcggtttgttattttaacagttttgacatgttgattggtttgataattgtcccaagagatgtcgtgggaatttgaacattctatacagtttcacatttaccattgatttgtgtgatagtaattatggaattcattttctggctatatctattgccctatgttaattatgttaacagtttccagtctgaagctggcacttttgtggaatctttgctaagtttcttgatgggtgtacaatagtatgattgtatgtggaaggagttcttgttgtaaaaggttaaaggctgggttttgattatagaattatttgcatagtttgcttgatgcgtgtataatactaggagatgaaaggaatgtcctttatagaggctagtttcttttagaagtaattccttaactgtgtttgtgaggtgattaggagatgaaactaatgccctttggttttcttatatcccagaaattctactcacacttcagtttgctttagtgtgtttgtgaggtgactagtgagtttactttagttttaaatttttaaaattgccctatcccgaaacatcaaccgcccaaaatatagcttcgatgctctgtacttcttggctagaattacaatggaagaatatctttataggttgcacaatacttgatactggtagagttaatggctgacattaagttggtgtttattgaacttcgttttttcatcttggattgtacagcaatttaatgtagacgttggttcttggtagtaagacacattagaggtagcgcactataaatttaatcttttgatctaactctttccattgtgtcatttttttc

SEQ ID NO: 198502 - DNA, 1073 bp, Cannabis indica
ggtatatacgtagcctaatagtgaagtggataaaatgaaatgtttatgatgcgtatgtttgtagaaaaggaaaggaccgaatttaagaattaagaggaagaaaggatagtgaaagttgtgaaagttgaaagaaacaagtgaacaagtagtgtagtagtggatatccagacccaaaaacaaaaaacaaaaagaaaaaaaaaaaaaagtggagatccaaagggtgcacgaaaacgtgtggtgcacactcctctcacatttctcttctcaaagagagtgtgcaccattaattcaatttctttaattattattatcatatcagagagagtgggccgcattcaattattgactcattctctaacaattatctttgagcaaagagtagttttaataacttttctattctattatttaaaatatatcactaaaataaaatttgtgtgtgtttgtcttatattatttatgtgttaatgtgtgagtaatttaggtgttcatattatacttagtagctattaagacataatcatataataagagttttggtaattagaataaatgttatgtttagtgattatttatatatatatatatataaaaaaaaatatgtgtgtttatctgctcatgtattaataatgtgattgcattgctcacaataaataattatattatatacattttgtgtagtttaaaaaaatatattatcaaaataattaatacgttgtaaatgaactgattttagaaccgatgagacatcattttttttagtattattttcacaatttatttccctatttatcctatgttttttgctcaaaattttacaccatgaaaattagctaactaggtaacatatcatcataacgacggacccagtaaaaataggagattcaatgataataccaaaaaactggtccatgctgttctctacgatcctttattatttttgtttttttatttgaaagctatgatcctctatatgtaatcgtaaattattccattattacctatatatggagcactaaaacaatatgcatgttactatttcattgatatgattttatatgagatatgtacac

SEQ ID NO: 198503 - DNA, 790 bp, Cannabis indica
cgcatgggcgttactcggtgaagcaggatcaatgctcaggttgcattgtcaacttaggcgcccatagttttagatggcctcttttgggatgtcgttgatgaaaactcatgtactagcattgtaccttgttgggtttaaggaattggggtccaaagaagttcccaaaaatctaaacccttgtcgtcatgccgcccaaggtgactaaatgtcgaactgggcgctcatcgtgcacctagtgtctctaggcagagttttgtccagacttatctctaaggtttgaaacttagttgaggtgtctctcatgtattctagtgcaatggctataagcaaattgcacataagaagttgtgggaactaaaactgatgccagccagcatacgggttgtcaacctgcgcacctagtacttaacctgggcctaggtttctgggatgtccaggttacatcctcagtttcacagttcatcgttttgtggtcattgtgacttgtttgttgaatgatagtactcagaaatgattttgttggatcttgttgtttacctagttgcccccagtgtgcaggtaccactaccatatcctggaatgtggggttccaaaattgtttcttccgtgtcacgtatcaaaaacagtatccacgtcatcaagctaatttttttagtaaagaatatacattaattaatttagttaaatttctgtcaaagaaacgtatctaagactcaaatttaaaaaaaaaataaaggaaacaaaataaataacaaattccaacatcataaatacaaaataaatacactaa

SEQ ID NO: 198504 - DNA, 1111 bp, Cannabis indica
gcgagatatcatcatcaatttttaaagctttatacttgttctgatatatcttttttctggaaggttggagtctccaagcattaaactgtcaggcataattttagtaatctcccttggaatattattaacaggtaaactgctttttcaggtgcactttacttcttaggcattccaataaataaatgaagatttactttttatatctatgttttcttttttgaattattgatattgcagcacctcttataagaaccttggccaccctattttttcataacttgctttttctattcaataatgttttctttatcttacccaagatcagtaatggatatttccatattgaataatatgggtgctaagaaaggggaaattttgtttatacgaataaaagaagaatcagaaagcttaaagaataaattaatcggttcttgtacctatctatcattttagaagaatacatcactgaggttattatttaccatctgatgtacgcatttgaccaattgaaatttattaaatgtattccttggtaagttcctagttggacctcatacctttactaagtttcctttcttaatgtgttttttaagaggtgaggaaacatgcactaattgatggttactttgtttattttcatttatgtttttgacttggaacactgattagcacattatcattctgtagttccagctttactaatttgcttgctgtctgctgttctcttctctctattttagtctaatgcagcacatgctgttgatttactcaaaaaagttgctattgtagttctcagaacactttatcttttcattcggcagttgcaaaggaaacagagtttgagcttgggggtttcattcttgttatgcttgctgctgttatgtctggcttccggtggtgcatgactcaaattcttttgcaagtatgctttgtttgtttgattaaattgatattcaaaattacatgtagattcgtgtattcactgactcgctcttttttgtttgtgtttcttttttcttgggatggtatcttccttcttgtctacatgtttctttctgaaaccatgtatagaaagaatcctacggtatgtgctaaactttgctttatgaat

SEQ ID NO: 198505 - DNA, 1005 bp, Cannabis indica
gaccattccccgcgagcttcttgatgcatcaactgttgctgaggctatcagtgtcatctcctgttggtacgaagacaagaccgagtggggacaacgggttggctggatttacggatctgttactgaagatgtggttacgggatacagaatgcacaacagaggatggaaatcagtttattgtgtgacaaagcgtgatgccttccgtggaactgctccaatcaatctaaccgataggctgcatcaggtccttcgatgggctactggctctgttgagatttttttctcccgaaacaatgctcttcttgccagcccaagaatgaaggttcttcaaagaattgcatacctcaatgttggaatttaccctttcacctcaatcttccttattgtgtactgcttcctgccagcgctttcgctcttctcgggtcaattcattgtccagtctctgaatgtcacttttctcagctatctccttaccatatccgtgactctatgcatgctggctgtgctggagatcaaatggtcgggcatcgagctagaagaatggtggagaaacgagcagttctggttgattggaggaactagtgctcaccttgctgcagtgcttcaaggtctactgaaagttgttgctggtatcgaaatctctttcaccttgacatcaaaatcagccggtgatgatttagatgatgagtttgctgatctctacattgtcaaatggacatcactcatgataccgcccatcacaatcatgatggtcaacttgattgccatagcagtcgggtttagtaggacgatatacagcgtgataccacaatggagccggttgatcggtggagttttctttagcttctgggttttggctcatctctacccatttgccaaaggtttgatggggagacggggaaggacaccgaccattgtttttgtatggtcgggactgattgcgatcaccatttcccttctttgggttgcaatcaatcctcctgctgggactaaccaaattggagg

SEQ ID NO: 198506 - DNA, 4966 bp, Cannabis indica
tttgatcttcctctccaccaacccaaaaattctagttttggtctgaaattgctgagaaaattcttgtttcccttgggttcaagcttggttgaagcttaagagagagagagtgaagaggtaggttgattatgtgtattaagtttatccttagttgatattagcttttatcatactacaataatccaaggatattctaaaatccactaactccaaaagtaaaacatataagagcaaaagaccattttgccttttacttcactaagaagtaacttaactatataggggtaaaatggtctaacaccataattatgaaaggaactcgacattctaaatgtctaactatctttccatgctaaatataagttactaaaccatatcaaagtgacacgaatggccgaaacatcactctattattacggggcataaaatatataattcataaaaattcacatataacatatataatgcatctagcattcaaatatatttttgtaattgagaaaatatttttctaaggtctatttctgacgatgagccataatttctactaaaaggcatataatcataaattactatttaaatcattaattatctactaatacccatggtttaaccatgcgttcattacaattatactcctgttgaaaggattttatccttgaaatttcatctaatatactccagcaccaagtcctcacagttgtttcccaccttactatttagctaagtacccaaatcaatactatgattttgcatcaaatacctttatcattaggatatgattcaaattccttaacatgcaacatgaaaacatcatgtatactgacaatgttaatcataagggtaaacgagaaattagtaatctaattttctcgagaagctcttgggatcctggggcatattttctccttgcccaaaaatattttacttctttcactgatgatattcatagaaagacatgattttccatactcgaaatctcagtattttcgagctacagatctacatatctaaggccttactggtctgctaatctgacttcgaatctagatattttctggtacgagtttcaaaataatattacatatcattcaacatcttatagaaaccatccttaacatacattgataattgtttgttgtgtaaaaactttatcaaaggtagatacttgttctgtgagtttttataattcatcatgtaaacttgcaacatatttcttagaattaaaattgtcccttcagactggccatctgtctacgattagaaagttatactaaacttcagcttcgcgctcatggccctctatagactttgttaaaatctaaaggtaaatttcgattttctattcaaaataataaactttaaaatcacataaggtcatactatttcccttaaataatttcccatactagctcttgtaccaaaattagtattctatttcatattcaatcatacaaaagcaaacatgcttgcggttttaagtattctaattatataaatttctagtaacatccccttgtttcactcgagaaaatttagtaaatcataataacctttccagtttctgatggttaaacctagtacattgttaaattaagtatttgaatacataatctaccacatcattttgcattgtacctcattagtaagtagaatttcaagtcttggtacatcttaatagtaccaaaattttaacaatttaaggagaggtataagtttttcctagagtctctcttatgagctcaacactgcctgagacacaaactcgagtttattaacgtaacatcttgtgatctgatactgagaattctctgacttagccagcttaaaacatatttttgagttttcactaaatttgtatccaccaattgagcacttctattttcgttaataaatttggttgaagtgttaacttattgagtttactcatgcaaactccaaacttaacctgaccatgacaatcgttaactaaggagaaatcatagttgtactaaaaacccacctgagacatttcctacctagggttccctccactagattggccttcctggggtaatagagagtttcatagtcttaatctttgactaactccaaccattacctttgtcttattccagtctcttctgataataaaatatttcatattttcctccatagagatagttttgccaaaacctaaaagtgaaatcactattacaagttctaggtaataaattggttaaacgttacttatgctccttcaactaacgagaagaataagcaataaccctaacatcttgcatcagaatgcactccaaatcctgtctggatgccttacaatgcaccacgagttttcttgatctgatgcgtaagctaacactaaatcataatcaatcatcattgcttcagctctcgaatctaattttcacatttgttggtcatacaatagtcgtttcttcttgattaaccctgtaaagggcgtaaagatcttagaaacccttagacgaggcaatggtagtaactatctaaatctagaaaacttctaaccttagtgactatctttggcctttgccagtcttcatcaaattaattatttcccagataaactgtgatcccatctttaccaattacgtgcccttgaaaggcactcagaataaccaaaattcatacttcttaatatgatatacacagtctatgcgactatagtcactacaaactatctgtagatgttgctcatactctgtttctgattaaaaaatacacaatgatatcatcgatatttactacagcacatatcaagaaaatccatgagtaccctgaacaccaaattcataagagctaccggtgcattggttagtccccaaagacgtcaccagaaatttataatgaccacacctagtatgattggcagtccttaagatgtcctccactcagattctcaactaatgatagcttgagtgaagattagtcttggagaagactatctttctttgaagccgatccgaccaaccatccatcctaagtagagggtacttgctctttatcatcaacttgtttagttcttgataacaaatgctcatatgaagcgagccatctttcttcctaacaaacaaaactagaacttttcagggtgatacacagggtcaggtaaaccctaaatcaagcatccccctaaaatcataactttaattccttaaattctgttggagttatactatggggtgtcctagaagccacctctacttcaaatgccaaaataagaacaaagtctatctttgttgtagtggtaatcctaaaagttcttttggaaatacatccaagaactcttgtaccgcactaatatccacaggtcaaactgtctccactaggtggtatctaataccaccacaaggaattctatacatccaagatagtaattaattgcttttttgaaggcaaactaagatcaattttcttggagccattcagacacggtaaggattaacccaaatgtgatatgccatcatctcaacatcgaaccaacttacccttcaaaacgtcagaaatgacgaccttcagatctagagggatagaatacactaagaagaggttgacaaattattgaccaataacttcatttgagaaccattttatccctcatggatatctaacccaaattttgtcccaaagccaaatgggactggagaacttgcatagatttttttgacttgaataaagcatgtcctgaagattgcttttcactaccgaggattgaccaattggtagatgcaacagtaggacatgaactaatgactttcatgtatgcatattctagttataaccatattaaaatgcatatcctagatcaagagcatacaagtttcgtaataaatatgggactgtattattataaagtcatgtcattcaggttaaaaatgctggagcgacataccaatgtcttgttaatggtatgttcgagaaccagatagggcgtaacatagaggtctacgtagatgacatgttgatttatgcttgtggatgttgaattaggtgttttggaaggtttgacttcatttagggaagttttgagcaagtttcgaagctcttgggtttttctgcagaatcgtttctccaaaaatggttaaccattttcccaggaaggatcccagaaaatagtttaccgttttgaaatctagcttatcgattttagtagttttgagagccttagtttttgtgtttcctcgatatttaaggtattgtcatgctatctatcaacttttaattttgagtttaggtccccgagaaggttttagcaagttgtttacccgatttatgtgattgtgacatagggcctctattcagtgtgtgaatttctatataggtcgactgacacacttgaatctggaaatgaggtaagattagtataaaacatgtatatgtgtatgtatgtaaattgcatgctatgttatgtgattcatatactaccaacactagtacggtagcagtacaaagtgcattggtatagtatatgatgttcaaagggtacgatccagtgttaccaacactagtacggtcaagcacataatacatgtgatacaacactcagtggtgctcaaggtacgattcagccttaccaacactagaacgggatgagtacttagtgcatgtggtacagaggtcgtacttatgttaagaatgttcttgatcatctgttaagccttgtaaataggtgtgtgggcgctaaaatacaagtcagtaatatattatatgttttatgcttttcttactaagtctgttaactcacaaatattatttgcatgtgtacgtaagagaaaggctaaggctgagcaccagtaagtccagaacttagggataattgtacatatcaggatggttatacctagagagttcggtctcgggacgacttgggccttcattttgtagtcgcggagtggcatgtctttaaagtgtattttgaataagaatgtaaattttaaagacaggatct

SEQ ID NO: 198507 - DNA, 629 bp, Cannabis indica
ccaaagcattcttaattattttttgtcttctgtgcaagttcctaccaccttgtgtgaggaattggatcggtggtggctaagttttggtgggttggtagtgtggataagaagcactattctgcgctgagaagttggagtggcctttgtcagcccaagaggtgtgggggtcttggatttagaagatttaaggatatgaacttggcgttattggctaaactttgttggatggttatggaggggaaggacaagccatgggtgaagctccttagagataagtactgtaaaagtactgatgtgtgggatgtggagaagactgggaatgattctagatgttggagaagtatccttcaggccaaggctatttgtgtgaatggggcaggctttatgatagcagatggttcctatgaaatctgggataggccgtggctgcctaggagaggcttcgaagaaattaaagataatttccaatttcagcacaaccagcctttatggagggtggtggacctatttataccaggatctagacagtggaatgagaaggttattagggattgcttttctgctgacattgcagaggacatactccaaattaaaattttggatgaggggggagatgttttattctggaa

SEQ ID NO: 198508 - DNA, 563 bp, Cannabis indica
tcttcttcttcttcttcgtgttagtttcaagtttatttcttttgtgttaaggggaggtactgatcaaaatatgaaatgaagaatatattttctgtaatatcgatcagtgcactgtttctgtcattttcttaatattttattgagcaagttgttacttgttattttttgtttgtcatttttaatactttcttttctcgtttttcttagattcacatgcggatttgaatacatgtatgcaaattatcatattttaaactgaaatttatcattaaaataacccttttgttcccatattcccaaatttaggatatagtgcacatgtaaattttaatatttttatgcaaagttaccatgcatcttaatttctttctttttctgctgtttcaatgcttatttattaatattattattaattatcttaattttaaactcacagtggcagagaaacatacgagttaggtactgtttctgaacaaaatgttttaaagaattaaaaaccttgttcatttaatcggttacttggtgagaataatcacgtggtaatatttttttagttagttttt

SEQ ID NO: 198509 - DNA, 1223 bp, Cannabis indica
ggatttccttctcacgaaatgctcgagcaatcgcgcttgtatgtcttatacaaacgaagtggctgcgtcctctagttttgaatgatatttggggattttcttcttggtagatagaatctaatcatctatacataatagattgaaaatgttggatccataataatttcaagtacttgtttttatttttatgcagtaactgatgaaataatcaattcagtttttgttataagcagaagttattaaagttaaatgcataaaagagctgaaccaaacttgaagaaaatactgtgtttgaagacacatacagagtacattttataattaacagaacaaaagcattgttcatgtaactttgaaagggttttctcccttttttttttggtgatcatgggattgaattttcccattgtgtatataagcttcaatgtccaagcaaaaaccttagactatttcattttttgttacaatctttcaatacaagtaaagttttgtattgtattgtcaatttttttttttcctttatctaatagtatatttactaataagtaataggaattatttataaggtagttatttttttttttttacatttgtttactttattaaaattaagaaaggtagaatatgagataaatttcctaaattttgacaactatcaaattgtacataaaataaaaataaaaaaaatttaaatattttttttagtagatcttaacaaattaatttatatcttaaaaaaaatattcaaatattttgaatgattaagaaaatttaaaaaaaaaatttaaaattaaaattaactaaagtatattaaaatttatttatcttttattaaaaataatctatttagatataaaaaaaaatatattaaaattcaatatttgtaaaaattaaattttatcggaacaagtttgagtatataatttttttctccaaaatttaaatttgtttacttaatataatatttttttagtttaatttattaattttttttttcaaaataatataatatttttgttaagtttttattaattttttttttattttttaagatgtgagtttataaatatatagaaacttaatttttttctcaattttttttttgtttatttaaattatttattagatttttaatattttttatttgattttttaaccgtttataaataaaataaattttaaatataatttaagtttttttaactaaacttaatatttaatat

SEQ ID NO: 198510 - DNA, 650 bp, Cannabis indica
ttttaaatttataaaataaaatgttaattaaataaatacattttattttatttttcttttcctttcttttctttttatttttttgtctttctttttctttttcttttctacccattagatgtcgctcctctttcttcttcttctgcgagaccaaacaccccaaaccatgagccttaggtgacaagcccaagtcaacgaacatcatgacgaaccctagacgacgaaccacatgagcaaatctaagcgaaatcgatgatgagggggttcgtgagagtgctccgtcgattgagttctcgagatttagggtttttgggatcttagaatccgtgagtgagagagggggaaacgtgagagagggagagaggatctggggtttagctcgtcgtacaatgttggctccgagaggaggggaccagttaacatgacttgttttttgaattagattttcatgagacattcgatttaagaaatatctagtttcgaaagttttgagatgagttttagatttttgaggaaaatcgaatggaggtttttgttggtcggggttctggggtctccgttggtcttggttagggccgcagggtgctatgcttgggactgcttgtcgcggattggtgtaaaggtcggttctcatgtgtgtatgtgtttta

SEQ ID NO: 198511 - DNA, 1868 bp, Cannabis indica
tagctattttgcctatataaagagaaataaaccagttaaaactatgcaatctaaactaaattcataaactaaaaaagaatagagaagaggagaagcctatatattaagatgacttttggtgcacagtggaaaccagctacagctatgctggctattaattttgcctttgcaatagtaaatttacttctcaagaagagtattgatgatggtttaaaccatttggttatcgttacatatcgacagatggtggctactatgttattgttaccaattgccttcttttgggagaggtacaacgtaataatactgtttgattaagaaccatatataggttgtgttttcaatgacactgataagtttacttgtttttcttgtaggaaaagcagagctgagattacagcacacattgtttgttaccttttcttcagtgctttaattgggttagtttcttttctcatatcataatctgtattttcccacttgaatagttctttatttaaagtctatgttggtatattttcagggtaactcttgcccagttcttgttccttcttggacttcaatacacatcagctactttttcttgtgcatttctcaacatggtgcctgttttcacatttgtattggcactgccatttgggtaaactaatatttaagctcacctttatccttttttaccttttattacttattgagatgcatacacataaaataatcatctcactaaaattcttccagtcttgaaaagctgaacatgaaaagcataggcggttgtgcaaagctgttgggtacaatgatatgtgtggttggagccttggtgctaacattctacagaggaatgcaactaactcatttacatgcacaacaagccacagaagaccatgccagcatgaaacacacacccgaaaagacaaagaattgggcggccggttcagtactcctggctacaggcagcctctcgtggtcttcatggttcctcttgcaagcaaggattgggaagatgtatccatttcaatattcaagctcagccatcgtgtccttctttggtgccattcagtcagccatactgactttgttaattgagagaagaatctctatgtggattctcaaaggaaagttggagatcattgctgttgtttatgctgtgagttactaatatgaacaactttctagtgttaatttttttcaaacttggtaagcacttgactatctatttatttattttgagccagggaatggtaggatcagggttgtgctatgttgggatgtcatggtgtgtgaagcaaaagggtccagtcttcacatcagcatttactcctttcacacaaattttgtagctttttttgatgtctttgttttgcatgaaccagttcaccttgaaggttttaaaatcatggaattctctttctttcttttcaacacttttttcaaattctttgcttttatgttttgtgctggtactaacattttggcaatgataatttaaccagtttgctgggatctatcttggtcataattggtatgtacactcttttgtggggtaaaaacaaagaggccaaggaagttggtacaaagcagaagcaagtagcagaagaagagggtgaagattgtagtaactcaacagtgtctcatgtcattcctgtcacaatcaactcaacaacttcttaatctaatattttagccacagttcacaatagtcttaagagcaattgtttggatgcacacacttttgtgtttactactttgagatgttaaagacctaattagtagtaaatggtttttgtttatcctgcttccgcactctcagtatgatttagccaatttatgtattggaatattactagcataaggtaaagatattttggaag

SEQ ID NO: 198512 - DNA, 1665 bp, Cannabis indica
ggttaaaggttggcctttgggtgactctctccaaaatgttctaggatgggagttcaccttgttggttgggtagaggtacaccattcaggggttggccggctagaggttggccaatcaggggtgttgttatgccaaagatccctggctgacctcctggactgctagttgttgagatccttttgttcttgccactagatctttgtggcaagacttgtcctcctttgggtaggggaaggtctgtcctggttccaaaagaacctagttggatagtttgtctgtagaccctccctgatctgtcaaccaatctaccttggaaaggatctctaatgagatcatgacctctttcggtagttctttcattgaaatgtcttattaggtcactaggtgctctatttcagcggtcaagtttttcctggtgagatcaaaggatgtgctcttggtaatccatccatcctaaaaatttgcatccttattgtgtaaaagcatcgcatccaacgacgcgtagttcttagtttatctgacttggcagatggcctctctaagtttggctaactcgtgatcttctcccaagtctacactaggcttgctaatggctggttttccaatttctagcctcgtttccccgacataataccggggatgagatctagttgtggtgcccaagggttgctccatgttggccattcttccagtacaaggcgctagttgggatcctccctgggcagtagaggttggccattaagaccaacaaagtttgttgtgtccacctgaccagtcatggtggccaagtttgtgatgcttaccgagatggtagggttggccacatctgtcgagttcatggagattctagttgtggatggaacacgaacatcgtgatcaacaatcatagggtcttgaggaggacttgatgaggtagaagtgtagccagagttctccttgtgttaaacatggtgtttgatcacataaattgacaaagctctcaatgagagcaccaaactattaaccttaaatttggccaattgacagcagagtcgtatttattactgatgcgaccacgtgtacacaataagaacatgaaagtaaaagagaatatatttttataaaggtttgacccccttagttagcgggtaatgatctactccccttttggttatattaataccatcgatagtaccactaagatcacatgggtcatggattctaaaatggctctcttaagataacaatattagaattaaattggcaaatctcaagtaagagagaagccttgggcgtgtagaggagagagagaggtagagctagggttttagacttagagcttgagagttttagggagcttagagacattgaagaattaaggttaggttcatgctctttatataggagagcttataagatattaataaccaattatccttaaaaaatagggaatattaagaatttgttacatgattaagtaataaataataaatatgttaactatcccccaagaataaaggaataactgatattcctcccttattttcgtgggttgttgaagcccaaatctcagcttggcttgttatgccaaaaaaggcttcacgtcaagtgcctgcaagcctataggcttcacgtcaagtgcctgcaagcctataggctgcacgccaagtgtctgctagcctgcag

SEQ ID NO: 198513 - DNA, 859 bp, Cannabis indica
accattattaatgtaattaagtagtgagttcgatataacttaataaaataacttttaaagaatattgataagcaattataaggtgtcaactatagaaagtgttgggtactattggtgccccatagtattgggtacttctacaatgcactcttgtctcattcgacattcagggaaaaaaatttagtccaattatttttataattgtgtatgttataattatttaaaatatattataaagtttaagaaattcgaaataatttaccatatagaaagcaatgtttaatcagtctatgctgcattaagttcttgttgtgattgtcggtgcggcggatgtaatctacaacatgtggattaggaatctttctgcttttcagaataaatttttgaggagtgctaattacaacctcttattataatcttttagtcaacctctacgtctaaaatcatatgtcgaaattattttttttttcaaattttttacataaaggtattaattatagttatattatcatcgttgtaaattaaaaaaaaaatatatatcaaatagtttacattatcaaaaatagagttcttaatattccagtttaccacacatgtttaaaaaactttaaatgtattttttacactataaactattcgaaatttttcaaaaatttgtagggatggtgttgtaagcataacaaacaccgtcatgaaaaaaattcaaaaaaaatatatttcggcatgagtttttgaacacggaggttaactaagaggttgtaatagaaagttgacggtaatactactttaaatatttcactgaaactttgatgagttgagtaaacatgatattgagagggaaatttcattttacatgctt

SEQ ID NO: 198514 - DNA, 751 bp, Cannabis indica
gagagagagagagagagtcaaagaatataagaaatgggtgtggtgtggtgtggtgtggtgtgttatactgttatgttgtgtatttaacttgtttcggtcattttacttggcttgaagagaaaatgattcattacaatttatagtttaccaaatctcattttagaagcaattaataattttttttttatatattgttaatgttaaaatgaatttttattctatctatttgggtcgtttttttttatttatttatttttattgttagtttgggtttcacaaatgttcttaagaaaaagattatatttttgagtgttgactttaaagatgtgagttgggttttaatcattaggttgataaataagttttacaattatattttaattttattctcaccactaatcttcccaccttctatatatatataatatcaatgttgttaatagagagaaattctgatattaatccaaaagttcaaagctgctatattataatgtctattgacaattccacattgtttttaaaattatcatctttctactttttattgttatttttttagtccatttagttgttctcaaaaaagaaaaaaactgttttcaattaaagacttaatattattttggatattgttaatctgataacaaaaaatcagacacttgtacggtgtaactgtaaacctattaaagtaagacaaaatcctgttttttttgtcaagtagtcagcaatggtttttttttttacataataaaac

SEQ ID NO: 198515 - DNA, 517 bp, Cannabis indica
tagtctaaatgttaataaaaccagtaaaaattgaagtaaacccaaataaaagtctacaagaagaattttgaaactgtaatagagaatatactctcaatcaagaaagatattatttattaataagaaagacccgtaaattacgattaattaacacataaactacataaaaatatcttctctactcgtaattagttaaatttaagagttacctaaaatttgaatgaacagaaagatttaactttttttttccatttcttcaatctaatttgtttacttttcctaaattaattgatgatcatgtgactcattagaaatagttatacattattctaatattttgcttctattttttttaaactctttatattaatataaaattaatttaaattttatacttcaagtgaaaaaaaaaatacttattttcaaaataaataaaaattgtactcttttcttctttcttttttttttttctttagttgttaatgtcagtctttataattttgtttggtattttttt

SEQ ID NO: 198516 - DNA, 1377 bp, Cannabis indica
tgtaggtatatatatatgttattgtttttttttaaataattttgttacttgttagagatggttcttctctgtagtatatatacataagcatactattttctaaagctatgttcttaatggctttgcaattattttattattatttttattttttttctctcattctctaactttgctttctccaatctatcctcggattttgatgtatttatatttttccgtttttttcaggggactgattaggattagctcgatgtttagtctagagatggaatcgtgttcaactttgcatgtcatattttggtaaactctttttttgacaaggtggccatatgctattagttttaaagtaggatttagtgtacccttcaaaaaaaaaaagaaagatatttggtgatgcagtggtgtttacttgtgatggaacagtgcccaactttgcatctcatgttttggaagtttagccatgcatgttaaaatactttatgcatttcatgttttgttcattcacaaagcgctcacaacgtgtaaaagtagacacatttgatagtaaatgaaaaatcaacaaacacatcaatttaatttgtctatcttctgaacgcacaaagtggccaggtgtaacagtcaacatctatataagggatctacaaaggatggaaaagcattttaacttaacgcacagtaaatatgtgaaaccattttataataattgtgatacaaggaggcactagtttctcttttctttatttttttcagaatggaggggataagttttaatttattcataataatagttattgtgtataggctcatggtttgatcggaattaatttgtattagtttagtttagaataggattaagtgtttaataatttttgtttgtggtaaaaagtgtagtgatgttgatgggcacttgttggtttagtagatgagaatagtttgcttagaaagattattgtatgtagaaaatggtaaggtttatggattgtttgtagtttttggcttttggatgttgtgttagggcatgctttaaatacactccttttgtttaaatagggagtgattaaaaaaaataaactccaatcatacaaaaaaatagctctctataataaagaataaatagggaatttctaagtctgtgcacaactaatttattggatgacaaatatgaattaagcacgtcttagaaaaatttagaagtaaactagcaaaaacttctaataaagcccaaatcattatagaatgaatattgcaaagaaaaaagcaacattttaaagttgaatatccctattcaaaagaattgagtggaagtttaagcccaagcgatcaattcaactccaccgtaagagttctaatttcgacctggataaatgtaacatt

SEQ ID NO: 198517 - DNA, 1448 bp, Cannabis indica
tatatacaacaatccaacatttaacttcactaaaatttctaaattcaagcataaaaattatgattaaatgagtcaagtaatcattaatgaaaatttccatattaaacactcttgtttatatcaaacacctctttgtaaccacatagggcaaggtaagcattagacacatcacaaatacaattaagttgccaattaaatttgggttggaaacataaaataccatttatataaaaaattagaacataagattaaaaaatgattagcaaatttgattgttttcatattagattgttaaataatctttaatcaaataaagcaaagtgcatcaaattaaacgaaatcaaatcaactcaataagtaaaatcttgaaacaatcgaacactttatacaaataaaaaagaagaggggaaacccaatgtagcgatcagtgaagagatcgagttggtcgatgaaggcataactttagtttaattcaaaatccattgatttgagaagttagttaagagcatttctacaaacatatataaattaccgcatagacaacaaaggaaccaatgagagagagagagactaccttgttcttcagtgagcttaatcttggaagatcaaatcttcgtttaaactaaatggatttgaggtttgagatagtgaaatgaaggcactcactgagtgccaatggtgaagcaacctaaaacagattctcttttctttttcaagtcgtgtatataaaggataccattaaacccttattaaacaaaaattcaaacttcttatttatgttatttatgatttaagtaattacattgttatttcttaaattgtagtagaagatcaatagttattagttggtggactttatttagatatttatatgattttaacacttagtatatttcacagttttttttatacttgattattggaggtttattaaatccttggttgaagttgttattagggtttcctaccattttatataagctaattagtcattttgtaaatattaaagtttaagagatacaatttaacatatggtattagcaaaattaaataaaattagacaaaatttttaaattcaataatatcaatagttcaacggaatttttaataatatgaaaagttcagaaacatgatttggtacatattaaagttcagaaacatgttaaagttcagagtttctgaactttaacatgtatcaaattgtgtccctaaattttcatctacgtaagactttctttagtaaaattagacaaaagtattccttaaatcaacaattttaatagttcgagaaattttttttaacaatctaaaaagtttaagaaataatgatttagtatatatcaacgttcataagtaaaaatccaaattcaccttttatatactcatgtaatgaaatttatcccatttttttaattaatggttattccattttctcaaaaaaaaaaaaa

SEQ ID NO: 198518 - DNA, 896 bp, Cannabis indica
tacctcaaatcatactgttaaagtctttgttatctcatcactactcccttaacaaatttcgaaatgagtaactggaaaatgatctttggaaagcctaaagcgaaacaataccgctactagtattattccttagttctcttcaccatacgctagctgaaccatactaataacctcatatgaatacatgatcttaactttatttttatatagtcatcaaaaaacttttaattttttctcttccttttacgatagtcggccaaagtatatactctctcaagcatattaatataattaaactcacactgctattcctaccataccagaccatacatctaaatcaatttctatattagcctaaatatctctccaaattcggctaaacaccataaaatgaggaacaaatatttatcaaacaatatgcaataaaaataactccaatctattttttatttgaattaaagacttgactaccccttcctactaaccactaacacgttgactagaattcataaaataaaatgctagagaaatactatacatcctataactatcatacaattgtatcctcaattaattttctagtttatacatgtcataaacaaaagtacttgactaatcaatttaaatcacccaaaaatcaccaacaaacattaattcaaacatctcttaaattgaatttaactatacttattagatccttcctaacgtgaattagataagtcctccctcaatctccttccacttccatcccctgatagcattccatgacactttgagagagccttgaatagccgctttgccttgtttatatttgctgataatcttgcctagtaataccttgtttgtctcttgaggttcatccacctctccaggattgagattgaaagtaatgtcgt

SEQ ID NO: 198519 - DNA, 1666 bp, Cannabis indica
aatatggtataaacctaattaaaaaaatttccactattttgattttgatttgtttccacatataaaaatggttgtaggtgaattaggagaaggaagaagaggattccaaggtcaacgccaattgaatgttgaatttttatgtgaatgatctttgttagtatcaaatttttcaatggttggtagtaatgtccatttatgtacaatgcttagttagttctaatgagggtgttcatagctagctttttatggtaaacaaactattttcttgttttcactcagattaggtttatgaaagttaattttctgtgaaaatggttggaggagctcttgtaattaggacccctctaaaattaattaaaatataatgtatacacaacttgccaaatactagtctcattataaatatcttgcttttccagtttacaagtagttagccaaaatttttttttaaaaataagtaaatgaattattttgattttttttttcagtcaataatttttaactcttaacagtaatatttctattttttaaactataacatcgaaccaattaaaactctttttggtaacagattaaactaacaatattaaaatattttaaattcaaacgaaaattctgtttgattaaattaaaaaaaaaaaataacattatatctttaattatccttatacgattaggtataatattaattacattatttttttaagtatcctaattcctaataggattagatattttgttttcatctatatatattaataacacattttcacaaaacacttagataacaaataataatattattctcttcttatagaatttattcaattattaatcatggagatggcaactgtaaataccatttaggatatgagtataattattgattgctcaaataatcttccatcagagagctttcactttgaacaagacaataagttgttagtgtttatggtaaacttttgccataaaatatgtccttctcagcaaattattcaaaatgtaaatcaatcaattatacttagtcacgactcatatttttctgaccaatctaacatcacaaaaactattctatttagagtaggtgtgacaaatccaaccgcaggatctatacttgcaagccaaatagatatttacatcgacacatattaacactattccctttgtggcctctaagtgtgttattatcaacctttgtattgttgctctcactagtgaagaacaagaacaagaatcgatgatacttgatagtatgtttagagaggcacttgatgtcatttcaaatgttcctgctacacaagaatctataaacaaactaaaagaactgaatattaaggagggtgatgatttgattaccaacaataattgtaccatttgccaagaaaacttgttgtttgaagattgaaaaatcgtagagatgccatgttctcatctttatcacaagaattgtattgtttcttggctaaagattaaccatttgtgtcctttgtgccgctactcaatgcccaccgccaccactgctattgaaaatactgtgcttgacaccaacacctacactactattttctcttgattttaattattttatcaatattcctatcatatatatttttttcattattaatattatgaacgctttcggtattggttttttttcttttttttt

SEQ ID NO: 198520 - DNA, 1452 bp, Cannabis indica
attgtgttgttaagacccggctgttttttatttgtgcttaaattcgtgctatattttttcatattttatatttatataaataaaataattaacaaactgtatgtatttttttaatttttatagtgataattattttcaaataattttttaataatagtttgcagaaataatcatataatattattaaaatttgtatatttgttaataaatactcaaattattattattattaagctaattaagaatttttttgctcaatttttatatatactaaatcatgttctcgaaactttttaaacctttaaaaattcttcccgcgaactattgaaaatttaagattgttagatttagagacttctgtccaatttcgttaaaattttactaatacaacgattgtccatttactaatcacgtgtccctcgaactttgatatctattaaattttgtccctcaatttttaacatgtaccaatcatgtcctttgaattttatttacgtcaaaatttcattagaaaaattagacaaaaatctttaaaatccaaatcttaatagttcaagagtaattttttaacggtactaaaaaaatacaaaaaacataatttaatacatatcaatatttaggcacaaaaatcataattaacttttatttatcatcaaattaacctatggtactttctgataagactattgttacttaagtacaactaaacctttttgagcttattgtaaaatttatatttttttgtgtgtcaatttataacattgtatcaaaactcatatattttttttcatgcgtgtcaaaaaatccagccctaattactaatcatcatcaatgtttatctttaactctatagatatctatcaacataattaatatttgttatatataatatatgtaaattactatatagtaggagtagagggggagtagtattacagccctgcacgacaatgtgacacagactctctctctctctctttgtcttaccaactcataataataataataataagagtcataactctcattggtttcttctccctctttagacagcctttccttttccttttctttctcttctctttttgcatttgtttttgtttgtttatgtaattattatatatgtatatggtaattaataaaaaggaggggccggaaatgagcaaacttgttttgtttttttttactttggtctaacaaagcattatcaacaaacaaagctactctgcaattaaggccacaatattaattaattaattaatttctagctgcacttattataattattattttctgaaaatggtttattttttttttttttaatgagttggggtaaccaacaaaaaagcaagattcacatgggtgttttgagattcatgaagactactactgatcaggctggattaatggatatttatttggtgggaaaaattatgtgtgaacctttttttt

SEQ ID NO: 198521 - DNA, 1571 bp, Cannabis indica
ttttttttttttttagttttggtatttctaattttttcgtgatctacaccttttgtgtgtagaaatctaaatttggagtgtataacacaaaacattgaaaaaatttgtagaaccatgtagatcttgaaacaataccaattttttttttaaaaaagaacaagaataaattcaaattaagattcgattgaagttatacctcaacaaaatattttcatcaaattttatcgcagactatcgcaaatacattattaagtatcatattcttattgtcgctagaaatcaagtttttattacaccattactgatatatcattaaacatcgtaaatgcattgttaaatatatacatgtataacatattttagatttgaacaaaaaaaaaaaaaacaaacaaacaaatggagcagtgacaataaatcagaaatgtgtaaaatcttagtaattgttgttggtgccaataacaaagacgatgttaatggttgtggcaacacgaggatgtggtgctatcatggtgtagctagagatatgagctgataatgagagggacatatagtccatgttttgttgtcacaaaatgtcgtggagtttaatgccatattttctaattattgtatactaaggagttgtcaatgttggattaaatttctattgtgggcacatatatataatatatatactattataaagtgtaatataaaattaagtgaccaattatgttatgagtatcaaaagagtattacattattatgaaaataatgtgtagataccataagttaatttataatttgttgagaggccgaattataaatacccaaaaactcattctaagatgagtctataaataggtagtgatccccaagaaacactagggtttttgtattctctccttctacatcagagaaaatactttaaaaaagctagtgtattcttggaagatcaaaccttctttgcaatctccaacaatggcttcaggttagtgcttccgctcatcttttatcatcttcttcttctttaatttagcaatggttctaatgatttatgatttaagattttttatattaaagcacttttagaaatatgtagatctgtaatatatatttctagagtattttataaatcctaataaatggtgttagagctaccttttgctaaattaattgaagatttgatgattttaaaattaggttttttatctatttcatatatttatgcggttgaactttttttttggattgagatattatattatatatatgtttggcatatatacaaatgatttgggtgttttgctttgatttcagtgtatggattccatcagtatattggtttgaggccagccattaattcccactaatatttatgatgttgtatatgcctatatggcttatttttttctattatcggatggcttacacgttcaggtgccatttcatattattttatgattatttaatattggcaattccgatgaatatgtataagattggtatggtttatattgtcatcatttgactttgtttttcttcttttatgatataagttttcttgcttcagcttttgaaaagtccagccc

SEQ ID NO: 198522 - DNA, 638 bp, Cannabis indica
ctgatctcttttcttccattgagaatatacaggattgacaaccccattaaccagagtttgcggaggaggaacaccagaaaacagaatatcatcaagctcatgccctatgaccgtgggaacaacttggggtttccaagacaggaaattggttcgatcgagcttgatcgtgagggaagaagacaaagaactggagaacggattccatatcggaggagttgtgttggagggctgagacgagttgtcttgggcaatagctctgccagacgaaactgcaggaccagacagattagaggactccattggaggcttctgataccatgtagaagcttaaccaagcttgaagaaggtagaaccagatggtaaaaaccaagaaagaccagaaggaaaaacataacacgaaatagcaggaaaagctcactttagaatagagagctgagttctttatttatagggatcaagtatacaaaagcagaaacagtaagtaaaggagttagttaacaaacggttacaacagaattaagcaatcaagaaaaataaaatctaataaactaattctgtatgtgtaacatgtctaatcttatgtctaaaagtatactaaaaaattagattgcaaaacagaaactaatgacaaaataatc

SEQ ID NO: 198523 - DNA, 537 bp, Cannabis indica
aaaaaaaattaaaatataaaccaagattggatcacttgatggagcagatttagttgaccctaattagtcctagttttttttaaacgtaatataattattaattagttagggttatattttgatccattaaaccaaaccattagactaattaaggtaaaggaaacctcctctcctcctatagttttgtgtaccaattcattgaactatatatttattttaataacattacataaatataattaatacacttgttgtactatatatgtgtgtgtgtgacaataactttgtgccacaccttggaaacaaccatagaatttctaaatgatatttgccagtttttttttattaatgaattaatttatttatttaaattaaacaaaaagaaaagacattgtgatctctataagtgaatctatatagagagatatattactaacaaaaaataagtataattcatcgagtcaataaacacataaccagccactctggagcagagagaggctttgaatggtgagctatattattattattattatt

SEQ ID NO: 198524 - DNA, 753 bp, Cannabis indica
tggtgctcgcccaccacctcctccattgcctcctggcaccaatgctgctcctcgcccaccaccacctcctcctccaaagagcagtgctcctcctcctcgaccacctcaattacccggaggttcaaagtttgcccgacctccacctcctgctccaaaacactcattaaatgcttcatctagtgaggaaactgacataggtgatgaagctgatgctcctaaaaccaagctgaagccatttttttgggataaagtattagcgaaccctgaccattcaatggtttggcatcaaattaaatcaggatccttccagtaagctgcttaactttttattctttgttcctgctaattactggatgtattattttaaatactgaccaaattattgttttacaggtttgatgagaatatgatagagtcactttttgggtatgctgctactgacaaaagtaaaactgaacctaagaaagagtccttatcccaagatccttcaccccagtttattcagattattgatcaaaagaaatcacaaaatctagcaattcttctgcgggcattgaatgtaacaattgaagaagtttgtgatgcacttcgtgaaggttacttctctcccctcttttctttgataatctcatgtgcttgaaaacagcatgtaaatggatcgagaaataaatctgtctctggaaaatctaacatgcaaaaactgtttttttaagataaacataggcacaatagaagattgattcacttgaagta

SEQ ID NO: 198525 - DNA, 2134 bp, Cannabis indica
aaaaaaaaaaatatacatattttatgggaaaatatcggaaaaaagttaaataaatataaaaaaaaaacagaataacctacctgattactccttttggtagggtacctgttatccttacctaattttttcaatttttttcaatcttcccttaaaataatattttgaaaaaaaaaacttatattttcacacgaagtataaaatctataaaatttataatttccattttttttttttaatatttaacataatttattcattattttggcttcattttaccaggcccattacattttcttctcttcaattaagggacattatattatatatatatatatcatttaaatttttctatgcaaatcttgaattatttagggaaatttataagtttgtatacattatattaattgattattttattgaataaatactattttaaattctgtgtttcacaaaaattactgtttagattattaaataataaaatagactctgtatttttcaaaatcgtaaaatagcggaccttgtgattttttttaatataaccagctagaaaacaatttctaacacgaatagagtcaaaaaaatgtaactaattttgtcataatatctctaaatcggattattattaggttttattttaataaaaaaaaatcaatttaaagtcttatttgttctattttaaaaactacatggtttattttatcatttaataaaacagatagttcaatcgataatttttataaaatatagggtctgaaatagtatttacattatattatatgtgaagaaaacttatttataatttactggacattgttaactaccaaaaacatattcttagttctatattatatgagtgtacttttaatgaatattcctcatttatgtgtaatattatgaaaatttgagtttttatacttagtttttctatctaattaatacttttttaatttttatattatatgagttggggttgttctatcggctgaaaatgaaattaaaaaaagaatcagcaaaaaaaaaaagttgagtttgacttaagtgtatcttgtatataaatatatttttgatgtagtataaaaatgatatttttttatatatttttttaattaagtagttaaattatgcatagaaattcaattttctctttttattatttgttattggatcaaaaattaatagtttaatatttttaaaattaatatttatagttaaattatttaataatcatccatgagtaatacttgttaaaaagtattatatgtattaatttgagtatatataaattaattaattaatctatatatataataacggcaggagtttgatgggtgtgcctgtggatgaaggacaattactgtcgatatttttgaaagtgatgaatgcaaagaagactattgaaattggagtctttactggttattctcttcttaccactgctcttgctcttcctcatgatgccaaagtaagatcttatttgtaatattattaatttaaataatgtatattttgggctgtttattaattatcaataattttaaaataaatatcaccgagtaatagtgagttaagtaggtctgagagttttaaattaatttgtagataacagccattgatccagatagagaagcttatgaagttgggctaccgttcattcgaaaagctggtgttgatcaaaaaattaatttcattgagtctgcggcttcttctgtccttgaagatctcaataatgatgtaagtaatctcataaaatcttatattatatattctataaattgcatagatgataattatgtttgattaattaactttcacaacacgatttaaatctttgatttctttttttattttattatgcaatagtgcatatgcattaatgataaaaaaattcaaatgactaatttttaaattaaatattgacattttaattggaagacagatacgcctcagccagaatgtaaaaatattttagctcaatgtgttaatttttttttttttagtctatcaatgtgtgaaatttgtataacataaatataatttttgaaattacacttttataattaattattaataatataaattatatatatctttaattaaaatattaccatcaattatttcaagtattaaatgt

SEQ ID NO: 198526 - DNA, 2333 bp, Cannabis indica
aaaataatttccaacaggattatggtctgacctatgagtaagcgaaaggagaattagaattcaaagggttcgtggatgctgactatgcctcgaacagagataccaaaagatcaaccacttcctacatttttttacaaaacagaactgtacatgttggaaggcccagttatagtctgtggttgccctttccaccacgaaagacagaatttgtgatgtcacggaagcattaaaggaagcattatggcttcaaggaatttttttaatttgaagcaattaaaaggtaggagtgactatgtactcgcatatctagtcttccatccacctctgcaagaattcagtttatcatgaaaagagaaaacatatagacataagactctactggattagagaagataaaagaagggctggttgatttagagaaggtcattacgaaagataatcctgctgatgttgggactaaggtcttaacactaaacaagttgaagcattgcttgaactttatcaatctcgaaagttagtaaattgagatttctagaacaccaactagatggttgcattctttcttcatcccctgtcaataatttttaattttaagcaaaaaggtagaattgtgatattgttcttccaaataaaaaaaaaacatctccataagattgtcctagtaatggaaagttattaatctaccgaaagtatgtctcagatagctaacttgttcatccagaagaagtctcgtggaataatagttaccatccggaagggcattcctggatgactatcatgaccactctaggtgtagtctttaggaaagtcagccttcctccagataggagtttcagatggctagttgttcttcctggaatggtgttttggatagttgactccagctggctcttttcctatctggaagtcccttcagaatttgcttcagttcgttgccgggaagcgtatgtctcatccaggagcaccttgtcctgtgctgatgtgaagattatgttacgagaagcttgttaagtttgttacgtcataactaacttaacaacttagcatgtgcagccaccgactttaggatcgatgtagagagaggttcagagaaaagagagagattgggtttgggttttgtatgaagaattttctgtagttgaagaagattcttgggtaagagtgtgagagttgaaacattttgtgagaatccaacagagaatcctcttgactatattgtacatattcttgttcaattaataaagaagatttggtggtgttccagaaatagagtacagccataaatcacatcgatctatcgaacttgaaccaatatatatatatataccttggtgttgattttatcgttttactgcttgaatcattttttatttttaatactctgttcatctatatttttttcaattgctgttttgttttgttatttttgtcattgctaactgtttagtgattataaattttagttaattttgattatgcactttagtgttaattttttccacaacaataaatatatattcgaattaggtggtgaatatgaacccacaaaatgaataaaaagttgaaataagcatttaatcagaaagattgaagaaaaataaataaaaaaagattggaggaaaccatattgaccaagattataatattcccggaatttggaaaagtaagatcaactataactgatttaatctaaacaagaatgatttttgagactgattaaaagccttaatttgcggtacacgcagtgaatggggcgctgggaagtggtggtagtgggtctatttaaagggtcttagaagttggttatgttagaccaaaactcataaactcataaaaagcacagtaggagcattggtactttcgttgctgcctacttgtctcgtaagaaaaggcaaataataatgggcaaggcaacattggtagtatggttctcaatattggttttggttggtatcagtagtaatagaactgtgaaagctgggcccataaattacaaagatgctttggcaaaatctatactgttttttcagggacagagatcaggaagcctctctgctgcttcccaacaaatccattggaggactagctctggcctttacgatggtcgccttgcccatgtacttactaccactcactttattcctctctcttaatttcttctacatatctttatcatattcaaactttctttttttttaaatggttatcatattcaaacttaataactaatattttttcatttccccttaatataaaaaaataaattaactattatatatctatgtctaggtagctcactcaatttgtccctaactatttcttctttttttttt

SEQ ID NO: 198527 - DNA, 750 bp, Cannabis indica
ggaatcatgggtcaacatcgttgtatttcaagtttttttttcaggctgggtgctatctagtaaattaattgtaaacaaaacaatttgtagagcttatatacctaattaaataatttttttcttataattatttttgtgcattaggttgtttaatttattatttaattgaataatttggctttgcaggggaagcttctaatctttaagaaattcattattaattgttactattgtttcttgatgttattattattgtttcatgaaagggaaattattattattattattaattagctaatctctccatataccaatcaatgggggtatgttttctttatatatgtgtgcacgctcctgtaaaagatataaacattttttttaggttaaagaaataaagacatcaactttaatgacaagttttttagattgaaatactaatcaaaacatttgctttgttatagtcagagctatgtaaatacatttgcactgtcccatctggttcatattttgagaagtgtgtttaatacattttgttgagcagagctataataaaacagagtattgtctgtacatattttttgtaattgattgaaccaacaataataataacacataagagaatgctagatacaattgaattgaatcgtatttaatacttttgtgtattgtttaacaaaaaatttaatgacataggctttgtgtataacttataaatccgatatttttgtgttgtgttcaaatatattattc

SEQ ID NO: 198528 - DNA, 999 bp, Cannabis indica
ttatattaaatgtggttatataagtgaaagaaataatacaatttaaatttaaatataatatacatatttctcctatttttatattatattaaatataattatttaacatataatgttttttgttttacttttgcaatttaaacttaaatgtattacatatatttaaaaaactagttttagttttttttaatatcataattttaaaattaataatattcaatgcagtgataattattgaaatttgaaaacataatatattattattcgtcctaaatttatatatcttcgcaattaatgaaaatgcttatctggttaaactatcaagacattcaaaattaatttaaaataatatttaaaatttaactaattctaaataccaaaatttgaaaataatttttaataaaaaaataaataatatgaataaatttattattaattgcaacattttatataaaatagatattttttattattgtttttgctaaaaaaaattctttctattattatttaaaaaaagttaaagaaagtgtatgatattatctcatttatcttttatcttatattaaatgtggtcatttaaattaaaatattttttttgggtaaattctattttagaccctgtattttgtaacagttattaattagactctctgttttgttaaatgacaaaatgaaccttatattttctaaaattgtacaaataggaccctaaactaattttttgtcaaaataaaacttaataataatctgatctagagatgttatgacaaaactaattatattttctgtatctattcgtgttaaaattgtcttaaaattagttatttaaaaaaaaaaattattaaaaattgagcttaggatcctatttttaccattttagaaaatataaggtctattttgtcatttaacaaaacagaaggtctaattggtaacttttacaaaatacaggatttaaaatggtatatatccatttttttttaacatggccttcgatggttt

SEQ ID NO: 198529 - DNA, 938 bp, Cannabis indica
tgaagttgaagatgagctcgataggtgctcaatgaagatgagctcgatacgtgctcaatgaggactctcgatgatacttgctcatggtagtgaggtaaaatttaaaaatattaaaaactgaactcaatgataggcatcgaattcttattaaactttgttgagttcacatcaaatcaaataatgaaaggaaaaaaataaaaacattaaattgaaccccgtcaaaatcctatcaaacaaaagaattacacaaaatagaatataaaaatattatcctatcaatggagtcttcattgagcacctatcaagatcatcttcaacttcagacgaagtacataaaaatatactatgctatcgagattatattaaggtttctcgaagaaacatcaagttagcattgaaaacttatcgaccctattgaatttcgcaaagaaaaaaaaaatacacaattctaacctagaaaaatttaaaagtgaaaagttcacttttttaaagcttgccacaacttcaataatccaaatccaaacaaaatcagcaaatttattattataattattattagaagaagaaacattcatatttatatccattataccttcttctttttcagccatgaaactaatttttcctctttggttcaaaatatttttgaaataaaagaacaagtttttaagttcataaaagggaaaaaaagatatgctatttgataagtaattatggtttgtgagttgtgacgttagcaatgtcaattttaagtacacagaggagaagtatatcgatgatgatgttttctctcatgtgagagtgttggaaatccaacttgactgtacttgtcttaactttcaagtggatccctaagtcccattctcttagtcgttggctaggtagggctttagagaatctctgactttggattactggtgcatgcgtaataatgggag

SEQ ID NO: 198530 - DNA, 508 bp, Cannabis indica
cccccacaaataaaaattctaggtcggtcgatatatgtatatcacatgaaatattattaaagaaaaaatcactttctttgactgaacgctattaacaataatggtgatcaaaacaaattatagaccatatatatatatatgcatatgtattatgtatatattcaatggtccaaaacgagaaagtaaatgactcatgattaagctaatactgtagtaattatcaaagatatactggacagcaaccacaaccaaccgcctttcaatctttctacagtacaaaagggtaactttctagacaaaataataataatatcatactttactttttatttttagggttaatttgttagttgacgaaaaaaaaaatgaattaaatcaattaatataaagtataggcaaatgattagcttatgatcaagtcaattttgtaagccaactatagatatgtgatatacgtataatgaatttgaaatagccaattgcagaaaaaaaaaaattaatctatata

SEQ ID NO: 198531 - DNA, 1363 bp, Cannabis indica
aagcctaacaaaatccaaagaggatggccactccttcggtatttccaagtttctagcaacataaagaacacagtaagataggagagtataaagcaaggtttaagtagaaatgttagctaggagttattcaaatgcaaaaatacctacccatcgaaaagcctttcgttgcagaggtttacaaaatcatctgtgtacttgccaaaaatgttgtcaaggcgttttatcaatttcggtacatgatccggaggcaagacatcccatatctttagcacttggaagtagttcaaattctttgaaatgtccacagtactaataagaatctggccatcaaccttaaatttcattatctccaaagaacttctacttcctgattctgaaggagatttcttaggcctccaaccactggaaatcttaagaagatgatttaagactgacttttttttccggataggtgtcaattttttaaaggacttcaaaaagttatcactgaaaagaacctaaaatttggagtggcaaggacagaaaaaaaaaaattagaatagaaatgtcatatatgtatgtctacgtagatttatgcctgacattagtaaagaacaactgagcactaacattaccttccacttcgaatttctgaaaagcatactatcagcattaagaagatcatcgaattgatcaagctctttcttcatctctaacatagccttggccaaacccacatcttcatcagcattatagaaacagtgacgctcttttgcatcaatgactagagcttcccaaatagattgactattagcaagggttctttcattaccaagtatccacaagcaatgcctggacagatcaatagaacagacattttttaagcacacttatgaaaaccaggcaacaacatacttgggaaaaaacagtagtggcataccttgctctagttagagcaacattcattatctgaggttttgatacgaaatccaacgattggcctatactacagtagctttcacctattacagtcgacatgattatgatgtcttcctccccaccctggaacccatcaattgttttcaccttcactcgaaagccattaacattttcatacttctttccaaccttctctcgaattgaaacaacttgagcagaatagggagacactacaccaatactaagtttagcttttctctcaagccatcctgcataaaaaccaaatgtgacaaaatcaactaaaagtttatgggtcaggtgcaaatcaataacaaacaattaagaagaaaaaaagaacactgtattgttgacatttttgcaagaagtttcaaacatccatacatatattaataccttcgaagagattctgcagtattttgatgac

SEQ ID NO: 198532 - DNA, 2759 bp, Cannabis indica
atatataggcttgcctctcttttattctaatcaatgaaaattcactttttcctttctcaatatggtatcagagcaggagagataagccctcccgtccgatccttccagccaccgtgtcttcttctccggtgttgctgcgttcctcaagcttcgtcttctctatctctggtgatcctcttttccgttctgcacattgattccgcacaatggctacagaagaagatcaaatcagaactcctgcaactattttcgatcttggcgattcctatactaatcaaagtcttcgaatcgctgctgccaagaatccattggaagaccctgccagtcctttctttcttcaccacggagataatcctggaaacgccctggtatctcaacctcttacagggtaagaaaactacgtcacatggagcagggcgatgcaactcgcgatctctgtgaaaaacaagatcagatttctcgatggttccattgctaaaccccctatttctgaacagaatctttataatgcttagtatcgtaataataacattgtcatatcttggattttaaattctgtttctaaagagatttcatctagtattctttatgatgaaagtgcctcggctatatggaatgacttcaggattcattttcaccagaaaaatggtcctcatatatacaatttaagaaaagatctaatgaatcttaagcaggaaaaccaaagcattagcatgtatttcactaggctcaaaactgtttgggaggagctaacaaattacagacctacatgtacatgcaacggatgtacatgtggaggagtcaagaagcttcaagatcatcatcacatggagtatatcatgtcgttcttgatgggtctctcggattcgtactcccaagtccgagggagcatactcctcatggaccctttacccgaagtcaatagggtgtttcatcttgttactcaagaagagcatcaaagaggaactggaactaactcgaacaatgccaattctgccatggcatttgcgtttcaaggtgataaaaagggcaaccagaaggatgacaatcaatccatgaaatctcatcctcctaggagaaatcaactattttgcacccactgcaatatattgggacatactgtcgaaaaatgctacaaaatccacggatatcctcctggattcaacaagcagaacaagaacaaggaagccgctgcaaatcaaattcaatctggggaagagagcaactcgactaccagtgacaatcatgcgattctccctcaattgtccacagctcaataccagcagctgcttaacttgcttgcttcacagcagaatggtatgaacgttaatgaccctagtacttccacgaaaaatacaagtatgatactatcacataattctagttctcctctacataattcttggattgtggacacaggagctactaggcatatttgttcaaatatgaaactttttcaatatatgtgtaagataccctcaattaaactcatactccctaaccatgattgtttgattgtgaatcaaagtggatctgtcaaattagaaaatgaaatggtcttaactgatgtactatatgctcccacattcaagtgcaatatcatatccgtaagctatctcattaacaaatctgccatttctgttctttttacctctgaggattcactatgcaggaaaaagtcagcaagaggatgattggaagcgacagtaatgtcaaagatctctacattcttgacaatacaccaaactccagtcaaattctatctgttgctgctgagactgggcactcgcgtctttgacatttatctcacaaacgattgaatctcctcaaagatgttttgaactgtaaagtttctgatttacacaaagaaatagcatgttatgtttgtcctgttgttaagtagagaaaacttccttttcaaagcagtaacactctttctaataaaacttttgatattattcactgtgatatttggggaccctacctcattgtttcacacaccaatcacatacactttcttactttagtggatgacttctctagattcacatggatatttcttctacagcataaatctgatgttaacttggtcatacctcaatttttgacttacatacaaattcagttcaatcaaattttcaaagtgtttcgtttcgataatgctccagaacttgtttttaaggagctgttttcaaagcatggtattttgcatgagttttcgtgtgttaaaacgcaaaatgtagtcgctgaatgaaagcatcagcacctgctgaatgttgctcgatccctgctgtttcaatccaaagttcccataaaattttggagtgaatgcatattaaccgctgcatacctaataaatagaattcctacaccgctcttaaagaagaaaactccatatgaattgctatttgaaaagttaccagattatcaacatctacgcacctttggatgtctcgcctttgcatatactttatctgctcatagaagcaaattttccccaagagcccgcacatgtgtctttatgggatatccccaaagaattaaaggatataaactatacgacatcaataacaaacaagtttttgtttctcgaaatgttgttttccatgaaaggatttttcctttccaaaaacttaacactgaggataccaacatagacccctttatccaaattgttattccaaattctatgatttctaacacacatgtttcaaaatatcctgcaggcaatagtgctgtcataagcacaccgaatccag

SEQ ID NO: 198533 - DNA, 924 bp, Cannabis indica
gatatagataaagccaaaagcaatgatttttttttttttcttttttgtaaatactcatattatgacagttttatacctataatctatttatgtaacaaacaccggattaaatactaattttataccaaaaatatcacaaggttttctaataaggaaagcttctcatattattttgaaaaaactaaattagaaattattatggttaaaatttaataaattttattattcaattattattaatttaattatctcatatatatatagttttaaatattcgtggcaaagtgctggctgtttactaattgaaaaaaattaagagtagatagataaaagtatttaaagtaattataaagtcacatgtcaccatcttataccataactttatatataaatatatagatttttcaataaaaaaaaaaaaaaaactacaaataaaataaaataaagggaatcgaattaataacatttgactcattaaatgtatacatctcattttatataaaagttggagaaatactacaaggcactagtgtgcctaacagtcttttatgtgtaaatattgctattagcttaattaagtattgggtcttatatagtttaatataatagctaatatcgctagccaatcacaacgcgatatgtcgagaagatactcaatactactagtgactaataacaatgctcttgcaacaaacaattcaattcttagggacagcaacaacaatggacgaggaaatggaattatgggacacgcgacctttttccaacataaatctatctctctcttctattattttattatgactccttttcttacccgttactctttctcttattccattagtattttctcatataaaagtaacggtctcaaagattcacaactcattctctcactactctatagtctatagtgatactgtt

SEQ ID NO: 198534 - DNA, 1150 bp, Cannabis indica
aaaaaaagatacttattattataagtgatgaatgatatgatatggagaacccatactataatacaattatggattataattggtttatcaattatatgtgtaaacatatttatatattactattattaaatatatttttggataagtttattttttcaaagttaggccttttttttccaaaaaaatattctgtttttttttataggctctagttaattttgctctcttttatcttcatattcccactaaagttatgtactagctaatagatatttatgaaatagcttttcttcaaagttttaacctttttttttctttttttctaacgtatagatattagtatacttaagataagaagcctaggccctagattggattaaatttaaataacaacaaaagctagctaaactctctagaaagggtcaattttgttagttttggattttatatattaattttatttaattatatttaatttaatttatagaaatgaaaataccatgataaacgtgttgcccaaccacaattttttttgttcgtgtcgtcccatgagtaacgggaaagccaaataaccttaatcctaaccttgtggaactattaatctccatatataattaaacactttatagtaagatataagtatatacaattgcattgatcgtatataggtagtttttttgaatataattaatgagaaaaaattgataataaagagaaacaaagtgctacacatatacaactttgaagaaaaaatttttggtttttttttaaagttaacattttgtaattaataatggacggaaattaattttgaaataagaaataatgaagcatgtaattaatcacgtgagttgcacgtggaaaactatacgttgggacaaaagttggccggtgtacatgtgtactcaaagcatgtcctatatatattgtatcatcatcatcatgaatattttagttgtacagtgctgttggtacgattccaacagagttgttgaacagtaaatattatcatcattatatatatatatatatatctatctgtgtgtacgtattactactatatatataccgtataatatataattgtgtaattgtgtgtttatgtgtcaccaatccaaacagaaaaaatctcattttgcataaaactttt

SEQ ID NO: 198535 - DNA, 801 bp, Cannabis indica
aaaaaaaaaaatagttgagaatctaatcaaatttcaggtcaaccaaagaagataaagagaaagaaatagtacgcagaagatgtagagtgaaggagacgatgttgaatagtggaagctcgagagtgaagttgatcggctttgagagagaaacccttggaggagtagagtcgagcaaggtcgttgagagcagaagggagttggggatgggaataggattcggatgatgtttggatttggaggtttgagatgacagattccaagagagagatggcggcgtcggtgtctccggcagtgaggaggtcctcgacggattcgctccaattttcggccatagccatagcagaggtgtttctactacactaccaaatcaccaattgaatttgtagtttgtaccacgctgcttttataattctaattatgctattatatagtgctaggacaatgtatatatatactataaactagtaaataggcccgcgcgttgcgcggtctaaaaataataataaactattaagatttaattattttgttgaaaaaaataagtctaacctaattacaaattatttttttttataaatatataaatttattaatacacaaataacagtaataatatgagtttccctttatattattataaattattatttatacgaaaattacattattaagattgatttataaatatatttaatctattaattataattttaaaaaaatgtaaacactaaataatattttttaaaaaataatttatctaaattataacaatgtactaattttttcttggaagtctatttg

SEQ ID NO: 198536 - DNA, 1794 bp, Cannabis indica
ctcaaacacaacaccaagcatcaataaccacttaaatcagcttaattaatcataaagtaacctctgaaatcacaaccaacacaacttcaattctataaaactctaacatcaaaaaatgcatgaaaacctaaactaaaaaccatgaaaatcataggaaaagggaaaggagcttgcttaccttaaaggggaacttaaagatgcaatcaaactttgctaaatcaccaagagaggagttgaaaaatctaggttggttgctggttacaatggaggtcgagagggagagagattgaagagagagaaagtgcttttcttttttgtttctaatttgttttaacttgattaaatcataacataaaactaatgtttatctaactaaaaatccgaatacagtcactattactaatccactaaaggacaaaacttaattagggtgaaagaccattttgccccttgcctaagccaaaaggcatccttatcacttaggggtaatttgctcaaaactaatacctcgaataatctcaatattatcaatgtctatctatattgccccgctataactaaaatactaaactataagaaaatgtcattctatcggccaaacataacgttctaatgtggcgaggcataaaatatgaaaaacatgaaatttcatatataacattaataacacacatagaattcaaatatatcaccataaattcataaatcagaatttaaagtctaattctgaattaaaccctaattatttgctaattctcatattaaaattaagcggtctttatattttcccatggtaagtgggagttcaatggtccctagacttgcaacactatccccagtaaagccacataaatttaccatacatggtcttaatttcacatcttcaagcccatcttctttaacgtttctttgtaaagaatatttactaaactctccttgttaatgagaacctttttattcttttattcacgagcagaactatgatgaccagaggatctgtgtgcaggaattgcacatgtgctgcatcttcgtcaatgaagattatcggcggttccttgggtttttcatgcttgaggggttctggcgcaaaaagttgactcttgatttttaacctagttaatgtacctcttctgggcactattgctagttctagcaagatgtggtccacttgaaataaccagtatatcctcgccctcaatagggggaggttgtacattatggttttgattctggttgttgggttggttttgtccattcctcctatttctcacatatttcctaaaataacctcaagaaatgagtccttcaagcttgtctttcaattggcaacattccttggtagtatgtccaatgtccttgtggaaccgacaatattattttggatctcgcttactcattgagtttttcattggtttgggtcttcagaaagtgacccgattctcgtttgtagggaaagattattttcacgagttccattcaaatttgtaataaatagaatatatgggaatatatttctctattgtttttttttttgttttttcttatcctctgatgaatcttttgatttgtctttttttttctattttgacccattccccctgctcgcatttcccaccttcgttgttacagtactcgcggtagcggtacttaagttgggtttatctcttgagcccgacttgagcatttttacttcactacgtccttcctctttttgtacaaagattaatgctctgtcattgtatacatttattgacctgactgggtgacactataaatcattcaacaacttgcctc

SEQ ID NO: 198537 - DNA, 943 bp, Cannabis indica
agttcttaaaaaaacacgtgttcagatccatgcaaatgttggacggccaggtaggctttatttgaagcctggcaggccataggtggccttcatggggtctgactggccatgaggactgtgtgcctaggctggtcagcttatgcctaaaactacggtttctggccggccactaggttggatcttcgggtctgccgcccactaggatctggaacccttgtcgggcaaggccaaggctctagtgggtagcctatttttctccctctttcgacctcgtctagggtctcgtgatggccttggaggcatgtacatatctggccttatgtgtggtttctcttggaaactcgatataaggctaggaaaggagtccattatagtcaattgtataacttaggacttactgtatgtcgtagtgagtgtatctaagacggtacttggtcgttcgttgaccttggacactttttttacctagaaaatgtccatgggtgtcgttgacttgaatatatttgtagctttgtcaggttgctcacctcccgttatttcttccatgcaggtagtgccgggtgttgaattggggtggtgacagccggataagtctcttatttaccttggagttatggcaaggacaaagtagacactacgtaaggcgcccctgtatgatcctcatgtggccatggtggccacaagcgtcgagttagagtggaaggggagactggccaaccccccatcgaggttgagccagagatagacttagggactgagaattttgatgcagaatctaagcttgaggaggttgctccaatgaggaggaggaagtataggacttgctccatcctccctgactggcccttgggccattatgacgcccgaggtaatccactgaatgggctcactgagccttcagaactatagctggaccatgtctgatgcgtgttgtatgccgtat

SEQ ID NO: 198538 - DNA, 1507 bp, Cannabis indica
catctccactttcccatcttattattccaattgatacgatagaattaatgcatcccagaaaataaatgtaatattggactaacaagaactttcacatgaatgggaataggataagaatcatatataaatgacgacagtatatattaatatattgcatataaatatataaatataggataagaatcatatatattgcatacgacaaagttagttatacaatatgatagaaacaaacatgacggcagtatatataaattacaggagatttatttatatatatttatacaaatatataatataggtcaactgtgttatccgcattacgtgtgaaatatattagaagtatattcaaagcaaaaaaatgtaaaagaaatggattagatgacgcaaagatgagtatgatatattaattattacgtaatagatatataggttggcgaaatatatatcttaattatctaataattattattgtcttatactaacgttgcatttcaacaacaccagcgcccaacctaatttggtctcttttgacatctctgcttactcattaatttgtatatttcatgcatttttgaaggcttgcatgtcagtttcttaaaattacaagttatccatcgtttaatcgagagggacacatgatctcctctctctactattctttttcacccttaaaaataattaattttatgattcttataactattgttcataaggattaattgatacaatttttttttggtaaattaactgaaacttgtatttattcaaaaatataatttcaaagtactaatcaattaattcaattaaattccccacccatctctatcacttttactaatcttttttgtattcacaaaaagcattatgataaacatctttctttatatccccacaattgaggaaaccattggtacatttaggttccaaaacgcttcatttccaacctttcaaatataacaataattgcacatatatatatataaaaatatttagaggagtttcaatagttacattaaatatataactatcatggtggtattttttttagctattagattattggttttgattagtttgaaaattaaataaaaataaataataattaacttataacttaataatcacctaataatttattttcttataaaactttaatgaattttaataaagattaattatatttaaaaaattaaattaattataattattaattaatttatcataatttattattaaataaggatcttttaacaatttttttacccttaaattattaaaatttttatagcaaaattatttataaattaaaattatacacatataatttcataattaaaattttattatacttataactttaattttaaattattacacttaattatgtaattttttttatttaaatatttaaaaagtaaaaagtgaaatatattgaatgttaaaaaaaaaaaaggctaaactcttccatcttttttttattttttattttgatacggagccattt

SEQ ID NO: 198539 - DNA, 1489 bp, Cannabis indica
tataatctaaaataataaataatagctataaatttaagtgaaatgatggtttagcatcatccgcctattctagtagtcataagttgaattttgtttgaaccttatacttcatttgtatttttttaataaataaaatgtagatacctatagaaaaaaaggagcaagggtattcaaaacatggtatcctatgtaaatttaaagtatcttaactaattattctatttaattactatgtatatatgaaagtaacaattggatattaatatatttttaaatctcagggctaaaggtccgtggctaaaggtattagtcacaaaaattataatttattgtaactaaatatatttttagtcataatacttgttgtgattaaaactaatttagtgacaatttattacttaatactatgttttagttacaagtaacattatattatgattaaaagtcacatttagtcaaaaaaaaattatattgtgactaaaaaattatcattaaaagtaacaattttttatagtgtatgaaaaaaaattaataaatagatactgaatgtagaggtagaaggcgtatcaatacgagtaaaagtgtattaaatcactaaattatgcttatgactacatcaaacggtctttttgagaggtgtagaacacatttttttttaatttatagaaacaaagtagtgtaatttattttattttatatattttttactgtattctagctaagaatatatgtgatttcaaaaatatacatgttcaatatcatttacctgctagcgtacatgttttataataatttattatttataaaagaaaaactgtaaaggagacacccgacgtactcattctaattatttattaagcttaaaacattatgatactcgagatcagcaacaccagcaggtggtctgatgatctatagacacagctatctatatatgaatacatgaaatatatacaaaataaaaaccccaaaatagaaagtctaattggacacacttcataaattattatacataagacgagagctaataaaggtaagtagtatgcattattcattatttttcttttcccatttcttaatttagagatggatttacatatatatgggaattggagcatgcataatatggtaagtccaccacacaaattactacttttgtgcctcagaagaaaacaagtgtacaataatgtatatatgccctcaaataatgaatctgtataaattgtggctgtggcagaaatggcactgagttttataggtagatagatacaatttgattatcatataaatatatataaatagagtgaaagagagatgagtcagtgactgcgttggttgctgccatctttctctttctctttttttgtttatgtaattcttttgggttaaatggatgtgttgtatatatgtctcctgacagtagtaatagtataatgttgaaatcagctttaatttgagaaagaaagaaaaaaaagaaagagggggccct

SEQ ID NO: 198540 - DNA, 1562 bp, Cannabis indica
ataaaaataataataacaaaattttacaagagtgtaattaagtgaaacctttttgaattagaatcccacacgaagcataggaactcaaaaaaatcccaatttacatataataatgacacaaacacttatacattaaacatagtttgatcaactttataatagatagtatattagctctaaaagaataatttttttttttaattttttgtaatagtctataaaatgtgttgtattatttatcttttatttttgccaaaagttagtggagcttggaaccacaaggtgcaaaatatatgcttaagtggtcccaatccacatgctttcctaaaaataaggaggaagatgaaatattgttttgccttatctcaattttgagattcaaaaagtttgtaggtaaaaagaaaattatcttttacctttgaaagcaattgttttacttgaaccattgttttacttgaacctcaaaaaaaaaaaaacaaacatgatttttgcataagaaaacattgagataaagaagaaaaggaaagaaagcaataggttttagtaaaaaataaaaaaaaatcttcattgattcctcacaacaagaaggaatatgcttacatacatatgattctcattgcaaaaatgacaatgcaatttgctatcaagaaaatatacatatattcttttataatttgatgtttatatatatgtgtatatatataatgcttggtagggaatgtacttggtaaatgttcctattgaagggctggttttatgtgatagttgcaatatggtaaattgggtaagcaaaagagaataatagtccttcattggttggtgtggagtgaggaaccacattctttggaaataatagaatcatgcatttggggatttgttttggtatctaattaattgtcaaggttctttaagacaataaaatacaagaaggaatttctaagaataaggtggtggagcatcttcaatttactagtgtagttgttgttgttgttgttttgattgaaattgctttgtttttccaattttatgaattcatacacttaaactatgcatatggaaccattaaaataataataaaaaatatatatatatataatataaaaaattataaaaatcaagtgcaaaattcatttttatagtttgttatttgtttttgtgttgaaggaaaatagatgtgcattcattaatggtgaactgtaaaaacgcaattaaaggaagtttgtcagtaatttactataaaaaatagttaaatttttttttaatgagacatgtaaaaattgtgttatatttaatacaaaaaataactttgtaatatatttgtattaatttttagtattgttctctaatgcacaattgtaaaacttgataaaaaatttaatatttttattaaaaataaaaattataattaatttttattattattttatcatgtaaaataataaaatataaatataaattgtctataatttaatattatagctaaatatattaataaaataataaaaatagcataaatgtttataaaaaaaaatgcaattatagtgatgtaatttttttttttt

SEQ ID NO: 198541 - DNA, 1484 bp, Cannabis indica
ttatagcatatggcgtcagttatatcttaataattgacgatatagtgtatatatgacgttagttattatgaaataatcgatgtgtacattatagtgtcagttatgtttgattctatagtgctgcatgtatcaacgtcggtagcgattttgcgaaaactgatgctgaaagactttaaaaactacctctaaaagctaaatttatagtagtgtgaagtgaaaattttgaaaattttaattaactttattctaattaattagattattttaaacacttcatatcaaacatccttctagaatataaagataaacgtgaaacctattttaatttctttttcacttgacatagtattttcattgtatagataattgaaaatataaaaatgaatggcagaaatttgcatgcatgtgcatcaataatacactgtacgtcacaatgtatttaatgctttgtcttacaagaatttatatttatggagtaaatattatttttaaattttattttacaaaaattatacattagattttttttaaaaaaaataacgaattaaattttatatattttataataatactacaatttttttaaaataaattaaataataattcgatctagaagtactataataaaacttgttacttttattatatacatttatgatgttagaaattatcttctagttgattacttaaaaaaatattatcgaaaattaaatttaaaattctgtttatattattttaaaaaatataaaatttattttataattcaacaaataaaaatttcaataattaattttgacgaaaacacaaaattaacccgtatttatgcatatacaacaaaatgaaatgaatacgtggccaatatatttgtctattcacatacagcaaatggatttatgcatatactacaaaatgaaatgaatacgcggcaatatatacattattatagagtaatcttatgggttttctattattatgtcattttcctttttgtttctttatgttttgttttgtttttttatatctgatatctctcaccctttttattatttttctttaaagattcttgttttctattccactccattttttatttaataaaaaaagagaatgagtttttttttttaaaaaaaaatcatttatttttcttacctatatatttttatttgtgtactttttgcaattttgattgttcttagttttttcttacatgtttatttataaactaggaaataaacggtataatttacatgcgatggcatattatttattagttaattaaattataaaaattaaatcaaattttaaatttcaaaattttttgaataattttcttaataattgagtaattattttactaaaatttttgtaaaaaaaataaataaattaatattgtaaaaaaatttaattattatacaattttttatttaaaagataaagtaaattaagagagagatatcttcaaatgttatagtaaaaaataattt

SEQ ID NO: 198542 - DNA, 781 bp, Cannabis indica
tgaagaaaatgatctattactcaatcttataacagatccagttggagatatagcattaacttctctgcagccaaccacaaaaaaggtaaacattagcaaggcaagaggaaaaatcgatgcagaaaaattcttattattatttttattttctttttaaaaaagaaaagaagtaacagagagagctcactaacatgctgagttttggataggcatgacctcctacaatgaagggggaatagggacaaaatcagaaattgggaaactggagaatgtagacaaagattcaaattaaaactgtgaaatcagaaaattaaaaaccaatgtccataaattacctaaaaatgtgtggtagctagagctctggacaaaggcaatctctttccaaatgaatgaggactgcagatttaaaagaacattaataatatcaaattgcagcaaaataacaaattttaacagttctctaaacttcatggtaagtgcaatatcaacattaaaaatctacataaaattattgtaaatcatagaaaaataaagtatagattattgctaagggcaccaacggttctgtgcaataatttagtaattaggttttacatattttacattttaatctaaaattaaatatgtgaacccaaatacttcattgcaccaatcaatattcaataccgaatggtgttggacttggacactggcatgttccttatactgatgctgaaaagtataaatatactggaaaatacgtgccacaaagcctcccttttctattatgcttttgatggca

SEQ ID NO: 198543 - DNA, 714 bp, Cannabis indica
cacatgccatgcatctatatttgtgctacattggtactataagacaaatagccttctctttctagagtagctatccttgtgtgtatgtgcattttttcttctctagatctccaattatttaaaaaatgaaaataatagtatattaggtcacatggtgagatgaaagaaatatatgcactatgtgatgtaaagtgcaacatgtactgtgctgcaaattttctgaacactgaataagtcggtcatattaatttggaatagaatcttcctaattattcaatttctcattctgatctccatcttttcattttttttttatttttatttatttttattcattttggggtttgggggagattggctaaggcccttattagaggactcatggtagtcaccaacacaaagattccttcaaaaccaaaaggtttcctattgagaggaccaaccaatcattgtgcaacacatacatgtacgtagaagagtgtacgtgtttgcatatgtaccataaaaactcataattgaggaacttgcatttttgttagatttttataatgattcctaatcttataaaagaaaatctagcaactattattaacggcctcctccacaataaatgtactaaaaagaaagtacattatgcttatttcttacgttgatttgatacgaaaacttaagtaataaatatcaatttttaagccacgctaataagagaagtct

SEQ ID NO: 198544 - DNA, 777 bp, Cannabis indica
ctcaattggtttttattactaccgtcaacaaaaataggagtaacgtattaggtaacatgtttaattaccttacgaggagttttttatttttactttgaggggtgtaccaaatagtttgagttggataaacttggaaggttatattatatatatatatgctataaagaaacacaaaagacataaagctaaaaaagttctctctccaccgcttttgtgttgatgtgcatcatcacattaaacattaacacaaaaataaataaaacttttgataagttcttaaaatcatttgtttctatatttacaaacgatcgaataacacgatttatagacactcaaataacccactttcaaacatcattttagacttgaatcttccatgtaagtatattgaagatattaaagtaatttcccaaaattcttttacttaatcgacaacccctttaacatttactttgatattccacaaaaagaaaaaaaacccaaaatgtgctcttagttctaacttacatataaggatggataatcatattcgcagttggtcggaaagttttgctctgcttcaatctgtatcaataattcattctctcattattgttaggtatgaattttattttatttaatttatgtggattgtgtagttttgtagcaagactgttacacctatatgagtttatatttacataataatatgtttaaagttttgaagtaaaattaattatacttataataacatatgtactcttttattgggtttcactgatcaattttggagacagg

SEQ ID NO: 198545 - DNA, 1780 bp, Cannabis indica
tgaaatgggaaagtgggaaaaaaagtgagaaatggaaccagatctaagtatgttttgttcgtacctttgaggatgttttaggggtatcttgtacatccatggcctctgtttgtttcgttatgctctgatacggcttatcagagaaagagaagagagacaaagagagagaacattaggaaataacgtatgataaccaaacctatatatagtcaaaatttggagcttacacgcgtaaacaaagtatgagtttctatttttattttatttcatatatataatgaaaaaaaatatatgtacttatccaataatcttattataccttgaaagttgaatagttgatactgtcaaatttataatttatgattttgtattattttaattttttttttttttaaaaaaaagaaagaacagctcattaggatttttaccttctaaactttaacatactttaatatgtagtaaatcatgtctctttttttgggtgttaaaaatttttactaaatcataccccctgaactttcatccatgttagatttttttttactaaaattagacaaaagtccttaaatctaacaatctcaatagttcagggacatttttaacgatcttaaaagttcaatagacataatttgatacatatcaaagttcaagggtaaaaattctaattagctaacatataatttagttcttcattgtttttttttttctttgtttatttgataactttgatttttttttttttgttcttccatgttttaaaaacaaatctttttattaaattagctctaaaaaatgttaaatttgatattttgctttctttctttctttcttttttaaacaaatcggaattaactaaatattaatgttcctttaaagaaaaaaaaaaacttccataaacatatatgtgacgcatattttcttaatgcgctattttagctcaatctttattagtattatttgacaaagttttgtatttataaaaaaaggttttttttttccttctaattaactacacaaaaaaagatcttaaaataagttaaaaaaacgcattttttattttaagagtatttacatcataaattaatttgagtttatacacttatgtatactatttctttttacaaattaagtcggtaaagttgcatttttgaaacttatgttatactatcagtcttaatattgattggatttgttatattgtcacgtgttattttttattagtcaatttcatattaattttaaaaaaaatgacttaaaaaattattaaaaacaaaaaataataataagttttttaattataaaaagtgattaaacttaaaaataaaattaattagttttttttttttttaaatataatagtaacaaatctataatcaaaattaaaccggacaataaattattatattatatagatatttatttgcctcttttcgtgtagcatcattattcttgaaaaaacattcatacaaaaaatataagcactaaaaaaacctcaaattaaaaacaattacaaagcctttgatcattagatttcttttcttttaataaaaaaatcagcattaaaagaaaacacctaaagtaaatctaattaaaaaaaaaactaaaccttagttataaattaagataattttttgattcttaaagctaaaagtaacttaaaataagcttacctgtacatgttttttttttaaaataaaaaataaaatagtcaggataagttatcaaaagaaaaatttacataatttataataagttaaaaaaaaaaaaaacattctatgat

SEQ ID NO: 198546 - DNA, 567 bp, Cannabis indica
aaaaaaattaacaaaaatatgatggactagcctattaaatttttatacaacccaaatatattttattataaaatacctcttgctcacatttcctagccgcactaaggatacgaacctatacaatgataatcttaattctataatgacgcaacaattctggcgataagaaaacttcattaattctgatgatacaatctaagaaaatcagtaactcaaactgaaaaataaaccaaaagcgttcgatagaatattaaactgaaccatgaaaaattcaaaaaaactaattatcataaattaaatttagagattgcaaagatgtagttctgtaaaaaattaatttggagtttcccaaaattgctatattctaattgttgcattaatattttttttttcgaaatcggaataatcaattccaatcgcgacattaaactaaattcgcatttattttgtgtcatggatccgaccacataattttgatacttttgttgcaattgagttgtcatacaattgccctttagttttattgacgctcagaaaattgatatagcaatacttatacattgatca

SEQ ID NO: 198547 - DNA, 888 bp, Cannabis indica
tggggatgagaactcgtcctaatatcatgcatgcatcaagaaataatagagatgaaccgtatagcatagtatgttaactctcagggtcatttagaggatgattacccaaatatagtggaccattttatggttcatttcagatgctttatgggcataccaagcagtgcatccattccaattaataagaagtgtttggaagaagggcctcggttaactttggatgactagctgaaacttatcaaaccattcataatttaggatgtcaaaagttcttcattttctatcctgggtctgaaaagcactagacctaatgggtatgggtcaaaaaaatttcaaatttttgtggaaggatctaggcaacgaactggccacaactgtcctaaaagtttttcaaaacggaattattacagatcagctaaacaaaacattattgatgcttatctccaaagtggagaagcctttgaaggtaattgattaccgaccaatagcatgctgtatcactatttacaaatgcatctctaagataatttattcttgtctggctgaggtgctacctaagatggtaagtgataatcaaggtgccattattaaaagtagatatcttgctcataatgtagttatcctacaagatttgttgaaaggttatcagtgaaaaactgtttcacccaggtacttaatgaagattgacttaagcaaggcttatgatacaattgattagcaatttctagagaagttacttaaagctttatgcttgccaactcaatatgttaattggatcatggtttgtgtgagaggctcaatttacttgttagttttgaatgaaaagattcaaggccagtttcaagatgttaaaggattgagataaggagacgctatctcccctctgtt

SEQ ID NO: 198548 - DNA, 636 bp, Cannabis indica
ataactcaattatttattaatatataaataaaataataatgttacgatatattaacatattatatattagatttattgttcttattcaaactacttccattttttcatcttataatatttcatcctacaattgaaattagactatttttactgtgctataatcggtcgagaacatatcgagattctgtcaaactcattgataatcaatcgatattcaagtgatagtaattgaaaaaacaaaattacaattctctcacaatgcttcaactatcgagaatattttgataaaacagactttaacctgtcgagaactaaaagctaaatctaatcgataacctatcatgagaattaatataaaaacaaaattataaattttttgacaatacttcaactatcaagaacctgtcgataacataaatgttgataacttatcgataatagctaaacttaatgactatcattaaagctaaatcttatcaataacctatcaacaatttgtcaataatcaattgatattgctgggataggttttcacgcgggcgaagtaggggactggacgggtgacaaacatgaagggaccggactgaagagggtaggagctagaagggaccgactgtacgtttttttttttttttt

SEQ ID NO: 198549 - DNA, 782 bp, Cannabis indica
catttctctatacaactatacaagtacccagtaaataatgttgtacactaagtagaacaacatataatttggtttaatgttagtccaatccaatctttgtgatctttaaagtggattgcaaataaattaataaaaaagaaaaatatgatttgaaagtgagagttggaaactcagaagaacatagcaccagagagtcaatgaccaattgaaataaatcagtttaattcatttgcagagaaaaccctactgcactttcttcataatatcatcagataccaatttgatttgataatcaaaattaatcccacttcaatgcacttgttccttaacataattactttatgtccacaacttgaaatacaacaacaattaaaggactcactcacttccactttctcccagctttactgtcaatcctaattccataaacagaacacgtgaagttaattaggagggaaagtgaaatttaggtatgtgagatcgttgagcattagcgacgacctttaaagttattaggggcggaatggtccgccgctaatagtcctttatatatatattcatgatgaaatcatctataccctaatctttcattttccttcttgaatcccaacctcaccattattctcacctgggttagggctgcctatcacagaggtaatctctctatctcctttttccctttagtctttctgtccatttgaaattgattacactgtttttccttttagataaaaattgattacactttttttttttgatatatatattactatttttttttg

SEQ ID NO: 198550 - DNA, 922 bp, Cannabis indica
aatggccagacgtggacaacaggagtgcaggaggtcttaaatggatcatatgtgttgtttgcgctcatggaaatcgagataaaagatgtggtgtatgtggacctgtcttattgaaaagttcaaggaggaggttgagtcgagggggcttaccgatcaggtcattgttagtgcatgctctcacattggaggtcataaatatgctgggaacttgatcatctacagtccaggtgttgatgcaaagataactggtcattggtaagttccaatttgctaacatatttagtaactactttgatcatagttgtttttgctgtgtgattgaaaacagtttttgttgttgatgtaggtatggctatgtcactcctgcggatgtgcctgaattgcttgatcaacatattgcaaaaggcgagattatagaacgactttggaggtttgtgaatttgtgttttttttgatattatgctttattggaaagttaagtcgaatacattgatcaatgctgtttaagcctagttgggttttataagaaatggctttggggatttttcttacagtatttgttcttttctttaaaattacaggggtcaaatgggggtgtctgctgaggaaggtgaaaaagcgaaagaccagaagattccaaatggagttgaagttgagtcagttgacaaaatcaaggagaaagaaagtgaaactcaagacataagtacttcaggttgttgccagggtgctaatggcggggttacttgttgcagagatgtaagtttggaacagagtgataaaagtgaagaaaagaaggtaagtgtttgcagcaaagaggggtctatctgcaaactgtcgggctggtttagaaaattggatcaagcggacatgtatgctgccgcggctgtggtcagtgcagtagcaacagtggcggtggcctatg

SEQ ID NO: 198551 - DNA, 986 bp, Cannabis indica
aatttcattctattttactatttcagtcatgatttatttatatactaaaacatgctccccaaactttgatatctactaatcatgtctctcgaattttgacatgtactaatcatgacccctgaactttcattcatgttagacttttttactaaaattggaaaaaaaaatccttaaatccaataatctcaatagttcatagagcatttttaacgactttaaaagttcagggaacaaaaatcataataagccttaagaaatatatatatatttgttttaacttagaaaaaaatcttcaagtgatccaaaaaatataaaattaattgttggtgttttgaccactttcaagaagtcaactaattatttttctaacacctcaacaagttggttatgtttggcttttaactgtcataacatcctatatatacacatacatttggctcactcaagacacggttttggagaacaaccatttaatgcagaactaagttagtaatagtatagggttgtgctagagagagttctacaaggagaataggaagagagaaattgatggatcaccgttgttagagtgtatagtttcagtttgtgtttaatgtgtgtggaaggttgtaataaatagagattgtttactcttgaagtgacttctctcgtggtgagctgaaattgtagtcttgaaacttatatattggtgattcaaatttgtactatttttccttctcattcatggtatactgttatgaataaatcgtcattcaattcaattcattattttttgttctattttgattgctaaattattgccattgcgctattgattacttgaatcatttgttatggtgttcttagtgaggttatgatctgcaacaaatggtatcagagctgttgtagctcaagatcaagaactgtttgatcaaaggttcgaatggcaatggctaaattcgaagttgaaaaattcaatggagaaaatgacttcggactttggagga

SEQ ID NO: 198552 - DNA, 984 bp, Cannabis indica
agcttttcctctgagaaatctagttatggaagatgaagaagaaccctctttctctttctcaatctcaccttctacaaagcttaatttcctgtttcgtagtaacgaaatctcattatccggcaaattaatcgaaaccctcaatttcgatttcgtgaacttctgttgctttgagagattttcagagctattattggtaatatttacagaattgggatgtaatggagattgcttgagaatactcttgggtcgctcattaactgatttggttcgtaaattgacgctcctagactttaaaacgtcgccgttttcgtcgtcgaagctctccgttttgggtaccgccggagccatagaaaacagggctgcgttaaacgtcgcaatccgtacagacgatatagccgttgccggctcacctaaatgaccatttgggtgtaccgcagccgaagccactgagccagaaaccctggttggttcagtttgggctcggtcgtgaggtttagagctcgatttgccgaacctcctgatgatgactttgggttttgacctccggcgaatcggccaccggaaacgggagcatagaagacgaaggttcctattgaaaagtttaaacattgtaagaaaatgggtatatgggtcacaagaaagctctgactttgcctctctcttcaaaaatcaccatgaaaagttttagagaatattgaagagagcaacttcggcatgaatgaatgaataagtagttttacaagtattttaataaataaataaaaaaaacaaaaagaaaattgtgcgtggtgacacgtggcagtgaatgagtgtttgactgtgacgtttggtttttttttttttggttttgacggacagtgagaaagaagagatgtcgttcttaactgctccggtctccggagaaaaataggtacagaacagaaaagatgtgaggtacaatatgataatcatgtaattggaaatgaaaaatagaacaatttgttt

SEQ ID NO: 198553 - DNA, 1174 bp, Cannabis indica
tagtaacttcttcaaaaaaaaaagaaaactttgtaataatacatataaataaaacattcgttgtataacatcttcataaacatacttgtaggagaataaaaatactattttcttagaataagagagaacagcaataccgtagcaaaaagtgttgaaaattaaagtaattaacttggaaattttccaaaaaaaaaaaagcaaggcttgaaaataaatttcagttttatatactaagcaaaattcactacaaaggacaaaagatatatgattataaaaaaaaaaaatgtttttgatacgaaataaatgacggtgagataatatttattaaatttaatgtataatttaaaataaaaatagggagatggatccttatttaatgtaaaaatatttttttattaaaagttaaaaacagtactcttaataaacaaaatggtaggacattgatataatctcaatatgctggtctacatattacataaaagatgccgacagatgagaattaaactgtgctactattttattatgcccaaccaaactcttctatccttccacaaccacttacctatagatattaaccccctccaatctttacattatttcaatgagttctggtactcctatatcaatgagatttctcacaaaatggaagttccactccctactacattcttatgttttcacaaaatctgctacatactcattcttcttaacagaaaattttgctaactatgtattttctcaaaaccgtttcttcttcttaccatctctaactttaaatttcagcatctgcaaaagttcaccatacagagagaaagagaaggcagcaggctctttcacccctctaagtaacccacttaactcattgaatccacatttgctatattaaccctacatgccataacaatttaattccttggcgaatcttcataaccactcaacgagaagtgattcattcatttaaaataaataataataaaaaaaatacctatctcaaaccctcgccatgttccacgtgttctcctccatctaagtcacctccctcccaaagaaagtccatcgtcaatttctcaatgctctccattacattaccttggtgttggtggtttaaataatgacaaaataatttaacctattcgcactaatgcaacttcaaccaaaagttataaaaaaaaaa

SEQ ID NO: 198554 - DNA, 759 bp, Cannabis indica
ttaagtaaaaaatttacattttagttacaacaaattaattatgaaaagaaaaattggagaaaaaaaatcatattccattggaagaatattgtttatggatgttaaaaaaagtacttcttatgtaataataaataaattaaattatttcaaaataatactaaaaacataagtaatgactttttagtgaaattttcatatataagtctttcaataacattaaataaaataagaataaaaaaatacaagaatatttaattttatatttcttaccttgttatcaataattaaaattttagagacataaattattgtgactttattgggtttcgtaactttttatatttgtaaagttttttttttttttactattataagatattttatttaagagcattgctattaggctagcaccttctcgacatgtcgagttgcgattagctagcaatactccctaaaagctattatattaaattatatgagacccgatacttagttgaaccaatagcgatattaacttacaggtttttgttattttaaaaatttaatagtataactaatattttctaaaatactatttttttaatttttttcactaagaaaaacactccaatattctacaccacattacaacattaacccaatcccgcccctacctcaacacaaactctggacatcaaccctggcctcaagacttggagcctaacctcaaaacctagaccttgaccccatgacccgaaccctaatctcaagacctaaacc

SEQ ID NO: 198555 - DNA, 860 bp, Cannabis indica
tgaactttgagtttgaattggagatttcttcaagctttgaatgtgtaattatgacatttttgaacttcaatgtgtgtgtattaggcatgtataactatattgtgatttaagtttgcattcactatgttttgggcttagaaaccaattgcatagcatatgtgaaatttgagttgaattggtatatctttgaagttgtgaaaatttgggttttctgggtttaaacctagtcgttgtgaccatgtatgtggtccccgcgatgaccttaagcccaaaaatatgggatgctctctgtaagggtttgtcacgaggacctcgtggcaacaattcccttttgaactcggatttttcgtaaaacttattttggccataatgtttgactcagaaatccattttggaaattctttatatagctagagaacttgttaagacttatattacttagtctagagtttgagtcctaaatgtgaatatatattatatgtgattttcggattaaccctattttgtataaacttgggatgtaactaggaataacgacacttgctcctaatcaattgtggactagaaatttttctcatacattggaactcacgtaagacagcgaactaagcacatagcatatagcacactagcacatttgtatgttgtatagttagttatatgaaaatatgagttagggtcaataccctaagtttcctatgattaagcatgtattcatgatatatatgaataagtggtaagagtattgcgactgaggcataacaaggttagacttggtgactaagaccgagataaaccctattaaagccttacataagtaaagtagatgtgtgaacataacacgtggtgtctataccata

SEQ ID NO: 198556 - DNA, 1492 bp, Cannabis indica
tattaatgtaatatactctatgataaatgttattatactagttatgtgttgacctcacttttagccaacgacagtgaatctttattaaagcgataggaataattaactaagagaaaagcaaagattgtaaaggaaaatactaaatttataaaggttcagccccttttagttggtaatagcctactccactttttgttgtactaacatatgaggaagaatgaactattctctctcaaaatctgttacaatgattcttcaagcaaattactcatagatcatgatttctaccttgagtgttctcgataaattattttgtatcgctgaatagtgagagaagaccactatttatagtgattagttacatgaagaatagtttctcttaatcaataataaataaatagaataggaaactttcttatttcaataattacaataaagagattcgaaagtctaggctgattgtctttattctttgaagatagaaattaatccgacaaatgtacaaattattttcatgacatgcaagcttggaattaacaatgtacatctttgacattgctaactcgcaccccctggtcggtacatgcatgttacttacgtgatcaagcaggtcggatgtctacatgtaaccttgttcagacatcttaccatccatgtatgacttttaacttcatatcaatctacatggcttgttaggagtagaatcatctgcccatattatgaaatatgatacgcgggtcacctagatagatgacacatcatagtgcacaaattaggataatattttctccccaagtctgcacaggatcttcttggtcgcacctgcacttattcggctaggaggctgtccagatgggtgacgcatgtcaagttgtcaatttttataccatgtgacttgattgaaggtctctttggtgtttcggccattaaatacctcttaaatattgtacctcgagtcacacactaatgattgagtgacacctcatgtgtgacgtctgtacttttgaaatgagcactaacgtttacatttaggggaaaaacccaaatattcaaatttttaaatgtattaatcacccctttcaaatacctataaaatgggattaaaactttaaggaaatcttttagacatttttacttttaaagaaatatagcaaaaattccttcttgtttactctcaaatgttcatggggatttactggaaactctattgcttataccctctgagcagatcaagaaggcttcgaatagtgcataagttatttttccctttattgtatgtaatatttgttgaatatatgcattatttttgaatttcttactacaaaattatcttttctttaactgcaattcactgatcatagaataggtgatattagggcttgtaactttaactaacattcgattagacattctaattctctaattacatatcatcttttacatgaaaattttcatattcacctattcgtgggactctaaagatttccatata

SEQ ID NO: 198557 - DNA, 614 bp, Cannabis indica
cctctgatttggtgaagggtttgaatcctctcttataaatctttgtttacttgtatttttaactaatatcagtttcttttcttgtaatttatttaagagcaaattattagcagaagaatggctttttacattacttttttctgagattttgatttgtaattgcagtgcgtggtatgatgtattatagaagggctttaatgttacagagttatttggagaagagatcattgggaggtaatttcttttggaacttttaggtgcatcacgttcctttttgggataaaggacttactgccactttgtcacaattttcctgtacctgtagttgatggatattctcaaggcagcatccctacaagtcaaggttttgagttgtcgcgtgaatcaagagcacaggcagatataaagtttacctatgttgtgtcatgccaaatttatggccaacagaagcagaggaaagcaccagaggctgctgatatatctcttttattgcagaggtattgatcctttgaaagattgtcaaatcttgtcttggtaggataacgatatagaggcctctttattgtccttatgcctgtgcacatagagtttatatacaatttatatatatatat

SEQ ID NO: 198558 - DNA, 981 bp, Cannabis indica
gcccacgcgcgaggttctaaagtatcgtgacgcgcgcatgatccatgccgtatgtgtaaatagtagcgaatcctgaaacggtccaagctttggcactaggcagagctggtcctcctcacgtccttgagtaagtttgtgtgtcgcgggtccatagtattaacgtggtctttctaaagaaaatgaacgtgagtggctgaagcctaatagcgtttaaaaactcggcttattattggtcctatcatggacggtccactccatattatcttttattataaaatgctttagattctaaagaaaatattcaaagaaagtttcagataatttgttcaagtggacaaactataataataagagggaaagttgaattttgaactgagatttttgtcggtattgcctttgattttcaaagtttttaaaacgataatgattaataatgttactataataaacattcttttgaaattgtatctttaaaattgggtgggacattggtctactttagttcttaattgacaacacaaagccagattttaatgctttaacaatatacatttcgatggtatataatgtatccatcgaatttatgtttgtttgttaagacatcgcttattctatgggtactcaatgcatttcaaactctaatgcgtttacgattatattggaattggcccatatttggtgttgataaattgtttcataaaaaactatataaaattatgtcaaaagagtaaaccgtaacagtgaaaattgcaatattttttgagccattagaaacctttatgtgtgggattttattactattcatattaattactcgagtacttgctaatcaaaatagatacttgcatttatatgttgttaccaaatttctccaaaaatacttattaaaacatttaaacgtcaaataattataacaaagtttcattaaaaaaattgttatgtttctatatttactacatttaaacataaatattttcgata

SEQ ID NO: 198559 - DNA, 1609 bp, Cannabis indica
ggttgtttattacagccaaaattggatcaagtgtagcagagtttgaccaatttgaagcaataatctccttgctgtccgggtcagacagccacaatttttcaaatctgaacctgctcttacgtttgctggtgttgtgttgtgctgaaagtagatcgaatgaagcgcagatggcacgatgatctgactgataatagtcaaggtgctggacatttggtgtgtggaaaaaatcctcccaatgattattaacgaaacaccaatctaggcgttccttaatggtgttagcggctgtacgatttcttgcccaagtgaaaggatcaccctcgatcaaggtttcatgtagacatcctttatcaatggctttccgaaaagcttccatttgagattcacttcgaagtgatccacccgatttgttactgttaaaaaggatttcattgaagtcacctataacaaaccaaggaaggtgaggagcaacatccgcaagtcgttggagcaaagtccatgaggctgatctgttatgagcttcgggagcaccataaaagcaggttaaatggaaagttgggctgtcattcatcttcagataacaatcaaaaaaatttggaccaaagttcaagagagaaatgtcaatatcatctttccaaagtaacattaggccaccactaagacccaagcgaggagattccaacccatttgagaagaggagtgattgtcggaagcgagaaactgagtttattggtagttttgtttccataagaaacaaaacttggggcgattgctgctgaacaagcaaccgtaaatgtctgaacgcactagagttccccaaaccccgtgcattccagcttaggattttcatgatgagttgcggggttgccttgcaacctccgcacttgagtctttggagaaactagaatcttcattttcagaaactatagtctcaatgtcatcgtctcttgacaaaggagaagatgatgatccttgggcatttcgacatcgtttcagcatactcctcatggacaaggagtcattttgccttttaaaagtggttgctgagggctgattttctttagctatggacactttagctttagtgtaggttgggagatgagccatagattgaggaatagttgtgggtgaatgagtggtgttgagagagattggattaagaacaggtgggtaagtagcataagtgttgctctgcaaaacaggtatgtataagtgagaaagatccgtgacagcaacagtagctgatccatttgtgttggcaccagatgtagtaaaagtctcagtagaatgctgaagaacttgcttatttttttggttactggtgtgtgaagtggagtggttcaaattgcttgcaaatggtttcgatggtggaggttgctgatcattaatgttgcaagcaagtgggagtgtgtttgacgagaatgatagaggtgacactggtgtattggtattgctggtgtgggaaattgggtgataattgttgctggtatataatgcaggaggtgatgaatgtgggttggtgatgttgctttgatgagagggaatgtttggggtgtaaggttgcagagatgcagagcgaggaatgttactgaaatggctgtagggagtg

SEQ ID NO: 198560 - DNA, 736 bp, Cannabis indica
ttttgtttttggtaatttcttctatgtacactatctaacttatattattatttatatgtcaaagtatcattttttataaacggttttatatctgatatgtagtcgtatatttcactggagtaaatattacacttaaaaaaagttaactaatcaactaatcatacaaaaaaaaaaaaagttactcaaagtgtataggggacactttgttaggctaaaaaaactgatcagaaggctcataaaaagagttagttgaagtctatttttttggtgtctcctctagactctttcttttcataaaaataaaaatgaacaaaaaaataatctcataaatttatcgtactctaaaagttgtcaatttttttataatacaactttgtaactatcaattaatgtaaaaatattacattctatatataaatctaaaaattaaaagaaagattgtaatgaagtgagagtctgcccacgtttgtgctctgaggcagttttatgtcccctttggggttaaccgttttattcaagcttttttccagattttttcagtttctttcctcttttcttgcagttaatttcctcttctcctttcttttacggactggtttttccaccattatatctgcctagcagtatcttcctctttctggttcatattttacttatggatcctctaatacacaaaatgaaagcaaaaattaatctcactgagaatgaggagtctgtatttgaattccatgacaca

SEQ ID NO: 198561 - DNA, 1066 bp, Cannabis indica
ctattcaaggctcacttttgggttcaaactcatagacttcctttcttaagtaagtccagggctttggctaggaaagttggtgaatgggtaggagagtttgttgaagtttatgaggattctttacatgaaggttggggttcttttctgcgcacccgagtcttaattgatattactcaacctttgatgcgaggcaagatggtgactctgccaaaggtccaagatgaacactgacttgagtttcggtatgagaatctccctactttctgcttccattatggcattctgggtcaccgtttcgataagtgcaaggcatttctggaattggttgataatggtaaggatcctgacttgccatatggtcctcaaatgattggagataaacttcctaaggccggttatgacaggtatcgtaatgatttttcgaaagtaaatgcctatccttttctcacccgtttggccaagaaaactattgcctctactcttcctgcactttatactaaccccaacatagccataggtgcaatcccacaacctaagcctcttactcttgcagaatcaaacatgccagatcaatcgaatgtacccaacaacaaccaaagtcctgaaatgccattaccatttccttcatatataccaacagctttccattcagctagtagttccacaaatcccattcccacacatgtacctactatcccagttcatttgccactcaaaaactccctgaatactgagtccattgcacactatccctcccatcccattttaccaaagccttctgacagcagccctgttttggtaaataaaggcaaagcaattatgacaagtgatgagtctattgagttgggtgattatggtaaaagtttcaagagacaaattgatcccgaaaacctacgcagtgttcttaaaagatgtcgaggcaacaaaagggataacattgatacggaggagataattattcagcatgtttctcgttcttcacaggattcagctgaaaacaatcctgcgatttcagcggaggttgcacaccagcagccccgcccgcagccatgaaaattataagttg

SEQ ID NO: 198562 - DNA, 1044 bp, Cannabis indica
tttttcatagatgggctcggtttaataagttgtattagctagtcttaatcagtcaattttttgttcttaggttcgttgtctggtctttattagtttttctcataattttgtagttctacatgaaatttagtttgtcggtattatttgttttagtttaattaagaaaatgatcctggtttcaaaatagttttatggttgttatggaatttgtttgcggaaggtgattaatagttggatggaaatgcagtaaggtgggtagaggttagtgccacgaaaagtgagagttctgcgcctttatgtggttgagttgtgtcttttttggggttcattatgccatgctaggtgacttttgtgatatgaaaaaaaatttgttgttgttaaggtgtttggtgtaatttgtattaagttactattacttttaggagtattgaccattttaattttcttttagttataattaatgtggttttgacctcgtctagtaggatgatttagtttttttatcaatttttgagggatttctatggaattatttatcagttgtttttatataaatgctatttaatattgttgatatatagtgcattgaagatgattaaattggttggtgttaattattaaattgataattaaggttttgttttactattttagacttaaaacttttgggttatattttgttaggatggtgttgatctggtgttttatgggattaaatagttagaaaaaacaaactcttcttctgcttctagtaaagcaaaaagtaatctttcacaaattatgttagaaaaaaaattatacctaaatcctattggttgacttgatgccacaaatttcatctccaaaaacttttatttctcaaaaaaaaaaaaaaagaaaaaaaacttttaaacttttacatattaaactactcatttaacccttgtcttttttccattaacttattatccaaataaatattatacttttatacttgagaaaattagagcatgtttggtattgttttctgttttttgttttaaaaaattgtttttagaaattgag

SEQ ID NO: 198563 - DNA, 2383 bp, Cannabis indica
aaggtgacgcagaagcttcatcagatgaggaacttggggatgcttcaacaattgttgtagatggttaattgggatgattagctaaagcaaaactagatgatgatgagttttcaacacccaaagttggcatgttgtgttattcttggaaaatacaagttggaataatagcaaaagggccaacaaaaacagtatcagtggtgacattagtagaattaaagagagagttgcaaaaggaaaatcaaattcattgaagacaacatctcttgaaatgtaaattatacaagaagaaggaaggcatttgtaaccctcatgtttcaaactgtagcctaggaaagtgcactttttagatctaaactcaaatttatgcttgttatagggtctgatgttagggacacaggcacatccaaagacttttaaagtagcatagtcaggatatttgagaaaaaatttgtgtaagggagtgtcatttttaataactggtgtaaggagtctatttctgtacatagcaagatgttctaacaccctcatccaagtaagataagggcatggaagcctgagcaagaagggtaagagcagtttcaatgaaatgtttgtgttttctttcagcaacaccattttgctggtgagtagtgggacaagacaacttatggttaatactatgcttgatcaaataaggttctaagacttcctactctcccccaatcaaattgcacagaaataatgggggattgagctcttttttcaacttgggttctataattgatgaatgtttggaaggcatcatttagtttttaaaagaaaaatccaagtgtagttagaatatgcatctataaaatgaatattatattagtagcctggtgatgaaatcatgacagagggaccctaaatgttagtatggataagttgcaaaggtttagtgaaaacagtatctaaacaaggaaagggaaatttataaatttttcttttagaacaagcattacgaaaatcaataactgttttatttcctttaggataggcaagtttcttatgccacaaacaaaaattattacataaaaacacagaggtgacattcacagttggggaagtaacagtacatacgacaatgggattaaagaacagattagacttggtgatgtgtaattgggaaggctctttgacataaagtcctagcttaatttgtcttatcattagtatttccttcgaattctggtctttcacattacaaaaatgaagataaaactcaaagaccgcattattatttgatgcaaatttagagacaaagatgagatttttggcgatatttggaacatgtaaaattcactttaaaacaagtggtttagaagagagatatgaatgaaagagaatgttaccatttttgaattagaaggccaacaccatcacctatatgcatctgacctaaaccaacataaggttatttgtgagtgaagtttgaattgcttgtagtgcaataagtggtagcacctgagtcagggtactaagcatcatcaacaacactatttgtagtggcaagttgagttgtatgtttagtgacattagttgcaccaacaccagggaaatcaaagttgaacttttgatagcatcttgaagcaatgtgactaggtttagagcagaattggcaaactaatctcgatccagggatcatggaagaatgaggaatagaagtagctggtgtggatgagccacaaccaacattgtagtgatttggagttagactagatgtgttcgatcttagtgaaataaaatatggattaaaaagttccatgacctaaattagttggtgaatcattgtcaatgagagatctggtattttcactgttagaaaaggaagaaaagctagatggttttggcctgaaaccacgataaatagcaagactaatagagtccaaatctttattatgactctccatttgatgttcttgagacgacaataaagtctcaattttagcaacagagtattgacaatttcgtgaattaatagaattgacaaaggggaggagcccccttggcgtgcatacgaactagcttctctctcgatgaagaagaagaaagttactcgaaatcctacatttcgatctagagttgaagatcccccttcaaaccaagaatttaagattgttgatgaatctgccattgatgaattagatggaattgcgatactagagatacaatcgtgttcacagatgattgaggatgaggaactgattgaaaaatcaaatttgagatcgattgaaaaattagtgaatggtggattgaagagttctatagaagctatgctgaacactaacttggctaaggaagttgagaaggaagatttccaaacctcagcacaaagacattaagcgaagctcaaagaaggtcaaaa

SEQ ID NO: 198564 - DNA, 1577 bp, Cannabis indica
aactttcaaaccccaaatttttacgacaaaaacccccatataatacacatatacaacatatacatatatatatacatatatataaaaaccaagtgaagaggttaacaagagccaaagccaaagactactacaacaaacaccttcttctccaaggcaagctagctaattaataagcagagagaccaagaatatttccacacaagaaaagaaaggaattcatatatatatatgtatattatatatatgtatatatataatcatccttttttggtacaaacacaataaacacaacaactaccataaattttctctctttctctaatttcttaaagatgggaacttttatttacaaaattgccactacctttgttcttcatattcttcttgttattgctctatctcttagcttttcaggtaacattttcattattttacattttgggttttatttaattgtgattattattattaattaattaattaattaattaatttttttgtttaattaggtgttatgtctttggggattaattatggtcaagtggctaataatttaccaccaccggctaaagtgttggaactattaacttctctcaaagtaacaaaaacaagaatttacgacacgagtccaggtgtcctaaccgcattcgctaattccaacgttgaaataatcgtgaccatagagaatcaaatgttacctcaattaatggacccacaacaagcgcttcaatgggtaacaacacacataaagccatactaccctgcgacgcggatcacgggaattgcagtgggaaacgaagtattcacagacgacgattcatcttccttcgttacctacctcgtcccagctatggtcagcattcactcagctttagcccaattaggtctcgacacgtatataaaagtctcaacaccaagttccttagctgtcctcgaaaattcctacccaccttcagcaggaacattcaaaaccgaggtcaacaccgtaattttacaactcctcaagttccttcaatcaacaaacgcaccgttttggatcaatgcctacccatacttcgcttacaaaggagacccgacccgagtctcgttagactacgttctattcaatccaaatacgggtatgatcgacccgtacactaagttacgttacgacaacatgttgtacgctcaagtagacgcgatcatatttgctatggcgagaatggggtttagtaacatcgaagttcgggtttcggaaacgggttggccctcgaaaggtgacccgaatgaactcggggcaacggttgagaacgcagctacgtttaatagaaaccttttgagaagacaattgggtaatgaagggactccattgagaccaaatatgagacttgaggtttacttatttgctttgtttaatgaagacatgaaacctggtcccacatcggagagaaattatgggttgtttcaacccgatatgacaatggcttataacgttggtttgtctacattggctagtactacaactactgccacgtcatcaacaccttcttcagcttctatttctctcacctcttctgcttcttcacataaggtaaaaa

SEQ ID NO: 198565 - DNA, 866 bp, Cannabis indica
tcggtttaatccgatgggtatgggatgtttctccgtgggtttgggcgagatgaagagagaggaggcagtgggggcgagaggaagagatttgagatttcaaatgagaggggtattatggggaatatggtaatgtggtcatatatggggaatatggggtattatagatttagggggaaaatattaagtatatgtaaatatagaaaataaaatttctctttttaaaattacaattgcactaaaataacaattacgcaattatacacaataaattttaactaatttatatatatgtacatattgcaacacttaaaaatgaatatacattacaatacaataattaattaaaaattcttacaaaactttttttaaaaaaaaaaaaaaaaaacttaacaagaccaattaatacagtacacttgttttacttgaccattccactagtctcacatttgaatagacataaatatatattcctatgctctataataaaataccaacaaacatatatgtcatctacacaaaatttttcagtaaaccaaatattcataatttagatatcaatcatctatcatataaaacaactccatataattatatacacttatatctactatttacactatcataactacaatatatacttagaacattcaaaaaaagttatatacataaccattacaaattttaaaaaaatataaacttttaaaattaacattaaaaaacaaagcaactaaatagaatattcacaaaatgaaccttcaagtaattctcaagcttactttgtgttgtatgaagtttacccaaacaaatgtaaatctaaaatattcaaatacatgctagaatttttattgttctgttaactttttttt

SEQ ID NO: 198566 - DNA, 1387 bp, Cannabis indica
agtatagagttaccctcaactttattattactataaatttaaataaaaggaaagaaagaaaggaaaaagggtaataacaacaatgacattactacactctttcccagcctcaagctgttctttttaggaatcaaaccaacttagttatttctttcagcaaaaaaagaaaaccaacttaattgttgttatgaataattgacacgtggcatcagcagaagaaaatctacttggcaaaaagaaaaaatggaagaaagaaaatatggttgaggaggtcacgtttgaagagatgtgaagttgaatgaaatggttgtgtggatttgggtcaccaactattctggccagctgtgacaattgcttaaatcacaggttttacccattgggtttgggctgacgtgaccgacagtcttcaattttcatcagatcaggcccctattatgcgcccaagatctacacaccatacgacatcgttttgggacctataatcctaattaaaatagtttgattatttgaattgaaatggaatttaattaattaatgtgtgaatcaacgtttggtgatcctctaatattttgccttgcaaattccaattattgatgtttgtttggtttgatagaaattaattagtgataccatacttaaatatggttagggatattttaacaaaaattattatattaaataatataagatctaatatttaattgtattaataatgatataatattttgaataatgttagacgacaataatatcttttaataattattttttgagaattattgaaagatactttagcatttttctcggtataattaaacattagatttcatataatttaaaaaagtaacttttaaaaaatatcgttaacaattgtaaaatgtcacctataaaatatattcaacattattgtgctcaataataatactatttacttttaaataagagtttattgataatattgtttagtattattactagggaatccaaatgttgttttgttacttacttcacacgtgaatttcataattaattgatcaagcttgtctgtagtttgaccatttatttaagggaaaagtagtgtcttttgttgtagaaactagtgactattgttaccctcttacaaaattaattaagtattttatctgtgttgttcaagcttcgttcgacgtttatcctcgtactattcataaaataaataaaatatgggttattttctttttcgtattgctcagaatgtcttcttccataatgaggggtttaatattttaattttaaaatttattttatatgagaagtttgcacagccgaactacatgtaaccacgtacactatttctatataaagaaagactttaatggaagtctaaccatataaatgttacatataa

SEQ ID NO: 198567 - DNA, 1143 bp, Cannabis indica
cttacctacatagccattcttgcagacacgggcatggttgttttgcgagatttcgcaaactgtgtggatcaaacatctcttctgcttgataggtggtagaaaaatttgcttgcaaacgattgttgaatttgttattgagaggctgactcaataacaaattcaatgaaggcattatgattggtctgagaaagtttgtttgctagcaaatcatacatcactctctagaactttaggtctggcaatgaagacattatgattggtctgagaaggtttgtttcctccacttatctggtttaggtctgaccctatgaagttttcaccaaatctattgtaacacactacaacagagtgaccatactttctacagaccaggcaagttggtcgagttgtattggtgtgacctcttccacaaaattttctaggattgccacgagtgcctaaaatcaacctccactaccagaatactgattgtgattgctgtgattatttgagccacgaccatgtcttgctgtgttagatccaaagttgcttttggtagcaatgttagcttaaggattagtagggttgtttggtttgctgctgatggtaagtgtctgtaacctttcgattttgttgtcaaaactcaaaagtatatcttgcgatttcttaccaagttgtacttagtcttgcttcgatttggaccacgatcgtgaggtactctgcatccaggccagataacacatttgctttaaggtgtgcctctagataaggatcacttgcaagagcaagaatgtcataccgatttttcttttgtcgtagatattccccattggggttgaacctttgggaacagtctgaatcaaggtccttgtgtcatccatcttcgatttggaatatgctccataaaggctttccaaagctctctacagacctactgcagaagtggatcccatagcttcagtgacaattctttcggtcatagagctgtaaagccaacccatgagtagttggtcattaatgatccattgttcatactagtttctaactcacctttgtatttagcttcaccagcaataggaataaattctggtgggcacattttagtgccattgagatatccatgtcacatgtgtccacgaagaatggtggacaccatcatcttcc

SEQ ID NO: 198568 - DNA, 901 bp, Cannabis indica
ttttttttaaaaaaaggtaaaaaaaattgtatatgggattatttcaatttattctcgtgttatattattattagaatatttaaatattgagtatcatataacttaaaaaaataatttttaaaaaatattactcgtgaaacataatagacgcggctagtattcaataataatattcatttttaatcaaatacaagaagctttgactgacaacttcgaaatcactttgactaatttaataataaccatgttgtccaaattattggatgtgcttggctagattgtaataatgtgtatgtatatgtcttacgtatggtccattattggtccacacatcatgtcaattttgttcagatttacagtatatggacggaaaaagtaagtcgatccttatatgtttcatgcattaattcttctaaattatataaagtagaatgaattatgaccaaaacttttcatgaaacacacacgacacattcagattctgactgatcgattatggaattttatggatcatgcatgcccaaacaactctccctttccttttataataattctatttatatatatagtgagatttttaaataataaaggtgtaatttttatttattgaaggtataaattatgttgtttttttcttcattgaaggaatataaactatatatgttttcgtagaactaattatttagtatcaaaattatgattcataaaaactcttatatatataaattcacgcatgcatgcgtagaactaattatttatgaaatactttctgcgataccctaaatcatattgataacttttcaaaatatggtgtagaatagttggattatgtaaggatattgacttgtcaaatattaaagtggacccaattcatgcactttaatacttattttttttctca

SEQ ID NO: 198569 - DNA, 1735 bp, Cannabis indica
cataaagtctcacataagaaaaccaaattgggtctcttttggaatacaagatcctgtaggaattgtaaagcccgtgggttcccaagcccacagcaattccaactcaggacactcataatccttggtgggcctgagaaccaggacccaccatagacccattttttgatccatcaaacacatgatcaattccttccacctcatcctcatccattacttctttgccatcctgtcccaatcttctttttttagaatcaacgataatcatggcctcagtaaggaagttttcagctagtatttccttattggcattgattaacgcaatcccttgatccttggcaattcctttgtgaacccccaacccatgattgatgctatttattgcaaaatctccctcaacagtagtgttcttatcttgcaatccctgaatactcgtaggagtaattgtaggcgcattaattgctgtaacatcatcagcaaattgagcatccgccgccgtgcctgttcgaagccatctagctccgatcaacttattcttccgtttaggctccgctttcatccacaagccatatggtttttgaattagctccaatggagtatcgtatagacgcgagcaaaatctctcagaatggcctataatgccacagataaagcaaaatgtagggatgaactcgtatttgaaatcagtccataaccagtcaccatctggtttcttcagcttcattctcctcttcaacggtttttcatcattaatactaactcttacacgcagataagttctccaaattccattaaagttcttaggatccgacttaacatacgacccaatataattagcaactctctggactatagagtcagacataaaaccaggtctaagattatgcaactgcacccatatatctaggcgacaaagcttcactaacataggttcctctcccttcttgagacgttcaaaaactagctgaaacttattaaaagtccagggactcccttctatgactctttcaatatcagcttcatgataaaactgaaagaggtacaggttagtttggagttccttcacgaaaatacctttcccaggttgccataacgatgccatcgtgtgctgcatggacagaaaatcaataactctgcttgttaagaatttacctacaagacaccatctatcatcaactggttggcccacatcctctgctaattcacattacagggttccttcctcttcttcttccagttgtatcttcgagtagctatcttcaaaatctggtggcaaagtactactagaagccataacaaaacaaagtttctgtctgtatcactcaaagaaaacgtcagaaaaatacttacactcacactcacattccacgcatgtaaaaagacaagactctaatgagatattctattttttcaatttcaatttgaattaaattagttgctttaagttaaattggtattatcccattttaaataggagtgtctgtccactaaaatgctctgtggcagttttagttttgtatgagttttttacaagttttttattttgtttttacaataactacctcctcagccattgattttctggatcatttctaatcatcgttgcccttcatctttttccttcttcctcccatcatttttctttcaattggtaaagttttggtttttttatttacaacatatataagctgctttcagtttgcaacaatggaaattttgcctcattttctatctacac

SEQ ID NO: 198570 - DNA, 829 bp, Cannabis indica
atgatacaaaaatcctttcttttagttgatgatatttattcaaaaaaaaaaaattgatcgttagatatatacatatatatacaccttaataacatgatcattataattattttgcagagaaccccaatattaaagtcttcatttttataattgagaataatatatctatatatatagtctgagtctgacaagaagttgtacctattttagctttcttcactaattattatttctacccttgatagttgatatgacctttttgtttaaaagaaaaaaaataatattattttctcaaaatataatttggtatacaaattgtagacttgttaagtagaagaaaattcctattttttttcaaatctaattttagaattgatcattatatataatattattatagaaatcctcagctattatagcaaactcaaggtatatatgaatatagacatgtgtgtttgtgtgtgcatttatgtaacatatatatatgggtcaaaattgttggattatgatcaagatctcttgatcataatcatatcattcaccatcatcactctaaaatgtggactcaccacaaaatttgaaattaacttgctatactgccaacctagctaggagctagctatacatacaatatataaatatatatataatatttataggatagctcaaaaagcaatatttgcaccaatttaggttttgcttttatttgaaaagaatcctcttgccgggtgtctttccatgttctcactttgtcataattttcagtgaacttgtaataataattcatgagaatctgtgaagcaaggcttagctatatatatatattaaa

SEQ ID NO: 198571 - DNA, 1285 bp, Cannabis indica
tggtactttcattgagagctaagaaaaattcgataccaatattgtatactacaacaatagtagccaatagaaccactatcaccaaacatgccgctcgtgatggggataccatcatggatgagttaatcctcttcccattacacatgcaaatgtgagtgttactagggacggagagacctcagaagtgagcatcagccctgccaagatgaatccgcaacgtgaaaaatacatcgatgaagatcccattgacgagaaggatcgggaggaacaggaggatgatcttgaggataatggttataacaagaacgattaggagtatttacgagcaagatcgcaaagtgattcgaatggctcgagaatttgctgagaccaaacagaaattggtggagcaggaagagttctctcaaaaaatgtgagaaaccatagcatggctataggccaggatcgagtatgaaaatgaagttcctaaggaaaatactcctgacgagcctactccagaagaaaataataccacaaaaaaggctaatcctatagatgttggaccttctattccagtaaaggaaaaaggaaaaggtatcatggaggaacccgcgaacaagactattcctaatgctcgaaggaacaataagaatgtagccaactaaactgtatgaaaaaaaaaaccgccaatgctctagggtaacgccgctctattgatctgcgaggcaaagttgtgcaaaacgataagcttggtgcttaggtataaaggcatacagttcggggatagaaaaaacatccaagtgattatgttaactaaagtgaaagggtaaagaagattcacccagaagatagtatgtcaatagcggacctccgggaatgcttaaatgcaaagagagataaagccaaaggtgagaaagaaagaacttgtggaggcgatcttaggaatagtatcaatgataggtttaaagacgcgagttctcggacgaccatacctgctgactcagaattcagtcaactaacagaggagctttatttattattgataatcaccacgtgtaaataataatcacaaataataaaggtgacactgagatttatagaggtttgacccccttgtttagcgggtaatgacctactcttcttttaattgtattgattctcgagataataccatacagattacaagcttgaatcttgtaatttctagtatggttctcttcttcttcaataactgagtgtttacatattcaaaacttatgaaatttatgagacttatgagactatgtgaagaaaataggaatagaaa

SEQ ID NO: 198572 - DNA, 1649 bp, Cannabis indica
attattcataataaaacttcaagagtttaccattccatgctcggtcaaagattgagtcgttaagatcaaaaagtcagtatgttgcattacctatattttcagtgataaggtatggaccctccaagttttcgccaaaaaccccatgtgctgagttgcaggtattatgcatgactttatgtaataccaaatctcctactcacagacttctttccttgaatttaaagttgatatagcgtgatgttctttgttgatagaccttattctttacctgagcttgatcgcgcctttcttccaataaatctaattagagaagttgtcccaattcattatcttcaatgttaaaagcatcacgacaaagggagtctgcccgtacttctatgggaaccatggcttcacatctataggagagcgagaagggagtttcactattcaattgatcgagtagtggtattgtatgaccatgatacttgtggctactcctctggccagacgtcctttcgctcttcaagtttcattttgatggtgtgtttgatgatctgattaactatttcaatttgtccattactttggggatatgcgactgttgaaaatgctttttgtatccaaagtcgtcgcatagcttccatatttctttgcagttgaattgcttgatgttatctgaaattagcttgtaaggaatgcaaacctgcatatattggctcgatacacaaactcgcatacttttacaactattattactgtaagagcttatggcttgacctatttggtaaaataatctatagcgaacactgcatatttaactcctcccttgccctttggttgctcactaattaaatctatgccccgtattgcaaatggccatgggctagtgataaaagtaagattgcttagtggtttattgacatatgtagcgatttattgacatttttcacatcttttgtcaaagttgatcgcatctgcacgtagactcggccaataatacccttgtcgcatgacatttaaggctaaggagttccctcctgtgtggttgttgcatatccctctatggaattcttgaaggatgtaatcgcattcatcaccatctatacatatgaagagtggttgtattaaaacttctatgatatagcttcccgtcatagataacgtatcgagtagctcaataacatagtcttttggcttcaatcttgtcgtcaaggagtttgccagtttttagataattgattattagagtcatccaagtggtttcttcacgattaatcgtgggtcggtcaagtatgtccataagaattacatcgagtaattcgacttctcgagttgaggccagtcatgccatagcatcttcctaggagttctgagctcacgatattctccaaacaataattttcttaaatttagataacaactcacaagtataagctagatatttttccaatcgtcctccttgagctatgtactctccattgacctgatagaccacaatctaggaatccctgaaggctttaaggtatttgactttcattttaagtgtgagcttcgatctcgtaattaaagcttcatactcgactttgttgttggtggcgttgaacccaaatcatatagccacatgaactttatatttatttggattgattagcataatgcctttgctt

SEQ ID NO: 198573 - DNA, 1145 bp, Cannabis indica
aattgtagttaagttatattaaagattagttagctatgtacaatacatttcatgtaactaaaaacacaaacaaaaataaataaataaaaacgcaaataatggttgtaattttgctttgttgaaatacatgtgagactcgtgcttattaattaggaggcgcagcatattcatttaaataatattgttttttttccactttaaaaatatgaaaaatattcattagggtgcaaacaaaatagagtcgtaaatatattgaataataaaatttaatatgcccacttagacatcaagctctcatagctcagttggttagagcacccgtttagtaagcgggaggtcttgagttcaactctcaatgagagcaatatccgatttttaatttttaaaaatacagtcgtatcttattaacactattgaaatcaaaatcaaatatcactaagctgcctgtatttgaacaaataatttgatcatatttttcttcttagtatataatctggaacttttttgaacaaataatttgatcatatttttcttcttagtatataatctggaacttttttaggtatatttatgcctcttttaaatatacaatatttgttttcgttatgatctctttcaacaaaatatttaagtccactattcactcacctgagtctaagtaaaaatacagtgtttgaccttgaggtagttatgcaaataattatcaaaaggaaactatttgtgcaaagtgaatatatataagattattttgccaaacacttccattttaactgataatttgatgaatgaattatgatgatatttgcagtaccttgtaattctatgatagaaaatgttgtagatttgtaattatttttgctatattctgtcaaatcacggttaaatatgttttattttcaatgataattttgtagcaaagaaaaatgatgtcatttttatcaaagatttccgaaatttgtactcttgtgaatttccctcaaaaatcacctttctctgtgttgttaatacaatgttttcaaacgatgatcgaagtttgaaattgggctcatgcaaatccaaatccaaaccgaggcccaagcattttgcttctttcagtaaatgggcctccaattttgtacagccaccaaagatcgccaagaatttgg

SEQ ID NO: 198574 - DNA, 3148 bp, Cannabis indica
agaaccctggaaagtgagcttcacagactcttatataaagagaagagttacaggcagtagcattttctttgttaactggcttaacctcagagacaagaatactcgctatttccatcagatggcatctctcgacgcgctaccaataaattcattctctccagcgccctgatggctctactgctaccgatgcagcttccatcttacataccattgaacattattttgctcatttgttcacgagtcagaatcctaatatcgacttcattgaaaatgttgtgattgggatcactaatcatatttttgagtcgaaaatgacaaaatttcacgcatcttttactgaagatgagataaaaatcgttgcctttcaattagctagtgataaagcccctagaataaacgacttcaatggagtttttttctaaagaaactagcactttttggggaaggacgttattcaagcagttcaaagcttcttgaatggggatgctgacattgccacaataaataagactgtcatagtccttattttcaagcaagctcatccccagtaaatcattgattactgtcccatcatcctttgttccaccctttataaaattgtctcccgagtgttggttaatagactaaagcccattcttatccgtataatatcccccactcagagcacttttctccccaatcgattaatctcatataacatcattattggtcaggagattatccattcccttaaccatcgcaagacgggtcgtattggatggatggctctaaagctggacatggctaaagcctttgacggagttgaatggattttcgttcggaaagtcatggagaaatttgccttcccaccctaattcatagcccttgtcatgacttgcatctctacagccaccttctctttctctcttaaccagcaggctctaagacattttcaaccttcaagaggtattcaccaaggggatccactctatccatacttatttctcttatgttctgagagtctctcgtctctcattaggccatacaaaaaccacatcacttctctccttggcattccaataaatgactcaattggaaatacctaggcttgccacaaaacttttggtcgataaaaaaaagaggccttcaactacctcaaggatcgggtttggtctcatttgaacaaatgaaattccaaacacttctccaaaagaggaaaagaagttctcttaaaattggtagtccaagccatgccctactatgacatggcttacttcaaactcccagctttctttcattccaagcttgagtctatgatggctctttttggtaggatttggcaaattggtcctccctaagctattccaagtttcatggcgggctcggtttccgatctctgaaagctttcaatcatgcaatgttggccaaacaagcttggtgtcttcttcaggcttcacactcccttgctgcaaccttactaaaatctcgttattttccctacacaacattcctaaattcttctaagggtcataggccttctctagtctggatcaatatctcttggaaaaaaggaacttctcatgtcaggtcttaagaaatttgtgtgtgatggttctacaatctcaatctttaatgacgcttggattccaggatatggcaagctaaactacctaaaacacctctcagatggcagtatggtagtagcagatctcataacccctaccaaagaatggaatattccaaaaatccataatatcttccctgatgatattagccaagccattatcaccatcctgctaacccccttccctacatccgatacccattactggtcccttacaccacatggaacttacactgtcaactctggttatcacaaagcacacaacttaatctgccaacttgaatcgacaccttcggacaccatggcaactcataaatggtggaagatgatgtggactcaacctcttccccccaaaattaaacactttctttggcgagtataccatgatattctcctaagctataatttgcacaaaagaaagtctctgtcctcaccaagatgcagtcgttgcaaccaccagtatagacccaagtacatgctcttttcagatgttcaactatccagcaagtatgaaaattaacaaatttttatacatttatatctaaccatacctccctaacttgtatggacttgcttcacttggctgctagcaccttcacaactagcaacttccaattttttgcttgtttgctttagaaactatggcattgcaggaacgagcatctgcaccactgctccattctctcgcctatcaaaataatacagtggactgaagactacttggctcattactagaacatcaataacccttataaagttgcggttcagaattcctcatagcagtcatcacaccatgggctaacgataccatcctatcacttgaagcttaccgtggacactgctcaagatgaacaaaatcataaaatgggattcggtatggttcttcacaacaaccgcaatgaaatgcttctgactttggcaacaacgtggtggggtatccattcacccttgataatggaagcccatgcactccagcacacacttaattggtgtagaaatcattccatttagccaaattgtattgaatcggactgtaaaatacttgttgattatatttataacattgttaatctccatttaaacaggtttgtaacagagattgaaagcttgttgtctttcctcctaaagctactgccagctatattcctaaaggagcaaatgaagctgctcaccgtttagctaagtatgcattaagtctagatcaagaaggtttatgaaaaggatctaatttcttctctagtttatatcctgaactttgattagtggtgtttaatgaatacaggtgcttcttcaaaaaaaagaaaaaaaagaaacaatgaatgttgataaaaaaactatataaaataaaaaagaaaaataaataaattaacaatatatatgtagttttattccttaccaaaaaaaaaaaaaaaaaagaaggaaaaacactatctacttagtgttgcacaaaatttagaattcgatttatatacattggaatagtgcaaaatttagcattccattgatttggtataatctttatacttaccgatgacacttaaatat

SEQ ID NO: 198575 - DNA, 1565 bp, Cannabis indica
atgtacctaattttttattttatatttttatagcaactttgagttatattaaattttatttgagtttaaaaattgattacttgtttaattaaatatataaaaaaaaaaattaaagtattacttttggttgagacagaaatatttatgattgaaaaatatatgcttctcacatattaaaataatcacttcgatgtgtaaattacaattgtacaattcttaatactaaatatttaccggttaagtaaaaaatatttcattaaagaataaagataaatataagtaatttttaatatttaaaatatattaaatcagtagaaaaaagaaaaaaaaaaggaagatacttcatgcctattgtttttttaagaggttttaactcttcttaattaatgaactacaacaaaaaattcctgcatataaaaactcgagaattgggtgaaagaattagtatataggtggaccaaataaatttacaaactctcggtaatgaaacaattatggttatatctgtaataaatttcaaatctctgtttagagaggtaattttctcatataacttggactaaaatggtcataacgtggagcaaaattttggtgttggtgtcggacgggtttgggcttgggcttgggcttaattagcagttccaataagcccaccatccatttccaaccaagtttccctttcacttattgttgttgagcttcctacatatatatgacaaagcattttgattgacttaagaattttattatagcgaatctcatatcaattcaattaataaataggatatttaagtacctgtcgttaatgtttgtattgggtttgtgccaaaattagaatttgaaccaataagtttggaaagctcactagcactaacaatttctcctatgcttgtcccatttgccactgttatggaataaatagaatttttatcgactaattattagtactaattataattatatcaatgttatttacaaatatataatagctagagctagaattataatgtctaacctggctttgttgttgtttgttttataccaaaagtattctgacaattcttacaacgacatctttcagtgcaaccatttttcatcttgtatatatatgtatataaaaaaaagaacaaataaacaatattcaattagtaattatggtttatgataatataattaataaatagaaattacatttactcaccttaagacaagaacatttttgtgttatgcagtttgattttattgcatttgcatccaataattttacgatccttcattatctacacataaattatatatatatataattatatatatatatatataaagtaaatggtgaaattagtaataaggaaataacttagatttattatgtaataattaataattaatatataccttcgaaccaaatgcgcgtggatttagatctttcattctctgtctttccttctctactattttttcatttttagatgtatttatacaataatcgcatacacaagaacctccgcagtagttttcgaaagaaaaacagttacaattactagaaaaaaaaaaaaaaacaa

SEQ ID NO: 198576 - DNA, 969 bp, Cannabis indica
ctcatgagtggggcttttttcataaatgcggttggtttaatgaattttttgttggaccaaattgccctcatttaaataagaaaattatcatttgacctaggtttctttctcaatcgcaaaatcatctctcagctctgacgatcgactacttactctcaccatccatcgcaccactcttctccgtcaccgactgctgatgcctttcttctagctccggcatattcaaggtttgcttcttattttttcaatggatgacatgtaaaattacttttttttgtctgcttcactccttttctgtaatcatcatcatcatcatcatctttttttttttttttcaatcccttttctgcaattacatttttttgcttctttcaacgtgtggtatgcttaagatttttggtcttctttagttttttttgggtctcgactctcgtattttgtatattgaattttatcttgagcaagggtgatctttttggttggcaacactattggccttgtgatgtgtggattttggtttaagcttagttgcgattcagtttggttggttccaatattcaattaataaattaaattataatgtgctagcttaatcatggcctacataagatatgtaaataaaatgtaaaacctaatctttcagtagtttttttatccttaattctagagtctatgagtaaacatgttgctttgattttaatcatgtacaaaagtaagtggcaatatgattttgttgctgattaaggaaccctggcccttttttttctaaagaccgtcttttgacaagtttgttaaatatgccatttcattttcagggagtaccatctaaaggaaaaacactttctgcaacatttagaacatatttgtaaattaatgtgaagaatgtgagaagtttattgaaactttttaaggagctggacaagtaccaacaaggaatttaacattgttttagtactgaaagagatttag

SEQ ID NO: 198577 - DNA, 794 bp, Cannabis indica
gttagtagagagagagagagagagagagagaggtttcaattatcataacttttgggtccaaacttcttctctctcagccagttcaacgaccccagaaaagacatgcaaaattaatatgtttccctttttataaacaagatcaacatgcatgcatgtactcatcattataaaattaaaaattgaaaaaaaaaatagttcgaacctcatatatttagtagcaaagatttattttaaataattcatcctagagtaaaagtaaataagtaaatgtatacctatatatgtctgtggtaaatactacgtacgtacttcgacgtgatatatcatgtgtacaatcgatgtgatatcgttagatatatatttaaccatgattagctatatatatagctaggtatatatagggtatcacctaatacaattataaattatttataatataaatatttacaaacatttgactttttatgatcgatcatggtaactttattgacaatatatatacatgatggtcccttttggacccattatatattccctcgtcatccatatttatatatacacacccaatacgtatgttatgtatttcattatttctttctctctatttttcaatattaattatttaacaaacccggttctcacatatttaattgacatatgtacaaattacaatgctaagatataaatatatgctcccttttaatttttttaactatttggaaaaagaaataaaaatctggtaaaaatattattgattggtatatatgtaatagtcctgctaacgcctatatatg

SEQ ID NO: 198578 - DNA, 635 bp, Cannabis indica
ctaccaagtaccaagtgagaatcaaatttgtcaagtttccaccttaaacttttgtcatagtttgagaaataaccaagtcatatttttcaaaataacggctgattattaggcattgtctatgaaaggttatgtgagattacataacctcacattgattgaataagcagtacccaatacaaaactgatgaagagggccaaagataatggccatgacccaacgccagaactctgaaaaataatgtgataggtcagaatattataggcttcaaatacaaaatgataagtttcgaatacttgagaccagtttaatcccataccagaatagagaaagacgcaacaatcatgacatattcctgtgatgaaatatgcaatagatatctagaattacacaattctcgatgcatcccatgttaccatgtaaaattgtagataagtctctctataagaaaaataaagtagtattaaagcaaagaactaggcactggtgtagtgacctttgtgatcaaatataagaataaaacttagattttcttcattctaatagaatgcaaaatcaacagaatatttagtgtaagacagtaaaagctaccttgtctgtatcaatgtcgtcaagctgattcaaaccaacaatataa

SEQ ID NO: 198579 - DNA, 774 bp, Cannabis indica
tcacttgtgttttaaaaacttcacttgtgttttaaatcactaaccgaacgtcacttgtgttttaaaaaccaattcacttttggctaatattgtttttaaaaatcactaaccaaacgtcacttgtgttttaaaaacttcaaaaactattttttgttctcatttctaaaaataattttttaaaacaaaaaacagaaaacaataccaaacatatcactactctaaaaaattcaatacatatttataattcatcatgctcatacacatctcaatcaaagaattaaaatatttcattttcaatcataatatgatcaataaattctcattatatcatgtttattctcaacataataaataaatcatatttaatcactctcttatttatgttaagtcatatgtaagtaaatcaataatttcacaaaataataaaattttaaacaatcacatcacaagtatttagtggcatcacaaattattgttattattaagaatataaactttggtcattttatataaagtaaatagcagcataagtatccaaagtttttatcaatgcgaattttatttcgagcaacaaacctatcccaattttgagcttcctaatccgcaaggtaggatcaatttcaactttttctagttcttttatcggcccaacgtttgtacttgattccccaaagcagggatccatgtcctcatccccaccttgggtggatccctatttggaaatatttccttgcctttcttcgaactttagttgattgtttctttttttttttt

SEQ ID NO: 198580 - DNA, 858 bp, Cannabis indica
ggagtggttctttgaaaagtttagggagtgttatggttcaagagaagacatggtcattatctctgaccgtcacgaaagcataaaaaaggcaaccatcaaagtgtacccagaagtacttcatggagcttgcacctttcacctactaaagaacattaaaagcaaattaagaaaagctcaaaaactgtctcagatacattcttcgcagtggcaaaggcatacactgttgaaggcttcgagcgccacatgggaaaactagataagattgacaagaggttgagaccctacttgcaagaaatcgggtatgaaaaatgggctcaagctcactctcaaaataatagatactcgaacatggcatccaacctcgcagaatctttgaattctttgattgttgcagtaagggagctaccaatctgcactatggtagaatgtttaagaagtttggtgcaagaatggagctgtaaaaatcgaaacatagctcaagcaattcccacaaggctgacaagcaaacatgaagaaatcttaaatgataactacaaatactcattgaagatgacggtatgattctcaactttaaattatacctaacttgactataaattctaatattagtactttcaaatattaggtgcacccgacaaatgatgttttgttcgaagttcgtgatggatgcaaaaaagcaatagttgatctaagctcgagaacttgtacatgaaaacggtatataacgcaacctatatatataatttgatccttatatattgtccttagctttgttctatagatgcaaacggtacatgctaattgctaaacttgcaaaatcaatatgagatttcattgttatagatgtggttaattatt

SEQ ID NO: 198581 - DNA, 606 bp, Cannabis indica
tttatattagaattaaagctattattttcgtgtcaactatttgacaataatgtgttaagctttgtttcagatcctagagggaaaacacatttgcttatatggaggagatgatgtgaaatggattaagaagtttatcaagactgcaaaagttgttgctaatacagcaagggttgatttaaagtttctttatgttgggaggagcaaacttaagaagaaattggtaaaagttattgacattattcgaaaggaaactttcagcaactcacttgattggaacattatatggtatttttgggtacggttggagagcatgttgtactccaaaaaactacaccggagagggaattgggactctatattgcaggggattattacgttgttgaggtttgactctgaacacaaaaattgggccataataagtagtgaatctggtgagatggttatggctgatgggcaacgtatgctcatggggttgcgtgagcttttgaagctgaaatcaagagataaaattaaaggctgctttgtccctgctctgaatgagtacatcaacaatacttgttctgctccttctgcagcattagatatatttgcaaccacaagtaagag

SEQ ID NO: 198582 - DNA, 506 bp, Cannabis indica
ctacaactcctatcattttaataatcatgtgagcattgtcattaggcaccaatgctgttcttaacatggttataatagcaatatgacatattgtcgttagtcaccacgggtaaacaattttatcattagcatttctcataatcacggttatttagaattagaatttttccctgaagttttactattgtcaaatcgtgcttactaattgaaaatatatctttgtttttttttctcagtgtcaaaaaaagactatgaagtatttaatgttgttgaatgcattttggaaacatcaaacctgcatgactcaaagtataggagtgttttattcaacttcaactacactcataaagcaatattcaacgatttatacagcaagaaacgggtttgttcttcaatcctgtcacttttattttcaattttgaaacctaaatttggtttattaaaatattaattcagatcaataccttcttcaatttacttttagttatataacaatttgattatcc

SEQ ID NO: 198583 - DNA, 465 bp, Cannabis indica
ggaaggagagagagaaatatggtggattttggagtggtctgaggaagcaagataaatgtttttgttttattttttgtttttgtttttatttgaagatgctgaattatattatgggaaatcatgggggtcggtgataccaggactcttggattgctccgtttaatgcttaaaatgaattttgaggaaactgaccaaaacaaaactcttgtgtttctatatatgtattaatctatcaacatcaacactgctcaaatttctctccctaaaataactgtccataataatattgatattctatgtatgcccaaattcagatgcaaacaaatcaaaatttggatttttttttttcagaaatttacacggatattaatttttttttttcaaattttatatttatcaaaattttggaaaattaccatatattacattttttaactttttttttttaatttatggtttgagttt

SEQ ID NO: 198584 - DNA, 2817 bp, Cannabis indica
tagagcaccatgagccaagacctagtaagaaagtataatctattgaatataacaatgcatatagcacacatactacacataatatgccactgcatagataaccgtgccaccacactaatataactttccactgtgcctatgatgatgccaccgcatcttaagtctatattgtatagacactgcgtggtatgctcgcacatctatttacaaataaggccttttcaaggttttttttttttttttttttcttttaaattttggtcaccgagtttagcctagttacgccttgattgcataacccttataatctactggttatgtcttagtcgcataacccttttaacatactcaattaattcatatattacatgcataaatatagaaattttaaggtaataattctaacttacatttctaactaagcaatttataaaacatacaagtgcgctaccgtgctatattctatgtgcaagattcgctttcttgcctaaaacccaaagtatgaagataatttctagtccacaggtgatcccaaacaagtgccgacattcctagtcacaatctcggatttatacaaaaatagagttaatcccaaatcacattgataattattatattcttttcccttggtatgaactaccatactaacttataatgagtccctctttgtcagaactaagtcatcagaattctagattcttatattcttttcccatcattccaccaaagtttcactttctagttcatatgctaccattttttccttgcaatcaatactactttcatacttggttaacgtttttaaaccttatattacattcaattatatagttcgtcgtttaataaaataacctactctattatctactctagataaccaataatcattgttacttaatcaagtaatcaattattatatgttgtctaataagacaaccacctatgacgggttatagagtaacacttctcattggtttcataacggtaatgaccgtcttgttggtttcataatagtaatgactatctcataagtttcataacggtaatgactgtcattttgctctcataacggtaaaaccatctcgttactttcataacggcaatgaccgtctcgttactttcataaccatttaattcacaaacgatcatgatcttgtcttgacatgctatgtagtatagatgtacttttcttaccttaaattctatattcctgcatgtcggccaacccaaatggagaaatgcagccctaagtcacatcaacagtaaatcggtaaaccacttgtcctatcccatttttggtcttaaattcataactggaagtttccctattgatagataacatgataataccctaaatataaagaaaacatgaaaaacaggggtcccaaacatcacccaaaatgacataccattttaaaaatgggaaactgttttaagtgcctctgctagaaaaaatcgatagaccatttttccaaaatcgatttgtcatttttctgcagaaatggaccccgagtttctcttattctccacaacttccaaacttaaccaaatgagctcaaacttcacagaacagtcccataatatcaatataacataacctaagttacaaaaattaaaatcgaatcacaaacaaaaatctgctattaaagctccaagcttttgctccttcaccagctgctaactagaattttaaaccttcaaacaacttttattcaaacttaagaacactccttaatatataataagtctcacagtagcttaaacaacaaaattccacttacaaccaatttcatttttttccaaaaatttcaaggagcaaggagaagagattaccttcaatcctcactaccctccaccattgattttagctaaaaacttagttaaaaagacaaaaatttggctctgaaattgacttgaggagtttggtttctccttggtcttcttctatctcaacaaagaaagagagagagaatgacatagtgtttttggtttttgattgaccttaaacttatctctaataatccactactttctaacagctactaactccttctaacatgatttttaattaactaagaaaagaaagaaagaaataatactaacttagggtgaaatgtccaaaatgccctcaccactaattcttgaagaactataatcctagaattaattttgtcataaccaaatacctcgaaatacccagataatccaaaatcatcttaacttcttgatttcaccaatcccgcaaataaatatcgttgtgacatttttggccctaaatcgggtctctatggttgccggacctaaaaattttaaatcatttatgacaaaattttctaattctcacaaaattagattagtaagatcataatcttactcattatacccttattaatccatattttataaaatatgccctaattaatcataattttatttctgggatattacaaaatagttcagatttgcatttaatgcatcaattggaattgaaatattcaaatgatgatgttctcttcgggacacacgctaacatggtcagtcatcgtttcaaaaattgatgctgcacacactccattaatgaaagtaattcccacgagctaaagaaataataccacgattcattttattttaaaaaggaagaagctatcaaccattaagaaattaattgtttggaattcaaaaaggtttccaccttttcaagcatccacttgtccttcaaccatgtgaaagggagaatgcaagcctcaaaattacctccagttctaaaggcttggaggtaaatattattcgagtttttggatagaggacaagtgtaat

SEQ ID NO: 198585 - DNA, 1239 bp, Cannabis indica
cttcatgaacaattggaggtaataatttaaaaaaaccttttatttcggtttttaaggccttttatatcagttttcgctaaaatgaaaatcgagatgtattgtattctttttttttttgttaggtccagaaacatctccaattgagaattgaggctcaaggaaagtacatgcaaagcatattggaaaaagcttgtcaaactctagctggtgaaaatatggcatctggaagctacaagggtagtattgtaaatcaaagtgttcaccctaatcaccaccattctcatcatcatcataatcataatcatgagatgggatcaaccatgaaagatttcacctctcctcttggctttccatcatttcaagacctaaacatctatggaggtggtgatcatcaccaacttgatcttcaacacaacatggaaagatcatcatccatggatggtttcttacctaacaacaacaacaacactaataatagtagtcctaatgacactctttgtttgggaaagaaaaggactactactagtccttatagcgggagtggaaagagtcctttaatttggtccgacgatcttcgtctccaggacttgggaacggccgcgtcttgtcttggtgaagatcagattcagatggcgctgaactcgtcgactgagagaggaggaagcgagattgattcattgtctgatatttatgagacaaagccagtaatctcaggtgatcatatggggccggagaagaagtttgaaggtggaacaaatagtaataaactcgaaaggccttcaccaagaagagctcctctcagtgataggatgagtcctatgattcaaggaagaaattcaccttatggttgaattgatcgaacactacaattaattaccaaaccttgaatgaattatcatggtttacatatacgtaagttcatcaacatttatatatatatatatatataaatatttagcatgcatatgctcgatgaggtcttaatgattagggttttgaccacatcaaagtttaatattagcataattattatatatattcacaaaatgtagggtttctgagtgtatgataaatgccatatatgcatgtgtggcaaaccccatcaaatttattacattttcaagtttaaaacatgaacattttattaattttaatgtcaatatttatttctaatattgatattgatatatatgtttagctatcacaataaaaatctagttacctctgagtatggaacac

SEQ ID NO: 198586 - DNA, 725 bp, Cannabis indica
attcccgacggtcctaaagaaatttttttggggggaccgtcattaaaaaaattaagtgagtgtttaaaaccgtcaggaaaaattaggtattcctgacggttttaaacactcatgatgtattcctgacagtttttaagcatgccttaaaaattgtaattaaaaggaaattgttgacaattaaagatcgtagcctatactataggcgacgattttaaaccgtgacttatagtataggctacggtttaaaaccgttgcctatagtattattctcaatagtttttaaatgtgacttaaaaattgcaaattctttttaaaggaaaattattaacagttaaaaatcgtgacctataattgcgaattaccaaagcgatctcgagtcaacaatttttagaagcaaacttacaattggtcccaactccaattgaaagtttaagagggcgtattaggagaaatcattttgttaatgctgatatgagagttgattagtgctagttggtgagctgtcactttttattcttgattagttagtttcttcaacgtctaatccatgtatatgaactctctctactttttctttctctcttgatcttctctctttcttcaagttatggctaagggattcagtaactgcaatatgctaagttacaatgataagagtatctccaatgaagatacaaataaataatgtaaatataaaatattgttcattttattaaaaatcttct

SEQ ID NO: 198587 - DNA, 829 bp, Cannabis indica
tatgtgtttatttatcgtttttagaaagttcatatttaggatgttaataaacatacttgtgagtagatctaagatcctggtaaaataattcccaacactagatcattccagagtcgatcgatcctggggggagcttcaggtactagcattgctctatgcctgttagtgtagtagggaagattctacacctgatgttgtctctcacaccttgtagatcactttgcactcgaaagtagtgcatgagagacagtggatcttccttctcgttgtttagatgccgggaaggattcttgaactttggaggagtgagaagggctttgattcttttagagagtggtgagcattgttctctgtcgatctcaaattcagacaacttagatgtcgtgatccccttttctaaaatagttaaggtttctaactctgcccgattgaccccatgaatagtggcgtgtgtcctaaatggagcttttctcacctgtatggggtcgtatctagaagttcccacgtccattattcttcttttattcaagaggtcatgcatgtgtctttgtcttttaagttgatcatgagctcctatcgatctgggtcttatagttttcttctaaccatgacgttgtgaaggcaactcatgtgaggcctctagaatgaacctaggattgtctcgggatgaccggctgcgagagtgttcattcgaagcattgtactggctacgtccctcaaagtagtcatcatcaagatcacaagttcaatgaaattaaatggtcactcaagttcaattcctctccatgaactcaagagaagtactcgtgttgttgtcgatcggggccat

SEQ ID NO: 198588 - DNA, 929 bp, Cannabis indica
tgggttgtgattttatttatttttttcttctaatttgattataaaaatggatcattaaagtttataacttgctttgtctttttttagaatctaacgagatcacatgtacaagaagataataactcaactacaaaaattatttttttattattattatttaaatttaactgaatataaatatatataaaaaatacactttcccatcttacaattcaatttactctcctccaacacacacatgcacatatattattcctaagtaggggcggacccacattgtagcgaggggggcagtcgccccccctgaaaaaaaaaaccaagaaaaaaatgtatatgtattttaattagttacaatatatatttgtattaaaagatgatatatatagacataagattaaccttggtgtaatggttaaggtagttggtaaataggttagagggtaaaagttcaaatcccactaactacactttatattttccttttaaatttatttacgccccccctcactttaattctgggtccgccactgttcctaagtgatttgttattgctacttttacatttgaatctcctattatgggatttgaaccgtgttgccaatatattaggaagaaacatttcttattaagcatcaataacatttagcaccatggtgatgtggtgtcttgcaaatgaagggaaatttttttggctctgagttaaatggtcctagacacaaacttaacacgcctatgttcaggattgacctgctaataatattttataaaagagttcttaaattaaatcatgtactaataatagtaatataacatataaaatggtgctagactccttttagcatttctctgcaacttagagcagaaatcctaatataaatactctaaatttggtattttttataagagtaaaaaaaaatacaaatttaata

SEQ ID NO: 198589 - DNA, 3461 bp, Cannabis indica
tagcatatgttaggccttggatacaacattacaacattaagctcccaactgctaatagataagggtactttctcatgtcctccatctcctgaggattctttggatatttatccttacatagaataattccatgttcggacggtaattgtcctttcctgaaattctctattgagaatctttcgagcaccttatcgatataagttgcttgaaagagtgctaatgttctctgctttctatctctatagattttaataccgagaacatagtttacttctcccgaatccttcatttggaaatatttagctaaatatttctttaattctgataacttttctacattgtttccaataagtagaatgtcatcaacataaagaaccaggaataccactacattacctttaatgtatttgtatacataggcttcgtctttattttgttcgaagcatactctttaatggtcttattaatagtgatattccaagatcaagaggctttctttaatccgtaaatggatttaagcaacttgcataactttcgatcttcccttgctagcacatacccttctagttgttctatataaataatttcgtcaaggtttccatttaaaaatgcagtcttgaaattaatttttcatatctcataatcataagtgatagttatggaaagaagaaaatgaatagatttaagcattgccacatgagagaaggtttcgtcataatcaatgccttctcgatgtgtgtagcctttggctactagcctagctttaaaggtctctaccctcccttcaacatttctcttcttcttgaaaattcatttacaccctatgggtgtagtatcttcaggtggagtttcgtattcctagagtttgttggtgcacatgaaatccatttcttgatccatggcattgttccacttatttgagtcagggtcttccattgcttgttggcaagtcaatggatcgttcttgtctatgtcagagacaagaacatgtgcttcgtgttcatagcagacaggttgtctcacaaccctcccactacaatgatgtactgggtttcctttcaaagaatagtggttaccatcactggtagttcaaatgatgcttctgaagttgatggttcgaaaatttgctcatttctgatttcctcgatgaccacttgactgcgtgatttgtgacttttcatgtagtcatgttcaagaaaagtatcatttattgatacaaatactttattgtcttgatgactatagaagtatgcacctcgagtttcctctgaatatctcacaaacatacacaattcagttatgggagcaagtttcctactcttaggtttaagaatatgagcaaaacaatcccaaatatagaaatgtttcaaactagggtttgtcccattccataatttcattggagtgtttcttatgctctttgagagtactacatttaaaatgtaagtagccgcgagaagtgcatatccctagaagcttagtggcagtgtcgagtaacaccattgatctgaccatgtctaataaggtctgatttcttctctctggaacaccgttgtgctaaggtgtttcaggtggtgtaagttgggataagatcccttcttccagcaaatagtctttgaattcagaatccaagtactcgccaccacaatctaattaaattgtctttaaagatttacctaattgcttttcagtcatggctttgaagtctttgaactttttgaaagtttcagacttcttggccattaggtaagtatgaatgtatctagaataatcgtcaatgaaagtgataaattatttataacctcctcgagcttgaacattaattggtccgcacacatcagtgtgaataagctcaagttgttttcttggctatatttccttttgtagaaaaatgtcttttagacatattgccttctagacaagattcacatatcttattttgttgaggcaaagctactctaaataattcattattcaaaattaattggtcacttggtctgtgcacataaagtttatttctttatttcgcaaaacaaattggcattccaaatttggaaataataatctcattattaataaaaataatgttaaatgattgtttgtgcaaaatagataatattcctagtacaattagaaataaaaattgttcaatatcaaaatcttatttttgaatttttaaacagactttaccaacacacttagcagacacttgtgctccatagcccactcttatgatcacatttccatcagtcatttcccttgacaaatcaagtatttacatggaagaaaaatatgattagtggctccagaatcaacaatacataaggatttctcatcttccactaaattagcttagcaaacgggtagataaaacttacccttcttttttagctctgagagataatgttacaatttatcttccagtgtctcattacgtcataatagaaatactcaccttcttgtctttggacttagggttggccttgttcttcttggcttaaggtgccttcttcactttcagttcgggcttgccactgctgttgtccttactgttccatttccttttcttatcagaaaaggaaaggagagtttgattttgtttcaataatgtttgattcaccttccttggacttatccttgttaaggttctcaaacatagtcaacttgttcaacaattgagtcatgttgaactttagcttgttctttagatagttcgtggtaaaagatttgaagcaaggagatagcgactcaaggatcatactcacttgagtcctttcgtcaatgatagtctcatgtatctctgcctcatgcattagctcaatcatgtgtaatgcatgagtctttacagggacacccttcttcatcttacaattcatgtaggtacgagtatcatcatatcttgtttggttagattttttttccaaacatggcctgtagagaattcattatttgagatgcattctcaattttttcatgcgtcttatgcagaacattgtccatgctaacaagcatgaaatatttggccttgttgttggattgaatccaagggttgtatttgtcgcagatattttttggggcattagaagcgggcatctaaagatgctcctcaattatgaaaaatttgtagttttcacaaaccaacatcaaatttagattagatttctatttcatgaaattctcaccattcaatttttcaagtgctagtaaagcagtaaggggatttgacatggtagacgtgactaaaataaataaaaatagcatattgattttaattgaataataaatatcactttcgagtaaacgtgatgtataagtgcatacaagtaaaacacataaaatattattggaattatttcacgataaaactctttgacaattgatcgtcgtcttagggtcggtatcgagttaatttcattaagcctatgagattgatctcaactttataattttgaaacttaaat

SEQ ID NO: 198590 - DNA, 1051 bp, Cannabis indica
ttaatgaaaaaaaaaaaaattaataaatatatatatgtattaataaaaccctttatcgttttcataccaaccataaatagaatagttcaatgataatgaatttataaagttgtagagtactctcaaattcaaaacttgtcactaaagtttagctagacattgacctataataaatattgaaatgtatccatctatatatatttatattacattttgttcttttacaaaatatatttatagtatgataatgcaagcaatatttgcacgtaataacattttacaaaaatagtttacgtaactaatgaactcatccttataatcagctttatgacttatttcgataagtcttaatattaaatattactggtgttcgataacaatattactcgtattattgatatattaaacttgttttgtaaggttttagattgtgatgaaagtcatatttcacttttataatcaaagctaacaaaccctaaatttcttgcatatatgttaaatatatttatatatatatatatatatatttgaattcttataagtaaccctaaaaattaaacatcattttatacaattttcaatatttgaatgcatgcaatcatatttataatgaccaagaaaactagggttgaaaattactacccaacatcttaatttcccatttatacttgcttaatttccaagaactgaataattaatataagaaagatactcaccaacttgtttattatatcaaaatatttttcacacctattgacattaaatatatattaacttgtgattgcactttcatgttttatatatagatttcaattttgtttaattttattaacagacgcctgatttaatcataattcgatcgggagcagtactgtttggtattatatcaaagtttgggaggtgtacgcagggacggacccattaaaattgatgtgggggctatagcctccactaacaaaaatattgtcttttaaaaaaaattaaatgtaaattttttaatttaataattataggccaaaatagtaaaaaagcccccacaaaattagataaa

SEQ ID NO: 198591 - DNA, 569 bp, Cannabis indica
ctctctctctctctctctctctctctctctctctctctctctctctctcgaatctcctctctctgtctctcttagtcccgatctagggtttcgtaaaacccttacgggcgagccaccactaggccaccccgaccacgttctctcgaccaccccaacgccacgtcaacatctcttctctctctcgatctcgatctcctctctctctctctctatctctctctctctccctcttagtcccgatttagggttttcaaaaacccttctgcagccaccaccggccacctcggtggttcttcgacaactccaagctctcgtgacctcctctctcttttagtctgacggttctccgacaacccccagccacttcgacgactctctctccctcggcgctctcgtaagtcctctcctctcctcatttctcttataaaaaatgttgctttatttttccagatttagatgttttgtgatttggaaaaacacctatttttgtttaagaaactacagtttggtattttgtaatttgcatttttttagtttcaagtgagctttgattgggtttatgtggtggt

SEQ ID NO: 198592 - DNA, 1369 bp, Cannabis indica
cgaccagaattgacacatgcaacaaaatgaggaaatatcaagttgataacataacgaatcacagagatgttccacacaagatatactgtcaaaaaaatcaaaaaacacataaatcataatctcatagttcttagctagtaacaatttaacacctgaaaacatcaaactaacgattgaaaattagaagtacctcatctgattggtttccataaagagaagactcttccagtcggagtacttgagacttactagtccagaaaagttgcattaattctctccgttctgttgtcttgccagataatatatcccaacccatagaagctaccaggggctggagacgtggaaacagtgaaaagatctaccacaggaaaacaagcaaggttttccaataaaaactattagtaattcagaattgtacaattaaataactgactaacaaaattaaagaaattatactcacatattcaattaaacataaaattggggacatacattgctagtttcttcaagttgatttctcttcacagcagacaacgcggtatccatgacacactcaagaacatgttgtctagagactcgagcatattggtacatgtctctcaagcaagaactgaccacagagtttacggacagagttttattacgtaaatcagaatcaaggtctaattctttaacatatctttggaaacactccaaaggaggtggaatttggttattatcaagagattgatacagctcaatctcttttagaagcaatccatcatggagaacctgcggaaatcaattatcgattcaatatagcccttatattgtaataagtaaacttccatgtagtctttggcaatgcatttgttttataaaataccactcttttttcctggaattattgggtaggtatttgcagcatttaccaacccagaccaagaattctaccactctgacttatagtgaataaatgaaaacaaatatacctgtaacatttgaatgagaaatctacaattagatgcaagagctgcaccataaattatcaacaatttttccttattaatatgccaagagtctccatattcctcccatcctagagaaaccaccttcagtaaatcctgcaatacaatgctgtagaacatcgaaaatgaatgccaaggagaacaacaaaagcaaagtgagtgatgtataaatatgttctgacagtgacattttatcaaatcagaggcagaatgaaataacaaacttttgttctaacgtaaaaccaaaattttcaccacaataactatgagactcattcagattgtcaaatatgaagagaaagaaatatataaactgacttgtatatcaccaaccatgggaaagtttgacagtcaaaggggac

SEQ ID NO: 198593 - DNA, 2490 bp, Cannabis indica
taagttttttaattgaaaaatatgagtagaccactaatatattgacacatgtacacttttaatctattttaataagattattaatggactggtagtgatgaaagtaccgtaaatataaactttcggtatttaccaagagaaaaaaaaaaaaaaagcaatgtaatatattagtggatgaaatctaaaatattatgtatttatgctgtaaatattgctctatgtgaataagatttgacacactcatagtgacgagagtaatagaaatataacttaattaaggtcggaaaaaaaaaaacaatgtggcatataagtgtatgaaaccgaaaatataagtgtagttatgctacaaatatccttaatatatataattaggggtgttcataaaatagagaatccaatctatgttgtattatccaatctaatctaattcgcaaagtaaagatatatgcacttatgcagattgaattggattgtaaaatctaaaattcgctattgtacaagttagatgttgattgacatgtaaaaatcatcaaccaaatccaatccacacatatttatataaatttttaaaaaattatatatataactactattttatataagaatatataataatttaaaaatttaacaaatataatacaaatatatttcaaacttaaccgatattaaatatatatttcaatattatatgtaatttatttattttacatacaaaattaaacatttatttgatactcaattattttgttcctttgaatttatttttttatttattttaatttgttgttagagacataaaataataataatttattttattctgttgttaaagttatgtgattttttttttttgataaatattaaataacttaatattgaaaagtatttaccgagatttttaaaaactgataaactataataaagcttaaagaaatacattatagacaaagaataaccagagtctttacgtggttggggcgttacagagtcttaattcacgagtcaatattattacgataaagctagaaaaattttatgaatttacacaagtgttttgtcaagtgtttgaaccctaggatttacccgtgcaatcaaggaatgtgattctaactctttgtatggggagattttcttatatttatagtgttagggttctaatatgtacacatttctcattgatggggtaaatataaataatacattgacttcaagctcatttggtgaagcccgacttatgaggcattgagcttctgctgacgtggatgccatattatgttgatatttatcaaactgtatcctacttttgtagataataaagacacataaatacttgattggcaattgctttattttcttattcgggagatatgaatttcggacatgatcctgaaaataaagccctaatattgtggaatttggcataaattattgtgatacgaagatggatatctagacgcccattaatcactcatctgaaagatatgcctaatgccatccggagatacactgtgccggagatgaatcttatttagacgagtcatctgtccaacatccgagagacttgacttcactaatggatccagtccattatcttagttaggcctgggattgggcctagagcaactgagctgaaaccgtcttgaaattacatgtgtcctccatccggaaatacaaataacagaatgtaactaattcaaaataattgatccaatctacacttttacgaattagatttgagttattgtgcatattagattagatccagaatatgaaattcgcacttagtgcaaatcagttgcacaatgagcaaaaaaagtgataattagattagatgaacactcctatatattagtacaagcttacttatttaagttaggtgttgttgatgcaagtggacgaaatttatcttatatttttaaaaatttacataatacacttaaaattagatcttttcttttttacatttttacagatttcattttctacaagtttttcacttatttttttttaggaaacaaagttattttcgcattacttcttcgtaatagcaacgtaaacataatatagttttgaaaaataacacttcctatttttcttaagaaaaattaataaaatataaaaagtactatagatctataaaaaaatatatttttttttttgttattgttagatattcatgaaataattcccaaaaaattgttcaaagtctttaattttgttaattgttgagacttcacagataaatataacttacctttttataaaaatgttttcttctagtgctaaattttcatatatttcataaagttttgttactaatttacttctattaatttataaacattatttcaactacaaattttaaaattttaatatctagctttatagagcatcttcgcggataatcgataaaatgaggtttattgtatgaaaaagatctctcttcctttcctatgaccttttcaaaccactaaagtggtcctaaaaaaa

SEQ ID NO: 198594 - DNA, 873 bp, Cannabis indica
accaaaattttgatttagtatttaaccattaaatatgccaatatgaaaattactattttaaaaattatagagtttttaattatctttctaaccctacttaattcatactagttctcttagagaaaaagttatgaataaaaaactatttatttatttaaaagttaactaataatattttgttaaataatggtaatattacaagttgaagaaaaactgttcaactttttgttaaatagacatttttaatataaaattaaaaaaaagagatatttatataaagacaaaatatttatacaccacactaatttatagtctatgtgagtgtgtgagtggctgattcacatgaattattatgataataattcaaaataaaattttcttcactcaaagaaaaaaaatacaaaatatattttataatacatctatatatgtatataaataagacaaaaaaaaatagtcggtagtgttatatattcagctgtattttcttcatttgtggacacggtaaaggagaaaggtgctgtaataaactataaagattgcattggggaattgaattacaatcaagacatgaagtaaatgatgtaatttttattgttgtgattatttcatataatgtatctggccgatgctcactttcttaatctattagcaacttgatgagattaaaatttaactgctctttaaatttgttggcagatcaaaacaatgaaggaactgtacttacctgaacttcttgaaatgtaccataaaattgctggcaaattacaacaggtatgccatctcttacatggagggatctgctgttataatatgaatggaaatttggtaactcccacacagataggggtggcaatttagatcaccacaaca

SEQ ID NO: 198595 - DNA, 2511 bp, Cannabis indica
aaaaagaagatcatgatagagtgagttaccaagacaagcaatcaaatagcttccaaaagaatacaaggcaaatgcttcataacagtttcttaaaatgtcacaggccaaagaaaactttggattccacaaagatatgacctgttaagagtttttaacataattaatcagttcttagaagcttaataacatacaagcaattgaatatatatatatatatataattaaaaatcttactgattcagtggcataagctggtactatgaaaagaacagcaacaatccacttttgttcctgaaaaatcacatcaaaattaatcctttgtttcttcataatgaaatatcaaaattaatggtagagaaagaggaactaactgggggattagtatatgatctgagatgttgaaatataagaaagatagaaagagagaacgccacaagagcgaagcaacttgccactatgagtcctggttcatggattttcctatacattatttcactttcagacactgatgaataataatcatcattatttatcaccatttccattatttttcatcaaaaacaaaatagtttttcattaaaatgataaatgtaaaccggtttgtataagatagtattggttgctgtgacgttgacaagtgtactacctatactcaagacagttatcctgtgatccactagacgagcctgttccgacacgtgtactttaatccaaagtcagcggtcaagtccacacgtgtatatatgattgatgttcccttctgtttatggttttctttgcctcaagtcaagttgatgtcgtttacggttattctgttgtcgttttcagttttgacgatcagatgtttactcgttcattttaatgatttcttgttgttttattttggcttctgagttctgattatttcaatgtcactgtttttattcggttaattaaataccattattataccagtactttattcaggcttgatgaataaatttaaacgtgtaaattgcggtccaaagttttgagtttttaggcgtgaattttttaacggcataagtacttaatatttgtaaaattataattttttttattttttctgtaaagattatgttttgaatttattaaaaaaaaatagaaataattgacactacacgtttctgtccaacccaatgatatagaatctaccatttgggctttatatgtgccttttttaaaaataataacagagcatgtacggatgaaactcgagagctaaaaaaattattaggtttataccactaacaaacccaaaattttaagtacttatgctcctcatagccatcactatcttatccatcggaaactatatcaacatctccatctttcttgagattatagttctttaagattggacagtcagatgagtacacgaagcatattttcttgaacttggaattctgtagttgcctttaattgaattgttctgacccttgtttttcttctttggagcatttcctttgatcaacaatccatcaccaacactttcttcttgttgttctaatttttcaattcctttgacattaatgcattctgaatttcctttaatgtcaataaatccttaccatatatcatggtatccacaaaatactcataattctctgcagtgggaaattcagtactatgattacttgatctttgtcctcgactgtgattccaatgttttccagattgagtatcaccttattgaaattatcaagatgatcttcaatagtctttcctgctatcatcttaaaaaaatacaacttttgtttacaaaaataacctgttagtcagtgattttgtcatatatagaatctctagtttcaaccatactccaactacaaaatcttctttaggcaccctcaaaaagttgtcttagaggctcaatatgaaggcactatgattcttttcaagaatgtcgattttctcttttggagtcaatccctctgatagattttattctcagcttgtaaacctcattgatcgcaagtagagctcgccacaatccaaagttatttttctctgtaaacttctctagattaaacttagcattccttatttcttcttggatcgatctttaagaatcttgaaagctttgaatccaattcttgatctccaagctttgataccacctgtaagaaaaatgcatatgatctcacacggcaagaaatctccaatgaacacactcgaaatattccatagatccaaaggcacaaccacaaactgagttagtaaaaattctcaatatgttttattgattgtgtaataggaagaagaaattagaacgaataagtaaaataaatagattgacgagttataaaattaataccctagattccattattgatattcaaaattattgtttgcttactttaatattttttatagttaaattatttttcttgttttaataatattccttaaatttttgtttgtagtagaaaaataattattggtacttagtaataattttcgtataagatgatactcagggccgtctcaagg

SEQ ID NO: 198596 - DNA, 1186 bp, Cannabis indica
ggtttgatcgagtcaagtggcagacatacattacatttctttccttagatctcctttaattctttctaaattttctcaatcttattaattacttgatttaccataagtttacacaatatattatatatatatacaagtctatacgtaaataagctatagctaggctatatagtatatatatatagccaactccctttgactttgaattatataattatatatattctcctgaaaattcttgaagcaataagaatacgaaaacccacctccgcctgcattgtcatttgtcaaacacatataatatatacatatatatatatatatataaagaattgaagacgactgagaaaaatttttccctttcaaacacattaacataatctaataataaactcttaattttggttgacccaacataataataaacagctagatatcgatccagaataacattattatttcccactatagatcctatatacatatagttagggtttttatgaagctgtcgtagtttatattattaggtttttaaatatatattttactatatataaacgacatcatcttaaatcgtacatattgtttgatttgttctaatttgtcacacgttttctcagttatatattatatcacgattcatgatcaagtgctataatacctgatctgaatgaaagaactcatatgtataacatcatcatcatgatcatcataatatataatatatatagattaataaatagtattattgtgtgtgggaattaaatccattataagtagttattatatatagtatagtttagttaagccgacaaatataccaaagcgaatacccacttgctagttgccgcgtcacctttccaagcgtgactattaatataattaacttaccatatcttattattattattattattattattattatttaaaattaaaatgactgatccttaataatcaatatcaacttgctaggtcgaccactactactattatcctcacttttacttcttgcatatagacattttaattattgaggtcgatgcatataattagatgttttttaataataattattaaactaaaataagtaaaattttgatatatttaattatactaacagtttagaagacgaaaatcactgatgccctatatcagtacagaacaagaaatcaacagtacacta

SEQ ID NO: 198597 - DNA, 584 bp, Cannabis indica
agaagagaggtgagtactgagaagtgtacttggttggttcagctcaaatcaagcctacattcaaggaacgtttacaggctcaacaacactccaaacgcactcacacacaatatctttgtttttctaacctcttttccaccaatggaatattccacactaattaactactgtcgagttaaaacgtactaattaagaagtgatcagagagtgttttctcacaatatgatgataatattaaattataaaatttactatctatacaattatgaaatgaatattcaacattaaaaattaaaaagaaagatacgttcaaactgatttatcttacaataaaaagaattcttctgtaatgaacatttgtaagacatatgtatttaggtttggaagattatacccttgatgattactttttattagaagtgttcacactgcgggtggtgcgagttgtaactatttttttaaatcaaactgcataagtggtgtttataattttttaaaccgcaattgtagattttaaaactgtgaaaacttcaccgcgaaaatgcggtgtggtgcgataaaatttgagcgatttacactatcat

SEQ ID NO: 198598 - DNA, 1122 bp, Cannabis indica
ttttttttcttccatttggttgattaataaaactagtttcagttatctttattgtttatcatttatgttttgtttttataatctttattgttgttgtgtgacgaaattagtttttgtttggtttttatagtgttcattgttgttgtatgatgaaattgggttcggtctactttttgtgtttttgttcagatagaatataattcctccaataaaaatgcaataaaagatgttgctaaatattcaagtgctaactgtgagaagaacttcctccaattaaaattaaaattcgtaaaaaggttattcacaaggaaaaaaaaaaatctaactcaagttttaagggttcatttttcatgactttttttttaagtatattaatttgtttcaatttatcctcttatagttttatatgtttacttgtagctttttaaactgatcttcgtgtttaattgttggtttattattttacgtaattaaggtttaagtttttttttttgttattttaagaaattagtttcgttgtgccagagttacatttctacgtctaacttcggtgacgacttcagcgtcaaactccaagaacggtgacaattctaatgacttttcggtaattttttctgtcaattatactaatttcggtaacttttttggtatcgacatcaactctgtcgactttttcgacaattgtagcaactccagtgattttttcggtaccaatagtaactctaacaacttttccacaccaataactgaaggtggcaactccagcagtaatcacttttcatttatttgtttctaaatatatttcttaaaaaaagacatggagagaatttaaatatattttatggttggggaattttcataaatatgagaattgagggtatagtttacttttttatggcataaataaataacattatagggttatgggttttttttatttttttttacatttatatgggtttttcttacgccatatttttgtaaaaaaagtggaaatcccatatttgtaaaacaacaataagttttgtcagaaaagtcacagagatcggaaaagtcgccggcaccgaaaaagtcaccaaaaaaatcaatgtcgccaccggaaaagttgtcgaaaaaagtcac

SEQ ID NO: 198599 - DNA, 1319 bp, Cannabis indica
tataattaaattatatagcacttaatataatattaaccatgcgtgtcttaaacgtagcttttttctagtcattatatatataaaaatatgtataaaagaatttataaataataagtttatgtgatattttataactttttctttctatttttatttttattttttgagactttcacattttgtttaaggaacaaacacacaaattacattaattatataaacaacttaaaattatgtaactgccaaaaagtttctattataccaattaattaattattttttgttacataactagttttttaattaactcttaagtgaccttttgatttactgactgttgttttgattgtaataataactatttgatatatataaaatattttaattgtattaattattgtaatttaatagtagtttgtcaaaatgatattttaatagtttaacttaatatatattaattgatttttaaatcactctgtagcatttaactttttttttttttcattctcatttttcactattaaataaattatataatatatatatatataaaatgtttacaagaaatgtaacttttaccagcgcatttcgcaaactgcactgacaaagagatcaaagttttgctagcgtacatttgcagtggctaaaatctaacttttaccagcatatttacgcgctgggaaaaatcttttttgccagcgcttttcattttatgcttgcaaaatttctaataccaacattgatttgtcaatccccttttgccaacacatcatgggtaaattctattttaccagcgcaataccaacttttgtcagcacaaaaatatgctggcaaaagtgacatttcttgtagtgtgtatatatatcaaactgcctaactcaaattaaattataatatatattttaattaattaataattcaacatttaaataattaatcaaataaataaagaaaaatcccaaattctaaagaaccttgaatttttgtaattcaaattcaaactttaccacaatttattaatcacttgtatttacattaatatgcaaaaatagggttaatgtaaaacatcatttgtttcaaattctacttcattaattaagaaggcaacaattattattaaaaaaaaatagtcaaaatgtaattattctcaattaattgtttctaaattaatactctatataaaacacacatgaaattacaactacatagaaagtaaaaaaaaataactttcaatttaatgatatgaaatttagttgttggcatttcattatcggagtgaaaaaaaacaaaattgttaaaattgttttttaggaaggtaa

SEQ ID NO: 198600 - DNA, 1180 bp, Cannabis indica
ccaagaagattcaattcttgaaatgaattttcacgagaattttacacataattctcgtcctcaagacatataccatctcatctagaagaaattgtcaaagttaaatagagaccaagtgaacctttgaaggattctatccaaaggtttatggctgaggcaactaaggttaaaggcctagcagaagaaggtcgttatccagccatacttgggggcatccttctattaagtgagttctagaaagatatctggaggatctcaaccaacaacatgaaggagttcctcgaacaagcagatgacttcataaaactggaggaatctgttagacaagcccagacaagagggcaagtcagcaacaggtggtctcagggtgctatgcaatcccaagacctaccaaacatgcaggctaatacaagtagtgctatccagccctccaccagcaagaatattatgggcaagtgcaacaacaacaattctggccaaaacagtggcaaaaaagggaagtataacacttctcttatgccacgaaaccaaaaggagaaggagaagatgtatacgtgcttcaccctcctaactaagaaacctaagaccatttacatggacactcaggctagtgtcccatacaagaagtcccctcctattaaaaaggagacgagcaagaggaacatatcaaagttcttctgattttataatgattttggccacgacaccaacgagtgtcaatacatgaagagggagattgaattcttcataaggaaaattaattcccacttttgttgttatgtgcaaaacaaccaagctcaggcataagttttctagaatggagaccctatgccaccaccagcggcgggtcatttaggggtcataattggcgaaccccataatgcaggcgagagaagcaaggctagggagcactatgcttggactctccgtcacaagcctaaaatcaacatactgatcgtcaaaaaaagaagctctaagaaactcaagcttggagagcctaccacctcctttacagagggagatgttgcacaggttagtttcccacacaatgcccctggtaattactgcacagatttagaacataacagtttccaattgaatggtggataatggagtctcctctaacattcttttcaaatgaacctatgaaaatatgaggctccaactaacagacctagca

SEQ ID NO: 198601 - DNA, 919 bp, Cannabis indica
tgaaactatcatccaagagactatcaaggcacactctctatccaaaacagggtaaaatagttcaagttactgaagttgtactaatacccaagctcctaaagtcgttgattgcttctctaagtctaaaccccaatcaaatttattaatgatataagcctagagacaaaagcaaaacactataattgggatagaaaccatgcaaaataactctacagctacaatgatattaatggctagtcacacaagcaaacaaactgatcaatcaaacattattcagatcatggttctacaaggaatgacaattaatcactatataagctaccataagaaaatggcgtggaataacttagaaaacgtacccataggcagtattgtatcagaaaaaaaaagaagccagagattcaaagctaataagtataggttgtgtgagtcatttctttaggcttagcctatataatctactgttaattcaccttctactacaaatttgatgaaggaaagatagcaaccagctccagcccttctcttcatctctcagttccatgcattccgtttcatccacaacagacaaaaatcagcattgcaataaaattagagtatacgagtcaaatttaacagttgttactgtaatcacatagcaacctttaaaattcccataattttgattgagacaagctaaagcaagacaaacgacaaaccccattattcttttcatcatcaccattaatgataattagatctcagcctaaatttaatgcataacacactcttcatatttacaagggacccttttctccaaggataagaatattaaaaagtgaatgtaatacatattcaaattggtagtaacagttactaattgattttcttatagacgaatatatgaattaactaatgataatgaacagtgctaatcagg

SEQ ID NO: 198602 - DNA, 631 bp, Cannabis indica
atggttctacaaggaatgacaatgcatcactatatgagctaccataacaaaatggtggggaataacttagaaaacgtatccataggcagtattgtatcagaaaaaaaaagaagccagagattcaaagctaataagtataaatataaatatataggttgtgtgagtcatttctttaggcttagcctatataatctactgttaattcaccttctgctacaaatttgatgaaggaaagatagcaaccagctccaacccttctcttcatcgatctctcagttccatgcattctgttccatccacaacagacaaaaattagcattgcaatgaaattagagtatacgagtcaaatttaacagttgttattgtaatcacatagcaactttaaaattctcataattttgattgaaacaagctaaagcaagacaaacgacgaaccccattattcttttcatcatcaccataaatgataattagacctcagcctaaatttaatgcatacactcttcatatttacaagggaccctttttctccaaggataagaatattaacaagagaatgtaatacatattcaaattggtagtaacagttactaattgacattcttatagaagaataaatgaattaactaat

SEQ ID NO: 198603 - DNA, 863 bp, Cannabis indica
ttgtccaaaccagtgcaaggagacgacctctacctttatttggctatttttgagaattcagttagcgaggccctggtctgtgaggaagaaaagacccaacaccccgtttactacttcggcaagacgatgataaaagcagaagttgagtaccctttgatagagaaactggccttctatctgctaatagcatttagaaggtgcgaccctacttccaagcacattcaatcaaagcctttactaatcatctgctttgacaagttttatagaagctagaagcctcaagaagattgcttaaatttgcaatggagctcggtaaatttgacattcaatacatcctgcatatctcaatcatgggagaggccctagcatacttcgttatggagtgcaataaaactgaggaaactgtcaatactcttgaagtaattgcacccacttggaaagtgtatgtaaatggggcctcaaacaaaagtggattgggagcaagagtagtgaagacatctcccgaaggtttaaggcttcaaaatgccctatggtttaaattcctagcctccaataatgaggcagagtatgagaccttgctagtagaattgagattatccagggttgtgggagccgacaggatagaaattatcagtgactcccagttggtttttaaccaagtattgggagaatatctgactcacagagagaagatggtctcttacatctcggccgcaagggaatggctccaggaattcaagaactaaaaaattgagtagatcccaagggagaaaaatgcacacatgaattttctagaaaattagctttgaacaatgaagtagagagactgggggtagttcccatcaagtatctttcggagccaa

SEQ ID NO: 198604 - DNA, 724 bp, Cannabis indica
ttagagagccattaaagtgtgttgtaaccttcttctgtgaagccagttaggctagttcagtggtgtgggagggataaaaaaaaagagagggcatgggttccaaaacccctaagttaataataaattgtaatactattacactaaccttcttctgtgtatgatttttctggtgatgctgtgttttttcgtttttttgcattagttgattattttgtttcttctctcgatgactggcggtgttggtgctcaatgtagtgccaacaataatgttgcttcaagccttttcaatagtgatcatctaggaaatagtcttgtttctcatactttgactagtaaaaattacaatttgttgaattgtctgatgaccatcttaagtgcggcttgaagtctcgggttgagggactccaaaacacttccaacttctactaaattgtcttttgttttataaatcatctaggcacattttggacaaaatccatcgatttactattcataatgtgctgaaatcaaaaactcataaaacgaagtcaaatgtactgaaaacactaagaaacatcattatcttagctagaagaaactaagaaaatataataaacaatgcactaatcaatttttctagtccctcaacaaaattaataaaaactaagctaacagaggagaagtggtctacttaaaaagaaggaatggtctggccgaagaggtttttttgtctcaaaaattgcag

SEQ ID NO: 198605 - DNA, 513 bp, Cannabis indica
ttttttacaaaaattacaggtgggcttattaaataattacaacatatgtatagtacacaattatgaagaaaaataattagactgaaaagctctcctaaataccaaaacacgtaaagggtctcccgaaatatcattttaaatgtgtattatagattttccttttatttatagtgatacactatatatgaaactacttttaatatataaaaaagttgtatgctacatatatattttgttatatattgttaaagttaacagttaaaattaatactgttaaattaattaattataatatttaaatttaataatttattttattgtttattaaaatataatttttataactattttaaagtgttactaaaattaagtagatatgttttatgaaaatctaaatttaaattttattaaatgttaaattattaattaaatatttttttaaaaaaaaaagagagggtataagtttgaattcaagaatcctaagttatactaatatatatatactaggtgatt

SEQ ID NO: 198606 - DNA, 921 bp, Cannabis indica
aatacgttgtcgtgattttaattaaatgtgcacactattactaatcaatgaatttaatgaaaaacgtaattaattgaaatttttataactaaactattaaacttgaatatataaatattttacataattcgggatcatgtttttaaaattacaaccgtttacaaaatacttaattacaaaaattgtcacctagcaactatcaaaataaggcatgttctgcctatatctacaaatataaacaatatatatgagtcgatagactcaataagaaaatcataatcataacataacgtaaaccagattataactaggtgtccatacacctaattacaatcctatcccacgtcccacgcgtactaagtctagaatgtttatacgacagtacgattgaccataatataaacctatactcgatactatagtcgtaccgatgtaatatcatcaatacgtactttgctaaacatatatctttcggtattcagtgcaactctatgtacactaatatcgctcttactaatatattatctaataggaaataataaagcatgcacgataaatatgtaaacacatatgatactattatactaatcttaccttgatttcgaatcgttcaacctgagtgaaaattgttgcttgatgatttataggcccctaagccacaacatatataaaactgataagtgatacgctaaatcacttttcgaagacttagacttaaaataaaaaattgtctctatcgatagataatatgacaaccctaaatatcgataacataccaaaaaatgagatttctaagaaaataccacaaaaaatggcaagccattttctaaaacgacaggccattttttcgggtccttggctactaaaaatggtagactgtttctataacaacggtttgtcattttttactgcaaaacacaa

SEQ ID NO: 198607 - DNA, 2099 bp, Cannabis indica
ttaatataataatttagaaaatatcgatagtcaatcggaatgtgatctgtacgaaaaagtattaagtactactggtgcttaatagtattgttcttaggtaaaacatactaaatagactgatattctgcgttaataaagatgaagatgctattccatattacagtttcgtttttaacagtttgtttgccacgtcagctttgcagattttgccaacaatttcaagagactttttgtcgttttgtgagtggtttgtttcacttgtttgcctccacttttgttttttttatttttctttctttatttttgggttaaatgatattatatttgggttataaattaaattgtgtggtttctactaatgtcaatttttttatgattaaaattggtcactacatacaaagttcacattcacaatcttacttgtggaagtattgcatcatcaaatccttttttgttcttcttcttttataataatcatcaattacaatggtgtgaataaaatattcttaagagtaaagaaagcatttttaagtatgaatcatactcgtttattcttatgtgaagattccgaactacccccacttaatttattttattttaaagggtattttatggttccaaatattagatgggatcttgtcataaatataaagttaattagaatttttgttttataaactttcacatgtactaaattatcatgcccctgaacttttatggccgttaaaaattctccctcaactattaaaattatcaaaattaaggacttttatctaatttcattcaattttactaatttagtgattgtttatgtcatgctcctgaaactttaatatctaccaaatcatgtctcttgtattttgacatatgtcaaattatgcttttaaattttcatccatattagacttttcttactaaaattgaacaaaaatccttaaatccaacaatttcaatagttcatagagaatttttaacgaccaaaaaaatttagggggcatgatttagtacatcgaagcaaaaatcctaattagcctaaatataatttaatggttttacatttattctcacaaagaaaagaaaataaattaagctaactagaaattttgttctttgaactttgacatataacaaatcatgttcgttgttgatttttatttaatttcattcaattttactaattcggtgattgttcatgtactaaatcatgttttgcgaactttaatatttaccaaatcattctctcaaattttaacatgtatcaaatcatatcatctaaactttcatttatattaaacttttttattaatatcagataaaaatcttaaacacaacaatcttaataattgaagagaatttttaaaagatttatgatttggtagatataaaaattacaaaaatcctaattaacctaaaaaaaaatcccaatttcttgaattgtctgctgttgccctaggtcaccaaacaatatcatcttcaacctctcttcctcgtatcgtcatcctcccacaacaggtacttctctctccttttccctttcaattacaaaactccaattagctgttacgagtccctaattgattgtatatgaaagattataaatttatggagtattgttcggtttaattttgtgatgaagatgagagtcttcaattttttaatttggtgctaatttgatctcattagttgaacaattcgtcatagttgtcaataaaatgtaatctttcttcttatataaacaaattagggcttttgtgcttcgagcagtgaaatgggaatggaagaggtgggagaaatttcttttcttttttgctctcctctgcaatttctctgacttgttttgatggatttgcaagcagggtatcagaaattctgaatgaactcaaacaatcattttcttcagttggagccattccccttcaagttcttcttgctgggtactttcaattttatatcataagcacatcatatctatctaggggtgccaatttagttagtttaacacgaatacgacacgagagtttacgggttcaacaccacacgaaaattatgcaagtcgtgttcatgtttgtcatctaaaataaatttgagaacaactccac

SEQ ID NO: 198608 - DNA, 603 bp, Cannabis indica
agagaggcatgttaattcagtttggccaactgatgagtctaatcaattcttatgggcccatgctggtagtcaccgagctcactcttctggaattagtcctttagacatttataagcagcgacagaggtcatctcatgaagagcaggtgggccatctcgaacggaatcttttgttcaagagcaacttcagcaaggggtttatgaacctggctcattgccatttgagttgtcaatgtcttatcctcagggtgcttcaggaatgaatttggatgctgttaatgccatggctcgggcttatggtttggatatgcatgagtcaagtgcacgaatgaaatcttcaaatcaagtgggaccatttcctgctggagttcaaagtgttggtcctcagcaccctttaattaataatcaatttcaggttccacgaatggatggaattgagaacagttggtctgagaagaatgggcagctagagaatttcttcgttgattctcggtttcaacaatcgcatattgctgcagagcgacagaaaagggagtctgaagctaaaattgtttgtgaggattctaatttatggttgtcagatgatgagaagtcaaagagatta

SEQ ID NO: 198609 - DNA, 1058 bp, Cannabis indica
taaaatgttcccatcagctaatagtgtaacctgttgtgaaatgtgttcaacaaatatctagtcagtactctatcaatgtacagatagatattaaaacaaaagaaaaataaataaatgggtttaatcacataaaaaattcattttttattttgaatacaaggatggtaggaattagtgaattttggagcctaattacttgtatgctaaaaacaaaactgatcccctcaaaaatttacccaaacaatagacagaagaacactcataataaccacagtttggcatatctagatcacattttggcacatatttcaaaatctccatcaaagctaattgattgagctaaaggttttcatttgctttcagtcaaataaccaaaatataaagggcagtaaacttccaggttgtactacaccagcaatgacacttctaaacattgtttctactgctttcttgtcctatccctcttacattcttttaacatttggagataaaaaaaaaagattctttcaaggtgatatagtgtcaagaggactcgttaattgtcaaatttatcaaatacaatgaaggaaactgttaaactactttaactcttaggaagtgctagaaactcacaactgcatcatcatatacagatatgctggacaaagtgcaaccttcaaagatgacaccccctagggaaacaaaccgagtcttcattatctctatcagttttgcaggcctgtaaacagagaaggatctaaattaaagcaacaagttcaacaattgacacaatgcttcttgccacttttataactcatataacatacattacttattacttggaaagaagaagagagataacttacaatatgccaagattaagaatatcttcaacccagatttcgcccttcccttcaaatccacatctgttctgtgcagttaatggaaggccaaataagtgacaaaagtaagtggaatacctaactctgaagatgccatattgtagaattcataggctactctattcaattatgcaatttcccatcagatgaagccctagtcaagtgcatttgagacac

SEQ ID NO: 198610 - DNA, 2090 bp, Cannabis indica
taatcacaattaatattatttcacatgattcattattggaaagttatacaaattattatagaaatattgcttttcacaagataacatatttatatattacatataattatttatcaaattattaatttaaacttttcatttcattgaaagggttgggatgcatgtctcaaccttaaatatattagtatattagttatggtttcaaaatgtattagtatagtaattattgaacatttacatttttcaatattattttggtaaaaacaattatattataattttttactattttcttttacaatgtatttcacatattattttgtaaaaaaaaaaaatcaaaaataagtctattatgcaaaataaacaataaacatgtgtcctatagtaaaataagaaagccgaattttgcacgggattggtcgatattgagcattattttttgtggggtctttgactaggggtagccaactaggtttcgacacggtacacgaatacgaacacgacacgaattgtacgggttagagtcaggaacattaggcatgggtcgaaaacggatcgacacgacttgacacaaaataaaaacggatcaaacatgacacgacacacttaacacaaattcgacacgtttgacacattttttttttaaaatataataaaataataaattattaataataatataattatataaaaatatatatttagtgatttaatattaagttaaaaaaatttaaatttaatttttcttaacataaaattaaaaatattttaaaatttttaattttattcatatataataaactatatatacataaatgtatatacgttttttaatggaacttaaatctatcatttttctctacaattctagcttaaataataacaaaataggtcacagtgggtcgacacgaacacgacacaattttttacgggtcgggctagggttgagaaaattagacacgagttaaaaaacatgtcgacacgtttgacacgaaaaatagaagcgagtcatataaaatatagcacaaacacagcatgatgacacattttgtcacccctaatcttgactagttccgtgtatgaatgtaacacagagcattttcctgtcttgtcctagaatatacaattctaaaatattttttacattaataactgtaaatatgaaatgttgatacacataagtcatcttttcgctatctttcttataaaaatgaaatttattttatcaatatggcaatgactagtgtcttttttccactttaactagtgtttcataacgtaaattggttctttatatttttaagtagagaattgttaaaatgtattattagtgtctagtaccattttcggtgtcatatcattattagtgtaattaagtattgaaccttatatgaaaataatttttaaaaaatatagttataaccaatcgtaaacgccacttataaaatactctttcaagtacaattaaccgaaatttaggtttgaacatatcctaaatagagataaacttaataatcacggattaattaaaaaacttataatacaaaatatactaattaaattaattatttaattaaggagatgcctatttttaattaggacaaaaataaaaacaatatgaaaacacataaatccaaaccgcctaaaacaatagaaatttgaatttagtcaccttcctaatcttaactgtcgtttttccctattattttaaccttaaaatttaccttatttcctgttctttggccttgtacattcaaaattatttatatatatttatatcgaataccaaatagataaaaatactattcttttaaaatggtgaatttttctgtactttttcttcattatttatattaaattattattacaccaccaacggtcaaatttcacatgctgccctattaaatgttttctacccaaaaaataaaataaaaaaattattcactaatttgtcatttctgacacaaccccattattttcccactattgcatgtaataagattctcacaatttaattcaatttatatatataaacacaataagtgtagtgtagagtagtgtactacttctatttttatttttgtttgttt

SEQ ID NO: 198611 - DNA, 1389 bp, Cannabis indica
gtacattatttacatgtactgatgtacagttttacagagtaattataatgttgtatttatatataataaaaattaagataatcaaatgaactcaattaatcccagcattattattcaaatatatatattggatgtcacgaagtctgatctatttatgtatactttacttgaataaaaatatatatatatatatgatagatatggctgatcatcatcttcatcgagtattgttggaaattatggggttctatctcaaaaccaattagcaatgagtggagtagcccatgttcttatatatgactcaatactttcacatttaatccacgtgggacaatattctccaatatcatggtggctatttttactcaccaatcttgaatcaccttatcttaagtagtaccactcgcttatttttttttttttattttgcggttgggaattctatttgctcgcttaatcttgttcgcggctgggagtactattttgctcgcttgcggctggctaactctttgataagtgtggatcgaaagctcactagggatatggctctgataccatgttgtgaatcatggtgttccatctcaaaatcaattggcaatgattagcaatgatatgactcaatactttcacatttaattcatgggggacaatattttccaataagtatatatatatctattaattatgtgattattaccttatatatataaatatatagatagattcgtatattattagaatatattgaaattattataagaaggaaaaaaaaagaagatgatatttaatagagtatatatggtgaagcttataagtcgtggctatatatgtgcctatagatgtgctgcagtcacgtccatgcaaacactgaatatatatataacatatactgctttttatgattgatcatataataattatttgaagcagttatatatcttctatgtatatacaaaaaaatcatatatgagaatgagagaatcttataattaatggtgggagcatgagacattaacgtacgtactttatgatggacccgattcccattaattaatagttttgattcaaaagtaaaaaagcagaaaacgccaaggccacaactctaacgctgtccatcaatcaaattagccacgtccactacatatactctccatcctcatcactctaaatctgattctgtatagtgctagccgatttatatttttaaaatatgaattttattgtttcgggctataaaaaatataaaattgtatcatgtcgggtcgtaaaaaaatataaatcgtgttcttttagacaataattttataagataagcatgacacgttcttcaagctcagtaattttatattgtgttcaaatttatatcttactttatacgagccgttatat

SEQ ID NO: 198612 - DNA, 1281 bp, Cannabis indica
agtgttttataaatcctagcaataattagttatacatactccctaaaagttattacattaaattatagaattatcgatacttaattgtaccaatagcaatactaacacgtaagatagtgcttttagcatttctcctatataaatttatgaggattgctattggaaactagtggtgttcattactttctatagatggcgtcctacaattgattagcaatattttttaaaaattatttttttttaaattatataatacctgatatttaattacataataataatatgacaccgataaaagtactagtaatattttttaacaattttctaaatttatcttattaagtcaccaattatatatatttgtctcattattacaattaagtaaaatataataattaaatgtaaaaataaaaaaaaataattaatggtcgatttagacaggttaacccgatcaaaccgaccaatttcatttggcaggttactattctttttttcttaattgggcgggttgtacttagatttttataacccgatctttacattaggttgaataaagtatagcataaactgaccagatcgactgatgtacatattagaatattatctattttaagtataaaatcaatgtattgattttatacgtgtataagagaacgaatattttatatttattgtatttggtcacgattaagtagttgatattctatatatagtcataatatgatttactaaatattcattacctgatttaattttcataattaattgtcaaaatatctgactattaattgtggcagagaactagatggagagtctcacctatataaatataaggtctcggtccccaagttcattactcatcctgtgaaatactaaaaatccatctaaagagattagagagagcttggaagcccgattacccacgctaatctattttctttgcagatcaaaatttgtgtgggattgaagctcaaagatttaatagctagaggtatttcgatcttatagttatattgtgtatatgtttatttattttgcattttatttacacatttatattatcatattattcatataaatttttaacagtacacccctagtaacaactattactttaatgcaacagttatatctgttgcgagccaactaacataaaaccacataataactaataatttcacatatttaatacgaataaatattacaacaatcatgttttatctgttaaagtcgcgtacttgacaatttcgagccctgattttataatagtatgatattgta

SEQ ID NO: 198613 - DNA, 1133 bp, Cannabis indica
ctctctctctctctctctctctctctctatatatatatatatctatatatatacgtacatgtggacatgtttattaagttaaatttctcatgaaatgataaaatggctaaggttttgaggaacaaggctatgggaagtgcatttcttctcttttttcattcttaatatgtaaatatgataactaacaatttctgtcaaaattcacaggttccttttgaaaagaaaaaagaagaactttttgaaatggtatattctagtcccccttagcttgtttaagtttggttatcttgcttaagtttgtttatgttggcgagttgtgtacttcaggtaagcattcctgcgtggttcaccgtggatacaagacttggaagtttgtctatccatttggataccccacagtgtttttctgctgagatgtattcagcagatctgaatattgtgggaaaggacctgaggatgataaggtaaacacgctctcctagaatcttcaacctcttatttgtctcatttatatgaatattgtgtgtgtgtgtgtgtgtgtgtatttttgtctgttaatatgtgttgatggtggttggtttattctttgaaggttaaccttgcacgagaaactcttaaaggactcttggctcattggttaacaaaaagaagacaaaggtttggaaaccaagcttcttctaccaatggggagttgcctgggagggaaatcactacaagaagtcatgcccatccaagaattgatggagattctactgctgaaaatgattctgtggtctatcctccttttgaattttcaatgatatcccctccctccattattactgagggttctcagggaggtccctggagaaagaagattactgatttagatggaactgaagacgacaaggaattgccgtggtggtgtttggactgtgtcttgaataatcgcttacctcctagagaaaataccaagtaactttgttgacttgatttgaattccattttattttattttgttgacttgagatgaattccattttacctcctagaaaaataccaagtaactttgttgacttttaattccattttatttttatctggctgaactgcattaaaacacatatccccactttcaaattctctctctctct

SEQ ID NO: 198614 - DNA, 1072 bp, Cannabis indica
tttatagataatcttaaataactataatgtttatgatcaataaaaaaattagactaaaaaattctcttgaatgattaagataaaggtgtaccaggttaaccctttaggggtaaactaggctttcctaataattgaatgatttggttttgggcagcacaagtcctacgttttgggatttctgatggattggttgtcctcattcttgtattgttgcttgttcaggtggtggatctggtaagaagagcagttcctattgctttaactccagatgatgaccccttgagagatgagctaagggcactgcatgagaagaaggaagaaattgatgtcttggctcataaacatgtccgacgaatactttggaccgggctggtcctagcgacattgcaagttgtgatctttttccggttaacattctgggaattctcttgggatgtaatggagccaattgcgttcttctccacaactaccggtttagtcataggctatgcctactttatgatcacttcaagagatccaaacctaccaagacctgatgaagaggctcttcctctccaggcagagaaagctgattaagaagcacaatttcgattctgaaagattcaaagagctggagagaaaatgcagaacgcgactagatgccactgcctcgattaaaaaacgagttggcctggaactggatctagatgatgccatgcataaagattaacatgtcaagtttgacaatttttttggtaggaaaatatgtttgtaacaatgtgatccctcctgtttttaagtaggtaggggacataatttttacttggacttgtacaattttgggtacttaccataacagttggttacccatcttaaagggagaacactgagagaaagtgtaatgccgggccaacttcacaaaaaatctaactaggtataaccaagttcaatttgatgcatacttacatacatatacacatatatactagtgctgactttcatggattggacccaacttgatcgttttagtagttcctaaagtaaattcaagattaccagagggaattatttaagggattttttcatttttaca

SEQ ID NO: 198615 - DNA, 528 bp, Cannabis indica
tggaacattagaggtttcaatcagagaaataaataggatatcgtgaaaggagattatgactaaaaacaaagtgagaattggtgttattttggaaactaaagtaagaggtggcaaagtaaaagaaataatgggatctacctttttaagatgggagaattacacaaacccaataatagaaggtagaattttaatcatttggctcgataagtttgtaactatagaaatcctagaagagaacactcagttagttcactgaagagttagaatgaaacgaatgcttaaagaattgtgcctagcagttgtctatgtgagtaagattcagtctgagagacaagatttatggcgaaggttggctggtttatatatgccagttaagccttggctcctttgtggggactttaacacagttttcaatgatggaaacagaattggagggaagtcaattagctctggggaaatttgggtggctaacaattggatgacatcgggcctagaagatgagaggaagaggagtgactccaagtatac

SEQ ID NO: 198616 - DNA, 1061 bp, Cannabis indica
tatatttttataaataataataacgtgcctaagcacgtcttgcccaactagtaatatatttagcgagggcactatatactattatttatgttcgtctaaatggacgtatcacctagctagatgtgatatattcgattcatacaagtatcttacataaatcctatatataagacaaactcattgaaattgatacatatatacaaactaaaaaaattaaattaagcattatattttgttcccatcatctccaaaatggccaaagctcttcaaacaacaacccttaacctactcatctcactaactattttgctctctttcttgagactcaccactgcaaatgatgattactacaactctgtagtacaaagaaaacacgggtttaagcatgagaagctgacccactttcacttctatttccacgatacagtaagtggcaagaaccccacgaacgtccaagtggccgaggcgccaacgacgaacacttcggcgacatttttcggcatggtggcagtgttagacgaccctttgacggtgggaccagagccaacttccaagcaagtgggaagagctcaaggaatcatagcaatggcttctctgtccgatgtgggacttttaatgagtttgaactatgttttcactgaaggtaaatacaagggtagcagccttagcatattgggacacaactccatactttcggcgcttagagagatgcctgtagttggtggaactggacttttcaggttcgcaagaggctatgcactagccaagacttatatgtttaacgccactagtcatgatgctattgtggagtacaatgtctatgtcttgcatttttagttggtaattgaacatcatcatgtttttacaaacatataatatatacatatacatatgatgtattgtgtatatgtatatgtgactaatgttctttcatgtttttcattatttgaggaccataatgagatcgtgatatctctccttcaataataattattaatttaccgagctcatatatgcatcgatctgatgtagttctatgataatatatataaatatactag

SEQ ID NO: 198617 - DNA, 2053 bp, Cannabis indica
aacatctatttatatatagatattatagacatatttatttagcaaatttattgcgaataatatgataatgatgttaatgacactaattttgctgagctgtcaagttgttgatctgttaaatcaagattagttagttactgattttagttagtgagttagttttgtctcaactaatttttcctcttggctttatgtgtatatatactctgtctgtaacacttttttaaatcaatgagaaatatacacttttcttcctctttgtcaaatcttacatggtatcagagctaatgttcgtccttagctatggagactcaagcttcccccaccaatggaggttcgtcgatccctccctcttcgtcacaacaaaatcaaggtgttactgctcttaacaataactctcttcctaaaacgaatttaatttctttttctcattctctatctgttcgccttgatgatcagacaaacaatctaccatggaagcaacaagtccttgctgctatcaaaggaagctatttacagtgattccttgatcctttgttggcccctctgaagttcctcacagacgatggtcaccgtacgaacaagatcagtgttgaattgcaagaatgggaacaacaagataatgttctagtatctttgttgctatcttcaatgtcggaaaaggttctcactcgtatggttgggtgcgaagcagcagctcaaatatggatcacactccgtgaatactacactgcactcaacagagctaatgttggacagtacagaaccttactgagaaacacgaagatgaaagactcactcagtgactaccttctcaagatcaagaatcttgttgacactcttgcctctattggctatcccacctccacacaggatcacattgaagctattttcaatggcttaaccagtgattataatgtcttcatcacttctgtcaatactcgcactgatgcttataatgttgcagaaattgaagctcttcttatggcacaagaagtgttcgtggataaagctgccaaagaactcgacattgctaagaatgaagaaaatttagctcatgctaaaaccaatatgggacgtggtcaacctcctcttttctcccaaaatcaatttggatatggccaaaatcagccaagaactggtcctggacacttctttaattctggtaatggaccacctagtattcccccataccctgcatcccgtggtcccccacccagtagaggccagtttggtacttttagagggggtccatctcgtggtagaggcactttcactgcttggggtcagaagccacagtgccaattgtatcataaacttggccacactgtgcaacagtgcttttacagatttgacaaaaacttcacagggtccgaatcctttaaaaatcctcatggaaatgccaatgttgctaaattacaagcctattttgccactcctgaaactgtagctgatataaattggtaccccgattatggggctaccaatcatcttacccccaatgccaacaacttggcttcaagtcctgaattccttggtgagcaacaaattcacataggcaatggagctggtctgaacatcagcaacataggttaatcctcttttctttctccttatgtaccacagtttcttacacttaataatttgcttcatgttcctgaaattacaaagaacttattaagtatttcacaatttcctaatgacaacaatgttttctttgaatttatccctcttattgtgttgtcaaggaccaggatactcagaggattttaatgcttgggagacttgacaaggggctctacaaattcgatccctcacaacttgatcttctgtcatctcatcaaaaacacactcaagttcgatcttcttctcccctatgtaacaatcatactctcaataatcaaagtagtcttttttctttgtggcataaaggacttggacatccctcttctcggattgtccaagccagtttagcttcttgtaatatcaaacttaataccaataaaaataatacattctcatctgatgtgtgcactgcttgttgtttaggaaa

SEQ ID NO: 198618 - DNA, 598 bp, Cannabis indica
caaacttgttttctttttaaaaattcctagccttattccacaaagaaattttgggttttaaagaaaatgtagaccactgcactggtccaatgcaaacaagattaaaagctaacaaacactaacattaaaaaaaaaatgcattttctgctctccttaaaatctaagctatgagcatagtgcattgatgaaagcatgcgatacttaacaataaaaattagtattatggtctgaaatgatcactgagaactgaaaacaagtgaacatatgaaccataataataaagagagaaaatggggattgtggtaatactgactccattaaaaagaagatcgagaacaggagaatcatagacggccttgatctcatcacgggtccaatcgtttctcggaccttctttgactgttctctcagcttgaattgcagccgcggaacaagagtaggatgaaagctgaaactggagaaccgaagctctcagctgtgtagaacgacggaaaatggaagcaatagaaagcatcatgggctgatttttttctctttcttttttgtcttttctggaatgtatagttttctcggggaaatcaaaggattttcaggcgga

SEQ ID NO: 198619 - DNA, 714 bp, Cannabis indica
gtacatataatcatgaaataaatcatgtgaaccatgcaacattaaatgttatttctgatctatactaataagtaaatctgattatattgaaatgagttttatttagggcataaaacccaacagtttcaaatcctttttaagtttcttagttctagcctttagatccgccttcttatccttattccactccttaagagcctccccacaagaatttatacgccccctaagcccttgaggagaaccccaattagagttgtcaagccacaccgatccaacaatcctaccacaatcttcctcttcggcccaagcttgttcataatggaaccgagatctccaatttggtgtcttgtttgtttgatccttcacatgactgaaagtaaaaagcatggggcgatggttcgaactccaccaaggaagaaggataacggaagactcacaaaacctttgaaattatctcgagttagccataactctatctagtttttcaaaaaccaggttttgttgacgcccgttacaccaagtgaactccccccgctcatcttgatctccttaaagttataatatgagatggctctctggaaatcccgaatttgggagtcattcttcatacagccccctttcttctcttctaccttaagaatctcattgaagtcacctccacaacccaagctccttgaatcaagtccctagtctctccattaattgccaagtgaa

SEQ ID NO: 198620 - DNA, 771 bp, Cannabis indica
cgatcaaatttggcaaagtatggaggtctacatggacgacatgctagcgaagaccaagcttgcaaagaatcacgtgaaagacttgaaggagtgttttccattttgagaaagtaccacatgaagctcaatcctttgaagtgctcatttggtgtttcatctggaaagtttttgggttcattctcaattctatgggcattgaagcaaacccagaaaagataaaagccctcatggatatgccttcaccttaaataaagaaagatgtacaaagacttactggttgcattacaacactaaatcggtttgtatcaaagtctatcgaaaaatgcctaccctttttcaacttactttagagtagcaacaaagtggaatggactgaagaatgtgaacaagctttctaactacttaaaaagcacttggtagagccccctattttgtccaaacaaaatgcaggggagatctttcatttatacttagccataactgagacaattattagcacatccttggtacgagaagagaagaaggcccaaaaattagtttattatgtgagcatgcgcctcttggggggcagaggcaagatatccaatcatagaaaaacttgctttttgtttgatccatgcatcaagaaagctctgcccatatttctaagcacaaccaatacacgtactcactaatcagccccttcggcaagtgctaataaaatcagaagcttcaggctaactcctcaagtgggctattgaattgggatagttcaaataacttaccatccaa

SEQ ID NO: 198621 - DNA, 624 bp, Cannabis indica
taaaaatataaaaaagattattttgaaatgtaaaatgaaaaaaatcctaatttattatttattaataattgtataagctcactatttttgtagggtgaattaaattcataatatatattcaattatattcttgtaacattcatattttcacatataaatctttaccaaaaagtttaaaaatactattttttctctatgggacctctgaaacttgtgagttgtgatacatttattttgtattatttaatatttactataaaaaaatacattttttttgtctgatactataacaaatattaaatgagataaaacaaatattcttcaatacctacaaattttgagtgcaaaaatatcttgagagtcatatgtgaaaaacatgagtttggttggattaaaaataaatacaaaataaattagaagtttttgcaccagggaacctaattttgcacttatttacggatttggcctcgctttaaataatacggttttataccgtttttttttcaaattttttatgccacgtataccgtttattgtgttattggttttgtccatatctgatacgtgtattacacgtttatagggatataggctagatttgcttttttcagttagtcccaatca

SEQ ID NO: 198622 - DNA, 707 bp, Cannabis indica
ttttttttctcagaagaaatgcataaaattagtttctatactgaatttgttgtctgaagaggcggaatactttgctcattcctaaaaaaattgcctggatctataaatgtttttgctttcaccaacctatcaaaattacccttaaaatattttcttccataaataatggctttctttaagaacgtgtgattatttggattttctccaatttcaagatctcgataattcaagaaagtttctctaggattggttgaaacatagggagccatcttcttgtacaattgtcttgaaagattcatgtaataattcgttacatcaattccatcctcattccaatatacgtaatattgcactaaagccaaatttccagccctatgagggaaaggcgtttcccattctgaaatctcgctcattctcccaccataaggattccattttatcgaaacatgaccaatcttgatcgtcattttccataatctcttcaatgcttgctttgtaagaggctttttaatgtaatcagacttcaccttgtaaaagtcaacagctccattttgggctacaagcaactcatccaatgatgttattttttcagcagggtgaccatcgatccaaaaaacagtggattccgcccaactcatttcgaaacactcttttttcttcaaatccaattcagggtatctttgttctagaagagaaacaaggtcttg

SEQ ID NO: 198623 - DNA, 2192 bp, Cannabis indica
gttttgctatgttgctcctctcctaccttggttagttattggagacttcaatgaaatactatccaattctcacaaatctggtggtgcactccgaaatgaaacacaaatgtaggcattttaaaagatctttagatagatgtaatctccatgaaactccctttgagggtgatccttttacttggtcaaaagtcatgctgccttgaacacgattaaagagcaccttgattggtgttttgtccacaagcattgagaaaaaaaaaatttcatacacctcaagttcatcatctcgattaatttcaatcgaaccatcaagttatcactgcccagaccaggagcattaaaaggaaaagtcgttttcgctttgaaaaattgtagccggcagatcccgaatgcaaagatattattgtaacaaattggtcaattctccctcttcagacccaattgctgctctaactaaaaatctgttatcttgtgctgaaaatcttcaagcttggcatgatggcaagtatggcagaatgaaaaaaacattaaagaatgccaagaaaaggtggaaaaattcaacaactcttcggttcaaacaagcagccacattgatgaactttaacaagctgaaaccattctcgatgaattgttagaacaagaataaatatattggcagcagcgttgtcgggtggattggttaacttgtggtgacaaaaatactaagctatttcacgcaaaagctaatactcgaaaatctaataaccaaattaaatttcttattgataatatgggtgtaaaggtgaagcccaatgcagaaatttctttggttattcaagattattttgctgacatttttcaagctagtgacattgatgactctactcttgcaactactctagaatgtatccccaatatggtttctgatgcacataatgcctctcttcttgcacctttcactgttgcggaagttgaaacagccctcaagaccatgggaccggataagagcccaggagtggacggaatgtcagccatgttttatcaacaaaattggtcaattgttggggaccttgtaactaatggcgtgctaagtatcttaaacaatgggcctgatccatcaagattcaatcatactatcatcactctcattccgaaaatcaagaaaccacaatgcatggacttcagaacaattagcctatgcaatgtcatttaaaaaaatggttaccaaaatcctggtggcaagattcaaggagattattcctttggtaattttccgatacgcaaagtgcctttttgcctaatcaattgattacgaacaacattttggtagcttttgaattggttcatgcaattaaaaacaaaacaacgggacgtaatggcattgcatccttaaagttggacatgagcaaggctttcgacagagttgaatggagattccttgaagaggttatgaggaaaatgggttttgctaatggttgattacgcttatcatgggctgccttactactaacagattttcttttcttgtcaatggtgaagtcactagtaacttggttccaactagaggcttacgacaaggatgccccttatctccgtatctcttcttaatttgtgctgaaggcttatctaggctgctggaacatgaataaagtattggcaatttacatggcttcaaaatcacaaggcgtgcaccaaccatatctcatttactctttgccgacgatagtcttctattttgtcaagctaatgaaagctcatgccttgctatcaagagggttttgaacacataccatcgtgctttcgggtcaagttcttaatcccgataaatctgtgatgtctttttctctgaacactacattggcaacccaagttttctttcatcgacacctttctatgccaatccgtgagtgtcatgaaagatatcttagcttgccctcttattcaggaagagacaagaaagaactttttagcaacatcaaggaacaaatttggaaactaatgcactcttggagtgaaaagatattctcggcaagtggtcgagaagtccttctcaaagctgttgtttagtctatcccgacctatgttatgagttactttcgacaccatagttacttttgcaaacaacttgagagtatgatggctaatttttggtacggtatgaatgaaaatgggtccaaaattcattggtgctcatggaatctgctatgcaaaac

SEQ ID NO: 198624 - DNA, 1154 bp, Cannabis indica
atttgacaaaaatttttaaactttacaatttaaattgtttaagaaatttttttaactgtctcaaataaaaaatataatgagggacaaattctaattaatccaacctgggttattcatttgaaagtggctaaataaatacgtagcaatatattatttgttaagaaactaccgtgaaacatggtcaagtgagacttttgactagttacctcaccaccaataacacgaaagctttagaaaggacacgtggaagaacaagagtctaattgagaaaggaggaaatacgagtcacgtaagggataggatatgtataagcgtacctgatggaacccacggtggcgagtgagtgacacgccaagctcactgaggcaagcccatatcctctgatcagagccgtaaaatctataatagcggtcgaggcaaccgtccaatatcttggccaagcgagccgcgagtgggcgactaatggcgaaaccaccaccaccaaacgccatgtcgtacgcgtgcatcgcgtcctgctccacgctctccgaatttccgccgatgtagtacatctgcgtgtggtcgtaactccctaacaccgaaactaaattatccgcgaaaaacacggtatcatcgtcgcccatcacgaaccacctcgcgtttggaaacccgacccgaaagttctccaggactattcgggcgatccgaaccgctgctcgtgagctggagtatttgaaccgggtccagtcctccgacactcggtagggaatagaaacagtgtcttttattacgtcaggttttggttccgcgtcgagccagacgaagccgcgagtagcgttggggtcccaccattgaaggctgtaacggctgcgctctcgccacgtgtgcaccgaagcgccgattccaaaaataacgtgtgagatgttggtgggtcccgtgacgtcgtcgttttgtgcagagtagtctggaaatttcgttgtccggtccggtaaagcgaaccgccgagacgagctaccccagaaagccgaatggagagcgagcgaaattgatgccacgaggcaaaccaggagtccgattcgcattagaagagcgaataactcgcttgctctatcgggtaaccaggaaaagttgtgcgccttgagcgggtcttgactcggtccatgtcgattctgctt

SEQ ID NO: 198625 - DNA, 2467 bp, Cannabis indica
taataatctcattattaggctcaaaatcattattaccccatcaaacacttacaaacttagccaaaaaacatggccccctcatgtacatcgaaattggacaaattccaactctaatagtttcatcagcagagtatgctaaagagatcatgagaacccatgatgttgtttttgcatctaggcctcaaactcttgcagccaaaatcatggcaagtgattgtaccgacattgcatttgctccatatggtgagtattggaaacaactcagaaagatttgtatgaaagagcttttgagtccagctagggttcaaacatttcaacccattagagaagaggagttgtttaagcttgtacaagggattgcttcaaatgttgggttacctatcaatattactcaaatggtcaaagattcaacaaatagcattatttctagggctgcctttgggaagaaatgtagtgatcatgatgagtacatatccattatgagaaaagctctcaagggagctggatttacatttggagagatgtttccttctttgagttttcttgattggatcagtagggttaaatatgagagcttcaatttaagatcttcaagaataatggaagatattataaaagaccacagaaatactatgtcaagggggaaaggtggaaggaatgaagacttcattgatgctcttctaaagtttcatgataagaacagtactgatcttggcctcacattaacaattgacaatatcaaagctgtaatttgggtaagtacttaatttcaaattcattttctgtactatatatatcacttatatatacgagtaataatatgtttaattaatcacaactttacaattaaatataaatatttatcactgagatatataaattaaactacacatgtatgaacttggattttttctatgatcattactctaattaataacatctatcatgttattttgtaatacatatatatatatatatatttataattctataagtttattattaatttgtgaaaatgttaaatttattttgtcaggacattttttgtagctggaagtttgtcatcatcttcaactgtggattgggctatggtagaaatgatggaaatccaaaagtgatgaaaaagactcaagatgaggttagagaagtatttggcaaaaaagggttagtggatgaatcctaatcaatgagatgaaatacttaaaatcagttgttaaagaaactctaagattacatcctccagctcccttttacttccaagagaaagtagtgaaaaatgtgagatcaatggttatgagataccaatgaaaactagagtaatggtaaatatttgggcaattggaagagattccaaatatgattgaacctctgagttttatgccagaaagatttgttgattgttctattgactttaggggcaacaatttcgagtttattccatttggtgctggaaggagaatatgtccaggcatgttatttggtctcaaaaatgttgagctttcacttgctttgttgctataccattttgattggacgctgcctaagggaatgaaacctgaagatttagacatgactgagctttctgccattactctacaaagaaaagatgatttgtatttgattcctaataattatgtatgatatgtcatctaaggcaaaatcacagatgatgacgatttgcatttgattactagtcacttatgataattatctatatgcatggttaaaaaataaatgattaatttgtaataatttactacttaatcatacatatgctagctcatgtttagctttctcttaatataataaagtttgaatttaaaaatgacgactatagtcaagatacccgtcggttttaaatggttgtttagtatagaaatggtttaaaacacttaaaaattgaaatggggcatttaaaggggaatcctcgatagatttaaaatgtcgggcatagtatagtactcgatgatttaaaactatcggggatttttggcctaaaataaaatcccagtactttcagatctcatttcttaatcttcgtcactcgtctatcactctctcacatctgcgatttgcccaaaccctttgaagccctaacgacgaaagccatccaccagcgacgaagaccaaccaccactgacgaaggctgaccaccaccgagaatcctccctttgaagccctctcattccctcactctctcttggtccgttcgagctccaccaccgattgagaaacccaccactggtgtccctcttccctcctcactctctcccggtccattcaagctccaccacttgtcacgcttttatcttcccttctctctctctctctctcgctctctcttctctcagtcagtaatctgttctctccaccaccagccattcctaacctcgaccgccatccacctcgtgccactatcgacgaccaacaaccaccaccgtatgtataaatatttataaattttaat

SEQ ID NO: 198626 - DNA, 1253 bp, Cannabis indica
gattatgatccacaggcctatacctccactatggtgcaggactttagagatgatcattcttggtttgctgatataggtgctattgcacatgtcacctctgccaataccaatcttgatgtctttcaactctacaatggatctgacacactagctgttggggatggtaagaagcttcttatttcccatataggctcttctactttaccttcctcaaataatctacattctttacatctcaaatctattttacatgtcccagctattactaaaaatcttgtaagtgtgtctaagctaacaaaggacaatgatgtcttccttgagtttcacaagcattgttgttttgtcaaggacaaggagacaggtgatgtgctactcaaaaggaaagttagagatagactttatctttttggtgattcatccagtcgaacaaggtctgccttgcagtgtcatcttgctactgtttccaatttatatcttaattcttgtacccctaattgtattcctaatactgagaatgccttatctaagatcaattgtaacaatcttgcaattaataaaagtaatttctctagttaacatgagtcctctgttttccacactactatagctcctgatgttaacttatggcactataaattgggtcatccagcccattccacacttgttaaactccttccacagttaccacacactggctccataagcacacttcaattttgtaatgcctaacaacaaggtaaaagtcacaaatttcccttccccctatcatctagtcatgctaggcagccactttaactggtgcatactgagctatggggcccttcaaagatggatacaaaaactacatccattttcttgatgactacagcaggttcacctggatttaccctcttactttaaaatctcaggcaattgaaatgttcattaaattcaaaggtatggcaaaataataatttggcttgccaataaaattcattcaggcagatggtggaggtgaatacaaactatttgccaaattcctaacagatcaaggcatcctattctctcatccttgtccccacacccatgaacaaaatggaagggcagaaagaaagcacaaacatatagttgaaatgggattaacattgccaagtttgtctcacatactggtggcatgcttttcaaagtgctacctttacaataaacagattacccacccatgtcctaaacaatcttactcacaatgagtgtctatttggtaaaaagcctgacta

SEQ ID NO: 198627 - DNA, 1476 bp, Cannabis indica
agaacattttatgggatttttttcaaagacagctagctagtaacacttttttttatgtctcatatataataagtaaattaatgtgtagtttgttaaataattttctatatatttttctcatagatccatgatatctagtttttcagatattttttcattattaaattgttttttagaaaaaaaaaaattactaaatcttctatattgtaatatctcacatatcgaatatagaggacatatcaactaatttagatgaatataaatttactccactcattattttcatcactatttactttaaagaaaaaaaaaaaaaactcatgaaaatcttatcatatatataaacacataattttatatatactatgtaactttctattccttttggtcaatgctctccaacaaattgtttacataaaacattaaatagtacaaattaacaaatcaaattaggactgcctcaaagttttgttgggtcttctgaaaaataatatttttgggctgttattaaaagaatatttgatattttataaaatcactaaaaatatatatatataaatatttataataatgctttacaatgcatttaaaaaaaagtgtattgatcatacatcccttgctgattcgatattcagaaaagaaaaagaatttatttatgacgtgtcctgtaaacttttaaaaaaatcagagtaatttacagtatagaaagtagttttcaaatagtttatttcacacttgtataaaataaaagagttatgtgtacaacaaactgtttgaactctgtttttggagtgttaatttttttttttcaatttcttaaaattttgtaaaatgtcttaaataactgtacacgattataaaaaaaattaaactaaaaaatctcttgactgccaaaataaataggagtgcattgttgcatcccttttagaatcgtgcaccatagaattttctaaaaatatgtatgtatatttaaaagaatttttttttcttcgagcccctaaattaggcgggcctagctaggtgtagccctaaccgaccttaaccctgtactaactcaacaaactacaaaaatattaattactctcgtatacgtaaaagaataaataaaaaataattctttctaactattattattgtagagttttatcgctaatattatttttctttctccctaattaagctataaaaattattgcagatatccctatttaataacattatattcattttttaaaaaataattcacttatgtggcttagtatagttgcagtatctatttaactaatttaggctacaatatgaatttaagtttattaacatttaatatattaacattagcttatatatacacatatttttaaaataatttatcgttagaatgttatttatgcacgtattttatgtctaaaatcttaatattgcatcaaattagcttaacattaattaatactacatcaataaattatttaaaaaata

SEQ ID NO: 198628 - DNA, 823 bp, Cannabis indica
gtcaagaaattataaatagaaaccaaagcacaaaaccagagaccacagaaagagagagaaagagtgatccggtattacagctcttacaatttcattcccctttttcgcggacactattcaaccaatccattcctttcttaccatttttttttttctcaaaaaaataataaatccttacataccatttttttttatataaagttaccattttttctattattattattattattatgttaaaaataattaagctaggttttggttaagtgtaatggaataatagtggtaataactaaggtaggttttgattgtttgtactttgtaatagaatttgtaatggaatggtattatgagatttgatttatttttggaaagtaatgagaatgagaggttaattgacaaaaatttcctttagttaatttttttttaaaattttgatttgcttataatttaagtatttttaacatagttattttcaaaatattctttgaagcttatttagtatttttactctagaattatttttatattattttgtcttcttttttttaaaaaaatatttctagtattaaaatgtaaggttttgatttaaatgtactaaaatataccaatagctagttttatagtttttctttttggtttgatattcgatatatattataaattttttaacatagtaattaaatacatataattaacaatgcaacaatctataatataccttctcaaactaatatctcatatatttagggtacttttagtgggccatagaaaaaaaatttattttaggcccttattttgaaaaaaaaaaatatggtatttt

SEQ ID NO: 198629 - DNA, 1263 bp, Cannabis indica
tgggacattgtccacaatattaagaacttgaaaagattaaaataatagtacaagccttcaagagggtcagagcctgttggagcttgcatcgtttatgcttgttcaccattcatggcgcaactttcaaggaagtacaaccaaaaaaatgagcttatattaaaaaggagatatctttgaaaatatttcccatatttttctaacatgtatccttcttagacgcctagcaacatcatgtttctttgtagtcccattagccacaggcatgtcttgttttgtctcaccaaacgcttaccttaggcttattcagcaaacacaatgtaaagaatatttttctatatagaaaaatagtcatatatataggctacaactggcaggagaaatgtatgaagactcctttatattctcccatagcgcttataaataaaaggtagagtcactcaaaaaagggatgggaaaaaatgagaggaaattaaataactctaataatccatgcaacaactctctgtaagaacttgattacaaacattaatacaagtattaggctaagatttgttaatgctccaattatattaaaatctctttctaaatattactattttatttataataagaataaattaaataattactgaaaattttggtcaacaaataaaaaaattaaggactttgaatgccatagagaaattttaatggattcaaattggttgttttgtgtcacaatttagtgtctattctactaaaatttgacaattataatactatatttatggtatcgactttggcttctccaaaataaacacaacacattaaaagtgaatcaattattaaggtaaatacatatgttgatttaaaaaattcttaatttaagtcatatttaatataaactttattaaaaaaatttgtttaacatttgttactgtgttacttactttatactaacacaatcaagatacatcaacttctcacatctcgattaatgaaaagttaattaataatagtcaagttccttcctgatgagaaaagtaagataaaaatccaattaggccgtctcaagactattcaatcatatataccaaaaagtactcaaccatgacacaagtttccactaaacttcatggtattgccaaatacttttcgatttgcttttcatttttaatttgccaacttgaatcttttgtgaccttgtttcatcctataataatgatcaacactacccagctagcttataatataatactttaggaaaatttacatcatatacta

SEQ ID NO: 198630 - DNA, 856 bp, Cannabis indica
ataaaaacagtaaagtgccatatattatcattaaaattcactatacaatcgatatgattagaataagagttcaaaatagtaatattaacatcagccccccacaaaagaagaagtcccccaccaaaatattgtcttgagacttcaaacacaaacataaaccctaaagcctttctaaacttatccacagaaaaagccttcaaccttgtctccatcaaaaaagaacatttggccgatgattcttgaccaactgggagagccgattgaatgctcgaggactcctcaaacctcaagcattccaactcataagattcatttttctgggcgggtgtgctccgcaacacccgcctgttcaaattcttcagcaggagagacaccatgagaatcagattccccaattcgagctctcttgagcatggaacgtagagaaccaccaacatgagcttaaaagggttggaaacatggccttttcactccagaggcacaagccagccccttccccttcacttgagaatcaagtcgtggggcttccacagcagcagcctggttaacactacaattttgtccaaggtctaaacttggaatggctgcagccaaagaatatgcagcatggaccatctcatgagtaacagaggcatgactatcactgacaagagtagaattagtgacaacggaggtgagacaaaccgattgacttccagagaaatttgggttaattggggtgggaatcataacactaggtgagttcttaggtgcactcaaactagaaagtgaagctacatttgagttaagcaagggtgtaaaactaacagattgagtgaggaaagggttcataacttgaccttcatgaggaaaatca

SEQ ID NO: 198631 - DNA, 1742 bp, Cannabis indica
aatgttgggagaaggctgctattagcacgccaacacagcaggaaaccaatttcttagactggtgtgtctcagttttcagcaatgccagcacagaacattgcaggatgttttgtatcttatgttgggcaatttggggagcaagaaatgacaagtgtggaagaacaaagattgcctcttttatttttgcattcgctgtttgttatcttgagcaatggaattcggcaaaggctccttacttggagacatcacagactggtttactggtcggggatgggaatgaccgatggtgcgcacctaatgctaatgaaatcaaggtaaacgtggatgcatcaatatttgggagtagccaagactatggctatggaatggtggctagagacgaacatggttttatgatggaagctacttctcggctttgtcatgggaatatacgtccggagttagctgaggcaattggagttcgtgaggctctaagctggataaaaaataaacattggccgcaggtgactttagagactgattgtttggtggtggtacaagctattcgtaatccaactcatatgatatctttctttagtgatgtaattaaagagtgtcaaaatttgcttgtgaatttaagtggtgttactatttcttttgtaaaaccgtcagcaaacttagtagctcatgcgattgctaaagctgctatttcttaccctgatcgtgttttcagtatgggggatgtcccaactgaactgcttccttatttagttactgaatttgaagtttaataaaggtttgattactttcttttgaaaaaaaaatgaagttgagagtgatattaaaattattataaattatgttgggagcttttttaagaatgtctcttagtggagacaatttaataagatattcattaaggtagaaaacgaaattatttggttgaaatttttttaacccgaccaacacattgttggactttcatcaacaaattggtcattacattatataatcaaatttgtaagagatattattaaggagcaatataattttttttattgtgtataaatgttcagttttgaaaagaatatagtaacaacataaaaattagaggtagtaattcgtgttgacttgtcatatttgaattcatgtaggttgatatgtttaattggtcatccttaatccgacctatatatattttgtgtcaaaaaatctcaaaccctgacccgactcaccgtgttctcgtgttggcctgtcgtatttgcgtgtcaattatacctatgttacaatacatattaatcaacatgattggtatcgcatatataatttttacaaaaataatttatcacaaattattaatacaatgaataaaattcttaacatcagatataaattatctatcttgtatttttgtaagtaattttctttctaatttatatgtttttctatagaaataaataataatttaactataaattaataatttaataatatattggatataaacgggtctattcgtgtcaacttcatgtgacatgcgttaactctaatccaacccaagtaataattgtcattcgggtttgactcaatttcgacccacatctattttttatgaccctaacccgcaataattcgtattgagttcgtatcgtgttgtggtgtcatgacctaaattgccactcctaataaaaaccgtccataacttttatatttctagaactaataaagatctttaaagaagaaataaaaatatcttttttttt

SEQ ID NO: 198632 - DNA, 673 bp, Cannabis indica
tttcagtattaatttaattagctttcttgtggaattgatattcgtcttccttgtacgtaattaaataataaatacagagagagatcaagagatcattatgaagcctagcatgatgactaataatattatcttatatttttttttatcataattaaagatcgatattattgttattggttcatatgtattcatatatgtacagtatgcacttgcacttttatttaaggaagaataagaataaatagtattctacataacctgatgatgacgtggcattaattatatacatagacgtagtaatcgtatatcaatcatgattaattctagaagcggctgtttttcagtgttaatttgtagaatataatataacatacaaagcgcagcctccctcggagacctctatcgttatgttttaacaaatcaatgaaaacgtgttccaacttattaataattggcaaatggaatataagtaaggcttacttagggaccccaaaaacaaaaattaatattaagtaattaatgttagtgaaagtggcttcctcatttgaagcactaacggccgcaaccattgaagccactgtcttgattaatagtttggtcttgagtagacgaactggtcaattcaatgactaatacactagttttgaaacttatctctctttttaatacacta

SEQ ID NO: 198633 - DNA, 1226 bp, Cannabis indica
atctctaaatttggcctaaatcactcttataaatttaaagaggagtttaagttgacactaatttaaacccaccaacaactcatttattatttttataggttcgacaccaaaaatattaatgtctgcaattgtttttttcatatatatataatatgaaaccaaatctaatttttatgtcatttgtttttttttcatctctttgtttatctttatatgaaaacctaataaaataagttgattgttctttaaggtaagagcttatccataagtgttgcctcaatcaaagtggggctaaaattctatatgttgtgtattatttgaaccaaaccacaaactcacataaatatcttacataaattcatcaactagtccaaaattagtattcgaaatgaaaaaagattattctttgcacgataaatctttttcaataatacaccccaatttaaaaagtgggcagtttttattaattgagatttatttaattaaaaaatacaattataattagagtggtaaaaaaaataatttatggtataaatactaattataaataaatatctaaatttaatttatttaacatttaacaacaactatttattaaaattgtaaaaatataacttaataatttataccacaaattatgtaaaaaaatgttaaaagtgaaagcaatggagagaaatgttgaagcttaaaacttgaaaaggcaaagtggtgacttttaagttttaatgggacggagctgtctaagctcagtcagccatgtacaaacaagaagatcctaaattgacccaacccaatctttttctttgatcccaactccatccatagtctggagtccccaatcaaactaaccccaatttcattactctccaatccacaacttgaccgtgtttttgtgccacctttcgactttttcctcttttgtgggtttcgtttctttttcttcttttctctctctctctctgtttacagtttggctggcttctcttttgagttgtacaccattgacttgcaaaaaacaacgacgaagataaccagattgtcggaattggcgttgagttttttggtttgagaaggtatgaatgttgttcttattatgtaaatgggttctttttgtttcttgaaattttgggctgaattgcgtccttttggctgattatggttctgggtttttgacgttttgtgctttagaaggtgtttttgctttctggggtgtcgttatattgtat

SEQ ID NO: 198634 - DNA, 1004 bp, Cannabis indica
ttttttttttttttaatgagatacatgccatataatataagtatattttcttataaagaaaaaagtatatttaaaagaaaaaaaatgaatgaaagacttcatatgatttttgggcagtgtgagtgatgaataattaacaatatttattctatatgaccaaagaatattctgattatatatgtgatgtggaaaataaacattattattttatataattacatttttcaaaaaaaaaaaaaacaaacaaaaaagagtcaatggtactaaagtgggattttatatgaaattttgaaacactttcattttgcatgtgaaaagatctatcttatcagctttcattcccaccaaaatgagaagaaaaaaaaaaataaaacaaaacaaaaacacgtttttgggtttcttttgattaatattttagtattaattaagtacactaattaggggaattttgtataatatatatatgtactatatattctaatgtatttttgtattgggaattaacatacctaggagccgaaagtggtgttagttgtattatataataacatataaaagattctatcaaatatatattaattaattaaatacccaacttgatcaaatagaggattaaccaaacacatatctatataatactaatagtaataataaaaaaaaaaataactaattaagatgtactagtacgtacaaaacatatctatacaatatagtaggtaagcacacattatattgtactttagtgtactataatgaatttgaagtatagtagtagatttttagtactttaggtatgtttaattattactattacatttctatttgtttggtttgttttacaatgtgattatcattacaccaattataagaatgatgaagctagttcaaaaattaagggggccaatatatataagaaaataaataaataaatatttatttattttttaaagaatttatttttatttttaattacttttacatggaatttttctttaaaaaaaaat

SEQ ID NO: 198635 - DNA, 1298 bp, Cannabis indica
gactcaagagagtccatttcatcgttaataacttcattccacaaattaacatctagtgaagtcaaaacttcttggaggttagcaggatcctcctctagagtatatgcataaaaatgagaatcaaaatatttagatactctagatcttttacatcttctaagttcaatttccataccctcatcatgctcattattcctaataatagacatgttactagaagatgcactcccactatttctcaatttaaatgaaaatctatattcttaaaaccttacaccattagataataaaatgagacgcgcatttgattcataaaatctatatgcattactattaacaacatatccaataagcacgcattcatatactctactagtcaatttaattctcctaggatcacaaattctaacatatgccaaacaactccaagttttaaaatatgagacattaggttgtttatttttcaaaatttcatatggagaaaattgtcttttagatttaggaactctattaagcacataacacacaatcaacaaaatttatccccaccaatgagaagcagcatcagaattcaacaaaatagcaccaacagatttagtaagagttctattttttttagatttgctattcatttcaggtgaatacgatgcactcttatcatgtatgattccatgtaagttataaaaattaacaaaagtaatagaatcatattcagtgcctttatcactatgtaatctcttgatctttctactaagttggttttcaattttagccacaaataacttaaacatatcaagagtttcacttttatttttatttaatacacaaaggtaaaatcagaacaatcatcaataaaagtgacaaagtagcatttaccatttctagtaaaagttctacaaatatcataatggattaaatctaaaggcttagtttcttttcctatcatagatttatgtggtattttagtaatcttgacttagctacaaaattcataatttttaaagttatttacagataatttaggaatcatgcctaacctactcatgttcttgattaagcatttatttacgtgacaaagtctatcatgccaagtattaaaacaacacgacatatgagcaaaagtattaactacgttaacttaagcattccctcaattgcataccccttccccacaaatatcttatttttggttaaagtaaataaatcaacccttatcgtctgtgtaaaattgtcttattgagaaggtagcccgagactagattcttcttcatctcgagagtgtgcatcacatcttttag

SEQ ID NO: 198636 - DNA, 684 bp, Cannabis indica
ctccaaccaatctaattgaaccacatggttcaagatgctattctgggtcggaatggatagcattgtttatttttttttttttttacctttttctatcttaaagtacatgtatgtgtagtgaactacaaaaatctagttttgttagttttaaatattgtgaagatggttaccaactctgtggcggattgaaacgagaaggtctttgaaaacgcatcaaacagatagtgaattctttagttattgcaccttgttagaatttgggataagataaatgaggttccatctcaaaactaattgacaagctcatttctcttatatattctattatctttcaattcattagcgttgtgggactatctaaaacacctccttcaacctttgatcaacaaatttgctgctcattttttagccaaaaatactttaaattataaaacaattgcttccaagaatagacgaaaaacccattttgctgtttgtctaagtaattgctaattacattctaattcattataaatcatatggtgagaatagtatgaatatatactctcatttaatatagcatttaaatccttaaaaatcaagaaattaacaacttatctagatttggataaaggccaatctaatgtatatttttatcactattatacaaatcatttcatggtaaacaaactatatatatatata

SEQ ID NO: 198637 - DNA, 601 bp, Cannabis indica
aaaataatattatccttagtttcaatatctatagttttgtatataaatatatatatatatattgatcctaataagtaataataaaagttgttttaatgaatatattgaaaaaacttacatgaagacctggcttctcaacagtttgaggagtaattattctatttgtgaatagtttagatctaatgagatcttcttttgtagttcttctaataggaactgttccagttggacatcctaaaccttttacctcttccattttatgctcgctatgtgtttcatttttatttttaattaaatttgtaggacgagaagaaggtttcatctgtataccaataacataaattattttatcaagaataactaataaatatttttggtgaattaattaataaaatttatatgtttaatatatataaattacaacaaaccgtatggtaataattatggtcctttaataaaggatgatcaaaggcaggttgcttatagaaatcaacacaatcataaataactccatcatttacctgcaagtatataaattattttttaattggcaatcaatatttaaacatcatcattacctaaatttaatttctaaaaaaat

SEQ ID NO: 198638 - DNA, 1005 bp, Cannabis indica
tctttgctattccattggattgttaccaccatcaacaccaacaccaagacatgtcccatttggggtaaagccttgccctcagaggctcaaacttctccaaccaaattcaaatgataatttggctgatgctaatgctaacatagatcagaactcatatatgactatgcccactttcgggtctccagccattgttgtaaaagggcattcgtggtttacttttcttagggatctttttgatgttttcacttatttgactctgttaaaacaatatcttgtacaagtaaagaaagtagggaatattaaatccttttagaaatgttgcttaagttacaattactttcttttgtttacatatctctcaatagtacttttatttttttttaaaaaaaaaaaatacaacaaccaaccagaaacaaactggaaacttttttttgttgctaactcaaactagaaacttacatccaatgtaaaaagacaagttttttattattattttgataagctcaccaaaaacaagatagaactttaattgttggcatttacccttcaagatgaaccaacaagattcctttttttttggctatagtgaaaagaaaggtaaccgcaaacaggcttaaaataaatgttgagttgattaaatgtgatattcattacttagtgggctgttggtggagtgttgttttaaagtaaaaaagaaaggtaatattattattcactattatttagtaaggttgaaagtgaagtttgaagggaaatagagtcatagctttgcagcgctgagccaccactttgggcgctgtgagcatgcttttgttttaaacatgtgtacgtataaagggctcttttctggtctttaaattaaagggtataaattatcatgatgatggattctgagaactggggaactataaggaaataaacgagggttaaactaaagctgtatgtatgtatactatgcatctggataagaaattgatttttacctccttttttattttatttttt

SEQ ID NO: 198639 - DNA, 1709 bp, Cannabis indica
caaacacagaaacacagaaatagcaagcgctcaaaccaagaaattgagaaaatgaaaggaaagtgccataaaccatacctcaatcttactatatataggtagagccagaacccccgtagatgccttctcgaatcgtccctagtcgcatccctagcctccacctgaagaggcgcaatgatggtgaaggtattaagatcctcataattccaagcctccgcccccattttccaatctccaagagagaaaagatggctggagatatgctcagatgatataaaatgccaaagatcctaacataaaccctcaggagagaaacaaaacaaagaaagagaaagagaatagagaggaaaagtgggtttgcaattaatgagatgggattgtgtgaacaagggataacactcagagcaattaatgcccttaatcatgaagcaaagagaacaaaaaacgacaaaaagaagaggaagatgaaagagaaccaccacttaactgattagggtggacgagaatcaccatgctcgggaccaaactaacagaagaggaacggtttcgcatacctactagaagactccagagagagaaaagctctttttacatgtatgaaatgagattattttatgtcttctataaaaaaaaaagattattttatgagtcacttccagtcgtgtaaattacgtttttgttagtgagattcatcggtatgaagttgagacaggtcaagtttaattgatcaaggttgtaactgatacttttgatagtggaaccttgtagaggaatctggattaggccaaacaattattggttgagcccgcataaattgttatattatttattaaataatataatgattaagattaaagttatgatataatatatattattagtgtaatatataatgttattggaagttatatacatataatattcatataattgtaacataataagtggagttacttgtattttgtaacttccacgtcattactaattaagtgtgtaaagagtggtcacacaatttaatcttttaaaaatcaaagttataatgcaaatgtaaatattcagatttaattttgtcatttataatatgtataaatcaaaaaataaagtgggaataatttaaaatgctttgaagaattatttacaaaaactgaaaaatttagtaactaataactagttactttctttcaactttatgatttgaatatttttgacaatggggatactttctaacagctcctatacttatttaatctaatttacacccagttaagagatggtaacaatcatcgggtgtagggtatttgaattttaaagggtgtgatccaaaacactataaatagagacattggttcatcatttcaaacatactcttctcttttatttttcaaacacaaagttagaaaattctaaggcttgataattcccataagtatttccagaaagccttaagtgtttcatagagggaaaataatctacttggatgaatagaaattttgttcaagcttttggtgatccccatctcaactttgggtgtttgttattctattctttttttgttctattctctagtctattatatagtattacatgcattatatatatactatatcatatatatatttatatttattaatttaagtctctaatttaatcttttaccataaaattttcttaactataatatttgaattgtggcaaaaatctttattttt

SEQ ID NO: 198640 - DNA, 978 bp, Cannabis indica
aactgctatctgtttgtaaaccattttaatttgtcgttaggtcttgttaaaatttagatctttgaaatacttataccttttcatcattaagttgttgtaactatactctccccataagtatagtctttttcctctctcctcttttggagaagtgtgcccatgcatacgtggggtttccatggtccttttggccatggaaggcaccgaaatctggttttgggaagaaaaaaggtcactaccccactggtaatgactggaaaaatctttctaattcatttcgtgttcagaaactccggaaatattggagtttccacactaaacacaaggctttcatggttactttgacttatgatggtggttaaattcgtatttgtgaaagaactagacactttgggtatgaaattgctattactactgatgttgtggattggatcatcaagattgtgaaggaagtacagcagaaggaaggaagggaaagagacagcttcaaaagaacttttcgaaatagctctggcagttgttttttggaatattttttaaatacaaaaggaagttttctgaaactttcagtattgaggaacaacaagatgaaaatggtaatcattccagaagaagaaaaggcgaagggatggtttgaatttttacgatgtctcaacaacactatgaaaagagagcaagtaactgtaaaaaagaacactatttagcagaaagtagagatgaagagtgggggaactttgaaccagcgatcgtgggctaacgtagttaaggaacagaggaaaccatttgccacacaacctcattagttggagaatgcttttgcaaaggctcctagccggagaaaaggagatgttgagtggaaggatctatatccagccatcaaccccaattttaaaccaaaaaatccttatccagagaagagatttcaccagccaaagtattatgaatatatgagattgagagcacaaaccaggaattgga

SEQ ID NO: 198641 - DNA, 627 bp, Cannabis indica
aaaaaaaaaaaaagcaagaaacctttaccattttgctactattgattaatagctgtaaaatctgcactaaaatggattatttattgtgttcaaatatttagaagcattactatactatattaatgtagcataatattgtgagtggttaataattttttatattataactaaatctgcgagatcgatgctgaatataaaattacacaaataaccgtacatgtcacttctcttttttttgagtgtagcgtaatggtattttacaatcgtatataaacttaatagcttaaaggtcttgggttcgaactcatgacctctccctttttcccatccctccctcaccacgaagctagccgtacatgccacttctcagtcaataattatataaaccatgtgtgtgttactaaaatatatattatcactatgtgtttattaaatcagttaatttgagtatagttacacgtgggtattgtagtgttgggcgtcattttaataacaaaacagaaatttagtgttgtgttgaataaaaaacattttaacattgaagtattgaacctattacatgtaataatgtaataatactcacagtactaatattatagtaatgatcattaattagtataaccaaca

SEQ ID NO: 198642 - DNA, 1110 bp, Cannabis indica
caaaagaattatagtattccattttatttcggtctagcccattaccatcaaccaaacgacctgtgtgtggttttgatgttgtttatgtctagtatttaaaccattggtatatattgttgtaagcaatattctttaacttgcatatttttttttatgaaaataaataatacttttaacttaaagtaataattataataataatttgtggtataattgggaagaattgaatttatcttattcttgcaaagtgggtgatgttgaaccgactatatacttctctgtcaaggagatttgttggacttttctattttttgatttcgattgatttttttttttgtctaatctattgtaagagtacttcttagccatccattatattctatcttttaaaacttaataatatattttcttttacttgagagtgatgaactttttgttggaaaatctataaaggacatgaatatggcaatcatataaggccagttttgttttccaaaccaattgaaattttataaagttttggttcgatattaacgaaaagctcttaattattttgtttattttacagaattcagtgaataatttgttatcaaattgataactattatcagataatatctaaattatttgtgtctctcgttcatatttacttaacttttatttcatcttgttagtgtgagtgagtgttagccacttttcagcgtcaacatgttttctttgaaaaattaagagccaagatgatgatcaagactcatattcatgggatgaacatgaggcttgataataataaaaaaaaagatatggaatacataatagattaaatgatatgaattaactcaatataatacaatgtcataataatatgtatcaaaacagtaagagataaaaaaatatgaacacaagtaaaaggaatgtaaagaaaaagattagagttagaaagatgtaacccaaattagtacccaaaggcttgaaacatttgataaatgttgtctaaaatctctatttttaagcctccattaataattgaagattcttcattatgaatgagaagcagaatacacaagcctcgtgaaatttatgcaagtcgagaacttcttgataaacttcttg

SEQ ID NO: 198643 - DNA, 1196 bp, Cannabis indica
gagaagattcatcttgaatcaatacagatacagatgaagactctacatgaagtggatatggaaaaggagagccattggtagaagactcagaagcagattcaacatcatgtaatgtaacaacttgtgtaatgtgagactcagcaatagagattgagtgatgcttaggtaaatcagtagatataaagcagtagtataacaacaggagtaacaataggattaagaccagagataatttgattggtaaaaaaaattgagcaataggatatgaaacaggcgaagaatgtacatgaggtgatgaggaggggatgaatttgggaaatgagagttcattaaacaccacgttttgagctataaagagtcatatatgttaaaaattaaactgatatatttatctgcagcagagagttaaacttagtatttacgctgtaatttattattaattttttttaagaaaatatttatatatattataataataatatgaaaaaattatcaataacgttggttaaacttagtatttaagctgtaaattattatgattattattattttaaaaatatatattataattataataatataaaataataataacttgtaataagtccaagagtgggtgtgagtgtggggctgtcattggctgttgcatgtgataaattaaacagttcttttagtatttgtttcacgtaaaataataaaaataattttttaacatttacataacattaattaataattagtctttgatttttgttcccttatagtaattaataatgaataaaaaattctcacagaaccgtgttgaaattaaaaataaaataaagtaatactttagtcaagtcaaagtctttcttgtttaataaattaatatgtttatttatataagaaatatatacaaaaatagttcagcattgaaatgttcttacttactacaatttcctcagatatatactggttgttacagtctattttcttgggtatttcaaaaaaattaaacaaaactattttagaaattattatatatattacacaaattacacttggtaattaaataattaatatacgtgtttcaactataaaaagttccccttattatataaagactaataattcttttaaataattttatttatgattgcaaattttgaagtcttatatttttgatgatttattgcttatatgtatatatagcatta

SEQ ID NO: 198644 - DNA, 741 bp, Cannabis indica
tcctttggataatttcatcctaataattatatttgtgtttgtccaataatcactttcttttcaaataacaagataccatgggctttagtgataaaagcaaattgggccaataatgattgatgggatttttcatcaggagaaaaaagcaaaatatcatcaatatagatgagagtcttttccaatatcgggtcatataccttggtcatagccttttggaataaagaaggggcagttttgagccccaaaagtaggacgatccattagaaatgatgatttggaatgcaaaaaggttattttgggccggacatctgttttgatgcctaattgcccaaatctcgcttttagatcgaatttcgaaaaaatatgggctttggatagattgacaaacaatgaattcttatttggtattggaaatttatcatttgctaagagcttatttaggggcttgtagttgatgaccaacctttgctttcctcgagcttgctctgatcaattattgatataaaatgcatgacatgcccatggagaggaagttgactctattaaaccctactgttgtaactctttgcatttagtggacgccatttgttgatgttttgaattcatgcttggtgactagcctttgtagagtttatatcttcattaagcttaaaaggaaggattatgaagaattgttgatttttccataaaggatggtcacatttcttcaggaactcggcatgattattggcacatgagact

SEQ ID NO: 198645 - DNA, 503 bp, Cannabis indica
aagaggacattaaccttcctcagttttagggcatttattgtaatttctcataaatatatggaatcattaaataaatactaatcaaaagttttcaaaaatactgttattttaaggttgttctaaagaaaattatgttgctgctacattaaactatgttttgaaaacgcaaaaacaatgttattttctgaaaaaaaaaaataatgaaaaacatctgtaaaaatatatatgtatatatataaaaaaattattttaggtgtttttgtaaatttatataaatatacacacccattctcaatctttttgttcagaaaaccaaaaaccaaactgcgggtgcaacaacacatgcttctgatttttttggagtctgtaagtcagattcgagtagttttttttttttttttttaaatggtaaaaatcaagagtaccttgttctaagcaatttatttattagtttttctgaaaatcagagtatgttgttacaatcaattttttttttctttttt

SEQ ID NO: 198646 - DNA, 683 bp, Cannabis indica
tgtaaccaaatggtgatgtcatgaattctccattctgtcacgcctgacattaaaagcagcataatgttcttggacacggctactgaaatgtgaaaggaactcaattcactttatgatcaaggaaacggtcctcgcatttttaaactcagggaatcgctcattactctccatcaaggcaatgattctgtaagttcttattttgccaaacttaaatgcatgtggaatgagatccaagaacttcgtccacggatcccctgcacctgtgctgcttccattaataatatggtgttcttgaattaggaacaggttcttcaatttttaacaggtttaaatgaatcttcctatcctattagggctgaaatttttcttattgatccttttccatccctgtccaaagtattctccatggttatccatgaacaaagatagcgtaatctcaaatctcctaaggtcccctcccttattgcttctgctcaagattctactcaaaatccagctcttgtacaaactccttctgcatcagctgctaatgcgaatcaaggatgcaataagaggatgaggccttactgcacaaattgtcacaaaccttgccaccttaaagagaaatgcttctttctcattggatttcacaagggtatggagacaaaaagaaagaaacacaagcatctgcctttagtgatcta

SEQ ID NO: 198647 - DNA, 1872 bp, Cannabis indica
tttcaatacaaataataataaaagaacttttagtgacaattttttgatcataatataatttttttgtaactaaacatgccttttagttacaacaaaaaattacttaacactaaaacatactatttagatacaatttgtcactaatttagttttagttacaaaaaagtacgtacatttagtcacaaaaaattttaatttttgtgactaatatctttagccacacatcttttaatcacaacataggaatgatggtttataattaatcacaactattttacatttagttataagttttgttgtgagtaaaagtaagaatttaagtagtgaattataataaataaaaatattagtaataaagtaggatcgtttgtcattatatatatacccaataataatatccacacaattatgtagtcaccaaatagttaaattaataatttaaataatacttagtatccatcatactactcatttctaacttttgcttaacaatttaagtgatacaaaccatccattcaaaatttagatacataaataatctttaaaagaaaacaattattaaaataggacttagctaatctcatcgttattcatctcacatctacaagtaccaaactgaattcctagaaaaagatataatgggggtgagtttgtaaagtcgagtagaaaaataactaatattagatgaccagtaatttaacaaaaacccttctatggttagcttttaaaataaaacatctcataatcaacatatataaacaaaataaagagaccacaaatataataatcacaagaaataaacaccttactctcaatgccatagaaaacaacatcctaaactggttaattgtgcttcataactaccataatactagagctcagatttaattcgcttacatctacaagtgagtgcacacctgatctacccataatgacataagactaagttgtgaaataaaaaaatatgaaaaagtcatgataaatttagctctcattagtaaaaccaaatacaaccaacaagaatagcaaaagtacatattccctttattttagaaaattcaaaagcataacaactataacgggataaaacccaaaaatcaatagtttcatgcataattatatacaaaaatatatttggcactcagtgccccataacagtcaagaaaaatatgcagattaagttttgaattcaaatgttttatacaaatcaataaaatttaaacatatcaaatgttattcaacacatataaaattaagtcaaataataaaatttggtcccgacctcgtcaggatcgtcaaactttctccaagagaaacgcaactaagctcccgatccctaagctccaaatagcttaatcactcgaaaatttacttttttcctatactcttaaatttaattaaacactactacaaacaaaggcctttaatcccagtttttaaggctttttatcacggttttcgctaaaataaaaattgggatatatgccagtgggataaaaaagtctttgaaaatttaggataaaaggcagactttttgtcccgattgttacataaaatcaggataaaaagagacttttaatcccagttattacataaaaactgtgataaaaagacctttttatcccgattttatgaaataaccaggattaaaagtcaaaataatattaaaaaataaaatccaaaaaaaattattttagttccttgaaacaatttttacaatcagattctaaaaatttatatcaaaatgtacaaattagtacatcatcaagggttcacatcataaaaaaaactccatcaaggaccaccaataacgaagcttcgtgcaccacgaaacgccaagatcctagaggcatcgtgaccgacgaatggcca

SEQ ID NO: 198648 - DNA, 1269 bp, Cannabis indica
catacatatagtactctcttttttaaatttttttctccaatagctatggactcacatatttagataaaactttgttatttcaaattaacataactgttattgttacacatttttttcattacaatataattgaagaatcctaataattactttaggacgatgatttcatatcagttagtttggctcatgaatttatttcgaagccaacctccttttaaaataagaactaaataataatttcaataattagtaattttaccttcttaacattcaataatatttattctatctttaaaatatacagtttgttaagaatttttcgaatttttatatttaccgtgtcattattctatttaaatactcaagtatttttgtaaactaaatttttttttcctcctaaactttaacaactatcaaatcgtacctcctcaaaataaaaatgaaaaagattcaatatttttttactaaatcttaaaaaattaatttagatcttaaaaaaattattttaaatgattaagaaaattagaaaaaagattaaaattttaaaattaatcaagcgatttagaaaaattatttatttttttattaaaaatttcatttaaatattataaagaatatattaaaagtttaatttttatgaaaactaacttttatggatataaatttgagtctattttatttttctcaaaagacataaatttgtttaagtaaacatactactaagggtatggggatcaggggtataattataattgttatataggaacaaaattagattggactgaaagtttaaagagtagaaatactaattattttaataattttgtttcataaactataatatttataggattttgccacataaattagttaaaaaaatatgtaacgtagtatctttagtttctgatcacatcaataaaatatcttaaaaaaatgagtgaaatatgacaaaaaggaaaatttgcaattatttccatacatctaggagaattgttttatgaaaaaaatatttcataattcagagggaaatgttctatttattttcaaagcaatactttggattatagtttttattaacataattttacatatttgggaataaatcctatcatataaaatacttctttaaaataaaagaataaatccaataagtaaatagaaaatagtaataataaaataagatcattcatcaatatatatatatatatatatactaggaaaaagttacgtgccgagccacgtaaatgttagttttatttaaggtttttg

SEQ ID NO: 198649 - DNA, 638 bp, Cannabis indica
taccaaagtaagttttgggagatgatcaacggtaggatgttggcctttgcaaacttctttgacctcagcacgaatcctgtcttgccacgtaggactacttgctaataacatgacagtccacgtcagcaagagtgctgtagtttcgtgtccagcaaagaaaaatgtcttgcactcatccattataagttgaagattcaaactaaaacccatattccctctcttttgcttttgcatttcattaagtagcataccaagaagatcatttccatacgagctacttctcccaatctcaacacagtcttttctgctttggattatctccattagtaacctctccacttctgatttcaatgactttatttctctgttatacttatttggtaagaacctacaaccccaacaaaaaaaatcaaaattgtgtattagaaaattaaaagcacagcttcttagtaaagattggaatctattaaaggaaaagctaatacgtaaagatttttttaattaattaattaatgaaaaataatataataattaccggcttccgggaagacatagacgacgacttgcttgagcacaagatgttgtaaaaccgttaaagatggatatttgctttccttctcgtagctgctatcgaactc

SEQ ID NO: 198650 - DNA, 4328 bp, Cannabis indica
agttttacatatctatcatcttcctccccattagtaaacacacctctctgtttcaatcaaaagttatgaaattatgaccactaactcaaaatctctaaaatttagggaaatttaccaaactaacaaataaccacattcaatttacattgtgcgaccattataatcgcagtataaatttgtggtcgcatagcgtaatgtttcatggttattttgctaataaaatttttcacaatgactactttcacaaaacactctgaaattcattgtacacaaactaaacatgattgatttcattcatgaatactgacacactaaccaggcttagggaagttcgatactgaaggcggtttctccaggtgagcttaggtgttgagagagaccatccaagcttgggaagcaaaagaatctgagaggaattcatcttatcttggtaactgaatcttcttctctcctctatagaacttatccttaatcataatagctttgatacacagatttatttcaagtttcaaccctaaccaatttgaagtcttgacagtctttgcaaattattgattcatttcatatccctagctaaaaaaaaacttcatcatcactacaaaaataacataactattcaatcaaacaactaattaaacaaaatttgaacattaaattcagatattgattacagaacagcttcaaaaacaagttaataatggttaaaatttcaaatgtatatatacgattgctctatgcttgcactatatagtatagatatagaaattgtatgaaattaaggtttgagaatttccaagagagagagagagagagatatggagtggttggtggtcgtgagcgtcggaagcgaaggagcagcgatcggcgcggcggaagagctgactgaggctgagaactaagataacgaattgtaatttttttttttttggttgcatgttttagttatttttcattattttttggtattcgagtgaatattttagtttaatttttttttatggtcgtctacacaatagttatttaagatattttataaaattttaagagattaaaaaattaatacgctgaaaatagagttctttattttataggcttgtaaaataagctatttaaatatttttaatgtgttaaatttttaaaattttttaaaattttatataatatcttaatatcttaaataattataaaaattaaactattttttttttcaaagttataaaataaatagcaatacatgtgaaccccatttagagtgcattataaatttttttaaaactatatatattggaataagtttaaaaaaaactattataaatagttggataaaaaatttatagtacacttctacttgtcctattagtttattttatttttttttcaatcttatacataagaccatccatttttaaatagtttataatacaaaaaataaaatttaaatattttgttatatacataatatttaggtattgataagtagttatttgaactttacttttattattataaattacttaattttttaaaaaaatttataagtgatgattaatgttcgaatttgtatattttaatgctttaattttatatatataaaattaatttaaattaaatatttttgtaatttaaattgtaaaactattttagttaaatttctttttaatttactttgatttgttgtgatttatgcaaagtagtataaataaagagcattgttatagggtaccaataatgcttagtgtcacatgctcatcttttcagacattaaaaaacacccgtgcaataccttgacttctcaaggttaaccatccatgtaataatagtctcaatttttttttcgcgcgaacgtgtggctcttgtacactcccgtcccttgaacaacttttgcccagtcatgctcgcaagcatctatgcatctatgcatcgaaactttttagctaatatactcgcattatccatatgttctcactatggcaaggtaaattctaataccatcgctcacctagtcctccgtgaccaaggtagcatgtgtgaccaaatgccaacaccaaactaacgtggtgtctcattcgatattatctgaatagtctccgtcatggcctaatgactcttatacatccatagtccattcctcaaggcaccatgcctacacacatgttgagaggccctcaagacaagccaccagactactagcatatattagacaatctctttctagcacgattcatttgtctcatgcgtatatgcaaactagctccatgaatgactaccattgtcagctcgtgttgagacttgtggccaagacgcaccataacgtctctttgaggtttatgccacgttacatgcaagtggcatacgaacaagccagtataaacataccaactaacctcttagtggtatctctagacgcactaccaaatcgacctgataatgtccatgagtaatccaattcatggagacatacaagtcccctcatggtcctcgtatgtctgttctactagtcccactaactagtagtaactcacttagcaccaatgtgtctgggggtggtggagagttgacaccaggttctccctctttaaggagcattctaagcttttagccttctaccaggaacatacatgatttttattctgtagacatatgatcatcaccatataccaatttttagagttcttcaagtcagattgtgccattgtattcttagacccaagtggcggataccaagtcccataaaaatctagacaatattgaagaggtatataaaaatacctttgtcgtacatactaagcattgatatgccaccagcatgtgccactacttgaccaccacttgacaacttcatgggcatcacttagattgtatcgtgccatcttagccaacacgttatacctagcactacttagatgtggcatcctgttaaggccaaccctgagaatatatgggcctaaggccatttaaattttggggtcttcactttcaaaaatatataaaaaaatatattggaatagagtgttatgggactcaaacccacaccattgagtaatgtgtcatgcactccaaccaactaagctatgaatatttattgtttacaatacacttatgttacttaataaaagcctaatgagaccttttatttttattttgggctctcagaacgtgtaggccataggcacgggcctagccctgcgtctcgtaaatggttgtcgatatttcataatagttatttaattatatttatgtggatacttaattactctaataacgatatggcaccataggtaatactaggcactactaatatattttaacatttctcatgaataagatagtgacattttttaagctttaaagtccgatgaatggaaatgctcgattcttagagaagcctaaattgccacgatttggtttataagtggatcgatttggtttgtgttgttcgcattttcctaatatgaaatgtggctcccgcagtggaggcccaaaagggtaaacccattctagaaccaattggaataacaacgttacatctttgggccttctcagagagagcctgcgggaagataaccacactatgatcccagagaatgatgtgtgatctgatatgtcaagagtcgcaatccccaagttagagacttcaaaaaaataagacacgattaatgggtcgagggatatgggatcaccaagtgagagatggatgttgccagattgcccaattaaaaataaaaacaaaattaaaaattaattagttttttttaatttaaaaaattataaaaatacatataataaaaataaaaaataaatatacgtgcaatatacacataacctaatattatgtataaatactaacaatataccttaaaaaattatgtttataacaattaagtgccatgtctattacaaaaaaaaaaaaaaaaacaaattaagtcccatgaaaataaatatttaaaatttataaaactatgtataatttttatttgaaatagacaattatagtttttatatttatttattgacaattcatatttatacttgtatttaaatacacacataaatattacatgatacaaattttcaaaactgtgaatgttaatttaggtaattatttgactagaaattataacaaaattaccataatttataaatcaataaaataattcatatcatcatgtgatctctaacttattaattaataaactatttgcctgaggtagatagataagaaataatttttatttatttttaataaatatattaacacgtgaaacctaattattaaaattattcttatttcttaattattatcactagggaaatttcactatttgccc

SEQ ID NO: 198651 - DNA, 1348 bp, Cannabis indica
tattgaattgacacctcatattcaaaaacatcttgtattttaaaatatattgtaattactagattgtgtaataattactaccctaataattaccactctagaattttgtttttggaaaattaccacatatacttatttttaactttttctttttcaaatttatggtatgggtttctaatatggtttctatgtgggttgctatacgatttttggttgcgatttaggttgttcctttagttgcaatagtggtttctatgtagaattctagaagtgtaaaaattatttttatacttcaaaactgtattttttttttgtatttttacggaattctacatagaaacatatattgcaactaacggaacaacttaaatcacaacaaaaaattgtatagctactcatatagaaaccactggagaaataactttaaaaactcaaactttaaatttgaaaaaaaaaaataaaaacaatagtacatgaagtaatttcatttttttaatagatttaattaaatagttactcagtgtaatataaacttcacaaattactcatatatgaataatatgaaataaacatacacaaattttataaatttaattacacaaaaataatatttatctaattaccaaaaattttatcacaagatttatagcttggtagcctaattgtttgtattaatactatatatgaagactacaaaaggcggaaagcacgattccttggaatttctttatttattcgtatttaaatcaatgattaagacagaggaataactcaaactcacgttgcatgtagcaaaaaaataaaataaaaaacgattactgcgataatatatgaggaattaaattagtcaatatatataaaaattgttcaggtatacaaaccaattcattgttaaatgaacaattattaattaatatattttatagccccaagaggcaacatatatacatatggatttctatatatataaaaaaaaaattatatttttgtaatatttatatatgaaagtggaaatatgaagagcaaaggccacttgattgtttgttttgttgtgttgtgttgtgtcgctttgttttgaaccccactcgagaactgagaaccatgttccatgtcacagtcggacccgaattgaagcactattaaattttggatcagtctaaatatggcacccatccacaaatatatatatttatatattaatgcctgtgggatataatttaattttcttcagttctatttttttctaatgaaataaattaataggtatccataaatatatgtacacatacttcattaagcatatatatatggtttgattttggtcttggacatgatccatgatattgga

SEQ ID NO: 198652 - DNA, 924 bp, Cannabis indica
attattattattattacctttatctttcagatggtagcagagcttcaaaaagtccacagcaacttctccatgaagtttgttgtagagaatctcttgtcacaggtacaacaggctgttaataaattcagaaaacaaaacacaacaaccaaatttgttaacaataaaacaaaaaatcataatttcagatcacaaactaagcaaacaaaacttaccaattctgttctgttctcaggtatattttcattactagtaacttgttctgttgattcccctgaattctcttcattaccctttttgaaatgatcaataacttgttctgccaaagctgaaatattattattaatggtctcattcttctgatctgataatggcaattcagattcctcttgatcatgatcactttcccccgaaaccacagaactcacagcttcaatctttgacactaactcttccaatacttgaggaatctcattctcaatcaaagaagtcaaactattctcctcaacaacctcttcatctttctcatctttattctcagaattctcttccttcacttcaggactagtcatctcttcctctttttcatcctcagagctactagaagaactcgaactagaatgatgaccatcaagaaaatcctcagctttgtgaacaacttgctcaaaaatggaaatttcccttttgtttacagactcagattcatcatcaatctctacatttttcacatcttcaacaacaacctctttagcctgatcctcaactttcccatttgaagaatcttccatggcagaaaatctgagctctctttcttcaaaattcagatcagaaagctctgtatccaagttgtcattatgattataaagacaccccagaaaacaaaaattaataacaatataatattaaaatgacaaaaaagaaaaaaaa

SEQ ID NO: 198653 - DNA, 1537 bp, Cannabis indica
tttaatcttattttaatttatatttgtattatatctattaaatttttaaattatatttttttacattgaattagttatatacataagtacaaatattcgtattttacggagtagattaaatctccaaaattaaagtagatttaattatttatgaacatccaaagaaagtgtattgtatatcattatccaaagttgtatatgtgctaaaaacttggtatgggtttagtacatacagctaacattgccaacgaagctctgtactgtaaaatagttatataccttcccaaaaaattggtgaggtaaagcagacaataggcagacccattggtttgacgacacatatttcgaggtcaattcacacatcttggccagattagacatatgcttagcatttgttgaatacaaaaattaaatagaaaactaatacacatgatccaataattcattgactaaagtgtaaaaaagtggtttgttggttatcattcctcattgctgtacaaccaatatgtatataaatattttttttgatttaacatatataaatagttgctacttgctatattgaactgaatattttttatcacacctatccttctctttgactttaatgaagattaaagaaatttgcaggggaaccctttgtagaaacttcagcctaccattggtttcaatacataacatatataaaatcacacaacttttgcagttgaaatgaaataattacagagaaattggtttatgaccactgactattggatcattttaaacaccttagcttgtaaatgtctgttagagaatgaaagagagagagacagagatgacttgtaaattataataaataaagcttgtaaattagtttagagaaagtacttctaacaagaagagggtaagagaagctggcctccacttttcatcatgctcttgaactcttcaaagtttaccattccatctccatccatatcaactttcttaatcatctctttacaattctccatctctttcccttctttcaatcccaaagaagacaaaatagaacccaactcctcaacagaaattctcccatctttatctctatcaaacacatcaaaagcctccttcaaatcctcttcattttcaaacaagctttcattcccattcacttcatctttgccttgctcaccaccaccaccaccagtcatggactcacaaagcaaaccaaactcttcaaagtcaatcaaaccatctccattagcatccaattttaacaccatttcttctacctctttctctgtcatgaaaattcttatgttcctcaaagattccatcagctcttgctttgttatgaacccatcactgttcttatcaaaggtggaaaatacttttctaagctcatccttcctgttgttgttgaccatcttcttctctttgttgggagataacaatgatttatcaattgaagttttttgatgaagcactagtacttctaccactactattagttgagatgaacaaggattgaatccaaacatagattttcttggtgggaacatagaagtac

SEQ ID NO: 198654 - DNA, 1140 bp, Cannabis indica
agagaaaacaacactttccaaaataataactatgtgctaaaaagaaaccatgttgtataaattgtatacgtagaaaattataatgaaagcaaaatatatgagagacaactattgagtgaaacggtggtcaaggtttcttacctttcaagtttaaattccttacctcctccatatattgaatgaagaatatgtaaataagaatcaataagatataatatttgatgttaattcaaaactaattaaaaccataaatatatataaatgatgatgttttgatgacaatcatatttgtcatgcaaacatagatatgattgaagcaattatatgtatacatttattatattatgaaaaacatgtaataagctatagctgcagttacagtatgaggggccttgagaagctttattaattagccatctttctttctttctttccatccaacaaaatattaggtacgaaagatgagaaatcaccttctcacattttcaatcaccactttatcatcatcattcaatatcacactccactccattcaattgatcaattcattgtatttttcttcttcttctttttttcttattactttctctccaaatcaataactatataagaacacacacaacataatataagtgtataattaactatatatatatgtgaaactcttcacttgtgcacctatattttacttttactatttatatcacttcttcaatcattgattagtagcttctatatatatattaactcacagtttacttcttcccttcctctagctggtttttattatataatattataaatagctatatatataatgactcatatacatctatatgtatagatggagttatgtgaaaaatatgggctaattagggtagatgttggcatggttcaatcaaatcaaagctctcatcttaattgatcatcatatatgagttcttttatctgattgagccgtgccaatatctatttacgcccaccaaatttttatcacttaatttttacttatgaatgaaaaacgtttttttctttttacacatgagacaaaactctccttaaaaaatttgactataaaactatgataaaagtttgtattcatgtattatgtaaattttttaaggatttttacgtcatata

SEQ ID NO: 198655 - DNA, 514 bp, Cannabis indica
tgggaatggactttgacattgaatataagcccggagctcataataaagtggttgatgcttttttaggcgagtcgaaccaaccacccttgacactatggttactatggaatggcaattatggcatgaattggcaagagaaatagcatctgacccaatgttatcccaattacatgaggatgtgaaaagtggcagcaaaccacatcacgggttccaagtccacatcgacctcctttattataagaatcatttagtaattcccaagaagtccaccttgattccacgaatattagaagaatttcatactgccctatttaatgagcattctggtgagcttaaaacatataagcgagtggctgctgagttgttttggtagggtttatgggaggatattcataagtttgtgcaacgctgctccgtttgttaacaaaataaattgctcacaacctcactagcgggtctcttgcaacccctagcccttccagcccaagtatgggatgaggttacaatagatttt

SEQ ID NO: 198656 - DNA, 666 bp, Cannabis indica
tatatatatatatatttagggtgtagcagaaggacagagccgtatgaggcactaaatcttaactttttgcagactcatttaatctgttgtgagccttagaacatggaaagctgaaaatgacttagctggaatggagccaagagatgatgagttataataagtggtctatatttgaaggggatttatgtctgcattaaaactctttgctcttttgtggtactactttcaaatggaccacatattggaaatctctattttacctctgtatatatatttatatatatatagatagatagatatatactgttatggtggataactagatttgttgatacataatatataaccataaaagaatagttttttctttttgttttcaatttgcaatttgcagagaatctatgtgatctatttccacactcttcaaaaaaagaaaagtaaatggtgattttgtaatatagttggaacttgtaattacatttttaaagaaagaaaaatcaaagattttaaatacaagataactgtaccagcaagctatgataatataatgtagtcattgactcattgatcaaggttaaattacctacattttatctatttttgatattgtatggaaacaaaatatctataatatctatgttttgtaaaaatagtaaccaatatacc

SEQ ID NO: 198657 - DNA, 762 bp, Cannabis indica
taaaccaacaatttccgttaaattaccttgaaccaaatgagttcacgttgcatttgtagagctgcaccagacacaacatttaatctttcgatagatggtaagttagcaacaagatgaaatatgttgtttccttcactatctttaaaagcaaatatgatacttttaatggaaccaatctcatgtatcaacctaaatatttgatcatgtcgattctcaacagcaatgtggaaaatggttcttctttctctatcacattcccataataaatcatggtaagaacaaataagagcaactatgaaatcatggtttccaacctcagccgcatcgagaagtaatcgagtcggtcctcttattaggtccttaatctccgagtcacttctgtctttcagaatttgcttccaaagttctttcactagaattagggctttgctttgcttgtgagattttctaattaagactctcattccagggactatatatatatacaattagtacataatcataatattggaattaaattttaattaattttcataatgtaattaagaaattatacatacatatatatatatatagagagagagagagacttacaataagtgagaaatttgtgtaagaatccttgagtctctgatatgaaatctaatggctttcgagctaatacatgcaaggctgtttgaccattgtcacgtgccacagatagctcaccacaatctttcaacatcaacaatgccaattctagaaatacagtagaacttctat

SEQ ID NO: 198658 - DNA, 501 bp, Cannabis indica
ttttttagaggtggttggcaagagtttcgtcatgggctttgggttctggtgatggtgagttggttggtatcgtgctaaagaagacgaagtgaggtcgtttgctaaaagggtttgataaatattttctatggcgtcggttatttgataaaaaaaaaacctaacacgtgtcaacatatcatatggcgtcagctttttgataaaagtcaaccctatagagggtatttcttgcgatatatattctaatcctaaaaccgtctctaaatggtatgttttaaattatatagctatagttcttattgaaaaaattgtttcgatgttaattttaaattaagcaggtatttttacaccttttagtttttctttttataaaaatagtctctaaagatttaaattgtattattaggctaataaaatttaactaatggtggactataatgagctaataatagttataaagatggtctcatatacttctaacacaattagtaactaatagttatt

SEQ ID NO: 198659 - DNA, 738 bp, Cannabis indica
tttcctcttttatttttgttttttaggcccactttatttatccaagttgatgagtgtgacaaattatttcagagacaaaattaataatagcgcttacgtactccattacgtaagcatatttattggcaaacgatagttttataagcaccaaaatgccaaccactaaattgtgttttaaaataagtgagttttttttttttgttttttttgtttttatttttttttattaattttattaaaattaaataagtgaaattcaagattaattaattaaaaaactttgctattcatcccgaatattctaaccattttgattcatgtggtgaatacaggttggtcgacaaattgcagtcaaatttactaaccaactcacatccgtcatgtaaattgagtggtcagaatattcaaaataaatagaataaacgattatactgtaaattaaattacaccactaataatatcataaactcttcatactaaataccataaatacaatttttaacatttctcaacaaaaatacatgtattatgaattacaagtcacaacaaactttctaaaacaataatctttcaataatttccataaaaatcgtaacatataattccgaaaaagtggtaaaagtaatccattaaaaaaggtcaatcttcattttttttttgggataattacatatgaaatttttaggtttaaaggatttttttttttatatttttacagtttttcataaaaataaacac

SEQ ID NO: 198660 - DNA, 1188 bp, Cannabis indica
ggctgcaccacataacgtgcaaatggccaccatggccaaccaacagcaggctttcatgctacagcaacaacagcagcagcagcagcaaatgatgatgatgggtccacaaccacaacaatcttcaaaccctttcggaaatccttatggagcagccactgtccatccctatggctcaggtatgcctgttcaagcttacaatccgtatacaggccttatctagaggttttcttcgaggaacgttttcgttatcaaggatcaaaaatgatgtgcagattattcaaaaatgggatattggatgaagagagatgtgtaccatatcttgtgcatgtgcagttgttagctaggatcaagattctttctcaataaataaccatagggggaggaatagcaattattttatagttacatttgaggttggtaatgatgtttttgagactaaattttttttagaccagaccctgctttattcttgttgttcttataagtagggaatctttttattacttttctaatgtttttccttaatttccctccctctttcttggtgtttttattattttttataatcttttattataaggcttcatataaataatagaaaaatatttgtactaagtgattgtttgatacacatttatgtaatgagatattaaagtttgatttgtccagtttatatagaatactagtttgattaatgagttttctattttggacaatattttgcaatattatcattagtgtcttttttaataaattaattatcattagttgccattgtcaagtttcattggaattatcttcaaaattgatgtggagttggtttaactaacattcatggtgaaatatcctggataccgtcttaaattaaatgtcccaagaaaataaaatcaaattaattgtgtaatttattttaagttgaaactagttctagcaataaagtaggttgttaatcaataaaataaataaaacaaatccattatttattggtcattagtagaattaaaataaaagttaattattaaagaaaggacattaaagatgattgtaacgttttgttaccaatgtcttttcttaaaagaataatattaacgtattaaaaacccacttcaattaatgagattagaactttcttggatgaaattcatagttaaaaagttaaaaaaatggaattaccttatatactgtttt

SEQ ID NO: 198661 - DNA, 874 bp, Cannabis indica
gtcaaacttattaacccaagatctccatcatgttgttacaataagttatcagctgagctttacactaagatgtttacattttcatggagcttatcacgttagtaattaaaggacaatattcaacgtttgggttttgtttttgtactaaaagcttaattttttctcatcatttcattcatataatttgttcttttatttctgtacaatgttttttttttttacgttctcatacacacatcatcattacagggaaagatgtacaccatgtgacattatgtgactttattggaagttgttagattatatgtcttgaaatgtgtaactagtttgttatgtgtaacctttgtgttttcgagttgtaagtccaactgtcataactgtcatctcgacaattatgacagttgatacccttagtgattaggtggctataaataccattagtctctatttcatttgcatgagaacaagtgtaattcttagcttgtaaaagtattactcaatcaataaaacattaaaattttagagctcgagtttgtgtggctgtgtctttgtttctgtgggatatattttcgtgtcttctttggagatcctttgttgtgtgtgtagaaatgatcatagaagtgtttttcaaccgaaatcaagtataagattttttgcataaagtatgcttttaatctacttttataaaaataatttagatagcctttaaataattacagtaattttaaaataatattaatgtaatatataaggatgcacatggagcagaaaattagtggggagtgcttctttcatccccatccccacttattctccataggacaaggcggggaattttctaatgtggggcggggacaggacggagaatctccta

SEQ ID NO: 198662 - DNA, 587 bp, Cannabis indica
gacaactttccataaaagaatttattctcttataagaagtctcctaaacaaaaaaaaccacctcagaaggaatctttcctaagaaaaaaaaataattaaatgcacaaatttaatgtaataaaaataatttaaatgctcaataaaaatatacattaattaaaaaaatattgtgacaactaaattgtcaaaacaaagaccaaacaatttttcatcatttactcttttttttttttgaacactcatcatttactttctaacacatcaaattactgtaatatttttatttaatttaatttatgattatatttatcattacaaagtatgattctcatacttttcacaactcagtatcatattttattttatattacactcatttggtaaaaaaaatgaaattataattatgtagaaatattattatgtagattaattccctaatttaatttgatttatcttaaatattattatgtagaaaaaaatggtttagcaacaaaggaaatttaattaacaaaacatattgaaggttaacagatcctctaaagtggttccgttagttttgagaagcaaattttactaaaatagattta

SEQ ID NO: 198663 - DNA, 1800 bp, Cannabis indica
tgagaaaaaacagaacaaatatgataaaaagcatggtaggcacaatgagacggattaagtttacttttaatttactttataccaaaggattacaaataccaattcatggtcatcattagaacaaaactaaacatgaaaacaaatctttcttcttaagaatagatctaaaacagaaaaataaaatgctaataagattaatcctttaggccataatatccgctccaataaaatttgtaagccaaatccctcttaacggtactgcaaaaagggaaagaaaagacaaacaaaggtgcaaagcaataataagcatacaaagcagtaatggtttgagtaaatctaaagtgataggaaaatcattaaagcatcttaccttgatgaagccaatctccttggcgttgctgcggaagcactgtctgcagcacatgagaccatacttcctgatcaaaccatgggggtttccacacacacggctgtcgataatggtaacgatccaacacaatacaacaaaacaaagtcaaaatcacagtgttcagaactgacccagtagataaatttaagatatttacaaatctatgaaatacccaaaaagaaataacttgaatctgaatcaaaacgaagaagttgtaggaaattagatcgttaccaggtgcgtgaaccggggccatagctcttggggtgagaattccagacgttggagtgtcccatgattggatgggaggcgggagagaaagagggctggaatcgagagttgaagcagttgtagagaataggctagggttttaagaaagagtggaaatcttgcttatatatgttgagactccaaaccctaatttgatcgtctacgctttgacccgcatttggtttccctattcgtacggacaaaacccgattactacccgatttgatttaaaaaattactacttaaaaaaaatctttaataatggactatattttggtttagggtgataaatttacataaaattacatccacaaacattacataaaattattaacttataggtggaactacataaaattaaaattaactactacttaattagatttatgtttctatttagtttattcaaaataatgttaaaaagaaataaaaataattgacaaaaaaaaaaaaatttaaaaaaaacaacttttaattttgtttgactatggatgaaagattaaaaatatgaatcttgttatttaagttacccaattatgaatgcaatttatcaattttctttctttaaatgataacagattatgaaaataactttaactcttctatcattaagatcttaaattatatattatctatttgtatctctaaaagaaattagcatatgatctgcattaagtaaataatctaaatgtcacacagtgaactggatcaacctcaactctaaaccctagtcgaaatcatgtcggatcagcctcaaccattgaagacacgtgtcacccatccagacaagactcatgaccgagtgaaatccacgtgcgactaagaaagtcccacacagacttggggacaaatgttatcttattttttgcactatgacgtgacagtaaattggatgacacatattttacattttcctacctgggcataaggaagtactcctagcagcccccgaaggttgatataaagttttatcatcaacatatagcaggatgtccaagcagagcaatcagggacatccgaccaaagtacaattgcgtgattaactcgcacgcatcgggcaagatatgtaagttggcaattttagaggcaagcatcgtagcttccaagacacgaagataatc

SEQ ID NO: 198664 - DNA, 1613 bp, Cannabis indica
gtttaagaaaaaaaaattaaccaaatataagcaaaaaaaatcaaattttcccttttatttttgtcaggtggcatgtgaagctctcttgattagcttttgttaaccataactaataatgactcaagctcccaatccatttgtttattataatatattctctctctttttttcttctttttctgtataatatatacatgtcaaagcatgttttcaaataaaaccattgtttttatctaatcttgtattccgaaagacactgagatggaataatgactaaaaaaatgtttctaacaacaaacctataatactatagtaagaaaacactaattaatccttaaattcttggtaaacatgttagagtatttaaatattgggtcaaaattaagatgggtaattaagatttagtatactggattggactattttgtgtgttggagggacttggaaagaaccatgttaggttcaattaagatactctgaagtagtgttataaatttggaagaagtagggatgaagataattcaattgatgatacaacacgtgatgagatttgatttttgtggacattacattaggtacagattgtgccaactaagaccctatgttttgccccccatatgcctcgaactatatacatatacatatatttatttaaactctatatgtgtccctttacttgcaaatttttaaaatgtaagaactatctaattacatcaacattcagacaacctccattttgtattgcgcaaatttgaactgatggcttaaaaaaaactttaacttgtaatagaattagtcatgaagatatgtttactttgcgctttgaatttgtggtggtgattttaatgaaattcttcagatgagtgaaaagagggaggggggcccatagtattttggctataaatgcgtttcaacaagctctggatgtatgctcgctcgttgatcttggttttgaaggacataagttcacgtggtttaataaacggcgtggtgttgcccatatccaagagagactggaccactttgttagtaatattgcacggaaggagttatttcttactgtgaaaatgattaacggtgattttacaggttttgatcatcgtccggtggtggttgcttgaagtggtggatcggagattagaagataagtaaaaaaaaaaaaagagtttcggtttgaacaacattggttgtgggatgagaagtgtagtgacattatttccaaggtgtggttctcttgtgatgcaccattggagtgccaggatggtatggtgaaaagccttcaacttcaattgtgtgtcaaggaattgggtaggtggagtaagaataagttttgatcaattcccaaatctgtacgtgagtcgcaaaaggagcttgataatttattgagtgtggatgcgcctatggtgcaaatggataaagttaagcgacttgaaataaagttggccgacctgctgtctagagaagaatgtcattggagacatcgttctcgagcagattggctggctttgggcgatcgtaatatgaggtattttcataacaaggcttcaggtagaaaaataaataaaatttcaaagcttgttactattgatggtaggaaggtggtggttgaggaa

SEQ ID NO: 198665 - DNA, 1806 bp, Cannabis indica
acatgattcacaatctaacgaaggcaacttactatattgtagataccatattagaaattggtaaggtatatggataaggtgcatgaggttccatctcaaaaccaattgacaatgggaggagtagagtccattcatgttatatggtattttattttcacacattagcaatgtaggactaattctagtacaccctccttacgtttgggcttgaaaagtgtgggtataacgaacgacttttaagagaccaaagggtcggacttgacaattgaaaaaatcccacaaggtcaattatcgggatatttatgggtgtacacgtcgagaaatttgtggattttgaaactggtcaaaaattccaacacttaaaactggcacacattggccgaaaggtcccatatagaagataaaagggagacaacagaagtttttagtctgactctaataccgtgtagaaaatggtgaataaattgtatattgtattctatagattagtatatgtttgtatacaaatctagaagattaaataagaactaaatataaataggaaactagtaaatataatttaccttaatttttacaactaatatccaactaatattctaacactgcaatctgccataatgtggccataaccattacgggatttacattttagaggcaaccactcatactcaatcctctgctcaacaagttggtcatgctcgtttaagtagtcgatgatctgtggtagttcttctgtaatgtccatctccacaagaacccgagcaaacttcaccattgatctctcccttgtcaccttgtcagccataattggcttaccaatcgtgctaaccacaacactagggcaactatttccccaatagtgtatacctgagtcctgtaattggatccataaatggaccgatttaataagacacaaagttgtaagatcagttgtccaaggtctaactattatagattttcgatcgaattgcagaattccctctagattcaaattgcgagtaacatcatcattgaatttcacaatcgcatatctaccattcattcgaacatactgcactatccctaatgtcccccatgtgtgtttaatgaacccttcaaacactgaaaacgaaggatttgctcctaataccatgcacacaactgctgagctccaatttgcagcttggattttgacctcttccacatccatctgagtaattttcttcacatctttcataattggttttaagtcaattttgcttccttaaaagatttcttaccttctgtgaattttttccattgctgctgtgaattcaattggaaatcatttagctcaatctcctcagcccaactctgtttcgcctctctaatctccttctcatcacacttctcttccaccaattcttgatcagtacaaataacatctcccgattccaacttgattaatcaaaccaagccatccaacagtctcctttggttcctccaattcatcactcgattagattgaaggggaatccacgagatttagtctagtaacaggctttcgaatcacctttttcttctttgccatggaagaaagagaagttgatcacacacgccttttttttacacaacatattactgtcttgcattggtagaatcatttagtttttttttagtacttcttttcataatgtggaaaatcagcattattcattctgggtctcttcctattgtccataatcaactaatgtcttcagtcaactgatcgagattctgataggttgtaggaggaattcaaattacttagagggcttatgttcaattggtattttttttttttttttt

SEQ ID NO: 198666 - DNA, 1180 bp, Cannabis indica
ttccaaaattggtgttcaaatttaaataagtcatttccaactcattatcttttagtattatgtaccatgaagacataaagcaaccaagtccaggccacaagagctgaaaatacacgaatcagcacttgagaaatcaaccagggaacttagggtttcatttagcgcccaaattgacaaccccaactaggattttagtttctaggactttctaagtgaaaatgggtcaaactttgcttcagagaactttcattttttaacacctggacacctaatgcccgggcaccccagtgctcaagttgacaatctatcaatcttggccacttccaagcatcagatcaaaaatctctcttcaatcttttttttcttcatccaaagtggggaaaaatgctttcaggaaagaaacaacccatccgggtgccagaacaaggaaccagccctcaggttgacacctagttctggcctagcgcccaagttaaaattttttcaacttaggccaattacaaggagtttgtttgaaaataattctagtcatattctccttcttcaacaaatattaagattcaaatatttttggggaccaaacggaacatccaggtagcttaaaactggacccagctctcaggttgacacctggcatagggcccagcgcccaggttaacatattgtcaacgtgggccatacaaaattagttttctgaaagagtcttataggcattttttgtcattagaaataacaaagatacaagtaaactcggggagaaaaccaaaagtccaagggcatcaaaacagagcccagcgcctaagttgacaatcaacatggtgtgctagtttcaaacactcaaattgcaattctactttgagcattctctccaaatggcgtaagtcaccatggcgccaacaaaaggtcatacgccgacgagccattgccggcgataaatagcaccggcaaagctttgccgccgagcttaagcgccggcaaaagtaccttttcttgtagtgttactcaaaccctacgacacttaaggcctttctcactctctctatctctttttctctctgagctcgtgctccttttcttcgatgttgatcagtagcctaactccaccaggcagctcctcctccttgaagccccgagtccaccagttgctatcaccgtcacacgaagtggaagcccactgtaa

SEQ ID NO: 198667 - DNA, 1066 bp, Cannabis indica
tgaattttgagattttagccttaccgatccatctcaccaattggggaaggctcttggctcgtgcattccatttcagccaactctcgatctccaacaagcactgactagcaacactacattcaaagaataagtgttgtccatttccattttgaacatcacaaaggctacatctctcattcacttgaataccatatctgaccaactgatccttggtttttaatctatttagcattgccaaccacaatatgacactatgttttggtgtgttcagtctagcccatacttcattactccatagcagtctattttgaggatgagtgaacaacttgtatccagctgcaatggtgtatctttacctcagaaattcagcactgtctgctatatttttgatatgatcttttagagctaccatattcttccagtaaaaactgaaatggacagaaccagagaagctccaccactcctgcttcttgatatatacactatgcacccatctgagccataaactttcctgcttatttgaaatagcccaaatatacttacatatggttggcttgttccattcctcaagctttttgattcctaagcctcctgcagattttggttgacagacattttcccaagctactaccctagctccatgaaataaagcttggcctttccatagaaaagatctacagattgcttctaaggatttcagcactttttttggcatgatcatcatctgactccaataagcctgaatagcaactagaaccgagttaattagtgtaattcttccagcaaatgaaagattccttgagctccaactcttgatcctggctgttattcttttagtgaacaattcacattcttttctagaaattttctttccacagattgggatccccatgtatgtaaaaggcagggcatgccacatgaatccagataactgcaatatctgattcgcacaatcttacttgcattaggttgcagtccagatgtgaaagaaaataactttagagcctgcaacatatatacaatacttttgaaatctccatgatagaatagtagcacatcatacatt

SEQ ID NO: 198668 - DNA, 639 bp, Cannabis indica
aaaaataaagttataggcaccgtttccaggttgtggttagggtgtcacaattatctcatgttatttctcttctccacttactaattatttgggctttgggtccacactggacaagcccatattgttgctactccttgggcaataccctaaaatacttggagtaagttgaaaaataccacttttattaatcaattaattaaatttacctctaattttatatttatttgaaacatacctctttttatatgtattgtacccaaaataccctaacataagagagtcacatggagagtatcttaaagtgacagggctaaaattggtacaatatttaaaaaaagaggtaaaaatgatagactttaaaaaagaggataaaaataaaagaagacaatataaaaagagtatagagtgtaatttccttaaatatttacttgactttatcctcatttgaagtactctatatagttatgtatgtaagtaccttcaccaagaaaaattgttatataatttgcataagtagcatgacagagttatttttaactaataatcacgtttgtgggacttttactattctaaaatgtggcgtggttataatattttaagtgcacatattattatttttattatatatatatatattaa

SEQ ID NO: 198669 - DNA, 717 bp, Cannabis indica
aactaaacaaaagaataaaaaagaagaagaagcaaataattctaataatgattggtgatgattacttggaatctctctcttgctcttcaatatgtattctaatctgcaaaagtatttttgtctctcactcgtcgtcagaagtcaaattacataatttttataggccaaaaaagatagaaaatatgacattttaaaatttgaaactaaattgaaatgttgcgcaaggcgacatgtcgcctgaaaatatgacattttaaaattcaaatttaaattgaaaagctgcgttaggagacatgtcgccgacatactgtcatcttttgtatccaccacgtgccaaaattattaggatttttaccctaaaagcaagtagttgatgaataatatattacagattatatgaaatgcaattataagctaaatgaatacattaattatagaagtgtaattaatatatatttgaaaaattctttattcatatggagaagatataatcttgcaaggatgtacaagagaaggtataatcttgctaagtacgacttacacttgttgattttatggcactaaatcggatacgtagcgaaagagtttcatattaattgattatcattttaccatatctaaatagatctacagatgtgtgtacattaaatcaaaacataaattaaccagtttaaaatatataactcttgaagattgctatcaaggtatccttaaaac

SEQ ID NO: 198670 - DNA, 633 bp, Cannabis indica
catgcttttagggactgtatttcctgctgtcaactggaggatattaaaagcaatggcaagttttttatatggtgtaataatcagcaagaaggagatcgtatttactctaaactggacagggctatggctaatgcaagatgggtggattgcttccctagtgttgaagccatattcttaaatgaaggagcattcgatcactccccagctcttgttacttttcatcagttatcacacaatgagaaaagccttttcgatacttcaagatgtggagttcacacacagaatatgcaaacaggctacaaagaatttgacagcagaattatcatggtacaaagaagtaccaaattgttgccaaactcaaagacttaaaggttgtctttaagaagattaatcaagaaggctatactgatttacagtcagcaataaaccaagcaagaaatgctcttgataactgccaaaataagatgctcctggaaccttttaaccagctcctgcaactcgaagaacttgaaaccatgaacactttcacacaagcgcataagaactatcaattatttcttcatcaaaaagcgaaaaactagctgaactagaaatagagatgataacactacaatatttcatactagcatcaaa

SEQ ID NO: 198671 - DNA, 1399 bp, Cannabis indica
ctttcactataattctcctcaaagaaattgtaataagcatataattaaataggtatcactttattatatctgtagaaaaagtatccatgtatattagtatatttataagagaaatgctaaaataaacaccgttaatattactattcgtttaatttaatataaagtcccatataatttaatataataacttttaagaagtatttctaacaaaaacactaaaaggagatcagaacatcatttacagaagtaaaaacaacaggttccacttccctcaaagaaagaaataaccaaaacgatccaaacatatataacttagatactaattaatattacaaatataataacttgaataattagccgatatacatgacttataaatatatgatctagttgttcttcttcagatggatttgacttgagtatcccaatctcattacactgccatacaattggtgtacagacctttttataggcctacacctctctctgtctctgtccttttcactcctatcatttcatacgggtcttattcacaactctaatcaccactacatattgcttctttacactaacctatatacttacctcatatgtaatttcgagtactactttacaatattctaatttatgtacatactactcaatctaaaatattttgagaaaagtaatttaaaaaaaaaaaaatacatttaatacagttataaaatttattagttgtatataataatatttaagtatgcatgtattatggacgtagaactctagatagtgctaagattttctttctcaagattttgttcatttctttttacaaaacccaataattttaaaagtgtttttttaataaaaaataattttttttatattttaaaaaaaatatatatttttttttttactaaaatgatgtaacaaaagttaattagtaattaccaactatttctcatatcttttggtgatttaattaaatgatatacaagaagtcagagccttgttgtggccagcccctgattcaatttatttattttgttttataaaatatgtaaatgtttttaatttaaagcttataaaagagttaggattcccttctctaaaaattataaaattagaataaacccactacaataatgatgacatcacctcccctatatatatatattattgaaatggagaagtggtatgtatttgatcatcctattatttttctattaggtatagtaacttaatatatataggtatatcattttttaaataagtgttatacattattttcttctaagaaaaaatagattttggccataattgagttttgagatacataaaattatacgtgtagatttattgttgttagctcaatggaatcttctaccagctgcctctgacttcgtttagattaattaag

SEQ ID NO: 198672 - DNA, 891 bp, Cannabis indica
aatcgctatccgccaattttatacatatatattatatatttataataactacacataccctagctacccaataaataaatattctaatatgaaaatataaatgggcatgcaactaaaattaaatatataaattggtccatattatattggtcctccctaagaactagcttaaccactttttatttttctctctattgctttctccttgcaattagggtttttccaacctagtgcacctttatgtctaagtcctctttattgaaccacttgaggctaactcaagtagttataagaaagcatgggccagaagaatgtgtgtgtgggtctgagttcagcttctaaattatgcaatatttgtatatataaataaaatgctttaatgaaataaaactctttattggggccgagttggtctgaccttagactttgtactgtaaaaaaaattacttttagtaataattttttagtcacaatataaatttcttttgactaaatataacattcaatcacaacgaaaagttattagtgactaaacatagtattttgatataagttgctactaatttagtttttagtcacaataagtacttattgttactaaaaatacatttagtcacaataaattatgatttttgtatctaatacctttagacacgaatatttttagtcactgaataagaataataatttataattaatcacgagttttgctgttactaaaagtaaaaatattgtagtgttggcaagagtcatttggctagcatttaccctctgtgacttttattgtaattgagataatgaatttaaatatagttcgcagtaaaataaagtttgaaaatacttagattaattactgttgatttaatactgtttactagtattataatcaat

SEQ ID NO: 198673 - DNA, 933 bp, Cannabis indica
cttcaatctttacttctttgggacctgtgcttagggaacatgatataaaggcttttgcccagaactgttgaagaggtgagaaaagctgtctttcagctttcaggggacaaggttgtaggtttagatggtctgaatgcgttcttttattagaaaaattggtttattttgggtagggattttacaaatgtaatcctagattgtcttaataagggtgtggattttactgatgttaattctaccctcattgttttaatccccaaaaagtagcatgttatgttaaaagactttagacacgttagtctttgtaccactctctataaagtaatctctaaaacccttcccaacaggctcaagttgattctcgataaaattatctctccctatcaaagtgcttttgtctcgagtcgtgtcatttatttaatattatcattgctaatgagcttgtacatgctatcactaatagaagagttggtaagcgtgggtgagctgccttaaagcttgacatgtctaaagcttttgattgagttgagtgggattttcttcggaatcttatgtttcattttaatttccctgtccactttgtcttcctcatctttaagtgcctatctacaacatccatttctttctatgttaatggtcatgtttgaaggactgtcaaacccactagaggtcttaggcagagtgatcctttatccccctatttgttcattctctattcagaaggcctgtccacaattcttaggaattatcagagtaaggggcttctccgtggcattgctatttctagaaacgcccctcccatatctcatcttctttttgctgatgataacatcttattctgttcagcagatcaacattcatgacatgctttaaatcatgcagttactatctactctaaagcctctagacatgttatcaattttactaagtcct

SEQ ID NO: 198674 - DNA, 836 bp, Cannabis indica
atagaatgactcgagagaacaaataaagacggtgcaacaagctgcactcgtcactgccgcaggaaggtgactctgcaacactcaattattaggaaagatattgggttaagggattcactaatgaagcattgttcatctagatacagagccatagatccgggagggtgattcttattactatgattgtagccttctaagccttgcatagaaggcataaaaataagtgtggatattctgcatttattgtatattttctttttttttttggctaccttaccattcttctctcaataagcctacttatacttcctacactgcactttcttcgtttgttttgactttatatacacacttactcccaaataatgggaaaacatgcatatttgagcttaattatttgaattattttattttaaatatgaccatttgttaccccttgggtacaatttctttaagagctcgttagtaatttcacacatcaataaaggtttttttcgtgacacataattttagccaactcttactttgggggttgaaattttttccaaaccaaccaaaaataaaaggaaaaaatttacaaaaaatgtgtcccgaatatctaatgaaaatccaaacctcgcaatatattcattgagtaatgttcatgtgctttcagattgcttggaagtggttaattccttaactgagaatgtttgtctcccagattagggttgtttacctatagctctcactattttagatttggtcaaatatattttgggttgtaagtttttttttttattaaacgttattttaattctaccgtggatggtttggcaaagagcgttagaatttct

SEQ ID NO: 198675 - DNA, 931 bp, Cannabis indica
atatatatgtgcaatagttgatcaagtcacatcaatcattttttctgaactgtttgttgacagggttttaaaagcaaatagatattagtaattcctatctaacattatatcagcccccttaagggtgtttgttttgagttttgagtagcctaggaatttgtggaaagagttaagatggagggtaatatgaaactctagatttcagatagtttgacattaatctctaaaagctatgtaggacccaaaaaagagttacactttcccatctaaaacttaaccaaacataacatggtatataatacacattcctacttcatcacctaacaccccatcaccaaacacaccataagtgtttttccttaactatatgtgatcccaagtggatgatgatcctgattattgtaactgtcactttttgaagcatggaagagattcattcagcctgtcatgattctgctggaaatggattaccatcacgaagaccagttattgaaatgacaattccatctgtcttggacaagactatatctccacctggtattttattacacctctccatttaaatatatgtgctttcatcaaattatccgttagttttttttactaaataataaaatgaaatgcataggacaactgtcttgtcttttttcttttttgtaaacagttatcacatcatgtcaaggccaatccaagtcatgagaatgccaagtaaataaaaaggctcgtgcacttagattctactttggcagtgccaattataagtttaagtctaactttatggttgtaggtaagcatgtgatcaacttgtttattcaatacacaccatataaaaccatcagatggcagctgggctgactctgcttacagagtgagtttccatcaaatgcacttcttctcaatctgttttccccactttttcaaaaacgttaat

SEQ ID NO: 198676 - DNA, 2272 bp, Cannabis indica
tatatatatatatattactaaatttttagtggggtactaatggaaggaaacattgatgaaccttctatttaccaacttaaggagaatcgagtggtagtattgttggtcactactacaaaacaagtcttcaaaggtagttttttaagctgattaataaaaaaaaaaaaaaaaaaacaaagctaatcgacgccattgagtgaggctggaatgaaagagacatatggtgttgactattacaagataactgaggccatagagtgtcaaattttaattaaaaaatcatatggtgtcgattattttgtaatagctgatgtcatagggatacacattaactgacgcgtgtcacctatggtatcagttattataaaataatcaacatcatagggtttatataaccccaaccagcattatatctccctcactttgtcttctccccaaataaaataaccagcaaccctttcacgaaactctcgctcaaccactgccttccatcccccatttcttcttttttcatccattttttaaaatcttgtattttcatacccaaaaatatattctctaagtttgatcgtcttttgtttgatttttaggataaattaagcttagaggtggtggttgtggtggttgtggctccaaccgctgcttttggtgaaaaaattattgaatctcaacgttcattaaggtataaatctaatctctaataattttattaatataaatttctttatttttgattttataaatttttttagcgtttttttagattgttaagattttgttatagtagttgtgcatggtggtcaaatttcaataataagataaaaatctaaattttaagagctttgttataaatttttttagatttgattgaaatgataataacactcaattatatatagggaaatttgcggcataaatactcattttgttcattttattgctaataagtacctaattttaaacaattacgacacaaatactcaaaactcaattttaaccatttgttattggtacccactaacagaagttagtatagtagacatgtgtcatgctctcattatttataattctttttacctaatttattaaaacaaaacaaacataaaatcaaaaactaaaaaaaaactcccattcccaatcgcattagacccaaaaaaaaaaatatatttccaatggcacagaccctccattaccaccactatgatcaaccttagtttatatgttctctcttcctaaacccatattgggaccaaaaaattttggatagagtgagaatctttaacacatataaatccaaaaaaaaaggcaaggagggtcagattcagaagaagcctaagttttgatttgtggctgccgaagatcttcgatcattttaacgacttgttccatggtgggtcagttctccggtaccttggacacgcaagccagagaaatttgaagcatttgaatcatttcctcctctacatggctctgtctcagaagctccacatcaaacacttctgatgtccattcctcacaaaccacagatcgaacccatctgggcaagtcaccacctcgtcgtgacccagatatcggattggaattttcccagttagcatttccagtaagactctgtagctgtaaacgtcagaattttgggtgagttttcgggtttcgattactttcggagctcggtacccgatgattcgggagattattggaggaaagttaactatctgggccaaccccacatcggttatggaggcttcaaggtcttggttgaggaaaattcaagctcaaattacctgaaaattttggttccaatatgggtttaggaaagagaacatatgaactaaagttgattatggtgggattgggaatgggatttttttttaagttttgtgattttatgtttgtattgttttaataattaggtaaaaaaattagaaataatgagagcatgacatgtgtctactatactaacttgtgttagtgggtaccaataacaaatagttaaattggagttttgagtatttgtgccgcaattgtttaaaattgggtacttattagcaagaaaatgaacaaaatgagtatttatgccgcaaatttcccgtatatataatcgggtagtttgggtatgtatatatatctatacatataagaacatataaatgggtataaataggtagtgtttggtgtagtggtttggggtgagagaggtaaaggttagttgttgcttgttttggttttaaggtatcactactacaaaaaagagttttagaggcggttttta

SEQ ID NO: 198677 - DNA, 873 bp, Cannabis indica
agagagagagagagagtacaataacaaagacaacgatgttggagctgaagaagacatttgcattggagaaagcagtggactaggcttagtgtcttcttaagagagagaaaaaatcaagagagagagagagtctctctttggttgtgtaattgtttctaattggagttggatctataaagtgggcttctaaaaaaaatgtttgtttttgagttaacaaagtgggccttcatgtacatgtctcaatgtgcaacaccatgtgatcatattagatattaatcctctgttatcccaaactcttttcccatttttctttatcaaatcaatacatgatacctcactcacctcctcaccaagggacaacttaagatatcaaaaactacatttgatgcaattcaatataaaaaaaacctctaatgacgcactagaaagactatagtgctagctctaacaaaatattttacatatataatcatatattttttcacatataaaaaaataattatctatagtaattgataatttctcccaaatgagttttctttacaatttgaccccaacttataaacttcccttcgtcaatgcttctgaccactagaattaacgatacatcagtatagtcaatggcagaggaaaggggaggtgggtcattttcccctcatcacctctcaactttttataatttaaattttttattattttatattttgattctataaaaataatttttttatttatgtttttatatattttatattttttatttttatcccacatttatatccatataaaatttatatttttttgtttttatttccatgtacttttttatttttattctcataatttttttatatatttcaataaaaattataa

SEQ ID NO: 198678 - DNA, 661 bp, Cannabis indica
cacttacttttggcaacaacaaatcctccgagtacaaacaccagtaacaatgtaaaagtaccaagagtatttgcaataacttgtgttcttccaattgcagcgatgaagcgaaagagggaaagagccatctgatgtatgccaaagaatgccaacaactgtttgaaaaatctgttgtgaaagcaagaacaataaggtggttttagccaatgctatgttctatactttataactcaatgaaaagaaaattgtgaagcttattttacctgctagctgctggagcaaacccaattgtataatatgttagaacaatccatattgccgattctataaatgatagggggattcttaggacccaaataggaaagcaaaaggcccaagcaggataaaacaagaaatccctttgtttgaaaaacacaggaagtctaaaaatagtcatagccagctctgccatcccattgaacatcacattaatcagactaaagaaaagtgctccaaaaaactttcctccatctaccacacttcccactggcatttctgttctaaggaacacagtcaaagcaatgagcgacatgattgttatctgtgttgttttgaatatgtaaatgaaagaacttcgcttcataagcagccattctctcgaaaagcatgctttgaatagctc

SEQ ID NO: 198679 - DNA, 1233 bp, Cannabis indica
aaaaagagattctctcatgtgcttaaaaaaaagggaggatattgggatcatatgtgaaaaattgtagggtgattagattggaaaaatcttatggtataggtgagcctaaataacgtttttatctacccttacctaatcctaacattaaacctcaattaagtctttttgatttcaaagcataagttgttgagattagtggagaaggttaaataatgcaagcttattaataatcgatttgtggatgtgttggattgagttgagcatgtatattaatttctaaaatttttgacatttgcgagttatatttttcttttctaatttgttactattggaagtaattggattgaaattctacttttaaaacagttaaatcttgggagtagtggtggtgtggtgtgaattgaagtaaggcttgctttgggtcttttgttttagtttagtgtcgatctttacttgagagagagtaaaggttaagtttggggaagtttgttaggttctaatttgtgctacttttaagtatgtttttaaagtatttttaattagttttagtttaagttatattttctgcaattttatgctttagtttgttaatattttcacgtgtagtaataaagaggaagtgaacaagttggaagaaaaatagtgtgaaaaatcattaattaattaattcaagttttttcgttggtgcaccaaaggaacagtccgtggaataatttagaagatccggtgcaatcggagtcgttaaagttaaaaaaatgaagaaagtagagtagcgtcgtggcataaaaattcaatgtgagggcgctattgtgctaaaaatggggagagaggtcgagtttcaaaggaaatattcgggcctcaacattagagaagctacattgaggcatgaggagagattacagtatgcctaaaaaggggccaagcgggccgcgaaattgggaagtgtaggtcgcagcccgctatgaagaaattggtatagtcttttggatttttaggacacgggttgcggtatgcattggaccatgtagcaacccgctatggtgagattgcattggtggtttttaaaccctaatttcgaagcaggatttgacttttgactttttagacttttagggatacgaatttggagacaagaagcaactggacaggctaccaccattgttcatcgacgagttcttttctttctcttttaatttcaagtttctaatatgtttaattcaattgttcacaatg

SEQ ID NO: 198680 - DNA, 790 bp, Cannabis indica
aggatgtcgccgtcatattaaattgattttaacaaattattatgctaatttatgggtttggtatttggtaaacatgaatcaatgactagttttatagctttattattactttttaaatacaacttgtcaatttttcttcaatatattattatattattaatacacacaacttgtttaattaaagaaaattgtgggattattctcgttaattaatcaaacagttttctcctcaacctaacattataatgcattacctccctagctagctacattataaagattctgtttttgctttgttatttaacttgctctttgatcatgatgcacatatgtctttgtcaaaattaaaggaaacattttttttaacttatagaaagacccaaaatttcattttaacgaggggaatttagaaatctaattaaaaaataaaaataaaaaaccattggaatctttatcgattttttcaaacctttttcatatctggatgagcatgagtagattgcttcttttcttcttgaaaaagcacactttataggttatacaattaagtgatcctctaatctaatttagcaaaatataaaattactgaataaaggcacaaaaaccttccaaccttgattaaccctatgaatctttttatttatttgtaaaccaaactcgaaagcaaaataataagactttgtgtagactaggatattggaatacttccgttcttcccattccgcaaagtatctcaatcccaatccgcagccgatttattagaataatactcataataatatcaataata

SEQ ID NO: 198681 - DNA, 2463 bp, Cannabis indica
tttatccaacaattattatttatgaaacagaattaaagaattaataattggtacttgataatcaatcctcgtgggaacaatactttacttatcattatattacttgtttcgattgcatatacttgcataccaattttaccaaacaagaaccttcaaacataaactttaaagaaaaatgtattatttataatttcatgtgtaactaatttatttatttatttatttagatgattttagtctatatatctcaaattatacctattaatttttataattctctttagttcttcaattctttctattaatttcataattctttctactactttaattcttgatcatgagtattcttttcaattaaatttgtagaatagtaaatcttgatatgatttaattgatgagaaggttgtgtaaactgctctccatctaattttttattaataattttatacttatatgtgtcatagaattttttaattattattattattattattattattattattattatcttattattatttatttgtgaatcatgttgtactaatatatcatataatttatatattttagaacctatttagtaaggattttgtgtacaaaatttaaagattgttacaaactacaggtgagtataaattattttaaatgactataaaattttatttttggctacaacttcagtaaagagactagaataagaaatagtaaacattccaattaataaattttataagtgtgcttttcattttttttgacgcggtgatcaaaatcatacaagattaataaagcaacaatccacaatcggcggcggaactttctcgaaccaggatagctcatcgtctaatcgaaaggtatgctttgccaaatcatatgttgcagaattcttatcccgagccacatgggacaaaactgcaactcgaaaatttagacaataaagttatgacatcctcaaacaacacacccaactcattaaagaacacctttcctttgatagttgttaccagagacaacgaatcagaacaaacttctttaattgggatttcacacggagagctcaattaaatccaaccaaaagtaccaaaatctcgacttgtaatactgaaatactacctgaaaacaaacaaaaccaaaaaacaccacaaaataatatattagtataaacactcgtatgctaaattaaactagaaacaaaactcaataaagtaaaacgaaacccaaattaaggatgaaacaaaaaataaagaaaactagccaaaggtgttaccctttggctagtaacaaaaacaataaaactccgaacaaaacattttcctcaaagagaaaaatacaacgtaaggcatgaaacatcaaaaacctgatacaaaggcgctcaagatctgtttcattaaaggctatctaaactttctaaaaaaaacaactaaccacactattagaatcaagagctactactattcggacttaaagctagcaaaatttgaaaagcttgtataaattaaaaaggtttgccttaaagttaacccattgtctaacctttgacagacttgcaaaaagttgatcttacctttttatcttctgataggataatagcccctaagccaaataaacttatagtattcaatactgctacatcaatcataagtattgtgtggcactgttcttcttaaagacttctgggtaaaattactaaacaatttctatttctttgaagagaaaagctactatgcttggcagtataacaagcatacacaatagactcataatagcttacaacccaattaacaatttgttgtgattgtctttattgttatccatgggtaattttatttctctccgtccatatagcccaagcactaataataattttttttaaaagaatcccttctaccacttcagaagcatatagtaacacacatttttaaaattaattacctctttcacttcatgtagaaagttaaagtctatgagcttctaaatttcttgtgcaaagggacaccaaaaaatagcatgagcattggactcacctccaaaaccatagagctcacaagaattgttagtgactatattttttttgttcaaatcgttatgagtaggcaagatttcatgaaaatctctcaactcaaaatgtaatattttcctagggatttttaaaccccataattatttccaccataatgagagtacatcactagcagaagagggtaatgatttatccaaagtcatagcagtattatatccactgcccactgaataattaccatgactagtataatgccaaaaccataaattttcatgattgaatggactcgacggtataaaaaaaatatattcttcatcgagaagattaaaattctaatgtatcaccgaataattccaacaaccatgaggcccaataagatccgacactcttgccatctcatacgcaggagctgagcttggaagaaaagaaggtggtcttgg

SEQ ID NO: 198682 - DNA, 1561 bp, Cannabis indica
ctctctctctctctctctttactatttacattttctctcttcattttctcacaagccaaacactcttaattttacactatactatactacatatagtactttttactatttcaaatcaacaaatatgaagatgaacagtagtagtgtagccatgggagctgagcagtccaaaaggaaagatccatgcagaaagcttggtgggtatcttaaacaacagaaaggaaggctttacattatcaggagatgtgttgtcatgcttctatgctggcatgactagtcaatatatactatagtcatacattattatcaataattatactagtttagtactcatgatgatgatgagaatagtttggagctataattacttaattttagtgtatatttactctgtctatggggcttttatgattaattccccagatcgaaatgtaaatagaaatgagaaatatatcgaattaatcttatatatacatcagtcttttttttacatacatattatctcagcacttgatcatttacttattatattactaaaaaggaacaccaaatcttaactagctaattaaactatatataagactagctatatgttgtaacctagctaagggggttaagattataaatatatattaatttatagcagctaaactagagaataattttctgttataataattaatgatctccttaatttaaaaaatgaattagactaataatgtttttctgtagttaaatttaaaagtaacatataaggaaagaaaggaagaaagtaagattgtgaggattagaagaagagtactgcatgtatatagatcaatattccactcaatccaaatatatctaaagaaagaagagatattcccggaagaaagtggagatgaatggttgatgacatatatatgattattgtcgttttttgtaggctacctagcttagcttagcttagcttagctttgctttgctttgctttgattgtactggtcttgtctactcagctagctatgaactgcacttccatacaaattgatgaactaaaaaaaacaaagagagagagagagagactatgtgtatatattgtgagcacatgcaagttgtactcgataattagaccctttttagtcttctattttcgacagattatagtttccaagttaattggaacaaaagaaaaataatggtttcctgtataatgaactgttaattaattgctataatttaatttgtgcaattaactacttataacataactataaataaatttgtaactaaaaataaaaatttgtggctaaatgtattagtcaaaaaaattataatttatcttttagtcacaatatttaaaaataaatttatgataacttatatttaaatattatattttaatcaaaaataatcttttattgtccatacaatgtgttagtgagcatattatttattaataattagcgcaatattaatgtgcaacgaaaaatggaactacatccaaagtctaaatcagtttatatattaattatttatattggagtgatatatatggtaatatatatgtgttcaatgctcc

SEQ ID NO: 198683 - DNA, 2486 bp, Cannabis indica
aaattttttcaaaatatataattgttatttaattcttattcttttctagccatatccattttactcagccacttcattaacttttcacaaaacaaattcaaaaatgattatacaaatgtaatacccaattaatatttgtacgacaaccagtaccaaatcttcacaaggccttcctgacatatatcgagatctccgtggataacaaccagttagcgctattagaagagacccctcgcctcaagcctttgggcatcacctaggtggaaacaactaaagcttggaagactaaaccatgagagagatcgaatatttgaagagaaaaccaaatgaatgctaagatgaggcctccaacaccatatgacacgatgatgtcatctacgactagccccatcgatgaaactatccaatcatctaaaggactgtgtctccagtacgatgcatgttgccacttgcttcacaaggcttaagataatggccttagaagaaagaagcatatgtacttggtgagctcaagctcccaaatttgttgctcttaattggagataaacaacctcggttggaagaattccagaggttagagaccacaatggctggtatgaaaaaggtgttgagtggtatacttgagggcaaagcccaagtattgctctccaagtgcgataaaaaacaagaagagagaggagaatccattgcttgtgttaatgcacagaactacatgctctctactaatgatatccctcaagatagtcatagaaaagacatgccgctagacaaatgtcctactggtcagcgaaggtaatacaagccaatcctctcttaaaaggtcacaccgaggggaacaccccataaacttgagaagaaactttgtccaaaaagtttcattgtaggtgacacctcacctatggcttccttccaagaggaaagcaaacgtgaggtcgtatcgccaaacatgttgagaaattaataatggacggaacgagagaggtacctcatgcacctcccatgaaaacaacaacagggtcaaagttccacacgctaacttcagagggagaatgatggaaaaaaatgaaggagctggaagcggagatgtgataactacgctgaaaaatagcagttgcctcaaaaggagacttgagtaatgatgagaaagttgataacgaatcccttttcttgagggagattcaagtggaaccacttccatccaacttcaaagcgccacaaatgacaccatatgatggtactacttacctgaagtaccatctcagtgcttttaatgaattgatatacatgaaaaaagtccctaacaatgccaaatgttaatgcttcacagttacgttaagaggagctacgtataagtggtttaagtggctagaattggaaatgattacatcttggaagcaattctgagaagagttcctccaaaacatcatgttgtatgcgattacatcatgctcatcatgagcatcgccaatatgaagcaaggagaataagaaattttgagaagctacattcgatgcttcaacactgaagtcacaaaaatagaaatggtatcaaaagatgaactcaagatggccatagccataggaacatgcctcaggataaaactatgggaaaacatgctgaaagatgagttgaaaagtctcgatgatttctacgaaagagaggagaagtatatccatgtggaagaaggtaatagagacttataagatgacatgggtgaggactcatcaaagaactcatcggacttttatagggtttgttaggagacataccttgaaactcaccgattgatacgcctatgagacgcctccatccctcgacccatggacgccaagcatccaagaactcatcggacttttatagggtcttgccaccgattttgtttcatcaagttctgcctgtgcaaatttgacaaatctaaaacccgtcgagtactttttgttgaccaaaagtcaataactcacttattttgatgataaaattttttttcattattctttgttactaatttttgttgatcattttgcaaacaatttacaaagtatcaatgttttctcagtaaagtcaaacataatcatagaagtagattcaacaagtatatcaactactttatatttgataagagcaaaagttttatcaagagatcaagatttcaagaccctatccaaaaaaggacttcaaaagcttaaattcaaaaccttaaagttaaaagttaaccagaaagtaaaagtcaaagttaactctccagaaaagtcaactagatcaagacatgcaaattaatctaggaagctcatcaacatcatgactacataaaatcaaatggtataagtttactttagtcttgttaaagtgatttgcataacacattttttttttgataaatcagaaattcattgcacaaaacaatcttttttacaacctagaagcaccaagcaagaaagcaaggccttagtatgctatacaaatttatttacaaagtgttgaaccaa

SEQ ID NO: 198684 - DNA, 1025 bp, Cannabis indica
gacagtgtctcaaacaaaatagtctgattggagagtaaaacttttaattcctcgtttgatagcgtgagggtttgcattgcatgtgcctggacattattcaagttgggaaaatgtctcggagcagtatgaacacctaatcttaaccaaacttcgggtaaatatttattaatttatatctaaataaataaatgtaattattaccatgttattttaataattttttgtcatatgcagtattattaccagattgacaaccattcaaaattaatagttatttcgatagatgagatggccgagtagtacaaaacgagaaagaatatgagactgccatatttcaaagaataatattacaaaaatctagaagactttgaaaatgcaatgaagaaccctcccaatgaacttaatgacgaccaatggtgactaattatatgtcaattgttcataactcctgaatttatacaacgaccgaagcaaaactctctcaatcgacaaaagatgaaatattcttcaacacaaaggtcggtaactatgggtgagatttttcatcaaaatgtaagttaatatattaaattttattttataaagtttacgttaaatacagttttctaacaagttatatttatcagcaaggaaagagttacattgagacttggaaagattgtcatacaaagtaagatagagacacatttatcaaaggctgccaaaaataaatttgtaagactttaaaaaataataaattttaaatatattcaaataattgtaactttggttgatttctaatttattaattttataagaagagatggtaacaacccgaaatagtgctcttgaatcttcacaagtttctgaacttgagatacctcgacagactcttggagagaggcatggccatcagcgaggagtgggtcgcaacttgaaagggtgatcgtcaggacgacgctcacaacatgcaactactaatcaacctgacttacgggaaatagttgttaagatgcagaaaccaatacagatgttgactcaacaat

SEQ ID NO: 198685 - DNA, 588 bp, Cannabis indica
ttatttcacttaaataaatgaataatggtgatggtatagtaactatggtatgctaacttaaggtatgatagttaaaattaaaagtgtaatataaacataaattatttacacatgaacaataaaattatatttcaacattatataaaatttcttaataatttacgaaaagttcattataataattaggaaaaatttattgcaagttattgtgttgagcttatggaccatcttttagttgaaaatgttgttatgtttttttttaattattataaatggtttaattagtctattattattattatgctcgatgagcatgcaatggactatgtccaatttgcctaatgaaaatttctaaaatatacaactatagtaagagaactccttttactcttatgcaggtagggacatttttatttttgatatttgttattttttttatacaacaatatacatttagaaaatttgaataatttacgatttttaaatcaaaaagtacttttaaaataatcaattgcacccatattaaaaaaatatgtgaggatatgtttaaatcttgattttgataaattatttaaaactttctaaaaa

SEQ ID NO: 198686 - DNA, 1427 bp, Cannabis indica
tttacatgagaagttacgaagtggccaactttcagactcactctacactaatcgagatgggctacttcttcacagaaacagatactttcttagtgattcttcttctctcaagctgccattgatgtccgagtttcatgcatcgccgattgggggacacgcaggggtggaacggactttattgcggttgagtgcaaattttttttgggttggaatgagaaaggatgttcaagcttttgttgctgcctgtacaatctgccagacaattaaacacactaccgcagctccatatggcttgcttcaaccattggaattacctgagcgagtttgggaggacttggccatggattttattgtgggtctcccgagttcccaagggtatacatcgattttagtggttgtggatcgattcacgaaatatggacatttcggcgccttacccacccactatacagcaaccaaagtagctgatcttttttcgtccatggtgattcgcttacatgggttgccacgctctattgtatccgaccgtgaccctattttcactagtcaattctggcggcagttgttcaagttcatgggtactcgccttcgcatgagcacttcgtttcatccccaaaccgacggccaatccgaggtgaccaatcgttacttggaacagtacttgcgtgcctttacttcggaatacccccacaaatggagccagttcttgaaatgggctgagtatcactataataccagccatcactccgccattggtatgacaccatttcaggccgtctatggcagacctccaccctctattcccatgtatactcgcggtgctacatcactccaggctgttgaagatgaactgctatctcgtgacgctttgttaactcgcctcaaggagaacttacagcgagctcaacaccgcatgtgtcagcaggccaacaaaaaaagacgtcacattgaattcaatattggtgatctcgtactcgttaagttgcaaccataccgacagtccacggtggcgcaccgcctgaatgcgaagttatgccgccgctattttggtccctttccggtcgttgcacgtgtggggccagtagcttataccttggaacttccttctaccaaccgcattcaccccacttttcatgtctccctactcaagccctttatcgggactgctactgcacaccattttcccttgccggagctacaacgaggccaccaaccattggtcttaccggttgctattgtttctagccgtttgattcagcggggtcagaagaccattcctcaagtgcttgtccagtggtcacatagtcccatcgaagacgctacttgggaagactttgctccgttttgcaagttatacgacctgttcgaccttgaggacaaggtccattttgaggaggggagtagtgatagcaaagtggcccatatca

SEQ ID NO: 198687 - DNA, 1796 bp, Cannabis indica
tttgttttcatttccgggctcttcctctagatttggaatcgaagtggtgagccctgagcttcttcttgcgcaccagtgatgtggcacctccaccctctctgaagggcatgcccatgagagctaatagtctttggccttctttatctgttttagcagttgtgacaatgcaaacatccattcccatgggcttaccaagggcatcaaacctgatttccgggaacacactctgttcacgaattccgacagagtaattcccatgtccatcaaagctatttggattcacaccttggaaatcccttgtcctaggaaacgccaagttaacaaggcgatcgaggaatgagtacatcaccttcaaaatttgagaagcagcaatgagtcacagcataagattcattttgttaggctctaacataaatgatattgaaagcaatagcaaaatgatacactttctagtttcttgaatgtaactttacaaaagcttcatctgatacgaaatgagatgagcaatgcacgtaaacgaattggttaagctagccattacaactttcttctcgtttccattttgtcattttaaccattaatactagtgtgatcctgtcgtgcagccacttaatcagctagagttccatatgattagtcaacaatgaaagttcagtaccatcttaaataattctagacactcaaaagacactgtcattaaaggaaaatgaaagaactatcaagctcctcgtgctgacaccatttatgacttatatttgttcactggcttgtaactaactgttaccaaagacataatttcattgcaaatgaaaatataaaatggttattgtataaggctagcaaagaggattccatatcactaaacttttctagtactaccaactctgcaacatcagggtattccttcaataatgaaacgcaaaaacaatggatgtttataacataaaaaaaaggccaaattgtttctgacagataagtagataacaatgataaaataaaacacggccaaactaaaactcaatacttaatagacaaaatactcacatttcctctaagtgtgacagcaattcctagtggttgaccttctctgattttgaaggtagcaatggaattccttgctcgtgtccttacaggtctctgcgcggtaatgagtgccatatcattcattgcagcttcaagcccttttgcattttgctgagcatctccaataccagaattcaccacaatcttttctacctttggaacctagacagtggcgatagcaaacatttgtggtgaacacaggaaaataacaattgctaagtacccaagtccaaatcctaccttcaaatattgagctgctaaaaaaacagaagaatggtacggcaggcattatatctagagagcttcaaaaactagttactggaatgctaaaggccaaacttgttgaatttaaagctcaactatttagcattctaattttctaagcaaccaatgaaaaacccaaaaaatataattttgtaaacaatcaaactctctctctctaaaggggattttttaaaagaaaaggttagttacacttattgaataaacctttcttttagactacaccatactctacaacaaagttgaagacactaacaccatactcaatcaaccacgcataatatactatttcacaaaatagtttttcagcattttgtttcaattttaatattgcaaacaataaactaaaataattaattatcctaattttcctccatacaaacaaacgaaaaagtgcacccaaataatcatgtcttcaatattagtccaat

SEQ ID NO: 198688 - DNA, 1060 bp, Cannabis indica
taagcttggttagttcattcatgcccaacaaccactctttgggaagcttgaacaaggttatgaggtatctcaaaaggtctatctcagatggtctatgtcttaaaccatattaaatttttgtctctgcaaggttatagtgatgttgacttggccaattgcatagatgatatgcactcaacttgtggatatgtgatgtttttgggtgaatctagtctcatgatctgcaaagaagcaataaatagttgtcagatcaagcactaaaagtgagttgctcttgcaaatgctgcttcaaaaatcaagtggatctcttctctattgtctaagctgcaagttgtgcctcctattatattggttgacaatcaaggtgttttagcattggcaaccgatattttcatgccaaaaataaacacatagaaattaatcttcattttgtgagagataatattctggccaaacaactctcagttcaatatgtgccatatttggaccaagttgctaatgttttcacaaagccttcgtctacaaaaaggttttgttacctcaagtacaaacttcaaatggcctcttctcctttccgtttgaggagatgttaaccaaaacaacaaactgaatgttatgttagttatacagttagcttatttgtaaatagttagttaaatttaataacaaactttctgtttttagctaattgtaatctttagttttgaactatataaataaaggaccgaagttattattcatgtcaagcttctttgacatttcaattgttcttcctctttcttttcttttctggtttgtaccactcagcttgtttgtaccatttgccattgtttaagcttctgaaatgtgtagcaaatttgctaatgttttacctttgctcataaatatgaatcaaggtgccttcatcaagaatagttccctagctcataacgtgctcatttttgcaagactgtctttgttggtacaataggaaaggaatttctccaagatgtctccttaatattaatttaagcaaggcttataatactgtagactagaaatttttagaagagcttctaaa

SEQ ID NO: 198689 - DNA, 1073 bp, Cannabis indica
aaggctggccgacctcctccatacactctcccaaaatatggccggccaaaccctagcacatttgagcctgtagcccatccaaggagagcaaatcagccaagtccctacagcaacggatccttctatgcaagcataattagacaaaataagcgacatgatcaagggcctaacttgttcaaaaccttcagaccttgagctagacaggtcaaggggatcactattctcaaaatacataaatgccttatccttgcctaagctcaagatgccggtatgaaagatgtataccggatgagaagacccactggcacacattaggtacttctatgggacgacttcttcacttgccacgcattgttcaactaaaaagcatgtagaagtacaatgaaattaacttactgcatcaaatgagattagacagtcaagagcagttttttcaaagactaaaaatacatcaatatttactcagttaaggcaatattagtctcaactaagctagaaagtccctatctgcacaggcatttgcacagggacttgaggggtaaatgttatcccgattttcgcccacctgacgtggcatgtctacgtggtcaatatcagagccatgtggcagtacaactatcaataagaaggccaagtcatctactcaacacttcgattaacggggagtccaaacactcaaacaagataatgaatgatagaccagctaccttaaggagattggccggccagttagcttttagacagcataaggctggccagcctgcatctgcagatgcatggccggccagagattggcctggcaggactttggtgtatagtttcatgcatggtcattaagatagactgccaattgggccttaatagcccacaaaaatagagagaaaatatctattttaagggacatttcagtcatttgtattttactaatttaatatgtaaatatctgcttattttaccagattaaagagttttaagctctcctatataaaggtccttaactaaaccctgaaaccctaagtgttaagtgaagtatgaagtcataagttgaactctaagtctaaactctctctctc

SEQ ID NO: 198690 - DNA, 1653 bp, Cannabis indica
tggtgttcagaccacaaggccctggtgcttgataccgaggtggaagggattccaatgacggggggaaggcacttcgttcccggtttcattttgaagaggcatgggtagaggaagaagagtgtagtgacattgttagagaagggtggaacacgttggatccttgctcctcggattgggattttaagagtaaaactcaaaggtgtgggagtagattaaatagttggaatacaaagaagaaaaaagagttgcaacacagagttaaggagggcacaaagagggttaatgagttgtcgaaaagaatgaattttgacaattaattggggattacttaaaggtgctgaaaacaaccttaatgcaattcttgagaaacatgagagatactagaggcagcgaagcagaggtttatggatgaaatgtggggataaaaactccaaatattttcatcataaggcgatggcgagaaagaagaagaacaagatcagtgagataatggatcatcaaggtgggttgatgagaaatcactctgagattagtaaggtcgctattgaatatttccaaggcattttcacttctactaatcctagtgagcagatgatgagtgaggtggtggacaaagtgaaatgcaaagtctctgcaaacactaatagggacctactagaggctttcactgaagaggagatcaccaaagtggttttttcttgaatcctttgaaggccccaggaaaaaatggcctccctgctctcttcttccagaagtattgggaaactactagaggggatatcattcgggtttgcctcaacatcctaaataacaatgcgtcaatggatcatcttaacgacactcttattgctcttatccccaaagtggacaaaccgtcaaagatggaagagtttcgcccgattagcctatgtaacgtcatctacaagatcatatccaagtgcctggccaaccgaatgaagatgtgtttgaatgaggtaatcttggagtttcaaagtgcttttgtgggaagtcggataatacaagataacgcaattgtaggctttgaagggatacattgtatgaaatgaaaccggtttgggaatggatcaaaagtggccttcaagcttgatatgtcaaaagcttatgaacgagttgaatggccttttgtggaggcagtcatgttgaaattgggtttcgatagtcagtgcatcatgaaaatatccaagtgcatttcatctgtgtccttttcggtgttgatcaatggaagacctacgagaaactttactcccaagaggggattaagacaaggggatccactatccccttttctgtttttattctgtgccgaggctttgtctagcctaatcctggatgcggaagagaagggccttattcatggactgaggtttggtagaaatggtgtttcggtctcccacctgttcttcgcagacgacagcttgatttttgtggaagcggacaaagaagaatgttaccaagtcaagaaaattctggcagcctatgaagcgacttcaggccaaaccatcaatttcacaaaatcaaaaatgtgctttgggaaggtggttgatgaagcctcgaaaactgaatgtgctgatttatttggagtcaagaaggtgggttttttgataagtaccttggtatcccaatctttgtggg

SEQ ID NO: 198691 - DNA, 531 bp, Cannabis indica
acaattctttttagtaaaagaaggatacagaagaaataattctaaccacagtgtaaagtgatcgactataactacttcatcaaaaattctaaattgtgtaaccaacatccaaaaccaaaaagctataaactatcaataaagtactttctacatacaattatctcttctaagtgaaacaattgttatatactaaaccaactgttcatcaacatcattacactattttatcacaaaacctattaaacacttattccttcttatctaccaattcaaatctaaactattacaaaattaaatctcaaaccatcatgtttgttgtcagatcaacaactacataaagtctttgaatagtaatccaacttattatttatttttttgaaaatactttgttggttttagttttgattgcaaataaatatgtagggtagtgatccgagaaagtaccccctttaatttatatgaagaagatgaatagaggaacactgttttgttgcattataattaatgtgtttgtgtgtattaggagtttgt

SEQ ID NO: 198692 - DNA, 838 bp, Cannabis indica
ttttcataaccaatataactaaaatctgtacaaactgcaaaatattccatcgaatttactactcaaaaatcttaaaactatcttcaacatcaaaattgaatataattaaatactaattagttgtgaaatatttaacaaccaattttatttgatttttaatgcttttaaagtactaacttattctttgtaataaaacacgtgagcaaaattgaatgatactaacataaagttaaaaatcaaagttgttttattcttgatttattcttttcagtatttcatcaaatctttctcactttataatttatgttaagtttcacgtgtgattttgccgaccaccaaaatttgtaaaaggctaaagttttatttataagagtttttccaccaaatattaaaatttttaatatttttattgttttgctgtagagcggaattttttcaaaattacatagtatgtaagttatatactgtgtactgtgttaagttttcacgattgttccacggttatttttagttatattactgttattttaattgttctagtttgttattttactgttgttttataaaaatatagtgtttttgtaaaaaattctgcctaatagtaaaattataaatttttattcaaattttaatatttttgtaaaaccccaactttattcatatacgagaaaaacggcccataagaaattcgatgatccaattcgacataaagggctattgttttggaggtagttttgggcttgaaagttcacactaagtaggcccaattattttgggctaatttattgttacaatcgtgggattattttctatttaaccaaaaaaaaaattgaaaaaa

SEQ ID NO: 198693 - DNA, 1490 bp, Cannabis indica
atacatatatatatatatataatttgagtaggttgaaatatttaaatggttgaaatttggcactaaaacacaaaagcaaaatgacaattaattattaatgtaagttaatgtatcaagtttgtattattaatttatttaaatgaaaattaaaatgtgtaaaatatgttgtgtaaaattgtaatagttaaatggtagtgtgtaatatgagtcaatcataatttttttacgtagataaaattaattacatattattattttctatgtaatagtgttaaggagacaattagctagtttgacacaacttttaaaaaagctaaaagtggctttatgagaaatttgttctataaaagatatttggtaaactgtaattaaaaatttaaaaaatttatggaaatattataggtcagaagtcacaacttaacttttagaaaaaaaatatatattttaataaaaaaaactataataaatttatttgttctatgatcactttccttatttataatatattactaaaattaaaaatatttaatataatttaatattataataaaataataatattaaaatatttattttttattttgtttaattatttttttttattttcataatttaatattaacaaaccacatcaatctagtctttttcatttatttttttacagcctaaagtttcttatatactcatatttttttttacattatatcaaatgcatataattaaattcatacaaaaaaaataataataaataaagacagagaaataaaaatttagtacaatataaatttttaaatatttataattataataaactaggttataatatcattaccattttaattagaatcttaaaaatttataacactttaaataaatatataatttaccaaacatgacgtagatttttatcacaactcaagctatagttgtttttttcctcacacacaaatatatcaaattggtggctttgttagtctcgtctctatacactacggtagattcaaagagttttagcgtttctcgctgcactcactagagagtggtatagaatctttgtttttgttgtcctttttactactcattcttaaaggggctatatcatttgaaatatcaagtggaaattatatattttataagtttgtagtgtaaaaaaatgatttttatatttgtttatataaaaatatcttgtaggaaaaactcaaaaagtattggaaaacatttaaggtaactagttacttatcaatactatttccatttttttttttgtataaaataacttttttgaatgaaaaaaagaaacatattatataaactttttccataaaaaccataaaaacaaaaattccttgaacatcaaacacttattatgaggctcaacacagaatggtgagacaagtgaggcgatggtacaaggcccctcctactgggaaaggtcccaaaaatataaatcaaatatgttatatacatactatatgacagattatttcata

SEQ ID NO: 198694 - DNA, 810 bp, Cannabis indica
atcatcaaaatcatacattctcttaagctcacaacacaatttggccaaatatgaagagagatggtcactaacatggaatggtcccgacctaccaaattttgtcttctcctttaaattcgagactcaaaaccaaatttgtgaatcggtttgatacacccaccacaaccgggttgtttacccaggtgtcatccaagcccaccaaccacttcaaattcatcggcaagtgcaggcagcctcggtggaacgggtgccacttgcaggttgaacccgacacgcaaggccaaggccaaggacaagaccaatggccaaggcgggctaggtccacgcttatggttcactcctttaggggcctaaatgatttttttatatataaatatacatattttttaaaatatttttaaaaatactatttatttttataaaagggtttaaaaaaattatttttttaaggtccaaattaatttagagctagccctgccgaaggtattcgaaagtcaaaaatttaaattaaacaatgttgtttctaataacaaagactcattttttgaattttctgccacaagtattttggatcacatttacaacttggataatagtgaagaagattcgttcttaacacaattgcattattgcttaaaagagttgatcagaaagataaatactatatttggaggaaaatgggaaacatatttaatatggttattcgtttatttagttatattttatgttttttaataaataaataaataatagaaaattattctaatatattttttagagtaacttgtggtataaatatctaaatttaac

SEQ ID NO: 198695 - DNA, 939 bp, Cannabis indica
ttcacaaaagagcagtgagacttcagtacattaggatggtccaccagtgtcatagtctgtgcttcacgaaaaatattatcctgttggataatagcattcaaataaagaaaacaaaatacaagaaataatcaattactcatctaaatattacaatgacataaaaaacagagcatttaacacataaaactttttgtacttatacatgaaaaacattgtctaatggcccatagtcacagcagaacgaaaacaacctatccactaggatctagatatcagaattttaccattattataaaatgcaattcatacagaaacgaatgtctagaaaaatattgtgctattagatcagtggctctaattaaatagaaaaagctagagaaaaacaccacttttctattcatatacaatattgtatcaatatagtttgctcataatagcaaatcaaccattgccttatatcactcataacataaagattgagtatttagctagaatagaattatgactattttcaccactttctggtcactaacgaaaacaataataacgaaatcatcacccatattttttattttgcagatcccaatatgcaatttgtgtatattttttttacacaataccaaaactcaaaaatttaacaataaaaaaatatcaatgcataaactaataaaataatagctatacttaattaattcacaattaaaaattttgtgcgttggaattaacaataagaaaggaacgaaaaagtaccaaatcacaattctcgcgctcgaaatcaagaattttgatggcgacaatctcatttaagggcttacagagagctcgatgtacagaagcgctaacaccatggccaacctcctcatagagctcataatgctcagctccagtcggatatatcttcttctcaactggctcctccacaccaccacctttctgatt

SEQ ID NO: 198696 - DNA, 1884 bp, Cannabis indica
aatacccatatgatattcctactgaagccttctcttttgaaattttcaaacaagcttttgttgccgtgcagtcatgtgttgtgcatttgcaggtaatttttatttatttatttttggggtagggggaggggggcagttatgtggtgtttcttctaattttaattcaggtctttcaattaagtatgttagtcgatactagctaaaccaattaaaagtgttagcgtttatccccggcaccaacttggtatactggtttagtagtatgatgattggcatgttaagaaccttgtgatttcattttctactgcccccccaaccttgacgtgatatttccatcctcgttagaaagtctgtttcattatggctttttgacatttttaatgtttcttttttctcactcagaaagtcagcttggctcgtaggtttgctttggtccctcttggacccccattattagcttacagcagcaattgcaaagcaatgttaacagctgttgatggtgcagttcaactggtggttgatcgtccatataaggctggagaatctattgctgtttggtatgacatttttctttatatatattatatgttatcatgtagctgacaaacagattacaagttagccatttattattcttgatagtgcaatttgttactttcttattgctatccatttaccacttgaagcatgctgaatggtttgtgtgtgagggttatctgctcttattccagtaaatatatttaaaacaaaaatagcacatgttagcttatgtgaaatttgtattttaatgcaggtgtgggccacagcctaactcaaaattgcttataaactatggatttgttgatgaagataatccttatgaccggttggtgattgaggtataataagcaagtctgtgtactgtacacgattccctatttaggtgtaagtcttattcttactgattgtttttcacgttgcatattttctaggcggctttgaatacggaggatcctcagtatcaagataaaagaatggttgctcagaggaatggaaaattatctgtgcaagtttttcattatgcacatttaatttgttttccagataaatagctgttaggtttcttttacttcgctttaatatacccttttttcaggtatatgctggtaaggaaagggaagctatactggatttgcttccatatattcgattgggctatttatcagaaccttcagagatgcaatctgttatctcttctcagggtccagtttgtccagtaagtaaaaattactttcactttcaattaatgatttttgagttttcatgttactttgaaagataagtaatgcataaagattatgggaatttgatacatacaaacagcactctctagtaatgcttgcacatgaatgaacttgcaattttggatgttttggcgaaacaaaccataccttggctattacatgacttatagttaaagtggtatcctatggttttcttttgttttcttgattcctttatgaaatcaatatagacaagcccttgtatggaacgagctgtgttggaccagcttgctgattattttaggactcgcctggatggctatccatcaactttgaaagaagacgagactttggtaattattgtccgtcaaactagaaacattagattctatattataaattattgtattactaatattgattgttacagttagcagatggtaatttgaatcctagaaagcaagttgctacacgtcttatcatatcggaaaagaaaatgcttcatgcatgcctgcaagcaaccattgactatataaaccagttaccagaccattccgtatctccctgcccagctccttatgcccctttattaaaataaaggtaatgtatcggacttgccttt

SEQ ID NO: 198697 - DNA, 1007 bp, Cannabis indica
caatcttggttggaatcatatccttttgctgaagtagttttcttaaatgaaggcacatttgatcactctccatccttactatctatgcatccagatgtccaatctagaaagaagccattcagatacttttgaatgtggaaatcccacaaggattatgataaaagaataaaagaagtttggaattaccaatacactggcactaacatgttccaactggtaagtaggctcaaagatctcaaaagggtgctcaaaggaataaacagggaagggtatttaggttttcttgcagatacaattcgagccaaggaagctttagaagaatgtcaaaatgaaataagacatgatcctttaaatgtagaattgcacacggaagaacatgatgcaaggaaattgctgttgcagaaacaaggggactactagtccatgctccaatagaaggccaaggttgattggattaaacaaggagatggcaattctgcaatttttcatgctagcattaaagggagaagaagacagaacataatactgacaattgaacaggctgatggcacaagagttaatgacccaagtaagataactgatgcctttcttgcttattacattgagctattggggtctaaaatgcagaatagaagataagacatgaaaactgtcacggcctaacttcacaacaagctgatgccttattagcaaagtttatataaaggatgaggtgaagcaagcagtgtttgatatcccaggtattaaagcaccagaagttgatgggtactccagctatttctttctggacaactgggatatggtggaaaatgtattgtgtgtgaagcagtgatttcatttctagaaacagggaaaattttgaaagagataaactccacaatgataactcggtccctaaggtgaaatgccctaatactgtgaaggacttcaggcctattgcatgctgcaatgtgatctacaaggtagcaacaaagctcatctgctcaagacttaagcatatccttcct

SEQ ID NO: 198698 - DNA, 1183 bp, Cannabis indica
tatctcaaccagctgctttactttagaattttcgctcgtattttttttatctactgggctctactgatgaaacgtggctacattatggtacacttaaagagatagttttatgttcatatttctaagttccaaattttcagcaagagccaatttcttggttactcatttatgtttaatttcacctaatctctatgacaggggacctgaaggaagtttagtaaaattgaccattcaaagtaggtcagaaataaagcacctggatttaacgtaagttcaatttcaattttttctccagaaatgctgtgcacttaatatctcgatgctttcttcaaacattttgttttaaggggaacaattttgtgctccccaaaagtcttatcattttcttttacgatgtattttattattctcaagtgtattatgcattttgtatgtggtaatatccaaacaagataagatagaagaaatgtaggactgaatgaacttatgttgattggcaatatcactattacagtaaaatcacctaagagttcaagagcctggttctctccctatgctgtaggtccccctaattcaaccagaaaatttagcagtaggaaaattacagaaattctccctgagcacacaatctaccttagatttttcgacaattcagtatatgatttgccattttgctattaaatactctgctactgctgtttggttttagcctaacatagggtatcctatcagtaatctgagcatcattattggtgatttggttcagtaaaattttcaattttagatgtaatcttccttcattttttaattttttcatctttttatttatgtatttacttattaattttgaaataatttggattatcttttctatataggcgtgagagagtttcattgaacccggtgaagtcaagactatgcaagttacccagctcagggaaggatgcccctttgattggctatattaaattatcatcattcaatcaaaatgcatcaggtaatatgttacaaattgttttgtcgatccatttcaatggctgataattgtttcgttgatcaactagagagaaaaagagagagagagagaacctgtgatctttcagatcaattgtgtactccatgaccatcataactataggaaggcacaattcagttttatgttgactcacatggaattgctctc

SEQ ID NO: 198699 - DNA, 1222 bp, Cannabis indica
ataagcaactaaatagttattttcattttaaaaaaggcgagaaaacatatgcttcacacatcttgaaatgattacattgaaaagtgggtcgcagtgatactatttttaaggtcaaaaactagcgatgtggttaaaattttattttaaagttgaaaataagagaaagaaagaatattttttttaaactagctgcaggggtcccagagttgggcaccagaaaggaaatcttggtttgatagatgtaacccctttcctggtcttcccttggccagtcttcccaaaagtgttttgaaggcatgcataatgaattttgtgctcttttttatatcgatacttgttgtatttatcttcagctgttgcaatgatttctactcagagcttctttttagtccccagatttcgggtgttgggatagggcaccttgcataaattaaaattctcaactaattaatggtccacgatcaacttagccttacgtaagttaaaagtagtcaccaagttgccaacgttcagctcctcctagtagctggcaaacactttggcgtgattcaaaaataaatatgtaggggttgtcatgtgcaatggaggaatcttaacccattttgtcaaaagatctgaacattcaaaagccttaaaccatgatggaaagaaaaacatatgacgatattccttaacattcttctaagatttaaaaggcattagggtttcgttagccgaatgcgcttgcaacttataaaaactgtcattaaacttgtcacccttcttggggacggatagtagttcatagaaatacaaaatttctgcggggccgggagtggcccaacccctagcagcataaaaaataaaaaggcctgagagtaggcggtatgcttgtgggataaggtgatatggggcgagtctgatgaaaactaaaaagtttataatgtaatcataaagtagtagcatggctcccgaaatgaagtgagtttggattcacactccaaagtcgttgaagttgtggttgggtgtttcctcatccctgggcagttggtggtaaactcctaaattggatggcttgatcccattcacggccacaatttttctccaactgatgagcacacgtcagggacgagtgcaactcatcagcctcccagtcattagagcgacacgagtacttcttgtaaaggtcaggaccttccataaccacgtctaggggggacaagtttttgagattccttggccg

SEQ ID NO: 198700 - DNA, 661 bp, Cannabis indica
ttaaaaaattctaaataatttactgtgtaaaaaataaaacaatttaaatactatattttttatgcaaatggaaaggaatgaattttttaaaatgtgtaaatagtattaaaataaaaagaatttcacattagctacaccagaacaacaatttttgaaacttactatgttgcttaaatcatatattataagaggctttatcttaaggtgaacagactcttaattatatgataaaatattaattaagaccccatgtgaccaaaataactcaaaaggcagtggggttagactttacataactacacttcaattttttttgcaacaaattctaaatatgctcaactcatccaattattcaactgagaaaatagacctgatctaagttatcattgattcaattttttttgaaagaagctatagttaattcaattaatgcattaaattttgctagttaagaagatgtaaattagttttgcttcttagttcagttcggtcctaattggatcacgctaaattcaaccatacataatacgctgatttttttttttttggaaagtaagaattattttattgcaacaaacttcagatataatttgtgttacaaaacttgtcatcaacttatgtttctatcttattttatgttaggcgtgttgatttatttttt

SEQ ID NO: 198701 - DNA, 2677 bp, Cannabis indica
ttctattattgcctgcttcagatgaagctagctgtgtttattgtaaaatttgggctagatacttggaaggaagctggtagtttgtcgttgcttcttcagcgagaaatttgaggtcatatttgaagcttaattttcttaaagttttgcatgttaacttcttaatattgttttcaaccagctttgtatcctgcagagtttctcattgtcagagacagccctcaaagaaatggtagatgaaggaacagaaaggacaatcattttcaaccccagagtttgcaatgacgtcgaacttgaagttgggaattgcattcgtatctactccccatggtacagtagtaaaattcaacatctttgttgtttattagtttattttatgagaagtttgaatctttctgttgacctgatatgtcttgctccatgctaggctggtagtgttcttaatgtatgcatttaaagtagttatggtttgattttttacttagttgtattttattaattccaataaaaatgggtaccaattttaatgttgaaacttttggacaggaaggaggtccaagcggccaacgacaaaaatattattttagctaattatttttccaccatatcggtcagttcaggtttctcaaaagaggtttgatttgcttttgtattgcatttccttaacataatatgatgaagacaaaacgaacagatgattagcaaaatctatttctttcagtttttcttaaaacaattattttcataacatacatgtaccttgtcttagaaaaatgtagctctattggttgggttgggtggataggttgtgtaatacattattcaaattcttgtttgttctctcattcttaaaaaatggaacctggaaatctgaatactggaactcttaatctggttaggtatttgttaatggttgattagctagtactcatttaaaaacttagtttttaatcttttagtttgtaaataattggtaggcctaccgaatttttgatccacctagatattgacctacttcaccacttgttcttggccttatatttattgtaaattgtagtgctgtcatagttgactaataactaattatggcttaagcctcaagataaccactttgaaatacaataattagaacttttatattattattattattagagtgtttttttaaagtcatataatatactagtttacacttctttgatttgcttaaatatcatgtttatgttattgggtgcttctataacttctataaaaaaagagtaataatgtaatccattcatcattcaaataattttaattatttttatttttattttatataacaatgtatattatagttatttaagatattcagaaaaatttttagaacttcaaaataatttatagtgcttaaaataaagtttaaactaattttttcaaacacagataataaaaaataaataggatttgtcccactttacattataaaccttataaagttttgtctcatgatatatatattttgaaatcatttcaagtattcttctttatttacattccccttattttctatacaatttgtcaatataacactagctttactaagttaaaagctaagttttaatctgataatagaattttgatgattggataaatgttatatttgatgtgatttataaaaaaaaattaatttggcgtagtaaagagtccaaacatacaaaaaaaaatgtataaataaaagtctaatagtaattatgagaatatgtatatagtggttttatggtactatattaccaagtgttttgtatatattaaattaaaaataaatagatgaacataatatttatctctcaaagtctatcaaagtatcttctagtcttttcgtatgttgtattatcgaaacaataatgacaaaattcacaccttgatttttcagatcttctatcacacacaagaactagtgtaggctaagataatagtgtatataaagttcttgtattctcaagacatgaacaagaacaatcttgttgtagtgatggaaagaattttttttttactagttaatcttttaggcattcagaaaagttacctacaatttttttttaaaactatatagaatttggtttatacaatatattaaataattcaataaatgttttatttaattaattatttaaatttaattttttttaaatcatatttaattatttgaataaataatagaattttttttatttttacacatcaaagcatttttttttaatatttttacagaaattcacatagagcaacttaatattttttttaatatttttagagaaacacatataacaactaacagagtaatttaacttgcaactaaaatctacacaacaactcacatagaaaccatcggagcaactgtaaatttgaaaaaaaaaaagtttaaaaaatggtatatgaggtaatttttctaaataatataactgaactctgttatagatatttatattctataactgattgagggaatctctcaaccacttgagagaatatcttaattacttttcaaatttaaatatttatcttttgaattacctaattaatctaaaaagacaatcatcggagatacctatattagtggtgcatgcactatgtctagacacaatgtatgtggcgcctccctgtggcttaattacgtctggggatcatggacctataa

SEQ ID NO: 198702 - DNA, 1934 bp, Cannabis indica
actagggcttagggttgaatcatcatattcgttaacaaaaatctaccttaatagtttggtgctttcattgagagcctacatgataaaagctcagaaaaatccctcctaaccaatgacaaaattttttctccatggctgataatggggaaaacgataacactcatcctgaagagactactcatcgtcctggaaaagagatgataggctcacaaaggccacacaattcacgaacaacacgttcgacacggtccacatgctgaaggaggagccaacgtgaaaccaatgctgaagaagatggttatatacctctgattgaggatgtttacgaccccaccagatacgtaccgttggtcgagttggaaaatcatcaactccgacgacatctggaggaggcaaaccaatgaaacgctgagttgaaacaggaggcggttgtagctagggtagcacaggaaaacgacgtacaaaaccaacctaatcctggagtgaggaggccacgaggcagacctcgcggctcacgaactaggttaaaggcaacatctcaagaggaccctcaaaatgctcaggaagaagaacctagggaaactaaggatgcccctaaagatgaataaccgaatgacgaggcacctcataaagaagtgcctcagagaccctggggatttacaacccaggggaatggaaactgtgatttcccagagtcctctagcagaaatgcgaatagaagggaaccccgaactagggaataggaaatcccttgtggtaacgagagagatcttgggactcaacctaggacaagtgggttgcccctaagacatcgtcagcgtccttctcgcactgatagagaaggggcacacacaaaccccagcaggggcatgtatcaactcattcccaaaggagaaggccagtacgtgacgaggcaagttctagctcgagacgtacaagatttcaagatcatagtggatatacgcgaggaggagatagaactcatcgcagtagtgatcaagagagtacgggaacaactagaatcgagggctactcaaggatgagatctataagtaattatgacccgcaacgactaaatcttgatgtgaaattgaaccagaagaagcctgacttacgtcaacaactcaatcaaaagaaagagaatcttatccaattgcgaatcattgagttggaggacaaattcaggagataccaagatagggaatatgggaaactgcctggttatgactcaaacaaagagcccaagcctttccatccaaacattatgagtaccgaattcccctagggatttaaaaacccccacatctcgtcatacgatgggactacagatttggtcgctaacctcaaaattttaacacaataatgcaagccagaaatgtttcgaataacttacaatatatatttttccctacctcgctagttggggcagcgagcagctagttcaacaaatttacacatcactcgatcacctcttacgaacacttgtctagagacttcaagaaacagttccaggtagcaagagataggcgacctgaagcgtcttctcttactaacataaagtagcaaccggacgagacacttaaggcctacctaatcatttcagtatagctgctgtaagggttagaaacttaaacgatagtgttaaatttactgctcttcaagtagggaatacgactgatcgttcgattgctggaggcgagctgtgggatgacttgcagggtcacccagtaaaaaacatcagcgagttcaatgagagagcttaggtatttgttcaaaaagaggaagtaaagaaagagatgaagttgttaaatattggctcaggaggtaaacccaacactgtctcgacaagcactgtctcgataaaggctgacaatctaggaggctcttttacaaagaggaaagatgagtcttaggagtcagccaaagataagaaa

SEQ ID NO: 198703 - DNA, 710 bp, Cannabis indica
gaggaggatgaagacaataattttttttgggacaaaccactatagtgatggtttaaaaccgcgactatataggccacagtttaaaatcatcaactatagtatagcccacggttttaaaccgtggcctatagtatcgactatagctgacagttttaaatcgtcgagaattcttttataccgatatttttttaccgtcgtctattctaccaagtattcgcgacgctcgtataggtgacaattttatagaccgtcgagaattctttactcgacggtgtaaaaatgtcgggaattccaggttttttagtagtgcgcgatcataagatgcgagatcggggagccgactgagcaattttgagttggtttattagttgtcctctcttttgagactttttttttttggtgggatttcacccttgctttatatagtattgcttatcaatcaaaatttttacttgttaaaaaactccttttagtgagaaaggttttgagcaaagtttgcttgaggatcagacagattatgagagactttgctgttggaagacacgacctgaagtctctctattttgctatcaaagctgagtagaagttcttggagttcttgccatgaggtttttgagcctggcttcgatttgaagcacaatggagagatagctgacatcaagaccagaaagcacattagtgataagttggtttttggtttattgcttgtt

SEQ ID NO: 198704 - DNA, 605 bp, Cannabis indica
ttttctatccagtttcgcttgttggtttttacgaagtctgtcatcctcgtgttacagcaacttagtacctcagctttttatttcttttagagaattttcgcctgtcttcagttagcaaattgtcgagatgctccttttctagacatgattattgatggcttgtcaatttaacatataacttaataactttggtgcattttcaggttctcttctgtagcacagagattggaagggcctcttttgttcgacagttggagccagattggcatatcgacacgaatcttgagatagtttcacagttagctgtataaattcgccatttttactcatttcattcatcaagtcccaccaaaatatctgttgattccaaagcttgtgaactaaatcttgtgtttgcttgtgacagagatttatcaagtacgagcttcacatctctcctaccagaactgaacggactgcttctaatgtgttcagctccccatccttagaacagttttttggatcagtttgatgcttttaaacaaataaaaatatgcaaatataattcataaacttttattaggtggttctttcctcccccatatgttttgtttttttaatctttt

SEQ ID NO: 198705 - DNA, 1404 bp, Cannabis indica
gattgtgataatgtgaataataactttcataagttaatttcttagaaaaggttttgtatttcttccttaaaacttggaatgttagtaatgatcacctcttaaaaactcgaattaattacctcactcaggaaattgctaatttatagattagggtacctcttaataaagaagataataacaaacttactaagctccagtccatgttagatactctgttatataaagaagaagtctattaggggcagcgtggtagaataaaatagcttaaagctgagaataaaaatactaaatatttccgtaagtattctatgtataggaagaaaaataatactattaagtatttaaaagatgatgtaatattgttgatcatcatgatggtattgtcacttttattactatttatttctcttaattttttttcctcttaaggttgtgatgttgatgcttttgcttcgatttttctcttctttgggtcctgatcttgaggacctgtatatcagcctccttgcccaggcttttactgctaatgaggttaggcagactatttctctgttgtctgaggataaggcaattggtttagatgctttaaaagcctttttttttttatcaaaagaattagtttgtcttaggggttgattttgctaatgcaatttcaaattgtcttaataagggtattgattttttagatgttaattcgactttaattgttatcatttcaccaaaaaaaaataacatgctaataccctgaaagattttaggcctattagtctttgtaccactttttataaagttatctaaaaaaattttagctaataggcttaagatggttctggccaagattatctccttttcaaagtgctttttatttttggtagggttatctatgataacatctttattgctaatgtgcttattcatgccattaataataaaaggattagtaagaggggctgggctgctttaaaattagacatggctaaggcttttaatagagtcaaatggaatttccttaaaaatatgatgtttcatttcaacttcctagttagctttgtctctctagttatgaaatgtctttctactactactatctctctattaatggtcaggtcaaggacagtgttaaacctactagaggttttaggctaggggatcccttatccccttatttactcattctttgttttaaaggactttctgctattctcagggatcatcaacataggggtctttttaagggtatttctatttccaaaagagctccttctataacccataattttttttgttgatgacaacattattttttgttatgctgaccaaaattcttgtgtcactctcaatgatgctcttagcatttattccaaaacttctagtcaggtcattaattttgccaaatcctccatt

SEQ ID NO: 198706 - DNA, 1086 bp, Cannabis indica
atttttaacaataataatattaaattacaacttaaattaaattaacacataacaatcttagtttaagtcatgtgtattttttttaaaaaataaatataccaataaaaaaataagatatgaataatgacttcatatttaacggctaattacctataaaatttctaaaatataacttagatattattaccgtcaaaaaattaaatttatgaatttatttgtaatcgagagttaaatttatatatttacgacgtaaattattctaactaatattaaaggagtctgaattacaatttcttaattaattttttcagtattcgttatagttataatattaattttgtaattttttctaaaaaaataaatttaatatacatgttaaaaaaaaatcaaatttatttttcacacttttaaattattttagaaaaaattataatttatatgaataatattataagtataataaatattactataaaataattctaacatatattgttctcttcttaatgttaattaataattaattattattggtttacgtgactcaatttgccaatttcgaaaccaaataacaaatggggaaaaatcatcctctttcaagtttcaactttagtttacctctcaccacttgccccaagttgataatgttttaccaaataaaaattatatgttgtttattatcatgcttcatttgtttgttgtatatataatataattatagtatagcctgacaattttgttacatgcttatctacattattattgtctctttctatttctttttttatttttaaatttcattacatagtgtgtatatatttgttaatgaaataaggaaatatattttgaaaaaaaaaaaatggattctctccataataaataaggaataacaaaaagtatgtgcccaaacttttacgtgcttatgatagaaaatttcaataataatttgatatttacaaaaataataaaattaattacatctttaccaatttttctaataatacttatcttaaagtatatgaaaattgatttttaatatttcttcaacattatcatcaaataatatttattacatttttttattat

SEQ ID NO: 198707 - DNA, 512 bp, Cannabis indica
gggtgcattatagaatttcccttgattatttatgtttttttttatacattgtcccatgttttgtaaaggtgaaatctgaatatatagattgtaccatgttcttttttgccttcagattttggagttagtttttaaaatttccagtgaatcaaatatacaatgtgtgtcaaaatacatgaattggcttctccttctccgtctccggcagtggatatcaacgacattaaccatgacatgaaagaagaattaggcgaatcgaacgactcttctaaagaccaaatgagcggtggaaagaaagtcggtgttgcgtttggagtaatcgcagttgcagccttttgtttggttggatcggaggatttgtttacaaaagacgtcaagataacattcgccgatctcagtgtgttacacagcgagaaaagaaatgctttgaacaattccattctttcgaggttacttgaatttttttacaaatttacagccattaccgtctcttttttcttctgtatgttttc

SEQ ID NO: 198708 - DNA, 622 bp, Cannabis indica
accaatttaattaactctaatatagtcaaaatgcacgtgtaaataataatctcgaaacatattacaaaattaatttcaattaagaatcatctagtcctagatctacaccccatgcattaatataaatattatatagaacattgtcgaatatgaacacattgtatattataattaaagaggtaagcttatttataaatttatatatatatatatatatatatgtgttaatggatagtgttatagtgctcgatttgaaagattaatattttcataaaagtaaggatatgtagtagcatatattattgtaacatgtgatatttttaagagtaatataataataataataataataattttctgtttaattaagttgtatagtctatatagtgtgttcttggttctgaagacatggcatgtatatgttttctagaaaaaggaaatatcaataaatatatatatatataatatccaaattactatagtggtttcatcattgttgatggaatattcaagaaggtccccaattaattaggccagtcatgcacaccccaagatatatatatatatatatatatgtatggatatcccccaatatctggtcactgaatatatatatatatat

SEQ ID NO: 198709 - DNA, 649 bp, Cannabis indica
atttaaataatatatgtataaatactattgattctttaaagtgaaagtaaataattagaaatataataacatataaatgttgatgggaaagagaaataagaaaaggacaaaagaaaatattaaaaaaaatgtatacaaaagcatattttcttggagtgagggttagctagtttagctaaggctattgaagcatcttagtgcatctccaatggtagcatttttttaaggatcctaaaaatctccacatcatctaaaaatataatattttattttatctctcttctacattatttttacactcttacttttaaaaacactccaatagtatagcacttttcaaaaatactataattaagatctcacacattaaaaattgtatatgtttcctcatttttagcaacaacaaatttttagttttaattttttattaaaaaattatgatagcattgatgttgtatagcatccccacaaattcctagaatgacattctttccactccaatagtataacatctaaacattttgccacatcatttatccacctaagcaagcatcttccttttttttaccattagatgctctgatggagaatggttttagaatttttagctatttaatttgagaaatgatagtaaatggtcccaaatcat

SEQ ID NO: 198710 - DNA, 537 bp, Cannabis indica
ttattatttctcttattaattatttaaaaattaagtttacaaacactccttattttatacagtggtattaattcaaacaaattaacaaaaggtatggctaattataggattttttatctgaattttgacatatactaaattatactttaaatttttcaccattaattaaaaactctcctaaactattgaaattgtaagattcaaagaattatgtctaatttcattcaaaattaataatgtgacgatgtctttgtatcaaattatgctccccgaattttaatatgtactgaatcatgtttctcgaattttgacatgtaccaaaaattgtacctcttgaattttcattcacatcaacttttcattggataaaagttcatgaattcaacaatctcaatagttaaaaaaaaattaacgattgaaaaattaattaaaggtgtattataatttagtacatgtcaaagtttataagagaaaatcataattaacctatatatgaatgtatgtgtatatataacttcttaccattgatattcccaa

SEQ ID NO: 198711 - DNA, 1586 bp, Cannabis indica
ggattacacctcatggtcattataaataatgtttgtcgggattcgttgacacttcgaccgtaccattaaggtttttggtgaaagcccatcgagcaacattataagcatcaaaattacaaagtctagaaataaaagcaaaagtacaacccagaaaactacacgagagtctattacaattcaaaatatagttgtcaatacgccaaaaggaggaagttccgatcaaagctttgacaacaatctcagagtcactctcgatcaacaaaaattggtgcttccacaccttagccgtttgaagggcgagaagacaagcctccacttcaccaatcagggaatcagcataggtaaaactcttggaagcaattcacaaaatagatcttgcatggtctcaagccaacgccacatcacacattgacccatgccccactttaacgtcacagttgatcttaatccaatcatcaggaggaggagaccaatgtagagtagtcttagcaggagcatgcaagagtaacgaggccccataatcttcataacaatgagtgatagagtcaatataatgtttgatgttattcagattattgttgtgtaccttgtcattacgagcaagccaaatggtgtccaccacaatagaagcaaagagaaacacttcttcaacaaccacacccttcgaatgtagacctcaaatgaattgcactcagtcccacatgcgccctcctgaatcaagcaccgaaataagaccccaaggggaggccctccaaagatgggaggcaaagtcacagtatagaaaaatgtgcttcatcgatttctcgccaaccccacatataagacaactagcgtcactaacttgcaatctcttggccaacatagagcggatcgagagggccttggaaagaatacaccaccacatgactttgtgtagctccaatactttacagttccaaagtttattctacatgataggagctacctcacaaggcggggcctggtcaatcgcttggactaagtaagcctttagtagtaaactgccctgaatgctcttttgtccaaatccacttatcatttccttgcttattgggtgtgcccgctttcaaaatgttattaaaagtcttagaatcgaacatgtgcctaagcttagaagtgtcccactcaccagaatccaagagaatgtatgcaatcctgtcaaccccacttgaccgattggccacataagtaagcacaaacttattaccatgaacaactcaagggtcttcttatatgtcaatataactattggttcaactaaatattaaatcacatataccactagtgcctaataacaactccctaacaaaaatgagttaagttaaatgtaacaaatgtataattcagatattgtggtcaatatcccattaaaaagtaaataaaggtttattattgttcaaaagtaaaataaaattaagaaaaaaaggtaaatactattttggatcatctgttttgcaaaaattattaatgggacattctattttgttaaatgacaaaatagaccatatattttttaaaatggtaaaaataagaccttgagctcaatttttaaaaatattattttttaa

SEQ ID NO: 198712 - DNA, 1388 bp, Cannabis indica
gaacacaagttaaacccctattacgtttcagctcaagatcaaataaccaatctacttctttcaattttctctaccgaatattctaaggataccaacatacttatgctacctgtaagaaataacagcctctactccatgttgtaactggctaaggacattcacataatcgtcttccgagtaatttacttcaatgaaaatggacaccacacccgccaaggcaagagaagataattaagttgttttaagccataatcctatgaaccacaatgctcagtaaaatgaattcaataatatcatgatttgtctaacatttaacattatctctgcatatgctaacaaaccaaatatctagttcacattcaagtatcctactaacacaaaagcaaatttcacaatatgggtttatcttattataaaaatttatcaacaaattacacattgacaattgacttattaactatcattccatcataggaggtggaagtaattataatatgttagttgattggaccaacaagcttgatattttaggttgagtttattatatgttaatgtggaagtgaagagtcattgtctaattgtgtagatggggccacagagttaggattatgagggcgagcaaggcaaagtaggaattcggggcatgcaaatcaaatattctagtcaacgagtaacaagcctatatatatataatcaataacaatccgttcttgcttttttgctaaaacaacttctaagttctaaccatgaatagaatattttcaaagaatcaacaaagcacaagacccagacaaaaaaaaataactaaatccaacatagtgcaaagtacatagacaaaacaaagatcgattggaaggataccttgtttctttttttgatcggataagggtttatttttatcaaagtcagtgttccacgtgctcttagcaactctccactctaggccccctttctctcttcccccacgccccctcctcctccttcttcaaaaggcaccttgtttcttaaaaggaggtttagaaccctaaaaagaactaataagaacacaaaaatgaaaatattagaactcaaattccttaatgatgatcttcaaataatgaaagagaactgaagtttgaaattttttaagttgaaagtgagtttttttagttgaaagtgaagttcttttgagctgaaagtgaagtttgatcttaaaaaccttcactttactaaatggggacataaatcaaaaagtttgcaaccggttacacttccaattctcaagtcaaatacccctccatttataaaataaaatattatataaaaataatatatggggtacctaatatcagcctttagatcaaaattgagacaatctaatggctataaacgtgtgcggcactagtcac

SEQ ID NO: 198713 - DNA, 1885 bp, Cannabis indica
gaagatgaaggatacgaatacaagtctatacacggaagcttgaggataaccaaaggttctttggtagtgatgaaaggtgaaaagatcaatggtttatacgctcttcaaggagaaattgtcccagctagagagacaagtatgctgaaagggatagaatcggatttgaagtttggcatcacaaacttggacatatcgacaaacaatgccttaaaaaactgcacaaacaaggtataattgaaaatttaaattcttgtgccttaccattttgtgaagctttgttttagagaaacaacataagctaaaattcactctggcaaggcacaaaacaaaaaagatactcggatatgtgcatgctgatctttggggaccatacaaggtgcctacccactctggtaagtaatattttctttcaatagttgatgaatatcgtaggtgtgtttggacctatttactatcaaccgagaatgagtgcctggaacaatttagagtttagaaaactcaggtggaaaaccaaacaaatcttaaaattaagaaccttaaggctgataatgggttggaattattaggcatagaactgtagtgaagagcccaacgcaaaatggtgttgctaaaaggatgaagtgaaccttcttgaacaaagttagatgtctattatttagtttttgattaaaaaaatccattttagggggaagctctagcaacaaaaacgtactttataattaggatcccaaatagagttataggcttgaaaaccccttatgaaatgtggtacaacagaactcccaacctaacgcatttaagaacattgagtgtacaccatatgtacacctatctattgataagcttgaacctaaatctgtgaagggaaatttcctaggttatgtcttaggaactaagcggtatagaatttacatttcaaggaaggggaccaaaggatgtgattgttaaaaatgttgtttttaatgagtttgaatatcctcacatgacctccaggaaatgtagtgtgtctccgtgtaatgcagaaaaaatagaaaataaagacactataagtgtggaaatagagtatggaacgaagctcgcgaaagaaggttcgcaggcggaagatagtgtggaactggaagacaatgcatagaggaagttgttacggagctgaaagataatgaaaaccaaatagaggtgctagaaggattcagagagacaggtctagaaggttatcagttggctagtgatagaaatcggagagagattcatcctctagcaaggtgttcgcggaagtagacataataacatttgcactggcggtagtacaacaaactgaaattgaagagcccagaagctatgaagaggcaaattcatgtggaaacaagtctaaatggcttcaggccatgggtgaggagatggattcactctggaagaataagacttgggtacttgtaccgaagttggagaataagaaaattgtggactacaaatggtttctcaatgcgaaaaagggaatcaatgagaatgaaccagtgaggtttaaagccaggctagtggctaaggattttactcaggtggaaggtatagactacacagaaatattctacctatagtaaagtacaagacaataaggttgatgttatccttggaaactcacttggagttcgaggttgaacaacttgatgttaagactgttttttatgaagagatctacatgaagcaatcacacggttaagtggaagggaaaggagttgaatttctgtgaaaacttaacagatccctctatggtttgaaataatccccaaggcaatggaataagagatttgaaacgtatatgcatcaaattgggtccaaacaatccgcatacaattactgcttacatttcaagaatctagagcaatct

SEQ ID NO: 198714 - DNA, 1799 bp, Cannabis indica
taaacgaaggaaaagggtcatccgaaagagaaaagccgaaaaataaattctttttgttgttttgcgtacttggcttggctcatcaacctttctatatagttttttaatagatttagatagaaaaagagaagcaaaagaacggaacggttttaaagcatatacttatctttagcattactcattcttagatgctcaaggaatttcagattgttgtttttggtgtacacccaaatgtaatattagtataggtgaagttgttcaagttcttaaactcagggttaagcaagggaagtcatgattctggcggctgattgaatgtgaaactctgtatcaatgcggtatattgcagagtctggctgctagtttgtattaaatgcggtcataacattaatgtaagctcaatcctatcctacgtgagagggtattagttgatattatgtgtattgtggctgtatattgcattatgactttggaacaaacaaactattggaagaagaaacctatattgcatgttgactttggagaaaacaaacatcaggaagaagaaaccaataaaggttttaggatccgaagtgtttaaaagtgagaaacaacatatagggaaaccgatatataattatctaggtgaaaaagttcttgtgcatagttttgtacacttttttttttgttcagtctactggtgtttaccaattaggtgtatcacaaaaaaatggggattgagacaaaaatattgtgcctttaatataacttaattccattttcgaattgggaaagagaaagaaaactctgtaggatttgatttgttaattatttgaggttgaggtgaactttagtatgtttgctgggagctttggtgttcatgaccttttggcttttgtttagttgcaatagtattatttgattccaagataagttcactttgttactctgaaaacttttggcaattagctccgatgctgttgttgaactgtatcataatttacctgttgacaactattgacgttgttgagtctttcttgctaattggcagttgaaaaaaatatcaaatctgttttattatcttatgtctttctctggcttgctgaatttttgagttccataattatgatgtattttcttataataaggcattatttgctatttttctaaagtgccatagttttttttttttctcttttgcctattagtacttttgttttctacttttatactaggaagtatttacatacgctagcaaaatccatgcagatctcaactatatggaaacattcctataaaagtggcgagtggaaaccttgtacaaacagatcttctggaggtatgtgttaaagcctttttttctagtctagaaaaattgatggtgtttctatgtcgtgttatttgcttattttattatgtttgcaccgtgcaaacatttggctagaatagtacttctagttccttcatgaagatccattttgactgctccatagaggccacgtatcacagtaacccctgttctacattaagtacatttatacgttctattggttgttgggtccacgtatacaaattattatggtcttggaatgtgtttttagaagacgaagacttccgcttcatgataccatttggaacttttggtttgttagtgattgttgttaaaatctatagcacttatatgacattctgcaggtagtgtgagcatgctgatattgctttctacttgaaccctcttctacgaccctctatggttaaatgacatcatgtgtgttctttaccttttccgccttttatattatgtatgggtgtgcgtcact

SEQ ID NO: 198715 - DNA, 2664 bp, Cannabis indica
ttttgtacaagtaacactaatcccgtttttaatgttactgcttcacatggaaatactctgagggatgttcatcttgaaaccacagcttctccccaatgtaatatgcctgctactcaaaatgaaagatcagttgccacgaatactactgctgccacaaatgctactgttgccaatgaacaaactcctattcctgctgtgcctgttgaaccaattcaacctatctctcaaccaaatatcagccaaacaacacaacaacctgagaactcaaacaatgctttacacacccaacactagtcaaatttgccacctgataatcacacagaactcatgccatgacaactcggtccctaaacggaataagaaagccaaaagtttattgtgctacaaaacatcctttacctgaagcattattgccaactgaacctaagtcagtaaaggaagccctcaaagatccaaaatggcatgcatcaatggcatcagaaaataaagctgttaagaaagctagaacttggactttagttctaagaactgatgatatgcaggtcattagtaacaagtggattttttgagttaaactcaatgcggatggatctcttgatcgatgtaagtctcgattagtggctagaggatacttacaacttccagggattgactatgaagaaacattctccccagttgtcaagcctgtaacagttcggactgtgctttcattggcagtttctaacaattggaaggttactcaacttgatgtgagtaatgcttttctaaattggactctaaatgaagtggtgtatatgcaacaacctcctgggtttgaagatgagaaacatccagattatgtgtgtttactacacaaggcaatatacggattaaaacaggcacctcgtgcttggaatgacaaattaaaatagagtttggagctgatggggtttaagtcttcacgagcagatacctccctattcatacatggttcaggacacaatttgattttgttacttgtatatgtcgatgacacattagttactggaccaaaccaggagctgatttccaaattggtcactaatctcaacactcaattctctcttaaggacttgggggaagtccattactttctcggggttgggagagtaagatctgaaactggaatgcatctatctcaatctaagtatattactgatatcctactcaaggttcatatgggaggtgctaaaccttgtcctaatccgagtaactctactttgaaattgagtttaaccgagggagaaccatttgaagatccaactttgtacagaagtactattggtgcactacaatatcttagttttaccatgcccgatgttgcattaattgtaaataaacggagtcaatttctcaaagcacccactgtggttcactgggaagcatgcaagaaacttctaagatatttgaaaggcactataagtgagggactcatccttaaaccagaaccaaatgcttcgattgaatgctattcagatgccgattgggcaagatatatagatgaccggaggagtacaagaggctatgtggtgttcttagggagaaatctaatatcgtagtctgataaaaagcagcatgtggtagctcgttcaagtactgaaagtgaattctgagctttagcaaatgttgcagtagaggtaaaatggatagggtcactcctaaatgagcttcaagtgcatcaacttcaatctcccataattgggtagataatcaaagtgcagctacactggctgctaatccggtgtttcatgctagatcaaagcatattgaacttcacttacattttgttagagatcagattttagcaaaacaacttcaagttcggtatgttcctgcattgaatcaagtagctgatgtgcttactaaatccctctcaactgacagatttttttatctaaagcccaaacttcaaatggctcttaccccttttcgtttgagggggaatgttagtgttgaaagttagttaagctgttagttaggacttttctgttaagtgttggttatttctatttcggtcagttatgttagttgtactattgtctttaattcttgaatataaataaaggcatattaatgagagggtgtagcttttgctgcatcattactcttcttttaaagaaactctgtttccttcttccttggtgctctgcacctttcttgctagtcttaacatgggatattgttattgtataatcaaaaagtatgcatacatgtacatttatttatatatatataaattacttccacacatccagttccatcatcaaatatgtataaccaaatgcagcttactgaaatcttatgagttttcatgactcaatagtgagatgtaaagaattttgtatttccaaaagttagttgaatgatttaggccattcaaacccgcattgcacacttcccttaccacacaaactccaattttgtatttaccaaagtatattattattttattaaaaaaatatagccgaaatttttaattagtcaagtctgaaaacttactgcttggaattgaaaagggccacataatcaacattagtgattgtaatttattataatatccaacaaagagataaagttagataagaactgagtatggatctctccatgattttcacagaattaactataaaagatatgttgcatatt

SEQ ID NO: 198716 - DNA, 726 bp, Cannabis indica
aaaataaattattattattattttatatatgtcttcaataacaaattataaaataaataaaataataaataataaattacagaaaaaaaaaattgtatttataaaaatgtttaattttattttacattgtatttagaaaaaatatatatatataaatggagtatacatgtaatatattaagttttgaaatataattatattatgtgtattaaatttttaaattattattttctttacattaaaatattatttgtatatataatttttaattttttttttataaatatatgtgaattagattggatcggttacttttacgtattaattaacattcaatccgcacaagtgcagattttgaatttttcaatccgcacaggtgtaaatatctactttgtgaattatattagattggaacgtagatattgaattagatcaactattttatgaacacccctaaaagtctgatgatgctattatatatggttttaatatatttacattaataagacaatattatctaataagtaaagattgaaataatttattaaaactaaaatataaataaaagatattataattattagatgaataataattgaataaaaagatcaaaatagataatatttagagtattttacatttgtatatttatttggtcatctaatttacaaaactcatgattgttgtatttggaaaacactgtgttgcggattaatagtacctgat

SEQ ID NO: 198717 - DNA, 586 bp, Cannabis indica
ctaaagaaatggaagaaatcattttaaagatgtataacctttatagcaaattgatcttgctagtaattaatggctttaagtatagtttttctaatttgttccaaactcctttcgacgtcttctctgcaatgaattttcttcgagcactgtttaatagatacacgatgatcatgtagtatgccatctcctccatttttttatttttcctatggtttcttctcggctgaaagtttctcatctccaagaaccttggataccttttggtgcactaggatccctttcaaactttctctccatagtgcaaagtctcatgttccattgaatttctccaattcaaaacttgacattgatgacattaaagttttttcaacaattacagcgaaaagaatcctaattctgcattcttgatcgattaccaagctcttatttgtggagaaaatacaactaaagcactacaagaataacctacaatagcggcggtaacattagcggcggagctcctccgccgctaataatggcggtattagcggcggaggccctctgtggccgctattcgggggctgattaattttttttaaaaaaaaat

SEQ ID NO: 198718 - DNA, 909 bp, Cannabis indica
taagaggaagggatgatattgggaattattttcaagatcggttcaaggctattttcaattcctctaatcctcagatagacgctgatctggatactctgatttctgagaaagtgacggagagggagaatgaagagatttgtcgaatccctggtaatggcgagatcaaagatgtggtgtttaaactacaccccctcaaagccccagggctagacggattttcaggtatcttctttagaaaatactggactatagttggtgattcggtttgtaagatggtgcaacaattctttatgtctgggcaaatgatggaaagagttaatgagacttttattagtctgatacccaagactgctaatgctgccacctttgatcaatttagacctataagtctgtgcaattttgggtataaagtaatctctcgtatcctaacggatcgtctagtgtctccctttcaatcggctttcatccctggctgatggattgtggagtgttctcttatggctcaggaagttctacattccatgcaaggcaagaaaggaaaagtgggggtaatggttgttaagactgatatgaacaaagcttacgatcgtctcgaatggggttttcttttgcgggtttttaaagcgaatggtttctgtaacaaggcttgtacccttctgatgcaatgtattacgactgttagttgttctattctgcttaatggtgctcccttggctcctttcaatcctaagcgaggccttcgtcaaggagacccgttatcgcctttcttgttcatcctttgtagtgaagttttatctaaacttattctccgagctgaaaagaataatgatttaaatggtgttcatacgaaaagaaatgctactcccattacacatctcctctataccgacgattccatttttttctgta

SEQ ID NO: 198719 - DNA, 1948 bp, Cannabis indica
ttagtcacaagatcagcagcctcaaaagaagatgctgaggccccatttaaaacacgactccgcttgagcattttcctcactgacattgattcactagggcgtttaggaaagacatttggagagatattctcttggttcatagcagtagtagcacaaatgttgacagaatggaaggtaggtggatgtggcattggtgtatgaagtggagttgaggtctgagatggtaaaagagtgttgtgagatggtgggtaagtagcaaaaacattacatggcataggattggtggatacatagtcaatgtcatgcatatagacatttgaaaggtcaacaaccgagtgtgtagaagctgtagtagaagtggtattagtggcagtgggggtggtgttggagacatgagatgctttgtcttttgaatggtgatttatgtggttgagagcagcaggagtaggtgggatagtagtgacacaggaggcagattgatggagtggatgagatgacgatatacagccagtatttagtgtaaattgtggaggggaaggaggttggaggctggtatttgctagagattgcaaaatgtgatctgggttgtgaatattggtctggccgtggtgtgaaaggtgtgtaggaatggtgtgagaagattctccatggtgaagaattctaggctgtggaggggcacgggaagggggaatgggcagtgaggaagtaagtgtgtttcttgccaatcgtgtgagaaacggccaggcattggccttagaaaagtcggtgcgataacggtcataattatttgttgggagtttagaacctttcagccaaggtccatattgaaagtcatcatcgttgcctctatccattctctccatgaaagcaatacatcgctcaaaaggatggcccaaacatccgcattcgaaacaaaattcaggaagtcgttcataacggaaatcgacccaaaactcatccttaattttcggtagtttaatcatttggccacgcataagtggcttggtaacttggagtttaacccggatcctcagaaatggaccccaaccttcattagtagagtcatcataaacctctagaaattctcctatgatattaccaagcgcttcagcaagaaacctagacttactcaagaatggtagacgatatatttgcacccaaaaaggagtataaatcagattttcctttgtgacattttgcagagcatctggcgcaagaaatatgattaaatggttctgaaagtgccatggttctttggcgagcacacgacgcttatctccttcgcagccaaatcgaatgtgaaataagccatcttctcccttgtattcagtaatcgtaacggggtatcgaccttgccaatggccagacatttggtcaatgaagcctggttgtaaacattctggcttgtgagaacccttgccaaaagggcaaaacctggttggagatcagatgattgcagtgctgcaacttcagggagagtaagaatagaactttcctcatcagtgagggatagtgtagagtgaagattgtccattacagtattcatcacaaagaaaaagggataatttagtgcaagaggaagaagccggcgatggaggatgatgaaggaaacattggagggaacagttatcttcaaaggtgattttgaaaatagatgaataaaccagttgaaagagaaaaaaccgttaaaaaaaaactttaaacttccacagaccccaaaagggcaccaatatatcaacaatctttgtaacataatttgtttaaaatttcatatttaatacttaaaagttataacaataataatttatgtattattaccattaaaaataaacttaagtatttatttataattgaaaattaaactttaatatttataacttaaattattcgtgcacatgatactggcaaaaatattaattattttatttagaagaaaataaaaattata

SEQ ID NO: 198720 - DNA, 872 bp, Cannabis indica
tttgccatgaatgaaggaatgaagaaaaatactttggttagtctacaagaatcaaagtaatggaattattcttatcttttttatatataattttagtaaattgtatatgcaaacttttattaattaacaagaatctgaatacaatatagcatgtaataaattaaaaaaatatatatatatttttaattatacctcttatattttcatatagttttccacatttaattttttttatcctaaacatcattatgtaccatttaattagtataatttaatatctaattttttaaattttttttattctattcattttacatgaatgtttggaccataaataatgtgtaacatcaatcactcgatgcgaaatacaataatttgtacaatttaatttttcgatttattttcacatcgagttaaacatagttatttcaattttctcttattttcccattttaaattttcaaatatctcttacttttatattctaccaaacaaagagttaattaaaatgccaaattgagaatattttttatttttttaaaaatttagcaataaaatgtaaattggataagtgggagaataaagttgtggaagagttgagatatggagaagattgatagatacctcattaaagtgagaatgaaagtttccatcaaagagtgtcaccactcataaaataaataaataattaaataaataaatactcacaattctttctttttctttttggtcactgaatcttttccattaatattattataccttatacttataaataaataaataaatatgtatctatacataagtataattgactaaaaagcattaatattctctcattctttttttttgggcttttttttttagtatat

SEQ ID NO: 198721 - DNA, 832 bp, Cannabis indica
aaaaaaaaataggccagtagtacgaaaattaatttagaaatgtaaacaattcattaaaaaaaaaaaattgtcctatatgttttgtttgtcctaatgtaaaccataggaccacatataagttgggccagaaatggacatgcaaaatgctgtggaaaccaactaacctgtctgcctaaagtgatgactgttccaattcaaagtctacaactcctaattaataaactatagtactccacaattttatttaattttttaagtaacagaactgagaaattggctaaaagaaaatgtaaattctattaaaactcaaaatattgtaacctttattgcacaaattacgatttttttttttttgaaaggacaaattacgaattaaagcggtgaaattctactattttatccatatttacaaaaaataaaactctaccagtgtgatgtggagtttttttataaaattattattatttaaaaaataaattattctatttagaattgttcataaaatatttagtctaatctaattcaatttgtagattaaattaaattgaaaaatccaaattagatattaattgccatataaaagtaattgattcaattttaatttatctatatttttaggataacttagttttatataagtcacacagcaatgattcacattttgaccttgtatatcttttggttagacaatttagtttatttgattggatatccctttacatcgacgttctgtcagatcactttaaaaaaaataaaaacaaattaattattatattgtgtaatttttaataactacactttcttctaactacatattgttaaattttatatt

SEQ ID NO: 198722 - DNA, 973 bp, Cannabis indica
ttgattttggttgctgcattgtgctcttgattgtgttcgttgagagtgattcattcactacatatatagtttagcttatgtgcaccagcacaataatgaaaagagactctaggatattacaatcaataattcaaaaacagtacgtccatgattgctacttttaataaaaactcgattaatttgttaaaaagttaatatatacgaatagtaatatataaaaattaacatgagtactatataaaacggtaatgggtcccaaatcagaaactaaatcatctagaagtcccaaaaaataaaatttgtcatcatcaagagaggcccaaagaaaatactattaatattgaaaactaactttatatataatatacacatagcatagggaaactaagggaagttaccatgccatccaagaataatatatataggccataaatatatgacggtgatacatatatacaataatataaacaaaaaaatatgtataatattgataataataataataataataaaaaatatggttcagattagatttgggaattattatttttaattggacgacattgatagacagtgattaatattattcaagattctgtatttgttgccctaatacacgaaaaagacacatctataccagtgcagagcagctgagacccatatttataatatatatgtatttttgctgttggatcgagcctgctcaactagatctatatataagattatgtactaccaaaaaataaaaaaataaataaaaatgtaatcttttttgaaatgtaaaataaaataaaagattaattagtagtagtgcatgacagaagctagcatggtggggtagctcatgtgattatgggaccaatattggcctcacatgcaccacctccacttctctatgtatatttacatagatctcttctcttttagatttataacgtgatatgtgtcataattatatataactataaaatta

SEQ ID NO: 198723 - DNA, 880 bp, Cannabis indica
tcttaaatatgctacccaatcgatcctcgtgcaggctgttattcattgaatttgactttctactaaatgaatgatagagagctagaaaatatgggagttttatctgcaacttataaattacattcaattttaataatttttattttataaaaatatatatttttattcttatatgaaatatgtatataaaaaatatgcttataaaataatagaaataaaataaaaaattatattagaaaaaattaaaaaaaatgtgtaaaaaaaatataactaactattcatattaaaaaaataatgaaaaaaaaaatcataaaataattaaaaataatttttaaaaattaatttaaaaattactagcccttctagtctcaatttctaaatttagttttaatcaaaattattaacgtcaaaaaactgagtggaatcattgattgctaccgctaataataataataataataataatgtgataaattgtgttaaatttgtttggacaggtgatgttctatgtgggagtgaatctggaggaaagttgcacctgggcattctacaagaatggttcggcatacattggtggaacactcgtgcttatgcacttctttttgttgccctcttcctcattttaccactggttatgctaccacgagtaggtcagcaagcaacattacaactcttttcgttttcgcatttctacaaacaccttaactccaacgtcaagtaaatttttttaatcagattcactcaggcacagttcagcgatatcgattcttttagctgtggcttttgtctcatacctctgccatggcgattaacgcagtatccaaggcaaaaagtcacaaaaatgagattgtttccggactttgctaatcaaatttcaata

SEQ ID NO: 198724 - DNA, 1808 bp, Cannabis indica
aatttatagtgtacaaaaataggtttgattgttttttgaacacgcatgataatatggaacattacgaactctgttttcagtgctgtaagctattctgtaaattttttaaaaattcataggtatgatattttaactataataaatacttctatagaaaaactaaaaaaaaaacaatattctattaaatgacttcaggcacaaaaattaactaggaggttgtaattaacactaatctttaaaaaatactttatatttattaaatattttttagtttcataattttatgttaacaaatctcatgaatagtgtttattatgtttttctacacgtcacaaaataaagcgttttttttaggaaaaaaataaaattatcaaatgcatataaatttatatttttttaaaaaaaaaatatacataaaaactaaaaaattttgtacaacataatttttaatatacttatgattataacaaataatattataacattattatcattataattaaaattttaataattcacagtactttaaaatttataatttactacactgtaatgaccgcatatttagacataaaaattaacaacttattagttatttaattattgttttatggttatatatgagcattagtacaaaataagatctactgtcagaaatagatatttgtaatatagtttctcaatcatggagattttattatattctaggtgtttacaagaaaactagcagtgatgatgtggacatcactttttgacacgtgggaagaaagaaaatatcccggagttgagtagtcctgactcatagcagtccaccggggagaagtcttagttctgcgctcaggttgactctgagaactccagaataggtgtttggatccctcaccaagttgtttccaactcaccattttcaagtattctaaactaagaagacaagaagaatccaagtcctggaaactaaaaagtgacaaaacagcacttcgaaagtcaacccgggcgcctagagttttcacacagcgcccaagttgaaattctaactagggtttcaattttcgagtctgtcttagtgaaaatagctcaaagtttgtactttgacataaataagacatgtcaagaacatatttgagacatcggaatcagaatcgtaacactttcaattttgagcacctaaggcaccaggcgcttagagcacctagtgcacccagctcccaagttgatctattgtcaacttggggcgcttccaatcacaatattgaagaagtacatcgaacattttattcttctccatccaaaaataagaatcaaatgctttcagaaaagaaacgaatcgaattagaaactaaaattggaacctaacacttaaattgacctcggcgctggcccaacatttaagttgacacgttgtgagcctaagccatttctaacaacaattcgaaagaggtcttccacgcatattctgcattttcatcgatgattaagatttgggtgcaaatgtattagacataaaactagcattccatctaccaccctttaggagcacgagtaacacattatattcttttttggaaaaaggacaacgatattattcttttgaaaaaagtaacaaaaaatgaaacaccaaccaaaccattcactagcatacaacaaagtatttttttatttttttggcaatgaacacaatttcatttactataaaacgaagttgatacgccttatctctccctcatacctcttcttccaagtcccatttttacatccacattctttcgttcgtcgaccacaacattatggctctcgaggttgctgtcaag

SEQ ID NO: 198725 - DNA, 1835 bp, Cannabis indica
agagagaaaaataaaataacaaatgtattctctcaactctaaaatctaatacctcttttgtattacaagtgactcctatttatagagccaaaattacccctaaaactaatattttcgtgttacacttagtggtgaaaatggctaaatgcatgctaaagtggaatcatgtcttctgcttgtcaagtggtgtggtccacgattattggcaggcgagtagttccacgtaaagaatagcagtagttgtgggcggttacttgcgtcagtgtcttggagaacaatatgagatgtgagccttctatatgaatgatgggctgttatatgtgaatgatgagctttttttaatgagccttagcataatgaaaaatcgatcttcaagtgctttaaattaatgggttttttaaaacaattaggccaagacccaacatgcacatatcatatatatgtaatacgttgggcactcaacatataaatatacttctcaaattgcaagtggattcgttgggtcattcaactttcaattggctttgaaacccaattttcatttgtaacactttacacaaatctgaaaaataacacaaaattaaactaaattaaatatttccaattgaaataaatttaccattaaaaataaggaatatttaatttatattaattaaaatgtatcaatttgaacctttatcaatgtggaatgggaaaaccaagtcggtcaaaaatgttatcgcatttgctaattgtgatcttgaacaatggacttttgctcaagaaaaaactttcaccccctcttcctttttgatgcatagtggagaaggggatgagcaatgatgtgctccagaagtaaataaactcaagattaatgtggatgcaacaccatttgcggatagaaacaagtttggttatggctgggttctcgggattctaggggtcaagtcttgcaggcgagaacggggtcttggaacgggtgtgtcaatccggccttggctgaggctttttgtgtaaaagaggtgttaagttggataaaagagtccaagctttctcatgtcactgtagaatcagatagcctcttaactgttcaagctgtctgtagatcggtgaacacgaactctcctttcggttgttgcattgcagactgcaagagatttatttctgagttaaatcatgtttgtttacgctttgttaaacgttctgctaaccgtgtggctcatggaattgcccgagtctcatggttatatgctcagcgtagttattcggttgacactattccgaataacattagtgatgtaattgtacaagaattgttttaaataaaatttcaacttttattcaaaaaaaaaaaaaacattttaatcgagtagtgtttgggttcccaagagtcgagtaaggtaacattcactataaaaacatttcaattacattcactttttcaaatcaaacaacattatctgaaatgactttacataagatttacctaactcttgaatacaattaagaacacagatctaagcacacttagatccaagaagacaagttgcacttaattccaccaagctaaaatccctctagcagattagtctgaactctcttcagacattgcagattcacactctttcttcaacctctgaagatccaatgaattactatctacaagtcataatcaaagaaacacaaaaaagtattttgccctaccagagcaagaatcactagaagattctatcaaaaatgagagttagttagaaaaattaatattggcttagtatataccatactttgaaaaatccgactcagctaactaactcaacaaatcaagccagctagcgccaactgaactgaataaaaga

SEQ ID NO: 198726 - DNA, 1270 bp, Cannabis indica
gaatcagagcaagcagtaggcccgggccaatgtttgctcattctcagactccctaggaaacaaccactactacagtaggtgctgctagatcacttgcatccattacacagtcaacttacacacaacccttcaacacactaaatcaacctttccctctgaaatttgattgaaagaactatgttctttcgaagacaatggtctccatggtcatcacgagacatcgtcttgatggatttgttaatggcaatcgaccatgctcagtaaagttcattccagcacaaccaatagaaggggaacctaggttcggtctcaccatcaatctagagaatgaaaactggatagtcagtgattagttgctaatgggctggttatacagctctacgatagaagggatagcaactgaagtggtgggatgtgactctgctgctgctctatagagagctcttgaaaatctctatggagctcactcaaaatctcaaacggatgatactcgcaccttgattaaagaactagaaaagcttcaacatcaatagaagactatctaaagtagaagaaggctttgtcagactctttagccttagctggttagccatagccagaaaattaactcatttctaatgtcacctcttggttagatattgagtacctacccattgtgcttcaaatcgaagctcaatcctcaacaacatggaaagagctacaagggtatagcattttataacaagaaggagaggcttcaaaacctcagtctcaacagcaacaacaaattaacacattcttctgctactctaaatgctaatctcgccaatcgctattttcctaataacagaggacgaggtagcagctcctactcaaatcaagggaatcatcatcaacatcagaatcagcaagaggtggttgaggcaattataatcatggatatggcaacaatagtggaagaggttgtgatggtcgttcaaatggacccaaaccaacctgtcaagtctgtgggtgttatggccactctgctgctatctattacaacagatacgatgaaccctatatgggatcagatccaaaacttggtggccaaacaagtcaaaaatcaagccaaccaccagcagccttcacagttacaccagaagttgtggacagtgatgcatggtttgtggatagtgcggcaagcaatcatgtgattgttgatgaaaacaatatgctgcataaatgggagtatggtggtaaggaaaatctgaccattggtgatggtaataataaactacatatatctcat

SEQ ID NO: 198727 - DNA, 837 bp, Cannabis indica
gtggagggatgtaatgtgatttctctcagtgtgagacatttcttttatattcttagacatatctgattgtgtactactgactattcaatcaatcaaattcatgattcattcattttcaagctaagtttattcttgtcttgtttcaattaagttcaaattttgattttgtgattggttctagtttgaattatattttcttgaatattgttactgctgtaacaatcaggttttgaggatgatctttcaccacagtggagaactctaaaaagcttagaattcttgatattcgattgccttccaaacttggcgagtcttcctaagggactacaacatgtagtcagcttgaaagaattccaactgtggcgctgtggtactgtggaaatccctgaatcgataggccaactccataatttaagcaaacttatgatttgtttgtcctaatttgaaatcactaccaaaagcatttggtaagcttcaatctgtagagacactagagattgaggagtgtgacatgttattaaggagatgtgaaaaagatattggtacagattggaagaagatgagtttcatcccaaatctacatttggatctgatttatgacaaataatacaatcactcccttgtaattgttcatcagctacaaaatatcattcaattactacattttgcaattctatctatttagtaagtgaaactgtggagaattatattagttctcacaactcactaatatgagtattatctttgaattataaggcagtgagtttgtgttggtgtcttactcccaaacatgagatttggaattgaaatgagaaagcttgacaacaccttatggta

SEQ ID NO: 198728 - DNA, 560 bp, Cannabis indica
ttgaacttagaatttaattatacgtactattatttttattaaaggccaaatttttaagattagaacagggtctctaaaatatttaagacggtcgctcatcttagtacttattacttgtagcttctagtagtctccatctcccatgtacaatattcaagaactatcaaagaaattaacacatttctaaaattagattgaaaccaattttttttgatgatattattgatatttatatatatatatatatgagggtttgattaaattttggattattgagaatttgggtgaggaaacatcttagaaacttctcaattttgggagcctttctacttagtttgctgcctttacaagcttcgaagggctaaaactaattataattgatgagttattttcttttataataattgtaataagtaatgtttttaattgctcaattgacatgaaaggttgtattaattaagattgtgtgcaaagttagtttaaagtagcattaataataataataatactgataaataagtaataagtaagtcctattaaatgattaaaaaaccatagtc

SEQ ID NO: 198729 - DNA, 968 bp, Cannabis indica
ttaggtatagactatttagactgattatgtctaacaatcaaagtgaaaagagatcaaaattttaggaaaacatcaatttttcttaaagccacattttctgttttggaaaaaaaaaattacaatttcatacaaaaatattatgttatgtattgagcccctgcttattaaaattttcacatgttattatctttgttatttttttatctttatttctcaagagttttttgttttggatttataatatagtgcttacctaataatcaaaatcccgttgaaaaagatattttaaatttgtcaactaattaaaaaaaaaaaagaaaattgcataaattgttatttttggtaaattttttgttagataaaatttaaaactatcaagaagttacatgaagttacatgaaagtaacaggaaaactacctcaccattcaaaacaacaacaaaaacaatatcaaaataacaataaaataacaagagtataaaattaaaatacatcaaaagaccgtattttctgtaaatgaaatcttaaaaactataataatatttaacatttcatacaaccatattttttttttattttttgtgtgtgtatttatgaatttatcccttaaaaaatgtgttgtgacagtggctttggagcattttatttttttgggtttccactcctatttttgaaccaacagatccaaaaaccacttatgatgtttattaactgtatattgtttatataggcccaaaaattggatagaataattttgttgaaaaaaaaatagggataattatacaaaacactattttctataaatttttttatatttttaagtttattttttttttatatttttacgagtttttataaaaataacaagaaaattacataaaagtaacacgaaaataatatcaaaacaataacaacaaattaataagagtacaacataaactacatcaaagaccgtatcttctgtaaata

SEQ ID NO: 198730 - DNA, 988 bp, Cannabis indica
ctaaaaacaccttaaaatttaatcccatagttatagaaaaataccataaaagagaatacgttttgttaaacacaaaaattaaaattaaattaaataaaaaattaaattcaaaacctaaaaattactgagaacataaatccctaaccccctaaacttcacattcttctccaccttcacttctgcaaaccagaagtggtttcatgttcttctctcttctgtgattcaaggggtcagcttcatcccttatcgtcttcttggaaccaggagtcatcgttcttctccctcatcggcgtcggcctgtgagcactcatcatcgacgtcttcttcctcctcaccatcggagtagtcctatttcaccatagtgcatcctccttttcccctcttctcgacagcctacaaaccaaaggcatgctttgatcttctttatgtctcttcttgttcccaaatcgtaggaagaccaccaatccctcattagagtttgtggtttgtgcttttatttctaggtttgagtttgtatttatgtttctagatttgtggttttagtttgggcatggagttaattgaaatttagtctacctcatttaagggtttcaaatcaaagttttggcttagatctaattgtttaatttgtattttgtttgtaatatttagttttgattcaggatgaaattttgttcttgtcaaattatgggtttgtttaggtttagtgtaaataaatttatataatttatgaatattttgttgaagaatttgggtttgtttagatttaataattcaaaaaataataattttttttttatcttaatttgttaaaaatctgaatttagtttgtttaactagttttaatttttcaattggagtttgttttttaatttagtgaaaaagcaatggaaaagaattaaaggttagaaaataaaaattaaattacatttagtttttatttatttttaataattttcaaacatttaaataatatttaaataataaa

SEQ ID NO: 198731 - DNA, 1995 bp, Cannabis indica
gtagtaattaaagtggttgttatttttttttttatatatatatatttatataatggtcaattgattttcgaattataactataaaaattgaaaatcgaattctgaatttttcttgtgtaaaaaatcgactaaaccaactgttgcacacccctaacttcaaaaggagcagctgcccctctcaagtgacctaaacagatgaattctcccttctcattaatcaatttaatattgaggttgatatttttatttttgaagtaacatacgcaccacaataataaatatgttagttagatttgttaaaataaaattaggaggtcaagttcaaatttctctaaaaaaaaaattatataaatatatattaatttttgtttatcatgtattaaatcattcttttgctatcattttttgaattccaaaattcacaaagtaaaaaaaatcaaagtgctataagcaaaataataaggccatttaggatataaatagcctaaaaatcattttgctatttataagcaaaatgatataaatatatatattcatttttatttatcatgtattaaattgattattttagatttttgttccttcaactatgatcttattgtgcccttgattttttctacccattaaaaatagtctccaaactattcacagtattagcaaagtagtccttctatcaagttttatcatatgtagcaaacaaaataatgatgtgattatttagattataatcacgcaatgccacatgtgtgattaatttgaaaataaataatttaacaatctttaatttgtaactacataatttttttaattattaatggatttttagtttaataatattttttaataaattagtttaatacgttttgaaagatacatatattagtatttttttttgttttaaattacacacgtagcgctaataggacagtggtacacacatatacatcatcatcttgcttgccacgtgtaaaaaaaattgacattaagaccactttttttctcctcgttcaagaatctcttcccttctgccacttcgttttaaagggtaagtaggactaattcaatcacgttttcattcatttgaaatatgagctcttctattttatttttatttatgttaacttttttttttttctttttttccatcattctctattaagtgctataagtttaatcttgtagaatttaacttattttctcattgagcgaaaaatacaaaataagtcaaattgatttttcgatcaaaaaaacatggcaaatagttcgataactacttttaacaagctaaacaattcacaacagtggataatttgagatcataattcaagatgcaaaaatcttaaatagccaaataataatggtcataggcaatactatatctttccggatgtccctaagttcaaataatgtcaaagaaaaagctaaataataattaaataaatctacaagggaaaaaaattgttaaagcaaaataatcctttatttataaatataaaataaaaaagctgttgggaaaaagaaaaggtgataatgtgatatactaaactcatgggaacaaagttgaaaaataacaatgatagtgattacaacaatggtgaccatatttttttggtcaaggatcaaagatcaaggatgtaatatctgccatatcacacctaataaaatgacttcactattcaaatttcaacaccatataggtgaaactctactactacactactactctacaacaaatgtaatatcccaaaacggactcgatgttaattacacattcccaagtaactaatcttttcctaaaccacaacagaagaagagttcatttatgaattgattttacactttccaacagacaaccaatattacagaatatcctcacttttaaacagttgaagaaagacatatcaatcaaaatcgaactgagtgaagcaacaatgtacacaacttttgaaaagttttacacccctattccatgtgctggagtgtcccgaggcctcg

SEQ ID NO: 198732 - DNA, 1608 bp, Cannabis indica
attcatccttcataactaacaatcgtgaatagtgtaaaggtctatgcacaattctacaatacaaactctatgtttagagatacaacattactaacactaaatacaactcaacaataaaatatacttacatatttatcccaaaatacgtacataatttcaaaagcaaattaataaaataaaatttgaatgttttttttgacataacactgtacttttaggttgtaaaaccggttagaaaaagcattgcaacctagatgaatatatttttcttgtcttacttgaggtgttggaaacctcaaaccaaaaggaggttctacataaaaatcatattctctaatatattatccattaattgctttagggcataaatcccaacaataatctcccacttgcactaaaagtaagtgctacttattctataactcttatagacgttgtatctcattcgactgttcaggctaattcatatgagcgagaccctccacataatatagtttcatataaaattaagtctaataatcaagataagtccatacctctttaggatcgtcaaactttctccaaaagagacgctcctaagcccttgattcttaaattctaaaaatagcttagtcactcaaaaattactttttcctacactcttcaattgaataaataattatcatcattgtaatgtactcttcaaactgagtccaacgacatataacatgactatatttgaagtttaaagttttaaaatcttacctaagcagtgcagaatgacgattggtggtggtagaaattggtgtacctaaaatatcgccataaagaagcttagtatatatcaaaatgactctcttaatgagtagatcacggatgtacaatgcgttagcccaaacaagcactagaatcgccaaaaaatgcttctaaagaggcgaatatacccaaatctcataggaaaaaatagcaacgagatggaaaaaatggcttagtggagattgtactccttcagacgccaattccaacaataccaaccattcgtcaaatggtcatcgaagttggcttcattgttgatttgaagttttgacggtgaaactttggagctttcgcacaagcatgtcttagcttcaattgctatcaaacttggggtgtgaggtccttgcgggttggtgatcgtgcaactctagcacattccgaaaatggtagcctagagggtggtggatctaagcttgggtgatggtggttatggtggcttttatgagagagaaagtaaaagaaagaaagagatgtcggggagagagaaagaaaagcaagaaaaagtttttttatggtcccacaccttttatataatgtgtataacttctttttttttttatctttagcacttatttatgttcttaatatttagatagttttaaaataatcttaacttttttatatgataatgtacaacgtagttatttaaaacatgagaaaaattgtgaaaaatttagaaaaatttaatacatcaaaaacaaggttcaaataatctattacacacatgcctcttttattttatacacatgtgaaataaactgtttgaagttgaacactacattctacatagtaattttttttgaattttttaaa

SEQ ID NO: 198733 - DNA, 608 bp, Cannabis indica
tttattattaataatattgataactattatatgttaatttattactgccacatctgatctcttaatgtacgtatatatttgacacgtgacaaaaaattaccaaatgaaatttagttttaaattgtttttttatgtaaaaataatgtattttgtatacataaagtctttcgaagaaattgtttatgaaatgacgggagagtttaatgtctgatcgaagaaattaaaacggttatatatagaataatagtttagtagtagagttggaaataaaaggcagagaaactagacaagtggtgggtgaagaagaggtcagcgatcagagagagagagagagctttcgtattctcttctcctataatttagttcaaagcaatttctccaacttgcagaatgttaggccaacagtcaatagaaacttcaatctaaactctataattacacatgcatacaataatattcattatatattgaaattaatggacatataaataatcaaggtgatgtatattcttttcatttatatatatttcatatattaattaattttgaagctgtaagtaaatggatgatatatattttttatatatatatatatatatatatattat

SEQ ID NO: 198734 - DNA, 1963 bp, Cannabis indica
tcaagtccatctacttcatgttataaggtctcaaactattttcagttacttcaagtttatttcccaatgatctgaaatctacattatactgtagtggaatggaggaaggagaagtatagagaatattggatgcctcaggtttcagtaaaagtgatttaccattcaaatatctaggtatttcgatatgtacgtgctcgaagatttttagctttagaatgtgaatgcctaaaccttaaaccctaaaccctaaatcctaaaccccttaacctcaaaccctcaaaagatttgggtttggggaataaggaacctatcttttgctagtagggtaacattgattaactcgatctttctctccatacattcatattgggcacaaataatgattttgccaaaaaatagtgttgaagaagataaatgtcatttgtagagcctttttatggaaaggagaagctaaaacaaattgtccaggttatgttgcttaagataagatgtgcaaatccaaatttgaaggaggtttgtggttcagacatactttgcattggaatactgccgctctggacaaatatgtgtgggtaattgcttcaaaataagacaatttatgggttcggtagatccataatatctatataaaaggggctgattggtggagttataaaattattgtaaatggaagctagtcttggcgacagatagcccgaatcaaagagaaatacaaagcactgctggactttcaacaatttactacaggattttatagcatccaaaaaggatacaaaactttaagactggaagttaataaagtaccatggcatcaagaagtttggagttgctacaatgtaccaaagcacagttttattacttggatggcagtccaaaatcgtctacaaacaaaggacatgttagtatcctttcaaatctgtcaagatttaacatgtttattgtgtggtttagccatggaatcgatgggccatccgttctgtgagcgtatattcagtaaccactgtttaagttttctgaacgaatggcttgattggaaggtaagtgataaactgctccctgctctgctgcggtggatatctcgagcaagtatgtccaagttcaaaaagcaggtactaagcggaatgattgctagtttagtataccatatttgaaaaaatggaaatgatatcttttagaataaaaaaaaatataaagaatagagatttttgtacagaatgtgcaattcaatattaaaaatagaattacaaaagtctgttgtaaaaagattacaaaagaggataggaaatagtttgatgctctttagcatcttgtaattatatagcttcagttttgagttggaacagttgtaaatgttgattgagttaaatgaaaactacactaagctgattcacaaaaaaaataattaattgataaaggggaaaatttgaaattccatccttacagcaccttaaattttttttccctaaatgcatacttaataatattggtcatatatgaccacatttctaatatcccacaaatacccctcccatttgaaaaaatcaaaaacttaatacttctctctctctctctctctgccgaccaccccacgaaatcaccacacccacatcccaccaccacccgaaaccccatcggagcaatccagtccgaccccaaccccagtccgaccccaacccctccgaccctcttgacccacgctcaacccaccgtcaccaacgccgcacagaggagaccgaggaccaccgaggaccacccaccacctccgacgaccaccgaggaccacccaccacctccgacgaaggacccagccccctctctcggacctagcccccctctctcttcctctctctcaacccttgagcctcaatcgaaaaccaaaaaaaaaaaccaacgggtccaatggtcggaccatggggtccgatgggtctgatgggggggggggggtccggaatggggttcggac

SEQ ID NO: 198735 - DNA, 845 bp, Cannabis indica
ttactctagataccatgttgagaagtaagaaagtgagtcatatctcattatgtaaaaggtttcaataagtaaagctaagctaaccacaattgaattcaattgataaatatagctgtacacgtgccaaacataatcctaactaacaacgatcctaactaacttttattaaaaaaatttaaccaacaatgtggctatgagttagatgtacatttaaagtacgatgatttaacaactttaaagatacctacaatctaatttattggagttaaacatacaaattaactttaagaaagcatatacatattctcataatttatctatttatatatttattttttgtcaggactcttgaattgtaccaaaataaagtcatattagtttgcagtgatttctatatatctatatagaattatttacagtaatttttatagtttaaaaaaaaatttcccaaaaaaaaatattttacttagccaaataatataaaactttataaaaattctacattaagttaatatttcaagaataaaatttttaacgaataaagttgtcaattattaggttcgagttgcttatttattttcaaatcgtggttatagtagggaatttgtccctactgatttgtagtaataaaatagcacttttattaaaaaaaaatgaataaaatttgaataaaaaatatttttattattattaaaaataatatatatgtgtatagtaaaaaaaaatgtatttgaaagtattataaaaatattgtgtcaaaaaataaaacccaaatacaactcatgtatcccatttataaatggtggagtgagatacgctgatgttaataattaatgactttgaat

SEQ ID NO: 198736 - DNA, 1143 bp, Cannabis indica
taaacttgataatgttcttttgaaagcaacgattattaattatgactttttatcaggtacatgaaagaatgactgttggacattggtggcctgaatcgagtatatgaatttttgaatccaggtgcgattgccactgattcaggggctgatagtaatcgttgccaagcactagtcactcgaatgacttggatgactaactcagacaatggcttattgccccatataataataggtatatgtagatgtaaatgttgtacattatgttgcatgtgaaaatgttgttgaaatcaagaaattaaaagttgaaattgagaggctaaaggcacaaagaaatacacaaacaaaagagcttcaaatgttagacaatgcatatagagatgaagagagacatgaagaccaagaaccgactgaaaattatgaagactaagaaccaatcgacaattatgaggatcaagaatcggtcggaaattatgaagaccaagaaccaaccgacaattatgaggaccaagagccaaccgaaaattatgaagaccaagaaccaaccgatcgacaattataaagaccaagaaccaactgaaaattatgaataccaagaacaacccgagcatgatgaagaccaaggacaaccaatggactatgaagatgaaggtcaatgtgtaaaattatgttcggataatgacaatgtcatggctgagggtgtcatgattgaaccggttgatatcttttcatatcatggtatcgtgatttcaaataattatgcacgggtttaaatcacaaaaattattcaagaagttgaaatcccataggtgttatacgctatgtttattggcctaagaaattgattttgatcgaagaggtatgcaataatttatttgtatttacattaatgttttatcataaattgttcaaggtacaacattgctccctcccccttattattaagttcttatgctggtagcacatcatagaagttctttgaataaactgatgagccttcgaaactttgttgatttccgcattcacctttctacttgtttcctgtgtttcaaatattacgacaaacttttcatgaatttgaagaattgcttattttattattttctttagtagaaattctattatcatcatcttcttttttttttt

SEQ ID NO: 198737 - DNA, 2532 bp, Cannabis indica
ctattgatacatttgagaaattaaacgttttacaattagtaaattagatttattgtcataatctacattttccaataaatttgatttatttttatttaaaccatgattatgaataaatgtataaatatattcccgaaagataagtgagtattgctggtcattttttatttaaaaagtagtttaattataccaataaaaaataaaatttgtataatgacttgaaacttaatggacatgtacttccagaagttccagaaatataactaagtattattaccgtcaaatattaaacttctatctacaactgagagttaacttaagtatttattatgccccaactttttcttttttttaaggcatgtggatatatgttttatagattgtagattaaatattgtgcttgagttgacgttacataaaagtcttgattttccaatataaatatgggagtatagtcatttagtacttagttttttctttgaaaacacatttggtaccttgtatttttaataatatttatttggtaccttaaattttaaaattgtacatatttggtaccccaaaataaaatttaattaatatagttttattagttaattttaccaaacagttctcagttatatgtaattaaataattaaatttgaatccaaaatttataaaattgaagacagtttgattgtattgataaaattttatcaaaaaattttaaatttaaagtaccaaatatatatgcttttaaaatataaagtaccaaataagtattattgaaaatacaaaatatcaaacctgtatttaaataaaacataagagatcaaaatatgtatacactctataaatgatgctaattggacaactatcaaaaaccttatacttatggcattcttatcgacaactatctacacagatatgctaatttgcagcaatatatttgtgtttgatggcaactatatgtcacaaacctcactccaattactaatttttagttatactaaggtattgacaaaatattttacactagtagtcaacttttgacacatcccaaccagctaaatgttttagctctatattttggtgtcaaaaagagatggacatattacttcttcctataacgaagaaaaaattacacttactatgagattttaagagttcttataatacatatgacatatttaagtttgactaatttatatggtatttttttttattttttaggtctttgtatggtatttgatatgccatatatatgtaaattaggttcaaaaatccaaaatttaatgtttttatttatttaggtagttttatttgtcactgatgccagaaaagtcgccggagtttgctgtcggtgccgaaaaaatcactggagtagcagtcggtgccgaaaaagtcgttggagttgcactcgatgccaattcgtcgaaattgacattgtcgccggaaaaatcactgaaaaaataaccaagaagaaggaattggtttcttgatgaagaaaccggtttggtttcttagtgatttttcggtgacaatgccaattctgacgacttttctgacacaggcagctactctgacgacttttctagcaccgacagcaaatttcaaaaaagtcatcaaaattggcatagtcaccagaaaaattaccaagaaattggtttcttgatgaaaaaaccagtttttttgatgagaaaaccagttagtagatcaagaaaccagtttcttggtgatttttctgatgacaatgccagttctgacgacttttccgacatcgacagctactccggcaatttttctggcaccaacagcaaactccagaatagtcattagaattggcattgtcgcccgtaaaattactggaaaaatcaccaagaaaccggttttttggtaatttttcttgtgatttttccgacaaaaatgctaattccgatgattttttcggcactgggggcaactccggcaattttttcggcaccgacagctactccaacgactttttcgatgccgatatcaaattccggtgactttttcggcacgagtgacaactccggcgatcactgtagttttcatttgttttattttttttaaaaaaaataaatataaagggaactttaatatttttttatggtaattcaattaaatttttattttttttataaattttaaatttagattctcttttttaatgttttatatgccatctttatcataatcttaataatttttctcatattttttaaaatagcccatagatgccaattggacgaaagtgtgtgcattagtttggtattcttgaggaatcaaaacgacaggtacagttcaagcttaagaaatatacataatgacaaagtgagttgttgatttgatatggatatgtaggcaggaacacacagtgaatcataaaaagtaaaaatggagtaaatttcttttctacacaacattaatccttttagaaattgccatttgctcacatgtttgaaattaaatttcttttcaagtttgccaactggtttatctcattctacaaaatcatcatatatttt

SEQ ID NO: 198738 - DNA, 772 bp, Cannabis indica
  modified_base (717)..(717): a, c, t, g, unknown or other
gaagacacgagtcacctcagatgagaaatgaaaatagtatactatatagtactactagtctactgctacgcgtctacgaaattacctttataccctctctttgtcatgtttcttttttgttttttttaccttatttttggtttttgtttccaattttgtaaatttgtagttgtgttccacatcatctgccactacaagattgatttaggaaatacgaggaacctacttttttttttttctttctagtctttcttctatacgaaggacagagaaattggttatcttgaaggtgaactgtaaatcaatgaaaatttgtcataaatatttacttttttttttaaactacataaatatttacttactacatattaaatattataggtatgtcaataaaaaaaactatgtattataggtatgccatccataaatatgtaaaaaacactttatttattaaaaaaaataaataaactaaattaaatgtattcttgatatttatttttcgattttttattacattattaattttattttttattattaattttaagcatgtgatttattttttttaagtaaaactaaataaatgtaaattatttatgagtagtaatatgtgcacataacactacaaatgtgacaagcaaacatgtgagaactgagaagtcattatcgattattatatttaaattttatctattcttttgtcaaatattaaaaatntaattttattatatgtatttttagaataataggtagaaaaaaaaaaggtacgtat

SEQ ID NO: 198739 - DNA, 1398 bp, Cannabis indica
atgtgagttgatcacacgatcgaactttggtcagatgtctcatgttgactatactcggacatcttgctatgtatggacaatatatacctttctaccaatcctcaagggctgctaggagtgtaaccttctgtcaagataggaaactataagacacttgtcatctagctaactgccatgttatagtgccaaaaataggataacatttgccttcccaagtctgtgcgggaccttcttggtcgcatgtggacttcatttggttagggaccttgtccagatgggtgacgtgtgtctttggttgaggttgatcctacgtgactttgactaagagtctcttcggtgtctgggcattaaatacctcttaaaaatggtacctcgaatcatgcattgattgctaaatgacacgacatacatgatggttgtacttcttgtaatgagtactaacattcacttttgggaagaaaacccaaatattcgaattttaaataatttatctttcttttttcgatgcctataaaaggggattaaagcttttgggaattcttttggccatctttactctcagggaaccagagcaaaaaatttcatcccaattttcttccaaacctttgaaggaacttgccaagaaatccattgacgttatcttccgagcagatcaagaaagctttgaacagtgagcagatcaactttgagtgaaaccctttgtttttatccttaatctggcatggtcgacatgtaaaatctatttttcatctcttctttagaccaactcttattttcttgtctcctaccttttgtagatgaaccctgatgatttctggggaggcaagcaccacattgaccaggacttgctccgacttctatacgaagaccaccctcgactccgtgcaaattcatctttgtctagtgataacctctcaaattctagctttgaagactgggaagtgagtagtgagcacacaccatctttggagcccgagttgcagcatcattggtatcccgaccaagtgcgtggggaaggatacaagcatttcatctggaaattgaggaaaggttagaggcgttatctgcccactaactggacatacagagtctaatctggtgtcaatgatactcttcctgaagggtgtccagccccaattgtcgagggaacccctatggccgagtttgttataactattgctcgacacacaactaaattaatgtcatcgcccagtcgtaaagcaatggaacggacaaaacagacaatgaggaaaacttcagatagtgaccctcattttgccagactattcactgtagttggatggaacaagctcgacctacggtcgagcaagaaagtgccgctgagagagacattgaggtctaagaagttgaggagcatggcgaggtccgtcatgctac

SEQ ID NO: 198740 - DNA, 553 bp, Cannabis indica
taaagactggcttcattagaatggtggaagtaactctctgtctggtcttgatcggtggattagaagagaaaaattgaacagcttcaggaaactagttcttattgctgctatggcaagtctagtctaccatctttggagaatgaggaatagatgcctttaggacaaagaactacaggatacatctaaattgtgttaagaaattaaggctagagttattcaaagagttgaattattttggccaaaaaaaattaagaatgatgataaagcttggttttttaccttgtaaattcagcattatatattattttcatattgtacagaatacaaaaatgtatagccgaataatttaagcctggattgggtgttattaggatgtaaacaaattttatgagctaatacactttcctgattcatcaaaaaattaaaataatgtagagaaaaaaaatggataggagagagagggaggttaagaatgaaattgtacgtagttggaaagggtaagggttagggttgagaacttggacttcaatagaaaaattgtgggaagaaaaga

SEQ ID NO: 198741 - DNA, 691 bp, Cannabis indica
ttttttttcttttcctttttaacaatataaaaagtcagtcaacgatcgttatcacggcttggagacagaagcggcatctttaccggaaccgtcagtcacgccgttacccatcgtggctgactggacggtcaacacggacatgctgggtgaggaaggtccctcaccggtcgatggcatctgggggttgttcatcatggggttcctagtgtaacacgtggcagtagatatagccgtagctaacgaaatcggcatgagacagagtcctttgccttggagatattgcatagctgaccccatatcttcctccatgagtttcgccacttggtgctccgtcaccgtcatggtatcgtttgaagacgacgccgtttggttgccgttagttgcgtttctacctaagccgccgccgttaccgttggcctggatacagtcaccacctccctaataaaaaaaaaagtaaaaattagatataattttctattttcttctcaagaaaggagaaagaatagcatgaaaaagccaatgagaaaaaaacaaaatcaaaataaataaattaattgaaaaaaaaaacataaaaataattaaagtggaatctgcaaaaggtgaggcgcgcgtgctacttttgatattttgtcgttttcttacgattgaaagttcttgatttgttcagttgagtaggtgaaatgagttgtta

SEQ ID NO: 198742 - DNA, 1476 bp, Cannabis indica
tagctataatggacaagttttgaccacactccaaaatacgatcggccaatcaaatttaaagaaaatttgagttgaaaaaaaaaaaaatatatacaatatgaaagggacatgaagtatgagaagtaaaaatatttaatcaattaacttaaacttctttaattaaaagagcaataaatgttatatctttctttatatttcacgcatacacttaataaaaaaaatattatatattgttataatttatagcatgagcatgatataaatatattatacaatttgctttcaataaataaataaatatattatacacacgtacgtatactttttgtttgttagatctagctagctacttatatctaaaataaatagtattaatattaagaagttttttcatttttacacttacaaaatatttttttttttttttttagcatttttacgaaattctacataaaattcttattgcaactagcattgcaatctaaattgcaacaaaaaatcatatagaaacccctattacaactagcgctgcaaccactttagaaacccaaactgtaaactttaaaaaataaataaaaaatagtatatgggataattcccctaatattaatatatatttataaaactaattttaataacactgttaaatttaacaaaatattattatattcttaaaccaacaaaaatattagatgaccatattttatatataaaaaattaatgtaatattatatttattgccatttttaactctatacacctaacttgtaaatactaaaagaggaaattattgaaatgccctacctcataaattaatttttaatatttttaattaggtacaacaacaaatttgatctttagcatttaatttgttagcacattttattttatttcatcttagaaaatgagatttctaatatcattattataaaatttagaatgtttattttatgacacttctaaaatagtcataattatattttattatttgactaatcaaaataatttttttcatggctacaaaaaaataatcaatatagtccaaaacaaattttatttccaagcaatatttatagctacagtaatccctaaatataatgctttttttttcccaatcaaatttaacacataaactttggtttaattagcattatatgttttgagtacaaaggaaataattaatttgccaaaattgatattctatatataaatttttcaaaccaaacttggcatttagagatgtcttgggagctaaaaaaagtcttgatggattttttttttccattttttattaaaagaaaacaataagtaattacttaattattagatttcatgtgtttgtttaattagaaaattacttaatgattatgtaattagaagtaattgaggtatttttttcacccaccacaagaatttagtgtaattactaaatattatcaatttttttttgaagctaaatattatcaattttaaata

SEQ ID NO: 198743 - DNA, 1442 bp, Cannabis indica
ttaatatataaagatatatgattttttttattaattgaagcaaatgggttgggttgggtttgttgggccacaagaagtctagccaaattccaacccatactatgcaggttgataaatattacacctaatacaatttcggcccataaaaaaataaactgatcggcccatttttgggttgggttggtcggctcagtccaacccatgcacagccctaaaggagagtcaatatcctcttcatcctctatagagtcactatcattctttttttttttttgaaagatttccttcctgccaaacatagtcttaaatgtaattgaaaaatttaatgaatataaaaatgttggtcacctctccatccaatccaaagtctcatgtcccaaaaagaagtttcatacaccaaacaatgacacgagttgagtggtcccattccaactcccaacatcttctaaatacatatacaatccaactaaatcccatcactattttattttttgacatttgacgttgaagcctaaagtgcatatgtgaagttgaactatcatgtctgtggtcctaattcctaacaatgtaattgtaaagtcatttttccatctcaatttcccttttttgatttcaaatatgaatatgtaattatgttaactaagtacattattttatgtaaaattgtatcaattggagctgctgtagtaggcatactcaacaatttcaagaaataaattgttaaaatttcagtgaacattgcttaaaggtgcttgcattgtatgtatatgggttcgaagctgacttagatcctctctgttattgggcattttagttaacaaagtagaacaaagctgttcatcctgattataaatcttcctacgattcatatagccaattgcaattgggtttaattatttttcaaggacaaatgtttcggaattatttcaatgtgtaacaaagtattagtgggtctaacaagtaacaaaaacaaactctgttctgaggagtaattgtaaagtgtgtgtgtgtgttttcctttctctaaaaatggtattgacaatactgtatagaatctatacataggctttaccaaaagtagtatcaattacctgtaatatctgatagtaaataagctcaaagtacactgtcactgcagtagtcattaaattgataaaatatctctcttttaacaaagcttggtccaacagattcttgggctggcccagcaagcagatttatgctagcccatgtcccagctaaagggcaatctagtcaaaagaaacagtgatgaggtggcactacttgttgttgttgttgttgtttcacttttcaacaaaataaataaaataaaatatattgttgctactaaatgatactagtactcctgctaagatactatttctgatacttcaaactgaagacttcaaaatttcaactttgttgcttagaaaaaaaaaaaa

SEQ ID NO: 198744 - DNA, 1346 bp, Cannabis indica
agtttgcagaggcttttggagcaccacaacacaagtggtatagttttaagagttgaatatattttgtcctcttggtggtggcctgtggttcatattctgcatattggaatattgttcatccggatgtcctgggctgtcaggttgtccaatgccttcatttggccctgcaccaacatactgttgtacaaccaacacagacactgttgctgcgaaatccgatgatgcaagcagatccccaattgcaccaagttctgggcattcactccagtctgtgagtccagctgtgagaggtgatatcattccttgtcctcttccaacgatgaacaagtcatggatattgtccattgaccttattgctgctactgtctcctctccattattcaccaacttctcactatacataattgattcatcgttcatggtttttgtcctaaaatcattcacaagctcatcatccagatgcctttccattgcatcatctgtttcaactgttagcattctcgggtcattaagattgtcacgaggttgtgccacattagaatcatcctcacccgaaatgaagcgcaaaactgtgagacttgtccctggatggtcagacattctccaagcataagacaatgcttctctatcatctggtcccccaaagaatatcactgctatatgatgagtcacttggtttgcagctaagcgtgtggagccacttagccctctatcaacaagaatgccaactgagcaaggtgcattagctagtacattttggttcaccatccggaatgctggatttgtagcttccattccaccatcaaccgtttgttgtttatggaaaggaatgataatgaaggctactcgtttgtcctcagccaagttgcaaatgtcttcatgcatggtggagtaaggagaaatggcagtgagaggttggacagtaacacaaccagcgtgttgctcatagttctcaaaggcattgatgatgtgatctgactgggcctgtgttctattaagagctggtctgccggatttcctcgtgttgtgaactatgagcattgcagatgcacggccagtgagttcaactaaatggagaacatatacgcatataggagattttttggtggggtgtgaagcttcaagaaggttgatgattgttggcacatttcgaggggtgtggatgcaaaccaatactcgtaactctgcgtctggttttgacctttgaattgttcttcgtttataaggtacgaacttccttgctggcttatatattgatgtgacaactggcgtgataattgcggtcattatcactgctacaattaccataattgcaaaggactcgtcatctaagacctgcaaaaaca

SEQ ID NO: 198745 - DNA, 840 bp, Cannabis indica
tgatttttagtcacaacaaaatattacttgtgactaaaacatagtatttagtaacaagttgtcactaatttagttttagtcacagcaagtattgtaactaaaaatacatttagtcacaacaaattgtaatttttgtgactgatacctttagccacggaccttttagtcacaaaataaaaataataatttatattataatttttttacttttagttacaaattttgttgtgactaaaagtaagattttttgtagtggttaaatgttgttagtagctggtgaagtcgtgtgggctgctgcttcggcttcagtcttgttctgtttgtaaaaagttatgtttgactaaaatcattctgttttagttaaaaaaaaaaaaaaaaaaaacccagatccatatcccagtgataagaaaaatttacccaaatattattcaggtaggcttaacgtgccatttcccaaagacaatatgcctttatgttttctgtcatttgtctacaacccaatcgaggactctttcttcttttgtgtacagccctagatgaccaaaatctgctagtctttgggcatgttcacttgttcagtatttttcttccagcacaaatcatgcaatctctttcacttgtgttgtgcttatataattatctccaattaccctatactatcatatagggaaatctgctaattggaatgttatcaagataacgaaaatattacctctcttcatagttgacactcgacctcattatttatttcatacccaagtaaaggaagggtaaccttactgtatgttttttcatttttccttcatcccagtttgtagaatttgtactatgttatcatat

SEQ ID NO: 198746 - DNA, 3234 bp, Cannabis indica
tcaaaaagttcaaacacaaatattcatatgatgtgataacatttatatgatatttttataatacaatattcttaatttttttctccacaatagcacctttggactgacctcgtacttttctttttcgtgtttgaaatccattctcattagaactttcgggaggaatagttgctgaagaagacatacttctgcaatacaagagggagaaaaaaaaatgactttcatagaatgcacaaaaaaataaaagatataaaacataaatcagatgctagcttgttattaaaatagaaaaatataaaattgaaaagaataaaaagatacatatacttatatgcttattattcataatcaaatgtatcatcatcatcttctaaataatttttctcgtcttcgtattcttcaaatttatcatcttcaaaatcatcatcatcaactaaaatctcattgttcacccttatttaaagtagttcatccacataagaaaaaaataataaaattcaaacatattttatactagtgtcaaaaaaaaaaattgaactaatcttattatactcattatgctattattagtagatggtttattcgttttttttttttcaactaaacttatttgaagcacaaagcaaaattgctcttatgataatatataaccaattgatttgtaactttatttagtacgaacaaacataacatatttttataaatatataaattaagaaagatataaatgcatataactaataacatcgatcattagaaaacacactgtcactatccatttatccgcaagcatgccaattttataagaagaaaattctaaggagcctcataattttataactaataagcagagaaaaatcctctcttttgtccatcataacatctttataatacaaaaaagtaagattcttatgagtatccaataataaatacagaagtataaaagcatatatattgtcttcttcgagattatactcaaaaatgtgcttcaaaatataaagccacaaacttccttagatctcgacattgcaagacaatcaacaattacagtacgaccgagaatgacttaaaactcattctgtcacggaaactcaattacatattacagcacaagtaaatatattgaccccacattaacatttcttatgatattcattatactcctcaatttattatgcatataaagacacaaacttcctcaactttgccaaagctggagaattaacaatgaaaagggaatatcaagccaagatcagacataaaaaatccaatataacagaaaaaaaaaatgaaactcatctctcattacctcaactaaagtacaatcataggcaaaaaaaattgtcacagtaactccactatgaaagcaaagtcataaccttctttaagttcaaattttaaaaatgtcacattctctcatggtatggtagtaatattaatgcaatttgacaaaaagagttccagaatatacacaattattcaccaataataatagacatatatatattgaaatcaacaatacttcttagcttctaaaatgaacaccaaattcaatacactattcaggcgttaagtaaatcaaacaactaaaaatcaagaaaagaaaagttgaaaaagtaactaccgatttttaattttcctaggagaatcaatcactaccaaaaacaggatatatggttgtcttatatatatatacagagagagaaacttagagagaagagatgaataaccaaaattattgaagtgtcatccacggagaagagaagcagcaaaaatggtgacatcacggagaggtagcagcgactccaaattaagaatgaagattagagaaagaacacaaaatcatccatagaaaatttgatcaaaaaaattagaaaaataagacaaaatctaaagaaaatgaaaatgtaagagtaatattacctcagatgcaagaggagagagccaatggaggtatcaaaaatggtgatgaagaaccagaactagaaccagcaacaacgacgacgtcgacggagagatagcgacattgcggcggcgacaacatcagtatgattaaggattgaaggctagggtttaacaattgatccaataatatatcggtgaagcatcaaaaaattgtgaagtacattaggttttcaaaccaaataaacagatcttccaataaaaattatgatacaacaacctaattatttaaatcatgaataaaaaaataaataacatgcccaattatcttgtaatgctcaatcatataagatttgaccatataataaaaggccaatataaaaatctaaaaatctcctagatttgacgaccaaatagagactaagacgtccttgaagaagtgatttaaatccattgatcaaacacaaataaaccaatagtagacaaaacctgcatctcacataaggacattaataaaccctatcaatctaatacgatggcggataatctcgattagaaaaaatcaaataaaattaaaaataaacaaaataataaaaaaatgtaaaattaaaaattgaaacaccaccatacaaattgaaacccatcaggcccagatcaacactcaagcactcaaccatggatatcattcaacatctggacccttccttataccaccacaacgatcccacaaatctcaacgattaactgcaatccatcaaactatttgttgagcaacaaccccaccagaagtgacaaaccccatacaactgacccccaccaatcctcccggaagggagtattggggttttatgccctagataaaactcaatttcaatgtaatcttatttattgtcaataaaagataatattagtatttgagtaatgaaaataataaagaactataaatgacacaagatttataaaggttcgactcttgaatcggtaatggtctactcccctttttgttgtgtttatctgggaaataactgttggaacttgttttaccaagatctagatttactaacatgtatgtttgattataaatttataatctaacatcctaaatgtaaacttcctaaaacaatgaaataaacacataagagattaagaaatccttacattggtggcaacagaatataatgactccttccatttaaatctctagcccttgattcatgtttgtagcataacattatcaagatctgaacctggatcttcttttccttcaatttggttaggcacagtcttcctcattatgctaggtattgcttatgacatgagtgggcatactct

SEQ ID NO: 198747 - DNA, 1734 bp, Cannabis indica
attttctttttaacacttatttattcttttgcatattttgagaaaactcttcttgacgagctagcttttgttgggtctccaacaagtcattggatactcgaaccaaatttggatcttgctcatgatggtatcgtctttatagtagccatctttgacgtgtccttaatcctcttcctccttgtctttgacgtcagggtctttgccttcgacttgcttgcaacgtcgagctgggtcgtcccctctgttgtcaacttcagatgtatcccccttccatcacatgactcgtctgagcgtgcgtggaaggtcgtagggttacatcctccatgacaatgttagggttcacttgaggagctttctctatctttgtcttgcatgtagccaccatgatgtagaaacgcagtggctcaaatctttcctcaactctcaatgaaagtactaaaatgtttaccgaggttttcgaaaactaattaaatgaaagctttagaaaataaataactattaagtaaatgagacaaaggattttacatggttcgagcattaattctccctagtctacgagttagtatattggccttgtaggcttttacaaatgtattacaagtgatgtttacagagtaaaaccccaactctgcttctctaggtttcttctgatgaagaagagagcttagaggatattttggcagagcttcggctatccttttttcgattccccctacatgaagaaatgaaggagtttatataggctaaagtttgggtccaggctcgattaaggtatttgaacaaagtctacccactattagggtaaaatacattatataaatgactattgggccccttagaagaattcctctcgtgggtcgacaattctgtacagctgggaccactgttggtgcaagacacgtgtcgggcaaaggtcacgcctggcagacaaattgcttagaggagctttcggacaaaacagggtattcagaagaggtgcacgcactaccatgctcggacacagaggacaagatctgatcttgtgtcaagaaagtgaacacgtcgaggaggatgtccggtttccatttcgtagtaggcttccagtattccttgtgcatgcaacaaccgtcttggactcttcagatagcctctaggcattatcctgttcgcttaatgggttcgatcttcttcgggtctcggaaggctgagaaagcttctaagttccagacaattactttgtcttgtggcaaggtactgaacctttcctagacctaagcctcctttgagttagcccaatctttttgcgagtttctgcaattaaagagatttaagaaataacttagatcgccatcttctatctttcgtcacgtgtccttattccagaaacacgaataacaatatacatataaattaaatgtgtaatactaatcatgttaatcaatatgtattcattgtattgtaagataagtatagttgacacgtgaatacaacaggtcaagttaggattaaagtttcttgacacgaaatatatataagtcagattaaagttaatcaattaggcataacatgaacacaaatatggcacaacaacacgaattgccacccctacatctaggatccttatagagtaaatctcagcctcagtaaaaacattgccaagtcatggagggtgagtacccaatttgaacttccataaaagaattttgagaaaaatatctacttttcagcaatatattcagttttgccattgaaaga

SEQ ID NO: 198748 - DNA, 558 bp, Cannabis indica
attattttttaaatttcaaaattatttttaaatcaattttataatatttaaataactaaacttattcgaacatataaaaacacatacatgtgggtgtacaatgtcaatctatttggcatttaacataagaaagaaaaggccaccttaaataacaaaatagaagcaaagattaacatattttgtccccaaattaaaaaattagatttgagagttaaatgtggcaatacataaatattaagttgtataatattgaataaaacaacattgttacaaataattaatatatgatatttgttttaattttggtatgggagagcagtggattgtttgggaaagagttgttgcataacacaaatttaataagttggtctctgatgttcaaggcattcttttttttggtggctatattatgcattgcttcttttacaactaccatcaatcagatttacgatcttcacattgacaggtatcacataattctaatttcaattttttttatataacaatctaaattctacttattaaaagaaatttgaatagatttacaaaaaaaaaaaa

SEQ ID NO: 198749 - DNA, 949 bp, Cannabis indica
ttttttttatgaaaaatagtgtgattcgattatgcattatagagaaaattttgaaattagactattttgttcctaataatatttggtgcattttttctataatattacccctctattctaattaaaactacaatttaaaaagaacttgtatattatatatgtgccgagagagtgcaaagataataactaccaaccataaactcaaatactaaacatttgaggaaacatgagaaatttatagaagaaaaaatggaacaaataagagagaaaaataaactattacaaaaattattctcattaatgctttgttcttttaatgttcaccaccaccaccttctttgtatcttcttgaatatttttccttttataattttccatctctattttgccttccatttctagtttgttctcatctatgcctttactcgtatactaaaataaaaacaatatatattctaattattaaaatcaactatgtaaggctcttgtaaaaaaaaaatattaataatataaactaataatttatttgataatggtaagtaactcaactaccattttttgtggtttattttaaatcaatatgggttttcattcaaaaaaaaaaaatcaatatgggttaaattattaaaaaaaaattattatgcatacatacttatatacatctgaatgacatttatatttatacatatatatatatattatttttaacaaagataatttaattttttttaaggatagattagtttgatttaattattttgtttagtatatgttcaaaaatttaatcataattcttatttcaacaacctcaaaaaaaatttgaatatttttctaaatatattttatacttccagtattgctataaataattattttaaataccaatttacaaaattatgaaaatgtcaccataaaacaattatagtatatatataagtctaaataatat

SEQ ID NO: 198750 - DNA, 2517 bp, Cannabis indica
atgatcttgtaacataaaggcaatacaatgcactctttctattctcgtcacccccatattatctaggatgtgggtaatagtactcatccattgcgcaactttaattatatcagcacctctcagaaatgttggaggttgcaactttacaaaacactcaaatactaaatctctgtgcggtagtatgagtccctagttacccaccactggcataggagctggtggtaaaacttattctgcaggggctgtcgatgctggttacctcaactgacgtaattcttcttcttaacgaagtatgatacctcgcattttttgaaacatctactgctagtcagcaggcagattagcattgccaaccgtagcatgatccctcggattctacggaggcgcaggcagtgccggtggattggtttggtctacaataggctctacttgctcgccatgtggtttaggtgattgtggagggtccattttcacaaataaccctgtaatcaataaccccggcgagttagacaccaataccacacatatgcagttattacctttaaaccctaactcaactatttcattctaaatacataaaaacatttatcaattaatataataagcatggctttcatatcacaactatactagatgctcacatactgcctaaaatggaaagtagtaaataaataacacataagtagttaagcgtttactctctacacttactgcaccacgagctgagcttgcctctgacgatgatatgtttagccagtctacaggaagtttaaaaactttggcgctctaataccaaattgtaacgccctaacaattaggcacgctacgaaagccgatattgaaaccctaatcccattaatccgggattactaaaaagataagcgcaggtaaatttaaactttattaacaacagaatgaaaatataacttgtaataatttttaactttacaataaaccaaaaggtacaagtttcgggatcccataaacattttcaaaaaatattacaaatttatttcacgtgtcgacctaagcagtaaatcagcggtttcaaaatacattactggtagaccccaactcgcttggtctagtatggcccgaacatgtacaagcaccgccaagctctcgcactcatggctaatcacagactgatttatcctttcttgcatggtagagcacctgtgagccaagcccagcaagacagtatagatatcaataatcacaaataacatatcgcatatataataatgtcatttcacttattgtctatttgatatagacctgcttgttacgctcacacgcccatatatgtctatgtggcatagacccacctgttacgctcacacgtctaaatacaatacgaccttaaaatggttcgtctcagttctaattactgagtccaaccaaattatgccctgaattcataattcttaatctcaacatctatagcatggcatagcatttaaacatcaataatcactagggtaataaccttagaccatataaccgctcactttagggtaataaccctaatttcggtttttaattaatcacaattataatattcaacatgagcgccactgcacttaactctacgtgctaactactatcttacatgatatcccgtaaacgtggagattctaaatccctgggtgctcctgaccaagtgtcggtaatcctagtcacaattttgaaaattcacaaatagggttaatccctaaattcattctcacataattattaaattggcattcaaatccaaataaacatatagagctcagaacgagctctccaatgatactcgaaacattcaaaacggagttcgaatcacaaagttatgaatattcgaataacgcgttcaaaactacccagaaacacaaggcgggccacgacacctgggttggaaacccaagatttagaaggggcagccacgacacccagttagtggggccacggagcctgcgttccaaacctagaaaccctaacatgcagcaacacgaaaccaaacctaactcacacctaattcacctaaaacatgcttacatacaaaaatcaatcaacacataatataactacttcaacagggggatatcaagacattaaacaagctcttccaacacttatatacacatttaagatcaaatttaacaactatcaaagtattctcaaagcttgagctaaaatcaacacaatatcaattcaaaagaatggacaacaaagtcctacatacaacccaatatttcaacatgcaactccaagtaattcagtaaattaaaaccccaatcttcaatctaaaattcacacaaacatacacaaaggcaatacacacaattctaaagctttattcacctacaaatcatcaaaacaccacaatcacacaactatgcacttaagaatacaattcatggaaacacacattttcaacttcaaattacaacaacaaaataaaaagaaaagagatggaaactacatcaagctctaaaccacaatcttcttcaagttccaagcacaatccaaact

SEQ ID NO: 198751 - DNA, 743 bp, Cannabis indica
aatcaaaataaaattatgtcacagaaataagattaatcacagaaacctaaatgaaactcaaaaccatgttataaagacaaaactagaatcgtagtagcaaaactacaaactccgaccaagccatatctatgcccaaggagggctagcgaacttgtccagagaaaagaacatcctcaggtgactaaatatttagaaagagaaaccttaacaaataatataaaaattgttgttttgattattaaaatctttagtaaaatcaagtccaccgcgaagacattcatagactgctctaccgtaatttttaggggataaccccaatttaggtttaatagtacattctaataatggtaaaacttacgcatttatgtatgaaattttaaacgatgagttattaatagtttgcaaggcgttttacttctactttgcgattggttaacaatactaaataaaaattattatattaaattttatgggactcgatacttaattgaactaaatgtttgaaagattgaatactaataaacattcatgagcaaatacaatgcacaagcctctggatttgttactacattatagttgttcaaaaatacatcgtgagtgaataattatatatatgcatatatttatattgtctatgaaaagaaacacaaagagaaagaccaaatgcctttgcatagctttaataagataagtataatctaatatatgtaaggaatatgcaatgcaaattagttattagactt

SEQ ID NO: 198752 - DNA, 808 bp, Cannabis indica
ataagcagatcctcaagtccaagattgagcttctcaacaatactaacatggttgattacgccatggacatccacaaatctctttatcaaactgaagacgttcctcaaggtaatttcattgttttcattttctatacaattgaatatgcgtttcaagattgaatttttttatgtatttgtttggtttggggtggtagatatggtggataggagagttgaggtggtttctaggttaaaggctttggaggatgcggcggcgcctcttgttacatttttgcaaaatccagctgcggttcaggaattgagggctgacaaacagtataatcttcagatgcttaatgaacgttatcaggtgtgtttcttctttttctaattcaatcaaaattaggattagggttaatttttgtttggatttgtttactgtaatttttgtcatgaatttgatgctttgttttggaccttgtgatattacatagcaaaaatattgtgaaatttgccaaactaacaatttaaaatagtaaaatttacaaaataaactcacttaatttactcactctggtcgactaatcattgcacaatgtaaatttctggtcgtttatggttcgcacagtgtaattcatataagttttcgcgaccatataaggttattttgctaataaaaaatttcatagtggttatttgtacaaaacatttggtaggggaaaaatgaatgcgaaatatttaccatgaatttgatatgggactttttttaatttatatatttttttgtatgtattattgctttaaattatattacgctcaaagtttta

SEQ ID NO: 198753 - DNA, 1094 bp, Cannabis indica
taggacactaactgtcataactgtttttgacagttatgttagttagtgtcatacttgtttcctatgtctataaatagccaattggctttctagtttagataacacattgtaaaacattaagtatcaataagacatgctattttctcagttctagtcttagtgcattcgagttccttaatcctaggttcagttcttgaacctgtgagtgttctggtgagaaggaactcacacctgctggtgtgatcgaaactggtgttggctcaacaacttagtaatgattaataatagagttttggatgtgagagcttaaggaagataaaagaagaagataagtgcttgaaaatgaatagaaattgttacaaagttatgtgaacaagttagggatagaaattttaccagtgggatgggcttcacagtaacctaatcctattggggggttccgcctaaatggagaagaggatggggacaatgataatttctcattcccaaatatcaaacaaggcgggatgggggtaacactctcagctcgattgaggccccgtctgatttttattttctaatagtattttttaattttcttaatatattaatattttttttttataaatttttactttattttggacaatctctcatactttatattattaccataatatattatcattattatttcatgtaatccatcctttttatttataatgtttattatttttaaaataaatgatgcccataagattatctgtcacaatggaaatttctcatcccacaaatgggaaatatgcagggatgacgagggcaggggcgaggaataaaataactaatggggatggggacgaggacgagagagccttccccactcaattactgttcgtctcgtttctattcctagtattaatagttagtgacaagaaaaactgtgataagaaagagcaaattgtgaaaaaaataatctagcaaacctaattattaatacttatatataattttgtttgttgaaaaatatataaaaacaaaaattaagcgaaaaattgttacgtacttacgatataacataatagtaataaacaacaaccatttacctattaatcaac

SEQ ID NO: 198754 - DNA, 1326 bp, Cannabis indica
tgggtcttcctcaagaccccatggctgttaattgatgtttgtgttccagccaatactggagtttccacaaacccaaacggatgtagccaatcctaccaaccctgacagcccaacaaacccaacaaacttgaccaacacaactggtctagttaaccgtgctaacctggctgatcccaatgaccggcctctgtcgcccagggtagatctgtcattggcacctcatacagagggttttatcaatgtggagtagcccccgcacactacgactgattttggtcccaggtatcatgctggggaaacggggccgagaattggtcaaccagtaattggtgagcctcatgtggacctaggagaatactttgaattggccagacttagagaggtttgtatccttgtgaggtaaggttattatacctgcataattaattataagttatgtccattaaggtgaatttttaattagtatataattttatatcattaaaaatgttgtagctacttcctaattatttaaaattatattttttatttagacattaggtattgcgctctacttaaaagctagtttgttattaacacaatagataatcattgagactagggctcttagtgtggtcgtttgaagataattaaaaacctttctagatttgagcatttgtcttagtttcatactttcttatgtcaaaccacaaaattgcttacgttttattcattttatgagcgttttgtgaatattttatgaaattttatgaaaattaatgtgcaaaataaaatatcaacctatcttaatgtttgaatatactcttaatatatctaatactatttatgaaatttatatacaacatcttaatcatataaatattaattaattggactaataataaatttttaaaattaaatacaaaatagtacaattattatatgataataaattaaatgagaaattcgataatttgtaattaatggcagatatttttcaaaaaaaataaataaataaataatttagacaagaaattacttgatttggtaaataaatgcaataattgtataattttaaatattaaagtcaagaaaattattaaaattgcatgcctaaataaaatcacgtatttatttaccaaatcatatttttccaattttaatttataccagataacatataaattctaaatatatatttttaagtaaagatgaaaaatcaattaaataaaatttattgattaaattcaaaaaaaataaggaaattaattaatattcgaaataaatgaaaacttatttataaaatttagaattttcccttgccttttttttttgaaaaattgttct

SEQ ID NO: 198755 - DNA, 1374 bp, Cannabis indica
tttgatcgggtggaatggtctttcatttctcactttcttcatcatattgaggctcctccgagttttacctcccttatttctaaatgtctttccatagttacctaccaattatctctaaatggtaatttatcaaatgtgttttcttcctcccgaggcattcgccaaggcgatcccctatcaccatatcttttcctcattgtagctgaaggtttgtctgcagccatccatctccatgaggatgctgccctattctctaggcattaaaatttgtcgaagggctccctcattttcccatctccttttcgctgatgacaatatgttatttgtgcctgtttacccctcaatcttcagaggctataaatagtattttgcttctgtacttccaagcttcaggccaatctgtcaatagggacaaatcttccattctcttctccccaaatactccccctgattcccaatccaaatttcggacctctttgctccttaatggtgaaggtttcattagtaaatatcttggagttcctcattgtgttggtagggttaaaaattctatcttccattacctcattcagaaagtttcatctaaacttaatgtttggaatgataaactcttctctcgggctggcaaagaaactctcatcaaatctatcattcaggcaattccttcctttgcaatgtcttgttttagacttcctaaatccacctgtgtttctattcaaagtttgactgccaaattctggtggggctctacttctgataagaggaaaattcactggaggaattggtctgccctttctgcctctaaattctttggaggtttgggttttcgttctcttacttctcataaccaagcccttctggctaagcaggcttggcggatctggtctactcctgattccctgctccattctcttcttaaagctcgttactttaagcatactgattttctccatgccccaaatggccacaatccttcctttacctggagaagccttctttggggttcccaactcctcaaaaaaggtcacatctggaaaatctgtttaggcagtgatatccctatctctgctcctaattggatcccccaaatctcccatccaaccattcttcaacccattgaaccttctctcgccactgtttctttttttgttaaccctgacaggacctggaatactaaaaaactgcaccagtttcttcctacctatcaagccaatgctgttctcaatattcctttggatcttggacccactgattccctcatttggggctttcatcactccgacattctcacagtcaattctgcttaccaccttgcccagtcccctgccctcaccatttctccatcctcttatgatcctaacccttttaaggatt

SEQ ID NO: 198756 - DNA, 710 bp, Cannabis indica
atataattatgttgaattaccaaacaaaaatccaggaagtaatatggaacaaaatccatttcttttaataattttctcaattataatcattccttaaatagtatttattattattattattattattattattattattattattattattattattattattattattattattattattttgaaaagtttaacattgttaaatagtaactaaattaattgaaacaaatcttgtaaaagtttttttttattttttatcttgaataactacttttattgttggattggatcttggattaagtaaaagcaaaaaatcctagggatttcatttggtgggcaatataatctaaaaattactaatacctaatttaaacttaaacgcgtttacttaaatagatatatgtacttttgtatatatatattacattttacttttttggcttaaaatatattttttgtttgataatttttttaaaatgtacttgttttcatatataagcatttatatatagcctataattctatatatatcataggataattgtggcaaaatttattagatagtttcctaatttattacatttaatttaatacttatacataataaagtaaaaatatgtaaagtggtgtttagttataaaataaaaatacaataaaaatgagaatagaaatagtaataggaataagattaagggaaaaaaacagaaaaa

SEQ ID NO: 198757 - DNA, 934 bp, Cannabis indica
ataactattgctccaaaggctcaactgcagttttgaaaagaaggacataaaccttatcgatcgaaaaatacaagaatcccccgagcgaatgcgtgacataagaaccgaagcttgttcctacaatgcagtgccaagcagggccataggatgagtcaaattcctgtcaatgcccaaaaaaaaaaaacatctcacaatgagtatccaatcaaagggtagtaactagtaaccaacttatacacctattattttctgttactagttactacttatcctaaaatgaggttacaacataagtggttgaaagaatttcaaggtcttccatttatagttcaaaaacctcatatcatgtgcatttatacaatttgattgaccttcaaacttgggataagcttgaaaaagtgtagtgtggtcttacttacacacacacttgttatttaatagcttagctgcattgaaaatgattgagagaagtttctatacagttgcatttatttgccctattcccttaaaaatggggttatcagtagacaattactgcaccaactaaaatgttcaaaaaatccttatttattattattattgttacttttgtcagaattcagtaaatccttattgggcctacaaattttaataacttatagagagctcatcagttgggtatataggatctttctgcaacaagaaaaatttagggaaaaggtatcataggtaggctagtggttacaaagctattgagccattatgatttgaagtttgagaaatactaaaaggtactacctttaggtagtactatacaattacaattaagtatctaattttatttgtaaaatattaataactaatcataaaatactatttttagataaataaacaatattgatgtccaataacaagactctttaaaattaatctagtaatcgttctagtaaaatag

SEQ ID NO: 198758 - DNA, 3475 bp, Cannabis indica
attcatcttgatgataggtcaaatgcttatcctagaggtgtcataatatatgtgctagtaaaaggcaatgaattggtgtttccagcttacttttatgttcttaatatggaagatgaacccattcatgctccactctaatctttttgtgaagaccattcaagaaaactgtaaggaccaagattgatgtgcatgaagttactttgactatagaatttgatgggaagataatctaattcaacatctttgaagctatgaggtatccaagtgatgtacaagttgtttattctcttaatgtgttggatgttttttctgaacgtgtcttagattttcataatgaagatttcttagaagttgtaataagagagtatcttgtgtttaatgatgaatatttttttgatgacatcatagatgtcataatcgcactcaatagtggtttttgacaagatttataaaaaggtttcattctttgacttatcaatttaaattgagaaattacaaccatctattctacaagctcctatacttgaattgaagacactcccagagcatcttaaatatgtttacttggggaagaacgggacactatcagttataattgttagagatctaaaccaagtgtaagagaaaagtttacaagagttcttcgaaattacaaaactgctatcggtggtctatcactggtattaagggaattagtccttctacttgcatgcaccaaatttttcttgacgaaggatctcaattgaaacatgaggcacaacaaagactaaatcctcctatgatggaaatggtgataaatgagatactgaagcttcttggtgtgggcattatttaccaaattttacacagtcaatgggtgagtcccatcaggtagtgtcaaagaattggtattacagtagtgaggaatgaagacaatgagttagcaccaataacaatgtaaatcagatggcaagtttgtatagactaccacaagctgaacgtggtgacacgtaaagattcccattagcattcattgatcagattctttaaaggttaacaagccatcgttattattgcttccttgatgtttattcaagatataatcagattattattactcccaaaggtcaagagaagacaacatttacatgccctcttggaacattttcttttaggcgtatgtcatttgtactatgcaatgctcctataattttttagtgatgtatgatgaacatattttctgaatacagtaagaacatcattgaagtctttatggatgattttagtatttatggtgactcatttgacaagtgtcttcacaatctcactgtcctacgtggcagtacgtgcaattttgatcaacaggaaaccccaaaaagaacctaaaataatgacatgtgaactataaccctctacctcgaagtctttttaaacgagtaaagttgtaaagttctttaaacggggtacttacttgtggtattagaggttggggtgtcagtttttgggtcgctggtgagatgcttgcatgaatgttgcaaagcctccttgtaagctcgtcgaagtccctttgaaaatccattgaaggtggttctagagtggaaataagcggactggcactctgaaatagcttctctcaaaattgtaacaatttgttgaagagctccgagccaagatcagacattcaccggcaagtttctgggtttaggcggaatttttatctcttggagatttctgaaaaaaatttgaataaatcactaaacatgccaaacgatctatttgtggagtatttataacaaagttggcgatctgcgtgacacaaatctaagggctcaaattaaatctgagaaaacacaaattctaccatccaaaggtctaggaatatcaaggtcacattcaatgcgatccttagaaccgttgggacgtatttttatggtgatattcaactccagtaacacactaatatgatcaatcgtcaatacaaaacttgaggcatcacgcgctgcagtagactgcgtgattaacacgtaccaacaatcgtttgagacgtggattgtgccaacaaaataagaaaagtttggaattcccacaatacctcacaatagaataccaagaggtcagtccatctcatgttgttgaatacgattttaaatccaagcgaaggtagcaagcctctgtgactctcgagttgcgaaggcttgaggtaaatgttatccatgttattgaatagctagcacgagggccattattgaggcccattagggataccgggcccattaactgggtctataagggtcaactacccggcccatctggtatcataatcgtttttcaataacaagtatggacacgaggtctaggatagcaattaacacttaatagaaaaaatgttatgaaatcaagaacgatatcctcaagggccatccgagaatagaatacgaaggggagttcagaataacttattatcctggaagtcgccccactaggcactcctttaacacgatcctaatgaatcaagcggcttgtcccttgcgtcagaccttggaaaggctcacaacaaaacggaaatcacctttttgggcgaacaccaactattctaatattctttattccccacaatggctcacgttaatctatcactgttgacagtacgaccgtgtacggaaggcaactcaattcaaattgggcctcacctacctggcccaatagctctgtatatgttttaattgaccttatcagtgggattttagcactaaaaagaaccctaataggtttggattagtccgacccatcaataacttgcctataaatatggccttaactcttcaggcaaaggggtgaaatttctagtgtccaaaaaccataaatatagtgtaaacactatagccaagagcttaataacagtgactcgtagactaaaactcattaatgcccagaccacataaaaattaatgtcttattcttttcttaatcatactttctttagcttaatatttattatattctgttttcgaaaatctcgataaatacttagagacatagaacaacaattatttttttttaattattgttgaagaattttaaaataatattttacttttaatactttacttaatttagtgatgttaaaaaaaaataattaacaaatattaaataaaatagtattaaaaaagtaaaaatattgtattggatttgtattatcatgagaatttggattagaaataaaatataaaatttacaatatcaaattctatatttatcaaaatagtgtggattagattagatgaaaaccatagtgtacacacaaaattcgattcacagcccaaataaatatggttttcaccttttttcttcatacaaataacatatttgaacaataaataaacaatttatatcctctaattaacttcatgatcataggccgagcgtgaatggcacgccggtggacggtaaccaagacctgccagagataagacttccggcagtaaactgtgaggcc

SEQ ID NO: 198759 - DNA, 785 bp, Cannabis indica
aaattgaagagaaaaatcaaaatctcacattgattgataactcactaatttgattcaacttgcgaagttgcaagaccagaatagggaacagaacaactctgagactcaatgtagagaaagcaataactatccacctgtaattacaataacatattcaatattcaaagaaatacgtaagcaaagcaaaagaatcttgcttcacaatgataataatgatgaaaacatcaaaactttctcagtaacgaaactcagttaaacctcaccaaggtaagccagtaaggtcatgaaacccatcaagtattgaaatgaccactcgaactggaaggatcgattcatcattaccaattactgaggcggcatccatcatagtagactcgggcaacttagtgatgaaattgatatcaaaatcttcggctcttccgtactccgaatcatctccagaacgagtgaaaatagttcgagagtataacaaaccagtagcccccaataatgagtacggactacttgacaagaggctgggtctgcgatgatgggaagaacacgggagagggcgagtggcattgcaagagttagggtcgggaataggattggtgagaatgggatattcatatgcatgagagagagtagagagataggttgctggaacagaacggcggacgcggttgagaattttgtaggtcgccattgacgcccaaatttggacgagctcctctttctttcaaaccatgaagaagaagaaggaatttggtattaatttgtgctgtatgtataataattttaaaaaa

SEQ ID NO: 198760 - DNA, 2508 bp, Cannabis indica
ccgtcgacgctcagcctccagctccggccccagtcgcaccagctccggtcattccagcacctttacttcaacccctggcgcctatcacaatccgtcttgaccgtgacaactatgcctactggcgctctcaggtcatccctgccgttcgtgcacatgaccttgacggatttatcttcggaaccagattatgtccgccgcagttcatcgatggccctgtcgaaaacaacccagacgctccacaacaggttaaccctttctatactgtatggattcgtactgatcaagctattttaagctggttacttaattctatcacagaggccatgttaggccatgttcttcgttgtcgtgtgtctgcagaactgtggctgctacttgaaaatctgttcactacacaatcccgagctcgcatcttacagctccgatttcaactacagtccttaaaaaaaggatctctgtcgatccatgactatgtcctcaaaatgaaatccattgccgatagcctcaccgctgctggacaagctttcaatgatgacgatctcattctctatatcctcggaggattaggtccggagtatgactcggtggtcgttaacctcacctctcgaggagatcgcatcactatttcagaggtccagttcctcttgcaaagccaagagatgcgaatagaacaactcaataccgccactgcagatcttgttgcaccctctgccaactatgctaatcgaggtagaacaaactttcctccctcaaactctggcagatccaccaatcaacgtggccgtggaaggggtcgtggccgtggcaacaaccaaagtcgtgttgtgtgccaactgtgtaacaaaccaggccatccagcttcaaaatgctatcacagatttgatgtgtcctttgttgctcaaaatcccaacagcggcacaaatcactccaatcaaaccacttccaacaatggcaatggacagcaggccttcttggctaactttggacagccacaaaatgacgataccaattggtatgtcgacagcggagccacaaaccacatgactgacaactcggcaaacctacaaactcaagccgagtacaatggtaagacccaagtcaccgtaggtaatggccaatctctccctattactcatattggaaattctgtcattcaatcccatgtttattctcaacctgtcaaactaaataacatcctctgtgtgccaaacattgctaaaaatctcttaagtgtttcacaactcacaaaagataacaatgcctatgctaaattctactctaactcatgtgttttgaaggacaaggattcgaagaaggttctacttcaagggacggttagcaatgggttgtatcagctgtccactccgccacatcccaagtccacctatcttgcctcgcaagagtataaaaataatcagtcaagtagttgtcccaatatcgagtctgtttccacttgttttcaagcgtctgttgatgagtccaacttatggcaccttaggctaggccacccgtctcttaatgtactcaaacatgtgttagttaatgaaaagaaacctttatcatctaaagcacatttctgttctagctgccaattaggcaaggctcatcacaaaaactatgctctctctccaaaagagtctaaacatgcacttgatcttatacactcggatatttgggggccatcacccattttatcccgccatggttaccgatattacatccattttatagatgatttcagccgttacacttggatttatccccttaaaactaaatcggaagctattaatgtctttaagcactttcaagcccttgtcgagcggcaactctctaccaccatcaaaaccgtccaaacggattggggtggtgagtacagaaaatttgctccgcatctcaccggtttaggagttcattttcgacacccttgcccacacacacaccaacaaaatggccgtgccgaacgtaagcatcggcacattgtcgaaaccggtcttactctcctagcacactcaagcatgccacaaagattttggtgggaagctttccaaaccgccacatttctcattaatcacttagccaccccggtcctacactacaaaagtcctatccaaaaactttttggcctaaccccaaatctcaaatttctaaaagtttttggttgtgcttgttatccatacctccggccttataactccaacaagctacaatttcgatctgaaaaatgtgtgttcatcgggtatagccctcgacacaaaggctacttgtgtctccatagttcgggtagagtctatattgcaagtagtgtctcatttaatgaacacgaatttccttttgctcacggttttaactacccttcagcacacacggattcaacacttactcctagtcaatttccacaatggttaccttatctccccaccgaacattcgcctggagttaccgctgatacaactcattgctctccaagtcaagaagtgtgcccctcgactcctttgactacatcacacc

SEQ ID NO: 198761 - DNA, 922 bp, Cannabis indica
attaattaatttttttttttactctgacaatttaatttaattattatttttaataattgtttgtgtgtgttggcgatttgcggtgtggtgtcggcggagatctatagagggtaagctggaaagtgatgcattgactgcaaatatggaccgattttcgcgtgagatttcatttatgaatgcgcggtcatagaaaaagaatgagctgacgtgtccaatttgtgattggttacctcaggagatgtaaaagtctcgtgcgagcgtgtgccatggacttaattaatgccctattcatggaaatggcagcttcgccaccgaagcttgccaatttacacccgacgagattcgattattttactagtacttcttcactataattaatttgctacggcttatacaaattaatttcttaactaagtactattatattatatttagagtaataaatctccctatattttacatattatcaccattagaaaaataattgggacacaactcaaattgtacatatttattacacattatttgtatattattttaatatttttcaattgtggctgatgctttagcgggtttgctaagggacattgccccctctatggcaatgagtttgtttggtttccttcaataaaatgacttaattaacaaaaaaaaaaaattattttcgacattttacgatatattctacgatatgatttagttagaaactgtatttaacgctaataagtttttgcaattatttgtgatcttaattttgatgatatatgtcggagtgttaattttgtatgatctccaatatttttttattgtttgcgatgtgatttaatcagaggccgtaatttaatattttgtgattttattttcattgttaaattacgagtgtctttttttctttgcatgtatatttttttatatattttat

SEQ ID NO: 198762 - DNA, 700 bp, Cannabis indica
tccaggttcgatcagtgtctgctaagtacattatgaaatgtgatgatgatacatttgtaagagttgattctgtgatcaatgaagcaaaaaaagtacctgagggcaggagtttgtatataggaaacataaattattatcacaagcctctgcgatacggaaagtggtctgtgacatttgaggtacggaataacttattggatctgatacactcatttgttgttgaagttataaaccttatttaatgagtcaattttaattctcttatttggtaataataaagtagttaagatttccctctgcttcatgcacagacacaaatgaacgtgcattatagcaccattaaacatgatgctcttgcttccttcaattagaccttacaaataaaagaatcactattgattttgagtagactggcggcttccagaagcagagaaagcacattcataaatggcttcaagtctttttagagttcacaatatgggtcttccattttgtattagattaagttttagagtttacatcttgcaatatcttctcacaatttctttttattggtgttcaggagtggcccgaagaagtttatcctccatatgcaaatggacctggttatatcatgtcatccgacattgcacgctctatcgtgtccgagtttagaagacataaattaagggtaagcatttctctctctctgttttgtctt

SEQ ID NO: 198763 - DNA, 597 bp, Cannabis indica
agcagtagacattgaagaaaatctagcaatctctcttgcgaaggaggtggctattgaagaagttctagcagaggctcctatccagaaactttagcaggacattaccctagaggctactccggaggctgcaccatccggggtaactataaaatgtaagggcaaggggaaagccaaggctccacatcctacgcatgtattcaatgcttccatatgggagacagatcaaaaactcaacaacttcaaatcatatggcatgttggagctttatgccaccaaagccagagtacataacattccagggttgatgtggcataggttatctaccgtagaagagtcgtcttacgtgagcacagacgaattcagtgcttggagttgggccccacatcgtgagtgggccataactccccttgaggcttacttcgcgaaatttattgcgcggatagggatagccccctttcaagttaatacctctagcttacaagctcttagtcggatggtacatcttctatagatcacaagctggagtgcctactcggagagatccgttattctatggtgtgaagcctcaaaccgtatgcgcatcgaattgcaagctat

SEQ ID NO: 198764 - DNA, 619 bp, Cannabis indica
cttgcctcgaatcctgtcttccacgccatgactaagcatattgaagtcgatcttcatttcatcagagatcgtgttatggaagatcaacttgatattaggcatgtctcagctgaaaactagataacaactattctaacaaaacctcttcccataacacagtttgagcattttcgatccaagttaacatagacaagccctagtgtaacttgagggggtgttaggtcttgctctgtcttctcttagagtcagagagtcagttagattatttgtttcatgttttaactaatcttttgtaaaagctgttatgtcaagttctttggttagtttttctaaccaactctagtgtttgtaatctcttcctataaatacaagtctctcacctcagttgagattgagctttatttattttcttttctgaaattctttttttgcaaacatcaacaaaagttattagagagagcttagactagtttattctaagcatttatatatattgcatataacttttttttttctttcaaagaaacatataattttttcctcgtttttttgttataaatataattgtttttcttttagaacaattataattactttgttgtatatagtggtattgtgc

SEQ ID NO: 198765 - DNA, 1030 bp, Cannabis indica
atgaggttttaagaaaaaatgacctattttactaatattgaatatagaaaaacaattttggcccaataaatgtctaattagtcaaattttccaatgtaaggcgccacctataagtagtgctaaacacattggtgccttaattatatgagaaatgctaaagggcacccttatgagatgtaatattgctattgatgtaattcaatattgggttcttcttattttaatttaataaagattatagagaacaactaactaattataagacgtcatgtcatagcaatgctctaattatattgttaccaaaagagaaatgctaatatacactagtggtgcctagcaccctcctacagcatgtcaatatcgttattagtccaattaagtatcgggttctatataatttaatgtaataatttttaaagagtatcattaaccaatcacaaaacgacaagtctagaatgcactaggccctaataccaatgcttaaatattatgtggctcatcataattggttattacatgaatataaaattattcttgactttgacttcaatcctcaaagaagaatcatattagccacttcccctagttaataatacttaaaacttaatactctcacattttttatataaacattaattaattaatttaattaaattacaattagtttagaatagtcagctgtgaaaggaaagagccttatcatttcactttcataatatatatataaggaacaagatttagtgatccaaagagaaaatagagagagagagagagagagagagagagagattatatatcaatggtgagagttttgaaagagatcggcttcggctcaacagggagcttagccggcttcgtaacagtattattggctcttttaatgactctggctctcatatcggctctggtcttcgtctgtgccgatggaccctctaaagaaggaaaagattccggtaatacttacggcagcggtggctgcggaggtgctggctgcggtggcggtggttgtggtggcggttgcggcggttaa

SEQ ID NO: 198766 - DNA, 631 bp, Cannabis indica
gaacctataacaaccagttttgcaacccgccggtttgtacaatatacttatgttgaaaatttagttttatatttatttatggtactttattaatatagtatgaattttttagggataatcttaaaatcttattaaatttgtttttttttgttttgttaacatgaatctattatgaatgcaaatgtgtaaaaaaagaaagcgaaatgtattctttaaaaagtgcatgtatttacaatccctaagttacaatatctttaaattttttttgttaacaatttagaaaaaaaaaatgtttttgttaacttaattacaaaatataattttcagcaaaaaaaaaaaaaaaattaacaaaatacatttaatttttttacaaaaaaaactaattaattctttacttacaatttaataaagaaatttttacaccaaagatacaaaatgctaactttattacatatataccacaacacggctaaagcaacttttatacatttttgcttaagttttttacatttttaccacatgcacacacatttcatacatcatttccctccttttctcttctttttcatattattttatatttctttttcagtttttttttttaaaaaaaactaatcaacctccatagctg

SEQ ID NO: 198767 - DNA, 1148 bp, Cannabis indica
ggacacggactccaaccctggctccagtcagagactcggaccacaacttcggcctagactcaaaaccgacttaaataaattaaaataaagttataaatattattttatttttattttagaaattaaaaaataaaaaatagttataaatactatttttattttttaaaaacactaattttacttttatttttataattaaaaaattaacaaataaaaatgttaacactccctaaaaaaaattgttgtaagattatttcaacgagtcttctttgatacttttctaataaggggtaagtcatgcatttttgaatgcatttatcttttgtctttttgtatgcatttttaaataccagctactttcatttacaatttttcttaggtataatacaaagtgatcactccacttttaatgttttctaatttgttgggttgaccaaaaacatttgtcagcaaaaattaacattgtatttcaacaacgccttctggatagtcttttagaaagtgctaatgaattggacatttttctgaaaaggaaagaaaaagagtgataaggtattaaaagaaatggatcatgttgttaccatacctattcaaaactcttgacttttgtcacacatgaggattgtaataatcttcaagttcaactcacctttgagtctaattggggcagcaattctcaatgatggccattatgaaaaggatctacttacgtttattcaaagattcattaacaaaatggtcatataaatctttgcttacacatttatcatcattggtaaagttttagatcccaatatcgatcaagtggctgtggcttgctcatttttgagataagaaaaatataaattaggagggaagttaggcgctagtggtaaaggttgttatatctaaacaaaatttgtctatatttgaggggattaaaaaaattcaggatggaggtgaggtgaaccgatgccaaggttgcacaccaacaaattatatgaatcagatattttgctgttctccaatagaaaatcatgcccatatgataaaactgaataattactccaaaacacacacaaaaatagctgtacataaaataaagtaaacaaaaaaaaatgtggattacaaggtgcgtaaatctcagttagttgtcattatcactacta

SEQ ID NO: 198768 - DNA, 911 bp, Cannabis indica
gggaaatgaaattaaaaaggactgcccacctcatccctccaatagcatttcgccacgtcatctccttcgctttttttttttttagtttgttaatttcttttcatgtaagaatataatttccttacataaaattttagatgttggatttacaatttccaaatacttttaattttaataatataagagaaaaaatagtgtttgggttaaattctcccaaaactattgattttgagcttaaaaaattaaatgtaagtaaaataataattaagaaaatttaactgcaaaaaattggtgaaaaattaaaattatttggatgtcaaaacacgacaaatttacatttcatcgtagaattttagtgtattgagtttgcaaatagataataggatatttttagtgtcaattcagagttttacaaacatgatatatgatacattaattaaaaaactatatgcagaaacactatgcacaaattctcccactactagttttagtaacacatcatatgcctcctcctccataacacctgctctagccagtccattgatgaagataccaaccgaaacagcatcggggcgatttcatgccccgttcgggttccttgccctcaagtacccattcaaaagcacaaggaaagcaagcttgttaattggaaaacccttttcaatcatgtcacataaaagctttttggctttgtttaagcaacccttcttacacaaacccaatagcaaataaccacatgtggaagacgatggagttaaaccgagtctactcataatcgaataagcttcataggcttgttcttccaaccctgctttactataagctgcaataatagagttgaatgcaacaacactgagaggaaatcctttctcgagcatattttttacggattccatggcttcatccaaccg

SEQ ID NO: 198769 - DNA, 2133 bp, Cannabis indica
gtttagtactaactcgactcgctaaagtgacaaatgtcaaaattaattatataaaataaaaaaaatatttattatttaaattatatatatactaggtattagtaacatgcaatgcatatttgtttgtagttgcattagagttattattacctaattattaatttaaataataataatacaattaaatttaatacagttcaattatattttttttaaaatatataaagtttaattttaaatttgtctataaaaaatatatttaactaattttattaaataataaaataagtaaataggtttatatattttatattaatataacttagaaatttattataaaatataattaattaattgaattaacttctaattcaaatttaaatttaaattcatataaaaaactatctaattttgttgatacttttaaattaaatttaaatatttaaaactaattaattttttttaaaaaaaaaagataattaatttattgatttagcggggttagtttttatcattaactttaacggaaaaataaaaaatttagttaagccaataatttttgttaaataattacatttaatatagagatagagatagagatataaattatttgaataattatataaaatgaaaagatatatattatttgaattatatatatatatttatatacttacactggctaagttgacaacatctcttgtagcaatagcaatgatatcagcacaagacacaacttgatgacatttgctctctaaatctttcttaatatcatctataacattataacctcttacacttctatttgggccagcgttcttctcagttgggcttccatctttatttttctcaattagaatagaagcatcacatccctatacatatacatatataattagaaaataatcataataatatatactaattaaaactcataatgaaagtatgtgttagatatgtagaatattggaagttagtttaaagttttttttttttgacttttgaagctccaaaaacacttttgttattggttgggtaactaataaatttttaccttcaactcttagttttttttttttaacaaaagcgaataacttcctgagaagactaaaaaaaaaaagcaaaagctagaattcggtatggtgcttaattttgttgagggatatttttgctggtatatattgatcgagatttggatgctcaagtagaataactcgtcatgctcttatgttattgggcattgtactattaggtattaaattatgtgagatccaatattaaattataagtattattggtgccctttattgattcatgcagtgtccaccctatgcatgtaagatggtcggcgttgaataattaccagtgtcgcttaataatactcatgacaacatattataataattatatattaacgcgctatttatgtgggatactctaacagtaacgtgtaccttaacaaagcaatcgtggaactgcatacgaagaagtgcggccacaagagtccggtcttttccaaaagctaatttcacggcatctttgattgtggcctcaacattcacttccgttgttgttgtttgagatttcgagttgaatggccagaagccggtggtggtggtggtggtaatgttgctattttttgttgtagtaaccactttgcaatgctccataacattgcccaatactcaaactcaaaattataaagatacctataataggagccatctccaaaaccctattattcttcatttttcaaatatgtataatgtatgtatgattattattattactaggatttgtgaatattgagttgtggttttaatgtttttttgtgtctatttatagggaatgagaatgtacttgtagaccttaattataaatatttatatatatgcttggcacgtatatatgatattgttggtgatcaattttgatttttttgtaagctggacaagacgtgctatatagtcgtgtgtatatatatatatatatagatattatatatatatatattgtggattaattattataatatttggtatatattatagattagtgtgttaatcatgtgtttaagttaaggtgtgatattctaagacagatatgtgatctatttttttgtcctaatttttg

SEQ ID NO: 198770 - DNA, 861 bp, Cannabis indica
taattgtgataacgtaggtcccaagaatattgtcttcataattgatcacctctacatttcactttagttcttctctcactcactctttgcatttcaaattcgttcctgaaccgattgtgtctgctttcctttgtgtggtgactggtgagttttcatgggtggtggtggacataccctttgatttgctttctgagctttattccattccctcactttataattggacaaaactacataataattatcaaatatctcttgatctgatttttaatgagctgtatacattcaaatctaacacattttatgaattaatctttgcagtatattcgtttgcgatcatggctgctgaattggttattggagggcttgtctctgcttcccttaatcaggtgtttgatcagttagttacaatggcttcagggatggtggacttgttcacaggaaaagatgaagccattcttaggctgatggaggagttgaaagttaagatgtccacagctgatctactgctcattgaggctgagaagaagctcatcacagaccacaaggtgaggcagtggattgatgatctcaagaacaacatttataatgcagacgacttggtttacaagatccagactgaagcattgcgaaatgagctcgaaagtagtatcctaacttcttattattctactacttttaataatgaaataaaacccgagttggaagagatacttgagaaattgaatctttatttagatgtaaaccaacatcgtttggaacatttgaaagggatgaggcttcctgaaagagaatgggcgcctttgttggatgatgacgaagtttatgggaggaatgctaacaaagaagagattcttgagt

SEQ ID NO: 198771 - DNA, 927 bp, Cannabis indica
atacgctcatctcagctaagagggcatataacttcaagtaagaccttcagaatctgtggtccttgagcaaaattttcaattagcagctattctaaaccccttacggatgagcttctcttattactttctatttttctattttataagagaggatctaaaacagataattgggtttcgcaagttgcctgattgtaaataacaaggctgatagttgcctactttttgatgcaatatttattcctttcccataattgagtttagattagaaaatattgtagagctctttgtaaacagagcatctgctttttcatttccttattgcgatagaatacaggttggtatttttgtaacattgcagcaccattaatctcgcatatgtatgcatttatggttcaatctttccctccttttctaattaaagattttgctaagttgtaaatgactgttggggcaacttacacaagatttaaattgcgaactagcacacctgagcttgtggcgatcaaattaatgatacaattgatttgttgagataaaaaaaaatgagatcatcgaatttcgagtgccatgcctacggtaaaaaattgtctcatccatactattactatataagtgggaacaaaaccttgagttccaaaatttcacctttggttgtctaggtctaaattattgagaaataatatgaggaaaacctaatggccaatttattccgaaccaatattcgattcacacaacatcaacattggatacaagtaatgatatttgcacacttatggtaatttttcaaccattcatattcatttaagatggatcatgtttgtgtgtaacatgtgtgtgaacacatatcattactcttcttaagttacagataaaagaaaaaggtacatatacgaagcctcaactgttaaacttcacccactccactta

SEQ ID NO: 198772 - DNA, 2771 bp, Cannabis indica
acccaatctctcttatattttttacattaagatcattatatcattttttattagtcattacttctctagccataatatcgttaataagttcttactgttaatagtttggcaccatctgggggaaacacaaagttcaagctacatttttcttagaatgatcaatcaatgttccaacatgaaaaggtattctcgacttcctaaagatgttgaaatttttctacacaaccaacgactggtggtcaccataaggaacctctcaactccaaccacttgagaaagctcatgtggaaatgaccaatgtggtaaaatttgaagcctagaggactaaccaacttggcgcgagaaattcatcatacctacacccaagaaaactagaaagagtggcatcaaggaaggatgaccctagggggcattcagcggaaagaaacctaggacctagctcgagaagagctgcctacatgcccatgatctacccattagagctacatccagcgactaacaaaaaagaactcgaaaggtaaggccaggtcgacttattatgatgtaatacataggtaaggctaggtcagcccaatataccatgacgtgtatgcctaagtatggtacctagaggtaataaagtcactttttaacataaatgataggcatccacgtccaccacgagtaatgcacaatgacccttactcaaaaaactctccatacacttggaaccataccacaaccaagggggaaatcccgataagactcccccatgggggaagaagagagccccttgcagtgcccaaatgataaaatgagtagagcaaaaaccattaccatgggtgtaacacttgcttaggcaacctacaatggttttctaaatactgtccacgcctttgctaatcaaaatttttctcaaaaatggtgcccaattaaaatttttaattaaccttaaatttttataaatatataaccgtacataaaattcgggatcccatcttaaaagtttacaacaaactcgaaaatacattttataaacatctcgctacacaactataaaataaaaggcccaagtcgtcttgagaccgaactctccaagtttaaccatcttgatatgtccaatcatcctcaagccctagactcactggtgcttagcctttgcctttcctttatctacacgtgcaaacaatatctgtgagtcgacagactcagtaggaaaagcatatgacatacaatatattaccgacttctatttaggcacccatacacctatctaaaaggcttaacaggtgattaagaacattcttaacaaaggtacgacatctataccacatgcactacataccactactgtactagtgttggtagggtttgacccctaccccaagtaccactgagtgttgtaccacatgcaccacgtaccaaactgtactagtattggtaacaatgaattgtacctttaaccatcatatggtttaccaatgcactcaataccgctattgtacaagagttggtagcatatgaatcatataagtagcatgcatataatacacatacagatatacataaatattctatgctagtcttacctcatttctagattcaagtatgtcagtcaatttgaatggaaatgtcactttctaaatggatgccctatgtcacattaacataaaactggtaagtgtctaatctagaacactttctaatacccaaaataaaatctagggttttctacctaactacgtggtgaagacaccctataaaaaaagacataatttggctctaataattataacatgttgtagagctcgtcatatgctttcaaacagtatatataatgtctaaaacagacacccaagtgaaaagttatggccaaaatacgaaaatcggccttacctgatactatccaaccagaattctagttggtatagccctaaaccaactgcagttccggttgtctgggcagaaaacacaaaaatttccaatcttccaacccccataacttggtccaatcaatctcaaatgataccaaactttctagaatatcaacatattacacaaggaacctattgcataggttaaacacaaaaaattatactaagaatcaaaaatttccattgttgaggaagctttgagttcaaaaactaaaacttgctcaactcacaccacagccactacaagactttcaaacagtcctaaatcaatctattaaaccatccttaaacttcccaaacatgaacagaagctatctcaaataattgtattcttgaacctaatgtttaactcccaaaactcaaggaaaagaagtaatagggcttacctctgatttgcaccaccataataccctgtattcaagctgaaaactttgaaatttgatgaagaaactggcttggttcttgctagtttcttaaggtcgaagagaggacagagagaaatgaagaggtcctttttttctttcataaattggataatggttatataacttaggttatcccaacattaaaataagaatattaaaattatagtttattctacaataaaccaacagaataacataattctagtttaggcaaaattatcatttgcccctttcttgaagcttaagttactataaggtaggttgagcataaaatccagaaaactgaaaaaatcgtttaaatcgacctaccgaacaccgctggaaccgaaactgacggaaacaaaaaaccgaaaaaatcgctaaacggttaaaactgccattgaacagtcgattattttggggtaataagtcgaccgaaaaaccaaaaccgacc

SEQ ID NO: 198773 - DNA, 892 bp, Cannabis indica
gcatcatagttaaaatttagcttaaagcattagagttgattttcgatcccaaacagagcgtgttaagcatccaaaacatagaatttttcacccatatattatatcttagaactccacattccatggtaaattcattatatattaatcttatttaatatgttttttccaattttcaattcatataacaaattttaccatttaaacttgaaacaagtaaaaaacaaacataattttgcaaaaaatgaacatagctaactgaaatatatctctaaaatgcttcataaaattcacctaaaactagcttatcacactcttcaacccggtgaaagagctaggcaccacagggtgccatggtcccacaattttttttatttttcaaaaaaattacatgtaaagctcattaaaaatgaaaataaataaatttttatttttttttagtgtatttcccccctttaaatttttgagttggcttcgctattggttcaaataacctatttcacatgcgtttaaaataaaagaggtatgcatgcaacaaattgtgtgaaccttgtttcgatacgttaaatttttctgaaaaatgtacacgatcatgaaaaaaagtagagtaaaaaattctcctaaatgtcagagcaaatacgtgtgtatcagaggtgtaaaaaaaaattcttaaaagtttttggttagtgttgcaaatttttttttaaaaaaaatggtcacaaaattaatatacaaaaattttaaggttacctatgttaaatgccctgacatagttatcattatttctctaaattttgtctaaaaaaaaaaaccaacaaaaagttcaaatttcttttgctccaagaaaagttcaaatttgacttaaattgatcgaaagaaacgtatgtgagtgaga

SEQ ID NO: 198774 - DNA, 1145 bp, Cannabis indica
atttttatttatgagaacttcttttttgtaataaaaccaactatagttttattaataggtgatttctcatcttatatttatatatatatattaaaatttagagaaatgctaaaaagcatcagtggtgcttcattattggtttaatttagtatcgggttctatataatagcttttagagagtatcactagctaatcgtaagacgacacgtcttaagggtgctaggcaccagtggtgccaaatagcaatgctataaaatttgttaaaaaaaataaaaaataaataaaaatagtcttcatttcccaacaaaatacatacacataggtgtttttttgtttgtgatgatatatataaatacactatatataactagctaactactactactacacttgtagtgtcataatcattaatatatcattgctttaatggaagaaactcaatgaattggcaagtagtagtattagtagtagtgacacttgtcgcgataccattggccgaaacatcattctctttctcagtgttgtaataattaccacttctaagtggaaacagctctagggtttgagactcctcctcatcctcgtgatcctcatcctcttcttcctcatgataattttcatctctatacggtgtcgttttgaaaatatcaatattattgttcttattattataattataattaaggagactttgtctttgtcccattgttgatgttgtagtaagtaacaatgaggtggctgcagtagtggtaatattagggttagggttagggttgttgttggtggtggtgatgacgtggcaagtagtgggaagaagaggaagacaagacaactgcattgtctgccacgtggcattcctttctgtaataaagtttcttctatgctgttgttgttgttgttgttgtaattctccttggttgaattgatgatgatgatgatgatgatgatgatcatgatgatgagtccattgatcagattctcctgttgcttttcctgacctttctattgaaacattacattcctgtttatttgtaatgtttttttgttattcttactatacacatgcaaaaatatatataaaaataaataaataaatactaaaaatatagggcactccatattaacctttttttttttttcttctt

SEQ ID NO: 198775 - DNA, 571 bp, Cannabis indica
ttttaaaaaaaaaaaattgaaacttgtttccttcttcaatgaaaattccctaaggaaaatatgaaaaatattgggactgaagtgccaaaagaaaaacaaattaaggactcaagtgcaataatactaaatgatcagacacaaaccgcccactatatttacatagagaaaggcttccaagtccaccgcaaatctcatttgttccattacaagtttacagcgatacttttctttttcgatttaccttctcacttctcacaccgtccgtacatcaatggctaccgaagcggagaaggcaagcgaccatactccttccattgaaccccttaccaagaccgccgacccactacccccactacaagatcccaaactcgatgatgtccccgaaaaggagcttgacgatggctccaagccttatccagctgactcctccgccgccgagaacgctactgcgcctcccttctccgatatcgagaagaagatccggagagccgagcgttttgggataactgtgcaactatctgaggtagagaggcgcaactctcgagctgaaaggtactcttcttttatcgtt

SEQ ID NO: 198776 - DNA, 1183 bp, Cannabis indica
agagacaataattatatgctatccagtacatgtgtatatatatataaattttctcatatttatatttatatacatgttgaataaattactagctaggacatgatcagataattttcaacgtacgtattattatcacagccaaaggatttgagcatatatataccacataaaatttcatgattctacattttgaaactacatcatgatatgtagcagccaattaatccctcatgcaataatatatatttaatttcaagttaatttgactttgcatatttttctaatatttttattcagtgtaccgtcaatatatataaccaaatttattaagaacttatttgaatgtcatttgtgtaattagagtagtaattatgctagtaattacattatatttttaaaatatgaagttattgtaaacttgtgatatggatttctaatgtgttgttggcaaattagttagtaattaaatagaaaaattatattttttaatataaatattttaaatgaataaaatttgtaattacactcaattctcaagttggtaagagctagtgtaattggagtttcaattacttataattacacattttttttttaattacatgattaaataatgtaattaccttcaacaatttcttgatatagctttctagctaaacgaccctaattaaagtactaaattataccttctcgtaatatataaagtatataaaattgtataccatattttattttaataatatgaaataatatatatacgattaacacaacatcatgatcaccacatatataagtgttttgatagattaattttgtcctatatttggcttcgttaactatataatatataccatgcaaatgaaaatattctttgatgaagatcgatcgagagtactttctcatgcactgtgcttataaatatatattataatttggatatgtaattaatatcatctatttatatctattttaaaagaaacctcaagatgcccataataagaatattcttaaaagttaaaacatcacttatattatagtgttatgtcaaattttacaacaagtgactctattttttagcaaaagggatcttaattatttgattaatttatgattacatatacaatatatatatatatatataagaaaaatcgacccctccatctaatcataattattactaaga

SEQ ID NO: 198777 - DNA, 669 bp, Cannabis indica
aagtattggtctgatgctttctatagatgtgtgctcatgcaagaagagttacaatatgcgaaaaagaagacacacgaagtcccccaacgaattcttgagatgttgaaaatgtaataatttaattactcattatataacaaatcttttattaattaactaagttatatatatatgttaattaattgaaatactattataagggacatcgcgtgtgtttattgagtaggaatatcagcaaattgtctaacaaaacaaaaaaaattaaaaatgtggtttttatatattgatttacataagtgacatcgtcgtaatgcaaattctaatcgttatttaaccaataaaaaaattgtaagtttaaattatgaattatcttatttattatattaacaaataatctaatatatatagtaatataaatatttacttctttttacaatatgagaaaaagaagatacacgatgcaaaaactaaatttttaccattacaacaacaatggatagaataattgctggcagtgattcacgaaggcttgaattgacgctaaattgtataagaatttttatcccttattttttatgttaatttgtaattttaatatttattattttctatgtttatttaggtatattaacttattaatacttacactaattttaaaatatttttgta

SEQ ID NO: 198778 - DNA, 680 bp, Cannabis indica
tgccatctcaatgcagctaatccttctgaaaactggtggacgtgtaatatactgcgggccagttgggaagcactcagaaagagttatagaatattttgaggtcagtttttagttttggattttatttaggaattctagtatggtccaaccacaaacatgagaacatgaatattttttttaacttaatccttttgtttttgacagggtattcccaaagttgcaaatattaagaataactataatccagcaacatggatgttagaagtcacttctacatctgcagaagctgaacttggtgtagattttgctcaaatatacagagaatcttctatatacgagtgagtactatcaaggataataatatcagtatcttacagtttcattggtattaaagaggctaaattttatgtaatgtaggagcaacaaaaatcttgtaaagcaattgagtacaccacaaactggttcaagtgatcttcacttccccactcgcttttcacaaaatgcatggggacaattcaaattttgtctatggaaactgaacttgtcttattggaggagtcctgactacaacttgatgcgtctcatgcatacctttatatcagctgttttctttggtgcattgttttgggaccaaggaaaggaaatgtaaaaatctcttcttcttttctattcatttgatc

SEQ ID NO: 198779 - DNA, 1061 bp, Cannabis indica
aattttttaaatttaaattttaatagtaaaaccttctaaattactgaatcgttaacaaatttaaggtgacatctatttactacagttaagtgctaacatgagctatttatgtatacactcttgtacgtagcatattttctattagtacacataatattaataattattatttaaaaaattataaaaatgattttaaaatacatttcaaaattaaaaaataatataaagttataaagttaataaaattatacataaattaaataaaataaaatgaaaactaaaacaaattaaaaattagaaattaaaacaaaacaaaaacaaaaaaaaaaaaaacaaaattgtgttttcccgaggacccatctccttcgacctctctcttccgcatccctcacccatctctgcccgatagccaccgccgaccactgtcgctgctaaaccagttgctcctcctctatctctctctcgttatttctttctctcttgctttctctctcccccgttatttctttttctctttctcacgagatctgtgtctaagatttgaaaaggtcattaatgttgtttgttctcgatcccattatttacttattcagttttcaggttggtaacttactgatgacgatgaagacgacgatgactgtcgtgacctcgtcgaaagctccgtcaatggactcgatcaagatgagtttcagtgtgttatgaattcctacccgaaatttccatacgagaggacgttgcgagcatcaaggagtccacacaagttcgatctatctcggtaaccaaacagtattttgttattgtgtaaacttacatattgtggtttagtgagtttaaaattggactttctatgggtttagggttaggaagaaggtaagatccagttcggttgggttggaggcagaagagagagagggttaatgagacaggtttgtgacttgctgaggatgacgatgactatcgtgacctcgttgaaagctccgtcaatggactcaatcaagatgagtttcagtgtgttatgaattcctacccaaaatttctatacgagaggacgttgcgagcat

SEQ ID NO: 198780 - DNA, 855 bp, Cannabis indica
tcatcagcaagcacaatcataacaaaagaataatgacagattctttttctttttgcaaaaaaaaaaaaaaaaaaaaaaaaaaaaaaaaaataactgcataattttcacatattaacactactgttttgaaaggctaaatcgcgatgcggggcaatttcccatagtaccgtgaggtgtaagcctcaaggggcatcgaggagtaagcctcaacaataagaataaacaattcataacatcatataaaacataaaatttatatatcaacagataataccatatcaaagtcaaaaaattcatgatgttactagttataagtcttaaaatcataggtaatatcattaaaggttcaaaataaaaatccttgagagagatggaaggactgcctaaaggagatggactagttgggtgtgattaaagaggagagagaggatgagacctagttgtgttgctgcatgagtgactgaacaggaggaaagcttgttgtatttgttagagtgtgaagagaagagggggggagagatgatgtgctgctggagactaccgcaaaagagataaagaaaaaagatgagtattttcagggctttatccatttacttttatgctttcaacattgttaatttcaaatttctcaaaattaaacttaaaatagcctaagaaatttaaaaaaaaaacaaaaaaggcctacaaaactcttaaaaaatggcccaaaatacccccatagcttagacgtgagccttaagcgtcttagaggcttaagcctcaaggcgtaagcctcatgaacaatgactgaagctaagcgtctaaggctatttttgagcacttcgttccgagagcgtacgcctcttttagaacatg

SEQ ID NO: 198781 - DNA, 1665 bp, Cannabis indica
aaaaaaaaaaaaaatcttgcaaacataaaagccacacttggacttagtgatttgggaaaaaggcctctgtctaaaatacaacccttcgagcacacgaccagtcaaagaatcaggaacattgtagatgcgagaagattgttttgccaaaaagggcttgattaaacagatgaaaatcccgaaagcccatatatacaagcaaatcttctcctaagaacaccaatgtatatttcttttaacattatttatactcccacaaaaaacgagcacgcatacgattgacatttttgacaaaatctttggaagcttaaaaaaatcatcatataagttgaaatagattgaataattgccttgatgaggatctcatgacctacaatagaaaacaatttcgattatcacctgttgaccgaagtttttggcaactaattaaataagataataatgagagcgttgggataattaatgcatatgatctttatgtgttcagacattaatgagccgtagtccacgagtctctgttattaatgagagtatttcttgcaaagaatgttctttgtgtgttttttctctcccttttttcgatctacttactcattttttgagggggtatttatagagatttgcgggaatagtcaaaaatgggtaacttgtctttgagaaccagctatagattagcacaagttcacaaaagatacaaaatagggcatgcattacctacatagtaggcattgtagaggttaggtgagattaaccttcatccttccttgattgatgtgattcttcataatggagtcgttactagctcttttgattatcgtgtaatcacactaaatcaggcttgcgatgtctgacacatcctcttatgggcattcccagacactttccccatgctgcattaaatgcgaggtgactgttaaagtagatcattctcgtcccggaggtgccttcctatatcttaactccagaggagaaggcgtgccttttacacttgtccgagagctaacatcatgaaccatacttgttgcctcttccatacaacctttaacttattttcgagtgaggtgtctattttgtccacatgtcatatataactgcggccacatatattaggaataaacgggggcaacatcacctattaagttatttctgaattctatctcgaatggtgttaaacaaaccaattttaattatttttaaaataaataaagaattattttttatttattttattataatattcatttattttaattttttctacttttagctatatatatagtaaataagtagatgtattttagtataaataaatttactatattattttgatcaaatttataaaaataaaaaaattaaaaaaattgagttataccaactttagtaactctatacattttttaacaaactgatttcttgttgtttatcaaatatctttatatagcatagctttttcaaagaaaaaaaaagcttttagctcaaaaattttacaaactcgaagtcgaataatatatggagataaatacaaaatattagatatatatgtatatattttaaataaccattattatatacaattagaaagatattatttcttctactttctcgatccttgtggagtctcttccctcaaaatatttagcaagagtagaaatataaaaaaaaaaaaaa

SEQ ID NO: 198782 - DNA, 1469 bp, Cannabis indica
ttttatttcagcaaaaataaccgcctctaaaagtcaaaattataatagtcatatgtactaattgttatattgagcattattatgaggtaccaaagtgcctaataactctatgacacgatgtcttataattagttaactgttcactatatttttcattaaataaattaaaatatatgacccgatattaaattgtattattatgtgttcaaaattttccaacttgttgttaggtcgtaattttactaaaatttctagaatttcaaattttgtggctcataattaagagccttgactatgaacactaccggttacttagaggagccctaatgtattttgtatcatggcttatttttcaaagaaaaacaaacaaaaaagaacaaaataacatatatgtacgaaaacacccactgaatagtgtacaataaattgttccatatatataattacaatcctctaggggtcctgccggcccctattcagcaagtggctctgtcacattacaaacaaatatatacaaatttggcaatggctatatttcacatcttgaaattaaaatttgtggtacaaaatttgttgtttaaaatatctatattaaaagtgataagcacatagacaaggtgtggtgcacatttctcccttaacttgtttcgtaggtagataattaaactttcctatatttgatgtggtcctaactttaggtacatctcttgaactacttttcttcttttggcttcaatttattaaatgacaaattaataatttacttttgaaaatggcttcatcgaagccactaaggctagcctagtggtgagagagagatgagaaaaaagggagaggttatgggttcgaatctaagaccttgaagctattaagctatcaaatgattgtaaaatactattacgctacactcacacaaaaaaaaaaaaaaaaaaaaaaacaagacttcatcgaggtactactactaaagggcactcatattggtgcctaattattttgagtgtaatttaatatcagttttcacttattttaatttaataaaaaatataaaaatcactaactaattataagacaacatataatagtgctaatcaccttaataccctatagcaatgctcctaaacataaacatggttacttgttataattattatcaactcctttttaaagcatgatcaaccttataaccaacataaacttattacaaatcatgtattcatttaagagttaaaattaagtatttattctaatttttgttattttctctcaattttttcatcatttatattaagatataaaatgaaaaataataaatataaaaaacgtgtatcgtacaacatctacccattgataggacatttggtgaaccttggccaacaaaatgaaaagcaattaatgttgccgataaatcactcctaatctctagttgcaagacttgtgcatgtatccaaatagagcgatttcaagtccaa

SEQ ID NO: 198783 - DNA, 1370 bp, Cannabis indica
aaaaaaaaaaaaaaaatatagatctcattggcaaaccagcccacatgcagaagaattaatttcacctctctcaattattatgaagcatcttaaaacagtcataaaatgtatgaaacaactcatagaaaattgtccaatagcaaaatagtacaaaccgacttgagtgtctaatctcaataggggtccctccctcaccctatctactataatgcatattcattcctcaaattcatatctaaaatctatttcatactgcaaaatcattctgccttttttcattgcttctcatattttgtgtcactctttttgtcttttctaatggaatggctttgcttatgagattccctttttttcttttttgctttttggggggtcattcccttttatttttacccatattgcaaagtcacatagtttcaatagttgagaagataaatacaaaaataagaaaccaatttttgtatatgatggtataatattactttattaattagtccttaagttattgagtaattaggtatgtggtttattttattcattactaaaattttatcataatttagtaattataagtgtagtataaatttacacttataactacgacttggtaactttaagtgtaatattttatcaattcttttaaaatttcaaaagatgatagaaaatagaacatcaaatacaaaataaaatatatataaaatatttctcaatattacttaatattataataggttgtgggggctgtagcaaaaaaaaaatttttgctccatcttttagctcaagcaaaaaaaaaaaaaatcatactaagaaaattaaatatttttttatttaatttgataattattaaacaaaattataaaaaagcccctacaaattaaataaattatgatcatttttatttaaagtatatccaattctttttacaattaaaccctcacatagaaaaatttctcggttcgtcattactaaaaaaaataactataaatattaattttaaaaatattaaattattatattttaatctactagccagtaattaaagaaatacttgagtttttatatttaaattatctacttacttaaaaaaaatatatttttttacattatatcaaaaaaaatatctaactcaaactttttttttttatctctatacactcactcatacacacattttcaatataaaagagagatgtttagtaattattaagaaaatgtaagaaataatatatggtccttgtctagagatattcaagatttgccatttcaccttttttgagtaaccttaaatttagcactctagcaaatttgttttggaattggaaaccattttttttttttttgtataccctcttactcaacacttctttagt

SEQ ID NO: 198784 - DNA, 1570 bp, Cannabis indica
ataaatcaagagtgcatttgattgtcgtccatctattgtaaaatgttgggttatgtggtgttgcagttggatccaatgaaacaaagcattgatggttatgaatgatatcacattgtgaagatgtagagaggaaaacatgaaacgtttctgtggcgtttagcctgtagttttctctagagtataaagagagttttactggcttgaacttttgggtacattcataatccccatcagttgatcgcgctgcttcagtgtcgaaaatgatatgtaaattgttctggttctatattttactatttcctttctgggtactacaatgattcaccattgtgattttgaagtttcacttgtcaaatggacagaatttttttgagaacaaactcattaaagaacaacattaacatgaagttaggaggaactaagcaacaattaattcatggaaaacatgaacggatgatactcttgtatattgaatgtcaaatggacagagatagactttgtgtcaaaatttatgagcacaaccaatatactcatcaagtttctgtgctccggaccacttttactagcaattatgtgccgaactgatgctgtgaatttgagcatgaaacataatacttgcggttggacactaagaaattgaccccaattcttcaactgtttgtttagtgacgccgaccctaccgagctctcttgtcaaaatggaatttcccaaaaatacattctaaaagtgtatggaattagtacaaactctgttgtactacaagttgccaaaagggaaagtaagtaatggaagtaacgaaagcatgctcaaaagaggtgaatctaaagtaaatacaaagctggggttcagtgagataatcatcgttacattaagatactagaaatttctctagcattttctcagaaacagaaggaaactgctgtgcagtgcagtgcagtagtgatgcccagtgattggtagcggtaaagttacaagaaaatgagttcgagacaaaggagttctaatttgacgttgatagacatcaaaatcatgatgaactttatatatcaaagccgtccaaattatcatgtaaataaatattaataccttctggaaacaaaatgattacacgttctaaatggataaagctaatagataatttacctatgccattgcattgtctgtggtagctaagtgggctgctgaacattttcatatctacgcgtcttgttatccttatatacaataaaacaaacgatccaaagataccaatacaaattttctcttcaataagcaattgtcttcgaggagggcccaacagcaatggaactaataatttcagcttgtctttcttcacatttgccttgtaacattaccagaaggcaaatgtcaataccccactagaagttgtggctgggctgaagttctaggaaaaacacatgacatgacgaattaaaaggaaggagacaataatcaataaaacaaaacataattttcgattctgtttcactaattaaactcatccactaaagaataacaaaacctcaaatatattgtctatttctgaaccttctttgaggattcttggaa

SEQ ID NO: 198785 - DNA, 736 bp, Cannabis indica
tatccaccaggattcaaaagcaatcgttcgaaggatgctgctgcaaaccagatacaaaccagcaatgaatcgaagaccagtgaagaaactcacactttgctgcctcaactcaatgcaactcagtaccagcagttgttaaatcttcttgctaatcaacaaaatggtatgatcactacagacccaagttcttcctcaggagctacaggtattgtcttatccaatcactgtcttacccctaacaatgaatcatggatcatagactcaggggccacaagacatatttgtaataatattaaaatgtttcaatgtgtctgtcctatacctaaagtcaaactaattctaccgaacaatgaatatgtttttgtccaacaaagtggttctgtctatatcaacaaaaatcttacattaaccaatgttctttatgctccccacttcaaatacaacattatatctgtaagtgatttaaccaatttcaataccatctctgtggaattttctgctgacagttttcaaatgcaggacaaaacacaccagaaggtgattggcaaagatagaaataacaatggactttacgttttggatacaagcaaaccagaagagattctttctgttactgccgagctatggcattcaagattgggacatttgtctcataaaagactagctcttttgagcaaacaattgaattgtactgtcaacaatgtacataaaacttctccttgttatgtttgccctt

SEQ ID NO: 198786 - DNA, 1294 bp, Cannabis indica
agtatagatgatgtgtcctgaaacaattaatagaaacagagaaggcacaccaatttagggacagtaaattttatttcgttgtgactaagcatgtaagaaggattgatgaaggtaaaaaaatcagaaaacttaccccattgaatgcctgatgtttcaaaatatttatctaaaaaatgacactagacgatatgtcacctggagtaaatattttgaaccatgttgaaaaatgttaaaaacaatcacatgcacacttgaatggttttcgagcttcattttgaagctttgaatctcctcaaccgatataacttcaattctaaggttctcatctgaaataaatgtttgtttcatcaatttctatcagctagaaacatcctcttacagaaccctccaaatgtaattagtttcttgattacatatgattaagtttggtccataggttacaaatccatattaaaatttgtaacctttctatttagatttgtaacctctttgttttttgatcaattttttttttttaaaaaaaaaacaaaagcatgaagataatagaagaggaagaaaattatgtacaaccaaattcattcatttatgatttcaaaaaaataaaaaaaaatcattctttatggtgtactcaaccaatcatagcaacagaagtaaagccccaccagtaggatcatatgtattttcacattatattttgaaactttcataaatacctatccattaaatatcaaatcaacaccacataacattctctaaatagtcaaagtcattaaaattttattttttatttaaaaatttctttaaataaaccaataaaaactgacacagctattaacttgatatttgaccactagatacctataaaagtactacaaaatataacttaaatattactacggttaaaaattaaatttatataagtatttacaatacaaattaccctacaatcaaatatgaaaaagagagtagtataaaaataaaaggagaattttaatttttatggcaaaagttttcaacaatatggttttgtaccaaaaaatttatgggaatttttttttttaaaaaaaaaatagaaaatttgagaaaaataatataagataccgaaataactagttacttactctaaactatattccccatattttttttatttctttatttttccctataaaataataaccctgcaataattgggtcacttgagtaccaagtgattaaagtggttttccctatgcaatatgtgattaaatttactattgagtagaatattcaacttgtacactcaaatcctaac

SEQ ID NO: 198787 - DNA, 690 bp, Cannabis indica
aaaataaaaaataaataaaaaacctcatttttaatttatcctaatgtatattatgtatttatgttaaaaaaatatattatcatatatataatacagtcttgtttattacgatataatctcaacttttttatttgacaaattagttaggatatataactatagtaaaagactatattatgttcatatataaaaaatgttagtttgagaattaatttgaataatgttagaggtaggtggtgaaactgtactcactttaatttgccaggaggagataaactaatactagtggcaaaaataaatgaggagacatatccattaatttatagatatgagtctccctgtaattaattatctttttagttaatatataatctgttaattaggtttgtcatacatttttctctccaaatactaaatatttcgatcttgtttagtccatgtgcataactgttaataaattaattaagtcaaatcgtgcataaaaaacttaattatcaatagtctctatgttcttggagatcaaggaaaacatataatattatattatatatatatatatatatatatattaatatatggaacttggataccacgtcttagatgtgttatatatttgaaaattaaacatactaagttcatcatcagttcgatccataatcaaatactatacattaaacaatgaaaaccaag

SEQ ID NO: 198788 - DNA, 509 bp, Cannabis indica
ttgtcgatataaaacaaagcctgaattcccactttcattcagggttcacttttgctggcacattattttgccggcaaaacttcttaatgtcagtgcaataataaatatgcaccggtaaaagtgagaaaatgaagcgccaaaaggcgcgagaagtttgccgcctttcatttcctttttgccggcgcaagtatacttttgccgcgacgcatatatgccctggcaaaagtctcaaaaaaaatgggagggcaaattcccgcatgcattttctgtggtaggtgtgcgccagcaaaattattaaactaaacgagcgttttgaactaggtctgaatgtatatttttaaacacttttaccggcgcaatttcatgcgccggtaaaagtatatatatgtagaaaccagcaagtataggtctgaatactgtcttcagcaggtgaaaaggtggctgtcatggggagcacaaaccagcagcctctcccaactacttaaatggattcataaggcaaaaatcaa

SEQ ID NO: 198789 - DNA, 1353 bp, Cannabis indica
atcacaacaaaaaatttttgtgactaaatatagcttttagtcacaacaaaaagttacttgtgactaaaacatagtatttaatacaagttgtcactaatttacttttagtcacaattaaaaacacatttagtcataataaattgtaatttttgaaactaatacatttagccacagactttttaatcacaatatagaattgatgatttactgtcagtcacaaattttatttcgtccctgctgacaaaaaatagttaccttagtgacaatcttttagtctcaacataaattttttgtgactaaatgtgacttttagtcacaacaaaaaattacttgtgactaaacatttacagttgtaatttttgtaactaataccttttccccaaaattttgtgtgaaggttgctgtcaccccaaaatttccaacctctaccttcacaatggcaagcaatcacagttgggtgatgacacacctgttatatataataataatgataattttagtaattcaataaattttttcattgtccaatgataattctcgaaagcaaagagaccaagatcattatatcctaatcagtaagcatgcacttagaatagacagtgaactaatttaaataaatcttctctattatttcttcacgatgttttatatttttattgttgaaattttcaataaagctccttaattataagtaattcgtaaatcattcgttaataaatcttgttaattcaataaaccattgttctttgtcccaaggaaaattctccaaagtgagagatcgagatcattatatcctagtgatcaatatgcatgcatttaggatggacggtgaactaatttagttaatggatcattctctatcattacttcatgacttattattattagtgaaactttcaatcaatctccttaattagtaattagtggttatatacttaggatggacggtgaactaatatataccttctcaatgaagaactgaattcctttatttgggaaagtcaacttcaaaaaagagaaattattctatcccaatactataattatatgtcaaaatgtgtatttatagtgaatggtgaattatatatataccttctctgaaatgaagcaaaatcatttatcaggaaatcagcttcataagtttaggcgcaagttatcactaatttaattttaggggcaacaatatacgctacaaaaaattatttgtaactaaaacataatatttaggcgcaagttatcactaatttaatttcagacacaataagtactacgactaaaaacacagcaaattatactttttatgacttatactttttgccacgaacctttcgattacgacataagaatgatgat

SEQ ID NO: 198790 - DNA, 1001 bp, Cannabis indica
tgccaaaaaatactcaccatggaagttcttcacttcagcaaatcacacaccagaagcagcattctgttgacactcactctgctggtgtatcacgtgaaaacctgcagaatattgcagaaaattcaagtcagttggcacaaaacttacaggtccaacctcctggcagcaatcggccacaaacaaatgtgatctcctggtccccacctgtaggtaattctcttaagatgaatgttgatgctgctgtcaatattacggataagaagctaggaattggtgcagttgtccgaaacaatcaaggagaagttattgctgcgttttctaaaccatctcaaggttgttttcgaagtgatgaaatggaagcgaaggcgctattccacggtctaatttgggccactaaacatcaattacctctagcgcttgtggaaacagatgccctacgagtctcctcagctttaaattcttttcatcgagacttgtcttatttttctgatctcattgatgatgttcgctgtcttttatcctctttccctggagttactgctgctcatgttcgtaggcaagctaatcaagctgcccatggcttagctaagtacgctctagagttggatgaagatgtaacttggataagagaaataccttatcctattttctctgttattgtaaatgacctttaatttataataacatggaaaatttctcaaaaaaaaaaaagaaattaattattataaagttagttgtatatacatagtagtagtgaattattaattaaacttttttactaatatatatacttattcttaatgatttgataatttatattggtagctagtttggattaatggaatgcgtatattattacaatatatatatatatacaagtatgctacatatattataaataaataaatcgttgattaattttatcaaaagaaattaaacgaaaattaattgcaatggtgacgtaaaagtgtattatgttaaatatctacataatttttttt

SEQ ID NO: 198791 - DNA, 1306 bp, Cannabis indica
ccatatttcttggctaagtctctgaatgaaatatggggtgaagagccaaagatttggtgtatatttcccactaatggtaatttccatggtcctggggtagctttgaaactgagttctttgtttgatgatgagctcttttcaaaactattttgactaccataaacataaaaactatagtgatgaggattattgggaaagaaagtagttgaagatccatgtaaaaagtaatgagacttattgatagaagatagtatcaaaaagattaaagattggagttttgagtagttggtgcacttataatggtcaatggacaagtgttatatatggatagcttgacataataaagttattgaagcttggtagctactatctaacccttaacacatgtggcaagaattatttgtgatagaaagaattttatccatctacacatttctagaatacgtgtacacaattgagaagagagttctagataatgtaatctaaaagagcattgctattgagtatcagtgatactcatcaccttttataggtggcgtcttataattagttagctatattttaaaattttcttaagttatatgggacccgatacttaattataccaataacaatataacaacgaggtgttaggtaccaatataccttttagcaattctaaatgtaaaattgcatgttggacagttgtacgcatggccttttggcatatttctctattggagtaataaatgccgaacatttgagtgtaaaagtacgtaaagtcacattaataatttggagaatgggttcatgaagtcaatcgggaacactttaaactattaattatttttggattgaaacataaattttgtgatgaccatacaagatattagatttttctcatgatcattgatgtgaaactaatatataatatttttttgttaaaaaagtatatataaaacaaagtatttaaataaaagttgtagctaactaatacgaaatacttaataataatatatgaataataatttataattaattataattcttttacttttaaccttaaattttattacggttaaaaaaatatatatctatatagtgcagtgctaacaatagtgttgccatttaacattactcaaatatgtttgcatcaaaattgtaactaattatgcactaatcaagagaatagtgtttttgacctaaaaccaataatgattggaagtagtcaaaatagaaatgatttaaaggatatctatgattagtgatattaattttggtagaataattaataatgggaccaaaagtggttgagagagtgtggtag

SEQ ID NO: 198792 - DNA, 889 bp, Cannabis indica
acaacaccaacactcagttgcctcctcgaaacaactcaaccgtgagagcgaaaaatgggggtacaatccctccggagactaacacaagaaccacgtactggggtcactacccctatcattggatttacgccttgtgttcaagagattagaatagcaagtactcaatatgttagagagattggacccagcactggtcaaccgtctaaaggagagccctaagtagatctaagggagaattccaatttaaaaacctcgagagatgtgttggggtaggttcagactcatactaatagactccactacaactaggaggaaacccgtattgctgtgaactatgcgttcaaacagtaacgacgtgaattccaggagtggatggacccataggctcaatccatgtgggcccagcaagaagagatgaatcaccgttctatggaggctactgacctgatcaggcaatttacccaacaaattaggggccaaaggctggaagcccaactgcccaagcaggacactagcaaaggaaaaggtccttatatctcgggcggaggacatgaatacgggttggaggaacgtccgactaactatgtataatcgcccaaacaggatggaccatctaatgccaggcttgaggatcaaaccatcagtcgactagtcgatgatcaagtttttcatagtcactaccttggacgagacgaccataataacttctgacctagacttgaggggaggagagatgatgtaccttcttgaccagttgggggatcttaggcacaggtgggcctacaaaattaggacaaaatagtccaggtttatggtcataaccaatatgtcaaccaatgataaggccaaaaaaggtctcatataaacatactctaacaagaatggcgac

SEQ ID NO: 198793 - DNA, 1221 bp, Cannabis indica
aaaaatgatatttgatcttattttgaaaaatggagtaagtttgaagttgggtacaattattttgtctacaaaaacatgcatgcataatgaagtttctaatttattaaataataataataataataataataataataataataacaacaacaataataataataataaacgagtattaataaatctcttataactactaggagaggtctgcaatatttcatgttattttttaaatcaatacttgtaaatactagataaaaatttccattcttgttaattaattttacaaaaataaagtaaaaaaaaaaacccataattttacttgattaatggatgcatgaaattgcaattcaagatatgaaaataataaaagagttgagtttggtaaattaccaaaattatgatatcaaatcgaatgagagaataagcaacccaaacactaccattcacaacagacgcaatagacagaaagaatggcatgtattccacactttttgtcctaatcaccattttctgtaacaaaaacgacaatatcaaatcaaaacgacaaagaaaactacaaccatattaatgtcgtttcttcgttctactagcaaacaccattgtcgtatgtattttttccattgaaagaaaaataatgagcattattttttacatattatgagcatatttaactagaaaaatttatcaaattcattcaattaatgtactcaataccttttcataaaagaaacaaaaaataaaatgcattccattatgtatttaattataagatttgttttatgtacactgcggaatgtactttagacttagtttgatgtattaattttgatttttaaccgttagatcaattcaaaattaccacaaaaatcactcccatatataaaattcaataataagtccataaattattaaatagtaagattttagtcatattttatgattgcaaaatataattattttaaaacttcatatatatatatattaagttttaataaatcacgctaaaaataaaattataaaattaaatacataactagtgagaatcaatttttaaataacatgttaaatttcctttatgcatagttttttttcttaaaaatctattacttcaaattgtgcccttaaatttttgtccattgttaaaattctctactaattataaccatacattatatctatataaatattattgtatatacatcggattaagatgactta

SEQ ID NO: 198794 - DNA, 534 bp, Cannabis indica
taatgtattatattttatgaggttctctagtaataaattttgaaaagatattattaattctacacaacgtgacactaaaaatagttatttttacgtgtatcaaaaagtgcatattacaaactgttttattcataattaaataaatactatcaatttttaaaaattcaccgattcatttcactgtcataattttattgttaatttgatataaacactgtaataattttttttaatatatataaattttaaatatcaataacatcattccccaccatttcttttttctagctagtatcaaatatataaaagtctcattcttatactaactttaaatatggatcatattataaaagtttataaccattcatatcatgcatgttcatcacaataaatcatttatatatatgtatataatatatatatactcaccaaaagtggctgatctaaaagtagtggaaccatcaacctgatttcgattcccagtaacaacagaaacatccataccatctccaataaccattaaattcttcacat

SEQ ID NO: 198795 - DNA, 882 bp, Cannabis indica
ttttttttttaataataaaaaatgaacaaaacttccattaaaaattaataagagtaaaatacattaagaaaaaatatggagaattatttaaaatagtttatcatccaccttgaatgcatgtactactaatttatgattatgaacataaattaccttgaatgtatgtactactaatttatgattatgaacataagttaagaacgcttcaggaaaattgaaaaataaactagtactaccttataaaaaaatcctaattctatacaaataaatgatctcatggagaacataaaaaaaaatctatttaatttatactataccattttaaatgttatttttgtatatattttatgggtcttggagttctttagtctaaaattttttaatattacactacacatgtgcaaaaaaaaaaatatttaagttccattttcacacatttacatatatttttaactaagtacaatatacattattataaaaagaaaaaattaaaaaattgtactagatatccaaacaaatagtctatatttgtactactattccggaagctagtactgctcgacctttccgttttgaggcttggtggacaagggacccacgtagcgcgctggttgtggacaatgcttggacttcagttactcatgactgggccctggttagattttccaagatagtgggtgctacccgtcttagtcttagtagatggaataaactgcaatttggtaaattggacatgtgtatctctcaactggaaagccaactcaagaatattcaaagtatgcctgctgttctaggagttgggcccaggaggttgagggtcaggaaggctctcaatgggtctttaaggcagaagactctttattggcaacaacgatcaagaat

SEQ ID NO: 198796 - DNA, 2555 bp, Cannabis indica
atgggactgatacaactcatgacttcaactttttctcactcgtgtatgagtggcctaaggatgtaagacaatatcttcataattgagttatttgctgtcaagtttatggttgatttgttatgaaaacttttcttgtttgtttgctaatgttcttgtccaagtttattttattgatttgtgatggaatcaatttcggacatgtttctttttctacaagtacttttggattgatttatataagctataagtggaaagagatttacttagtttctggcaattatgtatatatttaaaaagaggcaatgtcaaatgtcttattgatctcctcccaagtttattagggagtttctggcaatattaagttcttgagtaatacaaatcagttggggtaattgtatagaaatgatctttttaattatgtttattttttgtttctatgaggataccttattctcttattatttttttttgataagtgtattgtttcatacatatattaatatatatgttatatgtatgtatataaaacgtacatgaaaatgtgttggtgtattttgcatattgacctgtggaacacgttctaggagctttcacttggatcaaataattgatcatttcagcacttattacatgtgctacgttgaaagagctcgtgtgttcattattattattattagtgaattttttgtctcagtgatatttattagacacttggaataatcatatgcctagtatttttatttgcgtacccagccatcatctgtaggatcattggtgaggtggtctttgcaaatattcaatgcataatgcttctgttgatatgtattaactgtattcaaaagaatatatttcaaaatcaagttgaaacttatctgaatcattctggatttccctctggttgcataactttaaggggttcaaagagattcctttatctgtttaattaggaaattggaatgtttcgctgtttatatgtaggtgatacatgtggtttttccacttgtattttctttaaaattaatacattgcagatttgtttgaagtttatatatatttatatatatatatatatttgaattatgaaaattttgttttagtttgatgtttggagtattttattgttttaattatatcttaaaggttgatccttttctggatggatcactgtttgttagttattgttacatttagacttctgttttgactcatgtttgagtgggaccaactgagtatttgagggttttctctggatagtatatgtattgatttgatattttcatgtttgcagcttttaactcgccttgtatttgaccgtggtagtactgatgctgctagcaaggtggctgagattatgtgtgctgactttgttcatgaagttatttcagcgtgtgtgccgtcagtgtatcctccacgctctggtcaaggatgggcttgcattccaattgtaccctcttgcattaagagcgggtcagagaataaactaccatcaccttcttcaaaaggtgaacctaattgttatgactggtcatcaatattacctggcatccctctctaccctttacagctggatatcgtaaaacacttggttaaaatatcgccagttagggcagtattagcatgtgtatttgggagtagcattttatacagtggaagtgactcttctacatcaagctctttgcatggtgaattgctcgaagcacctgatacgaatcgtttgttttacgagtttgctcttgatcaatcagagaggttagcttaaaactccttgaagttattcatccttgtaaataatctactctgtgattacctatttaaatttatatttgctgaacagattcccaactttaaaccgatggatacaaatgcaaacaaatcttcatcgagtttcagagtttgcagtaacaaccaagcaaactgctgatggcagcagagttaaagatgaagtaagagctgctataaagagacttcatgagcatgatagtgatacagagtctgaggttgatgaaaatgttggtggtactaatatgtccacaaatttatcatcggtcaacagccaaaataatgcagctcccaatacatcttggcaagatgctatgaaaactgatgttgctgaacatgataattcggtttttctttcttttaattgggagaatgaagaaccctatcagaaagcaatagaaaggtattatttattccatctttacccttaaaatttatgagggttagcttgtttggctttcttactcatgtataaaattgctgtcaaaaagtttcttctgtaaaatagatatttggatatcttccagtacaagggttattgtcaatctgagctagagtctaattaacataaattttgctattagcaatctgaaagagtattgctaattgcatatacattctctggtaaaaaaattgtaatggtactagtaagttataaaacctgctttgtatctaaaggtatgttaatatctgcattagcaaatttgataaaaggaaaaactttaggatctaatttttactattaagtctgtacatccgaaaactcacacaatatg

SEQ ID NO: 198797 - DNA, 566 bp, Cannabis indica
aaaatatattttactacaaccgataattatatttaagtatagttacattgcaaattactcaaatcttaagagcacctctaatagttaaattttagaaaatattttcttatgtagattgtttatttggtaaaatacaaagatattataccatacgttagggttttagaacttccacaagtaaaaataccttttgttagttagggttctataactttcaatttcagataaatacttaattataacttctgaatctagcccaatcacaaaatgacatatcgatactcacctaacacttagcccaatcacaaaaattgtaaattcttaagttatacttactttaatagaattgttaaaaggtattagtggtgtctagcactttctttggtgtaattatatatcaggtcatatataatttaaaaaatatatcttttaagtaatattgttaactaattttaaagtgtcacctataaaaaaatattaggtactagtggtgccgcatgataacgatcttaatttaattactagtaagtattgagaagaagtgagtagaatgaatagagtgacag

SEQ ID NO: 198798 - DNA, 773 bp, Cannabis indica
atagagacggaaacttacaaaatacttaacttttgagatctttacggtgttaaacgattcaacgaataaccatccataatggggacaaagtctagaattagactttggagcactagacacatttctaatgctagaagatgtgtgttaattaattatgtttccctactacaaaaaggactttttccttcaatttttaagtgacatataaagaatttgtttcagttggtgtaaccgacgctataaccgtagacgcaaatagtgatattttttacttcatttataaactggcgctaattgattttttacttcagttatgaaccgaagaaaaaataaaagtttttgcttcagtttatagccgaagcaaatagtagtgcaatgacactaatgggtcttttgcttcggttatgaaccgaagtaaaaaaaattaaaaacaaatataaaaaactaaacaaccccagtgccaccaccatcatttataccatatatggatttctctgccagcacaacatcataaataacaaaaaacaaataccaaaatcaccacaaccctttcccaaaccaccaccatagtcaccggaagcgtatcctctatctaggattcctgtccattttgctctccacccaattaaaatagtccaagtcattaatgaattaatatcaccattttaacatctatttttccgttaacaatatcgttcgttaacaatataagtattaatatataacattattttgtttaataaataaggtgcttttctcaatgacatattagt

SEQ ID NO: 198799 - DNA, 1126 bp, Cannabis indica
tctctatgataccccttaaattaatgaaatttatgtgctagagttaagtagaatgtgagaatatatttggtaacctactctcaaaagtaggtatatttgaatgaaatatatatattaagttaatgtaacttatgtgctagactaaagtgaaagataatagtatatttaacaatccaccgataataatatgtatattttaataaaatataatataagaatatttttaattaatagataaaaaataagtattcctcaacttagcaagggactgtatcttagtccaaaagtccggcccaagttaactccgttgtacaagcccattatcgattcactatttatttgggcaagcaatttaaatttctgtccaaaaacaaaatacacattatgattataaactataatattctccgtacgtaaacggaaaatccgattcatctataataattgcctcattaattattagtattagttagtaaaataaataaaataggaataaaagctactctttcttcacactcaaaaaataaaatatcaacgatgaaaattacgaaaacacccccaactctttccatccataatatccgtcaccaagtacatcatcaaagcgtgatgctcgtttcgataaggtcctccaactaccgactctgaataatatcaaatacgaggctattttggtcatttcagtttaaataaaaaaactggcacgtacgagctggcaataatataccaaactcagctagctttttaaagattgcacacgtgtcaaaatctgtacactgttcccgccagcgagggagagaagaaacacaccaaggaaacacaaaacaaagaatcaaaacccccaatagcacaaggatcgatgacgtggcctttataaaattaaaatatataaaataatttgaaatcccgcccaaacgcggacttcaatttttattttatttttaataactaaatttagtcatttttatatttttctttttaatattttaatttttaaaattttcggaaggtcatcccattcccatcccacgaccccttcttatctctttacaatttactctttattttctctctcactccaaacaaaaccaaacaaagcatattctctctctatcttcttcgctaa

SEQ ID NO: 198800 - DNA, 1206 bp, Cannabis indica
atatatatatatagataaatctgaaagaaattctaaagtatcacaaaaattagcagatttatatattttaatttgttctatcaaccatgataatatttttatcttaccaaaattttaatgatacaataactcaaaattctaaaaagaaaaataatgataataaaaaaactatcaaatttatattaacctatagctaaaataatttctatttatgtattctattttttttttttttttgctatagttattaagtgtatagtggtgggcgcttgtagttatttaaacaattttatttaaaaaaaattaatactaaaaatagaagtttggttgatgttgaagttgaactcaagttctcaactaataagaacataaaccttacccttatttaggttgccactacgggcctaatttgactatgtatagtgttaattttgataaaatatagtagttaaataatgaggtcttaaaatttttaatgggcccttaaaaagtgtggatcctaggcacgggcctagcccgcgtatgtctaggaccgagtttgattgtaaggagccagttaagtcagttaagccttaatcaaattaactacttagttgtttgaagctactgcctttgaaattcatatcctcaatctataaatacagctatcctcttcattcaaaatatagaacacgaatcgctggaagtaaagtacgcacgttctttgagagagtttttgattgagaggtagagagaaagagaagcacatagaaaagagaggattgggttttggattttgtaaaagggaagcttctgtagatgaagaagcttcacaagaaagaatgttagagagaaaacaccttgagagaatctaaacagagagaatcacacttagctgtattgtacctgtgttcttgctcaatcaataaagaaagtttcggtggtgttatagaattggaatagagctatagatcatatcgatctatcagacttgaaccaatataattttttggtattattttttatagttttcttacattgtttatttatggtcttatcgtctctgttatactctgttattcttccaattttaaattatatttggttgattttgtcattactaattatttgttggttcattttaagttaggttgattctacacaatagttaaaatttcccacaataacatataattcttcttcattctccattttattaagttgatt

SEQ ID NO: 198801 - DNA, 719 bp, Cannabis indica
tgaaggttgttaggcatgcaggggtcccattaattttctacgttattcaacatctgcatgttaaaatatggccaagaatgaataaatgtgaattaatggcataacacacatacacatgtatatatatataaaggctcatgtcgtctttatatcctatgcttgcgcagttaattaagtatgaaatatgtttttgagactgatatgagtgatcacaacttctttctctcaaaaactagaacctcatgaaaacatgtatagatttaaaattactaaaataaatattcttgagagtttgttgatataaaattactaaaataaataatgttttaaatatttggaaagcactgtaattagaatgagaggtcaagtttaataaaatattaagttttgatatattttgcgtctatattatatatactaaaatattgcaagatatatctttacttgcatttgcgtctagagggtgagcttgaagccgtgcgatttgggctcgatatggctacgttgttggaggttgatgttgacacccttttctcggatagtagaggaaagagctcctacttggtatttgcatttctcttttcttaacgttttaaggtctgttgtgtcaagaaatgttgctttttgttgggtctcgcggatgaataatatggcagcctatgctcttgttagatggggtttgtctcatagttgtaatgatttgcttagtttttgggaag

SEQ ID NO: 198802 - DNA, 818 bp, Cannabis indica
gttaatacatattctagcttagattgcatgtccatcaaagttattggggctaactcaatctaataaaactaactagttagggaatgattggatcgagtatttattactaaccaatgtgaaattatctatagacagctaaataaatacagatataaaaagaatgtgaattgataaatagctaattattgtgtatgtagctgatgaaatacttaatatcaagaagcttttgcctgcttacctggatccaagtcttcaacttaaagaccttcttactggagtgagttttgcctcaggtggttcaggatatgatcctctcacatctcaagtagtggtatatatatacatacatgtctctatattatccacttattattttattttatttttaatttaggtgtagaaaaatcagatactaattacattttctttatatatatatattgttattagtctgtgttatcattatcagatcaactagagatgtttaaagatgtgataagaaagataaaggcaggagttggagaaagcagagcagggatgatagtatcgaaaagcatattcttaatttgtttagggagtgatgacattgccaatacttatctcactaccccattcagacagcctcattatgatattactgcatataccgatctcatggctgaatcagcctcaagtttcatacaggtcctatatattttatcatctataaactaatcaacttcaatatggttttttttttttcatatctcatttaaaatttaaatgcatgtcaaatctcttggaaatttagtggtccacaatattaattatttaaatat

SEQ ID NO: 198803 - DNA, 729 bp, Cannabis indica
agagagagagaggggagttggttagtttgtgagaggggtaattttaggttttaaaaaaggtttgcctatactaacaattacctataccttaatttccctaaccaattttaccttaaaatatgcatgaaaaaccaaaatttccctatctttattgggcatatgttagggtttctgaatcatttattctattttcattgtttttgtcctttaaaggaaagagtgagacttaagagatgctgttagctccattaatatctggctagagagcagtaaaaaataagcatgactatggacaaaaaaaactaagcaaattgaagaaaaatcggtgccaaatgacacatcaaacaagttatttgaattatccacaattcttcacaaatgcacaagatgaaatcacaaaaaacatatactatattacagccattatggcaatagtaaaagtcaaagcacacaaagaagcacaaacgtagaaaatgcagtccctgtttttgttgtaatctcgtggttctttcttattagaggtatttgacaagcagaaatatgatagcagccaaagccacaatcccaataacagataacaacatgcacatgcaggagcaaccacccttggtgcgcttgttcataattgccaaggtcttttgcactctctgtttttgtatataatagataacataagatgatgttagttccagatttctacctatgaacacaacattttcaccaaaaaaa

SEQ ID NO: 198804 - DNA, 1367 bp, Cannabis indica
gcgatcttcatgccagcagcagagagagaaggaaacaaaataaatattgtcgattagaaaataaacatagcaacaagagtagatgaaccaggacaagttacagagccctttctttccttttatcaccaactacacttgggaataaaaatggaaaacaggaagacagtaattgctagagttatgaagcaagggcccttggtcactaagcaacaggcagagttgttggtgaaagagtattcaaaggatgaagtcaagaaggtattttttgagatacctgggattaaggcactaggcctagatggttattctagctactttttccaagacaattgaagacttaattgatgatgatatatgtgaggttgtgctgtcattcctacactctgtccagattctcaaagaaattaacacaaccgtattaacactttttcctaaaagtaggtgtcctaatacggttagtgatttcagacctattgtgtgctgcaatgtaatttataatgttgcaatcaagctggtttgctcaaggctaaaagttattcttcctgttttggtggcccaaaatttagggaggttttgtatcctggcgggtttatattgcacacaatatgcttgatttacagaaagcttatggcacactagatttggaagaaatattacaatcctttcaatttcctgtgaaaattttcaagcttgtaatgacatgtgttcgcactcctagattctctctgattttcaatggagctcttcatgtatattttgagggggaaagggggttacaccaaggagatcctatgttacccttactcttcatccttggaatggagtacctgtcaagaataatgattcgaatgggatccaaatcagattttaaatatcatgacagatgtgcggagctcaaacggaatcacctgatgtttgtagatgatgctattatcttttgccatggagattttaaaagcatacattatgtactacaaggtctgaagcttttctcatgttcatctggattgcaaccaaatccctcaaaatctgccatttattactatggaatggaagataatgaaattcaacacatcattgatagctctggtttcagcaagaaagaggtacctttcaaatacttaggtattcctatttgtgctaaacgtatctcaggcaaataatgcattgttctagctgaaaaatgacagctagaataagatcatggtgttctaggaatttatctctagcaggtcaggcagtacttgttaattcagtattgctgtccatacactcctattggagccaaatcatggtcttaccaaagaagacaattagagacattgaagaccacctaaattgacttatctttggaagggtacaataca

SEQ ID NO: 198805 - DNA, 2011 bp, Cannabis indica
atgcgactctagtctgctagaagaaaagatcgttaaatttggtttcagcggaagctgtaaagaaagaagtcgagaaattagcctctatagagttcattcgtgaagctttatatcttgtttggacaacgaatccagtgctggtcctaaagccaaacagaacatggagaatgtgcattgacttcacagacctaaataaggcctgctaaaggactgtttctcacttccacgaattgatcaaatggtagatgccacgtcgggataagagttattaagcttcttggatgcgtattccagctacaatcaaatccaaaagcatgtagcagaccaagaacataagttttcaaatgtataaaggagcgtactgctatgtggtcatgcactttggtcttaagaatgccaaagcaacgtaccaaagactagtgaaaaagatgttcaaggatgtcctgtgtaagaacatagaggtttacatggacgacatgcgcttttgaaatacaaaacctcagaagagcacaacaatgatttggaggaagcctttgatatcacccaaagtatggaatgaagctcaaccctaagaaataaacttccagagtttcttaaaggagattcttgggtttcatagtcagctctcggggaatagaagccaatatggaagagatcaaagcccttctaggcatttcgtcccccagaaaacacaaggacacccaaaggttaactaaaaggattacaacactcagcagattcgtttcaaaaatgacagacaaatacatcttgttcttcaatgttttacgtggaagcaaaaattttgagtggattacaaagtgtgaagaggccttccaaaagttgaaggagcacctggctaaagctccaattttatccaagccagttgagggagagtcattgtacctatagctggcagtgtcagatcatgccataagtgtcgctttagtgggagaagaaggaaaggtataacttctggtgtattatgtaagcaagagattgttgggcgtggagtctagatatcccatgattgaaaaactttcctattgcttgctaattgcctcacggaagctgagaccatactttcaggcccatgccatcaaagtactgacaaatcaccctctccaacaagtgttgcgagatccgtagtcatctggaagactgttaaaatgggccatggaacttagcccatttgatattcagtattagcttagagttaccatcaaagggtggacccttgtagtattgtggaatataccagaatgaatgacgatccgaaagagccagtctcggaacgagaaatctgaaaaaatttacgttgacaaagcatcgaatgagaagggtgtcaaaatgagggtaatcttaattactttgcaagggtatcagatccaaagtgcccttcatttcaaattcacaacctcaaacaatgaagcaaaacattaagcaatgattgtcagcctgaacttggcaaaagaagtgggggcccaaaacatcaaagtgcatagtgactccaagttggtggtaaattatatattcggagagtaccatgcaaacggtaaaaagatggttgcatgcctgtcttgatctagagagctggtgcaaaactttaagagttacaccatctgcccagtcctcacggatcaaaatgccttcgcggatatgttggcaaagttggaaacagattcacaaatcaagcagtacagagtagtgcccattgcgcacctagagatttcaagtaccggagcactggtggtaaatgtcatcgaccactccaacttctggattggcttaatttataatttcttaactctaaggagctaccagaggatatggccgccaccaggaaaattcaataccaggctctcaaatatgttattatggatggatgattatattgaaggggattttcagttccatacttgaagtgcatttctagaatagagattagcgctgagatccatgaaggtttatgtggtagaccatacttcagaacccaacttgtcaaaaaaaaatc

SEQ ID NO: 198806 - DNA, 1618 bp, Cannabis indica
aaaaaaaataactaatagcaatgttgttattttgattaggaaaaagatttgtttttcgatcagcaagagatggtggagaagatggatacaaaaatctatacataatggagaattcccaggttggggagttcaataatggcaaagtaacaagactaacgaatggggcttggactgacacacattgtcagtggtctccgagtggagattggatcgttttctcctcaactcgcgacaagccaagtaatgctcctccgagtgataatggtcttgacccaggatattttgcagtgtacttagtgaacgcgaatactcgcgttgtgataaaagtgttaggaagtggtgatgatttcgcgggtcatgtaaaccatccctttttcagtcctgatggaaaaagaattgttgtaactgcagatcttgctgcggtatctattgatcccatctcattgcctctttttacgcattctgttagaccttatggagacatattcatcatcgagattgatgatatcctaaacaacaatgatgagaagaatagagatgatgtgaagtttgttcgtgttacgcatagtaggtttgagaatggcgccgctagttggatgaagttctcaataggtgatcccaatgagtcatggaagaaatatgtagagcaatacggggaacactcaaagggtagacaaccctcattatgtcctataatacgtcccctaattccaaaatcattgcatcttaatgataaaggtgaaagttggcatttgactggccatctttgcattcgagatagacgttgttgatgaattaatattgcatgcatgcatgcatgccttgtagtacgtgttcctatatgtacacgatcatataatatttggtcgaccttttcattattgaatatatatatatataaatctcataataatctctatcatattagtaatgctatgtcatatcattactaatatataagggaaataaggaataatggctcacttgagtgtatgtgtactcaagtgtagtgtgtgtacgcaaactttgttctctatctattgagtcatattagtgtgtgtaaactttgttttcatatatacggaagctttgttgtgatttatataagtataataattttcttctgtccaatttttcttttattatatatgctaagttttttattactttattcctgtgttaatagaattataggtgaatcttggtgtgtttaaatatgtggtgaattaacatttaccaaaattccaaaataacacgaactgaagtaataaaacatgtcatcaagtaatggacaaaaccagaaaatgcaatagaatgaagattaaagaaattgacacgagtgtggttcaccacccattttgtagtgactaatcaataatgctttttgaccaaactttattgatgttcacaatgatggaatacaaggtcacaataaagaaaactcacttttcactaataatgtcttgcaccttacaaaatagctttcttaaaagagttgtaagcataagaggatagtcaagattagtttaactaagtctgttagagttagttgcaggttgttataatttcagttatttctgttattagttctgtattctctctactctgttattggact

SEQ ID NO: 198807 - DNA, 1050 bp, Cannabis indica
aaagaaaattaatttactaaatttacttttgtttttgtttttttgttttttttttgtttttttttttttttttaatttcatgcttaatttatcattttaaccaacaattaatactatatgctatttatgatagggaggaaaattatgcatttattaaattagatattaattacgtatttttttgacatttactccaatttacaggttcaattgtttttatttattttttttatttttcttcatctcaaatagaaaaaaggaaaagaagtatttttttttttattatttttatttttcttcttcacatttattggctctttctttttaaatttatccaaattccaaacccctaacgtcacataatcacattattaaagaataataaaactagtggtaccaaattaataatacattattctattattcccatggcatttattaatcataaattttattatactttcttcattcaataacattgaatttaatttaataccacatgctttttctgaacaaacattaattatatcaataaataaataagagaccaatagtattttttaactccctccttcttatataataatattactattaatccaactaaaaattgaatctcatctaatttaatttaataatttttaaataatctcgttaatcaattacaaaacaacatatctaaaagtgttagacactactaatatccaataacgaccacaatgatatttagtggtataattaattatcaaattttatataatttacaaaaataatttttataaaaaaacacaattcctataaataattccaaatccatataaaaatatacatttttcattaaaaaaaaagtcctcattaatctccatatttcttcacaaattacaaaatggagagattcataagaacacaaacaaagactcaatttttacttaattagattacaaagactttcttcctattaaggaaaaaagtcaaaaaaaaaaaaaaaaacgtaagtttaaacttacaaaaaataaaccttcttcaatcatcatcatctcttcttcttcc

SEQ ID NO: 198808 - DNA, 700 bp, Cannabis indica
gtcttgagcaaaccaaccaaaccaattttatggctaagaatcaaattcttcactgctttttgtttctgttggtcattgattcctcggacattccaacttaggattctattcattttgaagaggaggatctccccctcctctagtatgatcatttgtaagtatttcatggcctccaattgtgattacttgaacttgtgtctttgtcttctcctcaacatagaaagaaggtcctgcttacatcgaaagagtttggaaggagttactggtgtaaacctcagtagctacttcttttcctatttctttctttccattagtaacttgttgaaagccatcaacacaattggagctacggtccttttgttcctggctttctttgtttttttcctttcactatccattgctagttttttccttcttttttttttttttgcattcttcagtcgcatatgtcccaaccccttgcagtgtgtacatggccaatgatttccattcataagtaattgacaggttgacattcgcaccatattcattcttaaaggaaatgttggctgggaagtgttgatgaatagagacctcaataagaactctagaaaaagtaagcttattcctctcctttgttgcagcatccacttggagaggattccccatttggccaacaattttgaatagtgattttttaccgcagtattttagctccaaa

SEQ ID NO: 198809 - DNA, 860 bp, Cannabis indica
ttcttcttctcactgtgcttggcggtgtggctgttcagatctcccttcctcactggtgtttcgtatcatcttccataaggtatcactgagtttcaagattgaagttttaatctattttaggctaaaggattcattaatcaatcaacacttttctattgtaatttgataaatttgcttaggttaggacttgagagattctgttcagtttagttttggagctatagattgatcatatatatatataaatttacttatgtaagaaatgagtatgattttctgtctttttgccccaattttctttcctaaattatttttttgaaaaaaaattgttctacatcgattcattttctctttatctcttctttcacatttcatagggaaattgaataaacgaccagagctccacaattataaagctccgacctaaggactacgctgaatctctccgatcttctgtcactctcttttttttttttaaggtaaacacacaacttaccctaatttgtatgcctttgaatgaatctcaaacttgatcatgtggaatgtttaattctcaaattcagtttcatcttatttgacaaaattgcatttagatagctttcatctttgtttctcaccaaattttgtttatgaaaagagttctttgctttgtgggtcatcattggttgtggtcctaaacaaggtctaaacagcaaaagggtatagctttcatgaagtagtctgtagctgtttcaaaaaactctatttgtttctgagaaactgtgttgcatcgagtagtacatgttgcatatagaatcatatgtgatctgggctatatatgtgtagtacatatatatgtactactcaaactatagtttttg

SEQ ID NO: 198810 - DNA, 1151 bp, Cannabis indica
attcccttggagtttctcaaaagctgacctccgtttactccactttcgaaaggtaaattttaactgcctaataaagagcagactatggaactatggtacatttacacaaataagtttacatctcaaagttggtgcacttatattttcagttcacttatttgtgttacctacttttggccttctgtaccagaatatatgtaaccaataccattactggagaaattcaagaaatcccttcgtcgggagctattcggtaagcattgtaaactctctgttttataacttttgtgttccaacaatgatttcttaattaacatggctaattatgtatgtgaattattagtgctggaaatgaacccagaccagtacacaggaaagccttgctcaaggctctcgcggatgaacttccaattgattctatcgtttctcaagcaagatcactgccatagaaacccaagcggtcagcggttcgaggatggctgtgatcctcaaggccatggactgaaggaagaagtccagcaggttttgttggtgcaggcaaaaggattcggttttgttcccctgactaaaacagatgtttattggttcctaacttgtgcctctgctgataaaggttccacttttcaaccttaacttttatcttcatctcctttacgtgataaggggaaaattgtaagttgtctaaatattataaagattgattatcttaactgcaaaaattaatgtaagtgaagcaatgcctttctgaatttcatatttggcatgtgtcatatcagatgcctacttgggaggaaaccctgaagcaattaagagtgaagtgcttgaaaaatatgccaatgacttgcccgaactatatcaagacattatcaatcactctgatctttcaacattgacatgggcaccgttaatgttcaggaaaccatggaaggtagcatttggaaacttgtgcaagcaaaacatcacagtggccggcgatgccatgcatcctatgacaccggacttgggacaaggcggttgttcagcacttgaagatgctgtggtgttgggtaggcacattggggcctgcatcgcacaaaaaggaggacttgtccctagagagatgattaaagcagtatctaattatgcagaggaaagaaggtggcgagtcactt

SEQ ID NO: 198811 - DNA, 793 bp, Cannabis indica
agagctatttttaattaactcctccgaatgtatcctttctactaaattaaaatttgaagtcttttgtatatttcttaatatattttctactaattaaaaaaaaggtctacttaaaagttaacccaatagaaaaaaaaaaaaaaaaaaactcaaagagaaaaaatatcattaataatggacattagtgactcacaattttgcccatgaatgttattttctttctttgtctctttcattaattatgtttttattagttttgccaatgagtaatgagtgtgttttcaagtttttagagtaggtttggtaaatttcatggaaataataatggagagaaagaagtgcttagaattattgtgtttggaatgagaaggaaagaacctttcaaaatagataaattattatttgtagactaatcactctatgtacttgattggcaaatctctcctaaaaacacttgttactttaacctaacacccttcctaccaaacaaagccctactaccctaacaactgtcaatagataatactctttatttatgattttctctcttaccaaacactctttaacatgtgataaataaataataaccccaacattaaagtaggttttctttttatttatattcaacaaaaagactaaagttgggattcttaaagagggtttggactttggagtattttagaaaggggactatcctatcctatgtatatgtactatctatgtatgtagtgtttggctttaaaagataaatagattctttccaatgtttcatttgtctttttattttattttt

SEQ ID NO: 198812 - DNA, 1243 bp, Cannabis indica
aaaaaaaaaaaaaaaaactctagcaaaaagagactgcattgtagagtagctacaatggatgcagattagcatgttatgtatgtaaggattaattaattgtttaatgaaacagtttattgtttgttataatcattattattattatttttaattagtgcagaaaccttagccttggaattgctgcctataagctagaatcctatgaagggaaatttgctgtgtatattcatggtctacttctaccctctaagtttataataatgactattattgggagaatggttagaagagaaatgctaaaggccactacctttgtatttgttaatatcgttattggttaaactaagtatcgggtcttatataatttaatataatagcttttaggaagtatcgctagccaattacaacgcgacatatcgagaaggtgttaggcaccactggtgcctaataacaatgctcttattaaaagggtattagagcatctctaatggtggtattttttaataaatatgctaaaaatttacacattatctaaaaatataatgttttattttatcattttccacatcatatttagtattctcacttttataaatactccaatatataaaactctttaaaaatgctataattattatcttacacattattattaagaatgacattttgttgtcttcaatggtataacatctcaatattttgccacataatatgttcacctcaccaagcattctctaaaattttaccattagagatgcttttagtggtacctagcatcattcttagtgtttattagtgtaattaaatagcagatttcatataattttaaaaaataagttttaagcaatatccctaaccaatcataggatgacacctatggaaggtgttgggccccaatggtgtccaatatcaatattctattattggacaccaatagtgtttaacactatatgttattttgtgattagttaacgatacttcctaaaagttgttatattaaattatatgagattcaatacttagttgaaccaataatgatattaatatacatacatagaaatgtgatagacaccattgatgccttttactatttctttaaaagatcgttttgttagattctttatttgtttcggcatctaaaaaaaaaaattagtttaattttttttatgatctcgtatgttgtagccatttaggaccacttgtaaattttcaaaagattacgaatagtttacaatgtcaaaaa

SEQ ID NO: 198813 - DNA, 971 bp, Cannabis indica
gggtgaggtgtccttctggtccacgtggcatacgtaaccggccatgtattttgagaaaatttgaggcaatacttttatagttaattaaaaaaatataacaattagttatatataaaattattatttttaatattgattaataaattaaaattagtgttaacattataataatatatacgtacaatttcataattagtattagattagataaataataaaattgtaaactaataacaacaaacaaaataaatttaaaaaagtaataggtatcaagtaataatgattcgtgcacatatctttttaaactaaattttacgaaatttgagcaaggttattaatttttttaaagcaaatttaagcaaaattattatctacaaagaaaacacaaaacgagttcaaaaatacatagtaagcttagtgatttattcaaaataataaactttaaaaaaatgagagatattttatattacctattaaaattaaaaacttattaattcttttttatatgcatgatttataattttttatgttcttcacatctttttagcataatcaattgagaataattgcatcttaatttaaccgtatactttttataatataaaatgttattagtgaatattgttttccaaatcaaatcaaaaaggtatattaattttcttaaaataatattgcttatattaatttttttttcacaaatgcacttatatatttaattataaatcgtagtcatttattattattggggtgctataagatattttttgaaattattattataaaagatgataaataataaattaaaatcaataagaaagtagataaaaatacttttaggctcaattagaaatcgggaaagtaaataataaagaatggaaaaagattaagatgccacctaaaattaaaagtacattgagatcatattaagatatttaagtgggtaatatataaaaaagtacatgaaataaaat

SEQ ID NO: 198814 - DNA, 578 bp, Cannabis indica
ttctttaaaaattaaaaaacaatatgagaatatgatttcaatatgagaattgttataatgcattaatggcttcagagactaagctcctgacacagctttcatcccattacacaatccttctttcccaattctcatagctatgttatgaacaatattagctcccgcactgtcccctcctagaaaaactcgtacgaagtcgccgtaatcagtcaaccatggctcctcagaggtaccgtgatgaacgttagttgaaagagaaaccacccatttgagggcagtccagcaatcttcgtaggcgattggaaggtgatgttctggggctaaccggtactctacggatacggctatgattttggcttcagagactaagctgttgagaaattggtggtggtcggcggagaaggctgactcgaagcagaagccgccgccgtgaaagtagaccaagatgggaagtttcttgttgttattggtgttggttgggagtaatggaaggaacaagcgagctccaatcaggggttggagagagatggagatgtccttggaagtgactggaactccggtttctgggtggtgattgt

SEQ ID NO: 198815 - DNA, 1034 bp, Cannabis indica
aaatcttggagatgagaaatggcctttctttctcagaaaactcaaagaacaaagattttcaagctaaaaaaactgtgagcttccactatatatatacttagtgccaacggcaattgcacccgtgtttttctttttcacggatatatttttcataacaaaaataaaatatattgggaaattctacaatacatatgtatttattgggaaatagtttttttttttcacggatacattgatgcactcctatctgttttagcactcgaaataattttttagttaaattttttctcatggtcatgtacgttatagttatttaagacatcctgcaaaattttaagaaatttagaaaagtttaacacgccgaaaactacgttcaaacagtgtattgcacgcgtgactattttattttatacgcgtgtaaaatagattgtttgaacattattttctatattgtaaattattcggaatttctcaaaattttataagttatcttaaatagttataacgtacatgaatataaaaaaaaaattagactaaaaaaattttctggataccgaaacaagtcaagggtgtatcaatacatcccttttaagaggtgcattctagaatcacccaaatatatttatgtttttattataatttttgttcagggaaatattacattttttttttactaattaggatttttaattaaattttggcatgtatcaaattatgcattataaacttttctgatagttataaattacccttaaactattgagattagttaatttaatgatttatgtgtaatttcattcaattcaatgcgccaattatctatgtacaaaatcatattttcagaacgtatttttttatattccagtctactactcgtcatgtgtttgctaagtcacttaattattctattaaatgataatataaatgttatttaggattttatcctgaattatgacataagtattattgtgctcctgaattttttagactaatttacagcattaaatatagtggaccatttttaaaaggctaaa

SEQ ID NO: 198816 - DNA, 1403 bp, Cannabis indica
caattgagataaagtttgtatttggatgaaaaaaatctctccattatttgtttagatgaggtctgtgaggcttgtttcaaatggaaccatccaagctcgggttgggatggaatgacaacttgtttctatcaagaaaattggccgaatgtcggtgacaatgttactgcaacaacccttgataaaactcttatatgtcttatataatctaaaaattgattcttctactagactttctgattatcgtcctattagtctttacaatatgttttataagattattatcaagacaatgattaacagaatgagagaagttttatcaggcgtcattttcatgaacaaagtactttcttacttggtagattgattattgacaatgctcttattagttttgagtacattaatacgctaaaaaaatggaaaaaagaaacatggtgatgtggggtattgtgctattaaacttgatatgtctaaaacttatgactagttagagtgatcttttttggctaacattatacagaaattaggctttcatgatgtttggatcggtaaggtgattgagtgtatttcttctgttgaatatttaattcttttcaatgttggtatttatggtactattcaacttaacagggactttcgtcaagatgatttcatgtctccttacttgttcttattatgtgctgaagtattgacaactttggtaaattgagattatgataataatttgttgggtggaattctgtgtggtaggtctgggccgatcattcctcatttgctttttgcttatgatagtctatttcttctaaaagcatcagccttggcctatgaaagattcaaacttccactctcttggtatggtgcggcttcgcgtcagagtgtgaattttgagaagtcaagtgtgtgttttagttcttattgtttgatgatacaagtgagatacgttggtaataacaattttaaatataatgacgtttacaagtgagatacggtgatgacaacaattttaaatcatatgcaatgatcattttaaatatctaaattatatgaggatttttttatttctattttttctttactataacattttaagatactttttcattactttctttttcaaatttgtacgtagagttctttattttttaaatcccaacctctgctaacatgattcagtagttaaatatgataattttaagaaaatagttaattttaataatattcaaaataattaagtactgtttaatagaatgactatcccaaataataataataataataataataatttttaattattattattattataaaaaatcttaatccaagggatgactatttttccatttggaaaaaaggtaaaggccaatttgtaaaattgaaactcaaattttaaataagttgcggca

SEQ ID NO: 198817 - DNA, 590 bp, Cannabis indica
aatattgctaacgcttttgatgaagtcaataaacgcaatcatttctctataagccattacatcggcttctaatctcataagagccggtaagaacagccacaagccagtagccatcacaaacgccacagccaaaaaccctgaaactaacggcggcagccgccacttctcgttaacggccttcttaacggaaacctcagcagccaaacagatcccatgcagagcaaaaaaccacgtgacttcccacgtgggtttcaatctccctatgttgtaaaaaatcagctcgtgcataattccagacaccaaaaacgccgcaatcacagcgggaactggggcccacttcctcccgatccaacggctcgtgacggtcctaacgggaacgtacactgtggcacgtaggatggcgctggccatgagattccatctcctcccccagaagtcttgtaacgatgtggaaaggtacggctcttcaaactgtggctcgagctcgacacagagcgcggctcgaactgaagccgccaccgtggctaggatgatctctagagcgatgtacatgtatatggagtagagaaacaagaaaacatttgggtgaa

SEQ ID NO: 198818 - DNA, 1080 bp, Cannabis indica
ctccagaactgggcaacacatgccctctcgttctagctctgccacccttggatggacatgtggccacgatatttggaggaccataccttgaaggaagcacgagaaactccaagaagaggtatttaagggaattacatggagaaggggaaatgtgtattgttctataatcactagctcatcgccctcgaaaatgaacctgcctattactttcagagaggaggatgccagacacgtgaactttctataatgaccccttggtcattggagcccaaatctccaacaaaagagtttcttgggtcttggtagataatggaagctcattaaatattctattcaaatgtgtattccacgcgattagtctaacgaattatcaccttgtcccattcagttgtaaggctttaatggggacactgtgatgccaatgggaaagatctaactccttgtcacacataaaggagaaaacaatatttgtgccttcaaacgttgaacttttgtggtggtggattgtcccatgacatacaaagcaatactaggacacctagtcttggtggacttcaaagcagtgacttctataaggcatctaggttgaagttctcctgcaacaatggatgcgttagagtggtcagaggtgacaaaaagagtgcaaggagttgttacaatgtctctgttcgaaatgtgttcatggttcgagcggaggcacctattatccccaaatggaaactcaagcaagagttaaagtcattcgtgaggactttgaagatgtattggaccaccaagtggggattgaaagaagtattaaatcgctagaggatgtcagagaagtttgaatctgtgaaaaagaccccactaaaaccatcaaattggggagagaccttcatccggaaggtaaagaaaaagattgtggatactgtcttggccaatgaagatgtgctgggatggagccattttgacatgatagggatcaaccccaacacagtctgtcatgctctgaacatcaatgaagatgtgacacgagttcctcagaagtagagacctttagattttataagggcagaagcagttaaaagcgaaagttgataa

SEQ ID NO: 198819 - DNA, 1197 bp, Cannabis indica
gtttatctagctatcttataatattatgtaaggattattgggtttcatttgacaagtatgctacagtatccaattagtatatacgtagaagagaagaattttatatgatttgacacgaacgtacgtacgaccaacgttttcaatatgttcatgttcaagtaacccgtgatgatcatcatcagtcaaacagaaaaaatatatatgcacgtacggttcaacgttagttggcccctgcactactataaataccctaataaataatatacgatcaagaaaatattaattccattaattatcgaagagagaaatatacacatattagcagagaagtttgcatctaaaaatcatcagcaaaaaaggatgactactcagcccaataataaaattatgacagctatttcattagaagctcttgcaatggcggatcatcatgatgattctgtcagggtaatggattttgaagaatgggagcgaacaaaggagttggaaccacctccaccccatttattactagctgacgaggatgaagaaggtcattattacaacgacaataatcatcgtcaagttgtgaacaagaagattatccttagatctgaattgtttttatgtatggagaggctcttaaactcttggtgtaataaaatgttggttgatctatctgagaaatgagagtaacgtaactcatgaccatgaaatgaaggcattacttactcaagcttagatggaaaaaataaagaagggtttcaattacctatcacatcaacgctgctgctttccagaattaagatgatgtatatacatatgattccattttattgaactctgtatacatgtatagtgaaactacttttctttaatttgttgtaatatgttgtgatgaccaccaaagtaaagaagttaatgaaattgtattcaaagaaatatatattattaattctgatttaattatgaaaaatgcaagtaaattttgagagacgaccaagattaggtagcattaacaacgtctataaaggctcgttttggtatgcagtattgtattatattatattgtattatattatgttggattgtattgtattaaattatattgtattgtgttgaattatattatattggattgtattgtattatactaatattatattaatattatttaatatacaatacaatgttggatattgacttgtattaattaat

SEQ ID NO: 198820 - DNA, 1079 bp, Cannabis indica
attacaagaattgatagttatttatagatttacattgttgtctaaattatctctgagaatatcttggctcatttatacaaccttaaatgatccagctcatctctagcaacaataatccttgtcagctttgatgaacacgcttttagtataaaccatccgggaactataatactcacaagtcgtctggatttgtacaagttcctctttccagacgaataagcaagactgacagtaagctatctagaattaatctccgaagtaataacaagctaccttgagtgacagtacatcgcggtacaagctaatctagaaccaccctctggtttctacaaagtcttccgcacaagactttccgaattcacaccaagcttctcgtatctactctctaaattcacaactttctttccaaatgacaaaacttgtaaccataatcaacaaatctccaccttggtttcaagttgaagtcgcttgacaaatcattgttataaatactgttgttccccttagcctctccaagctcaacttactccaatcagcttcaggcagtgctcaaacttaccactcgacactaccttggtcataatgtcagaaggattgtttttagttggaacccttggcaatcttcacagtttctttctccaaaacctctcatatgaagtgaagtttcatatcaatgtgcttagttcgttcatggtacacacaattcttgattaattgaattgcacttatcacaatggacagtaataatcttctggttgagtttcaactcttctatcaactcagttaaccacagtgcttccttgatcgctttcgtcagggacatatattctgcttcagtcgacagtgccacaatcttctgaaggttcgctttttaattaatagttgtttcgaacatagtaaacacacattcggttaaagactttcatgtatcaatacaccctgcataatcatagtccacataactattaataatttttataattcaaaataatattataaataaaagctacatcactagcaattttgccgcctataaatgactaaaactcgtcactctaattaggggtgtgcataaatcg

SEQ ID NO: 198821 - DNA, 1020 bp, Cannabis indica
accgtcgcgaagtctacattagcgcgatttttaatcgtcgcctactttacttgttttgcgacggttatatatgcgacagttatagaaaccgacaaaaatagtttaaatgattgtttaaaaacgtcgagaaaaattatttttatagtagtgttattttagcattaatagcaatggatacttttttacattttatttatatattgaataaaaattttatgtagtttcaatcaaatttaaaagcttttcttaactttttaagctaattttacaccaaatgtaatgagttgatcaataataaaatataatattgactcattctaaatcaaatttagcagtgtattctaatgataaaaatggtctagtctaagtatattcttactttagtaattaactcatatttagtatttatataataatatatttttttctgataaatatgtaattattttttttaattagcactatccatttttactagtgataaataaaagcaaggtaaaataataaactcaattttaatttatacattattcaaatttaacttcaaaatatctttagtttttatgctaaagaaaatctttctatagttaagatatcaattgtatgttgattattaatcaggagtaatatttttattgaaagtcaatacaaataaatttctttttttttgttgtatgtttttagggtggggccttagcccaaaatgccttctgttattttttatgggcttttacaaaaatattagattttgaataaaaatttacaattttattatcactcataattttttacaaaaaaatatcatcctcacatttggtgtaaaatataccatcctcacatttggtgtaaaatataacgagaggggtaatcattcatcttatatataacaatttattttcacacattattaatgtgagactaactttaatataccatcctcacatttgaacatagaaagtgtgtataacgaacgacttttaaaagacaacaaagttgaaatgtgacatttaaaagaatccc

SEQ ID NO: 198822 - DNA, 551 bp, Cannabis indica
attgtttataatgtgattgcaagtaaataaatgatgtaatggatataaattcatttaaattaaatatggtacttaattaccgtaggcatttccaatcttggtagtggttctgaaacttatagtaacagcaacacaagcgagcataaggagatagttggcctcaggaacaaaaacttgaccaacgtacttagtggaagtatgaacgatcttaacacgtgggaaacaacccaaggaaagtgattgttggattatggagaaagtccctgaaatcatggcttgactggctatgatggctgcacatacggccaccacaaacattggccaatacagtggcttcggaatagatttatagaaagtatcactcacaacatcattgtgcttacgaagaaacgaggcttgtccagcgtaggccattattagagccgggtacgttattgagcacatgcttatttgaatggactttaccgtgaagtgccccacgtccgcgaacaacgcctccgttcctattacatacacaatttttattttcttaattagaaaactcaaaaata

SEQ ID NO: 198823 - DNA, 1784 bp, Cannabis indica
gcacaccacaacctgctgcactaccacctgatgcatcagcacagatcacacacgttccaccacctgctggactcacaccagcacctacttccccacatcccacaacagatggttcaatacctcctaaaccatctcccataaataccacaaggactggcagagcattaaacaagccaaaacacttgcaagactatgtctgccatgcctcttcaaccgctcatcctattgagcaatacctatcctacattaaattacatcccacttttcgagcagctgtccttgcagcctattcccaaattgaacctcaatcttatgctgaggcatctcaatttaaacattggctattagcaatggacaaagaaactgatgcccttgaaaaaaaccatacttgggttgtcactaaactaccccctggccataaagccattggatgcaagtgggtgtacaaagtcaaatataatgaaagtggggctgttgaaaggttcaaagctcgactagttgccaagggctttactcaaagacatggcattgattactctcaaacttatgctcccgtggctaaattcaacactctcaaaatttttttagcccttgcagcaatgaacaattggaatgttcaccaattggacatcaacaatgcctttctacatggggaccttcatgaggaagtttacatgaaaattcccccgggttacaaggctcctcccaacacggtatgcaaattgaataaaagcatctatggcctaaaacaagcctctaggcaatggtttagcaaattgagccaaactctcatttctgatggtttttcccaatcactttcagataactctttattcacaaaacgaaccaacaccttttttcttgccatcttgatatatgtggatgacatcatcgttgctagcaacaatgacaatgccatctccttttttaaaacatatcttcacgacaagttcaaacttaaagaccttggcaccattcgattcttccttggccttgaagttgggagaacaaaacaaggcatctcggtctcccaacgaccatttaccatccaattactcaaagacacgggatatataggtgccaaaccggcttctactcccatggagaccaacttaaaactaagtaaggacaaaggaaacattcttcccgatcctactgtttttcgaagtctaattggcaaactaatatacttaaccataacacggccagacatctcttatgccgtcaatcatcttagccaatacttgacttgccctcgaatcccccatgtccaagctgcacatcgcatcttgcaatacctcaaaactacacctggacaaggattgttttttccttcaaacaccacaccatctatttcagcatatgctgaaactagcttatcaccctcaaacgttcagatctcctttttttctgacgctgattggggggcttgccaagacacaaggcgatccatttcaggttattgtctcttccttggcagctctcttgtatcatggaaatcaaaaaaacaacaaaccgtctctcgatcttctgctgaagctgaatatcgagctatggccaatgccacttccgaactcacatggatcctcgctctcctcaaagactttggcatcaaccactccactcccgcttcactctattgtgacaacactgctgccattcacatcagcgaaaaccccgtctatcatgaacgcaccaaacacgtggagattgactgccacttcatccgagagaaggtccaagatggctccatcaaactaatgcatgtttcttctcaacacaac

SEQ ID NO: 198824 - DNA, 747 bp, Cannabis indica
ctattcaagggtttagaatgtaacattttaaatccaaagattcttccttcaatagatcttgttggtcaaggatttctttgaaattattcttctaacttcttccaaattttagtaggtgtttcttccttgtcaacttgtttgataatatcatcaaaaagattgaatatgattattccagttgctgcttcaagaaactcttccttctgaacttcggcagttccattaggccattcatttggatcatctagcactctaagcagcttctgttgtgctagtaatgacctgatcttcagatccatcaaacctgtcaatatccacttttatattgctcatgtaatttaattcacaaaagataacaaatttcttttaagagaattctcagtttgtttattcaaactcttctagatgaagacctcttttttgagaattagcttcctttaattttgatctccttctctttcttcttgtgagttattctttctgtcaaaaaccacagctctaatgccactacaggaaatttcacaaatctcccaacacaactcacacacatatattagtgcacaaggtcaattttgacctttcttttgtctcaattaatgaacacaaaatggacatgtatcactttaatatttttagtttgattttattttataaaattaccaatatgtcttatttgaacaggcttcaaagaacaaaacaattaggccaaaagtttcaagaaaaatgagggaccatcagctctgttct

SEQ ID NO: 198825 - DNA, 1370 bp, Cannabis indica
ggatttatttccccctcctccagaagtatcacttctggatcctccaaactggcctcaataggccctccaggcgttacaatgacatccagagaaatatgtggagccacttcccctcctgcaagacaaatgtcgatcatgacttgacttagtaacaccgccttagggtcacttcctcttatcttagtcaagagatcaaccttgaaaaatagtataaacaaatatcttctttaaggggacaaaattaaagtcttctcgaagctagtctatactgattcagtgttgaccgataatggagactgtaggttaatgtactccttctcccactcactattttaggctaatgtgcttattttattaattcttagaattaaaacatattacttactttaataattatgattaatttatttataataaaagcctcaaattataaataaattttccgtcaccattattaaatctgaattaactctttaattcataatttaaaattcttttaaattaataggttaattttaaattaacaagttaattttaaattaatcttagtcagtttacatgcttccagtttaaaaaacggttaacacataaacacataggacaatcctaatatatcatatttctactatgagatgcatgataatacaactgtgtgagatagctatgtatatcatgttatttactaatgcatgagcatgttattaatcaattattaatgaacatttatttaaaaactataaataaataatgatgatgaattgagtaaaatatgggtatttttaattttacaattcttgaaaaaattagaaaattaaattacaaaacgaatctccatcactgtaagggcatttttataattttgtaagatcgtcgtaagcctcaaattaatttaattatttttaattaattattcttaaataaatatttatttaagacatcttttaaaccccttaaaataatctaataaatttatttttaaataaattatttatttaagacaaattataacccataaattaattaaaacaattttaattaattaatttttaaataaactcttaatttaagacaactttattatcatattagttttatcttaaaataatagtatttattatttttaattataattaagacaacttttgtcttaatatggttatagatattgaattagaatttcaaatttataatcaactattatttaattcaaaaataaatttgaaaatttaaattttccaaaaaatattattattttgtcttaatagtttttaattaaatacaaaatattttttaatacttatttaacattaagacaacaattgtcttaacacaataaattagtttcaaattgaatttgaattttaaatttg

SEQ ID NO: 198826 - DNA, 1797 bp, Cannabis indica
aaattaaaaatacgctagactctaaactctttttctattttaaggcttatttaaaatttattatacatgttactcgactaaacatattttattaattagttaggattttaattttactttttatatagaaatatgtgtaaatattaatattatatgtttgaaataaataaattaatatataatatttaaaaaaagtagattttagtgatttattttaaagaaacttatgtatgtgtaatattaaagtttgaggtaaaataaaaataatgagattttagtgatatattttgaaaaatagaagtaaaaaaactaatgaaagtgctctaattactagatctctcattgaaaaaaaaaaacatagaagaaaatatataatattaaaaatgtgtttatctatattagacatgccgtgatttcgttgaattaatatttgtataatcggtatccagatcaaacactatcaatacatcaaccaaccaaacacaataatttagccaattttcaatgaaagagctgatttatcactacgttaattgttgatcaaagatcatatttaaacgacaacccgtttgaccaaacgacaacgcacacatcaatcaatattgttgttcaatttttctcatcgaccaacactttattaacagccaaagcattctcacacaaccaacgaaacacttggctcttcccacccaacacggactcatgtcccacaagtgcaacgtcacatgatttcgagtcggtgacggcaacgtcgacccaagcgttaacgtccttataacctttggacatcaacgccgcggctgaatcatcaagctgttcagccgcgtcgaggtacatttctagacattccgacgcgccatcctggacttcagggtccaggctggaatcatttaacaaagtcttaaagtactcagcgatatcagaagcattagaggccgcttgtctgagagcgatgagccctaagccgggtaagtcggcatctttggagttgggatcggcttcgagcattgcattgcagaaaccttttttcacggcataccggcacgcggtagggattagggtggcgcttttgatgccagttttgtgttggtttggatcggctgcggttgttggatgtggcccaatggagaaaagaataatggtgaccaagaagagaagaaacaaagtagtaacgttgtggtactccatttttgttttcttaattttctggttaattaattctttctttagctagtgattaaaattacgtttacgtggtgattattgttttagtgtaatggtttatattggagaatgcattttggtttgaacggataggcacgttattcggcagtttgtaaggagtgtattattggaatataacacttaactgtgtttaattagcgcaaaaacttgatttattattgaattttattagatatataatttagactggaatgctaactacaaactctttctcaaattttgcctccaaaaacacatgccaaatatatttttctaattttgttcaggtaggtgtcatactaacttataatatcaccaatgtaaattttaactgtaaattatttaaaaagaagaaaacacatttttttagtatttttaacttttttaattaatagacttaattattattaaataaaatacaaataaaatacaaagtgcgatttattttctaattttaaataatttaatgtatcaaaaataaatttaagatcttttaacacgcttaataaattggaatatcaaatttattcaaaattttacaaaaatttataaattcaatgttgtagctataat

SEQ ID NO: 198827 - DNA, 783 bp, Cannabis indica
ggaacattatctgcttggttcaaccatctatctaattcagaggctacatgtctccagaatatgccatgggcggaatattttctgaaaagtctgacgtatttagctttgggatgatggtattagagataatcagtgggaagaaaaactctagcttccactattatgagaaagagctaagtcttgttgattatgtgagtgagttcatagtagcagcatctcctaaattgatagttagttcatttttcaactggtcatcttgattggttggacaagtttgttttgttttgtaggcttggcaactgtggaatgaaagcagaggattagatttggttgatgatgcattggccaagtcatactctgcagcagaagccatgaggtgtatacatattggtcttttatgtgtacaatatcatgcaagtgatagaccaacaatggtggatgtggtttccatgttgatcaaagaaacacatcttcctcaacccaaacaatccttcattacttgccaacgtcaaccacaagccggaactagttccgtgaatgaagtcacattatcattatctgaagggcgataataagtcatttaagttacttttggaaaccgcgcgagtctttctaaactattcattcatatcaaacaaacaaagtatgtgcaactattctccttaaattaaattaccttaaaagaacgagtgttgttattccattattacatttttaattgtatgctgttagtgaaaatttagcgacatttaaaaactgatatatttttgtaagtaatttttt

SEQ ID NO: 198828 - DNA, 951 bp, Cannabis indica
aaagaaaaaagagggaaatataatggtaaactaattcaaaaatgaaaacttaacatttaagattgaacttaaccacctattatcagcaaaggaaaaaaatcaactccccttaataactttatttattattattattattattattattttaaataacaaaagaaaacaactaataaaacacgtatttttaatattaaatattgaattttgaagacataagagaagcacatgaaaaatagagataacttcagcaatggaggggtaaaagtcctaatgtcaggagtacttgccgaagccatgcagacacccacatgatcatgaataacaaccccataccccatgcgacgagacacctcgtgcagtccagcatccacattcagtttgacatgaccaaaagaaggtggaatccatgggatgattgaaaggatagaagccatagagagagacacaatcaaggaattataattgtattcacctcaaaaaaagtattgagcaacttatggttatgaatccatttattacgacgataccaaatgcatcacagaaggaccaataatttgcccatatcaaccttggagagatacacctcttgttccttaaggaaagtataaagagtgacacaagccacagaagaagatgacctgataaaatcaacgtacttcgtaatggattggagactcgaacacccctaaagagcatataaagaagtctcaatctcaaccctatacataggacacaaggaatcggacagaaccttatgaagcttcaaattatgagaactgggaaaccaatcgagacaaactttgcaaataaaaaccttaatcttagaagggatgaaaagattccataaatatttccactaagaagagggacctgaagaagatccatcttgacctctacctaataaacgaatagtattccaatatccaactgtgtaccctccagaattgt

SEQ ID NO: 198829 - DNA, 1718 bp, Cannabis indica
ggaaattggtttagtaagtgaatcagctaattgatgttcagcaggaacatgttgaacaagaatttctttgcccattactttgtctcgaacatgatggatgtcaatctctatatgcttagttcgagcatgcaacaccgggttggccgagagttgaacagcactgagattatcacaccatataacaggtggcgatgaggactgttggtgcagttcagagaggagggactgcagccagctgatctctgtgacaacagcagcaaggctgcgatactcggcctctgttgaagatctggatattgttgtttgctttttggactgccaaccaatgagattgccccctagaaatatgcaatagcctgttgtggatcgtctgtcatcaggatcagccgcccaatcggcatcgcaaaaagcttcaagatccatagaagtaggacattttaagtgtaaaccataatcgagagtgccagctaaataacgcaagatgcgtttgacagccactagatgagattgcaagggagattgcataaattgacacactttgtttacactaaaggcgatgtcgggtcgagtgattgtagcatattgaagagccccaactaaagatcgataagctgtagcatcagtaaccggttcactgccaaagtttgatagtcgaagcccactattcataggtgagctttgagttttgaccccttgcatttcagctttgcatatgatatcttgaatgtacttttgctgagaaagaacaatgccatttgcagtaggaaccacctgaattccaagaaagaagtccatgatgccaaggtctttcaaggcaaacttggagctgagattggatattaaggtggaaacttgatgagaatcacttcctgtgattaagatatcatccacgtagatgagaacatagatgacaccagtagaggtatataaggtgaacaaggactgatcggttttggcacttgtgaacctgagttgaagaagaacaatggacaatttttcaaaccaagcacgaggtgcttgtttgagcccataaatcgccttatgtagtttgcacactttggttggattgtctggatcaacaaagccaggaggttgaaccatatatatgtcttcatgaaggtccccattgagaaacgcattgttcacatctaattggcaaaccgtccaaccttttgaaagagcaattgtgagcacaacccgaatggtcacgggcttaactactgggctaaatgtttcatggaaatcgaagccagcttgttggtggtatcccttggcaacaagccgagctttaagtctgctaactgaaccatcagcattctctttgatgcggtaaacccacttgcaaccaataggctcacggttaggaggcagggggaccaaagtataagtgttgttcttctttaatgttgtgttttcttcagacatggctgcaaaccatttcggatcctttaaagcacttttaacagatgctggaatgagggaggccattagaaccttgggctttcgaataccagacttggcccttgttgtcattggatgtttgctgaccacaacatccggttgttgagtagttccagaggggggaaccgggatctgaatgtaaacccaggtgtagagataggaccagtagaggcggggtagtagtggcgagggcacgggtagtagcagctggtgtaaagtcgtgtcgacaggttgagctgaagcgttcagttgctgca

SEQ ID NO: 198830 - DNA, 1421 bp, Cannabis indica
aatatcgaatgattgagatgcaccgaaataacacatattttctatataaaaaaaataatgtaactaaactgtacaattacaaattataagttatataatccctacctcaaaatataaataactaatatttaatgtatattattgtaggtaaatgtgtacaatttaattgtaaagcaaaaaaaaaggtataattttatgttaaaagaatataatacctaaaattcaattgcactttaagaaatgttagaaagtactagtggtacttagtactttcttacatgtcactattattgttattggtacaattaaatattgagtgtcatataatttattgtaataattttcagatagtatcgctagccaaattcaaaataacacttctagaaaatttttcattagcaaaataactttacaaaatattttattagcaaaataactttttatagtcgcagaaataatcatgaatcacattgtgcgattataaatgatcagtatattgcaaaactactatatatttacactgtgcgaccatggtcatatagtgtaattaaatttattcaggtaattttaaaaattatagtatttgacattattaatttgacaaatttcagcaattggagtttatataatatctaatcgtctacatggcattgaagaaaagcaattttcatattaaaatacaattttggaacctatgaagaaagattaagtatataaggtaagtatagcttagaaaattttaaatacgttttaagagaaatgctgggcattaaggttattagtttattttaaactagttattcctatattttaatatcaagttccactaattaattgaataaataatataaaaaccttaaccaatctttattttattaacagccatttactcaaataataacaagaagaaactaattaagaatagttttgcactcactttgacaaacaccattaatggggtcccatcgaaatccggccttgcataaacatcttctctgtccaacttgatccgccaagcactctgaattcgcccaagcctggcaatccattgacgttttgcacatcgattctcccggcggaacccactcgatctccacgccaggcatcggccacttactcacgggcatcgaactatccaaattcacaaatacttcataggccgagcaacgctgctctctggctctaatcttatactcattaaccgacccacctgtcctgtaaacacagcaaattggcaaactcccacactctttcattgccttgcttcgaatgtaatcgtgacattgggctattggacgaacagttccatgaaatttcgagaacttcggatgaacagttcatccccaccaccgtgttgctccccgaaatgttgaaaggaagagtgtcgttcagctgaatcccgtggcttcggaaatcggccg

SEQ ID NO: 198831 - DNA, 1170 bp, Cannabis indica
taaaaattataaaaaattgctataaaacaaaaccacaactcatagtagtgctggcaatggtcaataagtttgcaatagtccatcaatatctctacagccaccctttttgacttccaatagtgtgggtagcatcattgaaaactagaatccatatgacaatacagttgaaaacagaatagttagaatgcacattagaaaaagttacaacaacaaccaccaatttagaatttagagatttcttccttcattccaacatttcatcattcccataattgaaaaactctataagaaaccatataacatttcatcattcccatctttaaaggcactatccacaaaaaccttgatttttccataacaaagatagcctttaaagaaattatgagaagaaaccattagccaatgctcattgaaagcagtcaaaatagccttaaaaatgacttcaattacaatagcaaaaccacgatctctccaatctataatagcccttattgcggtaaaatcaacttaaaagacatgttaccgagtatcattatgaggtgtaatattattattggtataatttaatatcgaatttcatttattttttactttaataaaaattaataaaaaaaatgttaatcatttataaagcatcattacatagtagttttgttgtacttaattatattttctttaacatatgatttgtttttctttcaaaatgaaacaaaacaggtacaataaatgaccaattttctcaaattttttgactagaaaaataaaaattgctaaacttccaaattaaatatcataattcatctcgatgtaaataaaatcattttttcaaaaccatgaaatgtttatttattattttttgttttgaaagaaaaaccatgaaatgtttaatttagacttatatactaacaacatattacatagaaaattgctataaaaaatagttttttttgaaggaactataaaaaatagttattatattgttattgatataatttgttttttaataaatattattatcagtataattgaacatatgattttttttattttaatattttaaagtaattttttttatatttttacaaaaatccacatagtaattcacaaatactggaataatgcaaactttaaaaataaaaaaataatatataaaataattctccttaaatc

SEQ ID NO: 198832 - DNA, 1382 bp, Cannabis indica
ctgctcggggctgaacctctataaaattttttgtgtcttctttattatttatttattttgcttttatttacgttattcttatttacgacatatcgttttatcgctttatttaaaaagactcactgtcgttggctaaaagcgaagtcaacaccttttaatatttctctacaattacaattaatatgtgaaaattgatattaaaatgcaccaacaacaatatgacacatcttcttatgctaagtatcgcttctcatttttctatttataatttctcaatattataccaaaaaaaaaaaaaaaaaaaaaaaacttgaaaggccgagtttgctcctccactctcgttctcaatctccacatctaatattctacagattatcaacagataactactacttcagtattttatacttcagagaaagaaaaaagaccactaataatcggaggaacatgacaacacaaaaaccattacacgccgtcgttttcaccctctctctccaagggcacgtgatcccatccatacacctggcaatcaagctagcatcaaagggcttcaccatcaccttcgtcaacaccgaagtgaaccaccgtgacatcacaaaatcgctctgccgcaaaacctctcaaaacgacatcgtagacatcttcgccgctgctcgcgaggccggcctcgacattcggtacagaacagtcagtgatggttttccaatatctttcgatagaaagttgaacaatgaacagtacttagagggtcacgtacatgtttttccggctcacgtagatgaactcgtccgagatttagtcgactcggctgaccctccacttacttgcttggtcgccgattctttcttcggatggcaatctgctattgccaaaaaatataaccttgtttatgtgtcgttttggactgaaccagctttggttttctctctcttctaccacttggaccttcttcaaattaatggccactatgcatctcatggtaagtataaattatataattttaaaacgttgttttttattttatttattttctcttggatcttctcaaaataaaataaaatgaaaaacaccgtattaatttgttcatccgtatccactatttaaaaataaaaaataaaaaatttacatatataatgtttttgtgagtttattttgaggccacataaggtagtaggttactattaaaaatgttgtatattacattgaaaataataaaatgaaatgttatctaaaattaaaaatgataaaatgataatggatgcgtactcatttgaaattctgaatttaatcaaatataaatttggttctatgtgttttgtttacacagtaatgcttgtgtatataattggataaatcttatatttggtgtcattttactaaaa

SEQ ID NO: 198833 - DNA, 1105 bp, Cannabis indica
ttatatatagatatagattatcataaatacattaagtgtgtaatacttttattattaccacctatttttctttcagtatcttactttaatctggacagcttcatattaatttgtattcaaattttttgatatatccctatactagtttatattttgtcaaagaagtttagattaagtaccccactttattaatggcaatcaaacggctagtgtacctataaaaggagcacacgtatgatttgattttgatttagttatacatttttttagaagcagttttcaaaagtctagatagtagatactgtcaaacactaaatacttccaataaatataaaccaaacctcataaataataaacacacatatacctgtacttggttaaattaaaaagagtaccttcctaaataatattcataaattgtatataaatatataggaagcaaaaatgctccctctcctacaaaattgatcttaataaattttttttagtctcgattattaactgacgttaatgagaaggcaataacgttggttgcatcaattataatgtaccactctacttacttaggaccactatactaatttttacgtctttactaattaaaatatttcttgaagatcataccaagttaaattttgtaattaaactttaaacctttataaatacataattatacaaaggggctgggatcccgttttaaaagtttacaatatcattcaaaatacaatttgcaaaaatatcgcttcgcgactataaaataaaagcccaagttgtcccgagatcgaacactctaggactaaccatcctaatatgtacaatcatcctcaaattctggactcaatggtgctcagctttcgcctttcccttagccacacatgtaaacaatatctataagtcgactatacactctgtactcaacctgtactagtgttggtaacgctgttatacccctttaacatcatactgtaccaatacactctgtactgcaatcgtactagtgttggtagtatacaaatcacataatacaacatgcatataacattcatacacatacatatacacattttataataatcttaccccgtttcagattcaagtgtgctgg

SEQ ID NO: 198834 - DNA, 1005 bp, Cannabis indica
attaaagaatatatgttgtatggctttaacatcttgctcacaaatcaaacaagtatcacctgtaactatgccaaaattaagtaatatgtcccttgtttgtagtcaaaacggctaatcaaaggacaaagcgaatgtttagggataataaatctacctcaaacctttccataccatgtattggcttcacaatgtggtcctaacacttgatacccatgttgaatagagtacctgtttagtagaaaatgttgtaaagacatattttctttgatctcatctttaattcgagttacttgcctctaataccagctgtattgcattgttgctttgtaatcccaccaagacttcccgtttatgtatacattgtgtaccaatttaacttagagattgtcttgtttagtggcaactaccaagaactgctttgttctaagttattaaatttcagaaaccaagatcccaccttccttccgagatctacatagctcgttccaagctatatatcctggccctttatattctatcttcccctttcatagaaatgctcgacatatgacagtaatttcttttaaaacacttttcagaatcaaaattattaagatttatgaaaaagaaaataattatttaattttattgatgtttttaaattaaatataaacatttaaaattaattttttttaaaaaaaaataattaattgatttatttaacagtgttagttttaaccgttaattttaacgaaaaaaaaaacattaaaccattaattttcgttagatagccacatttaaggtaggaagatatgaaatttaactcaaacaaaatatttaaattctagaataatgattgcgacaaatttaaaatatacataattaatttcaattatacaatcttaaaattgatgccatcttgacttaatattatatatggttaaaatgtaatataagatagatcggttactaaatacgaccaaaccactaaataaatacgtatgaagcctcatcttagaattatta

SEQ ID NO: 198835 - DNA, 930 bp, Cannabis indica
tttaattctattcattctaactcaactcacataactaactcgactattataaaagataacatactattattgatctaatttataatcgggtttcatacattttaattaaatcaatattattgaaaattgttaaacacttgtaacatgtcacaacgttgatatcgacaagtgttacatctaagagcatctccaaaagtaattgcctgtagaattttaagtgattgcctataaaagtataaaatgattgttaaacattacatatgcaataaagtcatcattttcaatacaattttatcaatattattatttatatttggaaatacacgtggaattactctattttttttcttttttatttcaaaaaactattttatgatataattttatagaatttaattatttaaatagtggtatgtgggactatagtagataacttttatagttgtcaactattaagtaatttttatataaaaagttatcaaattttatgtagattgacaaaaaaaaaaaaaatattttaaaataatatgtacacttttaacaactataaagattaaactatttgaaattgctctaagctagtgcccatgccacatgttcaatttggttacatatttttttttttaagaaaaaaatgagagttgaaattaacttgcaattgggcaatgtccggtgataactttttaattatttaattattttattttttgaaaaagtttatttaaaaaaataacaaaaaaaaacaaaaaacaaaacaaaatatattctgtatttttaaattttaaccgcatttggagttgactactatttttgatagaaaaagagaaatcttacggcaaagaaaataagcttatataattttggcaattataaaagaagatgcttgctcaaatttgaattttcatatctacagaactttataattttttc

SEQ ID NO: 198836 - DNA, 2855 bp, Cannabis indica
atacatttgagcttaggttaaatacattttacgaagatacgacttaccttgaggaggcacgacaagctacctttatatatacatttacgcaatctactagctagggatgaatagagataaaagaagaggaagaaaagacgtctagtctcatcaaacctgtctcatcaatctccaaagaattatattttttttctcttcccctacacaggctgtctataagcctcaaagcataacaagcttgtatacaagccactaatttcatttgaatccatttaactcaccttcaggtagacaagcttcaaactagtgtgcttacatgcatacttcttgtttgttttgttttgcattttcttttcttttttatcttatttctctctacataagcaaagttacattaatactgtttttatttatcaaaatacctatttatacatcatttcagccaagaccactgttcagaataattcttaaaatctataaatctctatttattaattaaacataatcataacttaaatgttaccataaactcgactacttaaattgccaaactatgaattcactataattactagacttgataattacacaattacttctaaacacaccctaaattaatcattcatgaaagctaattaaactacttggaaagcaaaagattaattgtaacatggttaaaattaaaattaggaataaaaaaaaacaattagaaaaagggaagcatgccactttttttttttctttctttctaaaatggagaataatggatggaatgggagtatggagacaaagcaaatagaagaggtgaaaatgaatgaatgcgactactttcttcttcttttatcttctttttccctctatcttacatttctggtaattaagagagtcctgtcctatgttacaaatcaaaattgtggtggagttgcaaattaccacattatatcttctagtttttctctttatatattctctcatcatatcaattagaaacagctcacctctaccaaaatgaaaaattaaaattccacaaagctcattcactcactcacttgcctctccttttatgaatgaatttagtggttccataccactcgccaaatccccgaatccaaaccaccaccagccagccgccgccatgccacagcacgctaggttgtatgatggggtggcgtgagaaccgaaattccaatttcagagcaaccactcaattcacactgtgctcgatttcactgcagagtgttataacaaaagaatatgtagaaacaaatcagaaagcccatcatctcaaggggcttcgtgtatacctttaagggttggttgcccacatcagatcggttgggaagcatatgccgctttcgataaccaatcaataaggaataacgtatggcagagctaatatatcagctgattctatctgttgagcttccgaccacacctgtggtgtctcctcaacagttgatggttccaactttgccttctttgttgtttccgaagccttaatgtcaaacagccattcatcgtcactgtggtcagaccattcttccctgttcggtacagaataaatctggctaatgtacttcgagtctggatggggcggtcttgccaacgcttcagcaattggatcaactgctggtggtggtggtagtggcggtggtgtggacttaggcttcatgggagagacagacaatggcttagcttctgtatggggtggtcttgccaatgtttcggaaattggatcagcagctactgttgcagacttgggcttcttaggagaggcagacaacgactgctgagcttctggatggagcggtttcaccaatgcttcagcaattggatcagcaactgctgttgcagacttaggcttcatattatgagagacagatgatggccgagcttctgtatccggtggtctaaccgatgatgcttcagcaattggatcagctactgcttttgcagacttgagtttcatcgtggaaacagacaagggatgagtttctataacaccatttatctttcgatctttattgtccatcttgagattattagatgctccctttctatctgatttatctttattctcctatcttgagattattggaccctcctttctatctgttacatcagcggtaaattggtcacggttccagtattcttccatttccctttgatgaataagaagatgatgatgcaggccttggcaacttaccaggcaaattatcatgggctgtaagaataatgaaaacgggaaactttatgcatcaactaccaagaaataacaagactttagacctcattagcaaaatgatttcaagatatgccggtaatcaagtggaaccgttaaaaatcttagttgtaacagaatttgttatatgatcatacaataatcaaaatcctattagtgttgtgaaggaaaatcattctgcaaataatgattgacttgtcaaactcaccatgtgcaactccatttgtctcaatctccttcctcttctttggagttccggtaacaggaacaccgttgttgttgctgtcattgggaagttgagcggttttgattgtatgattattgaggttctgtttgttgctttctcttaaggtatccagctctgtggtggtcttaagttgaattttctccttcgctttctcctctttttcttctctttttcttctcttctcttctgtttctcctccttcttcctctgtttctcctcccttcttttctgcttatcttcctttttcttctctttatctctgtccttatcctttccatgactctttttctctctatctttgtccttcctcttaaccccacgtttatcgtcactttctttgtctttcgtcttctcattaccatccat

SEQ ID NO: 198837 - DNA, 1121 bp, Cannabis indica
tatagatatttactaaatataggacaatcaataattaagcctagactagaaagaattaaaataaggatgaagaataaactaaaaattgcattaattcaataataggcatttcatttaataaccctaagcaaaaagttagttcatagtaaacattctaaacataaaggaattcaaagacatatatatatatatgaaaattaaatataaatatatatatgtatatataaataagatgaaggaaaaaataattgagatagcttttaatggtgttttgccttgttccagttgctttccacagtctgaatgacctattttcgaccttcaattgcataaaacctaagccactttcgacttagaaaaaactttcattttttcgtgattttaaacaagcgtcgcaaccctactttagagagccacaactttactcaattttacagagctattgcaattttgaaatcttgctgcgacaaccgatggtattttggtaatatctctcacaatataacttagaattagatgatttaaaatgttttggaaaattgaaagaaatatttaaaacttttattcacaatatcttcttgaaagtgaacagatcatagtcaaaatttacttgaagcttcaaatttgatttttaattacaaacggagtgtgttgagtttctaaaacttacaatttttcacgcattgtatcataaagctccaaaaatccatgataaatccttcaaattcatcttatttaacatatttttatctcattttaacttatatgatgtacttgaccattaaagcttaaaataagaagaaaataaacgtaagcccgaacaataaaacataaaaattactaaaaacacatactaaaatagactctttaacaatataaaaatagactcaataactatatatgaaggtggagttaattcataaaaggcattcagttagagtgaaggaatgcgacaaggtggagaagactcaaatttcaattagaggttgtttgaagaaagaaagcatcaatgagagattgaagaatgtgaaaaataagtttggctaagttcagaaagtcttcttgatgaagctttgaaatgtgatcttggtacacaagtttattttgagagagagagagag

SEQ ID NO: 198838 - DNA, 1407 bp, Cannabis indica
gagtgtattccatatgcaaatgtagttggtgccctaatgtgtgcaatggtatgcactagacttgatatttcgcatgttgttagtatggtgagtcactacatgcacaatcccagtaaaggtcactagcaagcagtaaagtggattctacggtatatctatggtactatggatattggtttgaagtttgagagagccaagattcatggtaaccatctagttggataagttgattctaactacgctagagatctagataagcgtcaatcaattactgttatgtgctcacaatggcaggaggaccattttactggagatcgacattgcagtcgactgtagctttgtctactatagaggcagaatatatggttgtaatagaaatattcaaagataatatggcttctcaagttgaccaaggaattaggtatttttcagaagaacatggagattttctgcgatagtaaaagtgctattttttggcaaataaccaagtccattatggccgcaataagcacatcgatgttcgattgcatttttttcgtaaagtcattgatgaagggaacgttatactcaaaaagttgggactgcagataaccctgcagatatgcttacaaaggtggttataggtatcaagtttcatcactgtttgaacttgatcaatatctctcgaacttagagcacctagggcgcatgtggaggcagcactatggttttttgccaatgtggaaattgttggatttggctcaaaactaaaaaaattaaattggtttgaagttgcaaatatatggttcaatgatcaagagatttgtaacttattatttgccacattagtcaatgaagctatgcaatagctattgacttatgctccctcattaattacatatggcagagagttagtgttttctttctataagtatgaagctctttggagagcttagggcatcagttcaaggctaagagaaattgagagagatcatttgtatggtcaaactaggaaatactcagcgagtgtgagtattttggtgagttcgagaaaacactttgggaaatacaataaggaatattattagtggaaaatatttgtatccctattctatatatttcctactaagttaaacaattttgtgagttttattttaccactttgatatatcatataccgtttttatcgctatttattgctttcgcgcacaacattgtattgtttaatctaaataaacgaaggactaaaggctaatcaattggttaagcttctttggcataatttttgagctttgctaatctctctctctctctaaattcttctttgaaaattctcaaccagttgttaagcttcataagttggaatagataaaaaaaatatgtactgatactatacattttctggtgttgaaccaaatttaggcttta

SEQ ID NO: 198839 - DNA, 530 bp, Cannabis indica
ggcaagcaactatcatgggcccaactgatagtccttttactgaggtgtttctcttatatctattcacttcccacctgattacccattcaaaccaccaaaggtattacttgattagtattcatgacatcttacttgattacttcttaatgctgttttgaatgttaatatggtcaagcatgtggttttgctctcgagatcttccagggtcctagaacagttctagatttatatatatgtttgttatgataaaataattacttcatctactatatggtgttcggggaatcgatataagcaaatagataagtatgtggtttgctctcgagtccttccaagctatcatgtgacttgatcttctatttgctggtgttctgggaatcgatataactgtgtgtctaatctactttgtttaaaccatatagcatatggggattgttcgtagctataatcgatatatgcaaatgatcaagtatttggtttgttatcgagtccttccaggtaccgacatactagttagtttgagtgttgtg

SEQ ID NO: 198840 - DNA, 1716 bp, Cannabis indica
gtagtagttcaaataaacataaacaatgacaaaagaacaaaccataaccccgaaagtttgctttattcaatgactaacattaatagaaaaaccacatccgaaataacgataggaagaagaaactaattctcgtcggattcacctcctgaatccttctcgtcctcgctccaacaacgtttcagaattgaccgcggagatgcactctctgcatccttaacaaagctgtagtagatgatacttccacccatgccgagcgcttcagtgttcttttctccaatagagtagcccttcaggtgcactgggaacttgtttccaaggtcttcgttcacaacattagagtgcagagccacagagaattcatttggctggaaacaaaccaagaccctctcaagcagctggctcagatcaaccttctcaaaatcatatcccattgtttcaaagcttgcataactgaacccatcttcaggggtcacatggatagtagagattgcatccccttcgatagagttcatggagtagccacatggctcaaactcaaaatcacatatttcagattgggggagaatcttcctgatgccagaattctcagtcatcccgatggcagagcttgcttcagttttgtagaagacagatgccctttctctatcaagaccagtcatgcacatctcaagagtatgcactgacccggactgctgggtgccgaagacaaggctagccaattcagcatgggcagagtacacatgccacttctgtggttgatcagggctgcccatcatgtaagcgctgctagacaaaccaagcttgccaaagtagctatcaaggacagtaacttcctcagaaaagctacggtgagggtaggactgagcaccgggaaagatgaagttcccacgagtgtacttgacagattttacagcaagagaaagggagcttgcaagcttcagtatagcaggaatagagagtagcaatttagtagttccgcaagttttgataatgaccttgtaagggtacacaaagaagctggattctgagagcacatatgaatcaagttgatcattagacagtgaggaaacaatagtgcactcagctggcttcagaatctcatccaattgagacttcgacaaagatcggaagcccatccccgaaggatcagcaaagagtccaggctcaaagaatgaaacttcgagcctcttctcaaatccttcaaacccaattgcagaaacttgatcggccatttttatgtcaactaatcaaaagacgctgaaaggagcagaggacgagtaaaggaaacagaaagttcaaacagacgagagttaaagagaatagacagtaagtgaagagggaaagagggcgagaaaagaaagagagacagtgtattgttttggatgcagtttaaacgagctcaaggggttagatcggagcacgggagagtcaggatggcttgcgaacgcactgcaaaaaaacacaaagttaaataaagtcaataagccattaagacacataactgaaagaactttcgcataaagaataaaactaaaccaaaagcttacgttggagtaagcagctgatctgaatttcttgattccaccggcagggcgaaggtcttcaatgctgtatccgaggggtgcttcgtagatcaatgatttactactactactactagacttctttttcccacctttagactccattagctcattcagatatctgaaaaaccaa

SEQ ID NO: 198841 - DNA, 753 bp, Cannabis indica
tcactaactgagtattacgaggtaattcttcaatgctgtgcattacgaggttattcatcactggttgtgcattacgatgtgatactgctgtgtattacgagatgattcatcagtagctgtgtattacaaggtgattcatcattggtcatgtattacgagatgatacatcactgtaaaaaaattaggtttgaatccctaattcttgtttagtttcaataaatattaaaaacttctaactaaatctcatttaattagtaaatctaaatgatagaatttttaattcaattaatattttgtgtagaaatattttataagtcatttgtattaacttataaatattatttattaagaataaataattaaacatttaatcttttgattttaaaagtatactttaagcattgaagtccttatttagtaaaattaactttccacatattaattgaaataactatttatttaaaaaaatgtataataaacgaaagagcaaataagaattatatactgagataataaattaaaatgtaatgtctttaaacaaaaattcttaaactaagactaaattagactccttcaatgcacttctaaaatctcctccaactggaactttgaagaagtctcacttctttaaatcatcttcgtagattctgaaatttaaaagtaagagaaaatattgttagcggcaaagaataatccattccactgatataatagggatattgtgtaaatcaaatttacctcatcctattatgt

SEQ ID NO: 198842 - DNA, 1925 bp, Cannabis indica
ctagtacccatggcctttttggcgtggattcccactgttcttcaacagtggtctccgctatgcaagacaagcaggggtagacacttgatatctagaagcaaaaatgtgttatgtaagcttgtagattcaatttttttttatgtgagttgcacaataacaaagactaattaatgaataaaaaataatgtttatgttcaatttattgtgtctaaaccacttgctaataagattaacttctcaaagttattctttttcaactccacatgcatacaataggtagcactcgaagaaaagtctcaggaaaggtctatgaaaccatgtgaattgcaagtgaccaagagaccataagtttgtgtgttcacttgggggcacccacgccatactatgcatcaaactagcacagagaacttatgcaacgaaattttaacgcatagaataagctactaaacctgcctctaagtcaggtacaggcatacttcagcttgacataaagaaaaataaattcgaaaacttacatgtcaaggccaggattaaagcccgcatggtcagtcacacaatccatgataaaaagcaatagggccaaacaatagtagttttcaaaaatagagggcctataggccaaagatacgaacatgaaggccctgaggttgaaaaataagtaatgttctaaaaagtaaaaggccacgggccatacagaacatgaaaatattatctatattatacagccataatgttaaaaactaataaactgaatctacatgtatgcaggggtaggtggagccgaattagaagctacaagatccagatcgctgaagtctaggccgaccatagcatccacaagctagccagtctgatggtcaaattcctagtcggcaacctcctcagcaggtgggtcgaccatcccttcatcataattccctaaggatgacccctctaaatatgcagcaatttagtccgctcccaaccggctctcgaatagcactcttcctcgagccaacatgctctccaagaaagcttcactacccatgtatgacagatcaacattggagttacgcagcttgaactcgtagatgagttctaaagataagccaacatactcatcctttaaggcctgctgtccatcaagagctgctctcaatttctccttatgccccatcagttcagcctctagcctagagatagtggcagcttttgtggttctcttttttcatagtatcaagcatggtctccaagctagagatcatgttttggttccgcacgatgagagcgtcatctcagatatggtctgatcctttgccaggagggaagcctgcatggtcttcatctacctcaaagagcgtttgaggacctccgagagctatcacgtgaagagttcatcaaggcctgaaagcaaaacaacacaaaatcagtatcaaagcataacactggccggccagcccctccctaaggctgctatggtcggtcaaccccttcaagatacaacattggtcagccagccccatgcaacaaatccctggctgaccagcttgtaaaagtcccaaaaagatgagcaaggttaaatgtacaacttaccacaaatagatcctgaaggccagtggagtacaacctgtttagctcaccatcaccaagctcgtaaagctcctcatccatagaaggaagggctctctctaggaatctgtgagctgcctccatggctctttgccctgcaattgagcctactcctcaactaggctttagagcaccccaacacgaaggtagttccctcctagttgaaagatgatcaatcataggctgcccaactggtgcaagccatgtggaggaggaggcaaagatgatccagcagcatctctaccatgagtggtctgggccaccttggccctcagttgacccgagggctcattagaaggtcccccagtgagacctct

SEQ ID NO: 198843 - DNA, 589 bp, Cannabis indica
ttttatttttaattgtagagtgaaaatgagaacagataaaaaaggaaaaagagagaaagtggtgctgatagtggtgacataacacaaaagattgatgaattcatgggcttacattttgagcggtagaacggtaactatattttgattatttaaataattatgtttgttatttctgtcaatatttttaatattatgtatagaattaaaatttctctatttgaaaaaccactgtgaaccgaggagacatatttacgattcaaaataggacaaggagcgggaaacttagtaaggaatagaatagagaagagttgtagctgttctcattttcaatcaccttaccactctgcttcctctcaccattagggcttcgaaaatggcggacaaaagcatcactaaaagaccacctcagagtctcaacgacagccactataagttccttcaagacttttccgctccgcccaaacaatcctccaaaaccctcggtacgcagattatttttctttattgctttctccgtccgttttagggtttataaatgttggattgattattaatcgtcgtggttctggttttttgttttttttttttt

SEQ ID NO: 198844 - DNA, 1436 bp, Cannabis indica
aatttatcctattgtaatagttatattttgaggaatattattaataaatagtatattataaataaaggacacaacttgatattgtaaaaaaaatgctaatgttcacttttaagtgtcaagtacaacaaaaaaaatgatatattgttaatagtgcatttcaatattcaagtaatgtatattttaatttaataaataatttaataaataatataagttatatattgattcacattttaagttgcaaaataataatactatctacaaaaagttaaatttttctttattttattattattttatttcgggtgacaaaaagagaaccttcaaaacttaaaaaccaaaactgaacttttcaatcagttgaaagcttatcaaacaatcttattacttttcaaaagtttatttcaaaggttttgaatgggaaaggaaaattatacaaaatttattacttacttgattgattagttaaattagtttgatctcgtacccattgaagatgaccgtttatttagtcataattatgtgagccacacatatacatacagacttgtcttctccctaatactcattatacaactacttcacctccaaagatctttcctttttggaaaagaagaaaaaatggttcatttgcatgagagattcaaagctttcttcaaaagcagatggctagtattcgtttgtgcgatatggattcaatcctttactgggattggctacttgtttggaagcatatcacctatgattaagagcatcatgggttataatcaaaggcagctctccttattgggtgtggttaagaccttgggtggtagtgttgggtttgtggctgggagtttgagtgaggttttgcctatttgggggcttttgctcattggggctcttcagaattttgttgggtatggcttgctttggtatattgttcatcaaagatggtctggtgtgcctttgtgggtggtaagattagacttttaatattattatgctaatcttatctgattataaagcttcaatctttacatggtaaaagtactgatcaagttttattatctgcagctgtgcatttgtatttttgtgggaggaaacggagagaccttcttcaacactgcaaatctggtttgttgtgtgcagaactttccgaaaaatcgaggccctgttgttgggatactaaaaggattttgtggactgactggtgcaactttgattcaggtttatgccatattcaatttcccagataaggcttcgttgatttttatggttgcagttggtccaacaatggttgttattgctttcatgtttgttgttagacctgttgaaggtcataaacaagttagggaatctgatgactccagcttcttgtttacttatagcatttgtcttgttttggctgcttatttgcttggagtcttaatacttgaggatactcttaatttgaa

SEQ ID NO: 198845 - DNA, 1863 bp, Cannabis indica
tttggcacctttggctatgtctgtaggccaaaatcaacgtcattactataatgtattaatttaattaattggatatatatgcaaagttgcaaactatcttttcattcattaattttgtataacatgtcattcgattattgcacagttcttggccaaacacttgaaattattcttttgttttctgtatatgtgtaattaattccgcgtagcctatgtattatatatccttgtcaatctatagtaattatatttaggccacaaaaattgatagtgtgtgtagtgttactttattcggggaccataatttaatttatatttcaattgcttatttagacgttcttcttttaagtacttttatatttatatatagctaactttgatgcatatttgcatgtgctgtaccaaagggcattaatcatctatcttttcaatatggaattattagaaatataactaaatttatgggtgtatttgggaaaaagacactttataaggaaagattgagtgtaatttgaaataattataaaattttaatgtgtttgttcaactaagtaattgtaccacgtaattagaggtaattaaattatgttacactctcatactgtcataactgtaagaattaagtgtgattattatgtgtataattacaaatattgccataaatcattaactattagaccatattatttaactatatatattattaactcttttatgaaagaaaaaaatattttttaatgttagaaaaattatcttatatattattttttaatttttttttaaaaaattatagattaggttgttttggtaattgctctgatagtttctagattgttatgtggattttaattgcaatttatagagcctaattacaacattgtataatactactctacaaattgagcattgcttttaagcaccattggtgcctaagacattctcgacatgtcgcgttgcaattggctagcgatactccctaaaaactattatattaaattatatgagacctgatatttagttggaccaatagcgatattgacacgtaggagggtgctagacactactgttgccctttaacatttctcctccaaatcatacggcgtaataattaggcattaattttcaaacaccccaaaaattaaatttgattaaagaatctcatgtttaaaatgtgtacaaaaacaaacctaataaatatcatttataacaatataataaattatttaaatggctataaataatttcataattaatcataattaactgctaatttctaaattaaactaagcgggctttacaaacatttaaatggttgaattagaaaattggcgtttttgagaaaatcagatgcagaaaagataaaactgcaaaattgcaaaaagtgaggcccaaatccactaagtatggccagccacttttgtaggaaatttaaactgatattttcattattttaatgccaaataattcaaacctaaccctagtggaatgctataaatagatagtgaaggcttcaggaaaattacacttaaattttctatttttccttcagagaaaaacctgagccttctctctccctatctttggccgaacccactctctctctcttcctcattgagatttcgaaattcttagtgtatgagtagtgcccacacacagcaagtgatacctcaatcatagtgaggaagatcgtgaagaaagactttcagcaagaaggagtttcagcatcaaagattcagagaaagagatccaggttcagatattgataatgctctgctacagaaaggaatcaagggctagatatctgaacggaaggagtcattatattccgctgcacccaatgtaaggtttctaaactttatatgt

SEQ ID NO: 198846 - DNA, 873 bp, Cannabis indica
gattctctacagctaggtaacacgtgatctctctactgatatatatggaaaataagggatatatgatgataattaatgatttgaaaatatatggaatatgaaaggctgtgtttattattttcatatcgaaaaatgataataatgctgacaccttgtgtatgccacgtgataatgtgtgtgtcatctttgagagagagagagagagagagaaaagggttattgtatattgttgtttggtggaaggaaggaaggaaaggttaatattaggaaagttaaaattaatgtggtggggaggactacgaatgtgttttgagtttcaaaacaagaatgatgaggtcgatgacgatgtctattgatgttgatgtggggtaggtctcttttcacctcccacactgtcatctgattctctctctctctcatatctcatttttggttgatgagtagtgacaaatctcccttattttctttttagacaagtaaatatatataatgtacgtttatgcatgtcacaagtgagatccattatttgttgtcaccaacaacaattatacatatctatatattcaagaaattcacatataattcaaaattaagtccatagcatacatgtataattcatttatacatatatatatcccgctaatactttaaaccttgttgtattaatggacaattcagatcatttaacagtacacttaaaactaacttcaattttagttatattaaaaaaataataaaaattaaatttaaaatataaaaaatttaatttatcatttaacaaaataaagagaagagttcgatatgtaaattttgcaaaatatacaatcctagacgatatgaaccagtactgaaaatttaattaaaataattatt

SEQ ID NO: 198847 - DNA, 1572 bp, Cannabis indica
aagtgggagattatctcaccacaatttccttgtttattctgtacaagtgtttgacactttatcttttgtctcgtagatatggactttgaaattctcatatctacctcgggttccaagaaaggcaagaagcgaggcattgtgttagaaacctattcgaggacgaacctagaactgttgaagagattgaaaaaatcaacggttagaaaaaaaatgtgcctcaacccaaatggctatcgagccagaggtgccttaagtaacctcatcagttcttattgcgagcactgatgaacaggcttaagtgtatgttcatcaggttaagttctcgagttcacaacctgagaaggtgctcttagagccttcctgcccctggttcaaatccatcactagaaagacgaaaagaaaaggaaggtcaagcaattaaacacccactatccaaatgatagaatgggtatcaggaaggcctctcctgaaattgcttggataggtccctgccagacccaccttttccagaaacctatttttcccaaataactcaaagcaataggtcgagaacccaggggaaagttaccaggataaagtttaatgcaaaaatctagcaagtgaaagccccttggagtcctagtgaaagccccttagagtcctaataactccaaatggatatgaagaaaataatctggcctaatgttcgtaccgaaattcatctttcctggttttgccctaattttagaatcctacaagcatgcaaatgtctatggaagtgcaaataccaaactcaaaccattcgaacaaaatcaacacttttaaaacacaataaatttccacataatcttaccctagaaataaaactccacaggcaatactttaccactcaaacatgcaaagtatcatagacctagcttgaactaagcatttttatcttagatacaaaatagcaaatagttgacaaactgtcaggatacttactttttgcacgagtgagtaaagtgaggttgttgtggtaatctgcccaagaatgtcgaacccaatcaattgcacgatcgtagttggcctgagcgtcaaagtttttgttggcctaagggtggaacagttcgaggttcagcgactctacttctggaaaaacgggttgaacagaggtttatacatattcggattaggcagttgaagacttcttgcattcactgttagagacgacggtgaaagggaaatttttttggaaaacaagaaattctggtctggatttaaaaaatgggggactttgaaaatttgaagtgatgtaaaaggagaaatgaggtgggaaaatcaatttatacctcaattaggatccacgagattcgaaatagacggcccagattccttcttccaaaagctttgattcgatggataaaaagttgaaaagatggtgtttaaaattcacccctcgcatttattattcatcattgtacgacttgagtaccgtacgaattaaaggaggggttatttcaattgtcctgccctcattgtaactcctcccaagaaatgcgcccccaacgcgtgcgtgttgtcagcaaatacattaaagacgccacatgcgtg

SEQ ID NO: 198848 - DNA, 586 bp, Cannabis indica
ggacgtggctagtagcttggttttttttttttcttttttaatatttgaaaagggggttatatagctgttttgcgatgtgtagttgcaccaaactcacacacatatgcttaatctttcataaaaaaaactatgatttctttcaacgatcagtgatgtcaaaagagactactgaaaacaatatataaatgaatttatttattatatatataaaaaattataaaatattgtaaattgtgtatgagattatattttaaaaataattggtaatgagaagaatagtcctaaaattttatatatattattataatattccttaacatagtagcttttttttgcttgctattttttttttttaagtataatgtgaaaatttttaacataaaacaactaatgttctttatgataatatttgaaggaaaataaagaaaaaaagttaatttaattacaattaatgaatacccacaaagttttttttttgtttttttttttaaggtttaaagttaaccactataagttatgtataagactcgtttttttttaaaaaactttttaaagttaatgtatataagtactacgttacgtagtc

SEQ ID NO: 198849 - DNA, 530 bp, Cannabis indica
tttttttttaaaaattctttttttggtttttttttactttttaaaagctatattgctgatactttaaaaaaaatcactttgctctattttcactctaattccgtttggttccttattcctgatctatttttcttataaaatataaaatataatatgtgaatgttttaagtttaacttaatttttttcatattactttgaattggggaaagtatacatcaaagaacaaatatttcttgaaatactacgaagtattctgacaaagcctcaaagataatctcatacaaagcaaaaaggttaaagttttagtaagtattttctttattctcatttatctcatttttttataatttttttattatttatttaaaaagaggtattgtttgtttgattgttgggatagtgtgttttttatgatagactcgaatttcaatatattgattgattgatttaaatattttatattgttaaaaaaaatttgatgataatttatattatgttagttatcagattttttaaaaattaaaaaaaa

SEQ ID NO: 198850 - DNA, 2029 bp, Cannabis indica
ctcaaaaatttactttatgaataatacttagctaaatgtagctaagaattatcttaatttaatgcttagctatatctttttattatttttatagtgtattttatttaattgtaagtagtaaaaataaatagatattatgtaatttataataatttattatttatgtgtattataaatatattattttaataatttagagaaaattataaagaaactgatgtatgatataatataaatatctgaaggtaaaataaaaaaaaaagttagagttttgataaagtattttaaaaaatagagtaaataaattgttggaagtgctcttagtagtataatagtatctaatctaacatcatcggttagatttatgttaaataattaataattttaatgtatgatcaccattatattttttctcgcgaactttaactattgttttatcactgctactttaaaatctgttaaatgaaaaagatgtatagtcatggacggactcacataaaagcgagacgagacagtcattccctgaaaaatttcgagaaaaaaatatatatttattttagtcagttgccacatatatttttaataaaaaatgatatttatagacatgatattaactttggtaaaattgttaagttagattgcatctaggatagaggttaatagtttaaattccactaagatcattttttttttaagtttacttttattcttgtcttataaaaaaattacactcttcctattactttaaatcctgaattcgccattgggtataatttaacaatagtaaaaatttagaataaaatatgacagtgatcataattaaaatgtaaaactactagttatttaatggaagttccacactttactaatgttcagtgttttggcaaaatatttaaccttagtaatagttcaagagtgatgataattttttttttctaaatttcagaaaacaaagtacctatttattagttctttaaaaattaacactacaaaaccccatttgggatttttactttaaaaagataaattaaacaaaacaagaacaaaccccaaaaaaacaaataatttagttagagttatatgatgaaaaagataatacaattataaaacacttgtttttctctcttcttaatatttattaagaagaagaaaaagagaaatgaaaggcacttgtttttatggtttatgttcaaactagtcgttattaatgtgtgaatttttaattagtaatatccttgtccatcattataatgtatcaaaaaatatataattaagcttattatgtcattctctgcatcatcattggggacctcttattgtctagtataggccaacaaggttgttaataaattacttcactacttcccttgcatgcatcatatacttcataatttgtacaatttataatgtgtttaattaaattttattatgttttagattttggtttagatatctaaattaataattaataattaatcatctactcaataatctattttctgatcagataaatattgattaaatgacattatctctttgtaatctgaacctcaaccccacatataatctaatgtcatttttctagtgttcatgtcacaatttatgtacttaagatcataattttaatgtaaatttttacattttttttaaaaaaaaatattttaaaattttgtattattaaatttattataattgattgggtaaaagcttacatacaatatatccataatgcccaccaagcatatcccatgtagagtttctattggtttttttttttttttttgtaaagttgtagaagtttctatgtacttaatgatgaaataaccacttagcaagttgctaacattataatttaatttaaaaatttgttaagcacatgatagcctaaaaaaaaatgtgatcacatgaccctctgaaaaaatgtattgtgtatattatcttcaaaaagttgtcctacttttttttttttactttttcgttttttaacttatatatctaactgtcattataaagttttttttttcttaga

SEQ ID NO: 198851 - DNA, 1577 bp, Cannabis indica
tcatataggtatagtaccaaatcaaaaataaatttaacaaaaactgccacaaacaacatataataaaaacaataacacaatgacttgcacataaatttgatctatccaaaacacatattattcttagtcaaaattaagtagagatataccttgaaagtgagataatacttggtccgctcatttcttgaaaactatgagaaaccaagattttaccatagtaattagtgaatgatgatgtatgactactcctgcagctcagagaacactgccatgatgttatgtgtaccatcagaatcaaccaataataataaactcaaaactttaatacatattttgattttttactactaattctatatcaaaacaaattgagaacaacattaatttgcatctaaaaaaaataaacttaactgtattatactatgagccctctagtggataaggtgacagctcctgcataaaagctggaatgatgaaatgacccacttattttcttgaaaatcaaaaatagattaagcatataagtcttctaagaagatataaagaatatccaactaatataatgatattttaactgttaccatcacttaccaacataaagcttatcagtactcattacaaaaatcaattttgtactatgcttgctttttttttgctttgctttgcactatctttcctccagtaatgatgtactcgcaggctttctcttacttatttcatgagaaagattacaaataacaattaatcttatagatcaatcctctatccatctcaagcatccaacttgcacaagacagaactgtattttgtaacttttctttttatgaagattaatagattagccgaatgtcaaaacttcaaagaaattgcataaaacttattgagaaaatacaaacataccttgtatctcttctagtccatcttcattgtaaaatttcagattgtcaccacatcgatgccttaaatctatctacaatacatcataatcctggaaaatatatgctggaaaattaatgagcaaaatcaaaatagatctactaataataatcgtcgaaagataacttttgtcccttagaatcctcacataatcctttcccaaactgtaaaaaagaaaaaaaaaaaaacaagcaaaatttcttgaaaaaacatagctctgaaacagaacaaaaagagcactaacagaataataaattatgtacattatcgcaaaatattaactaattaaagataagcaacataataattacttcattgtacaaaaaataagagagtacacttcaatcactatctatgatctatgatatgaagtagtagtaataaaagttataaaaactatatatatacaacataatagagcaattcttgcaattcttctgtcatgcttctctgtataatccagaaaagaaaaaaaaaaattatgtatatatatatattagtagatgaaatcaattatttgtcaagaataaacttctattacttaaaatataaatcctaaatcgcctaaaatagagccaaaatttaacttttggtaccaataagaatcaaattcaagtgcccaaataatgtttatactaaaa

SEQ ID NO: 198852 - DNA, 2253 bp, Cannabis indica
taagtgtctcaaaatgtggtgaataactcctccataaataataatcaaacataaacaaaacatttaacataatacacttaacaaccaacaaaaaagaccttttcaaaagaataaataaataataataataataaaagtctttaaatgtgtccaataataataataataataataataaaagtgattgttaataaaaatccaacaaaactaacatgtgcaccaaactcgtataaccgcaacaaagcaattaaaaagtttaaccgcaacaaactcagtcaaaatgagtataaaacgctatccttatatccgacaatttgtgccactacatgtgcaccaccgtctgaaactgccaccgtaacaagaaacaggattgctaaggctactacaagcttccgtcgtcatccaaaccatatctatttttagtcggcgaccacgaactccagtcgaaagcatgacagaaattgccatgagtagccaaaaactgtcgaccatttctagcagaacccaaaatcactttcctcttctgagaatggctcgacaaacctgatttacgatgcctgaattagatctagactatagtccatgctgttctcatcttcctcaaccaattcatcttcaatgggtctatcttcatcttccccaacctcatcatcaataccatcattcttttcatcaatctccgaacccaacaagccctccatgcaacctaccttttattgtacccctttagaattttgtcagtgttcatgtgatattattagtttaaaatctatgtaactggccgaaatgatatattacatagtttgaactggaaaaaaatctaaatccgggcacatgaaccatcccgagtctgccaagagctccaccattgagagcgaccccccaagcgctaaatctgaaaatctaagcccaagggcgtgttctctaaggccgaaaatgttcatatattggattgtacttatagacaaaaacgtcatactcggtacgaaaaaaaaatagttttgaagcaattaaaattaagaagaaggtgaaaacactactaaaagataaaagttcaaaaaggagaaagacttatcaatattgaagcaataggataacttgcattccctccgttgaactagtaagaatctcagtcacagaatagtatatcattgtcatcttcttccctttgataagtggccattgtcaaaactctaagcacatcttcttgtatcagaagcgatacaaatcgaccattttgaaatatgaggtgtgtttaagaggttgattagttaaacattgagaatatggtggtttgaaaaaaaaaaagaaagagaattccactatatcatggataagttgtgttaaaaattaatggaattcgtaaaaatttatacgaattatttacttcaaatttagataaatcacattttagaacttatgtacgaacgtataataataactttgaatttacttcatttggtgtaaaatatgataaaaatttatgtagaagtattaaagaaatttatacttttagagtccaagatcagatttattacatcaattaattagttcaaccagataaccatcctaaatatctttagttatatttttatgacacaaaacatgaattagaaaattgattcaactttttagataaactatcattaatatctaccctaagcaaaataattaatataattaacataaattcatactcgcagtttttttttgaaacttcaattatgtttctaagttagaaatttaccaaatcaaaataagatcaaagattatataacactcctttgacatctcaagttacaacagtatggattgatgatgatctatctatagaatatactactcgtgatataaatgtaaacgaaatcaggattcttgttccaataagaaactaattgattttagccaaattcattcaccatttgaattattaatttgtgaaaaaaagagataaaatgattacattactaattgttgtttcttcttcccttttattttaattttcaattacgactttgaagtaattatcatatgttgattagaataagtttatatcatttcagttcatcaagcaaggaagaagagaaattgtatctcttatcgtgaatattattgctataaattacaaatttgatccttacaaaagtcaatactattacatgggggtcgtttattacaacaatccactaaatttgactaatgcaaccttcatgctacagagcaggaataattagttactctccaaatccctcc

SEQ ID NO: 198853 - DNA, 1164 bp, Cannabis indica
attttattattaatatatttattatattttgttttgtgatattttattgaaaaataaaaaggttggtctacacaataaaactaaattataaaagaaataaaatataatgtgatacccaaaatttggctttcaaaaactgacacgtgttttacaaactgaatatgagtcaactttaataatataataaagttatatcggcagattaaaataactcattattattaaataaagttatgatagataatattcaaaactcgttgactgtatagtcttaagagagataagggtaataactattgaacagatattgacgagacatacatctgtctcggaatacatagacaaaaaagaggatattcatccactcgagcagatgaatgtacacatacaacggcctcggcttacacatgacgagacaatcacctcgcaacattaaacaaaatgaaggaatatgacgaggtgaacgatttaccaacacttagtatttttttccctattttagatggataaggaggataactcatattaagcgagatacaaccttacaagtcagcaataacagtctaagggataaaaataaagaaccgttgggtagttattagatattaccccacttatgattaaactgaaatgtggaaattatccacgtttcatgaacaattacatttgaattgatccccaaagaataactgctaacctatactcctataaataggggcagattctacagaaaaagggacaacaaatttgagagagaatttattattattcaaatattgtaatttgtactcataaaaattcctaataagaaagactcgcggagtatgcagattttaactgcaaaatcacataaaaatatctagagttattgatatttcattatttattagtttctgtaaaaaaaaaaatatatgttactaaaaggctttctaattttggttaacgaaaatctgcgtttaacagttttgtgttttcattgagagccttagtgataaaacttagaaaatccctccttacaaacagaaatctatccatatttcagtggctgataacaatcaaaacgatggaatagaaatcgtcctgagaaaactacacaccccctggaaaagaaccaatggatctcaaagaccccatgccactagggatgttcgcggtgcgggtggt

SEQ ID NO: 198854 - DNA, 837 bp, Cannabis indica
gcataaaacccaacagagaatagtaaagacattgacataagtctattggataagagagaagataaataaggttttagaatttgagaaagtccacgcatgtgacaatcctgctcatatgggagctaaggttctaactttcattaagctaaagcattgtcttagcttactgaacattggtgcttattaaaaccatgagagtttaccatcatcattgattgagatttgggactgttattattttgaggatgaaggtggaatttttaaattttaatcctccaaaataataataatcataactaaccatcggtttagcttgttggaaccaagttgtttagctcctttagtttttcagtcataataatttgttatcttgtatgagctatagttataaataactattatcccattccattttaatgtaacttgtattgtaaatgttaaagagagaggcggagagtgagagagagttcgagttttttaagaataagaactcgaaggggttgtactaggggttgagaagaattgctattgttcttctagtgtaagtacagagagctctctagatctctgtcattggagtttgtacaagtttaacattgttcgtattggattagttatgatggctcttagatggagttatggctaaggatcaattcgatctctaggcctgaaagcaggataaatcctggtctttcttattgcttttcaatttctatttaagtttgattcattactttgtgttcctgtgatttagttatgtttgatatgggtaggtgttggatgaatttggttgttgtttatgaatttctaacaaagagaaaaaattaaaaaaaaatt

SEQ ID NO: 198855 - DNA, 549 bp, Cannabis indica
actatgtttaacacaaagaagtcatattgttgatgattatagtaattttgacaaaattttaaccaactataatgaaacatcacaactggttcatttattattttcttattaattgatgatgcattccacatacctcttaataatgttgacattttatcaaaaatgtaaattagaaaatatatataccaaaattattttattttttttatttttagtgagtgatatttgactagtatatatatacatcgttttcttcttaattttcccagctaacaattagtacatactattatgcagaaaaacaaacaaataatccccatatatgtaaaggttgaaagatgcaaaacaaaataatatgcattttttcatagaaaaaatcatatgcaacttttcatagaaaaaatcatatgcattattaggaaggtaatctttcctaaagaggctctaattttattgtaaaaatagttctggtttaaatagagaaatacaaccccacttttttgttaaaaaaaatataaataagaagatacactattattattattatta

SEQ ID NO: 198856 - DNA, 1874 bp, Cannabis indica
gagtctaatgatcactttcaaaataagaagctataatgtaaataatccaaaatgcaactcactttcatctctcttcactcctggaagggaaatgcgaaagatgtaagagtcctcacattccccaatgtccacgagtcctacagttggcccaacaggtcccgctgctgcactcccagtcaatgcaaatccgttcttagtagcagctactattttagacaattctgatgcagttggaagcgaaggaagaaatatcatcgctggactagccatgtcatgttgaagggaaccatccatcttaagaaccttgtctacatgtctagttttcctattcctttgtgaggatttggaaggagaaaggcctccattaatctcatccactggaactgctgcactatgtgaaatgacaccatcaatagtatgcaaccttgcagcatcttcatccaaaagaacatcatgcagtccggttaacctcctgaatctttcaacatcctctctgtcaatgtaatgtatgtctgggttgttaacaaatactatgttttctacaatcttgtttcggtattggttcagtgaatggcgatgaagtaaaggaggaaagagatcgggaaactgagggtagttggcagttgggtcgtttccatttttagggacaataccatcaaagaattggagcaacaaaggtaattttacaacagcagattggtcagccttcctaagaacataacggtaaatacgctctacctctactatttccatatgtgatgaaccagctagctgatcagaagtataaggtggaagcccctcagcaattctctgcaagatggactttttagggaaaccccctttaagatcaggtccaaagtaagtaccaatcacaaagaacaaaagaaaccgctgatcatcatcatctgcaatcttagtttgaacattggttgagcctaactttgtcacagtgttaggatttacagcttgagatgaattggccattgctgccaaacaaaatatataaatttggaagttaataaacaacagtaattccactattttgacatggacatatgaaataaatttcacaaattcacacattattggctttctttacatatttacttttcccatttgctataatcataaatctatatataatacaacatagaaattagcacttagtaataaaaatagtgaaaaatttatttgaaatttaatgacaaaaaacactcaatcagttggtgagcatgatttaagttacctgaaaatgatggcaagattgaataaaaagtgatcataatttctcaacatagaataatcatcccagatcatagaatttcagatcatatatattatatatatgcatgcatatttactgttctaacttagtataataacaataagagacttacttgtgagttgtgagtagggagcattaagccactaagatctccctcatcggaattaggactgagaatttaggggaattttcaaatgagaaactcggttcaacatctccctcctccgatttcccatcgtaacagaacaaaattcagaatccccaatcgtaattgaagaacctgagaaaatgcgaaatcttaagagcatttaacagagaaaaaatggagaatgaaaatggtgagaaaattgagactcagagtgagagtgagtagaaatattacttttaataatgggattatttccccaaaaaaaaaattacaaaaatattattttacagaatttaaatatttttacaggttttaagattttatttatataaaacagtatttttatattggacctttgttattttttttttggttatttatatattatattttgatgttatttttctgatactttcatgtggttttttgtattttataaaa

SEQ ID NO: 198857 - DNA, 1544 bp, Cannabis indica
cgtaccagtacgtacagtgccgataagtacttaacctttttcaagctaatccgcagtgggaagatattataataattggccagacatcaaaagtaacgaggagaggaaggatagaaccctgataggcatgggatccagaccacgtgcataagccattcccaagactgtcggccagctgaccctcacgaggaagataaataaaagcttcattaataagctagtagcacgaaggttgttcagcctcttaccgtcaacctgtaaggaggagattgacatacgggttgagacttgttggattttttctagacgggcatggcctctgtaagctcctccttagtttagtttacactagccttaagtaaccacccagaatgtcagaggatttgatctcttccatttctacttcaacttctcctctaaagcttcttaaagttctagatcattttgggcttggcccgccattaatcacccgatataaggatatgaagggagactagttaggtagtctatttcgtctgagctagtgtgcactttagaggtcgagttggctttgaagtgtgttttgctaccaaaatagctaagtctgcaaagacaaatagtagcctgagcaaagtaggacgtccaacaagcagggtgtcctagatgtatgctcgaactatgtacgtccacaaagctagagggaatttcctcgaacctcagtttaactcccaaatataacagtcgtaactatcaccaccgacctggtcggtatagtgatgatgttggaatgtggactctgaagagtcacttcaaaatccttcctcatgggatattgaagaaaatgaagtttcactcgaggatgaagatgaacttgttgctcagaatgctgagtggtcctcaaaaagtagtctgagcaagtattcatgtattcggtgatcacctccccagaattcacctgggctcatctataaaagaaggactgagaggtgaggcaccgcaaaagcatggaaagtgcctttcatagaaaaacacctctaatgcttcgaccagcataaagattcgaatcaaaataagaagattctatctcgttgatagaattccaaatcgagataggttttcagggttttcaaaaacctaaaatttctaaaatggcttaatttgatagaaagtttgcaaaaaaaaactaagtacgcagaagaaccgagttaggctattccttaatagatggaataagcaagacaatgaccgagcaaaatgcagattcacaattcaagaatgaagagattcaaacatattagcagaatacaaattcaaatttagtaaaaaaatcaatgcaaaatggaggattagaaaacttacacattattcatctggtgtattgaagaaggattattaggagaattggtctatgtagcaatcgatctaaagagaaaaaagctcaagaaactcaaagaacacttcacctttttttctctgggttttgaaaattttaaagtttcagatgaattcctttgaagtattataggaaggatgagtagattggaaaaacgtttttggggtataaa

SEQ ID NO: 198858 - DNA, 556 bp, Cannabis indica
cactagcaacctgcaataggacattggaccatattaacactaagcagagtagctaagcaaaatacccattgtattcaattcccaaactcgcctaccttcaaaaaattgttcgacacaacaaacatgaatcggaactttgttaggcttttactatgagtaatactagggacgctaattatttacactacacctagcaattgcaatgtgacatgattttcaaccatgtaacggtaaatggcacagtcccactttgaaatcagatgtgatacaaatcatgccattatttgagctttcaatcatggaatatttctagcattacttcaagttaaaaatatattttccaagtacaaaagaagatattgtttttgataagctcgggattgggtggctatatgggtttccagttatgactttaaaaccttgtataacacttttccttgctatatgtgtcttttggtttgcattagattgctttgactattcatgactttgtaggttgtcatttggatgataccttatcacctatgttattaacactaacctgtttttcttttct

SEQ ID NO: 198859 - DNA, 750 bp, Cannabis indica
ttttatatttttatatataatatgatcttctagagtggatatgacgtggcaatcgtcattattgaggtgggaaaagatagaataaatgggaccggattaattgaggtggccatgagaatgaaacttaacttagccgtctaattaattcaattaaaattaaaattaaaattaaaaatctcttggttttgacaatgtcgtaaaagtcaaaccacctcttaattctcttcttttattctaattatgtaattatgacaccattagattagttaagtggataatacaatatattaattacaggtttatgtaataaccaatacaacatcctctctctctccaatcttatttgttttattaactaaaataatacaaatttaaatatactaaaattcatacactttaaaatacttatccctaattcacatgtaaatctatttatataatattaatcaatatatattttcagtttaaatttcaataaatcactatatttagaataatttgtatcataaatatttaaatttagtaaattgtcacaagtaattcttaattggtcaaatcattaaattttatttaaaaaaaattattataatataccaataaaaaatagtcaagtagataatagcatcatatttaatggtaaaatatctataaaatttcaaaattcgtaaaaaattaaaatttaaatattatttgtaagcaaatgaattatataattatatataaaaaattaaataatataagtgagataat

SEQ ID NO: 198860 - DNA, 1764 bp, Cannabis indica
agattggttctgttattcaatatctagaacctaatggggtatattatccaaggtaaatccttaatactcaactgtggccaggaagtttggagatgctagctttgttcttggattctagttgtgtgtatgctttttcggagactgttagaaatagtaatggttaacatgttcataataaagctcttttttttttcttttcgctatactatgttttaagtggctgcataaaatgcttgagtcctttgtttttctgcttacaatggattttactagacccttgttctgcttaaaccttttcctttgggtacttttgataaatgtataattagtttaataatctattgtttggctgttctttactgactcaactcaacatgtataaatttggtgcaatttttgcaagcaggaaaagggtcgaccgctaccaaaattcggtgaatgggatgtcaacgatcctgcttcagccgagggatttactgtaatctttaacaaggctagagatgaaaagaagacaggtggcaaacctgaatcaccgggaaagaccgattctaatatcaagccagcagcagatcctgccaagcctcctcagtctgtaagttgttgttgctgttcttaatggcttcttattattggcttagtgattttatcctcttttattaatggcatggtaggtggcaagcaacaaccttagttgcccattagtaaatgttggtttttctgtaaaagtgggaagcttttccatttttagtgactctagtatgatgggcaattattatagccctcaaatgcaagattttgactctaaaattattaaacagtaacatgtcaaattttgggcaaccttctgtttattgattggcttggcttatcttcctaaacatagatctcaaattaggtacaagtttgagtttgctgtgatactctcctgatatagtaagtgcagagttcaggatcttctgagggtccgaaaataaaggcgagcaaaataagtgcctggacactctgtactcactatatcgaggccatcatggtgatttcgggcttgaaagttgaccaatggccttccgagatgaaattttgttccaacacatcatcaacagatttcattcaattatatatcatatgatctttatactctcatcatcttgtttgacacataactcatttttcaatttgtatcttttaatataactgtgattaaccgaaatctcaagtgctctcccaagtaaaactgtctcattaaaacatcttcatgatctaattattgttacccttttgttttttttttggtcccattgaattgatatttcagaaaaaatggttttgctgcattcaagatccacctgcagaatcctgaaaagaaaaaaaggttttctttcttcttcttcttcttcttctctccaagaagcttcttccacaaaagagcaatattgtttatttacaagttgttccaccagatttttacatacaaacaagataggagctctagatcttgagttggattatggggtctggaattaatttatctttctgttttgtaaaattagagttgtgagtgagtgagtggagataagtaaaagaaaagaaaacaacaataacacttgctgtatctatataaatatactgtcttatgtggtgattatattggatgcaaagtcttttttactctttttacctctcaatgtgttaaaatctttatcttcatatatttccttcttactttcttttcctattcctttttttaataattaaaatatgtatata

SEQ ID NO: 198861 - DNA, 832 bp, Cannabis indica
gatatttcattctaatttataggaaggtgttgcggtggggagaagtatatgtgctgccaaaacgcaaaatgaattaataaataaaatcatgaaccaaaacgtacttggccatgtagtaatatcacatacatttattgaaatcaaaagaaaaaacaatgacaaaacaatagagcagaacacaaactcttctgtattgaattgtatattattcttattcccatgtgcacctaatttggctggtatgcttaaaatcaagtgtcaacaaaatggtgccgtttactctcttcaacacaaatctctctaccaaaacataacatctaaatttgctccactcttttccatcaaactcctctgttctctttacatttacttgcctttcaaactcatcgactttgaacccaactctctcttcttcccaccttattctatccattgtcaatttgctcaaccccaataacctttctgattgattttgtcctttaccgccgtctgatgaacttttaaaccagatgactccatcatcaacatgaccccactcgcatatagcttcctttccatcaacacaagcctcctctctgctaacaaacacatcaacactcaccattttaatctcatttccaatattgtcacattcaaaaactctatcccatctctgctcaagtgtcatttcataaaacgtggaattcatctgctccttgagctttccctctaattcctttatgaacataaaagggcaataccattttcccacaaccacactttcattagtactcgaatcagataagattttcagatcaggaagctgcgaacgcagcgaggagttgaggcctgg

SEQ ID NO: 198862 - DNA, 681 bp, Cannabis indica
ttgtactaagtaggttgggttacaataattttttttattaaaatatctctaatccaaccaacttaacccatgtgcaccttatttgaaagtattattattattattttatttaaattcctgagttgtgtgaaattttttcttcctatgttagataaagcatagttcaaattactattttctattttaaaaacatgtgaaatattgaccttttgaattaagtaatagtttaatttttctaattgcattttattttttctcaaactcgtactaacattttatcatgtattaaatatattttattgtatcttttatcattgtgttttagatatattataagtgaagttgtggacttgtgtaattgctaaaaattggaaaaattactcaaaccattaagttactatataagttgttgggaaagtttatagataatcatatacatataattattgattcttatgaattacttaaaagatttctaacaagctatatatatttaatataaaaaaaaaattattcttcaatcatttataatataaccaaaagttcttcaaaaattcatcaaaacaaataatttacgagtttatgttatcatcatgttatgttcataccaattttaaattttgaagtacacattttatttagtttggcatctagggaaaatttttcagtttttttttttaa

SEQ ID NO: 198863 - DNA, 1278 bp, Cannabis indica
ccaaaccaaaactgcttctggagcttgtcaatcacgttcttatcaacttgaaaagccttggcaagcacatcaggattaatggcaggatctgacccaaacactgagtttgcaatggttattgttcctgcattttggctgcttagacctgcaaatgcaactgctggaacgtgtcctggattgaactgaaagtgaatcatacctattgggaacacaaacacatctccctctttcaaaacctttgtaaacagtcggtttccgtcttggtttgatgatacaaatcccacatacagagttcccttagctactactaggatttcagagccacgaggatgagtgtgaggtggattttgaccatatggtgcataatcaatgcgagccaatgttatcccgagagtgttcaatcctggaattaagtccacattcacttgtgtcacattagatccaactgggttatgtgtgtctcttggaacgttgagcccagagaagaaaaaatcttcagccttagcgagcttgggatccttgcaaaatttgccattcacaaacactgcttgacataaaggaaaaaggaaagaaaaattgttaattagtatattgaatcacatacttatgttatagaaagtttatgtgtacgcacatgctttgtggggttcatctactgcgacacaaaaatcttggagagggcttgggtcagaagcagacgctatgaagcttgccaaagcaaaggcagtgagtgtgagaagaatatgaacagctttcatggttaaaatacgtgtatgaacttatagtgttataaatgacttttaaattttttgctatgttttgttttgattgaggatgattttttttgcactactaacagatctatttataaaagaatttgagccacctatcttacaactacaagagaataggcggagacttggttttctcttcatcatttaataaattatatagaagatgactaggtaaatttaatacaatgactgtgtagttgttaatataataatataccaattaataaggacatagtccataattcaacaactctagcatatgtaattattttcctgaaaaatgacgcttttaaatttggaatggtcaattctaatatattctattaattaattactatgacgataatttattgttctctctaaatatgattgcgattaaataagattataggtagtccttattttttgtttttcgagtttggatttcgtttagcaattttaatgattaaatgtatataagctatatatagggacatgattttgt

SEQ ID NO: 198864 - DNA, 1990 bp, Cannabis indica
cttatatatatatttattctaatgtgaaaattgaagaaatgtttagtgaaaaaaaactagtataaattatatattttatacaaagtaaagtagcaaatacaactctcaatacaaaattgtctactcttcgtatttaaataataaaaaaatactcacacgtaggttatgtgtatttaacgcgcataataacattttagttagaggacaatgacgatctcaactaataattaataaatcttctaaagaaaacgaaaaggcattagtaatgtatgtaaatagatagatattcaataccagtttggaatacaacttattatattttgagcttttataataataataacaaaaaatcatatgtacagttgatgaaggttgctatagttgtatttattaagtttaacaattacaaaaatacttgtattctataagtatattgatatagaactatacctctaccaccataaatagaaaatatcccaattactcgtgcacacaaacaaaaaatgattaagcttccctaaccaagctcatctatgatcattaatagtcaaattttagtctttgactaatgagattataatatatggtattataatataacattttgaaagaaaaaaaaatgggagacatcatgtgcttccatatatatttctattagaaggcatgtcattgtttgaaataaaaaatatacatttttatctattattaaaaaaaaatacattattcttgcccaacatataagggtgcaaacccatgtgctttcttagtgtaccatgttttctttcacatagctagagagggtcacgattgtggaggcaactagagtttattttaattaatacatattattaatttattaatatatattttaaaaaatgaagtgatataaaatttgattaaaaaacagcgtggagaacaagatgagtaagggaatggagagttgggattgttcgtttaaagaataatgttgatttcaaagatgtttccctttacaatttatatatgtataattttgagaaactttatttattagaatatataattttaagttatttttttctatattatataaaattaaatacatggggcaagaacgtgccaatagtaaatgcttaaaaagtatactgtggattttgacaattttaggtcatgtgtggcatgcatgttataacttagttttagttcaataatattcgtcggtgcccatttatatttaggaaaaaatcgtcggtgccaccttcaactcaggcccttttctttaaatatagatttggttaaattaaatttggatttttctttaatttttttttcttttaaaaaaaattattgttaattaacagaaaatacactagatttagatttaaatcgtgtacttattaagtgtgacaatgtgtattgtgtaaaattgttttaggtttttaaaggtttaatatgtatacatgaagaatccctttatttattttttaaattcccttatctttgaagggaagaaacattgtatcaatgatatttttattattgatatttctcatactaatcttatccttggaaatgtacagcattaataaaaagttggtgggcatttttcataaatgaaaaaataaaactttgtgtaattaaagatgatgaatattagattagatgtctatttaacacattgaactataaagacctctgctttcttttatttttctttgtaattttctttatcaagctttaatatatatggagcatatatcaatacataaatgttgtaccaattttacattgaacccatttttcatttatgagttaacaaactaatattattaatagtgtcccaaaaaaaaaaactcttttggtgtaatgggaccaaacatgaagtccctaaatggtgtatggaattttgcccaattttacttttttgaaacgtggaaaaaagtcaattacaagggagagatacaaagagtgcaaaccaagtaagttgttaaaagaaaagagagttcattca

SEQ ID NO: 198865 - DNA, 1382 bp, Cannabis indica
ccaaaaaaattaaaaaacccaaccgaacaaagcctttggaatcagatcaaaatcagaaacaaaattaatttcaaacccccaaaagtgaaagtaatacaatatattatatatatagatatattttggggggtgatattgggagaggcagctgcggcgccatgagcgaccaccagcaccatcaccacccacggctgagcaacctacggacgacggctcagcttctcagagaagctaccaccaccttcaccactaacctcgccaccttcctctttctctcaatcctcatcttctcattccgtacagtcgtcgagaatggaacccacttcgtcacctccttcattgatcgtgacccttctttgaagtctctcctctctcgcctcgacctcgccggaaaccaacaccagaataaccgtcttcgctcctcctcatctgattctccctctcccgcgactcttcgccgataccaccgtcgccgaccatttcttcatctcactagggttggaaccctcgacgatgacttcttctctggagatgatgacgatgatcggagtctctttgggtctaatcggaaagattccgttaatgctagcatcgtcttgttcaccagcttgggtccgaagatgggtttttctgatctggttgttgataatgggattagggtttcggaggttgttcggtatggggttacattcagaaccgaagcgagagacgagaaaaacgacgaagaagaggagaagaaagacggtgtatcgcctggattggagaacggtcatcaagaagaatcggatcggattgtggatttgcaattcttcattaagggtttggagctcggccgtcgtgacgcggctttgttgttcttccttgtgagtttcttatctgcagcttaggggtgggtaatactagggtttctagtaacgtattcttgggttttgggcattgttttcacaactgttgttaatgatctattagggaggtttaattcttttgctggtctaatatgggatgggtcaagattagggcttaagaggctatctgggttcattctaatgagatgggcagtgagagatgcattgactcagcttcttggtttgtggtattttggagaaattgaagaccagtattcatttttcaagctgtttgtgaggttgaaacttatgccattctctgttatgtctccatggattcgtggttttgaaaaggagatttcagggtttttgtttacatggttcctgttggatacatttgtggcttttgtgttcgctgtggatgcttggattgccatagttgattcgaggaagagtgggagagaaattgttaaagaaggctgttatttgatatccaccatgtttaaccaagctgtccagatcaaatgtttggaagct

SEQ ID NO: 198866 - DNA, 2183 bp, Cannabis indica
tagtttataccagagatttttcatagcccgacacaggaagaaagcatggttgaaagtttcattagtgtgataacatcttgagcaggaggggtcatctattatatgtctgtgatgaaggttggtagcaaggggaagagcattgtggagagcacgccaggcaaaaatcttgaccttgcggggtagtttcagcttccaaaattgattccaccatccagcttgagattgagagtgtgaaggagatctagcttcccttagagaggttgtcgaatgacacccactcttcactgtgtatatacttgaagctgagtgatgccaaataagtttgtcttctggtgcatactgacataaaggtagctgcaggatacgatctatgtcgatgctaagaaagtgccttttgagtgctgtgacattccatcatacttcgaagagataagatccgagacatgcaaattgttgtcaggattcatgatatggatcggtttaaagttggtatttcccggaagccaagagtcattgatacaaacagaggaacctgggccaattttccaaattagaccatccagagaagctctttacccctatgaatacttcgccaggtataggaggggttgttacccaacttagtatgtagaaagcctattcgtctgaaataacagtgatggagtatacgggaaagaagcgaaccaaatttatcaaagaaacgccaagcttctttagtaaggagagcttgattgaagtcaataaatgatctgaagccaaggcctcccatttgtttgctacagcataggtaattccatcttttccaatgaatagaatgaccattagctttgaaaccccatcagaaatgagccatcatactcttaatactgttacaaaatgaggaaggaagtttaaaacaactcattacataggctggaatagattggaccacagctttgaggaggattttttttcccccaatggagaagagtttttcttgccaggcagtaagtagtttccaaatacgactcttgatctcattgaaagcttcactcttattatggccaatataggagggtaaccccagatattgctcatgacaggactggataggcattccaaggagaagattaaatgcattttgatcagcagtagaagtatttggagagaaggacataactaatttgtcatagtttatgagctggcctgaagctctgctagaaaaatccaaggtgtgtttaattgcaccaagagaacgagcatcagtttgacaaaacaggagactatcatccgctaagaggaggtgagacactttaggagcctgtctagtaacacctaaacccgtaagcataccttgttgttcatgaaattgcaacaaccgggagaatgcttctgaacagagaagaaaaatatatggagaaagtggatctccctctctaataccacgtttaggctacaactttcctgtaacatgaccgtttataaggaatgaatagcttgatgaagaaatacaacgcataataagctctacaagaccttggccgaatcctattttcaacagtacacgttccacaaaattccattccactttgtcaaaagctttactcatatcaagtttaattgcagcataacttattctgcctctggttttgtttcgcagacaatggagcaattcaaaggcgaccaatacattatcagtaattaatcagtccgagataaaggcgctttgaaatttagaaattaccaagtgcaaaaatggctttagtttgagaacaatagccttggagatgagcttgtaaatgacgttgcaaaggctgatgggtccaaattgagtgattgaagtaggatgcttaactttcagaatgagggtaattagtgttttgttgatacatgaaagatcagatcgattgttcagtacatccaagacagcagcagtgatgtgtgagccaatggtgttccaatgattagtaaaaaacataacagacatgccgtcagggcttggactttgtcacttcccatgctatgtaaagcagcttgaatctcatcacaagtgaatggtttatggagtaagatgttcatatttggtgtaatggtagtggggatagtgtccaagacaagatcaatagcaggagagtcaatattagcagtgtcaaaaaggttggaaaaataatcatgaaaacggtcagagatgccttgcaaatcag

SEQ ID NO: 198867 - DNA, 855 bp, Cannabis indica
ctcgcgggcatactttaggcagtatgtgaaaaataaaagaaacaagcctaaccagcctaataacattaataacccgaataatcagagattgcaacctccccccgttgagggcgaggatatcttggtaattttggggggggccacacatcacaggagatagtaataatgctcaaaagagatatataaatgaagtaaaaatgaaaaatcagccttttctcctgaaccattaaagaaagtgaattcgaatgaaccaccaattatcttctctgaagaagatacaaaacttgaactttatatgtgtttaaattctattgttttagaaattcatatttaggatgttaaataacatacatggtagtaaatctagatcctggtaaaataatccccaacaactagcctcagagccatggtaatgatttactttcatgaaatatcgatttaaaacgatatttgtgttgatttggatgtgttcaggttagtttatgagcatatttgatgattgtatgaaattgcaatttatgatgataaatatttttatttcattttgaaaatattttccttggaaagtagatgaaaaattaatatatttaggtttttacaaaattcaatttggattttttatgaattagttatgattttttgaatttgaatgaaaatatttgaaactgagcaacacgcatacgtgcgcggacaagggcttcacactactttagacagcccatgaccgagttttctcgaacaaaggctgtcctaagcccctcctgaatgagctttgcacctcaagaaggctgccaacagccctttttcacgcaatttggccccttatgcgtgcttgcaatcttgtttttgtgatat

SEQ ID NO: 198868 - DNA, 1411 bp, Cannabis indica
gaagtgtgccatttggaagatgttaaatttatagggaacttctttacgtggagcaataaacaacaaggagaggataggatttactctaagatcgatagagttttagcaaactaggtatggatggattctttccctgctgctgaagtgttttttcaaaatgaaggcatattagatcactcccctgcaatactaactgtttataatatgccaagtgggaataaaagaccttttcattattttaggatgtggtcaaagcatcctaattataagtctctagaatttggtcacagcaaatgtgtggcactaaaatgtatcgaatagtatcaaaattaagaaggctaaagcaggctttacaggctctaaaccagaagtcctttgctaatattcctgccacagccgtgacagcaaaggaaaagcttgatctttgtcaagaatctttaaggctcgaccccctgaacagtgagttgcagcagcaagagaagattgcaagagacacatatgcaatggctttagacaattatcattcattcttgtagcaaaagagtaatttgagttggttgaaagaaagtgatatcaacgctagtttttttcattcctaccttagggctagaagaattcaaaattaagtgatatctattacaaatatggaaggaataagagtggaaaaacctgatcaggttataaatgctttcatggctttttatcaaaagctgctaggcaacaattttcaatgtagaaagttggttcaagctagtgttataaagcaaggccctgttgtttctaggggccaagctgaaacacttactgctgatttttcggttgatgaagttaggaaagccatttttgatataccagggaataaagctccaggtctagatgggtatgggagtttctttttttttagcataattgggagataattggcaaggagactgttgaagctattatttctttccttcaatctggtcagttactaaaaagttaaactccatgattttgactcttgttcccaaaatcaagtgtccaaacactacgggtgattataggttgattgcctactgcaatgtgctatataaggctgccaccaaactcatttgctcacagcttaagatgattttacttgattttgtggcacagaataaagggggatttttttatggaagatttattggtcacaatatcatgatatgacaggatcttatccaacattatggaagaaagacaaagaaatcaagctgcatgataaagttaaacctccaaaaggcatatgacaccattgaatgggattttatagaagagatgctctatggcttcaaatttcctacaagttttttaacttggtaatgacctggttcgaactcctcgtttctctttgatgatcaatggatctttacatggttttttgtaggcc

SEQ ID NO: 198869 - DNA, 1439 bp, Cannabis indica
tatccaaagttatagtacccttttggtgtggacgagaaaatccctaccactaattatataattaatttatatacaaataaataaatataagggatcatttcataaatacataaaaataacaaaacaaatgtgattgtacgaaattttaaatatttttatggtttgtaagattttatttgtaaaaaatacgatcttttcatatattttaattgtgtaatcttattatttcatttttaattttttattattttttattactttcacatgattttatgtatttttataaaatacccaatttgtacctagttcatttacattttgacaaaaaatttatggctttaaatgaagaaggtaggtaagtaattaattgcactaataatgcaataatattgttgacttcaagatggacagcatattaaaaagaaggtcattttctttcttcttttaaatataattattatttttttaattttaaaattggagtattatatattggatataaattcatgagaaccgttccttctttttgacttaaaattatttatgggcatggaccctacttttggtctaaagaatgggacagagacgagaatcatattatgttttaatcgggactcgtttaatatattaattatttatattttataatatttatttgtactttttaatatattagtgttatttttataattttttaagctgtattttttaataatacataatgtataatattttaatttttaagtaattaatattattatatatttaaaattttaaaataaattttatttttatattagagaattacttgctgcgagcccgttttattaggagatttccctttttatccacgatagaaaataagtggggatgagactaggaacatgaggagcactctctgcaaatctcttgccttcgtgtacatctctacttagtgcttttgtaaagtaaaatattattattgataaaaattagtataaaaaattattatactttcataaaaattatagaaaagtgtaaatcattaatactttgttggtataaaattcaaatgaaacaaaaatgtcaatactggtttgccactccactccaaatttttaattattattaattaatataaattgcatatatcattttcaaaatatggtctctttccacaagaatttctagctatctttcattttcattaattatttgacttctctctctttgtcttggtccaaatgtatttaattccccatatttttcacttttttctttatataatttgaacaatcttttttgttaaaatataaatacaataaaggagataaaaatatatgaaaagaattttacaaattgaaaaatttgaatgtaaaattttctttatttaaccaaaatatatatatatatatatatatcatgatttttaagaatacacgtgttttttatttaaaatt

SEQ ID NO: 198870 - DNA, 2174 bp, Cannabis indica
gaaaagctctactacttctcttcccattccatgtttactatatcctacaatcatggcattccaagagatgacagttctctcagtcatactatcgaaaatccttctcgaataagtgagctttccacattttgaatacatatcaattaaagaattttgaagaacaacatatgaaggcagtttaaaccgaagggtacggctatgaacttgcttaccgagatccagtgcagcaagtccagataacgcagttaacagactagcataagtaacatagttgggaaccattccttcattttgtaaccgacgaaataattccaatgcctcttcatcaaaacccagttgtgcatagccagagagtattgcagtacaagaaacaacatccctttctggcaagcattcgaaaactcctcgagcttcatgaatcctaccaactttggcatacatgtcaagcagcgagcttccaacaaatatatgcgactcgaaatttcttttcaacacaaaagaatggatttgccttcctaagtaaaatccctcaggaccaatgcatgaagttagaacagttgcaaaagtgaactcatttggttctgtacctgcaaagttaacatggaaaaatgcaaaggcttagtccaaatataaattagaatgaataggattaatagacttttaaccccctgaattaatttttggtaaaaaaattcccctataactaagacaataattgcaaatttgtctattccgttgcatttcgttcatttttgcaaacaattttctaatgtaaataagactgatataaggctaattcgagaatccaggcaaaaaataattgcatagatattactctaacaataaaatatggaattgtgtatctgaaattttagagttaaagtttcaatgtttaaggttattgtacttggttcgataaataatctcgaaaattgcaattatttccatgtaattcagatgcaaaacctacaagtgtcatagttgggggagtaaaaattcaattattctaataattaaataagcaaataaataaataaacaatataaaatagtaaaaactatacctgatcttaacatctgaatgaaaagattcaatgcttcagaggtatgacccctttgagaataagcagaaatcatagcagtccaagacaccacatttctaagagtcatttcatcgagcactttgcgtgcatcagcaagaaaatcacatttggtatagaacacaatcaatcgagtccacaagtagagtggaggatgataacaagttttggtgatgtgggcatgaaccctttggccttctctaacagccctttgacttacacactcattcaatacggtgtcgtattcttggaactcaacttgaagaccctgaaccgccatttccaacagagcttccttcagtcgaccgttggagcataatgtttttaaaaatgttgagtttggcgccaatgatgatagaaatgaccgttggtgttggttagtgctcaacggaaaatatttcatgatttttcagcaatatcaattttgaaaaatcacaaagcaaaaactattttactaaataacaatgtcgtttaagctttaataataaactagtatgtcaaataaaatgtaggataaaataaaataataataataataataataatgcataagtaaatattatttaaaagagtatggcaccaatggtgcctaacactttctagacgtgtcattttgcgattgtttagcgatactctctaaaagtttatatggaactcaatacttaattacaccaatagcaatattaacacgtaagaagatgctaggcactactggtgccttttagcatttctttatttaagaagagagcattactattaggcgccaatgatgtctaatacttctagatatttcattttacgattagttagcaatactctttaaaaattatttaattggatcaataacgatattaacacataggaaggtgctaagcgatactagtaccttttagcatctctttaaaaaaaatattactattagacaccagtataaacttgatacttaattgcacaaataataatatgaccattttaagtgttaagcatatcttttagtatttctttaagaatatcatattagtataaataaaagtattgtttgtttcaagatcaaaagttagttcacttttttttt

SEQ ID NO: 198871 - DNA, 829 bp, Cannabis indica
gaaacacatattaactacctaatatcggaaactgagaaataagtatgatacgcaaatgagaatgagaatggcttcccatcagagttggtgttcctaacacgcgatgtcagcatgagatctcctcctggtcccaaagccacccgcagccgaaactcataactacaagtgagcacaatataaatatgtatattcaaatatactgatatcaagtatatataatgtaactgtactatggcagaagaagggatgaaatgattataaataatgaaattctagagtacatatataggaagagcaaaaagttctcaagtcttacctgtgtggccagaccttgacatcatcttcagaaggcctgaggatcaaatcaacataagctttgctgtgggttggtgtgggaaagggaggtggatcattatccacatcccaaaacctgtttctagcaaacccgtgcgactcaagagggccatgatttgcaaactgcaatcataggagaattttcctgaccaagatgaatagaataaaagaaagcaataagagggggggaaaacaaggcatacttgaggaaagcaaattgggattccaccacgaattgctttaggaggcttaaaaatagcctgcacaagaaaataaaaacattactatttgctgtatgttgtattacgtttgcgaaataagtggacgaaagttaaaatgactcgtaagaaaacagaaacaaaaaaaattgaaagcagaaaccacacctcccataatccattaaatatagggaactgtgacaagattgtatatcgaacaaggaaaatcctacttattttgatatggtgaataaaga

SEQ ID NO: 198872 - DNA, 2183 bp, Cannabis indica
ggttatttttttggtattactcctgactcatctacaatatggtatggacttataattgtgaaacaaaatgcttacttttcaagttgtgtttttcttcaaaaaataaacaaacacttcgattgattccagtgcttctatcgaatgaaaaatggtgtaatctctcctctctctgtgcagggcgaagtaccaaaagaatgtggaagcataccataataagatggccagcatgaagcccaacattgttcccaattgcattcgatcggaaagttatatgatcacctttgaaatcgaggaggaaaagtatgtgtctataattagcaaggctatattggatactctttacattttccttgtttggttggtgcaacttgtgaagttttttcaatttttatgtacttatatttgcaggttcccattatttggaaagaaatatcagctaaaattcaccaatgatgccgctgctgaaacccattgcctggttcatttcccaagcttcatcaggtttatctctgcattctataacattgtttacaaaagagataaagttgattgtcagcctttggcactattagtgccaagttcatggatttatagaagtaactccatgttgatagctttgaggctatgaatttcatcagatgttatgttgccatttttgaatctggagtatagattagtcaaaatcaaagcttaaaactatagtcagacaatgatattttaacaatgtagcaacgtagtgtaagggactttgaattggggttgcaagcttctccttccttctgtgtatacacaagtgtaaaattcgcattatcccattttgattttgcaaaatgatctaaattttggaccctgccatacacaggttggccagagaagctggtcttgagtacgtagaaattcaaaacctaactgaattttacgaagacaacaggtttgtgaattgcatttttgttatattctttaggactgtcttaattgacttgtgactcaagattttcagccctttttttccttttctccttttaaatgattttatttaaacattgtttgaaatagattattctttcccatctttcgctattgctgtaagagcgcaatttacaggcatgattatgaattttggtcccaacctggttgatccgagagggagacttcttcctcgatcatttgacttgttaggtaatgcgtctgtacaccttaccgtgtttagaatatcatcttcttcagtttagaatttacttaaaatgatcttttacttgttcttaatgttcttccctaggtctgtataccacattcatatttcaaaagcctgatccagatgttgctccacctcttatgacgccattactggaagatgcaagttataagaatgatgaggcaagcacttttgtaatttataagacagaagctacaattagttcgatattttcttcaactgataatttgtctcccttatgtgttgtcgagtaaatgacaatttgattcgtgcctgttttagagagaatggcatgctaccggctggaacgatgatgaaatggctgtgcatgtggagccaccaacggtaccaccctctctaccaacactgcccacaatgccagtgccgccagttccatctgtaccaccggcggtacctgctggacttggtaacataagtgagcaaaagggaattttagggcctggccctgccgagttacgtttttctgaggcactctgagatgatgcaagcaagaattttagtgttctctccttctcttctgttaactttttgtaggctcttgtttttctagttgaagaacttttttttatcacaagttcgaatatgggtttcacggtttatccccatttcccaacccccttactactaaaccaacctagtagcttttgtagttgaactattaatataccaaaatgtaaactatcaattatgtaatatcttcttttcattcatctttggcatgctttcaataatgagaaactagcaccttgacaaaaaaaaaataaataataaataaatagaaagtagctggatttaacaattagttgaagaaaaagatcaagttactttgtggacataggtaaggataccaaattatgcaattaaaacacaagaggctgaaaataatttatccacttagtgaagctgagtattaacaccagaaagttaggatatatatgtttgtttg

SEQ ID NO: 198873 - DNA, 893 bp, Cannabis indica
tcatttgcttgtaagatagaaattggagaggtgttttgaagccttgtgttaatctccattgtttttcttgtgtggttttctttggtgttttttctcttacttataaaggataagtagtcaaaggtagtagtggaataattggtaacttaattaattagttatgaaaaaaaaaccttcacaatatttgaaaaaagaattagtaaatacctagatataatttggtcatagattatactaaaatatatcttaaatctaggtttggtatacatgcattaaatttatattttcagatattacaaagtttggactgtgattttttcaaaaaaagaaaatatttgtgtatcgagctctatcgattgtagttatctgataaaattaatatctaccataagtagatacataatgtttttctttgcaagagaaaattataatacacacactagatatttttaatatattacttttaattttttttttttgaaaaaaaaaactgaaatagatttatcaactctatctattatctagtagtaagattttttattttatttttgaacaatatctagtagtaagttttgatcagagtagtttactccattttttttagtatatatctttattatatactagaaaaaaatctaatttttattcacaacaatattttttagtaaaactgaaaattttatcactagaaaaaaaaaaaatctttaagatatcaacattcatttttttgtgaataaaattatcaaaataaaattttgtagccaaaaaatctaattttttttaaagaaaaaccttaaaaattaaaaactaagacgaggatagggcatcgaaccatgcggcgaactaacaagattctcttgttacatagttaccaccgccaccaccaccaccac

SEQ ID NO: 198874 - DNA, 883 bp, Cannabis indica
catcatctttagcttcctgagggattgtgttcttcaagtaatgggtgcgagccacatagtctctatcctcttcatcggtaagaactggaacttattgccagtttgagaattttgggaccttaaagtctccagtagattgtttgttgccaaggagagcacatgctttcaagttgttctcggataacaagaatcagctgcttgcaacctagaaggaagatcaagaagaatcttgtgcctttttccaatttttggagttggaacaggcctcctagtgatcagttaatacaacgcataaacaaaattagtaagataaggcctacatttattaaattaaaactcaaaaccgagcttttgagaaaaggcaatacttacgtatgatttggaatttaattgtactgatgggggagaccaaaagaaataatccttgaactccttcctgttgggtagcctcacaataatcctttaatcattggtatgggtcgcgagacagtaaaaaccacctgccattggtatgggtagccttgctttcttacgggacaggccttcacagaatagaaatagagaatttctagtggggttgggcactcccacttcagaatatggtataaagattttaaacaggccaatattctatacaaatttgatacctgttggaatggagcaatgccgaggtagttacaaaactctttgaaataatctttaacagggagactgctccaactcttatatgttcaaggccccaagcacctatcctagatggctcgctagtgctacagccttctcttgagccactcgttcagggggaaagcaactgaactccccctaggcgacaaacctaactcgacatccttattcatacttgatacaacatgattttaatact

SEQ ID NO: 198875 - DNA, 1094 bp, Cannabis indica
cgagaaaacagggcaaaattcatctatcaaaatccatgacaactgaaatggaaagctttaccaaaataaatattatatatatttgaaattttagaatcaaaacagaaatcagtcaaattcaaatagcaaaattattcaaaacaaaacagacgaatatatagaacaactagaaaaataaaaatatacagctgagatggaatggcctagcgtgggcggagaaagagatgccggagtcgagtcgagttgaggaggtggtcggcgttgacggcgggagcagctgagagatatgaggttgaagaaatatggcagggtcagggtttgggtttgggtttgggtttggttaagcaaaacataaatttttaaaaaatttgttcccctacataaaaaataaataaataaataaaatttaatttaattcataaaattattatggtctactaaatcatgtaaatttattaatagtaatcagctaaaatcataatttacaatccaatcgggacatttttattgttgaagacacgattaagattagaattagaaagacgagcgaaagaatcaactgccatttccagatcatttgacaaaaaaattaaaaataaaatcatattaaaaagaatacagcatcacagttaaccttaagaacgtaactaaattactaacaacccttttagtcgaagagaacttattattctcaacgactaatatgaatttgatgacgagttatcaaagaatcaacgatgaaacaaaacaaaataaaataatgtcgcacaaacaaaattaaaacactcaaaattatgtcacagagacaagactaaaacactcaaattatatcacagagtaacaaagacaaaactaatcacattagcaaaaattgaatcgtaataacaaaatataattcctaccaagttgcacccgcacccaaaaaaagctagtagacctggaccaaaaaaaaaaaaaaaaaacctcctgtagccataaatttaagagcagaaaatcttaattttttttaaattagttcacaactctaaatattttgttaggtataatataacattattagaaactttttaagcagtggcaaattaggataattc

SEQ ID NO: 198876 - DNA, 819 bp, Cannabis indica
tactcaaatagtggtcattaacttagcttagtggttccacccttctctcacaaagagaaggtcccaagttcgaaatccccctctccctaaatgtacaaaaaaaaataaaaaaaaaaaaaaaaaacgtaactcaaataaaaaaaatatattgatacttgaccgagtcagttttgacaattaaataaaaaaataagatataagtgtaaaatgcttttatttttattaggactgaacgtattggttgagtttgactcggactcgcctggacccgacccggccaacttgttgcctatgggcaggtcgagtccaacctggtcaactcttttggccaggtttgagtttgatttttgctaacccgggggtttagattgggcctaaatctgcccgtgaatctaaccatttttttaaaaaaaaaaaaattaatatatataacataaaataaataatatatttttttatataagattttagtaaaaattatatatatacattaatgaacataaaatttaaaatataaaatatgattttttttatattgtttttctcttatatattttatctattaaattagagatgaatataaagttaggtatataatatatatatacatattatattagtgtatagctattattttataaatgcctttatcatatatacattaaatttataaatacattttaatttatacatttgtaaggatatgaacataccatatgtatggactattctatggtagacaataactagtacagaatgtatagatggattatggaatatagagtatggactttatatttttagtcacaatttattttg

SEQ ID NO: 198877 - DNA, 671 bp, Cannabis indica
agattttggttggggtttgccgaaatttggtggagtagccacctgcttttcttctattagctttcttgtgtcggtggagaaggaaggagagaaagggattgcggtggccatagcctttcctacggagttggctttgcaaacatttcaacgagaaattgaccagaatatgaacacacaacagcttaatcatgacgtatttgattgtttcaagattacatcctctctttaactaataatatattttctgttttaaaagtgatcatgtgttttaaaagcaaaacaaaatattgtaatctcctgcaaccagacatatatatatgtattatgttttatttgtattcttatataatataagtgattaatattgtggtattttgagtacatatacataatttgtgattttaattttttaagtgaccgtgtaaattgtatttatatgtgaaatgaaacatatataattgttgtatgaattgcggaattaataaaacatatgtgcactataactaaggatagaaatacttccagccattgaatctttgagctttagtctcacagaagctttgatctgcaaaagaaatcgattgatgtaggtgatcgggcttccaagctctctttactctctttacatgaatttattgtgtttcacagaaatgagtagtgagttcggggac

SEQ ID NO: 198878 - DNA, 629 bp, Cannabis indica
ggaaactaattatttaaatgcaatagccaaagaaatataattcaaaaataaatattataagaatactcaaggttttaataattacgtggttggtgcattaatgagctttagtccacgagttaatattattatgagatgctagaaaagcctaagtggtaacaataaggtatgagaaatctattttcacacacgcaagtgagccgcaagaatttctaaccttttgcatgtagagtttgttgagtatttatagtacatagacgtcatactagttaccatttttcctctaatggagagtttacaaataaaatattaaaagataaaagagttaaaaataaaaatgatatgataatcgcgaatgagaaaagagtttttattcaccttttatctcgattataattagttaaaaacttggataaaagggtttcacacaaaaacccttttatcccatttctaaactaataactaggatataaaaagttttaataaaatccttgatccctgtttggctaatccgtaaaaattgagtcttcaactcatttttttacctttaatattttttttaacgttctaccaaatagggcccttgtctaaaaaaatttagttgcatatttgacccgctaaatttaaaa

SEQ ID NO: 198879 - DNA, 937 bp, Cannabis indica
aaaaataaataatgtattagtaacacaaaatatttttacgtggttttgcagttaaatctgcatactccacgagtctatcttatttaagatattttctgaatacaagatacaatatacaattgatcgtatatatcttccgtccattattctgtagaatctgctcctatttataggaatataagttggcagttatttacatttaattcaaaatataatcgttaatgaaacgtgattaattcccacatttcatttaaatcgtatattggataatactagctaaccgggtaaatgcttgttattcttatctttatagatggttaatgctgattcggacaattgtatctcgtttattttctaattgcttatccttgtctattataatgtggaaagaacgctaattgttagcagatcattcgcctcgtcaagtttctttagaattgcaaggtggttgtctcgctattcataacccgagattgctttgcataactgtattcactcctttaaataactgaattatcttcttgggtttgtgtactccgaggcagatatgtgtctcgtcaatatgaattttaatagtcttctatccttgtctcgctttaagactatatagtcagcgagttatgaatattttctattaaccctatatttgccgaggtattctttttttctcgcattaaataatataatttcattatatcagacggttcattttttactgtaagacacgtgccattctctacagtgtacgtagtcgaattttaggtataacattagtctattattatcgagttgaaaaaattacatttaatttttttagaagacaacatttttattagtgaaagctatagctctcacattaatactactagttcgttactggctcttttggtaaatttaaacgaagctgctgtataaaaccaagtagtagttctcgtac

SEQ ID NO: 198880 - DNA, 773 bp, Cannabis indica
cccaaagtggatagaatgcctctgtgatgaaatcatgggcctgtagcttttcgacctcatttttgagtgcttgggcgcgttctttgtccaacaacctctttttttgttgtacaggttggaagtttggatcgatgttgagggcatgagtcatcacagaggggtctattccgacaatgtctccatgttaccatgcgaagaggtccaagtttgcccttaaaaattttatcagcactaattttatttttggcgctaaacctttataaatctttagtcttctagctggggaagtgggatcgacctccacttcctccagattttctataagtccaaagttgtctgtaggatccctaaagagaggatctatgtctaggtgggggttggacttcattgccctttgtcaggctcttctttagagctcttggcgggcatcttctctttcttggctttggacaaggccaagttgtaacaattatgggtagactgttggtctcccctcaaacatcctactctatgccttgttgggaatttcaggcaaatgtggtagatagatgtcaccgcctttaggtcatacagggctggtcgacctatcatggaattgaaagctgagggtacatcaattacgacaaaccgtgccatcagagttctggttgttggattctctccaacggtcaggagctatgggatgtaccccatgggtgcaatacctttgcaaaagaagccatacattacttgtgtgcaaggtgccaaatcagtttgctagagccccatatttt

SEQ ID NO: 198881 - DNA, 1108 bp, Cannabis indica
ttttgtttgaagcatgggaggtgaaatgcaggcaacgacggtggtgacaaaatccaaatctgcacagcttgatctctttgcctgagaatcaaccatccgcagtttaggccaagctcatttccaagatcatcgagaagaagattaaggtggttggcatttccatcacattcatactttcgtcgaccagatctagattttagacgaagattgtcgagtctaacatgttcagaacagtggcatggtcgagattgagatcgatgtagtgtttattgtgttcattgggctctttgaacaaccgggacaagagcacctgcgaatctcaacagcttacaaacttacatcagaacttgttgagcactgtttgttgaaactacgaaagtgaaaaagacatcaccatcggcacactattttcctagtcctccatgaggaagggtgatattctgggttttgaagatgaggctagattagggatggtggtgcgattaaatctggttcgaccactttttttttttatataaaaaaaatgttttagtcaagtgattaagttaccttatacatattataggttaaaaggttcaaattccaaaatttgggcatttaattttttaattgttagaatttatttttcgaaaaagatatagtccttaggaatttaacccttaccaataagagttatacttattagtgtctacttattagtgtcttaaccatttaattgttaactttttattttaaattatatttaacactaaaaaatataaatttgtatcaatttttaagatattatatcatatagctagaaaataaagtaggcccctcctaacataagaaaaaaaatcttaaaaaaatcattaaccatcttcaaaattgttcgataaaacatggaacatctctttttaacttgtgatgtggcgatgcacttgtggcgctcgtcaccttggggaatttttccagtgagtgaaactggtattcgagttttggattgggtgaagtttatctggagccttaataatagtggtgttagggctgaggatgtctttctctacgcgattgttgttgacaatatctggcggatgcgaaatgatgcggttcacaacaatagccctcc

SEQ ID NO: 198882 - DNA, 1534 bp, Cannabis indica
tttatgccgcaaattattcttcagagtatacattctcattatgatacacctctttccaaactcaaagaagaacattattaattattattaggtttccagtgcccaatatatatcctataccttacctaccgtcaaatgagtagttctagtgtgcacaatatcagatttgggtgattcactgacatatatattttgtttagagttgaaaaattatgctattatttcttgagagatgatcagccagctaatatatatctttgtcagaattttggtagttcaaacttcttccgaggaggttcttcagtcgtgaccaggattatttactctgcaaaaaaacaatgagtacgtgcttaactagcctggttttagatattttttaagatacgataacattttcaatctcattattaattaattagtattacattaggagatcatatatatttgtcctatactatatatttgcatcatgcacgtacgtacatattttacaattaatattttatttatatatatatatgtgcatgtattatatctatctatcacacggttcgatgatgatcagaaccagatacactgcatatgaagtttaattaagtaatttcaattgatctaataataataatattaataataattaagctcttgtgaagttatatatgatcgatgatctttgtaacaaccggcttttgtttcatcatgtttctcaacatgaggtagatatatatgtggatcaaaaaagactaagtcaatgcttatatctttgttaggtatcttaataaagtgtttaatacggtattgatgtggtattgatgtgatgcgttatgagggctaataattttttatattatttattaaattaaaatatgtaaaatttaatattaaattacactaatataacataatgtttgatacttaaagtttatgcttataattataagaaatgttaagtgcaacttaaggcaccacaaaaagtgacaaattattattggtgcagttcgttagcaggtcctacacatttcacttaaataaataatatttttatcccccaactttaccataccaaattttaacccttaatatatactactataacaaatttcgaaacatagtccttccgttcacttctgtttggttttgtcatttgatgaatgacataacagtattattttaaaaaaaaaaatgatgtggcaagacatgtttatattagtttaagattacgtgcatattttaatgtaaccaatactctttacattttttttaattgaatgaattaaaacaacaaataaaataaaacaaatataaaaaagacaactaatatcatcaacattaaccctaacttccctttttctctctttgcatggattcattttttaaaaaaaaaaaatcagaataaaggaaaggttgaacgggcgcttgggttcttcacccctgggttcatttgtgatcttccctcttcattgtctttcacttttttccatgtcttcttcatctcatttttataaaagtagaaaaagatctatatatatatata

SEQ ID NO: 198883 - DNA, 723 bp, Cannabis indica
atgtgtgctgagggtctctcatccattctaaagtaggcggaacacacggacgatgctttcggtatcaaaagtactcgcactgctcctaaaatttcccatcttctctttgcggatgacaacatcctgttctgtcgttcgaacattgaggcatgcaatgctattaaagaggctctggaccagtatcagaaaattttgggttcgcttgtaaacttccaaaaatcctctctccttttccccgaatactagcctcacataccaaacctttatccaagactatttgcagatacccatcactaaccacatggataagtaccttggtttgcgtcagtgttttggtcgatcgaaaagttcttctttcaactccctcaaagacagaatctggtcttacctgtccatgtggcaaggtaaatttctttcaaaaggaggcaaggaaattcttctcaaggctgtgattcaagccattcctacttatgccatgtcggtttttaaactccctgattccttctccagttttgttgaaaaagaaatggccaatttttggtgggatgctaaaaatggtgaacgaatatttcattggaaaagttggaaatccttatgtaaatgacaaaaagtatagggggcctggggtttagatctttgaagccttttaatgaagtccatgttagctaacaagcttggagaatccaacaaccagtcacctttgcttaccaacctcttcaaggc

SEQ ID NO: 198884 - DNA, 545 bp, Cannabis indica
ttttccattctgtgccctctcaacaatccaaaatctcataacctttccaattaagcttctttctgattcattactccttttctctatttctatatataaatatacgaaaactctgcatatatatactaatacataataataataataataaggttaagctatacccaatcttcatcttttccatggcgtttcagagatttcttcctcacttactcctactggtttcactacttccatgctttatttattcttctggagcttacaaattcacagtaggaggaaaacaaggttgggtttcaaaaccttccgagaattacaatcaatgggctgggagaaatcgatttaaagtcaatgacactatttgtaagtttaaactttttttttttaatttgtttttacgttctttttattttctctctgattcattcttttttttttctcttttgagttgaagatttttaagtacaagaaaggattcggactctgttttggtggtgaacaaagacgattacgaaaagtgtaacacccaaaatcctcttaagaaa

SEQ ID NO: 198885 - DNA, 1776 bp, Cannabis indica
agagagagagaggaagaaagactataatggtggataatatgaggccaattttatgagggattgattaggtgtattaatggacaaaccacaaccactagtataagattgaaggtggtccattaataaagtatatataatatggatggaccaaacctttgtcccaaaagctctgtttgtgatttactttattagttattacttattaacattggaacttaaattatgacacgaaaaaaatgcataaagtcaccagcaaaagctatatggattttggcaaagtttcgaaccataaacatatacaagtcattaaatttgccaatttatattataataaggaacaaaaagaataggagaaactattcaagtaaattgatggttgggactcaaaaagtgctcaaatagcaataataaaactattgtgataatactatgaaatattattggtgtgtgttcttcatgattaccaagaagcgaaaattttattaaaaaaagctatgaagaatgatgaagaaagaaaaatgcagaagccattgaaccagaaagattgcttaccaagcctaaaatggccaaaaatcaagagtaaaaatgtctcaaagagtttctttcttggaagaaaagaagtttgaagaaagagagaaaagtttttagagggaacgaagaatggtgaaaattggaggaggaataactgaggcatatggtggctatatataggctaacgtgtgcttcacatttcttttttttatttcttttttttatttttttaaataaacaaacatataaaatatttataccaatcaagctttttagttttatttatttttttttttttaagagatagttaactcaatttttattcaaaaattatatgggtgtactttctggactgaatatgtccagaaatttcctggttttgccattgaaatttataatattccaatattaccccgcagtttaagccagccattttgactcgttcctctaataatgttactttgtttctaagaacaaaaaaaaaaataaagtgtttcaatcaagttggtcacttaaataaataaaatagtttttaaatccctcgtttatgttcacaagttgaattgaaggaagttacatacaattacaaagaagaatcgcccctattttaaaattaaaataattaaatgagttgaatatattagtattagtttttatttgtatatattttttatattagaagcaagttcacatgtagtgagcctatttttcggagtaagtaaatgaatgcttaccactaaatagtttttaatggaaagttgtacttcattgtaagactctcaattaaaactgattattacgtcgaaaccatggacaatttggtcattttgtcattcgatcagatattttagagtagtactgtatagatcgaacgaatgatgatctagataattctaagcctactcttttcatcactacatcattctagagaccaaacttcaccatttggttttcaccagaaaaaaaaaatcaccatttgagatttttggttttttatttatttgtgcctttatttttttctctttttgaaacctaaagattttgggtctttattagaaaataattactcattttgacatgggtcagtcaaaattaatttagtatcattcatcaatatatcaccttatttccaacccaaaaaagagagagatagagaaccacagagaccttttggtcaatcatattgagatttgaatgatatgaattgcgcttctttctccatgttcattaacttaacacctcaaa

SEQ ID NO: 198886 - DNA, 722 bp, Cannabis indica
taaaaagagtttggcatcttgctgtacttactacagcaacagtgtattgaaagagaatatacataaaatactgctattttgtcccagcatccaagtcaagtcatcacctctaagttagaaactttgtcttggtagattataattaagcaaatgttttcccctagaaccgtccaatgataacaacccctctctcatgaagattatcctattttatatgtgaaacactaggagtagattagatcgatttgactcttattccagtaatattttaactattcttataatcagatggattcgggaataaatttcaaaaaccttaatttgcatggtttaatcagtacgtaccgtcatcttgatagtgatctgctgtgaaattccaatacaatatattattaatatatgtattgatcactctgatgtagcagagtactaactaataaatatatgtactacgaaatctcatgcaaagcgaaactcattatacatataacctatacacaaattcaagttaataataagcaagagaaaatatcaatcaatatcaatatgtctgataataatcaccgtatttttctcctgggactaataattctctttctaacattagtattaataaattgtgacgagggcgcagcctcaaaatgccgcccgagcggtagaatcaaaggaaagaagctaccaccgggccaatgtatggaagacgacctgtgctgcgtggaggg

SEQ ID NO: 198887 - DNA, 1359 bp, Cannabis indica
gactgaacaaaaacttgtaaaaacaacacctcaatcacaacataaacaactcgacacaaatgtggaggcgtgtcactttactttctcaactggtttcttcctccaacgcccccattcttaaccaggtacagctccacccttcaatttcatcttcgttttgcttctatttgctcatgcccaatttgtgtagctctaggctctagcttctcaaacgcgggtacaaattgattcattgtaagtgtttgtttgaatctcaaaagggtaacatggaaaactagtttgggtgaatgtgtacttcttggggtatcttattgtcgatgcggtcaacatgttttggtgtcaaagcaattgtttcatgttagatcccgtttgccattttttttttgattatttattaacttctttagattttgatttgattcctacttatacatgcagggagcatttaaccttcaaattttgggaaacattttccacagaggttgctatacaaatatgtattgtattgctttttaatacttttctaaaagtttgattcatgaaaattcaattgcatgattttgcttgtgtggtttttttttgcttctgctttttcggaattttatggtcatcaaatctaactaatgcagtcatattattttgttgcaggcaaaaacctttcataactttcgtcttaggtaacagtttcaatgtgaataattcttttcttttctgttgggtgcttttaatatgccttgaaagttttagttcatgatttgaagttcaaccaatatatattcatgattcatgtaatcatatttatgatggtagtttcttcttttgttctctcagggggcccaggtagtggaaaaggtacacaatgtgaaaagatcgttgaaacctatgggttcaaccatttgagtgcaggagatctgcttagaagggaaattgcctctgaaactgaatatgggtaaccactgctcattcttgtttattgctgatcatgtctaattaaaacattctctatttgtttttaagtaatcttaatatccaacttcaatttcagcactatgattctaaatactatcagagaaggtaaaattgttccctctcaagttacagtcaagattattcagagggagatggaatcaagtgacaatataaaatttcttatcgacgggttccctcgaagtgaagagaaccgtgtagcttttgaaaaaattgtgagtttgattctctaatttatttttctctcatggagtaaaaggctatattgtacttctatattcgatagtttttaagggatataaagataacaatgaacttttactgccaaagttaattccaagtctcaaatcataaatagtttttacttttgat

SEQ ID NO: 198888 - DNA, 696 bp, Cannabis indica
gtcaaaaaaaaacagtacttgtcaatacataatctatgactatgattgtttttgttattttagtttttggtttttgtctatgtatatatgcatgtacaggaatcacatatttcttttctatgaactatatatattgaaagaagctatatcaattcatatgtgtatttaatactaatttatatacataattaaaatttactccatcaaaacaaaaaaatttactcatggcatacatcaatgaacattcatcaatatagggtatatgatgatgcttttaaagctatatatatatatatatatctgttaattagtgataatacgtacatttcaaattccattaattagtacctttttacatatatatcatccgtttagtttcaccgcatgcagtgctgttattttaattggagttctcaataacgtacagtatacattccaactacacttgcattgaatacatagctatacacatatatatataatgtttatttcttggtgtacgtttcgaatatattctcttatacttgattatgttaattaagctaatcattgagcatactacttgttaactgtgtaattttctttcactcatgtgtaatgcatattcaagaacataagtcacttgcatttttatattattttgttcaaattaattagttttaatttgtactgatcgatcatgttaattagatatgt

SEQ ID NO: 198889 - DNA, 795 bp, Cannabis indica
gaaattgttatagttagcgatattagtcgatatagttcttacatctcacgatattagctatgattgaattagaagttgaaacccttagcgacatgtagtgatatgttgtcaacattattaacgatttttatgttgttttaattgtttactttgcctagctggagttagcgacatgtggcaacacgtttgtcgacatgtcacgacatatgccttggggattttttctcacagattatgtttatgttttagtgattactatcgatatgtggtgactttgttcgcgatatgttgtgatttatttttgcaacgtttagcgacacatttttaagtgctttaatatgttcctttattttgtcttaaattttacagatgactcctggacattattactaaaactatcgacacatatcacagacaatgtcgatagacatcgcaaaaattgcaagtggaaagcaaatatttttaattgtcggtaattacatcgctacatgtcgttaaaagtcatccctaacttccatgatacacttatgtttagtgtattaattttggcataatgtttgtataaaaaatcaaaatttttctttataacacccttaaagaatactaccatttgagatgttcttaatagtacttttttgaaatatacattttatagtagcataatttttcaattacattttattcaattttagcgtaaaataagtaaagtggtgaatgataattaataaatagatgcaaattaatacttttaattatttttacattaatgagtaatataatatttttcttttttat

SEQ ID NO: 198890 - DNA, 1063 bp, Cannabis indica
tttctttttctattttctctgatactttcctcttttagtttctcctactttgtataaatatatgccatttatatgaatgatacacacaattgactcaccattttctacaactttaaagagaaaggaagaaagacaaatatatatatatatatagagagagagagagagaaagagtttttcagcgaagaaaatcagttgatcttgacagaaagatggcatggcacaaaagaaattacataaatcaaacttttataacttaacaagccatattgaaaacacctccaatctaatattctctaacaggccagcagacataatctttttcaacacaaaaacatgttgggtttagtcattggacatgctttgtgcttgatcagtttgcaaggtcatcaattttgtccacataagcattgaaaaaaagttctataaagggaaaaagagaaattatttaaacaaaacataatctggaagggtgatcaagatcattatataacaaacacaatgatgaaattaaaacataaacatcctacatttggtcacataaaatcaaaaagactggataccaagtgaaagaactagtaaatcaattagaaaaaagaagaaacccgatcaggaaaatcctgaaacatttgccattattataattgcagaagaaaaaagaaaagaagggatcatcatgtctgtgtacatttgatctgaatcaaacaaaaagtattataaaatcattaaaacgatatcagaagaacaattattagtagatattatatattataacaaaaaaggaaaacatacatagaaattgttcccatcaataataagtttcatcatttgcggtcaaataacatttgtgcttatggtgagtaggacacatgaaattttaataaataaaactttacgatgctaccaaccattgttgaagaacaacaacaacaaagaatctgtaaatccacaaattaacacagacactcataaggactcacctcagataaacaccattcttcttgattaaatttattccaatggtatagaatgattaatcattggaatgccgttagggggatcc

SEQ ID NO: 198891 - DNA, 978 bp, Cannabis indica
actgtactgacagtattaccatttcacatcacatattgaagacatgcacctagaaaaacagataacatagactaaatagatctaatattacaactttactgggagacactctcataaagagaattgattgaatttataacgatttcagcatcactttccactaaggaaacaaataagtctaattgcaaataccattttaaagcataagaaattgccaacgctttagcttttttgagagagaaaaaatcaggcaaaaatttagcaaaacatcccaatagaaagccattagaatcacgaactaaagccccaaaaccaataatattgttttcacaacgaatagcagcatccacatttaactttaacaattcagcaagagattttaatcaataaataactggtgagaggagagaaatcttaaccgtttgcttatatgatttttaagcctgaagccaactatcataatattgaaatgtccaattatcatattattgtcattttgtatttgttttgctttactgtttcgtcaggaggacatagttaaagaaatagatcatttttttttgctgaacaaaatcatgataatgaactcgttggaaatagtgaatttatgtaacgaccaatatgcaaacttgaaccaaagtaatgatcttttttcctcattctaagagtaaatcatgtctcagatcgaatatgtttctctaaaagtaggcaggttattttagttgatgaggttgatgaatctactgatgtcattcttgatgcttttcttttttgctaactcattctcgatgcttttcactctagactttttgtagctatgaagcatctcggactgaatttaaaacaattatactataaacaaaaatatacataaatagtcaaaatcacaatttatacgcaaaaacataaacaatttaatgtatgaaatcacagagcagtgattgcaatttacaaataatatttaatagactaataact

SEQ ID NO: 198892 - DNA, 2569 bp, Cannabis indica
ccttgtttccactcaatttcaaagcaccattcaatcggttcaaaccgattggggtggtgaatatcgctctttgtctcggttcttcacccaacatggcattcgccatgatctctcatgtcctcatacacctcaacaaaatggccgcgtagagcgtaaaaattgtcatgttgtcgaaaccggtctcactttgttagctcatgcccatcttccctttcatttttggccttacgctttctccaccgctgtttatttaatcagtctccttcctactcgtgtacttcattatgacagcccctattccttactttatcacaaacctcccaactactcattactccgagtttttggctaccaatgtttcccctttctccggccttaaaacactcataaacttgagtttcgctcctctccttgcactttccttggctatagcagcaaacacaagggctacctttgccttcatcccactccaggcgtccttttatcactcatcatgtcatttttaatgagtcatgttttccctttgccactccctcggccacttcaccaccctctcatgctcctcactccgtcattacagccttacctctttcggttcctaccaccacaaccattcccaatgtaccttcacctacattcccacacaccccttcctctcattccacttctcctccatccacccgaactcagtcgattcccacttcaccctccacatctcatgttccttctcttaattctcccgttcatacaccctcctcacatacatcttcttcatcctcttccacggcctccccacccatcattcctatgatagtagatttgcatgacccatgtgctcttcccattgccaatactaatgtacatcccatgattactagagctaaatcgggcatcacaaagcctcgtttgttttctagtgttgccgcaggtacaccggttgagccctccaattttcgtgaagctagcaaagatcctaagtggcttgcggccatggacactgaagtggttgccttaaaatctcaaggcacatggatacttgttcctccaccctccggttttaaagttattggttgtaagtgggtgtatcgcatcaaactcaatgcggatgggtccgtggaacgctacaaagctcgcttggttgccaagggctttcatcaaactcaaggacttgactataatgaaactttcagtcctgtggttaagccgaattcaattcggttggttctctctttggccgtgtctctaaattgggttgtgcagcagctagatgttcaaaatgcgttccttcatggtgatcttaccgaaactgtatacatgactcaacctgagggctttgttgatcctgctcatccacaccatgtttgcaagctaactaagtctctctatggtctcaaacaatcacctcgggcctggtttttcaagcttagcactgccattctccaatggggatttgttgcttcacaagccggcacatctctcttcatttacagatccggttctgtcctcatagtgctcttaatttatgtggatgatatcattgtggctggctcatcttcatctgctattgatgcccttcttacatatctatctacacggtttgcagtcaaagatctcgggcctctccatttctttctcggggttcaagttcatcgctctcccgacggttttcacttgtcccaaacaaagtatatcagggatctactcaccaaaacaggcttacttgatacaaaaccggtcactactcccatggctcttaactctttgtctctctatgatggtgagccccttaccgatggtactccttatcgtagtcttgttggagctttgcaatattgtactctcacgcgacccgatgtttctttcgtcgtcaacaaactatgccaatttttccatgctcccactaccatccattatcaagctgccaagcgagttctccgttatctcaatggcacgactcaccttggcattctccttcaacctgactctactagagaacttcactgcttcactgatgcagattgggcctcatgtcctgatgaccgtcgcagcactagtgcttattgtatctactttggattgaacctcatctcatggtcttcggctaaacaaaaagttgtctcccgctcaagcacagaatctgaatatcgcgcgcttgccaatggtgcctctgaggtttcttggcttcagtctcttcttaatgaactcggtttccctcttgctgcaccgcctactatgcattgtgacaacatcagcactcttcatcttgcttccaatcctgttttacatgctcgtaccaagcatgttgaaattgactatcactttgttcgtgaacgcgtaaagaacgggcttcttcaccttcgctacactccatctgaagaccaagtggctgattgtctcaccaaaccactcactgcttctcgctttcaggaactccgcaccaaactcacagtgcttcccaaccccgtgagtttgaggggggatgttaaaccataatgttatttcattgtattttgttgcttttattgtatgatgacatgtgtctcttctttggtctccacttattataaat

SEQ ID NO: 198893 - DNA, 2257 bp, Cannabis indica
aaaagatctattgtatgtagctattgtctttcacaatccttgttttaagaattcaggatcacaagttagagtgatagaattttcacagttccaaacctttctaactaattttataggcttgcactgaaaactctccatatgaggggccttttcggagagatgctccagcatggtgctatgctccttttgaacctgaaggcattataaggtttggattggtttggtattctttgactatatgacatgcatttcagtgaagtgttctatgacagttatttgtgagaactccctggtttgaaggtcttccatgtttgacatttttgtgcttaacatcaacgctttcaaaagcaagggttattttgtgtgctaattttaatcttttagttttcttttgcctaagtattgcgggagtctatctcaaaagcgggttgctaactgttatttccattccacaccgactgaacttggaaatatgaattgggaaaatattgacaaaggactatgatgctaagttacatctaccctttttaacccctttagaatgaagcagcaccctctgatttcccaattcattatacagaaattgcagttgtcgtggccactattgtttttaacaaggttgcagttttaagaagtcatctagtaacaatttacaacatttactttggcatgcagctctatatctgctattctttccactattattggagtgcattttggacatgtgcttgtacatttgaaggtcaggttcataattatattcttataacctagctaatcatcaaaagttgctcaatatacctcataattcatcattattttttacccatattcccaaccacagggccattcagaaagactgaagaattgggccatgatgggttttgctcttctaatttcaggacttattcttcatttcactcatggtgcgaattgatggtgaatatttgcagcttctgttgtatttacatgttatcttttctttctaaatcttgttcccactgcagcaattcctttaaataaacaattgtacacgcttagttatgtttccataacatctggagcagcagcgctggttttctcagccttctatatagcagtaaagttctatcacttagtctggttgtcattttctgtttttgtgtaggctcatcgaattttcctaatctgttaactatactgccaaactaggttgatatctggaattttaggtacctatttttgccactggagtggattggcatgaatgctatgcttgtctatgttatggcagcagaaggaatttttgctggcttcatcaatgggtggtattatgatgacccccataatacacttgtacgttctcatgtccttcctcgttctagcccagttctttttcctaagttgcatttgaattatcctaaactggttttctgcttcattggtttcacaaatgagaagaaagaagcttcttgttatttctcttttcaattcttagtattatcttagtgattatctataagtatacataaatacttatagatgggttgtactaactcattgcagatatactggatccaaaagcacatattcattggagtttggcattcaaggagagttgggatcctactttatgttatatttgcagagatcctattttggggggttgtctcaggaatattacatagccttggcatttattggaagctttgaaacccagtattggattcctacctttctaggcaacttgcctatttactgtacttgatcttcagttgccattatcttatcttgtacatttgtcttcaatttctttacttggcgtttggctgtgaagtgtgaagtgtgaccattatagtaacagtggtgcttgctttgaaagaaaattttcctttttcgcatgtggggattttgttgaaagtatctccagatacatgatttatgctaagtttggtataaaaaattattcaaataatgtcccactagggtgtttgacaccagcaatattctcaatctgaatcattacaatttacaaggaattattttctgctctcttaggtacatatatgagctgagatggaatgctaaacttttgttttgctttattaatgatagtaaaattagtacgactcattttcaacagttaaggaatgagtattcgttaactttgttttatgtggttccttgtatattataaacattatttatgtgccatcagtagtattttgaatttataaagggaaaattggaagtggtgccaataaaaaaaaaaaaaaaa

SEQ ID NO: 198894 - DNA, 913 bp, Cannabis indica
actttacactatatcgaataacagaaaaacagagaaacacaggtcaagggaccagacttagaatgtatggtaaatgtgccattgtttgattttatttttcttttttgaacaaaaatatatatagccattgttgtaaaaacagaaacaactttctttttatttttttggacaaatataacatagaaaacatgatcatttatgtttaattagcttaacacttcaaagtaagatataggatgtaaagtaagatataggacatatgcattctctacaattatacatataataattatatatgcataatgtaagggagaagaatatgataatactatagagggtgtgtttcaggtgataaacctcaaaactcaacttggttatttaaagaagattagcaatcagctgaaacaacaaatgggttacacagatgccaaaactctgttttcaaaagcagtttacatcttcagtgttgggagcaatgattactcataccctttcgatactaaccccgccgttctaaattctcacacaacccaacagtatgtgggaatggtcataggcaacataactgaagttattcaggtataaaataaatacaatatctttcaaaattaattgtgtttttctatatatattttttttcattaattatattcgaaattatgtgaatcgatcaggaaatttacaacattggaggaagaaaagttgggtttttaagtttgggtcccatcgggtgtgcaccattcgccagagtgcttaataagagtggtgcctgttttgaaaaattcacaccctttttaaaattacacaacaaacaactctctatagctctaaaagatttacagtcaaagctcaaaggattcaaatactcacttgttgacgtttactcatttatggaagaacgaataaaccaccc

SEQ ID NO: 198895 - DNA, 791 bp, Cannabis indica
aagaagaaaggctaataaaccagaaagaagaccaagttatggagatatctaactccaactccaattcttcagagaaggaaatcaaagctcaaacaactaaaagagttcttaaggagaagagagcaaggttgtacattatcaaacgttgtattttcatgctgctatgttggaaggatcgtggagattgatacatacacacaaacacacactcactcacacataatcatggtaaagatgataatgctctttttgtttagtaatagtttgtctctcttttcttagtggtttatttttacatacttgtaagaaacttttactatttgtagcacaaatcaaactttctttgttcattttctttaatgcaatggttttgagtaatactctctaactttgaactcaatatattcaagcaaaagtagataatgccataaattttcttgagcatagttagtactattgtgtctttaactcataagccaatcaaaattaagaaacaccctgaaaataataataataataatttatttaaagctatgagaagttaatagggtaggccatggccttgaggttagtaatgaactcataaacttgttcagatatgaataagaacattgttcaaacttgaattgcaaaacaatattaagcttatttgaagaaaaacatactttaattagttatgaaaattttacataatcaaaaccaacataccccaaaagaaaaattactaataaagattaaaaaaaaaatcatttttttattattgttattacacattcacaaatatatatata

SEQ ID NO: 198896 - DNA, 1984 bp, Cannabis indica
taattaaattcttatctaactatgtttggttatggaagataagttttttttcccctttaagtaatgagaaattaattaggaaatttgtaaacttgccactatctatagacaccatcaaattaatacatcacatttttgttaattatcataaaacgacatgtagtttgatagaaatgtttatatataattaatgtaaattatttaatcatagacttattctaatgatttcacataataatgtagtccaaaacattttgctaattaattcattagaaaaaaaataaaaataaaaagtagtaattaaattatcacaaaattatcatattactaagagtaacactcataaaacacaatcatacaaacaaggactcaatttttttcttctttttagtaacaagagcaaactatgctaccatacgattcacattgtatacatcttgctttgagtcgccaccagagtttgagcagcagcaccaacaacagcagcagcaacaaaaatcgggaaatttttcaggcaaacatttaagaaaaatacaatattttttcgctaatttatgaaaagaacacaaatttttttcttcttcttcgggtaatgaccttgttggtgttgtaggtttctctttgggacgaaatagaagtgacacaaataagtaccaaactatgttgattgatgtccaaacacttagaagccaataatatttatccaaacgactagtgtttatactttcattaaaccaacttttaccttctttgaaagtaaactttgataccaaataaactaataacacacttccaatgttccctaatccaaacacaccaacagctgaatcaatcatgtatggttccaaactaggagggatttcatgatccttaaaaaacctttcaatgctttcatatgccatcccataaaaccctccaagaagaaaaaattgtggaaccagataaagcagattcatctcaactggctcgtttattttgctaggatcgttgcgtttgttaaggataccaattctcttactctcaacttcggcagcaatgatacaacataacaaggcgcataacaatgataacataattccaatgcggtggagtgccttttttaaagttgtgcagccaaaaggaatccaagaatctacaatgtcaaaatataatttcgggaataaatagttagcgattttgtaaacgcttaggagtatgactagaggaacttttagatttccaatgatttttcgatccatagaatatgcttgctcgagaaaatatgtgtttcccaaagaagataccaaacctaacaaacatattggaaataacgatatgaggaatttggtttcttcgactcttgttattatttcgggtttttcccctagtgatggttcttcatcttgatctttctctttacccttgttaaagaaacaacaacagcataatctgcaattttcacaaaataatcaataataaaaaagacttgtaaaattcattcacaagtttgactaaaagaaccaaatttctcatgcattatatagcaaagattgtcccacttaataattaccttagagtgacaaagttgagcttaccactcgttctactttaaatatgtgaatgaaaaataggcttatttttgttaagtcctttaactatacataatttggcaaattagttgctaatatattttattttttcgcaaattggtccacgacttcaattttttggcacaatctatcaatttcagtagaggatcatcgctaaccaaaaaaatttcaaaattggaggactaatttatcaaaaataagttaagtatcgattactaacagatctctcacaaattttcaaaataatttaaaatgacgaaatacatgattcaaatagcttctttgcacttgtgattgtttcaatatttatactaagtgtaaaaaattatttgaatcctgatctcgacatattctaaattatttagaatacttgagagatctattgtgactacaac

SEQ ID NO: 198897 - DNA, 1020 bp, Cannabis indica
aaaaaagaaaaaaaaaaagaagccaaattatatgtcctagataacgacaataaggtgtgaggaaacaagaacgtcgttttataaatgaggcctcaaccagccctgcgctaaaaataaaagcccttcttcagagcaaacttgaaactgaaaatggcgaacactctcgtaaatagagccgcaaccgatcggaacctaaacaacatcttcaagctttcattgaacttcttcagaagtttcagtactgaatcgcctttacctccttccccaagccctagcgcttcgaagaaacccaaacgcaaaaagaagaaaaatctcttcgaggtggctcagtttctgcccaactggggtcttggctaccacatggccaaaactcactggactggggtctcttacgagattactaaaatcaatctctacaaggtatctctttctcttgttcgagttccttttacttaattttaagcctcaattactccttttcccatcatttgttactacagttcttgaaataatctgctagaataaccggttaaaggtcaagaattgcttttcctacacgggttttaagggtttaagaatttagagttagaaggtttagtctttctttatttccctattatgggttttaagggtttaagattaatctgattggtcttgtttcaggatggtagacatggcaaggcatggggaatcgtacataaggacggtacgtatttttgcttgttgtattgagattagttcttgttcttatcgttttatgtaagtttaagcctcacattactagttaagctacatttcattgttaataaaagaagatatttttaggtttaaggatatgttttatacatcatgctgccactcaaaacaatcacaatcttcactcctagttaaagaagaaaagatgaaaaagaaaaagagtaaattgattattgtatgggtttctgtttaggaatgacgcaactgtgaatttgataacaagttgatgaagtggaagtgtttatgccaacgaaatgggaattt

SEQ ID NO: 198898 - DNA, 2153 bp, Cannabis indica
gagttttttttgttgaaagcaagatcaactttaggctaaaaatggactaggccagcatgatctacctagctcaaggtaggacttacctagtattggccagcttgtgccattgtacaaggctcctcattttctaagtttttaagaaaagacctattttttgattttttttttctattatacatagtactattattcacatctgtggaaggaggacacgtggcacaaagttgaatgcaattattgtattaatgtgggaccaaggttccctagtcacgaaaggccaaactagatctgaaatgggcagaagcccagtaagagatcagggccttgcttttattcgaaatgattttcaaaagggtcagaagcctaccaagccttccggatcttataagggacggagccctccaagcgtaccaacgagcacgcagaagcttaacgaagaataagagccagatgtcaccccctgacgtgcttgctccttagacataggatcagactctcttccctatgtcagagcatggtactgcgtgcacctcctctgcatacactcattttgtcccacgacccctctaaccactttgtttgctaggcgtgatttttgctcgacatgtgctctacgctaaaagtggtactactatacagaactgtcaaacccacaagggaaaaccttctaatgggccctatggtcaagtatattgtgtatttttgccctaatagtggatcagcttttacataaaatctaaacgggtcacaggtatgttcggacctgaattatagcctatataaacctcttaaccccttcacataagggaattatgggaaaaaacctaaaaaaactgggacataaaatactttataagctttcatcttcttttggggaaacctagagagtttaccatatagctagagttatgattattattgaaaaagttattttgtatcacatttctaaagtctaagaggccaatatacgaacttgtagattagagatagttaacgcccgaatcatgttaaaattttccatctcgtttacttaattattatttaatttcttaagctttcaagtatttagtttttaaaaattccagtaagcacatacataaataaaaaatgcaatttaagttttttcgttagttgccctgtgtatttctgtataaatgtaaaaaaaaaaaaactgtctttaaatgtaaaaataaaaaaacctttatatatttaatgtaaaataaaaataaaaaattctacaatgtaccatcttaaaatgagtatatcggtacacccttatttattttattatccgaaataattttttagtctaatttttattatgattgtatacgttgtagttatttaagacatcttaatttttataaaattcaaaaaaatttaacatactaaacacataatttaaattatttatacagatgacttttttattttaagaggtgtattgtaaaatcatctatataaaattactaaagtaaagtgcatttataagttttaaataaagcttcccttttatatactctttttactaaaatacccctaagaaaagctcataattaccatccaaccaactaagatagcttaatttataatcatacaaactatattctcgcccaaacttttagctaatattccttaattaaaaaaataaataaataaaaaaaatcatattttccattttcattttattttacttttctcaactctgctttttattaaattcaattatcaaactgaaaattcaagatccgagacgaatcgaagaagaagatgaagttgaatctgatgaacaagtgtttttcatcataatctagccatgaatttcaccaaaaagctttctaatctcgaccgtcgtaactttctaattctaattccaccactttccattctcatcttcatctccatctcttttttttcaccatcaacaaatccattctcctctttcgctccaattcgatccttccttctcggtcgctcaaactcaatcctaaacaacaatgtctcttccaccgccaacgcaacaatctttctaccgatgcgaaacgaaacggttgagattcggcggcgaagcaggactaggaatgaaaaaagatgagttgcttagatcgagaatagcggtttgttagtcggcggcgctagaagattcgagc

SEQ ID NO: 198899 - DNA, 1331 bp, Cannabis indica
atttaataattgtaaaaaagataacatgaaaaagtaaaacacaacattaaatatacttgcctgaaatacaaaccgacacgaacaaagcacggtacaaatccaagtaaggtacgaaaataccaaacttacgggccttgttggtccaaccctttaaaaatagacacaatacggcacgacccatacttttctgacacgacacgttctattttttaaaaaaaccaaacaaaatgtttgtacactatccaattcaatctacacattctttaaatacaaaactaattaaaatttccatgtacgacattctctaatttgataactaaattagtttcagagagttagacaataggcaattaaattagtgttgattaactttcgtggattttcttgaccaggctgaactcaatgccagatttaacactaaaattaaaaacccatttctttttttttttcttttttacgaaaacatagcctttttttttttcgcagattgattattgcaatttgcaagtaatgtacttctgtaagtctcccttaaaaatttaaaactgaaaaagttaaggcttgaaaaaaacaaggaacttgataaatgcgaccagtgacaacagattctagttctctcctggcaacataaacaataataaaccaaaatacaaaacatcagattaactcatcaatctgccattgttgccgcactctcaaatctcaagtgactttattgaaatagttgaggcactcctcataccctaaatttgttttgcacaagcatttcttttacctcaaaaggagccaccagttaggaaaaccaacattcttagataaagtttctgatgtccaaagacttgggttcaattacgtcctcatccttgaattcctccctgcaatatggtcaaaaaaaataataataaaaaaacccatgagttccatattagaatttgtattgtagtcagcccaaacaaacgatcactatctactgtgtcccattgtctatcaaattttccttgctataaatgagaaaaaaaaagaagtccatgacaaattaccgcttcttttgagtatccattgcctcgtagcattctttgtgcagctcctccaattgtgctttcgcaattttgagttccaactgttcttcatattttggaagatcttccttccgaattccaagtcttacaatacaagggtatagaaagttagaaatagtgtaacttaaacaatgcaagcaaccactataattagcagattttattttcaaatgcctacgagaataactaaactactcagtgacatacaggtagtgaagggatgtaacaagtattcatcaggtagatcatgtc

SEQ ID NO: 198900 - DNA, 1857 bp, Cannabis indica
aagcatagtagagttgatagtaaagatgataacaatgatgttgatgtggttggtgacaaggggggtgctgtgttttggatgttggtgagcaaaaatgtgagggtgttgtagcaagtgatggtgacaagtctaaggacgttggcaatgtcaagggcaaacaagtttatttatagggggtgattttttaaaggtttaagccaacttgagattgatgatgatcacgttgttttggctagtttggagcctgttgaaaaaataaaggtacagttctcattgaattttttaatttttgagattgtggtactgagtagttatttcatagttgcttatatgtttaattcaagttgtaaaactattagattgaaaactttttatctttccttttcttcaggttcccgcttccttcctgatgaggaagttgagaaaatagatgtcaatatttctaaagaagaagatgacacacattccagtactccttttcttgacaagaaaaagcatgccctgacattaaaatctccttttgttgattttagtttgtctgatttgaagacccttctattggagtttatgtctttaggttctcaatctgcaggagatgagtgagatttcaagattgttacatatattaagggcctttatgctattgataattttttttctgatcatatttctcttaagcttgaggggaagtttgacgaatggattagcaaatgattgtttaaatatcctaggtgatgttttgttaattctatttatgcattcttttgtttttaatttatttatgttattattaaattaagttttgttcatattcgtttttttttttgcttttaggccctttaatgtctatgacgatggtgcccaaaaaatctatcctagtattagattgggtgtggactatgtgaaagataaaacttaattttatcatatttcttactgtgacattttttataaatgactcggtaatttctttaaatctatttgtacgttttttattttttatatagttgtttgttgattatctttcaattttgcatttgttttgatgatcttggaatgtgttcatgttctaactgttttttcttttgtttctttaatttgtgttgtttcggcatatgaatactattttgtattatcttaaaaagaaagaaaagtattattctactgtaactaaggattttgctacaatatactgcctttttgatgattctatgaagtctctttaccaaaaattttataaggcaaagtcattaaaaagcaagatgtctcatattcatattgctcacccaataacctattatatcaaaactttgagaatttcttgttcaaagccttggtatgaagtcgaacatatttttttaataaagccattggatatttagctatcttgaacttataatgaacttataatgaacttttttaaatatattgtatttctcatacaacttaaaaaatattattcaacttttaagaaatcaacatgttaattgcaatgtatttttaacttagcacacaattatttagcaactgtactgcaaccttaaaaaaactatttcagtattagaaattaatagaaatctactaaaagtaaatttttatgatgtaagagttcatatagaaatttaaagaattcaaataaatatcctttctctatttaattgcttggtcgtggcatgtctttcggttgtgacctttttgaccatacacctattatatttttgtttcccattcacctataaactttcttttccttggtcttccgaatctcactttttgctttggtggcagaaaatgacatctttgatgtttaatttgaggtacattccatgttgtgtgattgtgtacaagatatattga

SEQ ID NO: 198901 - DNA, 1321 bp, Cannabis indica
tgagtgttgtaccacatgcactgtgtactcgtcacgtattagtgttagtagtaatactgcgtcgtaccctttaaacatcatatactgtaccaaggtactccgtaccgccaccgtaatggtgttggtggtatgtgaatcacataacatagaatttaatttacatacatgcacatatacatatacgtatacatattttatactaatcttacctcatttcttgattcaggtgtgttagtcagcctgaataaaaattcatgtgctaaatggaagccctatgccacaatcatgtaaatcaggtaaacaacatgctaaaaaattttcggagacctaaactctaaactagaagttttcctattgataaatagcatgacaaaactctaaatattgaggaaaaatcaaaattgtcaggaaaagtagtaggccgttttggaaaaatagcataccattttttgggcaatataccagtaaaaatagtagaccgtttccacagaaacaacctgccgttttttactgcagaaaaaaaaaatctcctttctaactcaaaataaccccaaacttgaaatcaagctctagagtacctaattaagcatcaacaaacacattccaagtggtagaacctcaaaatactcataaatacaaaaactaccattgcatgagccaagtttgagttcttaaactcagacttgctcaacaactgaactaatcaatataaccaactcaaataatcaacaatcaacttaaaaccaacccagaaaacaactcttaatccctagggttcgaacagaaccagtttccctaaatttgcatgtttgaacttagccaaaactttcaaaaacaaaagaaagagtttttaaagcttacctttgatctacacccttggaatatggatagaattggtcaagaattgatgaagaaactttggattcttctaattctgcctcagccaaaggaattgggagggagagcataggtgactttggtttttcttgatttttctttaatgtttatcaactaaaaaaaataaactataatcacataatataatccctaataatcacctagaaaaaggacaaaaaaatgctctccattctcactaaaaacaaaggcaacacttaggtgaaattcctattttatccattttcttcaagcttaagtaatttataggtctagaggtaaaatggtcaaataccataagcccgcttaaattcgatattctaaatattacttattattgttccgctgaataattttttttaaactgacccatatgactctaacaaccatttgtcgtattttccaatgtgatgcgtgtcgtaagcca

SEQ ID NO: 198902 - DNA, 840 bp, Cannabis indica
agacaaaaatctttaaatctaatgatctcaatagtccagggaaaatttttaacggccaaaaaagttcaaggggcatgatttagtatatgttaaagtttggggggaaaaaaattctaattacccttttttgaaatcttagttaaggagttattttagcccttctattaggaatgctagcaccttaaaattcctaatggcgtacagatgcgacacgttgtgagttgttagcaattttttatattatttattaaattaaaatgtgtaggcctaatattatattgcactaaaaacggtataccacctcttgtaatgcttgacacctttaatatttttcattcttataagtatagaagtggagaatattatatgtcttttctattctttttttttttttttttttttttcagttatagaaggaaagaaccaacaatgcatttttctggaatagttggaagacttgtcccatttgggtttaaccccttactattaatgatgatgtttatttatgtctctctcaatgtattaagttaatatattgaagacttggggtttttaatttttatgatttttcttcttcttttgacttttcatatcaaatcacttaatagggcttcttcacactttataagggttacaaccaactttctgactttgcaatttgcatacataaatggtacagcaatattagtatatttgataatatatatataacaacattgatcttttagcatagtgaattatgcaggtgtgcagatgctatgcatatatttaatgtttgtacccccatatatgaataaaagtgttatgaaaatggttttttctttaagtaggtgtatgagg

SEQ ID NO: 198903 - DNA, 630 bp, Cannabis indica
ggttgacacatatacacatcttcttctagcttgccattcaagaaggcattattgatatccagttgcttaattttccagctttttgtgacagcaatggtgagaataactctgactattgaagctttaacaactggactaaatgtttcaccatagtctagacctgccctttgatgaaaacctttggcaaccaaacgagccttgaacctttgatgtgttccatcagcattcatcttttctctgtagacccacttgcacccaactaaattgtaatccttggaccagggaaccagagtccaagttttgtttcttttcaaggcaataacttcatcattcatggccatattccagcctttgtgctgaagagcttcagcaacagtactgggttcagtgcagatgggattccacttggcttgactgatgtaggtttttggtttgtagattcctgcttttgctcttgtaatcataggatgtgaagtaaccaggtgagaaggtggaacatttgatgtctgatctgcaacagtttgtgcatcagcactgtttctgtctgctgcaacattctgcagagtaattcctggttcctgaggcaaattgcaatctacacttcctgatatctcagtgatgatttcaggt

SEQ ID NO: 198904 - DNA, 913 bp, Cannabis indica
gaagcttgaggctccaagcccaaaggagataataactgttacaccatgaaacccaacctatgtgtacgaataaggaaaaaattgggttttacaagctggagaagtatctagaggtgcatttccctacaagattcacattgtgttctcctaaccttcgggagtattggttttcctctatagatttcccaatgaagagggtgccaaacctttcctcgaacttaaaataccaagtatagacttctttacacttttctctatttggcactcttttccttttcaaacttgtaattgatgagatattttttttactcgtggcagctcctatgcctcggactccggagagtgagaagttgtagaaaaaattggctctatacaactccatcttaggccaagaaccgaaggtggaaggctttgtcaccaccaaactgctccgctaacatggactcatagccaagttccaaagcatcgataatgttagcagttgaggccttggttatgtctccctagaggctaaggaaaatattgtcgttgaggtctccaaaatcatgaagaaagcccttaaatatgatgaacatgtgatggaagattgggcaccttgtcatcccaaccccatgagggaagaagaggagcgcgtggagaggttcgcaactacatacccagacaagggtgctcctggagctagcacctctgaaagagttaaaggcctttatgcatctttcatacccctaacatctctaggattgaagaaatcatcaatagtccaagtaatctcgggttatctctagaaaaagttatagtagatcctttcttgtccatgtctttcctagacttcaaagagtatggaggattcatgggttgggaagacataattttatttgctcagggaaagtcgtatagtagctcacttaatggt

SEQ ID NO: 198905 - DNA, 1005 bp, Cannabis indica
aaaaaggacccacaatataagatactgatgctataataattatatttgcgtttacgttatgtaattcatctgcgaaaaaggacatataatggatgagtcttaatccccttatttaattatatctatatataacttattgggtgttatcgagaaatattctcctaatatttaataataataatgatcacaattcacaattcagaaagaaatgaaaggagtactttttgcgttctgtttctttgtttctatctttcttatcagtcactcacgcactcacaggtacgtccgaattgtaatatcgtgcggcgctaaataagagtcttgtttacgctcgttgagtctcgccactctccaaccaataagaatcgagtcaggtcaatctcacaccaatttatgagttgacttttagatcgtagagtactcccacgggcttctccatgcaccacacgtctagcgtaatatatatttattataattatatttatatatttaacagcaaacgactttgaattgattcactactcactctttctctctctctcaaactctaaggaatgtaggaaaataaaataacaccattcccaacaatgaccagctagctaactctctctctaaaaatgttgtttgtatcgatcaatgttgagaagtgtcattctgtgtttctttgcccctcgttctctcccttttctttggttggtagtgtttggttgtgaagaaaatgaggctgttcggtttgtgagaagtgggtaattgagaaagaaaatttgggcggagaggtgaaaggaagacagcaacagaagaggaagaagaggtagaaaaaagaaatgttgagattacataggcacaggcagccacctaaatcagggactaaaattgactttaaattctccagtttcaaggcccttcaggtattcgctattcctttcttgaaagtgaaagtatttataataagtttgggtgtattatatgaatgagatgttacactttatttagatgagatgtttt

SEQ ID NO: 198906 - DNA, 2302 bp, Cannabis indica
tttagttatgttgactaagagattgtattctgaataacaagtgttgttatgtttactgtaacattttctgtacttaaagaaaagaaagaaaatcacagtgaactgagagtaaattaatgtaggtatttagtttttggggtctttttattttatacttttaaaatagtttttctttttacatttttacaaaattatacatagaaaattctattgtaactgatgcaacctaaattgcaacaaaaatttcgtataaaaactcttattgcaactagggcaaccaacccaaatcgtaaaatttaaaaaataaataaataaataaacagtatagggaataattaccctttatcataataataatataattggtaatttatattttaactttttttattctctctactccctccaattacataagttatatcactcaaattgttttaagctcaatctatttggcaaccaagctcacgaaatcaaataactaaaaccaaatttcctagttaaattcactttgaaacattaaaaaaaaaagcatatatttaaaataaatgacaaattagtattttgtattcgaattatataagtatatatatatcatcaaaattcccaaataataacataggtgcaaaattatatatttcaaataaaagtaaaaagaaatacatataataaaaacgtgaaaaatttttgtaccatccatccatgtatatacagtactaaaaataactgaaaacactaactcaaagtttgtattatttgattacaaaaacctatacatttatgaaacagttagagtttgttgattagttattgacgtgtcaaattgaccaaaattaacaagtacaagttgatagagtttgttagcctgttttttcttagttggaattagtttaaactaattatatttatattataagccctccttgttttcattatttttcataaaattttcagtttcagtttcacccatatatataaatatatatatgtcaccattgccacggtatccaattggtttcgggaataattgttggataaattataataaacatgccttataatttattaaatataaaactagttactaagccatgccctgctatttttttgtttctttgaaccaaattttatacctttcaaaagaaaaaaaaaattataacaagatcagttgcatggaagaccaaaaatgttgctttatcaattttataattctgtatgtttaaatatgccaatgattaaaaaaataataagagttaaattgtgttcatgttttctttttattaaaaagtctgagttcatcaagttattctttaaatatttatcaaaagaaaaaagttattctttatatttatattaaagaattcgattctgataatcattttttagttagttttgactcagggttatatttttgatgtgagctactgaaatttgattagccaaataaaactgtggtaaaaatgttagattcagcaacaaaatatatataaattattcttaaaaatatatatgtgcatatttttttggtaattctggagttaagagtattctaataaatttaaatttatactagatcttagaattaagtctggcttaattaaatactgtagatgagtatctaaactctaatgtttaataatatatagtagaaaaaattagagtttctagttcttaaatttatagctatcgaaagttttctttcttttctaaccacccgccaactttctttagataggtgtgacttgattgaggttgtatttcgttattgtaattcgatttttgttactggtgatatagttttgagtgatttagtcttgtctctgtgacatagttatgaatattttagtattgttagtgtgatatcgttttattttattttatttcattgttggttcttatttgttattcgatagcttgtcatcaaatcgttgtatgtagttgggaataacaagttgaagtggttattatgtaccttacataattttgagtgttcaagttatgaggttgaatgaacctcctacaacagtcctattgttttgtattttgagcggtggatgaaagatgttcttaaggttaattgtaatactacaatctcttacatttgattttattttaattttttttatcgaataatttgggaaataagtagctgattatttgagtcgttattttttagttgattaccattaataaaatttcataatttattaaatatatatgtgcattatatataaagtaaattaaagcaactcaaaatatatatcagtgatattcggtaatactttttttatttatttttttt

SEQ ID NO: 198907 - DNA, 959 bp, Cannabis indica
taaaataaatagaaaaataaattaagataaaaatatattatatgactatgaactgtaaacgcaaatttttatgaaatatatatgttggcatgcaatacactaactactatgaaattaaataatttatttataaatacaatattgtcaatatgtgtaccacttgttttctaacgaatatattaatgtctaaaacttgtttctcaattttcagcactagcttgtcttatctagagccaccattattcgaagacttagtaaccacttggcttgtaaatatggtaaacacaagaaactagaacgtgtactctctttcttcagaaaaaaaaaaaaaaaggaaaaataacatattccgtctttcttgaaaaaataaacagcatatgatactctacgtctataatttcaaaatattctcccactttttttttcttttttgaagtgtaatattctcccacttaaagaaattaagttattttttttgaaagctagataaataaataaagttatatggaatatggtaatgaatttggtggaaacaagaaaaattattcctataatttatccccacaaaataatgcttatgttgaaaatacattagtatttataacgtgaaaggacggaaataaaataccccatccattgcatttcgtacacttttttttcttgaaaataaatttcgtacacttaaaatgactttttttcaaaaaacaaaacaagcatattaatggtcgaatttacaatctaaattttaattactaaatacatttataaattttaaaattacacaaatataattttctcagcaaaaataaaaaacaactaaaaaataataaaaataaatactcaagtcaactataaatcaattataaataaactataacaagcaaaataacaagaaaaaactaatctcatgacaactatagtacaactataaataaattaatatttttattaaaaattaa

SEQ ID NO: 198908 - DNA, 479 bp, Cannabis indica
tttttcttttttcttttttttttttttttttgttcgtgtttaccttttatattactctaagcaactcaactaatttttaagttcctagtacatataaatctaataattacaagttgatcatgaatattctaagagaaatgataaaggggactttatgtgtcaaccacaacaagtggtatattattattgatgcaaatgagtttgatacaatttaatttaataaataatataataaattgttaatcaattataaagccctatcaccaagttgttaggcataatattttaataatatatatatactacatatattaagttttattattgggagaaatattcagatatatcctgtaatctttgtagagagagagtagtgtagtggcaatcgttgctaatggaaatgatgtcgatagtcactctttttatatatttatatatatatatatgctcttctcaattaattcatatatatatattat

SEQ ID NO: 198909 - DNA, 642 bp, Cannabis indica
taggtttgtagatccggttgtttatggccatggatatatattagcttaatggagttattggtcttccatgaagagagcacttgaaatgagatgaagcaccaatataggaaggattgaattgaattagtctttggatttttttaaattagaaaaaaataaataaagttaaacaatttattttttcatttatttatgtctagaatagaaccaagataagccaatttacaaagagatcctaatgtttaaactaataagacatataataataataaaaaaataataataataataatgcatggtaagccaagcactcatattagttccttcaaaataaactttcctttaaagtagagaagatattggttaaaaataacatacatcatgtaaattatatatttttttaaagcaatgaataatacttctccacgtatagagaaacactgtttattattttatatattttaatgatgtaaaaaaatagaaaaattgacgtatgatataatgtaaaaatttaaggtaaaataaaaaaaaattattaatatattttaaaaaataaaataaagaagctaatgtgagtgctactaacttttataatctttcaatctttttttagtttgcccactactaagagcttaaattctt

SEQ ID NO: 198910 - DNA, 2229 bp, Cannabis indica
atttgaatcctttcttgtattttagatcttgcgataataacatttttttcttgatttaactataaacattaaaatattttaatgatatgaatataatttgaaggcaagcaattataaattaactaatataataaacactcacaatatcttgctctgaagcaccactcagatttttatttttaatttgattaatgcatcttctgaattttaaaactacagcaaaaattgttgtcattcgactctgcaaagatcttctaggtctacgttaggtaataaacatttcaggtaagtggtactcagcttccactcttgcccaaaactaatctttgaaatggtttattcctataattggattataagaaatgtcaagatatacacgacataactgtacaccttcttcaagtgagcatgacaaagttctagttgaagacattttggagataaattagaagaagagagagaaatatactgaagatgtgtattcattcaaagagtaatatgctcttatatataggtgtaaaatagcttgataatatcatatttcttatctttaaattcttgggaagactaaaagtttggatatgatttgattatactattcaatggtttagatcatggtcaaattcatctattggcccagatttatttgacatgtatcttatcttcaaattttagaaagagtaaaagcttagatataatttaactatactatccaattgttgagatgattaataaataaattcagtggcccaaatttattcgtcaaatatccttacttaaaattttgggaagagtaaaattttgaatatgatttgattataccattcaatggttgaaatgatgatcaaacaaatccagtgacctaaatttatttgtcaagtatctttacttaaaattttagaaatgatttgactatacaatccaatggttgagattgtgatcaaataaatctagtggcccaaatttattcatcaagtatctttacttaaaatttagggaagagtaaaattttagatatgatttgactatatcatccaatagttgagatgatgatcaaataaatccagtgacccatatttatttgtcaagtatatctttacttaaaattttaggaagagtaaaagcttagatatgatttgaatataccatctaatggttgagatgctgattaaataaattcagtgtcccaaatttattcgtcaagtatctttactttaaattttagaaagagtaaaaatttagatatgatttgactataccatccaatgattaaaatcgtggtccaatcatcgaaaattaaggatgcaattacagtaggcaaaaagtgactactaaaaatacgaccagcctcaacaagagaagatcgcgacaaatgtgatattaacatatatatataatataaagtataataaaatattaatatagatggaatgccattaaatgaaaagaagtactatacatatattatatggtgaaagaagtattgtatagataaaaccccccttaggaacaaagttaaaaagttatttatatcctttaattcatcatataaataggatagatcaaacttgaaattgttaagtttgtctagcataatacaagaatctaattcactatgaataatagggatgaaaataatagaatatactacttaataacatgaagaatgcaagtgcctcattgtagcagattttaccaaaccagccatctttttacaaaaacctgtaatgacaactcccatctcttataacaccagccaatccaattatagcattttgtgagtcaattgttacatcagtatttagtttaagaccaccaataagtggcggtttccatttaacatttcatcattttttgtttttgattattccaaatgccatacctttggtttgcctctttgaactcctgaaaataagatataatgtagctaaacacattttcaggcagaaggatagctttgccaagcatagtattattcatgaagttccatatagcccaaagcaaaccacacaatagttcgaagttttctttacccaattgctcaaaggccttgatattactaaggaaaaactgatacaaagaagagtgtttccaggttttccttactctggaacaatcgaacaaagcatggaaaacagtttctacttagttgtggcatctaaaacaaatgggactgtcaataactttcctgcaatatagtttattggcaacaagaagagcatagtgata

SEQ ID NO: 198911 - DNA, 530 bp, Cannabis indica
atatttttttgggcctctagtttaggtggattctaaacacaagtttagtccgcctatgtttaaggtcgagtccacattatttcagagtgattttttatttttttttatttttcatgatattataaaacattgtcccacatggatcaaatgtaaaagtattgagctatatataaagaacatgtgctacttaactcatttgcctattggttttaagatggaacccataattttcaatacatgaaattagataaaaaaaagtcatgcatctttctatatatccctctaaaccttcgattttactatttttttttgtgctagatcatatatattataatgaattattttttaatttaaaagaaactttttattactagttatttttaagacgctatttcaagatgtgaataggatgttcctttattaaagatgatatttataagagaaatgctaattacaatctcttattacaaccttttagtcaatctccacgtctgaaattacacgccgatatattattttttaaatttttt

SEQ ID NO: 198912 - DNA, 553 bp, Cannabis indica
gtgacttggaacttgggagtccgagtgcccccacccccactattatctgactctgaccccaaaagcaataatcatctgcagtagaattcattggtgtagcttagatccgattgtgatcatttctcttaagggtaatttggtcgtttctcacctcctgctcacctaacttagtagcaggaaagtaaatctggaccgttagttgctaaaaacattaatagagtctgatgtgtcaacggttcagattagtcaactatttatagagcttatgcatatctggagactggagtagtgtattgttgcttacggaatatttggtggaatcttctacccgatataacaggctactagataacgacattcgttttttttttttttcttttgaaacggaacgacatcgtttttatgttggatgataccaagtttaaacccgaagtaacaaaaaagaaatgttttttaagtttaaaataaaggaaaattatataatgcatcatcttcaaagggataccttgatatatttttatctattttagtatcaaaaattaattttttagtc

SEQ ID NO: 198913 - DNA, 662 bp, Cannabis indica
tttttttttttaaattaaccaacttagaaataaatataaaaaatataaacaattttattataatacccttagattagattattaattttattttaacaaaaaaaaacagttaagagtcttatttttaccattggattatacaagatctattttattatttaacaaaataaggagtccaatcgataatttttacaaaagacaaagtctaaaatgatatttacccaataaaaaaaataaacacgtgtttacctccgactaattatctcatgaaaaaaaaaaactatatataaaaatatatatgttattagattaaataagtttataatcgtaacaatttcagtgcagaataaaatggttgttacataaactaaaataaaattgtgtattttcaattttaacatgatttcgatctaaaattagaatgaatattcagatttctatgatctgaactcattaaatggaattactgaatttggataatgataacctatatttatattggtgaaatcataacatgaatattttaaaattaataagaaaatataattaatttcagaaaaaatgggcaagtaaaataataataattacaatattttgttaattaatttaaatatcaactgtttttttgaataatttaaatatcaactttatatacaaataat

SEQ ID NO: 198914 - DNA, 1236 bp, Cannabis indica
gagagagagatagagagagaattcaacaaagagaggagcctctctttttagttatctaactgaatagtctaatgaagagttgtccagttatgagcctctcattatctatttataggattttatctagggttagggtttaaattataaagaatgaaaaaagataaaataatggccaaaatttcctttcagtggtcggccatgtagtggacccactagtttcaattttaccatttaatttaacaacttatcttttctttcacaaatatcatattttatttttaatcatataaatgtcagatctatgtatttaataattataattaattattaaataaaattggcaccaaggagggagaattgttatagcatggaacccaattcgttttattgttgacattatcaaatgtacgagtcaacttgtgcatttaaaactttcaacaattgatggaagctatagcagttttttgacagtagtatatggatttaatgacagtaaggggaggttagaattatggaaggatccgtcttctctaaaaacaaaagataatcggttgattatgggagactttattgccattatttccaaggaagaaagagttgctcatagagtgaaatatcaagctaaagctaagtttattgaatgtctacaacactgccagctggaagatatcaaggcctctgggtgtttctacacttggactaataagaaagatggtcaggatagaatctattcgaaaattaatagagttttagccaagcaaaattggtttgataactaccctaatgcagaagctttgtttctaaatgaggggaattttgaccacacgccagggatcttgtctgtttttcccatatggaattgttggaaatagcctttcaagtactttcgtatgtggaaaacacatcctgagtatgatgagagggttgctaaagtatggaggaaggacataagaggcaccaacatgtaccacatagtttctaaactaaaggccttaaaacctatcatgagacagatcaatcaacatggtttttctgatctgcaagttgcttcaatacaggccaaaaataagctagatgaaatccagggaaagctacaaggagaacccctaaatgctacgctacatgagcaagagcttgctgctaggactgagttcttaacaacacagcaaaactaccagtcctttctgcaacaaaaggccaaaatcagctggattcaagatggcgacagtaacactt

SEQ ID NO: 198915 - DNA, 653 bp, Cannabis indica
ttaatttatataaatgagtatagcttaaggttaaagaatattttatttctttatatatacataaattgctaatgtttattcaattataattaagtttaatggataaaacaacacaaattttactattaggaaattacaaaatttaattaataaatagaaaaacgtaaaagaatagacctaaaatgtatagagaaacttattaaggtaacattttatatatatatatacactatttcttttattttatcttttttctttctgtacctttcataaattgtaataacatgtcgaataaaatcttaataaatttgtaaaaaaaaaaaaaatggcaataaagcatcatctctaatctctaatagacttaaattagtaatgagacttttttttttaaaaaaaaatgtcccaatatgagtgaggttgtatttgagattttaaattactatgtataatttgagtcaattatgttttatagtatgataaaaatatgtataagtatttttcactactttgattccatcttatattattactttttttttttttttttgcaaattctttaaatatgtgaaattttcaattgttataaaaaatgggggagtattattttctagtttaaaaataatgtaattacataataatttcttttttacttc

SEQ ID NO: 198916 - DNA, 1252 bp, Cannabis indica
tttaaaaaaataattttgaaagaaaattattattaatatttatagataaaatttaaaaagttaaacaattaaaaatacaataaataaatacattagagcgatgagctatagtaccgtattatttctctactctaaacatagtttaataaattaattaaatttaaatatttaaaattatatttttttaaaaaaataattaattaattaatttaacaatgttagtttatgatttgcagtgacttatagcacgaaacgatggtgtagagtgcgaacaaaaatttaagtgagcgtaactttttaaggtaaataaaacaggaattcctcatagcataaaaataacatgaacatataactaccagcatcgtttgactattagcttggtataaaaactgatagcagtcacgcacgaagacattaattaaagagggcccccactttcccatctaaatgctagatatatttatttaagagactcactattaatgatcaattggctcaatcataacatctgtcttatatgtgagttccaattattcaacctaagacgtaagtaaaataatttatgagaagagtgttgctgatcatggctgcagaagatgtggaccagtcaaggctttcactacttagaagtagtgatcccaactacaatgatgatgatactaagatttcggatttgtcctcggaacaagtggaggaggttctgggaaagaagcctcttccattgagatggtggtttcggcttgttgcttgggagacaagactgctgtggctactctccggagctaccattgctgtctccgagttcaattacatgctcacctttgttaccctcattttctgtggccacctcaacgctttggagctcgctggggcctccatttccagcgttggaattcaaggtcttgcttatggaataatggtatgcatcaaaatactcacgctaacttaatattacttttaatttccaaaactttaaactattgattgccaaaacaggaaactatatatcgaatcttccatgtatagtaatagtactctacattaaatgctttgttaagccagtttgcaataggtaaatgaaacaacaaatatgtttttttttttgtcaaattaaaattatgattaatagttttgctcattgttttacttttcttaattttgataaaaatacaataaacattgttacaaatgttctctccttgtattttttttttcactaaactatctcaactatcattttacttgtacttaa

SEQ ID NO: 198917 - DNA, 1528 bp, Cannabis indica
ggcaattggttccactgcatactcatctacatcacttatagcacctcggacccggcgctctttcttttcatagaccacaggattggcattgatcaaacccgaaaccattcttcactaaaaaggaaaagagagaacgagggaaaatatttagaaactatgtaaaattacttagaaactaatttttgaagaaggaaaaaaaaaaaccctgaaaagtataagcagaacataaattaaattaaagcatagaagatcatcctaaggtcctgatatgtaaagcaatctattcatcaatatccaatactatagcaccaactagttacataataggaatgaaagtaaaggattacccgcattcacaatgacaaatgatgcaaatgcctaagctctatagtcaaactttgtatattccttggacaccaaaaaaaaatcagtatccgaatttaattatctattttctttaatcctgtttcgcaaatatagaataggttttcagttacaattgccaaaagcaaaactatttaaacaaggaagaatcaatgatggatattccaaattagccatttttcagttactacagctaacagtagtactcctaaactaatattagaaacaacaccctctgatcaagcaaatgaaaatatttgggcataaattaaataagtaaataatcatgttacatggattaaaaaagaaattctatatatatttccaattcatcttcttgaaatctgctatccgaaaagaacagctacaggaatatcaaatacttccttttatgtccaagaccatcttattcatcttttaatagttagttccttgggttaaatgtgttaggtagcatccgagctcgtagacaatttctctttttcaaattatcttgcaatgaattggtaaaaccatttcatcattctcattgcgtacatacaaaaaactatgaagtggctgtgctggtgaatcaacatgatgaattaatcaaataatgcagtatcttcaaaggtgacatttttctcttatcacagttaaacacttccaagttgtgtttatcagcttcctctatcatgggaattaatgattatctatgcctaaaactcgtggtggaaaaaagtttgttctgaaagtttttcaaattcaaagagaattagaaacctccgatcacatataaccgatgttaaatcccaaaacaaaaaaaagttcaagagaacaaaaggtaaaccgccaagtaatagtagtaattcagtcaaggcatgacatacaataaaatataaatataaaccctaatttcagccccaaaacagaatacataaactcagtaaataaaatccgtaacaaaatacaagaaattagaactactcatcattccatggttgaatcaattataaaatcaaagaacaataaccttgaaagagatggatggatggatggatggagcagtcgacgacgatcggcagacgcggctgaaagcaaaaaccaacatagtaaagcaataccattacatttagctgcgattcaaagcaaaaatggaaaaatc

SEQ ID NO: 198918 - DNA, 901 bp, Cannabis indica
attggtccatttttagatggtagctcaagaataaagacaaggatacaccctcaaaacactaataagatcaattagaaaaagttcaaaacttcatttaatggataaatctaagaaaaaaaattcattacaacgccgtggataagcaaaggagtatttttattagatatcagtagtatctagcactttctcgacatgttgtattgtgattggctagtgatacttcctaaaagctactatattaaattatatggaacccgatattagttagaccaatagcgatattgatacataagaggatgctaggcaccactagtaccttttaacgtttctctaagtaaaaataaattattcctgataaaggagaacaaacggcaatgaggccaatagactgacatatcgaagcacacatgcatttagtcaaagttgtttttcatttatttatttaagcgtttatacattacacaatgcataacttgggactcgaacccataacctccaacacacacgcaccaccacttgagcaagcctcaagtggttgtcaaagttattaataagtaccataccattgtagatggtaggtaaataataaagacaagaatacacccttgaagctctaataagatcgattcgagaactggaacaaacaaactaacgcaagaaataaaaaaaaaacactggccaaaataaaaatagatctgagccacaagcttcacttttctgagaccggaggtgtaacgtcctattaagaggaacgccacgtgtcgtgattacaacatactaaccttgttaattagggtcgataagccaagtgatttaaaataaatattaaacttgattaaaataaataatttgtaacaaacataatttacttaaaactaaaattattttaagttacatattc

SEQ ID NO: 198919 - DNA, 934 bp, Cannabis indica
ttttgctttaaagtttctttaaaatttacatttataaaatactattgattactctaaacatattatattaattattttaagttttattaattatttttgtatgagaatatatgtatatattaatattatatatttgaaatgaataaaatatgataaattttttttgaaaaaattgagtttttgtgtattttaaaaaagttgatgtatagtataatatacaagtgtgctggaaaatgaaaaaaatagatttttggtgataaattttaaaaatagtccaaagaaactattgagagtgctggtactaatgtaattaatgtaattattaatttttaaaattttattttttatgtacttctgatatataatgtttttgttgattttattttacacttttttatcaacaaatattaattttaccactaatgcattgaatcactataataaaatttgggccaaatatgatattaatcctttctttttagctaaatttagctcaaattatatacagagatggtataaattgtgtagatgtatttatttctttaattattttaaatgttaaaataatagttgtatactgtaaacaaaaaaaaaaaattaattggcccctcctctaattcatccctagttttgccattgcgataaggtacgagaagcacaaaagatatgacacgtaagtacgaatagacttgctcaaaaattatggtacacgacaagtaaaactaaaacactaaatattataagtatataatttaaattattaaaaaatgtaaaactaaaactatatatttatttatttataaagtaatgtaaatttaagaatttataagttaataattaaattctaatagtaattattttttatattactattaaaatattattgaaactataaattatacatatagttcaataattaacttattaattataa

SEQ ID NO: 198920 - DNA, 936 bp, Cannabis indica
cactctaggaaagttggacactagaagagaaatattagctaatagacaatgaaattcagaggtggaagcatagggaggattgtaatcctttgaccactaaaagagaatcagtctctataaagtgagttggtaaacaaagatttttaagccattgcaaacaatacataagagccatagcttccataatttctggtttaaaggtgcctgggaaaggcatcgacatagcagcgataatattgccactgctgttacgaagaatcgcaccaaaaccaaaaaagattgttcttgttgttaactggaacgtcgtgttcaatttcaatctacccgatggtggattcatccatggtgtctctttgttaacaacatgatcaaaggtagagaaattttcatgtttaatataaaaaattttgttaaatcaactgtttttccatataatttttatactgagaaattgattttttttttattattattatttctgctcctttttttcatatatttttcttacttattttttttttctccactaaaatttaacttccaaataaaggattaggcacgacaaaattgtaatttattacaaatgttggttgagtaaaaatatcgaatgtttagatcaaatttttttctttaccttatatataatatacattttatacatatgtattggttaatttttatgaaatcatgtcattgaaaaaaataagaatattaatattcaccatttttaatgaatatatgtggatatttttaattaatagtaattagtattattggtgatcattgtatattgttaaaaagaaaaaggaataatataatatttgatctggccacgatcaaacaaataatattattaaaggtcaaaatgaagtgtaaaataaataatgtacattttttagaatattattaattgatatttggaggatccaaaaaaaa

SEQ ID NO: 198921 - DNA, 832 bp, Cannabis indica
cttggccctgtctaagggcaaaaaagagaacaagcccagtaaggggcaatgaagtctagctgaagtctagcattggacctgtagaagagttggaagaaattgaagtgaatcccagttttctaacaagaagactgcagattgaaaaaggcttggctctagaaataaaataaatttttgtagaatttcagagggcaaacctggaacttttcacatggtcacatggagacatggtcagaatcgacccctttgtgatgacccatgaactcaacattgatccaagaatctgtcctgtttagcaaaaaaggcagttactggaaaggagtaggcccaaccgctcaaagatgaggtcgaaaagctgagagctaatgacttcataacagaggcattctacccttagtgggtatccaacccagtaccggtgcctaaacccaacaagaatttaagagtattcattgacttcatcaacctaaaaagacatctttccactccccagaatcaaccatcttttagatgccataattggcatgaaataatgagtttcatggacacgtatttaggttacaatcagataaagttgcatccaccaaattaggatcacactagcttcattacagacataggcctatactgctacaaagtcatgccctttgggctaaaaaatgtaggggccacatatcaatggctggtgaacatgatgttcacagatctcatcggccgcaacatggaggtgtatgtggacgacatgcttgtcaatgtagtgcttaaaaatcctttacaattaaaaatgaagttcaacccctcaaattctcttcttattggaattattttacca

SEQ ID NO: 198922 - DNA, 1378 bp, Cannabis indica
tttaacagataagtatttcaaatttttatgtccttatatttaagatggattgatttatcattgttctctcacatgatctcttttcattatattgtgtggtaatagaatttatttttgtttattttgtaggtttttttgtggagggtctacaattacagggaatttactcataactttaattttaaatataatttgattgattttgattttaagcagtatatattagggtactagtatgttgttactagccaaagggtaatacatttggctaattattcttagaaatttgttgtttttatttttttagtaatgttgaggtagtgatatgagttgcgtgtcaatttttaagtttataaattaattttattttgaagattgtcattctaatataactgtattttttagtttggtgttgcactgtttatttagtttcgctagctctggattattaataatgggaaggtgttttttcaatgtgatgtggtgttgttttgtagatgttatagcttgattgtctaaatttctgagggcaattttgtctcatggggctcaggattagaattctacagcacatggttggcaaagcatgcccttcggttagacgatgagctatcctggttcgagaggaggtgccttcgccgattatggattgctgctttgttaatcatgtgtgattttgatcaccacgtcaaaaagaaaaagagaacccctattaattttatcatgacattatttgttatttttattttatattatagtataatattacattttatttaggaaaatatacatctacacatcttatataaaaaataattaccaatttatttgagaaatattaattaccaaaaaaataacttaaataactaatattgtcaatttattttttaattagttatacgaaatatattttacattaattgaatttttttttttaatttaataagatttttgttgacagagaaaactcatcaactacattatagtcggaaattttgagtaataacggataataattttaaaataatcttaatgtcaaaatataagagagagaagatgtaagatgtttttttattaaaaaaatatatctcccaaattacaaggctctaactccctctattagagtatagtgtatttatagttaggctctattggtgttgtttacaaaataaactataagtggtcctggtgaggaccatatattattatgatgacaggtggtagtgagatggaggcattgttggttgagtgtcaggtgatactgacacatgcacgcctccgccactactctttattagccttttcaggtatcgtggtcgtaccctctgatccatcctttcttaggtcgcacctttgataccctttggaattcctcatc

SEQ ID NO: 198923 - DNA, 2489 bp, Cannabis indica
acacatcattttcatctttctttccttgtcttttttctttgcttcattttattttctccaaaaaaaaaattctagtggggcaatagtatagtatatataagtagattcttagattgaacagaagagctagctgagattgaaacaacattaattgtaggtatctataacggtagatgctgaaaattgtaactgtgaagttgagactctgaacaaatggagcaagtcatcggatttcccagctataaactcagcattttcaggcaccaaaaacacttacgtatatgcagcatcgtcgtcagggtcacgcccaactttgcctcattttccgttcgacacagtggccaagctaaacgttgtaaacaaattcgtacacacatggtctgttggtaaccgacgattcatcggagaacctacttttgttcccaaaggaactgaagaagacgacggctaccttctcgttgttgaggcaagtgttactgactgccaacactaatctattgtgacatctttaactaatatgttgattttcttgttaccttgctcatctttcttcttcttctttttcagtatgcagtttcaatacaaaagtgcttcctagttatactgaatgccaaaagaattggccaaaccgacgctcttgtggccagacttgaagtccctaaacacttgaacttccctcttggttttcatgggctttgggcaaattccaactaattctcattttaaattttctttgttgaagttgtgaagcaattgtacagagatcataatttgacatgaaattgaaatcacaattttgtaatattggtcatatctttcaattttttgtgttcactttttgtatatatacatgagcataacgaaattattccacgtccagcaatactggacaaaattaaaatgttaaccaagatcatttgttttggctaagcaacctcacaaatctaaaaatcacgacgtaaagagttttgggccaattaattgtggaatgacagcacgactttgtgaggagtgttacacggtttttcgtcaactaaatattacgaaatcataaatttagttagaccgaatacacaattttactgtcataacaattcaattgtacagtaggcataatttgtcgtgaaattgaatcccaaaagtttataagccgaatctatcacttttgtattaacatcttggtgttgcttaacagaagtcaccgtaataattttactaacatggtatggcagtaagaaattaatccacatcctgcaataactggacataatcaaaatgttacaatttaagctgaaataatcaagtaaaaacatctcagtaatctataaaaggtgcatattctttggctatacagccttacaaaaaatcaggacatccaaagttttgggcctgccaattggcgatcagcagtagagccctggctggctagcttctgaatccgcgaggagaattcttcagcctgataagagagtaaagaatcggtattttagatctgtacaaagaactatgggaagcacatcttcaaatatcaaatagtaacaatttcttctaaaagagatcatacacgttcaagagttatccaaatggagaatcatctcataaatgcttaaaattactggggaatcaacaaaacaagaatatttgttgaacattaactctaaccttttcgtcaatccacattaaagaactagctgattgtttaaaattctaacaaccacatctagtggattcataccgtcgttagcatcaagctctcctccctaaaagaaattgaaataaagaatattattatagcaattatcaacagtaagcaaaaaaaaaaacaattatcaacagtaagctgcctatcatgaagtgaaaaccataaaatgaaaacaataaaatgaaagaatattattttgacaataccaacagtaagctgcctatcatgaagtgaaaacaataaaatgaaagcaatacctggttggaatttagggtctggatgactgttttaatctgttctgtcatctgctccaattccctctccataaactcagcctgctcatacctgcaatcaaaatagaaagtaagtgaaaaatagcaaaaacagttcttataaatatatatggggacttgaaccccagacccctcagccacccactataggagcactaattgcaacaagaactccataggatctaaatcaaaaattagagcgaagaaggttgcagaatctttattactcttcaagaaggacaagtacagaaaaacccaaactattcgagtcagtttggaaactccatggaaagtattcactttcttacattacacaaaaaaatctggaccctctaagaagataggcatggcctttatatagacagccattaactaaaagcaataaaagagttctaactaacaagcaatacaaccagccctaagcataagctgtactaactctccaactagcttgtaacttattcttacagtggctatatagtaggcatgtaagc

SEQ ID NO: 198924 - DNA, 772 bp, Cannabis indica
ggtcagccttgcaataaacagaagataattcagtgaggttaatattaggaaagtgtttggatgtagctcaccctgaaaaaattgacttgcattaccttattaatgaagtgcattgagtatataccaaagtgaactgtgcaaaccaaagtgagttgtacaattatcatttttatgacataatgtaaaactacacgagttgttgtcagctttagatttcagctgctctctgcagtttttattaagctcaagctaaaggttggccacatgcctcacttcctcatcgcttataatatcgaaaagaagcaacttttgaactgaaaccatatttgggagtatctggtgtgttaccctttcatgaagagcattaatggcaaagaagcaaccaatttctttaaccaattatcaaacactttcttaaagttactcaagctttgagccaagaaccaattgctcaagcttttagccctgcaattttattgaaccaatctttcttctaacagctcagaggactctctcacacacacccttctgaccaacagattgtattccaattttctttaatctttggttcaaagcctaataaacaatggcagattggattagttgttatgtcacattttgaattagctccacacacagtagccatagttgtctcacacagctattgcaactgagaaatgaaaagccatagttgactcatgaaaactctttagattacatagtgatctttgaaattatacacaaacttgtactcatggatgaatagttcaag

SEQ ID NO: 198925 - DNA, 840 bp, Cannabis indica
gttatattaacttattattatatcatcgtgggaggactggactatatcctcattcactaaagtttggctgtctaatatatgttaattagttgtttttgagaaaatattaaattaaaatccttatgcatgcaaagcctaattctattttgattaaactcaaagctttaaatgttttcttgtttactttaaattatctctcataattctatcgttaagataaaggtcacatgaaaatccttgatgaattaacttgaaaatatgtgcttgtagttcttccataaattttagggcattaaaatcattttttccttttttaatttaaggtttttttttctttctttatgtgttaaaaaaaaatgaatcttcaagactatagatatggtgggtttaaaatttagtactgtaattgctggcataaaattaagtccaaaaacgaaaaaaaaaaggacttaataaggttagtacattagccatacacacaagtacatggcaactcctatattctattatcctatattttataatcttgacaacactctattttattctataaaataatatatgccattatttatgtttagagaagatatatattcactaaactttcttttttccttgataggaataaactgcaacaaattattttcacacttaaaaatagcacatgcaaaatgcaattaatcatattatttagtggtaataatttgtttctcatacataataattgttgtaaaacacaaaagtttccgaatttgctgtacggaccaacaaataatgtggttttctttaccttgggattcatgtgcaaactttctacataaacgtatagagctaataaaa

SEQ ID NO: 198926 - DNA, 1058 bp, Cannabis indica
aatcatatgtctaattaaagatgacatgtaccaaccagaatagattaatcaatgatgaatatgtcgaaaaaataagtttgccaattagagaaaagtcatattaaacatctagatcaaatttaacagcactacagaattgtaattcgatgatgatgacataaaactaaaaccaaacaattttcgctataattcagaagcagcattggacaagaataaactaaatgaatattatgattatgaactgttatttgtaccattaaaagttattcaagtacagaaacatgttcaaacaactaaccttggagaacacatctcgatcgcgtaagctggaagcagaaaaagataactgcacgttgcattgtatcaccacgagtgagcaaaatttagaacattaaaataaattttaaggaaatttaaaaaacaaatgatgataagcttaactaacactgtacttaatcagtctgacgacaaataaattatgcacaaaaaatacataaaatgaattcaaagaacacctaaaacaaactaaaaataatctaattaggataaacaacgggttttgaactcaattcgtacttcgtacacttgaatttgcttctaaagtcactttgagtagcacgaattttcacacttttaaggacaataatttaaaaaaatcactaaaatgatgaatccacaacattcaaataataatgccagagatctccgaacaagttcatagctgtatccaattacaattcgaaaagacttgagctcgttttcgaatctaccagtgaaccaacaaaacaaagaaagctagaagaaaaacttataaagaatatctcaataatataaacggagaaactacaaaataagaatcaatggcggagtttgagagatgagaacctcgatctgagagaagcaaccctggtagccgcgatacagaaggaatcgttcaacggcatcgtttggacctgagttgggattggcatgagaagcagaggtgccgccgactgccgaccggccaccggcttcgtcggagcagcagttacccatttctaatgctcttttcaaatttt

SEQ ID NO: 198927 - DNA, 1163 bp, Cannabis indica
ttttattgtttgttagtaaatatttcttttttagtgttcaatttctctagagtgcaaatttctcatgtttacaaatatgtgaatactgctgttcacgtgctagttaagtatacttttatcggtggacactgattgtttatggttagaagaattaccaccacctctaatgtttattgtattataagtactctttgtttaatataataacattttataaaaaaaacatatatttttgtgtaaatttttataattttaaattacattattagatcaaattaatttaataatgaatgaaatcaaatcacatattaaaattagaaatagaatttataaactagaaagtaaacattattattattattatatagtgagtttgaatgtataaaatatatttaaaaaaaatacacctctactctacatgcatgcataaacatataaatatatttaaacaaatatagatatatattctcatccatatatagtggggagcaaatatgagataatatagctagatgtgacaagaatttcacttgtttgaaacagcacttcacccaaaaacagcaatacattaattaaatcagaaagatccctatggaatcaaattcatcactaacttttatttggaataaaaataataaaactgacaaatttcattttagttgatcacatatggaatattctattcaatgactaattcttctttctacttggtaaaaaaaaaccgaaataaaataaataactttagtctctcctattcttctattgtattgggctacactgattagttgggagtaaattacatgtctttttaggtattatattaatatatttggtgtctatgttttcaacaatgtataattctaatatactatgttaataacgatcactgtgtttttttgaattttaaaagtcagtataaaataatactccaatctccaattaggttatataatacgttacattacaaaaatttttacctttttagtcacacaaaacttgtgactaaagtaaaaaagttgtgactaattataaatcattattcgtatgttgtataaaaaggtccgtgactaaaaagtataaaatcacaaaaattacaatttactgtagtcacaatacttgttgtaactaaaactaaattatagtgacaatttgtatctaaatat

SEQ ID NO: 198928 - DNA, 1495 bp, Cannabis indica
ttgatatcacatgcatgatatatatgtagttattacctgaaagctgatattgtaggcagtgaagttaggagcaaagattgaaacagaagagctatagactgttcctccagtcgaattggctgtgtcgttccatgctatctttgtgtttagatacccttgtccttggaatatcaaatttgttttgttagcgttcacaactaccttttctctgaaaatcatttatatataaatcattatcatactctacatgaggtaaaatatataaaacgaaatatatcccttttatttagaaaaaaaaaaaatagagggaagtcttttaggatttataattaggggtgttgccacatctaatgtttatgtttttatgattatttaaatccgatctaattatatattggatgttagattttatcattcaatttaattaatttcaatcatccaattaatctaatatccattgaatgttggagtggattggttcggatgtatttcatatatgtttattagtttaatttaggtttatctattattttagaccttttttttttggatcggatccataatgcgtattggattgaattagatccatctaatcccaaaaaagagtaaaattttaatttgaatttttatataaacatataaattttaagtataacaatataaaatttaattactcatctaaattaaacgaaaatattaattagttttgtattgcatttttggacatcttgtgtgccatgagattcgatccaattggatatttaaaaataatatctaatccgatcaaatcacaattgaatatccaacatttaacggtcagttgtaattgaatgggtgggttctcattgaaaaaaaaaaaaaagcaatatgacacctgtcaaaaaaaaaaaaaacatcacgatagtttttcttaaaataaaagcaataccacacttgtccttgtcctttgagtaccttaacttagcatttctcatttagaaaggacgaaaaagaacttatcccacgttttttttttttggtgatatttaaagggtacaaactacaaacactagtacattacaaatgcaataaataagaaatccttttctaattggagcaaggattagaacataaaagggtaattttttttgttcaataaaaattgtactaatgtataatatataaaatatacatatagttttttctttattttgaaagggaacaatatacatctctatctatatatatatatttataataaaataatagggaaatacctcatctctggttgcagcgctaattgcaatagaagttcatatacgatttttattgtaatttaagttggagtgctagttgtaaaatcaaaaaaaaaaaaaacaaaaaaaaaaacaaaaaaaacttagtttgaagtagtaaaaataaaattactagaataattaaatacattatataaataaatagtagaaacaaaacgttaaccttacgtctccgtctatgtatcatacgcactcacata

SEQ ID NO: 198929 - DNA, 681 bp, Cannabis indica
taatttgtgtggagtaatgagctatagctttataattaacatagatgagtagagctttgttgaataaaaggatctaagacagcgttaacagagtatagtccaaaagggaaaaccatccaaattaaagacggcagtgcgaacaatgaacattgataatacatatccggcatgtccgaaaatcttcttatccttttctcaactataaatttttcatataaacatagttctttggggactcagataattttgctaattttagaatataattatttttttgttttgattttttttttaataaaattacactaaacatgacatttattcaattattaaaatcttgagaacgatttgcttttatacgacattcatcaagtgtgtcaatatcttgttccgaaagtttatagtattttatctataattaggttaattggtctaatcttattgcctatacccagataatgcaaaggatttgtttaacaaaaattctcttatatactctggaacttaactagaattgtttcacatactcatagtagctaaatgcagtcttacaaatcactacgttcttcaataagaaaatcgagcatgtataaggattttatgtatggtccatatatgctgaaactgagagctaagatcaaaaatatccttccgatccagaacgatttttgacatattgtt

SEQ ID NO: 198930 - DNA, 2048 bp, Cannabis indica
ggtttgactaaatccaagtcaaattatacattttagttaacatgaatgagttcagttcaataagaagtcgattgagtttcacatactagaatatatattttgactttttcaagtcaacataacgtagaacataaaataaaaagaaacacgtatattattatatatggataaaagtaaagttatacgtagaaaagaaaagaagagaacacaatagaatagaatacctaataaaaaacaataatatatagaacaataataggtgtccttatttttagttggattcaaataatgccttgagagattgtaagtccctgaggcacaaggctttcggccgcgatccatgcttctacggcaaattgctcgttgactttttccgtggcatgaccagagtcaaagaagatatactctttgacattgtcacatatatagttcatattcttttctctcctctcctgcctccacagctcaaatttcctctgtagatccttggagcttgactgtaaatcattgagcagtatggagagagttgtgtgttgtgtaattttataaaggttgtgactttttccaaacagctggcaccagtattgttaagagcttaatggtgcactcacaaaaggacctaaacttattactaacccaatttttcttcctccaatgcggtaatcacatagttacatatctaatgatcagtgaaaaaagaaaataattgaaagccatacaagaatgttttcaaagatatagtatttatatatatatgcagtactagtacgtacgtaacatcagttatgtgttgcctatgtccacaaactgttgggtcgtgtagtggagttaataatgaaaggaaatgatcagtaatcgttaacaccaacattgaagatgtaaacagctcttgaaatgagttttggtatctgcataccccgtttgtcgtaactcttaactgatcgctataacgttcttcaagtagctaacttgatcgagttttgagatctatcacttgaaataagtaagaatcatcattcaccacatttggttgtgttttggttggaggtaactaattaaatggaatgaaatggaaatgagattaattttcaattcaattcattttgttttgtttcatttagtattagactaatgactattctattttaataaattaaaataaaagtctattctaatgtgagataaaaaaaaagtttaatatattttttttgacgcattttaaattttgattcattatttattgtttttattttcaatcttattcattcttttatgttttcatttttttcccaactaaactcgaccttatatattaaattatcggtgcctttgttggtagaatgaaataaaagtaaaataataattttttcaatttgtattggaatcaatttatattctttaatctttgaattaaaaaattattttatttaattattaattcaatattttctttttgagatgattaattcaatattttaaaatacaaataaaagaataaatgaaaaatatttttttttatttaattttatttttatttctaactaaacacatcggtagcgaaactagaaataaaattcaaataaggcgattatttagatatagagttttgaatttgtgacttagctactagacaaaaagttaaaattaagcagaacaattatctttccaactataccaaataataatatttaatagtatttcatcaaaaaatataaagacatttttttttttaatttgattctaatttcaatcattaaaaaataaatagtaatatatggtacacataaatccaccatctactcctctagtttcaatcaaaggaccagatgttaagatatttttaacctattatttatgttattttttagagtttaattttcttcttttattattattttttttgaaattggaatgaagcttgttttcgtaatttaagtttcaacacttgaaattaatgtataaattgatcaaattttacaaaaattaaatgatctataaattaagagaaaattgtgcaagaaaataacaatgggatagctaatacctta

SEQ ID NO: 198931 - DNA, 1698 bp, Cannabis indica
  modified_base (1614)..(1614): a, c, t, g, unknown or other
tcattgagacatcatggtctggtctacagacgggtgatggggcagagcattggaccgttccaactgaaaatagtatcaagatcaatgtggacgctgctatatttgagggggctaatagctacgggattggcttagtagctcgtgatcaccatggttttctacttcaaggccgaatggatcttcttgaggggcatgctacacctgaattggccgaagctattggtgtgcgtgaagctttgagttggatcaaagatcatgcatggcaaagagtgatcatcgaaactgactgtttagtggttatccaagcactgcgaagttctgttcaaatgatctctccttttggtcaagttatttctatttgtaagcaactcattattgatttgccttttgtttctgtgttgtttgttgaaaatgaaacgatcagctaatgtggtagctcataactttgcaagagcttccatattatttcctggtcgtcgtttcggtatggagtctgttcctaccgacttgttaccttgtttggtaactgattttgttggttaataataatatcacattttccattcaaaaaaaaaaaagagttttaccgtcaaaatttaaacttagatggttaagtgcaagtgaagtaataattaagagggtttagctgcaaataacttattaaatattaggacatgtaacgataataaacaaaaatttagagactattagatattcatgagtaataaccattaagagtgcacccaaatatatttatgttgtgtggtgtaatagtaaaaatatttttcataatttttttttatttagattaagggtttgaatcccaccacaatttgtgttacaagaaaggttatgcttattatgtttgagctgttaggaggttatcttgctatgtcagtattatttttaatggtatggaaagtggaaggccttaaagtacattatcaatgactcaattaagtaagaataaggtataagtcccaaatagccagcatgtaattcttaagatatttaaaattgaataaatagaaaaagaatcaacacaacataattataaaattagagtataaatgtaaagaaaattaaaaatgaattaaattataaacaaaaacaattaatattagcaaatattacaacaacacttatcaataagcaaatattttaatacaatgatcttgaggtctgattttcacaacgctttatttttttaaaaaaattaatttttaaaaataatatttggaaaaatgtctctgtcaaatattaagaccatctcaactattagagtatattttgtgttcaatcttaaattgctaaaattattgatattaaggaagctttatgttgagttactcgacatttttggggcaagttgttattgagactgatagtttggtttatgtctaagctattcaaagcaatatttccatgtcttctcaattttggtcttttagttaaagatgttcgtattttacttttgtcttacaatcatattgatttgtgttttgttaaacgatctgcaaataaagtagtttttgtaaggaattcttgcttttatacaagtcgtgcactttaattggagattatctactaagtacaatccattatatggaagtntttaatggttataaaagttctaaatttattaaagaaaacaaataataaagtgtctatactctaatagtaaaaaaattaacttta

SEQ ID NO: 198932 - DNA, 1212 bp, Cannabis indica
ttaaacgatctgcaaataaagtagtttttgtaaggaattcttgcttttatacaagtcgtgcactttaattggagaattattctactaaagtacaatccattataatggaagattttaatggttaataaaagttactaatttattaaagaaaaacaaataataagtgtctatctactatagaaaaattactttacaaataataatgtttaatttgcaaaacaaacaaatatatgtttgttctcaaattaaaaaaataataacattaattaatcaattatgttaaacatcagcaagattgtctctatagctttaaaaatttaattttttttttataataaaaaatttaactttgttggattggaggatcttggattttgtccatataaattttatattttattattattatatacatatatttaatttaaattagtgggtcatatgaactaacagataaactctcacgtaacataatgagccatatgtgaattgaatccttagtaaggcccacctaaataaatgttctttttccatatagcattaattctacattttcttaattttcacaagaaaatatcttattatgctcattaaaacaaaatcttggtaaaactgaaaacttacaatatacctttttaattttttttcaaaaaaataccccatgtttggtaagttatactttcttttttttttttttaaactttggattgcaatttgagttatttggtgggtttgtaatgtggtagagataagttgagaaatatattttttttaatatctattaattagaaatatctttatattaaatttcattaaaatgtacctacttttgtaggtgagttgcctaatatatattcaccttctacttaaaaatttatattagcctaagggtcatcttaaataatataaaaataaaggtaaaaattaaaataagtatattatataattttctcatgcatattttgatttgagttgagttatgatttgggctgcaatataaagtatgaattgagtttgattgtcatttgattgctgtgtgagttgtgatttggggcatttatatttgtaattttttattaaaaaattaaatgaaaaaaatataatattaaaatgtataaatgagaaaaaatataatttgagatatttatttatttttaagctaaaaaaaaaaaaaaaaaaaacaacaaagaaaactcaaagagtagtatttaa

SEQ ID NO: 198933 - DNA, 963 bp, Cannabis indica
caatttataatgtactcacaaatagttctgtaagttcgtatctgttgtgttggtctagttcgtatatattagtattttttaaaaaaatggatcgtgtcgtgccgtatcagtatcatagaatcatgttgtatcatgctcatatttaaaggataggcccaatatttttatgtagttttttgctcgtgacagctagtatttcttaaacaagctcaagtattactaaagtatatgtatattttataattttactcatatttatataactttcaataatatttttttttctaaataaaaaataaactttcaataatttagtaccattagaacttaaatatttacgtataaatatttaaatttttatatcaaaccctatcaataaattaatgcataatcttttttttttaagaaaattaatatataattttagttttttatatttttattgttttaattataaaattatatattcaatattacatttaaattttattattattttaatttatttatcattagtaaatttatatgtataggcactccactagatgaattacccaaagttattattattatattataaggttttttaatttgtcgggtcgtgttttttggacttgtcgtgtgttgtaccttttgggttaggctattcgtgcttacgtgttgttcttctcgtgccatgtcatgcttaaggatatatttttcgtgtcgtatcatgtcaatttgtagcatcgtgttgtgtcgtgcccaaacttataattttttcgtgcctaatcgtactcgtgtatatatatcactatttcagtacataatatgaatgaatgttcatcgataatattactttaaaagagaactaaataaaaaattaaaaaaaaaaactataatatggcaaaagatgatcataacgaaaaattgttgacatatcttgaaaaaaactcgaccgttgaagttcatatagacatgccc

SEQ ID NO: 198934 - DNA, 550 bp, Cannabis indica
ttctttaaattttattagggttattgttgatatcaatcaaaagaaacaacatatgtatgtgatatggtacaatctccatctcacatttattatcctatttaagcttgtaaaaacaaaaatggttctctcatatcatatctccatcccaaaaatggtagagatcttctcacaattccaccatatgcatccatgtttttatgggaaattacaaaaatacagtatttctaatatttttaaatttctaacaaatattgtttacaaaagttgtatgcgtcactctatattctatatttttgttaaaaaaaattgtatttttgacatataccttattttaaaaaaatctaaattttatgcatttttgttaaattctcatctctaattgtatggccttaactaactaataacaccaaattgatgtgaatgtttcatgcaaccctttataaaaaaaaatcacaaatcatttatctctctccctacatttcaagatcaacttttgttaagttacatgtttggttaaataatatttgaagtttgaaaattaaaaaaaaaa

SEQ ID NO: 198935 - DNA, 617 bp, Cannabis indica
ctatatatatatatatatatttctaaaattcctattcctattattatatgaagatgattttgatcaagatatttatcacgttctttgacactaatatagacaaattaatatatcatttttatttatttattaaaaaagataaaaaaataatatcattttaatattttaaatttcaaatagatagttacgattattatttcaaaatttatatataaatcataacaacaataggaatcttaaaaaatacacattatttattattttgaaatcacgtagctagattgtttagtataaatactatactacgatcatattcatcataataaatatatagttttgattatagttaataattattcgttattattagaatattaaatttatttaaatcaagatgggaaagaagaaacatatgataattgataataagtctgagtattatattcagattacaaatatcataggtggtagatataaaattattgaagagataagtcctggtgcttccaaatatatttcttttgatcataaagaatattacagcctcactttttactttggtaaacgttatttgctttctgtaaaaggaataattccacgtggatcacaattagtaa

SEQ ID NO: 198936 - DNA, 985 bp, Cannabis indica
ccttttcacgaagtgttgtttcactttaaatgtgtttgaggaggttgacaattggctaggagacttcatttggtcgaaaactatcttggaggtgcttaattggtctaagcaatcgactaaggatttgaatagcacaatttttatcattgttctttctgctacattgtacttcatttgacaaaatagaaattcttgtatattttagttcttttgtttatcggctaagaaaattagctcgaaaattagacaaatatctaaatacagattgttgggtttgtggctcccaaagtgaagtaaaacggacagatatatgctgaatgtaattgagagtttggtaaggggtgtgttgcgctgcttttgcttttgttaagcgactatttgtgttgggccagtttcatctgctgccttgttttgtttttgtgctggtatttaaataaaatattccgtttgttaaaagaaaatctatataccaacaaccaacaacaactcataaaaagttaaaaaaaattaacatctttccaacaaaaaagattttaacaaaactcatatagatataccataagattagtaatttagttctaattctaaaaaaaatatgaaaaaaagaattattgattttttttatgtggcaaaagacaatatgataataaatagtctaaaaaggatatttctctataagttttaaaatgaaaatatttactaatatagtgctataatttgggacaatttactaaaatttcccatttaattaagaaactagtttttgggcacgtgcaatgcacgtgctcccttaaattagcataaaattagaaaaatagtgagaataataataaaagtataatttatacataattaattaaagtggtcataggcatagtctagtggttccagtactcctcttaaaagaggtaaatctcaagtttaaatctagtggcaaagccagctacaagatggcaaaaaaaaaaactggaataaaaattagaac

SEQ ID NO: 198937 - DNA, 2334 bp, Cannabis indica
tttaccatagtccatatgttccagtttcatcttcaaataaatgatttcaagaaagttgaggattcgaattacccatcaaggtcttagaatattctccacgtgtcactcaatagagtggcatgtcaccttctcgagaaattagaatgacaaataacaaaatatataaaacattaggcgtcagttattatggacaaaaccaacgctataaacacatagatcgtcgattatttgataataaggatgccataggcaacatttatgaaaaataggcatcccctatgccgtcagtgattggggtgtatgccttcggtttattcacccccctttagcgacttttggaataacatcggtcgtgaattttgtcaaaatagatgttgtatgccccaaataaccacttctaattaaagcccagttttcaagtagtggctctagtggtgcctagtaccttctagacatgttaccttaagaatagcgatacttgctataaactattacattaaattatttgagatctgataattaattacaccaacagcgatattgacacgtagaagggtactaggcaccactggtgtgcgttttttgcttttttctttattttttttaccttatttcagttaattaagggcattgctattgggtcgagtggtgcctaccacaatctagaggtgacgccaatgattggttagcaatattctcttaaagttattactttaaattatactagacccaatacttaattgaataaatatgaatataacaccgatgaaggtcgccacagttgccttatagtatttctctttgagttaattctcgatatcaaatacctatatggctatatgttggaagatatacctggatttttctttttttggttaggggaggggggagggaagttatttcttgcactttagtgtgctatttaaatttgatgaaactgcctattaaaaactatcttggtggtacatctatattgacttccaagagtactatagctgtgggatatataaagcttcatacgctattaattcaaatttgtttgtccagtcaaaaactcaggaaggccagattaaatcaaataaaggttatccctagtgatcatataacacagctctaattgatgaatcagattattatttttaaggttgttttaggggagtttaggattttgggaataagaatgtaaaataaaatttatgcatagttgctaatattttagtaaaaaacttatgatataggttctacctttaattataattttatgttatgaagtttttacacaaagtaccacttaaaagcaatgagattgtgactactccagtcatcatatataattggacaacctgttcttgtcggttaagttttaatgaaattaatggccaactacaaaagatgatgctgtgtcatgatatgaatctttccgagcaataaagtgttatctcccaatcgatttttcttcacaaaatactagtcaatctaaataaataattgttaatattgtgtcacactactgttacattgtacgatatttttttagtcgcttttttctttttctttatatttatatttttcctatatggtagttggggtagatctaaagtatggacacatatgtcaatttaattggtctatctaagaaatatttttttaaaaaagaaaaattttattatattatttattaatataatatgtagaataaaatatggtaatatatttttggaaaggtccacacttgttacaaggtctagggctcatagcatgggactcagtttgccagtttaagacaacaaggggattggattcaggaaagtagaggaatggaacttgacaattaccaagtatatttgggcaattgcaaacaaagaagacaatctatggataaaattgattcataatgtatatatcaaggacaataattggtagagtgaccaagctccaatccaagaaagttggtactggagaagaattgttgcagctaaagaaactgtcaaaaactccatggccttccagtagcttattagtgatggaaaatatcaaatctcaaagggatataaaatattctaccttgaataagagaatgttcaatggagccaagttgtatggattagcttaacatgccaagacatagcttcctaatgtggatggttgtataggatcagttaagaacaaagaaagactgaacaaaatcaacatatagcaaatgatgcttgttattttttgcagggtagattcagagactttagagcatctgttttttggtgcactttatctgaagcatgtttcaaacagttaaaataactggctgcattacaaatgtttgcttcgagctttctt

SEQ ID NO: 198938 - DNA, 1843 bp, Cannabis indica
tttcccccaagatccttgatagatattccatcccaagaacaagagtagagggggacattggatcccccacctgagatgactactaaagtaaggtatggattttcttacttaaaagtaaggatgaagctcttaatacctttgtgaattggaaaaagctgattgaaaatgagattggaaagaaaattaagaagctcaagacaagtaatggtttggagtattgtttaggcatgttcaaagaattttgtgttaaaaaaggcatatcaaggcatcacacaggtccaaagatccctaaaaatggccttgtagagagaatgaacaaaacactcctcttaagagttaaatgcatgctaagtggagctagtttggaaaggcagttctagggtgaagtagttaaaattgattgctattcgatgaataggtgtccctctgctgcaattaatttttttacacctcaagagaagtggaccggtagagctcctagctgtgatcatctgaaggtgtttgggtgttctccctatgtgaacataagcaggacaagctacaacctaaagccataaaatgtttatttcttggctattcagatggagtgaaagcctataagctctggtgtctaaaattaggctttaagaagtgcatcatcaatagagatatcatcttcaatgaaaaggaaatgcctatgaaaatgcagaagaaaattgatactcaagctgaggacaacaacataaggcttcaagtttaacttgacaatggcagagttgattatgagatgagaacagatgaatctatatccactgaatcttctacatcttagggtggacttgagacatatcaactagccaaagacagggaaagaagagagattcaccttcctgatagattagggtttgctgagctaattggcttcactagtcttgcattatctatggtagatgtgattgacattgtagaaccaacatctcacaaatacgatataaatagtagagatggtgcaaagtggcttcttgcaattcgagaggaaatagcatcgctaatcaagaacaaaacctagatcattgtaaagaagccaccaggatagaaacttgtaggctgcaaattgataatgaaagtgaaggatggaattctaaggattgaagataaaagattcaaggaaatgttagttgcaaatgggtttacttagagagagggagtaaactacaatgatattttctcacctgtggtcaaacaagcttccataagagctattatagccaaggctacaagttgtgactatgaaatccaacaaatggatgtaagaacaaaattcctacatggcaagctagaagaaaaaatttacatgagacaacctaaagatattgaaagtggagatgcaaaagaggtatgcttactgtaaaaatcactatatggcctaaaataggctccaagataatggaacattcgttttgatgaatttatggcaagaatcaaattcaacaagattatatttgaacccccgtgtctactctaattgcaaagtatatcttctattgtatgtggatgacatacttctgattgggaaaagcatggcagaaatagaagtgataaagggtcttttaagcaatgaattttagatgaaagatctggaagatgctaagaagatatttggtatagaaatctcagggaagagacctgaaaagatttgcatatctcataaaacttaccttgaaaatgtattgatcaaattcaacatgagaagtgcaaaacctgtcaccattccctttgctgctcatttcaaactcttagaagaccaagctccataaactgaagaagagagaaagaatatggacagtgtcccatatgcaagtgc

SEQ ID NO: 198939 - DNA, 741 bp, Cannabis indica
cctaattactcctagttccctgaaataatttcaggcaaataaaccattggtgagtaggggcttattaaatcacttttcataagtaggactcatcttatataaaaataagcggttaaaatgacttgtcacataattacatatcacttgtgcgtgtgatttttgtgtgcacatatcattactcggggcggaatttgcatgctgtttttaagtcttgtcctggtttgtcacctgcaagtccactgtccacccatttggagtaacccccttccatgttgttcacgttctcataaccctgccatttgaattgatttctccaacatctcaacattttctccactttaagaagttaaatcctagttcatttaaataaacttacatcattaagcaactctacgcatgcccgaagtgatctgcccccactattgcaacccttgaatgagtacatgcaagtatatttgtgtcagatatgaaataaatagtagtttctactttctagtccactttgttctcccatcatttatatgctacacatgagtgcaattatgctttataaagtttacacatttttataaccaagattaataataatgattaaaaaaaaagtaatagtcaacaaacagtaaaatcttgtgttcaatcataaacagtaataaaattaccacaactaaatggtcatcctttttgcaaactgctgaagcttggctcagaaattctggattttttactttacctggtgatcaa

SEQ ID NO: 198940 - DNA, 2496 bp, Cannabis indica
gtgaggtccctattgtaacaatagatgcatgaaaatccacaaaaaaacattaatcaaaagcaacacaagacaagaaagagaagcatgtggacccaattctagtgttaaaaagctacataattagtagtagaagtagaacacccaactttctttctctatttatttatttagtcttccttccttccttccttcattcattccttggctctctatatatctctataaggatatcctctgttctaattctgtcttgtagcaacagccctttatatatataacatagaatcaatcaatctcactttacccgccaacttattaaaaacaaaacaaaacaaaatctctgccttccttctttctactcatctagatctgtttctgaatggcctcaaaataaggagagaaagagctgtttgcaatggggagtggtggtggaaaaggcaaggttgttttgagggtttttgttggtgctatttttctacttgttacgttttggtttttgttagttggaattatatcaaatcatcatcatcatgttcatgttcatgccatcaaaacggtgagtattggaagtgttacatcatcatcatcatcaactgatgaaatgttaaagcattggaaatggaatggaagaggctcatcacttcgttgggactctaatctcatttacgtcagcaagagaagagtaccaaatggtcctgatcccattcacaacaggtacacttcacttatcatttctatttactttctctccaattacaatattattaatattgcctgttatagtcaagtatgttttgttctaggcatattttagaatatttctacaatacactccctatctgttttagtattaagaaaaattttactctaatttttttttttattagttatttacattgtaattatttaagatattttgtaaaattttaaaagatttgaaaaaatttgacacgccgaaaatatggttcaaacttttgttgcatgtgaaactattttattttataagtgtgtgaaatagattgtttgaactctattttcaaaatgttaaatttttttaaatgttactaaatatcccaaaaaattagacttctaattccaattaattagctctacagttttttggggggtcaaagacaattactcatgtattcttcctacgttcataattcaactaatataataaattaaatagattaattagaaagaaaaacaaaagaaaaaaaaaaggtgaaaaactatttagcttggagtggtgtttcataataagtgagaaaacataatgaactctttataaaagtgtctttatattatctaactttctcttattttgataaaaacacacacacacacaaaagatcttgggagagagaattgtacaactttaacaaaggaacgtttatgttatagttcatattttcattggttaattcaaatcatttgtgtattgataaattatgcataacttaatctgtgataataatataattatatatattgttattccaggagagtagtaacgactagacaaccaccaggtcgagcctaaaatatatattatcaggtatttaattacatcttgaagcatcaaaatttgtgtgacaaacaatcaagaagaattgaagctgagatcttctctagtctttagtctctactttttgagttttcatttgggttctgagtgaaaatatatttcattacttatatgcaattatagttatagtaattaagtataatcttattgtgttagttttaggatttgtggagtgattacttaaatgaaaattattaaagcttattgtaaaggggccaagtgtctttgattctctgagacaaaataataaaacacacacatttaaagaaccttaagataatgaaaaaaaaaagataaattatttggatttttttttttttttacttttgttatggggtaaaagtaaaaaaaaaaggaattaaatacattgaattgaatcactaccaaagaaaaggtcatttgactgaattttccataaatggattaaggtaatggtggtgtgtatgtatatgaatcattttgttgagcttttcaaattttgggtatccttttttatttctttaaattgaattggcttttttattgtgtggaataatggatcgtgctcccaactaaagtaacttaccatcaattaaagttactcttttactgaaaccagattgccttgattggtgtttgcccccttgtttaatattaataccaaagcttacccaatttacttcactttctagtttaagttaagcaataaattattaaacaaaccaaaacaaaatataaatagagaacaattaaggtgtttttcttctcatttttgtcatgaatcttggcttttgtaaataactaataagtattggtatttggtaggtactaggtgtgctctatatcatgagaaaggtaataattttagaaaaacttatataatgacgaaaaatttgaaaaaattataaaaatacatcaacatgaat

SEQ ID NO: 198941 - DNA, 1468 bp, Cannabis indica
aatattttatttctttctattctattttttctaatatatgcatatataatatagggacacgattttgtcccgtgatgtactttcacggaatatactccgtggtatattagatgggtctcggggtacattaaataagtgtcagggtacgtttctactttttaaccccaattacccctagatcaatctcagccgtcagatcaaataattaatctctcatctgacggctgctgtacatcacggaatgcactccttgaaagtacaatcacgagacaaaattatattctatataatatataggataaatctagagtataaattttttggtagatacttatttatttccacaataactatttaatttaatttttttcattaacgtgtataaataatattataattatttaagatattatttataaatttttagaaaaattttatataatttacaatgccgaaaataagatttacatattttattattcgtatgattattttttcctgataaacatggtaagtaattatttaaattttatttttagtgtgcaaaatttttttaagaatttacaaatactaagtaattataatatatatgataaaaaataaactaaatttgttttaaatgctaagtagtctacataaatttcctatattatagacaaatcattgatatatatatatatatttttaattggcatggttttattagaaagtaatagttgacgaaatggtgtacaatattgaattgaagagcattattgattgactaaataatatcaattaaaacacgtagcaattaggtactaaattaataaggcggcttcttcaataacaaaaatataataaggcggctgggatatatacataagattatattataatttaatgtaatttaatttatctcttatatgctcgggaatcgatcgtttgtttatgtattatatttttgtgtttgaatatgattttatttttttctaagttttgtgggaagcatatcggtggttgatatgataaaagagactagtaatatcattcttatttatgtaattaagtataggtactacataacttaatatagagaaatattaaaatgaattactgatatttaacattttcttcaatatcgtattattattgatataattaagtatcggattccatataacttaaaataataacttttaaagaatatcgctaagattggctggattgagattgtcaaaaattgtgggagctaacacgatacaaattgcagtgactctgtgttggttgttaatgaagtacttggggaataccaaaactcacagaaatgatggcttcttatatcacagttgcaagagaaatgctccaggaattcaagagttacaaaattgagcaaatcccgagggaaaagaatgcccatgtagattgcctagcaaagttagcttcaaacaaagaagttaagaaactgggggtgattcccattgagtat

SEQ ID NO: 198942 - DNA, 881 bp, Cannabis indica
tagagattatcagaaagacttggtaagtgtgagtttaaggacatgggatggttagtgatatcattcataggtgtatttataaccaatactctttgataggatgtacacataaattaatagtcaagaaaaaacagagcaaattagcttagatggggtctagtgaggtatgctccttgtgtaatcacatggtattgtctaacaagtcaccatggactgtaattagatgttttaggcatatcaaaggtgagacccaactttgaaatgaaacaaaataccccaatatcatatatatatttcaaaccccattacaacaactttgaggacaattgaccataatatgtcttaggcatgtctcatatccaagtgatcacatattcatataaaaattataaaataaagatgtggatatagtcctgcctttgtagcttgtttctcttgataggcttattttctatgtatgacttcctagacagtgccatgtgaacttcaaatgcctatgtcccttgaaaatcccaaaactaaatccacctcctttcatagccattcatctatatatacaaccacactaccacacaccttaatcatcaactctccatctcaacaactacaaccaaatctctttctgttgtgagaaactctcatacattccctaatacatagcactggtagattgttgctagcatgttgtttaaattgcccggtattctcaatgccaagaagaatcttcgtaggtctctttcggggcttaaagaaggaggtttgaagagtggttcggttccaaaagggtacattgcagtgtatgttggaggagaggatgaggagaagaaaagacatgtagtacctgtttggtacttgaatgagccttcttttcaacaactact

SEQ ID NO: 198943 - DNA, 1833 bp, Cannabis indica
gagagagagagagatagctttaaatgagaaaaaaaatgggaaaaaaataaagaaagaacaaatttagaattaaaaataaccaaaaaaataatctcagaacaattataaaataactataaaaaatcagtttattatttctactcaagatgtatttttgtaaataaaaaaatttaaagcataaaaattaaaaaaaatctgtatatatatatttttaaaatgtttgatctatcatgtaaatttttttaaaaaaatgtgttggaacaatttttttaatatatataacatcatatatttatcctttttttttagttatttagaatcacttataaattttttaatagtttatacatcgaaaataaagtttaaattgttgcatacataataattgtttaaattttattttcataaatataaattattagaaattttataaaaatttacaaataattttaaataactataatttataccatcatactaaaatatcctacgagagtatactataaatttataatatttactccctttttatactactactttttacgatggtgtaatcatattttatagcaaaatctaaaataataataataataataataataaaagtaatagtttgccaaaattcacttaacatatcccatttctaataaaagttaattttgtccacaacttaatttgcatatatatagtgggtgaggtgcaccacaatatggttgatcgttaaaaaaagcagaatcttattaaggatgtgatgtcataatcttttcttgtgtaaaaagtaagtattacattattaaaaacaattgccataattcactaaatatatattcattctaatgaaagttagctttctttttcggccattatagtgggtgaaatgcacactaattcacatcacttttgttttccttctttaaaagttctcaaaaagaaatctataccaaaagatcattttggtacatttttttactatatatttccgtataaaggagagagttttaatcttatttatattttttattttcataattgtgtttgtaaattatttgtatttttttttataaatttttaaataatttacagtgttaaaaaataagaatcaaataattactaacaaatatatagaaaaataatcgtggaataaaattttttaatcttatttttgacaccataaattattcaaatttttttaaaaatttacaagtggtcctaaataactacaagatacgaccattaaaaaattaaattaaaaaattctcctaaatactgaaacatataagaagtacaccaaaactgtccttttaagggtgtactataaaattagccaaaacttttttaaatttacaaaatctattaatacaagtcaatagcaaatatagtattgtattaagtaatactaatacaaaattaaaatagatataaaattataagtttatatataaaattaaattcttttttttaaaaaaaaaaagtaccaagtcagattagatccgatctgaataagtcgggtcggatctgatccaattcgagtatctaatctagtgggacgagacaaggcggatccttatatgatctagatcaggtcggatcatagtcgaatcagattcgactcgatccatttacactcctagagtttagttcccatatcttgaaaatcatgatttaatcttgtattaacattaagcgatttgttatggttaactcagagttttgttagcattaatgaggctttggtaatcaatgcttgaaattaattatataataaattatatatatttggctgtaaataataatgaagaaaacaataatttttacataattttgtagtta

SEQ ID NO: 198944 - DNA, 864 bp, Cannabis indica
gtacctgccttaaatatatatgtgtggtttaatgccatgttagcagatagcatgagtggtatggtcaaattctaaacaagtcatgtttaaacaaatttcatgagaatttttttcttaaaaaaaaaaactttcatgaaaataacaaagacataagagccaatagttaagactagtatttactctctgttctcttatcttaccttgatgagatttaccttatattcttattttaactaaataaatatgaatcaagcaaaaaaaaaaaactaaacagatatgttcacataaaaaagcagtaaaacgaaaaacttgggctacatataatagaaatggtatattgctaattgaagtatataaaaatggcattattaataatagttctccaaaagttgagttgggcttgtactaacagaagcccagtaagaacagttcgtggccttcagaataagcattcatcatcaacctataccaaccgcttaaaccgtcgcatcggtcattcaaattttgcctttcatggctttccccagttttctattctgtcctttttcaattcctccaaatttcgatgggaatttttcgggggtttcggtttttgtgtttgctgatttctgaagcgatcaacactcagaattcagtaccaaatttcatttgctgagtttggagaaacccaatgtcggcttcgaccgtatccattgcggcgaaccccggtactcggcggaggtcggcggttgtggtgtctacagagaagtcaaaaaatatcgagttggtttctgctgagcctcaacataaggccggtgacgataaatccaccatccgtgatggcagagatctgagtcaccactcgattaggggtgaggctactct

SEQ ID NO: 198945 - DNA, 1280 bp, Cannabis indica
taaactaaacaaaaaacaaaaattactataacgaaaataagaaagaaaaagaaaaagaaaaattcaacaaaaaaaaaaaagatgattctccagtgcttcgcgccacagcagtgtttccgtgctccacaaagtctgaccaatcgcttcgtaacacgtaagtcatcttcttcggagaccatctctgcatgtcttcctccattatcatccaaaaccagaagagaagctttatctctttccttcatctctgccacttgttcttccctactactccctgctttactcactccagcttctgcctcctccgccatatccgacttcttcgagctccctaattcaggtggcgttaaggctttagatcttcgtcttggctcaggagaagttccctccaatggcgaccaggtaatctatctttgtctttttgctcatatacccatcttattatctaaggcactgccattgaattacgagtttaggtattattgtaaacccaatttctaaagtttccatttttgttaataaaattcggtagaatgagaagaaagaaacatgtctgtccatgaaagtttccaactgaattttcagcttagtatttcgtcgaacagtttgaatgcaagaaagatatattttccaatattttgactaactaggatttttcaatttgacatgtaacaaatcttgccaccgaatttttgaagtggttaaagatttcttctgaactattgagattcttagattcaaaaacttctatctaatttcattcaattttactaacttaagattgtccttatatcctccttgaattttcatcaactttcgttagcaaaattatacagaagttcttaaatccaaccatttgattagtttggggaaaatttttaacggtttaaaagtttaagagcatgatttgttacatgtcaaaattcgggaaacaaaaatcttaattattcttttgtttttggtgattatatggaagtttcccatctgaatttaggaatgtggactttgattttgaaaggttgcaattcattactatggtaagatttggcagctaaacaaggatggcgttttgattcaacatatgaacataaagatcaaaaatggtgaaccaagtccttttgtattcatccttgggtctggaaaagtaagttcttgaattatttaatttcatcaatgtacattgccacccaatattgtatgcaattcttgtacattaattattaatttgatgtgaaccatgtttatccaaaattgattttggtgactatacaaaaagttgggta

SEQ ID NO: 198946 - DNA, 1851 bp, Cannabis indica
atcatatcttaaccatgtcatatgctttgtcacacaatttatacatgattataggtttaatatatgagctttattaaatcccgaacatatagttattcacaattacagtgatgtcatcacattggaaagtaattgtggttatatgcttcaaaatatttagtcttatgatttatcagtgcactgaattttcacagacatgataatcaacgataaagaattacttacacttgtataaatggaatgttctttgtaggtcattagttaagtaagcaagtatcgaatgtattggctatacatcagactagaccgatattgacagcggaaatcataaaattaacgttatgtcttttttatgtcaatgtcacttagttgatcttaggtcaattgatcttagtctggagatggttatgttctatcttaattgtactatatgggttgtttgacttgttcgttaaagctgaccagtaggatcggcctaatacttacatcatgagaactgagtagttcaattgagagggggcgctaatcatagatatagaatctatagcttatataagcacattgaagtgaaatgatggtttccttagagcttggctaaatgcgtttaaatgaatgaggcttcattttggtaattatattagtttctcgaaatatatttacaagtagctaagtgttttaaggataaaatacattgaagtctaaaacggtaatttaatccctattcaatgtagaccatctacagaggatcattgattatttagactttaataatgattaattcatagcatatctacattttgtatatagagtattttatgtaatcaagagtcagataactgattaacaagccatatgagttctgcagcagtgttggctaggcttcaaaattcactctcagtgcttgatctagcaacaacattctgcttctttgtagaccaggagaccaaatttcttccaagaaagaccacataacccctagtttacctttgatcatctatacaactggcccaatctgcatcagagtaggcacagatgtccattgaagctactggtctaagaagcaagctgtgtgagatagtgccttttagatattgaagtagtcgtttgtaggcttcccaatgggtgatagttggggcatgaataaactgactaagtttattgataatgaatgtaacatcaggtcgtgttaatgtgaggtactgaactgcaggccgtgcttcgagaaagtgtgatgtcctgatatggttccccataagatagggataattttttagtagagctggtgggattcagacatcttttgataccatctagctaaaatcgaacaagtaaatcagtgacatatttgctttgagaaagatacatacctgcatcatctctataaatctcaataccaagaaagtagtgtatagttaccaagtcttttaaagaaaatgatccatttagaccagctatcaatttggaaataaactgtgaatcaggtccagttactagtatgtcatttacatagactaagaggattattaaactagattctgaaccatagacaaacaacgatgtatttgatcttgaagcttgaaaacccaactgcaacagtgtttgctttagtttctcattccaagctcgtggagcttgctttaatccatagagagttttatgcaattgacagacatgagttggtttgcttggatcctcaaagcctcttggtggcctcaagtaaattgtttcatccaaatcaccatttaaaactgcattactaacatccaattgcttgacaggccaagctgaagtgacagctaaggttagaacagttctaacaataaccagttttaccacaagactaaaggtttc

SEQ ID NO: 198947 - DNA, 937 bp, Cannabis indica
gtgcttcccccttaattaatttccattaagggatcagctgtgaaagctaataatatctagctattaataataagctagctcttattatctgttaataatatgtgtgtgaaaattatcctaattttaaatattatatttaacaaattatgaagttatatatgaaaattagaacgaaaattattccttacaataagaatagttattggggtaatagaaagtacaacagtatgcatgacctgggaattaataatttctaaatcatcttataatggtagccatattttaaaggaacataagtttgtatgttgagaataattataaattaaaccactaataattagaataacaaattatataataaaatcatagacaagtgcatgttgcatacaacgaggacaaaacgtacgaaaaaaaaggccaattaatatatatatatatatatacacacaaacataaatatataagaacactctcccattcttcaaaaccaatgatttaataagaatttaggctagttttatgtttgcctgtggtatccatttatagttcctttacaaaagaaatttataataagagagtaatgacaaagccttttgttttttttttaaaaaaaaaatagagttttctaatattaataatgtatggtttttactgtattttaaattaaattattattccaataatagattctgtcatcgttgtttgtatatgatttttaggaattagaaagtcttgattcaaatggaaaaaaattataaatttagtactgaagttaggacgtacttactaaaatttcaatcttgtaaataaaaaataacataattcttattactttttacgatcaagaataaatatgtaacaaacaaattaagaaaataaaggtcgtgctgcatgtcattttttcttttttaattcattgcaactagtattattatat

SEQ ID NO: 198948 - DNA, 917 bp, Cannabis indica
tataaaaatataaataaaaaagacagagccacggtaatatttcgtaaagtttttggtacgtgcacttaccaatccagtgagattaagaatgctatcttcgtcataaaggtctctacttttcttttcacttactatttctagcaccaatgtgccgaaaccaaatacgtcagattttatgtttggagagaagtagccaagatcatctagctaaaataggtgatttattagttgtttttgaaaaattatttgaacatttatctttcttagacttaattagagattggagatccctgatgtaattcttgctttttttcaataagctgagtattttatttaagcacataataaactaaaagttgcttttttgacaagttttatctgacaaagccttaattaaatgttgtttttccctttttttttttttttttttttttttggtatagaaagaacagtaatttgtatatgcaacttaagaagtcaagtgttatatagtatagtatagcttacactaccatcaaaataaccaaatgcccatttctgaccttgagccaaaggcctaaaaagaaaattaaaagggaaaataaaagttcaagttacaagtgcctcatacaatgctatcaaaatttcatagtttggtaatttgcctaattcatctaattattaagttcatgatatcttaattttgaataaaaatggagacattatcaatgaaagttctgccatcaaaacggcaagaaaatcaggagaaacatccctcccctaaagatacgatcagcactagacaaacagtagaaccaaaaactggtcgcctaatcacaaatcgcttacactagaataaaacattatctaaatgtgcaatacccgttaacagtaacacaaaagcaaaccaaaaggtgagactcatatcagtagcacta

SEQ ID NO: 198949 - DNA, 741 bp, Cannabis indica
agtgtcaagaccctcagggtttgtgaagatcattaagcatttatcaaagtgccatggttgatcttctaggacacgtcgtctcttaccttcgcattggaatgtggcaaggaagagccctgagtgataatccgtgatttccatagggaaacagggtgtccaggcttcactcatagattttttaatccagaggggtttaggtgctttggtggtgagaatattgaagacaagacaataggaagagttggaatcgcccgagtgcagagaaacatggtcgaaatcgtgaattaagttttcttcctcaatgagttggagagtgttacatgggttgtgagaagaagaagaagccataggagaagggtacgattcaagacaagtgatgatctgggtgggtttggtagatgacttgaggtaccaggactttaaatagcaagaaaaatgaaggagagaaaaatacctggagatggagagccaccttgagaagcggaagaacatgaggtcagcctgttgggatttcgcacaggcttgggtggccatcattagattcgcaatgatggtgctaggaggtttgtgggagtagaaaatggcggttaagggtgggggtggaggcgtttgggcggaggatcaccattagtattctaaacccataataaatatgataaaacatgagtcgtcagtattaaatgggtaacagggcgattaattgagatttggctaattgggattttgatttttttttttttt

SEQ ID NO: 198950 - DNA, 849 bp, Cannabis indica
aatttggaagaagactgcaagcttccgcaactcatgaagttcgagaagcttgggggtaaatgttatctgcatttctagatgaaagacacgtggcacataatttaaagtatctggaatctgaaaggttgattagccccgttaggtccagagatgacgaagtcttaatatactcccaaaagacattcgaaaggtactcgagaaggttagcattgacaacagtcacccaaaagaagtcggaggtcttccatgtagaggaatccaaatagtcccagagacggttatgatttttccaacacaagatcaaatcttgtctcccgtgttagaccatggtattgtgtttgcctcatctctaaacataactttttgcctaacggtttttctgggtatctcctttgcaaggtgaaatcttttaacagcacgtgtccacttcaagcatttattttgcaaagtgaaaccttttggcaacacgtatcttggtggtcccctattgtctagttgcttccacgcatgagcacacaacctccgttagggggcgggggggggggcaatagtcagatttttatatgtattttatcccaataatgggcttattgtaaaaaatcttaggcaggtcatgagcttgtccatacccgcacttcagcctataaatatcttttcatttttatatgaagggggaatgaaaaaaaagcgtcaaagctctactaagattcctctaagctttcttcttcttcaagagaaacaagagagcagagttagggtttcttgcaaaattattgtaaaaatatacaagcctcttaagaccaataatgctaacacgtggactagggtttttaaacatcccaatcacgt

SEQ ID NO: 198951 - DNA, 2157 bp, Cannabis indica
tacatgacccctcatagtttgttagtccatttgcatttcaaaatatttaatgtgagacaaaggatcttctttgcctgtatacattttccatactggcatttttaacttgggaggtaaattgagagcattgatttttggtgggaatggtgatctctagtctagtcaagttctagatgtatgagttttgggtcggttagacgttgaacgacctcttaacctaatctatttgtgcttgcactaatggatcaacgtaacctgcctgttgaccgacctgtgtcacatgaggatctcctagaactggattgggtacatagttatttgtattatttggttgtatggtaggaggaatgtcctgtccatccaatccccttctatgattcaggtcattctttaggtcgtgcacggttcccaattgatcgaaagctgatgcgtcggggggtctttgtgcttcactattgtgaacattgggttagcttgatacctctatctgaggacgattgttaagctaatcactatccaagtaacgagttggtgaaacttattcatctaccatttggcccacagtttgactttgtggcctaggattggacggtccgttaattggggtttgccgagtgtgattaattgatcatttttttggcccttgctgtggcctaagaggaatgtaagcatctactattggttgctggttggtgacctggtagactctcttgataagtcaacaacctacttggaacgggcatcaatcattgcttgctcagctcacatgatctcatctctcgatctctccattcttcaaactagcatcatcattcaaaaaatgcaaagtttatagttgctctgttttcttgctgatcatgatgaagagtgttattgtggccttgaattttccttagagtagctagcaagttctaaagctcgatgttatcattgatcgacctttgagaaattgtaccagatgggatctcagtactaggggtggtttgctcgattgtagcattggtagtttcttgcacgcctagagtgaacccaactagaggggttgttactccttgacccacaatctatggacctgttggtggctgatgattgatcagggcggggtccatcttggctagatcacttggaattgcaggcgtctacacgtttcgatctgtagccattggattgggggaatcagtcttatttctcctctgtgtttgtacaaacatcctgtgtcttaaaaacaatttaagatagagattaatgtttctttgttctcaatgaaagcaccaaaattttgacctcgcttctagctaatgacagtgagtcaaattaaagtgattgagaataattaaacaacaaaatataaataatgaaaaccaaacaaacactatatacgttcgaccccttattgatgggaatagcctactcccctttttcttgtattgacttgtgagaagagtgaacaagaatgctttgatctctctccaaatctcttatgatgatctctgagtaatttactcttagatctagtctctcttgagtgttttttctctaaataaaattcgtgtccctaaatagtgagatgagtcatctatttatatggattaattacatgaaattggtttccctgaattaataagaaatataatgagaaactggcttaattttcataactacaataaagaaagtgcaaactaggctgattgcctttattctctaaagacaaaaatctatcctataaatgtaggaattattctgtgaattgcaagcttgcagatatatttgatatatctatgaaattgctaactcacaccccctggttggtgcatgcgagccacctatggaatctggtcagacatatgtgcatactgtgcttggatgtcacaacttctatttgtaaccttaagaattagtccttcctatatggcttgctaagagtagaatcatccgtctaggtaatgaaatatttttccacgtgtcacctagatggatgccacatcatagtgcaaaaatttggataacaaattccttatgcattggctaatgaactctatcaccgaaccaattcttggacacatcatcaactatcactcatgtactgaggtatggagtactttcaagcatctatttgcaccagatctagggccagacttcgacgaattcggaacctcc

SEQ ID NO: 198952 - DNA, 1603 bp, Cannabis indica
atttgtatttatcgacgacatccttgtgtactcttaattttgaagaagaacatgagcaacatctctatatggttatgcagtgatacgagaacatcaattgtatgccaagttcaaaaagtgcgagtttttagctatcttaggtgtctttacatggacacattgtcagtaaagatgggatcaaggtcgatctagggatgattgaatatgtcaaggaatagccgagatcgaaggcagttatagaagttagaagtttcatgggtctcgctggttattactgtgagtttgttgagggatattttaggacctcaacacccttaaccgaactcactaaaaagaatcagcgattttcatggacagacaagtgtgaagaaagcttacaagaacaaagattgattacaactcaagtattagttctaccatctgacatattgagatgcatctagacagagtctacagtgtgttttgatgcaagctgatcgattcatcgcctatgcctctcgtcaattaaaggaatatgaatagtgatacccaactcatcacttaggaatttctgcagtggttttggcattgaatgtttggcagcattatctgtacggagaaaagtgtgagatttatacagatcacaagagcctcaaatatttctttactcaaaagatttgaagatgaggcagacacgtttgttggatttggttaaagattatgactgtgaaatcctttatcatcctgggaaggccaatgttgtggatgatgtcctgagcagaaagtgtcctaggcaggtaactagtatgattaagatatcacctcagctagcagatgacaaggtcagatcaggtattctgtttgttgtaggaaaaaattcataattcgacattacaatttgattttttaaacagaattaaagatgctcagttaattgatcaagaactggtaaggatttgagaagaggttttaggttgttaagctatagattttacggtgtcaggtaacaggatgttgttatacaaaacaagagtttgtgttccagataatgcaaaacataggaatgagattctcaaggaagctcacaccactcaacattcactgcatcctggcactacctagatgtgtcaagatttaagacttttctactagtggtgcgggatgaagaaagatatggttgaatttgtatcctggtgtttaacttatcagtacattaaggttgaacatcaaagacctacagggttgttacaaccattgaatcttcctgaatggaaatgggaggatatcaccatggattttgtggttgggttacatagaaccacaagaatgtatgattctatttaagttgtgatagatttatttacgaagtcttcatatttactactagtgaaaacaacccttatagtggatcagtatgcagagttatacgtgaaggaaatagtaagattacatggggctccaaagtccattatatcagatagagattagaagttcacctcaaaacttttgcagagtctccaacgtgctatgggtaccagactgttacgtgcttgtgtgttggactttaaaggctcttggagcaagcacctgccactgatagtgttttcatacaacaacagttatc

SEQ ID NO: 198953 - DNA, 788 bp, Cannabis indica
tcgactttgttcgacgattatggtagagcgattagtttctcttctagtaaggactcaagttgtagttcgagcaaaattgtgagggaggtccccaaggcggagatacagcaagatgtgaaaagtgggcttcagaagtttcgcgttaagctcttggctgaaagtggaggacagagtaccacggacgttctttgccaggttagtttgccagaaaatgcaccaattctcttcctttttttatttgttcttataaatcattcatagctgctcttagttctagatagcaacaatagaatacgtattgcaatcttcttcatcatgtgaattcccccttaatgcattgctgttctgtgtctatgtagtgtttacaaatacattgctacacatcttgaaactattatatatttttaatgccataagatgattacaattattaggtcatcttcatatgattagagttaccgtgagtgtagaatcttgaacaaactatctattcttttcatgtcaattacttttttaactgatgttgatttcatattcttcttgaaatttttggcgcttcagattggtttggatgggattcgcatgcttgatcctaataccagtcggacattgagaatatatccccttgaaaccattagtagatgtgaagtaagtttgtgttaatatttatatatatttaatatgtatttgttataattctgcagtatgtttcttcttattattattttggtttgtgcttctatatataaaatggtttttttttcgaatgtcatacaggtgatggattc

SEQ ID NO: 198954 - DNA, 1194 bp, Cannabis indica
tatttatacatatcctcatataaaaaaataaaccctaagcaaccaataaaataaaatttagagcaataaataatataattctataaatgtaaattaataatgaattttaaagaaatttaaaatagaaaatgagtttgaataaggtgtttttagttaattttttaagaaaaaaaaaattctattttgaaacatcttatgtgagtgcacttataatacccacttttgaaatatattagaatatgaataatgtgaatagatatattgtatatatataatttaatttttaaagaaacttatatttcgcagcctaatttttactgtttttcttttgatcagttgaatttttttatctaaaactgagacagctaaaaaaaacatgctaataacctttatgtttgtaatttgtataagcaagacaaacattcaatagtgataagttttttttagaaaagtaaaaaataaatattattgtttagagcattgctagatgccagcatcttttataggtagcgacttacgattagttagcgatattccttaaaagttattttcttaagttatatgagacctgatacttaattataccaatagtagtatgacaccgaggaaggcattaggcatgttttttagtatttctctattagttattatatgattagagcatctctaatgtagatgtaaatgtaaaatataactcattttgttaaaagtctactccaattatgaatcaaattacaatgtaaatatgtcacttaacaaaatatgatctaaatttaaatcacaatataacatgatataaaatttacattacaataaatgttatatttttatatttattatattatatatttttaatatgttattattaaattttagttatcgtacacttttatattaaatattgacttgtattattattattaaatttaacatttgcttttatattattattatattttatatttatttaataaattattaagtagaatattaaattttatatgaaaatttataattatataatagagcataataataataataataaaaattgacgtaaaaataacacttttatatcaaatataatttaatttgttgtaaaaggccgttgaagatggtttgtatgtattaagacaatatgagtcccatgttatgatgttctttgcttcgttcaatgagagagagagagagaga

SEQ ID NO: 198955 - DNA, 1371 bp, Cannabis indica
tctctctctctctctctcatacgaagagatccctcgtacgaacccctgcaaaatgtgtagctgaaattggagtagttgagccaatcatattttcatttaccacacccaaacccttttctccactctataaaaaccctgctacctctctctctgtattatccgaggtcttttgtgtttccagtcccatcattttcatattatatatatggtcggttgctttatttagggtttttgtttaacaatgggaagaggtagggttgagatgaagcggatcgagaacaagatcagtagacaagtaaccttctcaaagcgaaggtcgggattgttgaagaaagctcatgagatctctgtgctttgcgatgcccatgttgctttgattgttttctccactaaaggaaagctcttcaatttttcatcttcctccaggtaattaattaattaattaattaattattactctttttgttttttttaaaaaaacaattagtacatgtaccagtatatatattctcatttttgactgttctgtgactgttaattaattttgtcaccattaattaagccaaaacaaaattagaaaaacaaaaagatattatccatttgtgctaaaattaaacaccgtgatctttcccctctgtgtctatatatatgctattttttttttctcttttttcttgtgtatatatattgtataaggatttggttggtgtggtgattatttatcaaataaatgaatgatatataatcacatcaaataataataaaaatataaaaaaaagttggactctttaatcatctttttttcgtacgtacgtgaggtgagctttaacagatgatacacacagatatatatatataaatatatacagtactactccagttgttaatggtcatgtctgaaagtgaaaaatcttccgtagaaaatttgagagtgaccatgcactactagtacagttatataaacggtgtgctaataatcttaaccgcctgttatttctaaattaattttcatacccaaaattagaattaattttttaatttttttatattggctacattatagatataatattatcttaacaaatttttgaaaaattcgaaaattagagtttttaatattttagtttatcttattcgtgttcaaaaaaatttaaatttatttccggcactataagttattcaaaaaaattaaaaaattatgagtttgatattataattatattgaagaatattgccataaaaaataaattttaatatatattttcaaacataaaaaattaatatataaattataataaaaagttaatagtgacacactatcactcctaattatatataatgaaataatccaaatccaactaaacattaaac

SEQ ID NO: 198956 - DNA, 2050 bp, Cannabis indica
tggttgagcgatagttacccaggaagcatggatcctaggttgaaggtgtgcgtaagtggtatttgtgtaaattttttttatttaggctgtatatttatttatttggccagctagaaatatttttgtaatattgttagttttttttttaggttaaaactcaaaaaaaaaaaaaaactcatttccttattatttttttttttttttttttgacaaaactcatttccttatttataaaatatttaatataaaattattatattttataattttttttagtagttcaaggacgtattgtttaactagtatatatttaaaaatatataaattttaatctaagctcaatatagtatcactttagtactaaatttactcttttatataatcttttttgttaaaaaaaaaatcaaatttaaagacttgtcactatacatcaaattacactattttttatgagtgtgagttaaaatggtggtttgtagtggagatgtataatataacactcttctttacataaatgtagtcttttcttgaagcgcaaatacactcttaaagcaagtaggtcccaccctgatccgtaccatggcccggacattaggtgtacctttccacgtacacacctgtccgaaactaaagtcctttttactaattttatttttaaaaaattaataatttactcctcactctttataaattgcaacccaactccctctcaactcctatcaaagctttctccaaaactcaaaaacaaaccctctcagaagaatacaggagagttctttccctccattttctctctccccaaacacatgagagaagaaacttctagtattattactagtactcttactcctattttaagaagcaatggagaaccaagatttctctccgccacacgtggacgcatcacggccgtccctgggcttccctctcggcaccgccttactcttaatcatcatcttcagcttaagcggtatcttctcttgttgctaccactgggacaagctcagatccctccgtagatctttcgcttccgacgcctctgattctgccgatctcgaaaacggcccaatcaaacccacgcttctaattcggtaatttttcttatttttgggttatttatgtaattaacaaaagttttcgggctctcttcgcaattttccttttttctttttgggatctacttaagtactgaaatgcaatttttgatatgttgaaggatttgaagggaaaccaatggcagagcttgccagttttgatgcctggagatactgtaccgaagtttatagcaatgccctgtccttgtgagccaatacgacatgaaaagattgtcgttgatttgcccaagcctcctaagccaccacgctttccggtgcctctctattagctaatactaccctcttctggtgtacagtttaatgttacaaaattattatatataatatatatatgttaaatttaatttaattttacttcgtatatcataaaaaaaatgcatgtgttttgtaaatgataatttatgattaccaaattttttctttggttgaagttatcatttattttttgaattttaaatctgattatttcaatgatattgtatcttatctcctgatggacagctcagtttttatttctttccgtctctctctttaagaaaaatctcgtttgggattatggtaaaataaaattctgaaagtgaccctttgatcgataaaacaaaaagaaaattaaaaaaattaattgtaatttagctcatttcgtcacagtaaaaatatcaaattcgccaaataaattcattaaactggttccaaactgagcacagtaaagatataattaatgtgttttggatattataatcagagaataaggaatattatgcctaaaaatttggcttgtatatttcgtagcttctggaaagaaaatgtttgtgtctgtatagttgaattgattggtagagtttcgatatttggttgtggatctttgtttctatgatggcttttggagttcataataatgtaacattcttatagtttctacgaccattgggagtttg

SEQ ID NO: 198957 - DNA, 858 bp, Cannabis indica
tttaataaacaggttagccatatcaactcaaaaataatccaaatccgtttattctgtgggtgtttcgagttgtgttatcgtgtctgacctagattgccacccctagtaattcttatgcaatcagtctatattttttgcagtgcattcgacggttgctcgaggagaaagacggaatgcaaggcttaaatggcctcaaatacttctcaaccataatagcagtctcaatgagaatactttttgattccaaaaaggatcctttgattaaattcctggttatatctagctctctgattgcaacaatagcaggcacatattgggatcttgtcatcgattggggtcttctaaggcgagattcgaaaaacccctggttgagggacaagctaattctacaacagaagagtgtctacttcgtggccatggtaagaaaatggaatgaaaccttaagatcctaatagtataaagatgaaagggctcttagcttctttggttatgaatgatcattcattcaattttcgggtacttgacaatgcaggtagtgaatgttgcgctgagacttgcttggttgcagacagtgttgcaatttcaaattgcttctcttcatccaaaggccttaatcgcaatcgttgcctcgttagaaatcattcgccgtggcatttggaatttcttcaggttcaactaatcttcattttgccattagtatctttaacataagattattactaacaagtatttgatgatgtttaactttgtcaggattgagaatgagcacttgaacaatgtaggcaagtatagagcattcaaatcagtgcctctacctttcaactatgatgatgagaatgatgagaaagaagagtgaaa

SEQ ID NO: 198958 - DNA, 2186 bp, Cannabis indica
ggaacatatctgatctcaacttttttctgcagtactttatctctaatgaaatgaatatccagctcaatatgctttgttcgagcatgatacacagggttttaggcaagtgcgcttgcactcatgttgtcgcaccatataacagggacagatggtggtgtaaatttcatctcttgtaacagagattcaagccaagcaatttcagccacttgagcaagagatttgtactccaattttgtgctcgatcgtgcaacaacgaattgcttctttgaagaccatgtaaccaatgcttccccaaagtaaacacagtagcctccaactgattttctgccatccgggcaacatgcccaatcggcatcataataagcaatgataggcagtctgtcactatatttgatgtgtataccgtgatgcattgtactttttaagtacctcagtaccctcattgctgcactccagtgtacagatgttggacactttagaaattgactgagtttatttacaacaaaagcaatgtccggtcgagtgtgagtaagatattgcattgctccaattacacttcgatatgctaaggggtctgctagttcttcaccatcatgaatggacatcggtttcccacatgttatgggtgtcgggcttggcttgatgttggtcatctcaacacgtttgagtaaattggcaacatactttccttagcatcacgaaagacctcaatgccaagaaaataatgtggttctcctaagtccttgagtgcaaaagctgtgttgagtttggtgatgaacaacatcaattcctttgagtcattcccagtaattatgatatcatctacgtaaattaataccatgatcacatttttggatgtttgtagcatgaagaatgaagtgtctgctcgagaattgatgaacttccaactgagaagtgtgtttttgagttgaacctaccaggcccgaggggtctgttttaagccatacaacgatttcaagagcttgcacacatgatctggtttctctttgtcttcgaacccttgtggttgattcatatagacatcttcttcaatcttcccatttaggaaagcattgttaatgtcaagctgtctcacttctcatccctttgcaacagcaattataaggacaactctgattgttgaggacttaataacagggctaaaagactctccgaaatcaagcctaggcctttgatggaaccccttggctaccaaccttgcttttagtctttcaacggagccatctgcgttgtatttaatcttgtacacccacttgtttccaactatatactgaccttctcttcttggaattaagacccaagttttatatttgaacaaggctttgttctcttctcccatagctcggttccatcccttatgtgcgagtgcttcaaagacatttctgggattttcaaggtgcgtattccatctggtgtgagttaagtacgttttaggcttgaacacccctacctttgatcttgttaccataagatggctcggctgtaaggtaggttgttcaatctgtggtgaaaaatgttgctgagatgcactagagctagcactaggactgaccattattgctggtgaaatgggattagtagcagcaaaatctaaatcaacaagtagattgtttgtgagatctacctgatctggttgtgactgatttgacatcactcgagttggtgctacttgaaaagcttcaaattcttgtgttgtaccagccctggattcattgatagggtcattgttggagagaattggtcgatcttgtggtcttggctgcaagagaggaagttgaaaccaggcaattggtgtttgaaccatggtttctttttctttttggtaattatttagaaatccagtttggaaagggaactcttgctcattaaaaaaacattcgtagatatgtataacctaccatttgagcttagaaacttatagcctttgtgaaattcactatacccaaggttgacacatttagtagagtggtattggaatttatgagactaataaggccttgagcatggatagcaagctgagccaaaaactttaagaaattgataatcaggtttctttccaaaaagaacttcaagaggggtttttccatgcaaaaccggtgttggtagtatattaataaggaagacaacagtttggaaagcatctacccaatatctcagaggcatgc

SEQ ID NO: 198959 - DNA, 662 bp, Cannabis indica
tacaggacacacaaaatacaacactataaatatacaatgtcatttcgctgagtaatgatcttagagacaatttgcaaaacatcataatgtgcaccacttgtaccaaataataacaatgctcaagctattactgaattgaaaaaatccaatcaaattaaagaagtgagaacccaatattgtacttcaaaatatacattattttaactttatgacaagcttttggtagtatatgtaaagaaatagccataaagctaggaaacaaaataaaagaaagacttattagtggtgacaggtgagactgagatacctataaaaatcaaaagtattaattgtccccacataggaaatgtgggagaatatagaacattgatactagttctctatgtacacctgctctgctttacacactgttactatacttccctattttcttcttacatgacattttttttccttaaaatattcttcacatcctttcttttttttctagaataataataagtacacaaattttaccccacatatattactaatttgtagtactaaaaattaatatttaaaaatattaaaaataaatccaaagtttttatttttccaaaaaaaaagttactaaaatatattataaacaattaagtaataaatacaaataatcttttagttaa

SEQ ID NO: 198960 - DNA, 919 bp, Cannabis indica
agagagagagagagagtgttttatgtctaattttctagtttttttgaataaaataataatgcccaactattatctaatatcaaacctaataaaatcatatgataaaacttaataataaacttctaagtcactaaaagacaaaggtcaacccaagagactattttgtcccttgctttacccaaaagcaatcttgctacctaaggatattttggtcaaatctaaaaccactaatattttcaatattctcaatgtctatttaaattgtcccgctatttttaaaatactaaaccatacgaaaatgtgactctatctgtcaaacgttgcgttctactattatcgggcataaaatatgaaagatatgaaatttcatatataacataaataacacaccgagaattcaaataaatgtctataaattcataaaccataattaatattctaatttagaattaaactttaattatatgctaactctcatacttaaaattaagcggtctttacataaactctcaaaataaacaaggtaatctttcatattaccattctcttgctagcattaacccattccaaacagtcctttaaaatattctattaaaccagcaaaaattatttgataactatatttatacataaagataaatatatttatatatatttgcatccactaaaatggcagcatacattacatttttttttatctattactaatatgtaaaaatttattttttataattatatattaattgaaattaattatatacttgtgaacattaattaattcaaatattttatagatatttttttaataattaatattcataaatatttttattttcatatttaagtctttattctaatttttttttaacaatcaagtcatatgattataatatttgtcataaaactttttttttttttt

SEQ ID NO: 198961 - DNA, 1356 bp, Cannabis indica
gataaatatttatatttatatatgaacacttctcaataagtattacctattgatagttactaaacaaatctaaatataaacaactctcaaaatattaaaccattacattttattgacgaaatttttcatcaacaaatctaagaagatcgtaaacaagtaagatgaacacaagtaatggttaatcaaagtaaatcagtttatcgagaagaaatttaacaaagatgaacacgaggaaggtagtccacttggagtgttattgatctcaatgcatgaggagagttttccagagttatgttatccaaaaatttaatcctcaagtgagttttaagaatgagagagtgggagatcgagataatgattttgtgagaattaaaaccaggattccttacaagtgacgtcactccctttatatagatttacattatgggtttaaaatctcttaactcaaggtgcacctcatcctaaccataatcaggttaagtttaaaatacacaataataacacaaaatcacatttcaaaataaatatctagaaaaataataaattatcgaagatatctttaattaacacatgttggcttgttcttgtcatgaagagcacatgcatattgatgaagagtacatgccgagatgatgatgttgatgagtcgtgaggagcacgtgccaaagtgagaagcatctcagctagggctgagatgatgactttgtgttgcgatctcagttaggaccaagatgaagacttgatgttatgatctcgactagggtcgagatgatgacttgaagtggagatctcggctacggtcgagatgaagcactaatggtgtgcatctcggatatggctgagatggtgcttggtgaggagctctgagatgatgcctttgtaaggaggtcgagatgatgcatttgtgaggaggatgagatgatggtctgagacaaggcgtaggtgatgatggtgttggtgagaagattaggtcgagacgatgagctttggtctgaaatggtgagctgcagttcgaggtggtgagctttggttcgagatagtgagctttggtacgaggtgatgagctttggtacgaggtgatcatctttgagacaaggccaaggtgaggctgttggagtttgattctcggccttggtctgagatgatgccttgatgatgtgcaacttggctagggtcgagatgatgccctaatgaagagtacttcaaccttggggaaggtgagttgacgttgtgacaccacctaggtgtaggtttaggtgatgaggcatggtttaccacctaggtgcctaagtgaaatgttattattatgatagctatttttgcaaaatcaaagtataacagaatttttacaaaaaa

SEQ ID NO: 198962 - DNA, 1331 bp, Cannabis indica
gtatgtgtaatatatgcatgttgtttgtgattcgtatgctactgacactagtatagtagcagtactgagtgcattggtacattgtacgatgtttagagcatttttgaaatatacggtccaaattgaattgatcaaaatttgctccatccaatggttggggactaaaagagtttacatttaatgtgcatgaggaaagagaataaggcattcattactcatcatttcatggcggcatcaccaacatgccatcaatctatcatcttttcaagtctagtcgtcattcacttcccacaagaaacgtgcttaagcgtagagcgtaagccccacggctcctgcaaacaagcaccatgctttagcaagacgactaaagtaccaacgcttcagctacccaaagtaatacggaagacttcttccacatttcaacacatggctaacatgtcgagatagtgaatcaagcatccgaaaggaagctacaagctctcatcactcgcaagtgcttagaacttggggataaatgttatatgtattcccggatgcctgttacatggcaatcacggaaggtgccatgccagattgtttgcaattaatatgtatcttttatttattagtatcacaaaaggagttatattccaagagttagtcgaaggttctccctatcagcgaggacagaaaggactctaggactcccactattcgtccgctattaagaaggattagagtcctcagacgccacgatttttccagaagggtagcagtttagtgtgatctgagaaagatgtgacgagatgatcctggaacctatttggctgtaccctacccgtagctcaaggcgacagttacatatattttgacaccaaattagatcttgtcacttgcgtcagaccatggtagtgcacgtacgcgccgctgaagccccttttttgtccaatgacttgtttaggcaataacttttaaagctgaaacttttgagcggcacatgtcctcattcccacgaaatgccttataacagtcgtacaccacacgatgggaaagcttcctaccaaccaattgtcaaatcatcatgttgtagtatcagcccttgtggcgtgttgagtaagaaaccctaggtgggtaaagagtaatgcccttacccacatgtgtgcctataaatacccttacttttcatgtacaaaaggtgaacattctcatacttaccaaacctctgctaaaattcctactagctttcttcttcaagggagaaacaataggaatacagagctagggtttatgttgtaaatacttatgatattccaacactcgcctgcaagactaatacaacggactcatggact

SEQ ID NO: 198963 - DNA, 1640 bp, Cannabis indica
gtagcggaggagaccttcatcatctcctcggcttcacagcggagaaggtcttcatcatatcctcgactttacaatggagaaggtcttcttgtcgactatcaacgatgtgttgtaatagtcactggctgttcttttggtcaactgaggatgtgaccaactcccgaattaatatgcctaagatgggggtgatgtctttcctatctcagatgcaccttagagtgattgtaggtgtggtctccattttatccttggtcttttaccttagaggtcttcatcgtcccttttattgtattcacaatagaagaggccttcttcatctccttggttgtcttgacagtgaatgaggtcttccacttccccttgactgttatcacagtgaaagaggtcttccttatccccctgggatagttaagaagttctttgggcaaatgttaacgatgtgttataacattcgcattttactctttgattgccaaagagacggtcgataccaaccgctgtcaagaacttgacagacaggtggtagataagtgagatggctcagaggttactaggtgttgaccttccaaggagacttggtgtcgatcactatggaggtagtcatagttatgtttgccacgaggtagttataattgtgagtggtgatctgattctatcacagggagcaatgtcggctcacctgaaaccatacatgagctgcttgcatggtttcgactcttattagggagtgacccactctttttttagggccctttttgcttagaacaactgttgatgcttgattattaacctttgttgccacgatgtttgaaattttgttgttactgtttgagcttgattgctcttgccccccagcgttgatctctttgtgactgggcaaaaaactttgaagtttgtacgttgaagctatcttctgtgagtgagatagaccactgttgatgtgtagtgcattatttatggtgtgcttggtgctcaagcatgagctcactttatgataataagtgagatgaatcactgtcaatgagtagtgcggaaaaatctcgttttgagaaatttttgctttttgggaagttttgaaaaaaaagcaaccttttagttgtttttttttatgtgaataagatatgaattgattattttttcattaaaaaattaattttagaattttacacatatataaataataaaataactattttaatatgtgagaaaaatatatttttcagtttccaaaagaagacgactaatagtaaaagaaacttttttttatatatatttttaggctatattattatgttattttattgtttaaaatacctttatgttatttttttttaatgtaactcatatgatgttcaaaacctattaaaatacctttaggttattattttttttaatgtaactcataacatactattcaatttatttacaaattattttataaaacctattaaaatagttttatttgaaaatacatttattttatttaatcttgtaatatctaaatataaaaataaaaaatatatatattttttagtaacttcttaaattgtttgatacattaaattttattaaaatttaaatactgtttattaatgtattaaaaaatataaatagaaaaactaaaatattataaaaaatat

SEQ ID NO: 198964 - DNA, 1726 bp, Cannabis indica
tcattagcaacatatagtgatatgttgtttgacataattttgcgattattgtttgttttattatatcttttttctcaatgcatgatgtacttagcaacatgtagcaatatgttgttgacaacatttatgattttgatatttttctgttttatctatctgtcttgtggtagttagtgacatgttgcgacacgtttgtcgacatatcgcgacatatgcctttagaatcatttctcacatagtaaacacatgttttagcaattactatcaatattttgcaacttaatttttgatgtttagagattttttttgtgacatttgcgacacatttttatgtgttttcatatttcctcttttttgtcttaaattttacagatggctcttgaacttaagctgccaattctgaccatttcataggttgtcttacctatcggggctcagataggtttaaagatattaaggccaagtttgaagcgatgaagtttattgagagggttaatgccagtcctttcagaccattcagggaagctggagaattaactttctcgggtgcattggtccacagcgtactcctgcaaaagatggaagttcaaaatgagaaggaaaatgagatatggttttatgttggtaaaacaaataggggatttggacggcttgagtttggattaactactggcttacctatgagtaggtcctacaaaggaagagatagaagccaattccaatgaacgtttagtgaggacgtattttgaaggaaagagttgtgtgcaatcggatacactattgctccaattagagatatgtgatgtagcagatgacatgtacaagcttggtcttatcgcttttattgagggtgtattggtttcaaacgaaggcaatatccaagttttgccagggatgtttgaatttgttaaggaccttgatttcttcttcaagtatccgtggggtgagcgtgctttttggaacatgatgtggtctatgagtaaggacatgatatgttacaagcagaacgttgataagaaaaagagaaagcaggtttctcaggaggaaagtatatcgtacatagctatgtacctaccatacaatattgggcatatgaagccatagtgaaagtgagaaagaagtatgttgattgtagtgacaccaggttccctcgggtgataaatttgaaaaccaaggagggctagcaaaaataagacttgaaggcaattgacatcgcacaactattctattataccgaaaattcggttggcacttcggaggatgacacgtgtcaactttggagaatacgaatcaacgaatataatggcaattatattaatggatattaaaatgaaataactcattaaatgcagagttagtagaagtatatctataactcgctgattgtatagtcttaagcgagacaaggatgtacgaactattgattcacgcattggcgagaaaccatttcacatcggaagacacaatcataaggatgacatcagtaatataaagcgaggcaccaaactcgctacgtataaaaagctggacgaatataagtgacagatagggaggcatccatctcgctataggaaggcatactcatggtaccttcactaatcagctccagatatctttcaatgaaatccactgctctattgagtcagcactatcagatataagtagacatccaaatgatgttgactactgaagtttacgatgtgatcaagaactgcgattgttagat

SEQ ID NO: 198965 - DNA, 666 bp, Cannabis indica
gctacttgctctttctctcaggttcgttcggtctcttcttagatccgttcctctatggttttgttcatctatacgtacatctatttatggttttggctttcacttttgatctgttatgacggtgattctggaatttgggaattagggtttcgcaaatggcttcgaagcggatcttgaaggaactgaaggatttgcagaaggatcctcctacttcttgcagtgcaggtattttattttattttatttatttttttttaagctcttcgcgtatatgtatgtgtgtaaatactgaaatgatttccaagttgattatttggtttttgtttgagctcttttttgtttgtttgggcgaagagttatcagtgaagtgataagtgtggtgaaagtcttgagtttatgtacatgatctgtaaaaggattctcttagggacaccaattcttaaaaacgaaattatgtggcattattttaagccatcatcttagtgtttggcgagcgatactcacttcttgagtatgattaattttgttctgtgatgatgatgtccttcgtgtggttctttgtgctaatttaatgattttttgactgcaatcatgtaaaaagtcaagttcgtgttgatcattaagcttcttggtaatattgttaattgccttatttgcaaatattta

SEQ ID NO: 198966 - DNA, 509 bp, Cannabis indica
cttttctctctaattcaattggataacactaacttctcccattacaatatttagtaaacaaatgaatgagaattaatactatgtaattaattttcattatccttaagtaaatatgtaaaatgtaactaaaatttttttttctattttattttattacttccaatcaaaatatgattgtaaattgttttatttttggttgaagttatgaagagatagtactaatactagacacattttttttttctaatattagaaatatagttagagaatgataaaatatatgattgtcgtatattcgtttttttttttgaaatggcatatgttcgtttttagtgacataaaaatttgtatgggtgattttgtatgacatttaaataagtataaccttattaattcatatttatttatttattttgaaagaatatttgtttatttcttgaattacatataaagggagtaaacacaaataaataaaagaatataccatttaattcttttcttttcttttc

SEQ ID NO: 198967 - DNA, 1504 bp, Cannabis indica
gattctggttttcaaaattttcagttagtttataaagtatagtatacattatatattgtgaaacttactataaaaaaacagcttaccggatgatgattcctatcattacgagccaatgagaaataaagagtgtctccaacattgagcatgcttccatcaatgatttctttaaaggcccgctttttaacagaatatctcagatcatcgcaaccagcattcctttccttcacatcaacattataggttttttcgttatcttcgtctccaaccacgaaatgcatcttattgttactcagcatgctgtgaatgtatatgagttttgcagcacactgaggaatctcaagtgcactcctcaagtctgactttgtgactttcttcttacaagccatacgaaggaaatctgagaaatattgaaatacccaactaagaaatagcatcaagataaaattcatgattcaaaaacgatcagcaccaaatataaacgaacaggatgaaaatcaaatcaggaaaaaatgaacaactcaaagctcaatgatccacactcataccaaagtagtgaaaaaaaaattgattacaaacggagagagacagactcataatcttggaattaaggaagtaaacatgattaaagattcatagcagttaagtaaaacattgaagagtattatgaaatagttaatgtaacaagttcaagaaagagaggagagattaataaagaaacagtaagaaataacatatatgactaagaatattatgcatataaacaaacaagatgaaaatcatgatttgaaagcgatagcaccaaatatgatgaaaatcaaatcaccgatgaaaacaagtataaggaagaaaaaaagaaaacaacaaacaactcataaaccctaaatcataagctgctcaatgatccacactcaaaccaaagtagtaaaaaaatgaaatcgattacaaagggagaaagacatactcataattaaaaacatgaatgaattcctaaaaaatgaagaagagagcaaaaaataccaaaattacctggaaaattgagaatgaaggagagtcgatcgaaaaataaaaagagggaaaatgaagtaaagtaagcaatagggatatatatactagctaagaggaaaagagagaatggactataatttgaaagaaaggcagattatatacttactggatacatttacctctaatgagtttccaacatgcatacaataataataggacagttttcaattatcgacgtagaaatatcttactaactctcacaaagtaaaatatatggagatgcaatattaaaatacaaacctcttttgatgaggagccgaattacatgagctttggcgaaaccaaaaaactcacagccccgagtaatagtagctgctacaacattaactgtgacatcaaacataaaaaggaacaaatgatatcagttttccaaaatcagaaaataaaatgatcaaatacattttggaaaatcacatttgtcttctttttttttttt

SEQ ID NO: 198968 - DNA, 572 bp, Cannabis indica
ttatcactcttatattgccatatgtgtttttaacacccacaagttattcatttgagctggaaagagcaatagggactagtaaaaaataataataacaatcaatatcaatttcattaatctttctaaaatgaatgatatgtgaaagaattgaccattcaagtatgtgggatccatatagaacatagatattttttatacacaatatataattagatgccaaaaaagaaagaaaagaagtggtaaatgtacatttgccactaggggaagtggtcacccactaaaagagaaaataaatatatgacaagttttttggggttgcataaagcttatggcttcttttctaatattttcatacacttgttttatttactctcatctccacatcgagttgatgtgagtggctaacctcacatccggtttatcttatcttttcaatttttttgttttaattaataaggcaaaaagactctaatattcgaaagcatatcatcttatacttatctaatctttggctgctcttatttatttatttttaattaatattaagcttcatatgtaattatatatatata

SEQ ID NO: 198969 - DNA, 1352 bp, Cannabis indica
tagatgatatatataaaaaaaaacctctgtcttgatacaatttttcaaaataaaatatatgattaaagtgaaatgcataatttctcttttctaatttattgtttcttagtcaacgctaaatctttcaagaaaagtcaaatatggcaatgatattcatataactagtgagtagtgatgataactcaaacgcctaactcctgtcccacatcttatcttatatatataatatgtataaatctatacagagaaacaaaatataaaaactaagaatggcttccataatcaaaaaaactatcctcttctcaattttcctggtcattttccaccaactcaccacctcatcagcccaaacgacaataaaagctgcgtattggttccctgagagcgagttcccggtgaccagtatagactcctcacaattcacagtacttttctgtgctttcgctcaactcaacccccaaaactaccaactcttcattccatcccaaaatgcccaaaagttctcaactttcacctccacagtccaacgccgaaaccccaacatcaaaaccctcctctccatcggcggcggtgctgccgacaaaactgtttacgctgccatggcttccgactggaaccgccgtcaagctttcatcaaatcctccataagcttagccagatccaacaacttccatggcctcgacctcgactgggagtacccttccaccaccgaccagatgacccaattcggctacctcgtcgacgagtggcgctccgccgtcgccgaagaggctcggaacaccggccgatcgccgcttcttctagcagcagcggttttctactcttccagatacgaaaccggtgccgaatacgtcgtcctcgccttgtcgagaagcttggattggatcaacgttatgagttacgacttctacgcgccgggttggtcgaccgtgaccggacctccggcagctctgtacaatccgggaaggtcggtcagcgccgattccggcatcaaggcttggattcaggcaggtttcccggctaacaagatagttctgggagtacccttctatggatatggatggactctttcgaacccgagtaacaatgggtactttgctccgacgaccggagctgcttttccggacaacggagcaaaaacttatcagcagatcaaaaagttcatagctgataatagggcgacggcggtgtttgattctcgagtggtaaacgattactgttactctggtaggacttggtttgggttcgatgatattcagagtataagaactaaggttaagtatatcaaagacaacagattacgtggctattttgcatggcatgttggtggggatgacaatatggcactctct

SEQ ID NO: 198970 - DNA, 865 bp, Cannabis indica
ccttttttattaaaatctccaaaaccctttaggctaacatggcctaaccttctgtgccatagcattaatgatttttccatttcctttgaagaaatatacacaatgtttttggatgttcttttttgtagaacatacacaccattaattacatacccttttatgattacctttgttcccttggaaaccttaaggactccaccttcaacttgtactgcgcatcctccatcatctagcatagctgttgaaattagattccttttgatctctggaacatgtctcacctattgtagttctctctaatggatccttttgcaagttagagtttcacacatccaactcccttgattgtacatgatctgttgtcccttaacataatagttccaccttcaatttcattgtattcagagaactgtatttttttagggtacacatgaaatgaacaccttgaatcaatgacccaatcaaggctagagtatcctgtagaagctaccatagcccttgcactttcataaccatcatcactgatattttctcctaatacaagattaggatttccatatttcttgaagccactacctggtttcttgctaagttcaggacaaatctcgtttgagatgtgatgttttgtgacacatgaaacatcttttcttgaagttggaaattggctttccttttgtggagttagcttgatgttgattcccattgtatgtgccttcaattcttccatgggcaattaacagagcctccgttgttctcttcttttttagactttcttttcaattcctttgacatcaaagcactgtgtaattattccaatgtcagtgaatccctttcaaacatcattgtatccacagagtgttcatac

SEQ ID NO: 198971 - DNA, 1536 bp, Cannabis indica
tgatgagatctgcctttgcctcccaatcaacacgaggatggctttgtggctgttaggggtggtgatttgggctatttggactggtcagcgatagaagattcttgaacttttggaattttggtaatttttttgatattttgttattcttttcatagttttttttttttttggtttgtattaaattgagtactatgtatttgtcaatgttttttattatcattattggtttttttttttttcaaatagaaaagatctgtatattgaaatcaatattattatttttggtttaatttggtaaacagttcaattgtatagttaattattttgtgtattatatttattaataatgtgaatctgtttatatagcttaaaattttggggaattatcccatatattatttttttaattttttttttcaaatttacagtttgaatttctaaagtggtttctatacgtttttttattgcaatttaggtacgctagttgcaatagaaattttaatgtagaattccataaaaatacaaaaaaaaaaatgttttgaagtttaaaaataaaaaacccctaaattattgcgtatattatcataatttatatatattaaaattaatatttatgttcatttaaattatataaatagaatattattaaataaaagaatattaggaaaataattttaaaaataaaaatagatatagtgacactttaggagagtggctattatctttagagtctgacaacttgggattctaaaagtttacagtacacgtatttagaatctctaaaaagttataatgactgtgttgaagtgtcacttaatattacttttacagtcacccacattactgacacgcaaaatctatagtcacttgaggtgggtcatcgaaccccatttttaattgcaagactctctctccacatgttatatatttttctaatattaaatatatcttcgtttatttgatggttagattgaccaaggtaattatatattttcatattaaatggagtgtaaaataaaagtatatatttaataataaaattatatcgaaacattgtgtttatattgtatttatatgtcgtttggtctgtttggtctgtttttgggttataattttaatatcaaaaacttgactttgctttaaatattaatgcatattttagatttaggaatgaatttattctcaagagatgatatgactgacatatgtgttagtttttaatttacatatgctacatttatctattctcttttgttcaattaacatctgtgttattttattaaattattttgcatgatatttcatgttcgacaataaatcaaaaatagtagtcttggagcttgatcatgatgcggttgtatttttttctccaatattcttattttctatttctttttttttttatccaacgtgtaagtaaattcttaattttatttattttagaaaaaatcgaatcaatgttgaattctataatttgatgattcttctttactaccttctttctttagtatttagtatatgttttctaaatattta

SEQ ID NO: 198972 - DNA, 823 bp, Cannabis indica
gcatagtactttacaaatgattaatgatattttatatacaataactatttaattaaaatatataatatttaatactttattgtaccaataatattgtctttaattagtatttttctaaatcacacatcgtcgtctattattaaatttgtaggtacatatatgggacagtactctttgggtgctaaaagagggtcgtacgtctgatcgttttctagttatagacatctttttagttttcgttaaattctgaataatttatagtataaaaaataaagtttaaaataatttattttatcaggaatacacattttttcatgcgggacccgcccttaaggaggcgggaattttctatctaaatagggaacggaatgggaatgagaattattttattcttgaatgttaaatgaggcgggcacggagataggacactccccaccccgatgagggtccgtttaatattttatttaattttgtaataatattttgtagtttatagtttatatttaattatttatacttttttagtatattactatcattttacaaatttataaattgtgtttaaagtaataaataatatattgcattataaatagtatataatatttttatttttatttattttaataattttatacatttaaatttttaatatatatactttaattttatattaggtgattcaccactccgggatgggaatcaataactttaacgagaatggaaacgggagaacactccctactaattttccactcctatgcatccctacatagtagtgcaattaattattattcaccttatttttaacactttaaattat

SEQ ID NO: 198973 - DNA, 1296 bp, Cannabis indica
ctcactatttttaatcataagtgatttttttgctctaatttttagatcggtaattttgaatttttgggtgcttttttttctttggcttgaatttttggtggctctctaacattatcttttaaaggattatggatttttgttgcataacttttttaagataaatttaataacactaaattagtatttattcaattaataaaattctatcgtgagattatcacttggtaactatttcgtggtttgttgcataatattggtaggtaatggttttggaatctctttttaaacgttttataaactttgtcaataagctaggacaattagtttaactccaaatgtgctggtctagcccactaatattttaacctttaactgcaaaacaacttacaacacaagatttttcctgttcggtttactaagaggttttaatgaagcttttttatatataaaagaaataaataacatgattgtatttatagatataggtaagacaaaaaaaaaagactataaagacacacattacaagtaattgaaggtctctccaaagcattttattacatggattcaaataatgctttgagattgtgagcccctgagaaaccaggctttccactccaagcttctttggcaaattgctcgtttgccttttccgtgggatgatcagagtcaaagaagacataatctttgacattttcacatacctcatactctttctctcctctcctgcctccacagctgaaatgtcctctgtatgggccacttccacaacatgcctccttcgcttctttaaaccctacattattgcacacaatacagagtttaagaatgtaatgaaagaattaacaaaaaactggttgattaatttgtattaccatattttgaggggtgatttatcctttcctcccaaaatgagtaaaagtcaacaagtgagtattcgaatcctttaagctttgtgtgtaatccttttagtaacgtcgagagttgtaggttgtgcaattttacaaagggtgtgggtttttcaaagcagcccccactatgtcccccttcaagcactctaccgtttggtgtacaccctaaaagacccaagtttagaaagccaaatttccttcctccaatgttgtaaatttcctgatcaaaacacatataattctgaatatggtaaataaaagcatatgtttttaaaaagatatggtataaattaagtacctgaataacttcagttatgttgcctatgaccattcccacatactgttcggtagtatgggaattaaggactgtggtgttagtatcgaaagg

SEQ ID NO: 198974 - DNA, 902 bp, Cannabis indica
  modified_base (855)..(855): a, c, t, g, unknown or other
taaaaactaaaaaaaaaaaaaaaaagaaaaaagaaaaaagagactaaagaggcggcattaatgataatgttgtccaattcttactttcgatattattttatatatgagacaactgcctattatatatatatataaatatatatatatatactgccaaatcgagtttcaacgtactagatgaaaaaacaaagaaagcaaaaacacattaatttatgtaaacgtcagtcaaagtgttctttctttaaaaaattatttatctatagtactgccttgagtttcaaacaacaactgtcagaaattttctatacattataatgtttcctacttttctattttatttgttcaactccctaaatgttaatttaatgttaaatcaacataaaaataataaaattttgacattaatttctctttttatttcaagcacaatactaaaaattacattaaaattatattctttattattatactattttactaaattataaatatacacaaataataaaagaattattacatgaaaaacacaacaaatttaagtataaatataatatttaaatattaaaactaatataaaaaaaaaatttagtagtattctattgtatcacactaataatagtggaacactataaacaatattataaattaaataattttaaagtatggttagaataaatttagtgtaaaatttcattaaatttgacatttttaaatgtttcattaaaattggcctaaaaatgctaatttatataaatatagagttgttaaaaggtattaattggtaaaaatataaattttaagaaaaatagtttttttaatagtaaatattactaccaaatcataaagcacaatttntaaaaaatactaaacactaatagtacccgataagaatatatgctcat

SEQ ID NO: 198975 - DNA, 2116 bp, Cannabis indica
cttggaaaactctatgttcttcttcaagagtctcatcctatgactagttctagttactctttgttttctcaaaataatgtagatcaatggcataaatgccttggccatcctcaaagtacatttcaaatacattcaataaaaattagatcctggtttttctatttcacaaaaccatcattgtcatgtttgccgtcttgccaaacaaaataaattacaattcatatccaataatatttttgctgaaattatgtttgatctcatccacatgggcatttaggaaccattcaatgttataagcatagaaggatatagatatttccttactattatagatgacaagtcttgatttacttggactttcatgctcaaaaacaaagcagaagtccaaactgttattcttctgttttacaacatggtttgcacacaatactctaagcttattaaggctattcgatctgacaatgccaaagaactaaacatgtaatctttttatgcatctaaaggcatgttcactaccattcttgtgtagaacacccataacaaaactcagttatggaaagaaaatagcatagcatgagcattgtgtttccaatctcacttacctcttgcttactggttatatctcattcaaactaccacttacttaatgaacagacctcattccgcactgtttcgaggaagcacctcctatgaacaacttcataacaaatcccctaactatgatcacctaagatgctttggatgtctagcctatgcttccaccctaacatctacaagacacaaattctcaccaagaagtcgtgaatccatattcattggttatcctcatggaatgaaagcctacacccttcttgacattaaaactaaacaaatctatcactctcgagatatcatcttccctgaaaacatttttcccctcactggtcaaaattcaaacactaaaatcaattagtttttccaacattcaatcactccagttgatttaccaattactcaagatataaccactccaactactggtgtcaataacacaccaattcatgctactgaaataccaccagctcctattggtacaacaatcaatctagcctttactattgagacaacatcaataacaaatggctttttcaccacaccagaccaagctactgaggctcaatctgttacctcaaaaattggtggacacgtaaacaaatcttctcacttgaaagattatgtttgtcatactacatctacagctcaccccattaaggaattcatttcttatgcaaaactcagtcctcatttcagggctgccattttagcatcatactctcaaatcgagccccaatcctacactgaagccttctagttcaaacattggctccaagttatggacattgaaactcaagctcttgagaaaactaaaatatggacagtaaccaaactatccctagccacaaagtcattggatgtaaatgggtgtacaaagttaaatataaccaaaaaagggaggttgagaggtttatagctcgtctagtagctaaaggattcactcaaaaataatggatagactatgtacaaacttatgccattgtagctaaatttaacacactaaaaatcttctttggaatgtccaccaacttgaaatcaacaatacatttcttcatggcgatctccatgaagaagtgtacatgaaaatccctccagtgtacattttcccacccaactctatttgtaagctcaataagagtatttatggccttaaacaaacttcaagataatggtatgaaaaactacaacacttacaactgaaggattcaatcaatccctgtcagacaactcccttctcataaaaagaacacaaacaatcctcataactattctgatctatgtcgatgatatcattatagctagcaataatgactcaaccattactcattcaagcaatatttagacaaaaaattaaagctcaaggacataggatcactcagattctttctttgccttgaaatacgtagagccaaacaaggtatttctatctcataaagaccattcaccttgcaattgttaactgacacagattaccttagagccaaactagcttctactccaatggaacctagcctaaaactca

SEQ ID NO: 198976 - DNA, 2103 bp, Cannabis indica
tctctctctctctctctaaatctttctcatctcactcaattgagattttcctagcattgtttcattattgtaattcatagagagctactctagaaattacaacataaaagtttgtgatctgagtagtattatgtctcaaatcaatacaactaaaaggggagtaggtcattacccgttaaccaaggcggtcgaacatctataaaattattgtgtctattttatttactcgctttaattgtttacacgtggtgattttaatcataaataaggctctgctatcagttgaccaaatctaaggtcaatattttagtgctttcattgagaatattatttatcaattcgatcaatcactatggacactgtaacaagaataactctgactataaaatctacttcatcgggtcttcctcaagaccccatgactactgatcctaatgtttgtgttccacccaccactgtagtttccacgaacccaatggatgtagccaatcttgtcaaccctgccaacccagcaggtccaacaaactcgaccaacataacaagtctggtcgaccctgctaacccgactgatcccaatgaacaacctctgttgcccaaggtagatccaccattggcaccttcaacaaagggtttgtcaatgtggaacagcccccatgtaccataaccgactctattccctggtactatgcaggggaatcaggtctgagaattggcaagccaactattggtgagcctcatgtggacttgggaaaagattttgaattggccagacctagagattatgtaggccaagttggccaaactaaagaactacgtattgttggttgcgatgttttcacccaacagagacgcgaattcctaaggtggatggatgattaggaagccatcctctgggctcatcgagcaaagttggactgttgtaatagggaagctagtaacctaataaggcggtttaataagagaactgctgggaaatgacatgaccagatcagagatcctctccaagggaggctcgtcgatagatcgggtagggtgtacacccatgtagacaataggcaaacagtccaaccaagttcttcgggaatgaggacggacttccctctacccaaagacggacaaatcctgccaaatagatctagtggcgagaataggcaaactctggtacctggtggtatggggggctgaccaggtatctttgggtcattaacacccccactcggccagcctctatacagagtgaaattcctctctgaagcatttgtgagcaaatcgttctaaggcttatctttaacatgctaggttcggggacaagtggaaacaatcgaaggttagatatctgaatagaaggagtatttattctgctgccaccaatgtaaaattttttataacttcatatatgtgtttatttcattattttaggaaatttatatttaggatgttagattatagatttataatcaacatacatgttagtaaatttagatcttggaaaataaattccaacacacaactcatcccctaataccaccaaatgcttcaaatactgaaaccgacgatcagattccacctggagagccacacatggagttggaaaaccttaaggaggtcgatcctcgagttgaacagcttagccaaactgagtgaattcataatttgatacgtagttgaactgcccaaaccaatttaacatctcggttcattaacaatctatccaagctggttcaacaagcatcttcactgtaattgaattgaccaaatcaatgtaactttgagtaatgtaatgcttgttgaatcagttggggtacatacattaatatatattgcataacatggtagaaacacaaagatattatatatacatacatacattaatatatattgggcttatgatattggaatacctcaaatatatggtactatgggcttatcatattagctaaagtgatgcttttgtaaaagggaagttgacttaatgtatgtacgtattagttgcaacacgcttcctttgtcctccaaaaataccctttagtattttatcccctgccattatattagcacattcttccaaatcaagaatctgcaattcatgtggtcttaattact

SEQ ID NO: 198977 - DNA, 2022 bp, Cannabis indica
gcagcagcttgtgtttggctatcactgcagcgttggattttaggtgttagatttgtaattgtagggagtgactcgagacaagtgatcaatgctctcaatgagaatgagtctaattgggttattgaaaactatgtctccttttgtattaaatcctcaatgttagtagaacttgtaattatgttgtccataatagttaaaataggcatttacttaccagatgaatctttttaggtctcttcttttccgaagaacctgttttgtaataaccggaaagtctaactattttatcttgttaattgaatgatgacgctgtttttcaaaaaaaaaaaaaaaaaacaatggtcttacaatttctctaaattttattcgtaattgaaaaatggcctcaaaaatttaaataataggtgtactgagtattcaggacaccgttacccacttaccttgattgaacgtgtttttttcttttcctctctaaatttcaacggaaaaaatctcgctcttcaactccaagatatttctgccgcttaatccaaccacgcgccgccacagcgcgtcttctctttacttccggttctacttccgatctgcatcgcaaccggagaggagaccgtcgaataacactcgacggaactggaaaccaccgcgatggcggagccgccgggaaattctctcccttcgtctgtgaattctgctgaagttcgtgcggggattgaggaagagactgtcggtgagaatggcggtggtgtaaaagaagtggagagcagagaatttagtgacggtaatagaattgaagttgaaagcggagaagctagtgtaaattcaccaggtttgtttgtttgtttgattgaacttgtgtttggttagtgagaaagagaaagctcaggaaaatgaatttagtttaattttaggtgaattgtgcggagaaatgtattgaaacgtttgaatataactaacggtattgaaattcaaaaaattccaggaacttctggcaggagtggcgttaagataaacacattgccgatggaaatatcaaattctgacaaaatcgaatcgagtgcaggacctcttaagttagaaaggtcgagaactgagaggcataggcataataacaataacctactttctgaagatgcagcacaaatttttgatgacaaactttcagttcagcaaaaggtacaatatagcaaatatgactttcctgtttagtgtttttcttttgaaggtactactagcttacttttgttatattattattattttggtgaaagatgcgatctttttctgtgttctaatgcatgttgattaatgtttttaagcagaaggaactggctgaagtttaactgtgttgtgctgattatgcatgtgctttttactgttatggactttgtttagagactaattagcacttttgcccccaaactttgacatgtaccaaatcatgcccctgaacttttgggactattaaaaattgctcctgtattattgagattattggattcaaggatttttgtttaatttcgtttaatttaacaaatgtggcgtttgtcatctaccaattcgtacctccgaactttgatatgtattacatagtgtctctcgaactttgacatgtactaaattttgtctctcaaactttgacatgtaccaaattttgtccctcgaactttgacatgtaccaaatcgtacccctgaatttttcagactgttaaaatcttttcccgaactattgaaattaatagattcaaggatttcttttcaattttactaacggacccttgtcgagttgtcgtagatgatttggttcatgtcagtcaaagttcggggagaactttaaaattcatgatttctctgttaattaatgtgccgctgtgcttattgtaactgacgatttctgagagatattagctggtagaggcagtgattattaatcctgtggttccctactagtctactacaaatgagtgggtttgtgcattaatttgttgacgttggatgcatgctatggtccagacgttttgattg

SEQ ID NO: 198978 - DNA, 823 bp, Cannabis indica
gctgcttttcccaaccccagaatctccgatcaacaagatcttaaacgacagatcgtagctatggctctgacctgaagaagagcccataatttattttattttcgtattcgtaaattaaaaatgttttctttctcccttagcaaaagaaagaaaaaacttttctttctctatctctgactcctttgatttgtaatccttttctgtagctgggcttctctctatctctatctctgtctctaaaaagtacattagcgtggatgagagagaggaagtagaagaagaagagagagagatatatattattaccactgctactaataaggacaaggtttttaatctatatttcagatggtatgatggagatgaagatgaacatgattctgggtttgctcttttctttttccttccttctctctttgttgggatgtggtgtggtattatagggataaagatgcacatgattctaggtttgcatttcgtgcagttccacagctgatctggttcactacgacaaagttctcaagctcttcttcgttcccacatggcactcgcctggaaaagaccctcttatgcactgtaacaactgcaatctcttttatccccaatcattctctctcccacctctctcttcctccgatgattcctccgtctctccgcgttgtcgctcctgtgattggattgttgagtccgactttagattctgccccttctgcggttcttctctctgaactttctttatatcatttgggtttattacgaatgggatcttatagggtttttctatgatcacttttgaataatttgttcatgtattttgagtggg

SEQ ID NO: 198979 - DNA, 709 bp, Cannabis indica
ggatggacattggatgatattggattggatcggttcggttatccattggatcggatgtctcatccaacatctgatccgatccaattggatttttaaaatttgcatccgatccgatccaattatgattggatatccgattctattgaatcggttggaattgaatcggtcggttgggattcgatcagatgactttctgcacactcctaatgcatattaatttgttatgagtttctggagaaagaaaaaactaatttttggaacctaaaaagtaatgtgccgttgctttcacttaaattttcatgatataacatgaatgatgcaactcatgtatccattcaaactaagtaactctatcaatgagtgatgtgtttataaattgtttgtgcatcacatggatgatattatcatagaccattctaattggcaacatgtccatattataaggcattgataagattaattaaccttacaaatttattaccgatacttctgagcatcaatgtgccttgatcaagaacaagaccagatgtacacctagttttatttgtataataccaagttgccaattaagtagcaacatatccacatggactctttgtcatcataatgcatctaaatccaattattttctccagccaatatattgttccatacaataatactctcttattgaattcagcctcgtcacttatgtgattattttccaatt

SEQ ID NO: 198980 - DNA, 1961 bp, Cannabis indica
ctaagaagatctgaaagatttaatcaaaaagtttttcgaaacttctgtgttactaaacagcagaaatcattatacaatacataattagaaccacatatgaacaaattacctccttactctatttgatttaccatcaatggaaaaaaaataaagtgaccaactacagattaaaagaaacattttgaaggtaacaaattaattgaagagtgattgagaacacaggaaaagtggatttgaataggaaaggcaaattaattaaaataatctacacagtgcttcaacttcagaaaaggggccatattttgattacctagatcatgtatcatcttattcctaataaacataatgcttttttcatcaaaataaagagatgactttatagatctacaacggctaataatatacatctatctaaaaaccaaaaaaaaaaccttgaattatatcatatcacaagttattgtacacaacaagtatatgcgcagtgcaacaaagaccaaccttatcaaactatataaaaaaaatatatctataaataattccatttcaagactctaattagtcaatgcaatatataaacaaatcagcttttaaaactaaataaaatcaaaaccaaatatccaacctaaatccaatttttacccaaattctaaatttcatcaaacagagactgaatccagccttcaaaccagccaaaatcaaacaagaaagaaaaaaaaaaaaaagcaaacaacagaaacagtaactcagaagaactcacttgcaacaagatttctttcctattcaagagaaaataaaaagacaaataagaatatcttgaaacccaaaaatatgaattagaagtatgcataccttagcttaggttggtgatagaaagagaagtgttggggtaagcttgaggagaggcaatcaatcaatcagtgtgctcaaagattgatcttccttagctaacagagcttcctcctttaaccgtggcgttctttcctactcttcctttcttttctttcttgctttctttgtcttccaccaataataataatttgatatttgatgtattctccatcaaactttataattcccgccgccaacttactacccttgaccttctaacataattacaaaactaccctcgtcgatggcaatgctactcttctttctactcggtttgcttcttcattaaaatattggtccccacctttacagtgaccaaaataagcttatctgacgatattttatggctcacactgattttgtgtagttaaaagtcttcatctctttctcttcctaagattaatcttggccaagtgctctctctctctctctcgaatattccaaaaaacatcgttgagttcttgaatcgtaggacattgtgaccctcaaacaagtacatattttgtgaatacccaaaagttgaacaaaaaaagtcttcgcctcttaattaagaaaattaaatttattgctactaatccatctttaattgagggatttattgaaattaatcataaagtttcctctttttttcttttaaaataaataaatccatttacttagttttattgtgtatattcactactataatttcatgagataaatattcacttttatagattgtatattcattagcaaaactgcattgggtgaagttgagcataaattatggtcgcctagttactctcagtggcggagggagaaaaaaaaaataagggcgcaaaatgtaagagaataattttaggggtggcaaattagaataatgatatatatatatatattcacataattaatatatactttttttttaaatgattaatatatactaaaatgcatataaaaaataaatttttgggaagaactattgtattactaacatttatcatcgagtatttttttttttcccactgagactttctcttgagttaattgatgaggtcaaagtttttctcaacctaaaaaaaataataataaat

SEQ ID NO: 198981 - DNA, 750 bp, Cannabis indica
tagtcacgagtgcaacacactgtctgaacacagttttcggcgtgttaaaatttttcgaatttcttaaaattttgcaagatgtattaaataactataatttacatgaacatgagaaaaaatttcattaaaaaattatttccgatactaaaatgaatagagatgtatcgatgcatctcttttaagagtgtattatagaatttttcataatttaataatcacataaaatatttgaaactgtatttagacaataaaaaatatttaaaattttttaaaaataattacaatgaatgtatatgatcttaaacaaaaaaaaaaaaaaaactaacggtgtatactatagacttaatctaaaaagccagctgttgtaggatttttttttcttattattattgttattttgaatgggatttgggattagagaattaggtggtgtggattcatgtagcaattatgagccacaaaaacatcacaaacttaaactcaaactcatcacatgctcccatccctttttctgtttgtttcctccgaaaattgatatttaccttccattttctctctctctttcatatcacaattcacaaaaacaaaacacactctttttcttcttttcttttttaagggttgtcaaatttgttctttccataaaacactatgtcgacaatccatgtgtatgttctcttctgctgcatttctgccctttttctttagatttatataatttatacataaataataataaaagaaaaaaaa

SEQ ID NO: 198982 - DNA, 2282 bp, Cannabis indica
agcttactttcagtgggaggatgactctaatcattgttatggtttgattaagcatctgagtttggggaacttgagatacctgtcatttaagttttttagtatgtggagcttacatagtgattttgaggacactgttcttactagctggaggaaagaagctaagaggagtaatctagctaccttgtgttttaagttgaaaaggcttcaaggtgtgctactgaaattcaatgtaaatcatgtcggagatgtcaaagtcgattataagatggcttgggattattacaattaagctcatcataatcttcaataggaccctcattctttgttgctctgataggaattaaaccaagctcgagaaaatatggttgattgcagcatgctttttgaaagaaaaaagaaaagtggattggctaaagtttggagatgaaaattcagcttacttgcatgcttgtattaagaaaaataggagtctaatcagatttcctctttccttgataatcaaggacaggttttagatcagtatccaaaggtgttcaatcattttatctcacattttaaaagcttcatggggaaaacaaacataacttcagacactatctatccccagtgcatagatgaggggcctcggttatccttggaacacgaagtgacattgattcgaccttttactgtactagatgtgaaaaaatctatgttctctattccagatttaaaaagtctaggtccagatgggtatagatcaagagcatgtggaaggaattaggccaagaaattgcatctgctaatctgaaattttttcatgatggcttgattctgaggcaattaaataaaactatttctatgctcattccaaaagtggagaatccatccaaggctaccaactaatagatttctgcaacaccttatacaaatgcatctcaatgatgattttctcaagactgtctgaagtgctaccggggttggtgagtgatagtcaaggtgctttcattaaaaaacgaccccttccacataatgtacttattttacaagatgttttgaagggttatcaaaaggaaaactatcactcctcgatgcttgatgaaaattgatttaagaaaggcttatgacgcaatttcttgggacttcttggaaagtttattaaaagcctactattttcagagacaatttgtgggctggataatggtttgtgttagaaattctagttacttatttgtgatgaatgggaaagtccaaggtcaattcaaatgtgctaaaggtctaaggtaaggggaccctgcatgtcctttacttttgttttgattatggagtatatatctcggacactcaagtggaaggctagagataaaactttttcttatcatcctttgtgtagaagtttatagctcataaccttttctctgaagatgatttaattctattatgcaaaggaaacactgatttagttagatgcattgctgaaactttttcttattttagtagatgctatggtccaaaggcgaataatgagaaatcaaacatctactttgttggattgagtgaaactacaaaacaagcaattcaacaattgggttctttcaagataggttattttcctttgaaatatcttggagttctccttagagcaacaaaataaaagcagaaagactgtgagattattctgaagaaactaaagctaaaattgcacacttgggcaagcaggcacctatctttggtaggtagagctcttctcattaactctctcctcattggaatatgaggttattggatgagcatttttcaattacctcaaaaagttttcgaagagatagacatgatttgtaggaatttactttggggtgagaatggaaatgcaagcaagttgtatatggcttcttggaagatggtgtgcaagtcgaggtagcttggagggttgtggtttagagaggaccctaaatggaacaaagcttctttggccaagtacctttaagctatgactttgaaacaagatgtcctttaggtaaaatgggtgaataatctatacttgaaagatcaagaggtgtggtctcttgagttaaagtctgatatcacctggtattgaaggaagctcttgagacttagagaaacattctcttaggagaatatcatacaacgaggttgtagtgataagcttgtgattgggtaggtctatgacaagctcataaatttatctcggtatggatatttgtaagcaacttggtgtaagctctcggatccgaaacatagattcatcatgtggcaagcattacacaataacctccttacaa

SEQ ID NO: 198983 - DNA, 651 bp, Cannabis indica
gtggtagatgttactattgtgtttattgggagtataggcatcacccacacacataatttaccaatcttgtgacctttctttgtgtttggtcattctgaaacaaaaattattgttcttgttttttttaatgcttcattgtttgttatttgaagttgagaaactgactggatttataaatttctacaatattatatatttgatgcaggactgctaaagggaaccctcctgtaacttttgcagtagccgcatgtgaaactcaaaatgtaaatgtaacagttttgccgtgttttggattatccgaaggaagtggcactactgcaaaagaaatgtggagtaagatggttaaggtactcatatgcttctattacaggacccgtttgaaattgtttttgtttttatctttaaacagtagggaaaaaaataaaagcctaatttttattagtcttttttttaataatactctttaatagagtttttcaagtcacaaaaaaaatgcttaattgtatttaatttttcttttttttgattaacattaggtgtgaatattgaatgttaaatttttcttaaaactcaaagcaacttcgttttttaaaaaccttcctttatatacaatagactaggttgcgttttatttataatctcctaccaaat

SEQ ID NO: 198984 - DNA, 759 bp, Cannabis indica
tatttatttacaatctatagttaaaagcttaaatatttatgccacaaattacactaataattaataaaaaattcttctttttttaaatgtttatataaatagtattttttgaaacaaaaatgataaagtaatagcttttattatctaatatgttgtttaaatttaatttaaattattcttatcatatgaacatcggtgtgaagaactatgcttgctggaatgtttggttgggcaacactaggccaaacatcattgacagaattagagtccttttgttagctgccacgatttatcatatatggagaaactgaaataattatttattttccttttattctaataatgttaattatatagtgaacaaaattaaaagtgatgtgaaatatatgctcatcttgattaaagataggaaagattcaaaagaggagaagaatttacttcaaatattgatgtgtaattattaggagattgtttttgttgcttctcttcggagaagtttagtgtgtttgtattcagtggattgattaatgaaattctctttttcttgataaaaaaaaaaaaccatcggtataaagataacatgtttcaataaaagactcaattttaagttttgtccaaagccctcaaaccgcttgggatgaccttatttacagtcaaataattttttttttatatttttacaagagaaaaaaaaataattttaccggtatttattttttattataattttacaatgttttataaaaattatataaaaat

SEQ ID NO: 198985 - DNA, 417 bp, Cannabis indica
atttttttttttaatttgataaaaaaattaagaataaatacttaagaaattttctaaatattactagaataatatccacccatttatacatgtttatgagaattagttctgctcactcaaattttgtcacccttccagatattatgagtagtcaatttacatagtatatggaagggtgacataattcagtgagagatcaccttataatactaccgatgattctcataatatatatatatatatatatatatatatgcagagatctttactaacatcatcatcaactgattcacattaagaaatggtttgacacagcacaaccgtatattctactacataattctaactagctatattttatgcaggtagtggcaaagcacagacaagttgacccgcactgtcagattcttcaaatcg

SEQ ID NO: 198986 - DNA, 917 bp, Cannabis indica
cctaaaattaatattaaatttatattacttataaatttggatactttatgtcgctatttacctattaattaattatttattattgtaaagtgaaatggaagtggaaggagatgaaggtagcatttgctttttctatatgttagagaaaatttaatactttagtttggtttaacaattcaaattactaattataacgtcttttttctttataaaaaaaaatccaaaacaagcaataattagtaatgaatttcaaaaagtcatgatagtcactttgggtacaatatcgaataggttaagctcttgtttttttgcttttgcttttgcctttgttttttttcctcaactaccatattatacataggacaaaaattatatatatttagaagacaacaaaggaaatataaaagaaattcaaaaactttatattaatctgtttataacattaaaagaatacattctatgtaaaaacgaggaactaagagtcgagtataaccaaacgagatggcaatttttagtattttaaaacattgcatcatcccatttaaacccgattcttttatctataacaaaaaatgataatgaaaaaaacaattcaaaacagagcaataagagctaagagaccccaaatgcaggggagaaaccaacaaacaactcgtgtaacattatatatataaagggaaaatctgaaaaaccctattattctgattacgaacaacctcattaatcctttttgttttctgagtaactatatgattttatctaaatcatctttagcacagaggtaaatccgcaggaggaggctctatcgtctgtaactctccaactccattgtccaccaagaacaccatagctaagccccatgttatgtgaacgtccaagtgacaatgcataatccaagcacctatgtatatatatat

SEQ ID NO: 198987 - DNA, 2182 bp, Cannabis indica
caagattggcaaaaatgaccattatacccttccatactaatagccctaaaggtcacttaaggggactttaggaaattctaaaattccgactattctcgacattcccaatatctaactatatcacctcgctatactaaaaatactaggatgtgattataatagccaaacaccgcgttccaatgttgtcgggcactgaaaatacaaaattatgaaatttctatatgtgacataaaaatgcattttgaattcaaataaaccaccataaaatttaataattgaaaattaataaataattccataattaaattctaattatctactaatttccaaattaaagctaagcggtctttacacaagaaattaatcaacatcaaatatggccctcgtcatatggtccacatcttgtttttttttgcaaataggtgggccatggcatggcaaaaccaatattgtggcacgcggtccgtgttgaggcattctaagaatacgttagggtcgtggcattgtttactatgttgaggccctaatactttttttcaatttttgcccatttttatcctaaaaattctccatatatagctttaaaatttcttgaaaattcaccttttatttgaatcaatcaccaaaaattatatttttcccctctgatttcaaccaattcatctccaattgttccatttctcatttgattcgctaaacacgaaaaacacataaaattaagtgtaatattgcactacataaaatgtaactaaacaaaaagtacctaaatacaacccaaacacgatgcaaaataacacctgatacttgtgttccatattattgttaataatattaagtaaatataaaaaaaattctaatttatatatgaagtggtctgattctcatattggtatgagactgagattgagacaatgaacttaaacattccttagtaaaataaagtcattgagatattaaattaattactgctagtatggtccgctagtattatagataaatgtgacttagattcaggtcattagtgtattatgacactttagtggaggtactttatatgtgaagaatatgtagaactttacaagatattcattaatgttgattaaaattttaaccaactgacacagagccacagtaaatgataataaatgaagtaaagagctttaaaagtaagaaaaaaataccaaaatttatagagattcatccccgagtgtgattaataccataatcatcttaaatttatgtatttattttaggttttgtcaaaatcacaaggtctcaattgaatttctcaactacaaagtaaatacaaagataaaatggcagagaacttgtttacgaaaatttccatcaattcccttgttcctataataatctatttataggaaaagagtaaggctaatttccttgaattcaaactcaaacgaataagaaatatctcatgattatcggagttagttgcggaccaaatctttaaggatgtcacgctattttctcagagctcaactgctagcacacaattgctagctgggggatgtcaagtagattgctgatgatggtattgagtgagtttcccaactgaggtgttgagtagggttttccctactagggtaccgagtaggtttttcaccttatgtggaataggttatgaacctaccctctctttgggtgtcatttatccccattataattcatgtttcatacatacttaatgtaggtgctgagtagcttagcccatgacatcgagtagcctatggtgttgaccatgctgagtagctcttagtctagaaaataattttttttgttttcaaaattttaattttcattttaaaaatttaaaagtgaaattttttttatagaacatgtttttttgaaaaatctttacactttcactactacaaatattacattttgcgtcagtttcaacgtcgaaaaaattacataaccgacacaaataatcagtggtcaaatttaacgtcggttatgtgcagacccaggtttagcattgatgttcaaagagttagcaccggtttactaaaaaaaagacaataatgggctccgagctcgagccaaattatgaaaaccttaaccctaaagatttaatactcacatcaacctagcggcctcccccatttctaacattctttcttgctctatctaccctcattctctctctttatttttg

SEQ ID NO: 198988 - DNA, 738 bp, Cannabis indica
aaaatattttatatatccactgcgaatcgcgggatgtttactagtatttatataataattattacaaatagttaaaaaaaatactaaaatttttactttaatttatacgttttagctatgaaagtttaaaatttagctaaacaggacatattgtgataagagtaaagtaagagtaaagagtggacttattctagtctcaaaatctaaatgtgataataccattattgaaactatgaaaactaataaaaagaatcaatattcccaagttgggattgggaggtaagcaaagagtgatagtaccaaagaagtacccacctcaaaagggtcatacttatatttaattaataattaataatttaaatatatttgttaaagtgagtggctttatagtttaagcatgaaaaaatgaacgttatacagattatattcattattataagacaacatgaaacagaaaatagaggaggatcgattctttgagctggctataaaataaataacaatactcaaaaagtgaaatcttcaaaatgctaaagacagaactagcctagctgtaccaatcattgtctgccacgtggattagatccaacatttacccaatctgggaaacactagcattatatgtaaagcaaaagacaatagaatagatgttaactgtgtcacaaaccttttttttttcatcttaataggattgtagtttttttttttttttttttttagtaattaagtcgttatata

SEQ ID NO: 198989 - DNA, 851 bp, Cannabis indica
ttttttttttttgtgataatttacaatttttagcgatgcattgcaataataaaccaaatctaaacttagggatgaagtttaccgctagttactgacgttttgcgatgtttgactaaaataataaatatttacgtacttagcgatgatttttgcaatgtatttgcaatatgagactaaaaactacaaaacacattgctaaatatcactaaatcacactcaagatttcacgataattagcgatgtatttatattttttagactcatctcacaaatacatcactaaacatcgctaaatatgaaaatatttattattttagtcaaatatcgttaatcacctctaaaattcatccctaaccttagatttggtctatcattgcaaaaacatcattaaatatcgcaaattattgcaaaaaattagaaaactagaaaaaaaaaaaaggcaaaaaaaattaaaatctaattttggataaaaatacaacgaaacacaaacacaaatgtggtgagtggtggtgagcaatgcgctgtgttgagtttaggtagtattttatgggagagaaaatagaaagagtgagatgaagatgagagagaatgaggggggtatttttgagtttaggtggaataataacacacttttattatgtatttaatgagtggattaatttagatccatgcttaatttccctttttaattaactttaagaaaaaaaattatggtcagtacgactacagtattagaattaagttaatattatgatcaatcataatataagtgcgatcgttcgaatctattatattatgcatgcttttcttgccgaatatgtcgacttacagttactttgttatatggaggt

SEQ ID NO: 198990 - DNA, 1867 bp, Cannabis indica
gtaaactccccattaaagggagaaggggaattagtatgaccaatactcactaaacctggatgcaagggagggaaaattcttgatatacttgctcaagaaaagaatagagtgctcatacttactataatcccttaagcttttctagcaaaatatttaataatattgactcgtggactaagactcgttaatactctaaccacgtaaaaactctgagtgtcttcttcatatctctctctgaattgtattttatttagcttttatatttaatcattagtttttcaaaaaactcgataaacaaaaaataaaagtagaattttattatattaaatatcaaatttttagttaaacatatttttatagtttaaaactgagcttatcattataagttcatttataaaagtacacatgtgatgttcctataagttagggcattataaactacatgttctgaatttaatagaatttagatattaaacatataatcatgtaaaataaacatgtgaaccaagtatttgataaagtcacgaatgatttttatttcttttattgataaaaaaaagaaattacatagaatatattttatttgaggcataaaaccctagcactccaaataatagatttagattcttacactattactattaaagtctgaagttataacccaagacaatcaaacaatagtgtgaaaaattttctgtacatacacaactatacaacttcaagattcatctcacattagcagtaggcactctctctatttctctctctctctctctctctctcactataatctagagttcgagaactcttctctctattctcagtttgcttcctttcaatagagtgagaggtctttgtatataggctaattagctttacatgttaggactcaactaatataatagaatactaacaaatcaagaaaccaagaatccaaagctaacaactagacttaactaaatacatgtgcaagaataatgtggcccatagacaagttgggtcttatccaacacttgtgcttgttatgtaggttggatttgatttatgttgtattgtcatattttatatacatgatcatgaaattttttgggggaaattagtaagaatttatgttgatcacaaacattgttacaacttacagtcaaaactattagttacaaactttacataaagcctccaatcaatctttgtctatcctatttgaataattaaattcatgtattgaattctatgacaaactaaaagtgtaagagatttttacataaaatgctattcttttttactttttaaactttttcatggtagtgtagtttcagttttcttttttgccatttttttaaaaccaatatacggttattatttaaatttttacactttatacgatttacttatgtcatctataactgcttacatgtttccctcagttgtctccaatcaatcacgtttctgtgccagttttcactctttaacccactctatcactctctctttttttcctttttattttgattttttctccttcatccttctcatcatcgccatcttcttcgtttttctttctcttgttttttgtgtgtttcttctttgtttttgagtaatggttgttacttgatctcgttcgagttcattgtcctcttatcctaagaaatccaaaaaaaagcctattaaaccatctaaacagaaatctattcctcagaaaaatttgaatccccctaatcaaaaatcaaaagttgttttggatgttggtgagccatcatctaagcttcctgctactatctctggtgatgctagaaaagctaagaggaagagaagtgataatgatgatgattttgtgactgtgcatcctcaaaaggtatttttgaatttt

SEQ ID NO: 198991 - DNA, 517 bp, Cannabis indica
aataatttatgtatatgaggaagattgaatgattataaatttctcttaggataatttcattatgctctattttttctaataacttcaataaatgtagatatatcattatgtatgttttcttttatacatacttgttaagctaatttctcattagcagatttatagttatatatagaaatggaagaactaatctagcttttctaaaacacacttgaatatatatagctgaaactatataatgagtaccttttattaattgattaaacataacattattgtgatatataatgaagctcctcatatacgaagttcgttcttttatatttatatatataattatgagacgtacttttcatccataattaatatttagttatataattagagaaaataattagttaagaaatgcgaaagttaaatgtatgtatgtaataaaaattggaaagcatggcccgtgcgcagaatgataagcacaaataaaaaaaaaatgtatgtatataaaatagaaattttttac

SEQ ID NO: 198992 - DNA, 1354 bp, Cannabis indica
ttgactctgcaaacatatacagtactggtgctgaagggcatggtgtaggcaatggtaaagaagttacaaatttgaattataggttaaacatttctctccaccactaactttatcccattaagttgaattcgatcttacatgtcccttcatacaaagagttttatggacgaacaacccttaacacactactatcctcacccatttttaacccactattaaacatatatatataaataaatatatgttctactctaagaagtagaattaggttattgggcatctatctttaatgatagtggattatggtttcatggactaacctagagtcattagagtgctaccatttgcccaaatacaattaataaactgaccatatcctagctattatgatcctaattgcataatcaacattatatcattcatatagttattcacatgtactaatatcgatattgtgtgagtagtactcaattatgtaagtccatataaatattctaacattgtactcatcatctttttatttgaagaagagtatcttgaactgtgaacctgatattatcccttaaatagaagatgtttttgataaacagaccctattaaagttctttttttttttttttttttttttttttttttttaatcaaataagctcaaacatagttttacatgtattttgcgtgaaataacatgattttgtctctttatttgtgcagccaacttaaatatttatttagtacaggtttcatgtattatgcgactagatttatttatttattactggaattaaaaataagtataaataataaaagtattactatttagtattagtggtgtttagtatttttagatatattactttgggattaacatgtttaaaaattattatattaaattatataaaatcagatatttagttaaactaataacactattgagataaaagagtgctaaatacgtgcctcaattaataaatcatcaaattaatgtctcaatttatatacatatagttatatttaatttgaaacctgcatatttttcaaattaataaatactactattataatgctagtggagtaggataattattgtacaagactggtactgtattgtaacgatggtttcctacaaaataattttgaaagtctattatgtgatcttgttgtctcattctattaaatacaatgaaaatataccaagttttatatgattcaattaattaagcaaaaaattagttaatttttaattcattcggactacctttatggtctaattattattctaatctaaaagaaaaatatatggtctttctattattccactatccaattgccagatcaaactaactcttaaaaaa

SEQ ID NO: 198993 - DNA, 3091 bp, Cannabis indica
ttcatgtaaccctactattaactatagaatattcctactaaatgtcctcttcctcaagaggaacaaggtggaaaggagtaaaagtccattatttatgtatttgtataaacattcatcggccaatgagcttgataaaatagactcgtggattaaggatagttaacgcttagaccacgtaaaaatatcttgtatgttattacattatttacgccttcattattttcttaagctctaaaaatatttgattgccgaaaacacagtaaaaccatctcaaataatgaattctctacaggccatgtttgggcagcagtctaatcaaacaagacatgatgctactcgtagctacatgaattgcaagatgaagaagggtgtccttattcaatctcatgtattgcacatgattgagctaatgcatgagacacatgggctatcattgaggaaaggactcaagtgttaggatatatgccctgaaaagcatgtaaagatatttttgattattaaataaagagtaaacatttgatgtatgtgcgaatgttaaattgtaaaatatcaaaaaattccttattaatatatgaggttgtggcttgtagctgtacagagaactaagaccacttagctatgaataaaataatcaacaacatattaaagttattaattctttaatcaatagttactagtacagttcactgagtctagttcttcggtgcaagtatcttggttcggattactgatattgtgagacatcaaagtgaaggtactatatataatagattttatatatgacaaggacttctatgaataaagttgtctttattaacatgccatttatcataaagatctaatttatatcataatgatgatcgatagtagattggcctaaatcttgagttatcatgaactcatgttcatgtaattaatttctttaattcactcgttaaagtttctcagagaagatgattcttacaacttttgttttagaaatctaataatatggacgactgggaacatggtgtacaattatggaatcataactttcttaatggatcgaattttggttccctttaagtgttaattctggaattagaatgttgtgcataaattcaaaagggattttgaattataattccactagtgaattaatagaactaaaggataaagaagtaattaaaaaggtaaaatagtattttgaccaaaactaattacaaatcaacacatggagggctaatcagcttaatcctatttctcgaggttcctctcacatagacctctgtctttgaaagagatttgacacatatcccctactcaagtaggtatccatgctatctatgtcattatggtttggtccctatgagtgtcttggtggatgcccttacccgggtcgtttccccacacccctcgtatcatactgagtgaacccatagtccccaagtcatgtttacttggcatctacattcatgcgagatgactgtgggttgttaagttgcacattctcacaatttgtgttaccgcgtgaggttcttagattatttggccgagtttctatattgttggtgcttcctagattttgtagacctcctatgtccactggtatatcccttgtactccccggttgatcatcctagggatgcatgggatttctgtggttatcacctctaggagtttccccatgtctattggtcctcgagcctctaggtcttccctgaagtctcctagtggatgtgtttgattggttaggaggtacatcgttgcatgcagcccttacagccgcaaccttgcgttccaacttagcatttctttgatttgattacgccaacctttgttggagttgcttgttttccaattccactaacaacatgtatcttatgggatcttatgtgtcctcactacgtctttttgggatttcacccccaatttttacaaatcctccttctcctaatcgggtacttcaaaaattgttaagagcagcaaaagtcagtgtgcatgccatggtcagaataaacgcgggtaaactataaaagtctttcctaaaaattcacggcaaaacttttggggggaaaatgttatacctaatttttgagaaattaaagaagttaactttaagacttaaaccaagaagaaaaagacgaaatagaggctaaactcgactagagtactaaatgtcaccttgtttgagtgccacatggtggaaaaaatgccatatacggccactgacctgaaatagtgtcagtggttgcatacctagggtttcacccaagacgactttcttaaatatttcatgtaaaatcaagtcaaaatcaagactctagataggtcatttcaaatcctaactcgaggaagaattccaacaagacactaattgacttaacctatttagaataatgaagtataaaggacaaggcaacaccatcacggctagaagataagtgccatttgtgaccaaggcactccaagatgtcaatggtcgcatagggatagataaatgaggtttgtgtcagtagggcaagacatttggccaattctcgcgtgaaacttgaaggaaaacaagtcaaatatgaaaccaaggcctaacccttggttactggtcgcatatgatgagtaaaatggagatggaatacaaccatgactcttcctagagtcattggttgcacacttcgaggtaggttagcacttcatgtgaccaatgactccttctaatgtagtggttgcatgaaatatagaagaaatagattacgacatgcgatattgaatttcacaaagccaatggttatatgttactaaaatcaagccccttggaagttattttgggggagaataaaaggccatatgtgagcactaccaaaagtgcggtggtcagtgctcgtgtggctcaactaagggaggtttccatggaaattttggaagcttaaaaccctacaagtgtaaaccaacttccaagatattgtgaagtaaattccaagttgtagtgcaagatgaagtacatgtccagtgaccactcaaagatagaagcttctaaagtactttcaaaggcacaaataactccgtaagtcaagataaatatttattttatgtaatctatttctcttcattagat

SEQ ID NO: 198994 - DNA, 1441 bp, Cannabis indica
cctgaataccagtagtccgattaagaagcatacaaatgaccaaaaccctccaagggtcatccacatgatcctcttggagaagaccaatatcagaacgaggaggcttccatgtgttatcacaacatttcctctcgtacgctacgcttctcttctctgcagcagaaagcagaatgcttttcttctttttctctttacccaaacccacaacaaccgaatcaacatcttcttcttcttcttcttcttgtgatttctcaaagtaaggggacacctttattgccttcttcttcttcttcttatgcttttcctctttcttcaaatgagcaaccacctgaaaagccaactttgaagccaactcataataggtcttctgagaaaccaactgagaataaaccagttgagaacaagttaccacctttaatgcttcattcttcttgttcaaattctctgtttctgggtcttccttcaatcttttcttctctttatctttctcaaaatagggtgaaatcactcgttcttgcaccaccttcatcttcttccttttccttttccttttcttgttcaacacgatcatttttgtgttttcatcgtcgtttgtgaaatagggagaaaccacgcgccatttgtgatcggagttgggttgttgaaacggtgtcgttctatccgagcggtgctttgtcttttcattcactgccactgctgctactaattccattttgttcccaatacttcggatatataaatacatatatataaccaaataaataatatgcataacaatttatgcaaagaataaagtggaattgtaaaattcatatgagatctgtttaagaaaaaggttttgcattccaaccagagaaatcggagaagaaagagagcttaccactgacgacgttgctttactggttgttgaatattttgggggcaagtgagaaaattgagtacaactcaaactcgattgacattcgggctccaagtttcatctccaggaggatggagggtgctcttttccccttttttttttttcaaagtccttcgcgtctgtcgccattacgcaccaaatcgtgtcgagaggaggagtggtcaatggtcaatggtcaatggtcagagaagcaatcaaagcaacaccgtttaaatgactgtgatcaccgttttaccctttttacttgctcagcattttctttttttatataatatttatcaaaataatcagtaaaaaaaattattaaaaaataagagtacaaataggataaattgttgtatttatagtagcttttttcgtttttttttcttttgaaattgtagtagctcttttctgaaaataaattttttgataatatttttcgataaactgttatcctatcttccaagttccagtacattaaatcttcatcaatatgtaaacatagtactatattcaattcataacaatacccaagtaata

SEQ ID NO: 198995 - DNA, 769 bp, Cannabis indica
attatggacaagggaaaaataaatcaattgatgatacgaaaaagacaaacaatcatcataccagcaaatcaaaacaaaattgaaaatatgcccggaaaagcaaaacaaacctgttcacatctttcctcgatagatttcttgtcaccggcaccatcaagaataacagtgtcatcctttgaaattgtcacctgagacaaaagccatgttttagataaggaatcttaaagaaaaaaattaaatacacaaaccatcaataaaaatgattttttgtgaaaggcggctcttaaattaaaaagaaccatgcatagaatttcataaccaatcatacttcaaaggataaaacttcattttatgcttgagcttacctttttgcaagtaccgagcatatccaaatcaaccttctccaaattaagaccaagctcttcagtaatgacctaaaagtaacattaaaacgtgataaaaggaatcagtaaacatacaaaacgtaagagccaatgataatacagtaacaagaaaaaagaaagataagctcacatctcctcctgtaagaacagcaagatcttgcagaccagacttcctgttttcaccaaaaccaggggctttcacagcacagacctgcacatatgacgatattatatatgcagtaaataaatgaatagctaaaacatagaaacaactcaacgacaacaaataaataaaactgcatagcttctagaaccttgattccagcacgaatcttattcaaaataagagttgctagggcatcact

SEQ ID NO: 198996 - DNA, 943 bp, Cannabis indica
aatttatatttttcatataaaaaatttttattttccctttccaaatttaagtaaaaaattataataattttttctaatattagtaattttatttttctttattaaaatgaattatgtataattagaatttattaataaattaatttttttaatattaaatatttataaataatattaataaagaaaatataattaatagataagattaaaaaattaatttaaagtaagaaattaaaactaatattattttattaatatataactttaatatttttaatttacctaataaataagagtcttttaattttatagaattaatattatgtcatcaaaaaataaaattttatattattaattttattcctcgtacaaaatcattaggtaaagacatagatatatttttaagacaattggtgagtgagttaaaagagttgtggaataatggagtagccacaccagagatatagtacaacgaacacgatatttacaatgcgtgcagtacttttgtggataattttcctgctcatagtaatttgtctagatagagtggtaaaggatacaaaatttgtttgagacattataattataatgtgttgcctctgattttgcccaaaatacgtggaccaaccggatgatgacacgaaaatgaaaagagtttagcgtttgaataaatcagctaagtctccttaagcgcagagttacacttagacgtgtaaatcccacatgctcccggagagtaaggctacaacaaagcacctccgcgaggtgtcagatcctatctgaacagtcacctcgcatttaatgccgcatgggaggaggcgtattggaactgccatatgtattaaagtctgacggcacaacccccacgttgcacctactaggctatgatcaataaagtctagtaacggctactctacgatgaatcacatcagtcaaaaaggat

SEQ ID NO: 198997 - DNA, 1039 bp, Cannabis indica
ttaatttttttttttaaattctaaaggcattagtgacagacctatgttatctgctgttaataccctcactatagcaggagattttgcccgtcgctaatactttgcggctattagttgttttggaggccaaaacaataagagtgcatctttttttaagaggtacattatagaagcaccttatattatttttgagaaaagtattagaaataaaatattttacgaaaattttacattgtagatgcatttatgcactcctatttatttcagcatctgagatgattatttagtccaaattcttttttatggttgtgtaagttgtagttatttaagacatcctgcaaaatttgaaaaaattcgaaaaaaaaattaacatgtcgataatagagtttaaattattggttgtacgcgagactcttttactttgaacgcatgtaaaatagactatttgaacattactttttatattgtaaattataacgaatttctcaaaaatttacagaatgttttaaaaaattataacatatacgaccatgaataaaaattagactaaaatattttcatgaatgttgaaacaaactttttatagtttataggggtatattgtagaaacacatttgaaaccatgcaccaattgaattgtaggagcattaattactacacggtgatttggtgaagacccatggcgcctagcacacttgtgaagtataatatcactattggtataactcaatattaagtctcacttattttactttcatatatattatagaaaatcaataaccaattatagaacaacattttatcgtggtgctaagtactcataacaatgctcatttacaaaatattataattgaaacatactttttatagtttataggggtacattgtagaattacattcgaaatcatgcgccaattgtagaagcattaattactgggcacccatagtgcttaatacttattttataattaataggggatcatgtagcagagatccttttcccatccttcaaccatttaagtcaatcatgggactacat

SEQ ID NO: 198998 - DNA, 1495 bp, Cannabis indica
gttattttgtttcaatatatattcctttaacaatctcttagataaatcacaaaaatactagtcttatctatgtatgattcaataaatttgtaaattttttttcccctttttttttcattttcttctttaaattagtcaaagttgtcacctagagaaattggaaagtacaattccaaagaaataacattattggttttttggtgtgatgaagaaatattattgaatattaaaaacaaatgatatccatctttggatatattattggtacactatgaggactgcaaatcattcacttttgatctttagccaaaaattaaattaaaaaatgtcattcacttttgaaaatttggatgattacatcatatatgtcatcatgatcataattttgaagaacaatatcttcactcttccaataaagtattttagagaaaaattagcaattttggcagtactttttttttttttggtcttttcaataattacaaaataaataaaaatagtgcagttttccacatcaaatttcactgccaaaattcatattaaaattataaaccatatttaataataataaaaatgttctttttatttaagcaaaataaataaaataaatgttctttttattgaatccaaattttctaagtattcatttaatcctttttaaatgtgagatgcaaatttatggtgtacacttttgtgatagtaaatcatatatttttgcacatgtaaatatattatcacttaggttgcgtttaattgagaggattagaaatataaaactaaaaataagaatgataatagaaatgaaatgaaataaaatttaaaatgcataaaaaaattattaattagatccgttccgttcggttatccattagatcggataaatacaattggatataaatgttaaatcaattaatatttttttaaactaaaatgtagatgtattttaaaactatataaataccattggatgactgttggatggtaattggaaccgttccgttcgattatccattagatcaaatgcatgtcctatcttacaatcaattcgatccaattagattagattttcaaaatttacattcgatccaatccaattagaattgaatatccgattctattggatcaattgaaattggatcgatccgttataattagattagaagaatttttgtacacttttattagttgaactgaatcagctaatcaaacaccttaattaattaaaatagtccacactaattttaacaattttggttcatgctataatagtttgattaattcttatgtttttgatcactgattcatgatgggacagtgacattgtgatggtttaatttaatccacatcaaatttttaaaaaagtgattagtatcacatctcttgtttacactgaaatttcttaataaatgactttgaactttgcaggtaattcattcatgtatagtactattcttgttattttattgaatatagtattaatctttattcttttttt

SEQ ID NO: 198999 - DNA, 2031 bp, Cannabis indica
tcttcatcttcttctaacgacatcttagcctccaactcacatttcgatttatgattccaatcatatctggaaccattattgatattatcccaaaatatttttccacaagattttcctgttaataattcacagaacagaaatccaaagtcacagacatcacttctttctgtatatcgtccttgcgttactacctcaggaggaccgaagcctttagtcccaaaaacttcagcatctacatgagtttccccttcaggaattggaattgaaccatagaaattaaagagcttgggaccatagtcttgatccaacaacacttgtccactatggatatctctgtggatgaaggtctttgaatgaccatggtggagataagcaactgcattggctatcccaatcccaattcttaacttggtctcaaatggcagttggggtggcagtaacagtggtggttcaattgtatggattagaaaactagagagatcaccttgaatagggaagtaatcatacaccaacataggccactttgtttcaagacagtatcccaagagcttcagaacattgttgtggttgctcatatttgatgccacagcaatttcagttgaattttttccaaataatcaccacttttagaaaatggttctgatgaaaaggttttcacaaaaattccacaatcatctttttcaccatcattaagtactcccctatacatttggtagcctccaccctggtgtatgattctgctaacatgaaagttatttgttgctttattgagttgttgagaagagtatgaacgaagtggattggattttccattgaacaaacgaatggtttgctctaacactgctgctccattcttcaagaagaaatttttattgttgttgttttctctgtaacatgaaaacataatgaaataagaaatgaattaagattggttttgaggatatggagagagttggttttctgatttcgatgaacaaattatatattgattaattgtgagttgagacacagaacagaaccttcaccaaggtgcatgtggtgactttaagtcactgtaattggattcacaaagtcatatatacatatatgatttgacattgttttcaaagataagaaaaccacatgcactttctatctactattgttggaagaaatttccacatatatttcagcaattatgtatctattattgtggctgttgtaataacttgaaaaagtcgtacttaatacatgtttgttctggtcaatttcgtagaaagacttatattgaattgtattatattttcttttatggcagatataagataattcacgactaattaatatgcatgagactataaataagatgagagagagagagagagaaagagaccatattccaatccataatccatgtcttcatctccttgatcaatattaatcttcctttagttcattatgttttcatgctacaaaagtaatactgcagaagatgatgatgaagaaatgaatggcttctttattaagaatggaggtgcagtgttagagcaaaccattcgtttgttcagaaaatccaatcgaccacgttcatacacttctcaacaactcaagaaagcaacacataacttccatgttacaagaattaatattggaatggtaattgaaacatgagttggaaaccaatgcgtttgtggaagaagaagaagaagatgaagaagttagagatcaaatactggaatgtggtaagctggtagagagattatgtaccaatgcaagagttgaagagagacctaatgtggtaagctgtcattttgatcaaaaccaacagcaccatttgatttgattaatactccaacaatacactattgttttccttgtttatggttcttatgtcatgtagttgtatccactgtgttcttattcttaatatgttctttttggctgaaaaaattgctcatatatgtttatcacttctaattgaccctcaactcagtagcatttatatcctaaagtatttgtcactacacgttttcctgtcaataattcagacaa

SEQ ID NO: 199000 - DNA, 1361 bp, Cannabis indica
taaatagagtaaaattagagatatataatatgaccctaattaagtttttcttaattaataaaatgaacttctttttttaatagcatagaaatcgcctaatttaataaaatgaaggtggaattagacaagcatcaaatggctattataaatctatgaatcacgtgtaaaactaaaaaatgcataaatgattaaacacaagagaattaacatttaaatgtaaataaggcagagcccatatgatgtaagaattaataatcatgtttggaaattaaacagatcctttttgaggtaattaagtaatttttttttttaataaagaaaaatataaacagaagagtaataaataagagagtgatgagttgagaaagataaagataagagaatatatcatttgagagattggataagtgggactctcctttctcctttttatgaggagaccaaaaagagatattctttataaaaatatataaggtggtatacagtgacatacaaatatgttttctagtgctaccaaccaccataatacttttgttaattgaagtttttacatttcatataatgactaaataaaatgaagaaatgttattctggttttctgtttttttttcaggtgtatttcaatgagttaggagaggtgtttgaagatgttgtagttttattgtctaaatttccgaaggcagttttgtcatatgtggctcgctttggatacttagcgatcatggtttggcaaagcatgctctgcggttagacgatgaactatcctgactcgaggaggttttagtgccgatggcagacgtctgcgtcgtaaatttatgaatgactaatcattttgtcaaaaaaaataaagaatgttattgaatgagaaaatcccatataattaatatatgataactaatagttagttctactgtaaatgtttttaattggtttgctagttagttttattaactcactttaactgttatttcagctttttttcttctttgtattaaactctctataaatacaagtttcgatttgaattaacttttacaaaatttttgagaattttttttctgaaactacgtaatgttaagactttatatagataaattctcatttttacaagatcacattatagaaagaagaactactatcaacaaaagaaaatcaaatattttgatttacacatatctagttgtgtattgttattaattgtatgttttttttatattatgtgccaagttacgtctacttattttattttaagttttagttatatttatgattttttttcaaatgttatagagtgatatatttagaaagaataataataatttgaaagcaagagaatttataattgtgtaatatattgaaaa

SEQ ID NO: 199001 - DNA, 3059 bp, Cannabis indica
ttgaaagtggtgagttagaatcggcttgtggtgatgctaacgtggtattgatacccgaaaaagaaatgcccagataccatgaaaaatcttaggccaatcgctattgtaatgtcttgtataaagtaatcacgaaagttatgccaaccggatgaagccattcatggacacaattatttcggactctcaaagtgcattcataccagggagattgatctctcctttgaagttcttcattacctcaagaggaagagaaaggggaagacagggttcattgcgttgaaacttgatatgagtaaggcatatgatcgaatagagtagcctcttttggaggctatgttgatgaaaatgggttttttgtctagatggattcgtttaatcatgtcatgtgtttcttcagctaattacaaagttattcatggctgccatgagatgggccctatcattccatcaagaggtatccaacagggggatcctctttcttcgtacttatttattctttgtgtggagggactgccatctcttatgcgtaagtatgaaaatcatggttggattcatgattgtaaggtggctaatggggcaccaagagtctgacatatgcttttcgctggcgatagctatctttattgcaaagctacaagtgacgaagcagtccgtatataagagtttctttgcaagttcgagatggcttcaagacaacaagttaattttgctaagtcctcaattatttttagtgttaatactgaagctaatttgaggaaccacatatgttcatttctccacatgaatgaggcgacaaaaggaagtttttatttaggtctcccaagtacaatgtctcggaataagaccgtggtcttgggatatcttaaagataaagtccgtagacgcattcaaggatgggaaggcaagtttttgtcaagggcgagaaagaaattttggtaaaaataattctcttgccttaccaacttgtgcaatgagcgtgttcttacttgcattgaaaattagtagagacattgagcgaatgatgattaaattttggtggcaaacatcaaaggaagcacggaaaggtatacactggatgtcacgggataaactcagtaaaaataagaaagggggtggtttaggcttccatgacttgcgtgatttcaatctggcacttttgggtaagcaaggttggagactccttaccagacccgagtcattggcatcaaaagttttcaaggcaaggtacttctccgatggtaattttctctctgctcaactcggttccaacccaagcttcatttggcgaagcattcttgaatcacaagagctagttcgtaatggtacgatatggtgtgtggggaatggtcaatctatatcagttttgggcgagccttggttaccggatgcaactaatcccaatatcatttcaactcacatggctcttttagtgctattgtggcaaacttaatggctatggatagttctagttgggatgatgggattattggggatctatttgaggaaagaaaccaacggttgattaaaagaatccctttgcaagttacaacagcctcagataaactatattggacaaaggaggtgttaggtatgtacacggtaaagagtgcttatggtttattgcaacttcaaaaagggttttggtatgaagacactgcatcgaatttctggcataagctttggagcctgaaggtgccaccaaaaatagctaacttgctatggcgttcttgctccgagtgtctccccaaattagtacagcttcgtgtcaagagagtggttatttgtaccttgtgcccgttatgccgtgaaacagaggaaacaaccctgcattgcttggtcacttgtaaggtggttcaagtttgttggaaccgtgtaggaataggcacaactctaacacctggtgcatcagtacttttcaagtagaaagtttgagttgaaaagtattgtggttgttgtttgttgggctatatggggagcccgaaataatctcgtttggcaaaataaagaatttaacccacataacgttgttatgtttgctaagtcgtatcttgatcaatggaagaatgctagaaatttcaacatggatgcatcatggtctgaatatcagaaaggtgatgggagaaagcattggacaccaccaaatgttaatagtatcaagattaacatggacgcgatattgttcgagggcggtcgtagttatggcattggcctcgtggcccgagattctaatgggacgcttatcgagggcaaaacttccttttcccaaagcatggttgaactatctcttgttgaagccataggcatcaaagatgcactcagctggatcaaagaaaggcaatggcagaatgtttgtctggagtctgattgtctatgtgtgatttaagctctacgaagttctttaaaaatgatttctttatttggtttagttatttaggattgtaaatctttgcttgatactattggtaatgtgtttgtctcttttgttaaacgatctgctaatgtagtgacccataattttgcaaaaggctgctattttatttcctgaccgtcgtttcagtttagagcagtagcgaaccaagatttaaagtgagggagcgtaattttttttttttttggtaaagcaggggagcaaaagtaaacttaaaaagaaaaaagtattgtttgtaagatttgatcctttaacctctaacatatatataatttagcttaattattgcaccaaaattagtattatgtttataaatattatcttttattacaaatatatgttgtaatcaactaaaatacatatacattttttcctaatttttttaggggcgactatccccttgctacaatgtgggttcgcctttagtttaaaaattgttttaactgatttgttattttatttgctagatgaattaattagttgataagtaattgcaatagtaaattagatgcaattacaaaatatatttttttattaaataacaatttatatataattgttacatgagaatattttatcattaattaatattatataattactacgaagacttccaaaacgcctttactat

SEQ ID NO: 199002 - DNA, 1407 bp, Cannabis indica
cagcgttgtcccgtttaggctagctcatagaattacccaatctcatagagtaagggctaaggctagctcaactctccataaatgaaaaacagtgtcaaaaagtactttatgcctttgagtgatctgagttggacacaacctgaagaaattggctatgtcccaaaagtaagggtgcaggggcagcactactacttgctcaatgtgatgacctgacctagccatccacttaaacaccacgcgataggctagctggtcccttatgggcctatcagatcgaattcctcccactagtcctcctgccttgatctcatcaagtttcttagtggatagagaagacggaggagatatccattcttatagctggttcccgttctcaaggacccatgggttagaagcctcctccaaaacatggtctatctcgacctcacacagacaaccaagactattcaaggctacccaacctcatcgtaagaatctaaagggttatttgaaaatatggtacaagtcttgtactgcctccctgtgacacaacctctttgacttcagatccagtatctgtcccagtcaaagcttcctcatcctggctaaccataggctgccaaggcacaggtttttcaacctggtcagcccttggctcaacaagctaagtttattcagcctcctcaacaacaccgacccaccctctcgccatcagctcaatgatgtgagggtcgtgagggggtgccttatggcatgtctgtttggtctgtgccatgtggaactaggagtttctaccaatagtaactgcaatctttgcgataggaagatctctcattgatggagtttcccgactagtgggcaatgtgtcaggcacaccgtcctggaaaatataagtccacgaactagggaggaactacctccacccttggttcaactcctagacgaatagggcataaaattcatcgactattcgctctgaatagtggtgatgctggacctcaagctctagggaaccactactgaccttgagatcacttgaggagctactcaaagaaccagctggaaagtggtcttcaaagagaagactgagcaaatcttcctctattcaattgtcacctccccaaaagtcacgcgggatcagcaaagtacaaattccaagtacaagaacctagatgaacgttgagtcttaagttgattacttgactacaatatactcgccctaagaagtgccatatagaattcctaagggaatcaaatattggacaagggttgaacaagctcataaggccataataaagttcttgctagagtcaaaagaggaaaaaaagttggtcattacctcgggactgaagcgatctgccggccagggtcccaaggtattgttgtgtgccgaccagggtccctaacccatgcaagaaccagccaagg

SEQ ID NO: 199003 - DNA, 1351 bp, Cannabis indica
gcttacttgaggcagccaaaattcgcatttcgtgaatttagcataaagcttgttctcctggtgacgttgcaatacaattcgaagatggttctcatgtacctcttcagaattagagaagatttgaatgtcaccgatgaagacattacaaaatcatttaaaaattccttgaacactcagttcatttagtccatgaatgacgttggagcatttgttaatccgaatgatatcaacagaaattcctaatggccatatcgggtaagaaaagttgtcttgggaatatgctcctctcaaatcctcaactggtgataaccagatcaatgatagatctcagagaagacggtctttccctgcaactgatcaaataaatcgtctatccttggtaaaggatacttgttcttcactgtcagcttattcaattcctggtagtcaatacacattcccaatgttccctccttcttctttacaaacaaaaccaacgcaccctaaggtgaggtactcgatctagtgaatttcaagtccaacattccttgtaactaaaccttcaactcttttcagttttgcaggtgccatccgatacggagctttagatacaggttttgccccaggtatcaaagcaatttcaaagtaaatctcatgttttgttagtaaccccagtagttcctctggaaagacttccatgaattcttggactaccggaacgtattctggtcccattggtacttccttcatggtatccaccacactagatacgaaaccgacaatccatcccataacaaatctctttccttaagcaccgagattaatggaattctggatcctcgaaccctacccacaaacacaaatgggtcctcaccctctggttcaaaagttatcacctttcttttacaatcgatgcttacgttatactttggtagccagtccatccctaggttaatatcaaaatcatctaggttcaactcaatcaaatcaaccgacaattctcttctctccacaaacactagaagggatataaccctcctgttgtagataaccaattctctagtaggcagtaaggtaccaaaaccactttgtaaaacatcactaggtttatgcagattcctaattactctacttgacaaataagaatgcatggcaccataatcaattaaaatagtcaacaaggtaccattaatagaaatctgatgtcacggtagaaggaccatcatcagcctctgtctgggtcgaagcaaacacccgagtaggaactaaagtgtcatttttcttttgtttcaatctctgtaaatgtgggcaatttcttttagatggcccattaccccgcactggaagcaagctctagtttgacatttgccct

SEQ ID NO: 199004 - DNA, 1324 bp, Cannabis indica
ctctatgtatctttttgaattcactctaagaactgtattctttattgatgcttaagcttcttgtttttgttgtccgcacatgcttttggataaagctagtttgggtatccaactggaattggagctctcattgttcgaaatggtaagcagtgagctattttttagtgttttttttctaacctattggctttaggtccttgttctctcttttttatcctctatttggctggatttagtatgtatgtatattagccttatgcttatttataagtcgcgttttcatcgcctaatgacagatgctgcaaaactattgaagaagacctactttagtggaggttggcttctacatatcttcctcttaatcaatgctttattttatttacttatagttaatacctatgctaactgtaataggatattacaggcacagttgctgcgtctattgctgatattgactttgttataagaagaaaaggtattgaggagctgtttgaggatgggaccgtttcttttctaagcattgcatctcttagccatgggtttaaaattctcaattcccttaccatttctgccataaaccagtaagtaataaagttttacttcattcttccattaagtctctaatgacaaaaatgaactcttcttttttgtacatgcatgcaccttctttcctcttctgttagttactgtgattcttcttgatgctttcctcttaactcaacaaatgtatgtacatgcactcactgatatccatatgtaagtatatgctcacagactattggatatacacctaatgtatgtatttgtgcattttgttttaagaaacaagaactgcataaaatcataaatcagcatgaacaaaattcaggggtatgatgcccccatatatagaaaataaaaattaaaggacagaactccaccctctcaccaaatctgaaaacagtagattttaaaattctttagtatcatcaaaccataaagccactcataatttaatactataacacaaagaacaaatgtcttcttccaacagtctgcaccatagttatcttgccaaagatcaatgtatcagcaaatgcactaaaaactcaatgctccttttacatatatggacatttgtatgtatttatttatactgtatatggtctaatactaaaataagcatgctctaaagtttattgaacatttttctctttgaaggcatacaacatcactcgctaagtatgtgcgaaaggtactactgtccttacaacatgaaaatggaatcagcgtttgcaaactttatggaacttcagcatcaaaggttggttggaagtaattaaat

SEQ ID NO: 199005 - DNA, 928 bp, Cannabis indica
gtgctctaaattgtttaaaattatgaaaaaacgctctgccctgtaaaattttatgttacgaggaggaatagtaattagtaacataatttttaaatttatgaaatacctttttatgattctttgtgtcatcaacatttgtttttgcaaggttaaatagaatctttatgtttcaatagtggagttttaggggttataatagagatttataagttgtaacaatcaccaccattaggttttgttagaaactagattcagaagattaaatgtccccatctatatcacatggttattatatgttataatatgtaaccactttgctttgttttttctatgaaaaaaattaataaaatatttatatattttgaattagttagtgagtcacatgcataattgcatatataaaccaggtcatgatcagtcgacacaaaaaaaaaaatattaaatcttgattaatattttttatggggtcacttcaattattcaatttctctcactcttatttaaagaatgaaaatgtgcaaaatgccatcttaatcaaacatgtatttatatgaaacaacataaatctataaagggatatttatttagtataacttgctaaaaaaaataaaaaaaagacaccttttttactaccactattaactatattttattcctaaccttaagtctttggttttggcttaggcctaatgaaaaatttctttcatttaaaaaaaaaacaatatatatttataaaattgacataaatcaaatagttaatatttaaaagaaaaaaaaacatttagtacaatttttttttttttcagaaaaactatatttcaaacaataatatatgtcattaaatgcaatcattgaattatttataaacaatttttttttatagatggaagaaaattatctactaattgcgtaactttgttacttttat

SEQ ID NO: 199006 - DNA, 718 bp, Cannabis indica
acaagaatacgaccataaacttaaatcaatcataaaaagtcaaccaagtagaatggggcctgcgtttggccaatataattggactagactattggggggaaattgagattgaatttggtgcagtataggattaaacttcctaataatataacttatcacatttttatgtaataaataattactaaaaataaaagatttttttttctttttaacattaattaggagggtacttgagttgaacttaacatttctttttgtgagaagtgtattaccatgcattatctatggccacaaataaaatgatataaataagagttaatggtggcaaaaattttaacacttttattttatttatacttaattttaattttttttatttggcagtaaaattctcaaagttataataccgttggcaatttacagtttcgtctaagtttagctgttaggtatacaatgttagattgtccatgtgaatacagtgtacacataacacaattttattaattcacgtaaacatatattaaaaaataaaaatattttttttcctaacatatcataattttcatacatattttttccagttttcatttccttctttttccttcttcttctccttcttgtcacaaactctcaccaccatcgccaccatccatagtcaccaaaatcaccacccaccacttccaaagtcaccatcaccacgacaacttatttccaaatc

SEQ ID NO: 199007 - DNA, 999 bp, Cannabis indica
gttgctacagatctttccatggagccagggaaggatatttacttcaaactcacgaatattcgtaagcgcttccatcagctgtgctcatattttactgggtgggacattggtcatgtgaatcgaaggtgcaattatatggcacataacgttgctgtttgggcgagggagacaaggaaaataggcttaacaaagcctacggatatggaccctactgtgcttaccgattacatcgaatggaggaagcatgctggctaaactgccgctgtttatcttcctaatactgatttatttctgtagtttatttttcgtatgctttatgttggttgcttatttttggtttttgctttcttgtagtttatattttctgcagtttgtacttggttaaaccttgattatttgtttaatcgatttgctttgggggtgttcacaccctctcttttatcaaaaaaaaaaaaaaaaaaaaactcttaacacaatttttttgagagaactcttaacaccattttagttcttacaacaattataatttcaatttatatatatatatatatatatgtgtgtgtgggtaccctcttaacgagtattacctacgaatgagtaaaattttaaaaaattagagtttttatgcttcatttttctatctaattagaaaaatctctcacttttatattatatgggctgagattattccatcggttagaaaaaaaaattaaaaaaaaaaaagtttttaagacaaaaaaaaaagaataagtaaaaagttgaagtttcacttaaatatttttatatgaacatattttaatatagtataaaaagagatatttttagtatattttctaaaattaagtagttaaattaaacaaagtaaaattcaaatttctcctttattattcgttattaagtcaaaatttgatgaattaatatttatagttaaaatttgtttaatatattcatggtaataccctataaaaaatgaatccatatatatatatatgtgtatag

SEQ ID NO: 199008 - DNA, 722 bp, Cannabis indica
accatcaaaaccacacaagagccaattaataaatacactgttgttcagaatttagatttcgtttactttcttagaaaccaaacagaaagtagagtaatttttatttctcgagagagagagtaacataccatcttttaaaacagtccagaaaccacgcagtgaagagaaacaacctgcaacaacaaagcaaaagtgagaattcaacatatacaaatattatgcgtatataaaagaagaaaaacctaaagcagaaaaagcgaagaaattttctccgaaaaaagaagagaaacaaaaccctaaatcgggagaaaaaagagagacctagaagcagtaggtgaagaaggttgggtggatccagaatcaaagtgtgtagaagatgttttgggagggagagagggagggctctctcttcttctctagtctttgtattgtatttctatactctaaactatggagggaatagggatccagagcgattttggcttaagcttaatttattcttgtaatttatttactttattttttcaataaatgcttttatatatttttcacaatgggaaagcttttcttctattattgatttgcattatcttttattattattttgaaacacatcattgttattatttaaaatgcttttttttaatcgaaaataaaataaaataaatttaaacgttgccctttgaaaatatgacggacttgttttcacaaatttgatttat

SEQ ID NO: 199009 - DNA, 1011 bp, Cannabis indica
atccccactagaaattagccatcgtgaattcaagttgattgtaaaaaccaatcgacaatcgaaaataattcatagcatatgttggaatagattggaccatagcttttaagaacacttccttacctccaatagagaaaagttcattccatgcatgcaatagtttccaaatcctttccttaacattgttgaataatttctctttgtcttagctcgaataagatggcgggccaagataagactcatggcacggacaaatcacatccccaaagtttggctggtaaaagtcttcccatcatctggcggttcgaaagacatgattgacttttgagtgttaaggaattgcctagaagctttatggtaaacgcctaagactcttttgatagccaaagctgaattatttgttgcttgatagaataataggctaccatctgcaaacagtaagtgtgaaactgaaggggcatgtctcatgagtttaaaacctcttagattacccatatcttattcatggttgagtagtcttgatagtccttcagagcatatcaagaaaaggtatggtgatagaaggtctccttgttgtaagcctctctgggagaacatcatctacaacctctccattaagtaggaaagagaaactaatggatgttaagcaccgtataatcatagagttccattgttgatcaaagccaattttttccatgacagccgataagtaatcacattcaactctgtcaaaggcctttactcatatccagtttaagtgctaagaagcccttggcaccttgtgtcttatgcttgaggtgatgaacaagttcaaaggcgaccaaaatattatctgtgatgagacgatttgatagaaaagcactttgtgattctaaaatgatttaaggaagcacatccttgaatcttaaactaacacttttgatatcaacttgtaaatgacattacaaatgctgattggtttaaagtctcccatggccaatggtttcctaatttttggaataagaggtaatg

SEQ ID NO: 199010 - DNA, 689 bp, Cannabis indica
gctgcacactgtcttgctcgtagctcttgtttgtattcagatcgtatttttcagtgagagtaatgctcctggtgatcttttatctattgtaatggttgaaagttcattctaataaagtttaccaattttcctttcaaaaaaaaatatgatttgtgatttagtattgctttctatttttctttctttatttatatatatttaattgttgttgatattaattagattatgtgttgataatacatgtacaacagtacaagtaaattttagggtaccacttttgtcaaaattaataaggaagtctctattttttagatttagagaaattataactcaaacattcttaattaaaattttttgttgaaatctgagaccagccaacaacgtgttctcagggatatctgagatcataaagcgagcacgggctgccaattaatttttgtttttgagtgatatctgtcttgtctattgacatggtttgagattgtttggcagtccgagtttggtttcgtcatagtttgtgtctgattgttgttgggtgttgtatccttagtgtggtttttctggcgtttttccgatggcagcggggagttcttcagatatggagatggtggataggtatgtgaatgataggggtggtaatgaggatgaagacatgctactgcttgatgatgatgaaggcgatttgtcgc

SEQ ID NO: 199011 - DNA, 1301 bp, Cannabis indica
cttcactcgtctactctttaccaactagtgtactttcttttaatgagttgagatgcacgcctttcatggagcaccaccactacctctagagtttcttgctcattactaggccaactccggcagctatccaaagcacgctgcctaacagagcacatccacgaacatcatgagagtacaccgaggctcatcacatttgttaacattctgaggattcattcacacatggataactttggaactcggttttgataccaattgttgggacatcagacacattggtatgatattgttcgctttgggcctaaaccctcacaattttgttcttgggcactttcccaaaatgcctcatactaatagagatagtgtccatccttatatacacaagaaccttctcatttctagtcaatgtgggactttagttgcacacccaacatagaattacccaacctgtatgtattcaatgttataaatatccagcataacttcatggagaatttcaagttaattagattataaaaagtatacctcaatcagaaaagcatgccttggtttttgataaagtcacataatgccacttgttgtacatcttccccaattattgtgatgtttgtacaaggcgttataaatccatgttgtaccagaacttgggttatacatattttccctttatgctcaaatattcgtcaaccatgaattggagtgacttggggatttttaacacgattgctggagtgaataattcatcatcatcaccactggcttcttgacgaggcatagtgcctttacccttcgacgtatcacttgttaaaggtgtttgagcaaagggaccctataaaataccataatatacgaaaaattttatatatgatttgtaattgtgtttttaagaaaataattttacttttgaagttaaaattaaatgtttaggccaagaaaggaacgtattcgtcgtttccctaacatatcttattccttgaatcggtactgggacttccacatcatcttgaagcatgtttgaaatcagaatgcgtgcatgcgaatcatcataaggcatggtatgaactgtcaccacaccttctttgtcatatgaatatgctttgaccacgtagatgttaatattgtccgagcaaacaattactatttcatcatccctatgttcagtgaaaatgtacatggtaggtggatcatataatcgtgagaatgttcttgttgaacatattgttgagcatactcctcttcataatctttctcttattcaacaactattttttttctaagagatcaaatttttactttcaatc

SEQ ID NO: 199012 - DNA, 994 bp, Cannabis indica
attttgacatctaattgctccaattcaagatcttctaaagcaactaagcttaacagcaatcttattgaggtgtgtttgaccactggagataaaatttcatgataatctaatccttccttttgagcaaaacctctagctacaagtctagccttaaatcttgcaccttccacacctagtatgccttctttgtgcttgtaaacccgtctgcatccaattaccccatggtttcttaactataatccaagtcccatttttcttgagaaacaatttcttgtcccatggcattgaaccatctctttctgtcagccaaagccattggttcttcataagaaatttattcttcattgtccaagcctaagatgctaatggcatagaagaccacatcagcatatccaaatttgtttggaggtctgatggcccttctttttctatctctaactagctaatactcctgagtgtcatgctcttgttaatttggttcagaaacaatctcatctccttgtccctcaagttcttcttcttgttcctcaatcttttctttaacctaatcttgttctattggctccacctcaaactaaactttcggatctggttgcttttgtattctggtttcttgtgttttgaatagatccttgtacacaacttcttcatcaaacaaaacatccctgctgatgaacatcttctggtggttaccctttataatgctcatcaatttgtaacctttaactccttcaggatatccaagaaagatacactttcaagctttaggttcaagtttgtcttgctttatgtgagcataggcaagacatgtaaatattctcaaatgactatagctagacaagtgacctgaccacacttttatatgagttttgaaattgattgcagatgagggacatctgttaatcaaataacatgatgtgtttgctgcctctccccaaaagcttttacgcaaaccagaatagatcagcatacatctcaccctctccaaaatggt

SEQ ID NO: 199013 - DNA, 632 bp, Cannabis indica
aaaaaaatatacatacaatttagttaattatgacatatatttataataaaaaataatatttatagacataatattagttttaatttacttttgtcgccctccctctctttaaaaaaattatgtcccctcactttaagtcttaaatccgctactgaaaatactttatgcatttaaatactttacttacctcaattttctattattctagctaattcttaaaaatcaaagtttatctttgattaatataaccaaattactaattttacctttaaattagaaattctataacaaaaatactagaggcatagttgtcattctaaactaacacacactaacaaatattttatgtgttcataaactaatctacggtaccactaaactgctaaaattatactgctgtaactttttcgtcaatccaccgaatttccattgttgccgataataattataaaaattaatagcataacacatacgtatgacacacgtataacataaatctttaataattaattactatatataaactgcctattttccaataaatatgtgtttaactttaattgcatacattattccatatttcatatttttcataattccaattaaccactaattttatatataaatatata

SEQ ID NO: 199014 - DNA, 1147 bp, Cannabis indica
gatttaagggctcacgtccaatttcacttacaggcacctgaatcacatgagtaaaattaaacggaattggacagaagtccttaattctaacaatctcaataattcagaagaatttttaacaatctaaaaaatttaaatggtacgatttggcacctgtcaaaattcagagacaaaaatattaataagctaaaagtaaaataacactatgttagtttccttttagtttcacatgatcatatgtacacattagcaaataaaataggcataccaagagcttactttcaagctctcaccatggaaagcaaaattagcaagttttctcatttttgtccatttttcaccttgagacatggcaaggccatctcctagaattttcttcacatataggctccaattttgtttgatataagctccctctttgttgatcaatatctctttcaccaactcaggctccaaaatcaccaatagtgctcgagtgccataccattgaagataaacttttcctatttgattcaacataccaaaagtttacaacaactccaagaaatttaaatcccataatagagttttgataattaaataaatattttatgtataattaaatatatatatatatatataactaatttgaaaggaaaaaaataatcattttatggtttttaaagcaatagtttgcaaaaatatgaaaaaaaagtagaagataactggttatctaaccattaattggacaattacccctacctattttcccatatttctttttcacttgttcttgattttttttttttgaaaaaagaaaaggttttatttttgtactcatcataaaaaacttaaaaaatttacaaatttttcataaaaacataaaataaagtagtctaaccatataagttggcccaataatgaatattaggctgaagtttaggaaagatgatatttgacaactccgatataggtttggtcttggccgccttcatcatagttaatatttctttagtgttgccctggatgaacttataaggaggaccattgactccttgcaaagacaaaaatttctgaaatcgagttggaacccaccatagattgtggaagatcttgatcaaagccaaaagaagaaatacaaacacaaagatcaaaactatggttgtaa

SEQ ID NO: 199015 - DNA, 990 bp, Cannabis indica
ttttttcttgttaaataatagtttaaggtagtagtttaaccttttaatggtaaattatattttagtttactttatttaagatacgaagtttatctaataaaatatgttgcttgtcttatttaacagtagtggtttgctttatttaaggcacaaaatttacgtgtcgtttgctttattttaggatagtgattttagttttaatgattaattagattttagtttactttatttatgacatggagtatacttaataagtcgagtcatttataagcgttatcttcttacaagggtcaaagtgtgacatttgaccacccaagttatggatattacatatctgccacgacctagggctcaagtcgtgacatgtatacatgtatatgtgtatgtatatgtaaatttttctataattgtatatatgtgttagtatgtatatatgtatatgtatatatttatgtgtgtgggtatgtatatattctaaaaattttattttttttaaagcaaaaacctttaggggcgattttaagggtgacttttaggagttttaggggcgacaacagtaaacgtcagatatagtcacccctaacatagagacgacttttttgtcgcgctaataatacttttagatgcgaactattagtgacgactgcttaggggtaacttattgcttctaatagtaattagaggcgaatttatatagttttagtggccctaatactcatatttattgtagtgtcaatccaattaccatgcatgtaaaaatttgggtaaataccattttggaccctgtaatttgtaaaagttaccaattagaccttctattttgttaaatgataaaatagaccctatattttctaaaattgtacaaataggatcctgaactgattttttgtcaaaataaaacttaataataatctgatctagagaagttatgacaaactggttacattttttatatctgtttatttagaaattgtcataaagttggttata

SEQ ID NO: 199016 - DNA, 2743 bp, Cannabis indica
tttttaatttaaaagtccttttggaagaagcttgaatttgtagcttctcccaaaaggacttttgagatgctattttcaaaattagaataatttatataattcataatttactcacaagagatctcttttaaatgatatccaaaaactttgaaaagtatttttcactaaaaaaatcttcatacaatagttatccaaactgtaaaaataagtcaaaacatataattatcttatacttctacctataagtaaaagtagaagcttagccaaacaggactgtaacttctcttaaaaagacttttgagaagttatttttaaaattagaataatttacttacttccatatttacacagaggatctttttttaatgaagcgcaaacactttgaaaagaattttaaataaaaaaaaatatatttatataatcattatctaaacaattaaaaaaaagtcgaaatttttgcttcttatacttttagctataagcaaaaataaaattttagtcaaacgagatatgaagaaaagttaggctatcaacctcaatcacatcttccaaatcagaagaaggccttaaagtaaggccgcatcaaacatattctaaatttgtaaatctcttagttgtttaaactagcataaactataccgcctaaaacatacttattggcagaaatgcatcataatgcagacaatatttctcctcacttttcacccacaacactttctttcacatttactttctccaacatcattttcactctcatcacactctcttatatcgttctatttcctcagtttctcttctaactttctatcacatcagttctctctaactttctcttttacatctctttctatctcctaattttctattctaccttttttgcacatcattttatcactcatttttgcttacatcactttctgttttctcatatcactttagctcatttattctttaatcacttctacacttgaaataatttgcaattgttaattttatttaaaatgttaattattaataagttgaaacagaaaatgtgacattctaatacactttaaaacaaagatatagttatatatgtaaataacacaatataatgcaatactacgcgatatagtgcaatataataaggtgtaacatgaccataagtttaactgacgtattactatgcactaaccatgttaagataatttaattgagttatgatacaggtgacggcaaccattgcaaaaatccatgtctgaaagtatatcaactggtttatgccctccaatgtaagttttatagaaataccaatggcttttatgctcatgacctggaaatgggagaacaaatcacagaagatatcaggttccataaatagtaaagtgaaagcacaagggagaagccgcatttggctagaatgataaagtaacttaccgttaatgatccaaccacagagcatatcccaatatagatcattatattggtttggccatagcggggagaataatacaaaataagaactaatgtcagtgctaccactgacgctgtgtataaaagaaatgctgcaagcaagaggtaagaatacatcagatcaattaccatataaagaaagggaaagaagaaaccatttcactagtaatgaataataggtatctacctggttgaatagccaattcccagatttcttccacggaggtaagagaaagttcttgaggagcatgaaggacaatcatagtagagcctacgacacatagaaggcagcccaccatccccattctctgaagcttctctttcaacaagaaatgagctaaaacagcactgccatatccattcccagatcaatatatcagattactaacctaagcataacgctagaaagattaaatgagaagaaaaagaggaagggaagcagttttgataagaaaaaaacagaatggcagaatgtacctaacaataatactcagtgcaccaagcggtgtcacaagcacagcaggggcataaacatatgctacaaagtttaaaatttctccaacaatcactgccaagtattaaaaatcattaatatgtagtatcacatcctctaaagtgtaaaaatcaaggaaattcaatatccgggaaagaaaagctaagaaacgcaattgcctatttggttgtagacgttcccaaattgaattgacaagttataataaatagcagagcaaaatcattattgatttggttatttggtttctgaaaaagggcatactcaaataccaacatcattatttttctcatactaactactgaaaaaacagcagccaaagtagaggaagagagctaaaacacttacttgtaaccattcccagccaccaaagaggttccaaaaggtaaccataccctccaacacctaattcaacgcacataattagacaccaaaaaaataacaataattgaaaattgaataaacaaatcaagagaacgtactggcactggggccatttacgccagcccttcggagaccctttttcttgatgatgaagctggaaccaatgaaggcgctagagacgaccgccaagataaatcccgtgagattactcgagtacatctattattatcaatcactatgtacaacaacaatagcaccaccaaaaacgacaatttcgaagacccgaagatgaaaggctacgactcatatcacaaactgagatttgtggtgtgaaattttcagtcgtagaatgagattggaataagatttgcagttttttttttcagaaaaaaaaaa

SEQ ID NO: 199017 - DNA, 721 bp, Cannabis indica
  modified_base (670)..(670): a, c, t, g, unknown or other
  modified_base (709)..(709): a, c, t, g, unknown or other
atttttatttttttaattaaaaaaataaaaatattttcaaaaatatatattctataaaaatatttttacttttttaatttttaaaataaaaatcaaaatttgaaaaaaaaaaaaaattaactttcaaaatttatgtaaataagtatttttctcaattttaatctatttgtatttttttaattaatattttgtatcccaactcgtacctcaaacttcgccccaaatccggaccctaatcttaataccgatccggacccgaacctaacctcagaaccaaatgcgaaccccagcccagggacataggtcgacttgaacattagggagcaaaataaatatagaacaaaattagggagcataaattttgagaaaaaaaaacaaaagaaaaaccaaaaagagaatagagtaattttttactatttctaaaatttgggaggtcatggccgcccttaatacaagggtggctccattgccagccaagaatcaaacctcagctctggatccaacacatcaaccgtattaggcacatgagataaattttaacaaaatttttatattttaatactgaaaaatagtttaggagtaatatttaaccgtaaaaaaaatttagagaacaagatttgataatattaatagttcatagagaataaaaaatatttaaaaaaaaaacttntaataaaaatttgtttaatgtaaaaaaaaaaaaaaacgngagagagagaga

SEQ ID NO: 199018 - DNA, 626 bp, Cannabis indica
tgagcagacagattaaggaaagtgaaaaaacacgaccttaacacaacactcaaataattttttagactggaaaatgcatatttcataaagccatatatattttttaaaaaaaaaacccaacaaaaagttcacctgaatttaaaaacaacaccactgtccagggacttccatgaagtttcaaagtaattaatgtagaaaatcagataaatcatgagatgtttatagcctacataacttttatatttaaacaaatcattattagggctagttgtatgatataagtctactggatgttttccttatttttggcttatctctcttgtaggttctcctcatattcagggattgttatctaacactatgtctataaataaagttgaaatcctgttagatataaaacaataaagtccaatttttcaagcagccttcctatttcgtttacaactaataactctaagtgaaatttgtcctgaaaggaagcacatgaaacttctagtctttataaatgcttaagtaaggtggatgattattgtttaaaaaaacaaatgcaatttaaggtacattgcatttgcataaatcattgagataaactgtaacaggtgaaattaaactctaaagactcacag

SEQ ID NO: 199019 - DNA, 656 bp, Cannabis indica
aaagtgggagaaagtcagtgactcaaatcaaatggttcccaattccttaggaattaacacatcccaacatcaataagctatgacgcaaaacaagagataaaataaggaatatgcatctatgcttaacattggcttacatttatcaacaaaattttgaaaactatgcttgaaattctaattgggaacccaaatgcccctctcattattccaccctctgcttctcctctctctttctaaaaacaaaacacccaacttgaaatctctctatataaaacactcacttcagaaaaatatatttgatatatcccttgtaatacaatggaaaaaaatttttattttattcttctgaaaaagaactaaaagtcatatgtcttagactgacctcctcccaattttattaggatgcctcactcatggcgatgtaaaccatagtaacaaaattgatacattacaacaaatcctaagacaaataaagtttagaacatacatctagtatagtgaaaaaagacatcgaaattaagatgtctaagccaaaaaggtagcaacaacagaagtctgactccttgacaatttttgtcttgttcctctcttctctctcctcttactgagtaaattcccatgcacgttaggggtggtcatggtccttctagccatga

SEQ ID NO: 199020 - DNA, 881 bp, Cannabis indica
gagtggttgttagaagttagttaaagatagttgttagcttaatgcggtatataaagctttgtaatctataattaatcaatcactctttctctctcaaagactattagagctctagtcgtttcttcaatggagattctaacttcttcaactggtgaagcattaagattgaacaatacttagctacacaacaattaacaagtttcactacctaaattgtaccctatttctttcaatcattccctatcaattaaacatgatgagcacaattttcttccctgaaaacatcaagttcttacctcgagcaaaggcagtcagtttcaaaaatttcttgatcctactcgggttcctgcaaagttcttgacagttacaaaagagcaatccaacaatttcaactctaagtttaaagatagggaacaacaaaaaaaatctacttatctcttggctactctcatttatgtccgaaaagagtatcaatagaataattagttatgacacacaagaaatcacaaagtactacataactcagtttcgaaacactaagatgacaaggtcactcagtgattatatgctcaagatcaaaggtctcattgatctcctagctactattggccaccctcaaacacctcaagatcatatagaagtcatattcaatgggttgtcgtcgaagtataatgtgtttgtcacgtccgtcaccatgaaaagatgtatacatattacagagattgaaaccttattgatggctaaatttattcaaatagagaaaaaagccaagagtcactcgcaaacaagaacccctgggtccaatttccatggtcgatcatcttactcaacactgcttgtacctcttagattcaatcctggctcaggtcgtggtcctatca

SEQ ID NO: 199021 - DNA, 857 bp, Cannabis indica
tcatctcgatgcatgcattttttctcctcccatatatatgtttataaataaagagaattaataaaattatgtcaaataatttaagaaaatatcattaatttaaagcgctacttataaaaaatattaactactactggtgtccaataataatactcacaaataaaatacgaattagaggcaaaatcagaattaaaatttaagtagagtgattatttaattttatagtgaaatgctaaaatgtaattatggtgcctatcattttttattaagtgttataagctataggtataaccagtggcggacttagaatttaaaatgaaatagccttaatttttttattatatatacaatgtagtttagtcattccaccaaagctattattatgtccctaaaaaaaattttacttttagtcacaacaaaatttgtgattaaaaattaataaattgtgactaataataaattattattcctatgttgtgactaaagattcgtgactaaatgtattagtcacaaaaattacaatttgttgtgactagatgtatttttagtcacaagacatgttgtgactaaaactaaattagtgacaacttgtaactaaatactatgtttagtcacaaataatattttgttgtgactaattaaaagtcacatttagtcacaaaaaaaattatgttgtgactaaaaatttgtcactaaaagtaatagttctttgtagtgtgtctgtaaatatcattttattacaaatatatatcgtaaccaagtaaaatacatatatatttttttctcgatttttttttcaaagaaggcgactatcccgccttgcttttatgtgggttcgcccgtaggtgcaacttaat

SEQ ID NO: 199022 - DNA, 857 bp, Cannabis indica
taacaatctagaattgtaggcatcttaagtctcgtcactcaatctttgatagtttaagttttatgtttctttattataaaattgaactctaatgtggtgtataatttagattaaatttagtatatactaaaattatgtcaaatttgacacaaaatataatatatgagttaaatttacaccataataaatatcacattcttttcaaaagaaaaataaataaatatcacatttttacttaataataaaaaaatattacaatttttatttactcttttatcactattaatataattgataaattttatattttgtttatttatttagtagaatttttatatatattttcaataaaaaaaattgttgtctttttaagttaaatttacacttaatatattagaatacaattataaaattttagtcaaatagaacaatgtcctcaactaacttaggtttaaagtgtattattattgagagtgactcgagactagtgatcaatgtcctcaacggaaaggaattccattgggctcttgagaactatgtctccttttgtttgagatcaactctttcttttattagttgtaactttttaaatattagtagacagtgtaactttgctgcccataatgtggctaagtgggcattttcccaccagatgtttggatgtattccggtctccgctttgctggagaaccttctttgtaatgaccgtgaaatctaacttttaattttatttaatgaagtactacgctaattttcaaaagaaaaaaagtcaaatagaacaagttcaattttttaactaattttattataattttacaacattcattggagttctgagattgtcttatgttagagtc

SEQ ID NO: 199023 - DNA, 983 bp, Cannabis indica
ttaaataaagtcatatatttatattataacaagtaaaaaagagaaaagaatttaagcattatccaccaatcacaattcacaactctaaatttattattattatttatttattttttgagaaaactctaaaaagatatttataaaacgagaaaaaagaagaatatatataaaaaaggaaagtaaaggagttaaaataaaatagagttaatatttgtaatctcatattatccaaaaggtatggatatggtaaccacgtggcagaaccctagtggaggaaacgattcacagccagaattttggagatcagataattccaccagaaatttcagtcctttctatcttcttcttcttttgatttcattttttttgccctaaactaaatttagtgcagaaaaattaaaaaataaaaattgagtcttgaaccaaaaagcttcaccagagttagtgatcatggctagtatggcgtcggctgcctcaggtttcgtattgactcccaacgtcgccaccaccaccaacaacaccaccaccgccgccgtcaattccagtcggaacagcgtttcatatttctacctaaagaacaacgccgccaacaacaacaccaacagcagagccaattctagacttgttgttagagccgccgaggaaggagctgcgccgccagcagccaccaagacagcacctgaaggtggtgaagcccctaagcctaagcctccaccgattggacccaagagaggaacaaaggttaggtttttactcataatttccccaaatttgatttttcactatataatccttaaataaagattattaatttatgaagcatatgccttaaaattttactttttagcaaagatttaagatataattcaacatttaaataaattacgattatgggtgttagttaatatagttaataagtgagtttaagtttgtgattagtttttaattctaccgttatttctgttacacttatgtaatttatt

SEQ ID NO: 199024 - DNA, 570 bp, Cannabis indica
tctctcaagttctttacatgtgccgatcgggaagaggaaaacattcatggcgtatgaagggagagattaaaccacggatttaatgaggacctccttacccgcccgagaaagaaacttgccttcccagctggtaattctctttctcatcttttcttttaggaaccccaagacagcatttttgttcctaccaacaatacttgggaggcccaagtagagactatctgccccagcttcttgaacttgcatcaagctacagattcgtctcctcatgtccgaccttgtatttgagctaaagaaagcagatgatttatggagattgaccttctgccccgaagcttcttcaaaggtgcgcaagagagtaagaacacaatttgcttcctcctcagaagctttgcagtacacatagctatcgtcggcaaaaagcagatgagatatgggaggtgcactacgggcaaccttgcaacccgtgatgagttttgtagcttcagcatgtttgatgagtgatgaaagaccctcagcgcacacaataaataagtatggagacaacggacagccttgacgaatacctct

SEQ ID NO: 199025 - DNA, 611 bp, Cannabis indica
tttcataattgtatatgttatagctatttaatgtcatttgtaatttttttagaaaattccaaatagtttaaagtgtaaaaaataaaatttatacaatcacttaccatatatataagaaaaacagtagcgagtgcagcaaaataggtaaattctatttcagcattgtaaactactcgaaattttctaaaaatttacaagtagccctaaataactataacgcttacgatcattgaaaaataaactaaaatgctcttttttatgtctatttagataaaagatctaccgaaacactcctttaaggagtgcactatcgaatcgacttaccctataacataatccccaataaatatactaaaaaatgatactttttttttaattctcaatttgcagcatcactactgatattttccctcaagtaattttcaactttgctggaaatgcatctatggttctagggcctaaagattaccttctagagcaaaattcaatagtgagttcttatactctttcatcactaaatttcattgttaaaatactttaattttctttcatttcgatctgatttcgaaaaccaaattcattggcataggatggagctgagctatggtgca

SEQ ID NO: 199026 - DNA, 710 bp, Cannabis indica
ccaatgaggggtctgcatctcctcttccagtgaaattgtacaaccgattgttgaaggcagcacatgcagcccttccaatggtgtgtcctcctaaaatccagaaacagatatttgcagttagatactactataaggaaacaaatatgtttgtacacacaaacaatatatatagatgatacttggggcttagtacctgacaaaacaaccaagtctttgacatttaaaccctttacagcaaacatggctttaagagttgttatgttagcaaaaggaggaggtaagttggttaaagcctccaaggctactgacacttttccgtctcttcggcctgttggaacattccaatatggtccattgatctgaaagggaggagatataagttaaaaatggagcacttgtgcttgtttgatattatcttttgttaaataagactttgtttgattaaattgaaaagtactctttgttaaatgatgcaattattaccatggatacagcatctcttgctaccaaagtcaagatatcagcacatgatacaacaccagggcatatcttctccacttctgattttgcaaaatcaatgatattgaaccctgttaggctcaaattgggaatggctgctttctctgcttggttgttacttgttgagttcaatagaacagaaccatcacatccctgcacatacaacttattagtagagagtagtattcatg

SEQ ID NO: 199027 - DNA, 1708 bp, Cannabis indica
aattgttattatttttccatgagtaacaattttccaagctaaatccaattctggaaaggctagacctagtagttacaacttggatgatgcaagtgaattcctaggtttacgtttttcttaataaatggaatatggatatttcattaccttgcataacttgataatgatgtttaattgttgttctgcaacctgatttgatataagaatatattaaactaagttgtagaacttaatctgtgagttttggaaaaatctcacaaacatatgaaagattatgttaactctgtgcaactttgttgaatggatgtcgtaacaagtaggctgatttgacatagggagaattagctattcaagtctatcattccatagatattttttctcgcaattaatttattagtatttgttgctttattttaagcatatttttattgtcaccaatttatattagtttcatcactcatccatttgtttttttatgtttttttccttactaaggactttaatttgttaattagtttgttttatatctattttaatttgcaatccttgtggagatgttactccatatatttgttatattacttgttatcgattgcttgcacttgcatagtatattaatttccacaacaagtttttagcacagttatcggcgattaaaattaaaaattgtgtattatcaattattttacaatctttttgttgtttaagattctaacgttgcttgagtgggttgtatatttcctttttttttcaggtttactctagtacatgaacgagtaccaagaattcattaatcctgatctattttctattaatccaaaaactgagcgcacattcaaagaaagaagaagagcacaacaaagagcacaaggggaaatagaaatgatggataaccaaggagattgacagcgagttcaaagggagctagccccaaacaatggtcaaaatctagtgaccatggcgaatgatagagatcaaatcaccccgaccatctgtatcccctcttttcaatgagctcaattcgagcattgtgaggctagaaattcaggcaccatagtttgaattgaagctagttatgttccagatgcttcaaactatgggacagtttaggggcgcacccaccgaagatcttcaccttcatcttcatctatttatggaagtgagtaattctttcaaattgcccagagttatagaggatgccttgaggttgaagttattcccctattccttgagatatcaagcccaagtttggttgaaatccttgccttctacattagttacaacttggcaagaattaacggggcagtttttaatgaaatattttcctcccactaagaatgctaagctccaaaaggagataacttcatttcaacactttgaagatgagtctttttatgaggcatgggagaggttcatggaattattgcagaaatgtcctcacaatggcattcttcattgtatccaaacagaaacattttacaacagtctcaatgctaatactcgaatggtggttgatgctttggcaaatggggctttacttgctaagtcttataatgaggcctatgacattattgagagaatttcctacaacaattaccagtagcctactactagagaacctttggggaagaaagttttcggtgttattgaggttgattctattaccgctttggctgcccaagtagcttctatgtcaaatatgctgaag

SEQ ID NO: 199028 - DNA, 1258 bp, Cannabis indica
aaaactgaagaaattgccgatgtcttggacacattcaatgtcatttccgagcttccctccgacagctttggtgcctatatcatttctatggcaacttccccctctgatgtgcttgctgtcgagcttttgcagcgtgaatgccatgtcaaggagccgctgagggttgtcccactgtttgaaaagcttgctgatcttgaggctgctccagccgctgttgctcgtctcttctcaattgattggtacagagatcggatcaatggaaagcaagaagtcatgataggctactcagattcgggtaaggatgcaggacgtctctctgcagcttggcagttatacaaggctcaagaagagctcatcaaggtggccaaacaatttggggttaagcttacaatgttccatgggagaggtggtactgttggaagaggaggtggaccaactcaccttgctatattgtctcaaccacctgacactatccatggttcccttcgagtgactgttcaaggtgaagttatcgaacaatctttcggggaggagcatttgtgctttagaaccctccagcgtttcacagcagccacactcgagcatggaatgcatcctcctatatcaccgaagccagagtggcgggctctcatggatgagatggcagttatagccacagaagagtaccgctccatagtcttcaaggaacctcggtttgttgagtacttccgcctggtaagttcgacattctatctttcatagtgatgtttttgtgctaaaagaagtttcatactttcaaatttgatgctataaacctgataatgctctgcaggcaactccagagttggagtatggtcgaatgaacatcggcagccgtccatcaaagcgaaagccgagcggaggcattgaatcacttcgtgcaattccatggatttttgcatggacacagacgaggtttcacttgccagtgtggcttggctttggggcagcatttaggcacgtaattgcaaaggatgtgaagaaccttcacatgcttcaggagatgtataaccagtggccattcttcagggtcaccattgatttagttgagatggttttcgccaaaggagaccccggaatcgctgctttgtatgataagctccttgtctcagacgatctttggtcatttggagaaaaattgagggccatgtataatgaaaccaaacagcttctcctcaaggtataacttaagctacgaactctttagttacattatatcagcaagacagcaacctttgct

SEQ ID NO: 199029 - DNA, 2083 bp, Cannabis indica
tgactttgctcacctattgacatactatattccatgtggcctcggtcttgtctacatggacatgccacgtcatgtggataaaaattagaataacacactgattaacaattagttatatgtcaaaaaaaatttggtggataaataaatgttagaatactataaaccagcgttaaataagtcgatgaaaaaaataaaaaaatactgaccatgttatatattgtattttaggagagcgttgccttcaattatcagtgtgtgaataaaacagaaagccaactgtaatgaaaatttaaagaaacaaaaatttaaatcaatatttctagatctgtagcgctagatgaatgtgaatttcttatcattgtcatgattagtattgaataattacaagattgaaaatctaaaaaaacaactgcaatgcaacaattatgatattatctaatgtattgatacatgtattttaaattaaatctattttgaattagtcgagaactccaaaaattgttcgttcagacctacaatttttgaatctataatgtgaatggaggattagttttgtagaatttgaatcgtaattgatggttgaatttgtgttcaaaccagtttatatgcatattttttcttaccaatcagcaatgattgattttctaattaatttcttcttcttctcaggtcacgttgctggaattaatggtgaatcatcaatcgaatgggttgatttgctgttgtcaccctcgtttgatcacacggtggcttcgaggatgagaagcgtggttcatgtgttgtgcggcttgaaattgtgtgtaagaagtattcttgtaattttgtttatgtgggctgtataattgttataatagtcggcccaatgtattattgtaaagtttttcctttgttttattataatagaaaaaaagtccttatttttataagtgtaatacattaaaatgttaaaactttggttcttaatatcaaagactggtatttatgaattttgcttacgaggcccgacccttagtattggtgggttaggcctgtgcctagggcctacttagcctaggagccccaaaaaaatcccccttttaaaattatatatatttttttttaacttattttaaaaaatacaacatttagttctaactaagggcccaaaatatttttttctaaggcccactaaattttaggaccgaccctgttgcttacaaaattgaaaattacatacaaaattaaaaatataagtccactaaaatgaaaatagctaatattttctttttttcaagaaattgttggacaaagcttccatttctcatacaaaagaaaaatactaaaaaaaaaaagatacacatagaaccgcaagcacaaattatagtcaaaacaaataaaattgtatgaactgattcccaagctcctaataagaaaaacacacacacaacactttgaaaagaaacaaagaacaaggtaaggaagttgaagccaccaatttcatagaaaccaaatccactctaataatctatagaattgagttttgaactatagataattttaaagcataggagagaccttccttagctagttcttctaaatccactattgtaggttggagccttgtaattttggcaatagcttcattttcttcattagtccccccctccaagaacactcccttaactttgccactttgaatccagtaggatccaaacttcggttctttagacaaaggatcagggtccccgaaaatcacagtttcgccaacattatctccataaaacttccatgatagatcaaaaacccttgaatagaacaaaggaaggtagtcatactcttcaatggacaccccacgttcaccagctttgatggctttcacagcttgctcagctgactttctagcatggtcaacatgctgaactctcctcatctcgttgtatattttcatggggaaagtagctacatctccaatagcatacacgtcagaaaagcttgttctgaaaaactcatctgtcttaatacctcctttgtcttcttcaatctgtcctttgaacaatgaagtaagaggccttccaccaatgccaactacaacaatatcagcctg

SEQ ID NO: 199030 - DNA, 780 bp, Cannabis indica
acaaaccatactgtgctagtttacaaccaataaatcctaatccacaaacaaaataacacaaataatgtcatacatagctcttcataacaaatttatacatatatattatgaattaaggttttatttaatctcattctttgatctgtctaactcttttttttttctaatatgtaatgaccaaattaattcagctataatatgcatgtgcctctctcttaattaataatactaattaagtagtaaagtatgtataacagcaaaataaaagaattttgtcatggaaatggaacataagatcaaaggaagtgtgcattgaactatttcagttgcaattatttttttaatttcttactgttttatttctcccacctagttttacacactttgcactacaaagagattatatatttctctctttcaaaaattaccaaatagaaaaagatataagaaagtgagaaaatttcaaataaaaaggagccatggtaatgacaagaatctcaaatttcaaaactgtgatgagaatgaagcataaaccagatgaaaaaaattagaaattcttcttgcacactcttttacttttgaaaggtgagtttcttcttttgttattataatgtttatatttatgataatttaaagctatctttttaagtttgacaacaaaatagagtaaacaattactaatattatctcatgaggatcactcaaaatagaagacaaaagaatgaagtataattcacaaactgtgatattctctactaacccaactactctattctgaat

SEQ ID NO: 199031 - DNA, 568 bp, Cannabis indica
atacatgtaagttggaagttttaaggtacaaacaagaaatgaaatcatatcataaattaaagatttctcagtcacaacaacaacaatactagtaccccatttactaataagatactttgtttgtgaacatgattatacaaacaaaacacaaggaatccaattcaggatgaattgcaatttgcatcaacattagactctagtttgtctctggtttcatcaaaccctgcatagaaaaacatgcttctatttcagttgaacacgaaatgacattgattccaccttcactaaaccaaatgcacatgttttacctcaacaactatctcatcgacgataccatagcttagccgtaggtcattctcttgtttcctttacccgatcgacaaagttttagcatatatgtcggttttggggtaagacatcatttatgtgttgatctaaaccataaattcaaaactcatcagtctaaaacatccacattgacttcccaagctttcttaattatacacaaacataccatagaaaaggttaagaatgtattttataaccttgcaaatacatcattataaaa

SEQ ID NO: 199032 - DNA, 619 bp, Cannabis indica
tttttttttatttgttaatatttacagattgattacttaaacttccaccagaaaaaagaatcaggtttagaattgttgaaaaaggcagccaatgctggtcaccttggagcttcttatttcatgggtattatctatatttgcaaagaagatcatcataaaagtgatgatgaatcagaacaaagttgtactaagcttgggttacaattattgggcaatattaaaacaagtgcccaaatgctagaatgtcgaaaaaaattgaaggagatagctaattcactatggcttacacaaaatcatgactttctcataccaaagttgtttgagtgtcaatttccagaacgaaagagaaggttgtggccttgtttggatgatgatttattgctatgttgtcacacatgtcgactcaataatgaaattacttttgtttgtaatttaatggctggttgttctatattttcatatcaaacttgttatcagtaatgattttgtattttatttatttgagggcatttaatgtgaacaaactcactttagttagttattgtatttgttttaataataaattttaattttactttctttaatttaaattttaacacacctattattctcttgttgc

SEQ ID NO: 199033 - DNA, 641 bp, Cannabis indica
ctgaatcagtggctgaggtgctaggagtgatactctatctgtctctaattttgatgatgaagaagatgaaatagacggggtgaaggttgctcgaacaattgaggatgtggcagaagttgtatctccgagatctacttttcgacaattgtttctagagcaagaggtttgtttgaacttcaggagttttttaggagcaacgaacagatccaagactcagattcaagctgggaagattgctacttgaaatatggaggagaaagatctctgtttaagatagttgggcgatagggaacatcaattatggtggattctattactaagaatagagaaaggcttaattttcccagaatcttggtcaaagtcaaaatgtttcaggatttccctgagaatatctctttccataaggaaattgatcaaaatattgaggttaatgtgaagtatgaatcaatcttggtggtgtgtaaggaatgtaaaaatttgggacatactgcagcagtttgcagaaagaaggaaaatctacgagttaagccaaagtagatttgggtgaaaaagacacaaaaaggggagatggaacaaggaaagcgtgagattaaggtggaataagaagggtttcaggaagtgaagaaaatagggaaaaatcc

SEQ ID NO: 199034 - DNA, 1244 bp, Cannabis indica
aaaaaaaatatagtaattaatttactatatatttgacacatgagattaaagaataaaaaccttagctctaaattattgattctcatgttcctaaacgctaataaaattggttgtgcgtattgaataaattcatttttttggcagttttattatgggattgtgagaattagatttgactaaactattatttattatgtatgttggattattaagttttaaattatgttttttatatatatatttttctttttaatgaaatcaacttaaatggtagtttattggagaacattgtcccacatagattaaatgtaaaagtattgaaccacatataagaacatggactactccactcattgccaattggttttgagatgaaactccatgattctcaacatagctaaaatggatttgatggatccaattcaatctaataaaaactagttaatgcatctaatagttggaaccgatccaatctaatatattaattggatcgaatcagatgacttaattcgatccgattggatcgaatgaaaaaaaaaaatcaaatatccaataaataattagattggatcggttaagtctaaatccattagatttgatccaataaatactttttgacatagatataactactctaaaatataatacgtgttttgatgtcaaatatgaattattatattttaatgttttgcaaataataagtaattacataatttaataatattaagaacacgtttgaaaagtcaaaaggaattgaaattaggtataagtgaatgtaattacatagtattgcatgtttttctaatcacgtaatgacattgtaattgtgtaatttaaagtaatttagatgtcttcgttacattctctaattctcatagctcccatgaaaattgggtgtaattatttctgttttttaatattaagtactaaaaattattataatcttgtgtagttactaattattttgccaaacaaaatattagaaatttttaagtaattaccacattatatctaaacacacattgtattttaaatagtgtaattactactaagggtgagcaacggtcagtttggttagttttttacacacaaaaaaatccgaaattcgattttcaatttttatggttataatccgaaaactgaccaaccattatatgaatgtaaaaaagctgaccgttttaatctacggtttggtcggtttaaaccgaccaaatatcatataattagaatattgtatcaaatat

SEQ ID NO: 199035 - DNA, 798 bp, Cannabis indica
atcacatgggaagagttgtactttgaactatattcagtcacatctctgaaacttaaattgcaaggaatataattagtcaaagtactaaccgaatgagctaggacagcgcgctggagaatatatcatgtgcatgtctttctaaaatagtttgctaccaattaaatttatatatatatatatatcttatagttatttcatgtatggatatatcatatttaatgaaggtcaaattaaaatatgtttattaaaatacatgacgactttttgttatacgaacaaaatacataatgatcacttgataggtcgttaactctaattgcccccccgcatgttggatataaatatttgtatatatagtacaaaatgagcaaatggccattgatttcggctaaatatatgaattgcacattaattaatttcgactaattatggagttgcatgcacaccatttagtttgacttatgacaaaaaagcaaaaaaaattcgtttgactcttaattaactactttagaggctcgtttggaacgccgtattaggtcgtattgtattgtattgtattatattgaattggattatatatcatatttttatataatactatgttaaactttaatttatactaaaatattatatatttaggtgtccatcaaatttaataccacatatagttttacataaaaatattgcataaaatgcaattcaatataatataatacaatacgacctaatacgacgttccaaacgagcccatagagacatgtcttataccgtgtacatgttaacttatatactatatat

SEQ ID NO: 199036 - DNA, 947 bp, Cannabis indica
aaagtatatttattttacttgtttatcatcaatagatacgatatttttaagactgttatcgaaagtggattagttctaccatggccatgtatgtcattgcatcagacattattccatctttcgtggcactcaaggttgatcattatttaggagaattttggtgaagtgactctgaattgaggaaatctactcattttattgcttggaactctcttcacaaatccaaattccttgtcgaattagattttcgaaggttggtagctagtaacaaggcctttttaatgaaatgggcatggaaagcgctaacaaataaaaacatcttatagagtactatggtaaaaagaaaatacctgaagagtaataattaatttcttgatatagaaagtaagataatcaaaagtgctcattacaaatttgaaaaccttggacgcaaatctcgaaagaaatggaaaaccacgttaaaacatatgatttataaatattatcaacgttgagatttagttggagtaaacatttcggttgataatagttcaaatgttggtttgaatcctaagaaaagtatagtaaaaaacacatgagtttacttattcatcataatgtatttcaccacttttttttcttcttattttcttttttgcaagatattggaccttcatccacggttgcactattttagtgtattttttttttactaatttaatgcagtattttttatccgatgaaaacagctaatcaaatgagcgaaacttagagggtttacttgatatattttttcatacactttcttattccttatctctagtttcttgtaacgattcttctttctattttttggatatatctgaagcttcaatttgttattatgaatatagtaaatgaaatttgtaacccaattatgaccattatagagttttatcttaaattaatagaaagtttttttttttttt

SEQ ID NO: 199037 - DNA, 2801 bp, Cannabis indica
catttgaataacaatgtgtatattatatgtttatatacacaattatgacattcttaacaatttagttttataaaacatatcgtctatagcataatttacaattagtcactaaattcttaaaaaaaaaccacaagaactttaaaataaaactaatatttacgtgactttgccacgttaactctcatctagtatatataaacatatataaaatcacagtttatatttttaagacttataggtggcgtttggttggaggtaataaaataaaatagatataaaagaataatttttattctatttttttatttagttacatttcaaagtattaatatcgttacaatagaatgctctttctactaggggtgtttatctaatccaatccaatccacactattttgcttatagtgcatctgatccgcactaataagtgcggattttatattttggatccatttcaattcgcacaatagctcaaatccaatccaatccacaaaagtacggattggatcgattactttttaatattgaattatttaatatttattaaatttttttttatatttattaaatttttttttcacataactaacaacaaaataaaataaattattgttattttaacaaaataaaataaataaaataacaaataataattttaaaagaagaagaaaaaattgtatgtaaaaaaatatgtataattttattttaaattatattctcctcacatataagaatatatatttatatcatatatattaagttttaaattattatttttttaaatcaaaatattaattgtatatgtaattttttaaaaaaaaatgtggattggactggattagttacttttatatgtcaaacaacattcaatctgcttaagtgcaaattttgaatttttcaatccaatctaatctgcacaagtgcggatatccacactttgtggattggattaaattggatcgtgtggatttgattggattgagttttatgaacacccctactttttactattttggtggaaagacaattttattttgaaaaggaaggaaagatcattctaatgtaatatgagaaaaaatgttatgattttttatcaattttttttatgcattttaaaattttattcaattctattcctattcctattcttatacatgttttcatttctcccaaccaaacgccaccataatgtaatgccctacttacttaggcattacagtattttttttaagtactgtactaacttttgctaatcaaaatttttttatcataaagtgtattgcttaataaaaaaatttataataattaaaactttactaaacatacaatatattttaaaaaaaaaaattaattcatagtttgggatactgaaatctatttcaaagatacataatttgtataacaacaaaagtgtcatctaaggacttaacaaaactaagcatgcgttgtctcgaagatcgcaaccctccaggtctaaccgtccggatatgtacaaatctttaccaagctcatcactcactgctgttcaattttcgctttgcctttacctacatatagaatcataattgtgagttgacaaactcaataagaaaagtataacacatacaacatatatctaacctgtaaacaggtgtccatacacccaattaccacaagtctattatctgcgtccaatgcgtataactgagtctcaaacgttcttaactaagtacagtttaccataataccaaaatgcactcactactctagtcgtggcattgattcgtacattcaatattgcctaacatatatttgtcggtatcccagaccataatgccatttatgatatgttaatctaattggcaatacatactatccaacactctatagtatcattagatatcagtatctaaatgcaaacatatgtacatccatattgttatttctactatactaagtaaacagtatcataaaatatgtaaatctaaaacatgctcatatatgcatctgaatactaatcttacctcaattttgaaatcaagtttcccaattaacttgagaggaaaaaattactcgacaatcaaaggccttaagtcacattaacggtaaattggtaagtgtctccctaaaaaactttctaggacttaaattcataattcaaagtttctctattgataaataaggtggcaataccctaaatatcaagaaaacatgaaaattgagataccccatgactgaccaactagtccaccaattttttgggtcaactggttaatcggttcatagaacttatcaaccaattctacaacagaaaatccaactcagaaatttttgagttctttcctttcatacctgcccaaaccatttcaaaacttctagaccaacttattaaagagttttaaacctatcccatagatcagaacacaatttaatccaagaattacaaatttactattattgaacaaagcttgacttccaaaactcaaactttgcttcaaactagggcaacaactgaagaacaccaattcaaacatgaattctggtccaaaacttcaagaaactacttcctaactaaataacatactaacagaactaaaaactctaaaatcacatataaaatctatctttccctccatcaaaaacaaagaaaaaagtcttatcgatataccttgagctttgcttcaatttattctcacttaaaagcctttaatatcactaattcaggaaaaaatttgggagaaaaaatctggtttccttatctttaaacttagccgagcgcgagattgatttataattttggcttttacctcttgatttttttt

SEQ ID NO: 199038 - DNA, 1668 bp, Cannabis indica
ctggttaccaagagaaaaaaaaaatagatcggaattttttttgagaaaatacatattgaaaagtctataatcagcaaccaatacgcgaccaaaatcaagagaaaataagacccaaaaaagatgacacaacttaccccagaaagccatttttctcttacttgggatgacggtaaagggtttaaggaaagagggcatgccataaacgagacttataatacccctaggggatatgggaggagaggttgaagaagactataaacgacggtgcgttttgtaaaactcggcttgggtggtgacgtggcaacttctaataccgtattaattaactattaagcaaggcggtcaaaggctagtgattctagtgtgatgtagcgcgggaactagactttcctttttttttctttttttttttctattacgaaattatgcccctaagatgcagattaaaactctttacgaaattatgcccctaagttgcagattaaaactcttacttaattattaaaatgattggatttaagaattttctaattttatttaaataatattataattattttaagtattaaattgtatcaccgaactttaacatcaaataaattatacttctaaactttaacttggaccaaattatttctcgtaaacttttattaaccttaaatttgcattagtaaaattggataaaattccttaaatccaacaattttaataattcgagaggacgacctgaaaagttaaggaagcatgatttaatacatgtcaaagtttgagagataaaaattttaattagtctttttctttgtaaataccatttggacctgtattttacaaaaattaccgatcgaattctctattttgttaaatataaaattaaacctggtatcttttaaaacagtacaaaatagtatcttgagttcaatttttattaaaataaaacttaatataggctaacttggaagtgtttatgactagactgattacatattttgcatatgttcatagtaaaaaattggcttcaagttatttatgttaaaaataaatttataaaaattgaactcagtgtactattttactattttgaaaactaagaagatttgatttgttatttaggaaaacaaaaggtcagatccataattttgtaaaacacaagatttaaaatagctttatcttcttttttttttatctcttccacattattatttattttattttcatggacgtttgacaaaaaaaattgtcaaaaagtaaaaaatacattagatttcgtatttttaaaatttttgtcattcttaggtatttataaaataatccaattttctagtttgtactatttatttgtaaaaattttatgaaaaatatttttatttatttatttatttattgctgttgaaaagacaaattaaataacaaatgattatcacaattcacaacttttataatacaaaaattattattttaacaaaaaattatacgctgtcacttgagttgttcttttcctcttcgtggatcaccaaccattttatgggtttggtcgggactatggttgggggttgttgtttgtgcattcgaagaagttttctaatggaggatcgacgctttttgtcaataaattttggggtttccgttcggtggtcgttgggattgactttggtcgaatttagtgtgggg

SEQ ID NO: 199039 - DNA, 1737 bp, Cannabis indica
tctttcttttttcgcaatatggtatcagagcaaagaaactaaagctttcccttgatcttgtttctgtcgcttccattgtcgcgcttcttctccgatgaccttcccttgagttgttccagttctggcgattcactgttctctgctttcctgatcagtgtccttctacttgatccttctttgttcttaaatgtcatcaacacaagaagaaaggagcaatgtcgcacaacctacgattggagatcccacaaatccaatcatatgaaatgatcaaaaccagcaacaaatcattcaataaaggaatccttttgaagaccctactgacccacactaccttcaccatggaaacaatccaggtaatgttcttatttctcaactactcacgggacaagacaattacatgtcttggagtagggcaatgcagttggccatttcagtaaagaacaaactaggattcttggatggtacaatttttaaacctaggccttctgattctgttatgtataatgtctggcttagaaataataatatagttatttcttggatactaaattctgtttttaaagaaatttcttctagcatcttgtatgatgagtatgttgctgccatttggatcgatccaaaaattcattctcaacaaagaaatggaccccatatatacaacttgagaaaatgattgctgaacctgagtcaagataatcaaactgtcagcatgtatttcaccaaactaaaaaccttatgggaacaactctcgaattacaaacccacctgtgtttataatgaatgtacttgtggtggtgtcaagaaaatccaagaataccaccacatgaaatacatcatgtctttcctcacaggactttcaaattccttttcccaagttcgaagtagcatactgctcatgaactccttactagaagtcaacaggacttttcacttggtcacacaagaagagaatcaaaaagggaattctagtgctacaacagaacctaatcctagtatggcgtttgccttttaaggagacaaagccagcaacaataaaaaggattctcaaggaaacaaatcccatccttccaaaagaaatataattttttgcactgattgcagcatactcggtcacaccattgagaagtgctacaaaattcacagctacccaccaagttacaacaaaaacagcaattccaaagatgcaacagccaatcaagttcaaaccagtaatgacactaataaatctatttgtaacgccccaacaataagaacgccacgaatagtaactaaacatatgctgaccccgctaaactgggattaataaagctaagagcaaaaatttaaactttaaaacaaatacatagtaaaattataacttgtaattatttaactttacaaacattcaaaatgtcacattttgtttcgagatcctgtaaaaacttttcaaaatattacaagttatcattacatgccgacctaagcagaaacagctgcgattacaaaatatttcttctagtagactcaaccatcatggtctagtatggcctgaacatgtacaacacaccgccaagccctcaaactcatgactgatcaataacagatttaccctttcctgcacagcagagcacccgtgagccaagcccagcaagacagtataaataacaatatgcataataatcagaaatcacataatcattgatgccactacatctatcgtctattttacataaatctacttgttacgctcacacgtct

SEQ ID NO: 199040 - DNA, 1141 bp, Cannabis indica
gatatttcatgcaggtggctcatatggaacgcactggacactacttaacagtgaaagacaaccaagttgtgcatttgcatccttcgaattgccttgaccacaagccagactgggtcatctacaatgagtatgtgttaacaagtcggaattttatacgtacagtgacagatgttcgcggggagtggttagttgatatagcaccacactattttgatctggagaattttcctcagtgtgaggccaagagagttcttgagaggctttacaagaagcgtgaaagggagaaggaggagagcagaaacagaaagtgaagattttctgggatttgatttgatgatcccctctggttatctttcaaacatattctgtatctttgctgaggaatgccccacttatcacactcgtcaatgaaaatgatggaagatacagccatgtttgatgtatcatattctaaatagctgtagaagtagttgaccattatctttacattatagttattttgtaattgtttatttgagttggattgcgtggtttcatttaaaagaaatcacttgtttttaaagatttagaagatggcctatatttttggtgttaatcgagattgcataactcagggaaataagaaaaaatgttcatagaaaaatacatgcaaagagcagttaattttataataagagttttatttgcagtcataaagttaaaagtacactttaatattaaaaaggaaattcaatgcatatattatatgattagagaaaggaaggaactactttaatgtgatggctgcaaaaagacattatatgatttactaaccgggggattgaacatgaagaaccacgctagagtttgacatgtcccataaaagaacagagttatcactgcatcctactacgagatgggaattggcctcctgttcctgagatgaactccaatgaccctgctttagatggatcaaaggaaagggaaataaattttcaatgtcaattggagaatgtgcaaaagaaaaatcgatgaacttgttttgaccttcaaaaacaaacatccaaaacccaactaccgaacttgggcaaggattggagtagcgtcaagtccaggcctagctgggcaaggcctaagctatatagcttgactctcttttcac

SEQ ID NO: 199041 - DNA, 1894 bp, Cannabis indica
aagtcaatagtcaagtgacagtttctaattggtatgagtgttattttttgtttaaaaattaatttaaatatactaataaaaaataacacataaataataacttgacacttataacagtcatatttctaaaactataatttaattattattaacgtcaaaaattaaacttaattaaattaaactagttaagttataataaattactcatacatatatatttgatcaggttgcctagctagtggcgggaggtgtacgttattagctctatgattgtttgttactttgttagttacacatacaaattataattgtagcttctcataatggttatggtagactactactactactacattagtagtgttttgcatgtgaattttcatttgcctataaaacgtgtatgtatcttataagcaatatatagcaagtaagtaagatcccaaaaaacgacacttgaaattaatataaatattatatattttgaaacgacaaaaagtgatgatattgtccctacctttgttgtttgtattcgtatgactataacactcaattcgtggcctacaattaattctcaaccaataaaaaataaaaattatatcaaaaattaaaagtcacggatcactttgatgagcttcttaaagagctagctcatttttgtggttgggttactacttactactcatctcccttcctcttcaggacaaggatcatcatcttattaattattattacactttttcttttctttttttactcaattgcattacttcttctcttttttgtctactaatataattaacatttgttcttcatgcacatagacattatatacttttatttttatcggtaggaacattttcattttgagcatatagagaaattatatgtcactcaattttattttataatagtgtatattatagttataaatattttacttgagtaatttatggtgtgtaaaataaaatatatacttatttatttatttttatatataaatataattaaatattttgtattatattttaatactataaattatagtaaaaaaaatacaaaatgaatatataattaatataccatattatataaaaaattaaataatatgtatatatattttgttgatccaatcatgacaaagtatggcagttattattatcattgttatgtaataaataaattgcatgttgttatttcaaacatatatttgaaaagtaaatagaaaagaattatgccaatgttgttttttattatgtcaagacaatgtatatatatatatatgtttttgtgagtatttgattaggtggcagccactcgtgacttcttgccaatatatgcacttctccattgcatgtgcatgtgtttttttcctataataagttagatatatatatcataaatatcaagagcaaaaatgttatatatactgtttataattatatattgtggacaatgtcccacatggaataaaatggtaaagaattgagccatatataagaacatggctactccactcattgccaattggttttgagatggaaccccataattctcaacagggtttatggcacgaatagacatcaaattagttttatataagaagctaaaaccataaacataaacatataattatatatttgttgtattctgtgtccagaaatgtttttatatctatttttattgttaaaattattatggatttataagaatgccagctgagtttagagccagggtgtcaagagaaataggagtgttatttgaatttgttgtgtacaaattttatgaggacatgaaaatgaaaaacacatatatacatacaaaaaggttatctgtattggagtgttggcatccacattttgagaatttttcagttgtcttcttattcttttctatc

SEQ ID NO: 199042 - DNA, 960 bp, Cannabis indica
cctggaaaaaattggatagagcaagggattcatcctgaagaaattcacttcttggccacaagttgaactctcaatggacatagtcttggttgacttatcacaactagtagtatttttacctttcaaaccagggagcccactcggcccaaaaatatcacacggcccactttcatttatcaaaagcaattctgatttgttgttctccaaatagggctcggtcccatgaatagacaaattagggacaatacacttattataaggcccacgtgatgaagctccattactaaagcccactttagagaccggcccattagaagagagagccggcccaacatccatttcacaaaaccctttccctttcccactctttttactgggttcagccaaatttgaaatagaaattggcaaagtagcaggcgacttttcctcttccagagtacgaccaggaaacttcttacccagaacggcaaagtttggcatgctcgaaccaggggacactttgggaacccattccctgatgcaaccctgcacaccaccctgagatctacgccccgtcaccatcaaaggacgactcactgaccgagacgtagggctacgtcgaacagaacccaccacaccagggaccatagccaacggtcgacttccaccacgcttcggaccagtactcgccggagccgccagagatgaagttggagagaaggaatgggcacccgagaatacatctttgtatgaggaatccattgacaaccatggcccaaacagggggaaaggaaccccattttcacttgaaaccgtgactggagaggtaagagaacaccctctcctttcaagttaatagattagcatataactactagcatttgatataaaatctaaatcatgcttgtatgagacccgtgatcacaatatattcgatcgatcatcagaataatatacgtttataatacaaagcagtaaact

SEQ ID NO: 199043 - DNA, 683 bp, Cannabis indica
taagtttagaatctaattcttagtggaacaaacacgtaagagatattttgaatgtcaatttttaggtggggcggtagtatttgaccatttaacccctatgcctttaagttgcttaagtatgcagctagggaaaaatagtaattttgctcttttagtgagatttgtcttttagtggaattaattgaaactattcttttctgttggatttatttagataatcctaggtcttattatattgagtaatatgcaaagaaaagacaaaagacaattagaaaaccaaaactcttgaacattttctttctctctttcggctgaagctaatctagggtaatccttggtatttttcatctgttttctgagaattcaataaggatttgaggtagctcaagccaaggtaagccttagaaacccttattccttgaattctctaagttgtaattggtgatagcatgcaatttttaatttttggctttgtccgaatctatagtatttagggtttgttttctgggtttaatttaggttaattagagctggtttggggttattttgaagcttgatacttgtgttgagcaattttgagttcaaagaactaaaacttggctcaataatggtggcttttgtttttgtgatgaatgttgctgttattgcttgaattcggttgttgggtgcttttataggtattc

SEQ ID NO: 199044 - DNA, 518 bp, Cannabis indica
cattatctatttatttatttattgtttatgtataatgtgaataaatctctttctattaagatttttttttcattttttcattctatttgttgtactatccatcctctacactttatttggtttctttattttgtttttattattcatcctccattaattttgaataattttgattcctcatttaaaaactttaatatagtaaatcttgtgtgttgtcctataattgttattatattagctggctaagtatactttatcgactactgttagtaaagtttggtaacttgactatcctctttgtattcagtctcttattttacatgatgcaattaatgaatgagttcaacttttgtgtgccctctcttttcttagatgattttctttaaggaagtggagtttcacgagacctttttaaaataataataataattaaatttcttctatctcattatcttttagatatgtgtaaaatattacgtaagatatatacatgattcacgtggttaacaaaatcttac

SEQ ID NO: 199045 - DNA, 572 bp, Cannabis indica
taaatgagagaacacactgtcacttccaactgtcatttcagatctgatctctttctatgcaaaaaatagttgatgatcaaaataagagtactttggaccgtacagaagtgttgactattaatgccacgtggcacaatcccattttcccacgtagtgttgtccaggtaagagtgatacaaaatacctaatacccagacaaccatatcccccattacagtttgctcacctaagtctttattttaattattatttaattaaattatgattaacaagttaaatctggtgttgagtttggttaattttagttttattattacttgttgtatatatatgcacatggcaagcatatatctaattatgagattttcaagtttttttcatgcatgaattgaaccatatttctaataatttatgttttttaaggaatttttatttaaatatatgatttgaaatagtctattgtccacatttttttaaaaaaaaaaatgtaaattcaaactaaactttctaatgtacaattttactaaataaaaaaaagagacacaaaaaaacctataataatgtttcaatga

SEQ ID NO: 199046 - DNA, 1146 bp, Cannabis indica
ggcgttaactatccttagtatacgagtctattttattagccactttagtaggcgaataataatacaaattgatatagaatggactgaaactctttattcctcttgttcttcttgaagaaggagaagcttaataggatttttttgtagagtttttaaataagtagtatatagtgtttttgtcttcaaagagttgcttctatcttatgaaatgcatgggtatttataggctagcttctcttcacatgcttgatggactgatgatacttagaggaaattcgaccgttgatttggtaggtgtccgattcatcacatggtatttaaggatgtcagctcgtacagtctgatcatcatacacgtgttgccccagggtctttccttttgaattgcccttgttgatgctgttggatcactcaggcaggtacaactaggcgcgtatggtttgtactacggcataacgtgggggacaaatcctggtatcgtacctgaaaaaggcctggctgcgatatttgcaatctgacatgtacaggcagagcttcgtcgtgatacaaaacggggttacagctcatctagacttcttccgcgacttatatgggcgctttgtgagaagagcttatcctttgcgagagcatttgactttagtcctcggagctgggagagatctctgatcatggaggatccccgcattgttgccttgcatgtagtgtttccttcataaaggccctttacgcgagttagggctcccaccttctaggaactgtgatcagaggtattgaccggccaattagcattgagctttccttgatcagagtccttgtatcaagcttacaaaattattgacaatatttaccccccaagattctggggcatctcggggtccaggagcttgcagtgtttctttactttctcatgattggcttttgacacgtgagatatcttcaagtttttcactatatcatgagagtggtcgtcaactgacgtgtcactagcagaagaaattattctcgctgttcactggcgatactttaagtgtcgactcttgcaatttgcgcacgtactaggtgcgtgtctgggaaaatccaaaatgacggcgaatcaattgagcaaacttttcatttaataagcacttttctgttgggttttatgccc

SEQ ID NO: 199047 - DNA, 1301 bp, Cannabis indica
ccccctaaatcccactctgcaacaaaaggtagctctgaacagaatttccagcattgtaattcaacttttaaactagcaaaggagaatacacagaagttccccaagttagttagacactaatatctgaatcaaaggagaatgcaaagacaggtctttcattttttgtattgttattcgaaaagtcaagtattgagtatgaaaaatgaccagtaattcttctatttggatcaaatgtcaatattttctcaatgaggtctatggctagtactggatgaacatgtgggaaagccctgcctaactgttggcgagggaacgaagggagttgcggtatgtatcttttatcatcttcatttcgaatgaaaccgagatctctctgttggtgtgcctagaagctaagaaacacaaaataatgcataagtaattactttattaaacgtataatataacacacaagagctttgatgttaaaataaacaaagaatatctgtatctaattagaaaatcatgccatagttccaaaagttattttagcattaaataaagaaaaattggcaaagatggaaaaggtgtcaatagttgaaatttggtattataatctacagtacaagtcaaataagatgagacttcacttctgaaagaaattgttttatgtatatttgtccttacctctgtcaacaagcgcatctgatgaacatggtctttgcttagaaacaaaggcttcctaatcataagctccatagatatgcaaccaacaaaccatgaagcagtataatttgaagagttcaacaataactcaggagccctgtactatttagtcatattctctgttttcctttgcatcctccaatctctctcttccattactctctctaataactttatcaactcctttctcccgaacactatcttcgactgtcagaatctccatagcctcgttctctctcagaacctcctcgtgggacccatcccagaagtatttccaaaatcgctaacctccggcaactggagtttattggaaaaaacttcactggtggaatttctacaagctttggtcagtttcagaaacttgaatagcttattctctctacaaatcttcttgacggagttatacccaattctcttggtaacatctctagtctcagagagctttttctcgtttataattcgttctcgccgagtcggatactgagtgagtttggtaacctgactagtcttgagaagtggctcaatggttgtaaccttgtgggacaggttccgacgagtttggattggctaagtaactttcatttgtaatgaaaaaa

SEQ ID NO: 199048 - DNA, 1260 bp, Cannabis indica
tgagatccacatgctgctttaattaatgttttttttttacatttgtagcaatttctgacacaatattgtttttgttaggtgaaaattgggtctgtttgtctaatagagttaagagcaatctgtgagaaaggtcttctattgctcactataactattcctgaaatggaggtatattgaagttcaatgctaaatttaaatataaattttgatttcataatcattaattgaaggtacatgtgagaaaattaaatttaaataaaaggctaatgctaaacttttctgcagcatattctttggccctttctgttaaagatgattattccacgagtttataccggagctgttgctacagtaagttttagtctgcaacttcatttcctattgctttctatgtggaaactattttgactcatctttatactgctgcattgtcaacaagtagttttttttttttttcttttttttgtgtggttgtgtggagctaaaccaatttttttttcccttcatcttttcttttacttggtatgaattcatacatgtgaagctttataaaaagcaaacaatcttactccttggttctgcatttggcttgtttaagtttatatagatatatgcactctgtttcatcattgttataaatttgtcttgcaaattttgtacttcttttacaggtttgcagatgcatttcagagctgttcaggcatcaatctttgaatggtaatgccatgcttaatgagtgtaaggctcgtgctgatttaccaaatcctgaggtaaaacttaaatatgtagaaatctatcattttgtagtccttgttcaaaatcacctaatatctcatctttataatctgtatgatcgtgattaggagctcttcgcccgtttattggtactcttgcatgatcctttggcacgggatcagcttgcaactcagattctgacagtaagaatgatttaccctgcttcactttttgtttattatttacgtactaaatgttttttaaaatgagctggaagtttcttctacaagacctgagtgctagtaaaaatgatctgaattcagtgtgtaccttctcttacattatactaattcataggtattctttgtgttgtgcgtggatgtattgcatttctctatgttaatatttctcttgctggtatttcgcaggtcatttgctacctagcaccactctttccaaaaaatattaacttgttttggcaagatgaggtacagtgtagcaaatattgatttaaacttggaaggt

SEQ ID NO: 199049 - DNA, 1862 bp, Cannabis indica
acaaaaaatttattttttttacaaaaattaaacttcttttgacacaaattaaaattctcttcttataataaattttcaaataattaattatttttaaatgatatttaattattttgttacaattatatgaactaagtatgaggcctcaagctaatcaatcgataacaagtgcagccatttttttttttaaaaaaatccttcaacttatttcattttttactttttaaatatttaaataaaaaaattaaataattaagtgtaataatttaaaattaagattacaagtataataaaatttaaattatgaaattatatgtgtataattttaaattataaaaagttttgctataaaattttaaataatttaagtataaaaaaataaattgctaaaagatccttatatagtaataaattgcaaaaaattaattaataattataattaatttaattttaaaatataattaatcttaattaaagttttataaggaaataaatgattaggttactttcaggttacaagttatttattatttatttttatttaatttccaaattaatcacaaccatttaatagtaatccaatggcttaaaaaaatgtaaccatgatggttacaataaaaatgtaaccattgaaacctcttccatatatatatatattaaatgttcaatatgatgaagccagcccaaaaatttatggggcgaatatatctaagaaaaataattattaatttttatttttaatttaaattttagtatgttgatcttttaaaaaattaaaaacaaatttagggtccgacggcaccctccgacctccttttacgtctccgttattgttaaatatttatataataatctgaaacatggactagatcaattagatgactatgttagacacaagaagacgttattgtaccctatcgatactatattatatatatcattgaaagtgtagtgtgctttatcaatcatgataaagtttcttatcactagaccaaagttgctttaggccatttccaaccatatataatttcacactaattttgttttttttgttgtaatttttacactttatttttaaattaaaatagtaatatataaatatatttttttaaaaggctaatacttaccaccacacactttttgtgttgaatatagagttggcatgagtcggaaaactttttgagctattacagctcaacaaaaattgtgttataccgttaggttggttggtgtaaaaacatatagatttgtaacaagttattttaactgtaagtgatatgctacagaaagcttatccatagttaaattctatatcaatgtcatcaatttcacttttgttttaaaccttaaaaatatgaaaagctattatagatttattgatggtaaattgaatgttattatatattcccaactatagaaattaattaagctagcgtttgtttctgtatttggggccataaagccacgcaaggaaaacaaaaacgttatcaacatgctggagttcccttcctattgtggcaaagcattggtggtggtgggtctctttgtactcactatatttctgaaaaagacttttatgagagagagagagagaagatagagataagggagaaataatttagctcacatattacatgcatggataaccacactaggtgtgccttgtggtgaagtgaatgattacaatttttgtgaaatcaaacacatctcattaattaattttgttagtatttataaagctaattaattttgtcactacatcttttttacaaattaaattaaaaaaattaagtttaccttaactattactagctaatagattaacaaagaaaaaaaatgaaaaataattttggattgaaatc

SEQ ID NO: 199050 - DNA, 737 bp, Cannabis indica
atgcttggacaaataataaatttgttgcctaacattcctatatgttatccgaaccacaaaattctaattgaacacatttgaaccaggatttcacttcttaattttttaattagtttttttttttttacactttcttttcaagcaattaaaataattgaacatgtggtctattagtaggtacaggagaaaacaagtcatcaaggactgaggtggaggggtcttctgattctgaggatggtcttcccccactcgaaaggaatatgaatcatttgaactttgaggatactgacgaagaaagtgattgaaagaaggattatagttatttgacttatttctactttaccgtagctctcctatataaattttggtaggttggtttctaatttatcattgacgaattcgtcctcaaaattaaagtatatattgtttggcaaattaatcgacttttagtttaagtccaatagtggtagttttgttatattttactttaatttatttttatattaatttcaaatatttttctttttttgtttcatttaaattaaaatccaaaatggtatttacctttataaatatatataattttttttctaaaattctttttttggatttgactggtattactctcattgcatgataaatgtctaatttaaattatagcatagaagatgcataaggaattattctcatctcatcttcctcttcaggagtctgtggagactactttttagaaagat

SEQ ID NO: 199051 - DNA, 1189 bp, Cannabis indica
agtttttacactaaaaacagcaaattatagaaaccttatttagtttttttctttccaatttttcacttttcaaaaattgattgctaacctgtaacaaataacgccctggaagatcaacaaggtgaagagaatggacattttcaggaagcaaaccaccaccaaattgattcatatcagaaactaagaaccgctcaaaacaaagcttggctttcacatcaacattgaggccttcaaagcccggtacagaccgttcaagtccctgaacacaagcatcaagccattctctcttcagccttaatccaagcccttgaagaaagtcaccaacggggcaaccgaatgtactaggatgaggcatgtggtgatcagaatgtggcgctggcgctggcggagaaggaggtgaaggaggtgagaggttgtcagagacgtctatgaactcctcatcatcatctgaaacttcaacaaaatcaccatcatcggatatttcaaggggtgaaacatgagcctcattattagtagtaggactaggacttgatgggagagaagaaggttgttcagggtgggtttgggattgggtctggggttgaggttgattgttattgttctctccctcatcttcgtccgaatagtaaactagcctacgtcttcccattttggtgtctcacactcagactgaatcagagtttagttccctcaaaacttaaaaggctttcaaaaaatttggggtgaagagtgaaagacaagcacaaaccaaaaagccatacaaccaattattgagtccacatcatgagcctcactaataactgtgccatgttctgaaaaagagataaaagggttttcactatgatggactctagtaatgaatcagtatgcaaatgcccagaaaagtttattctgaaaataataaagaaactagaataattggtgtataaacctgctcaataaggtaaaacaatgtagttgagcttgtatttcagaataatggacttctaggcctctactgttcttccttcagccttagcttcagcagttagaacgtttcagaagatgttcctaattttgagtatcaaaagtgtcaataagtattgcaaaaattatgctaacacagctaatagacaagtcaaatttcaattgccttaatccagtccaggaagttgatcatacaccggttaaaagaaaaattagaacaaga

SEQ ID NO: 199052 - DNA, 1816 bp, Cannabis indica
tatatatatatatatagcatgataaactaataaattcatgatataaaatatgtaaactattttggcataaacattaacaacatggaaatttctatttgataatgaccttccaaataactttgtggtcatttttagggttttcaacttaatttgaagaatatttttatttgaatgatgggagttttgacttgatcataggattaggaattataaatgtatagttgaaatttgtaaaatttattaaattctttacttatcttcaattttccaaggtggaatctctagtgggaagcctaagtaattaagtcatatttttttattattatcattttgttttgttttttcttatgatttttaccctataataagaaaaccagtcattttcttaattctttttatttttttatttttattatttacaaaagacaatataaatatatatatttgtaattttccattttattcgccaaaatagttgactaatataccattcacaacaccatgcactaaaaataccaattacactatagtttaagctatttaacattatcattctttttaattagtatgaataatccttactacccaatagaattttcttcttttcctttttcgattattataaaaagacttaacaactcatatggtataactttcacttgtacaaaattcttatgagtaatgctaaaacatgtatcatactattcaaagagtttgaccaaatgggaaaaatatgtcacatcaatattttatacaaaatttataaattctaatattgaaaattatatattgctaaaattttgccactttctaaaatgctagtaatatattatggctggcagctatacatgccactataagattttatggcagctaatattaatctattttgatttatataattgagtatcatgttaaatatttttatttaactaattactgtacaaaaaataaaaaatataagttgttggaaatacttatttttatgaattatttaaaaaaataatagaaaaatatattgtctcatatgtttcgaaatatttatttttaagtgtatatatagtgtagatataaataattaattaagctacgtgactcaattaaatttttattcgataatttcgttcatttttattaatatcataaaatataaaaatcactcatcttaaaaaaaaaattaaaagctaaaccaactaaaatcaattgttgttgttgttgttgtttatttttgaacaaaattattgtaattatatcaaccagttatttaaaaagataataataaattataatatcaattattttgaaggtgtatatacatattattattcataaataatcctatgacaaaattagtaagacttaagaatgagtgaaaaacgattgtttatctatagttaagctctttaattaaaaaagaaagaatgaatgaatgagaaacatttcttacccattaaagtttaaactagaaatttattagaaatttttacacctcttaaattaaattgttattttgatagattgtaattgttttttttttatgatctcgtaaacttgtaattaattacttaattagataacatataaatttaaaataaaattcaaataatttacaataacaaaaataaatttaaaattacgcatacaataaaatatgtaaaaatttattttcagactattttataaaattttataaaatattttaaataattataagaattattaatctatcaaaacacctattctaaggggtgtattgtaaacgagtccaatttatttaatcatttatcattacgttgtagtaaaacaaattagacaa

SEQ ID NO: 199053 - DNA, 1773 bp, Cannabis indica
gtgaaaaggcatcctgagttgaagactaaagttgtggatggcagtagccttgcagtggctgtaatactcaacaccatacctaaacccacaacccaagtcctgcttagaggcaaaattaccaaagttgcttctttggttgccttggctttgtgccacaagggtattcaggtaattttattattaataatataatattatttattaaattaagttgatgattttttaataataattacattacttattttcttcaggtggcaacattgcgagaggatgagtataccaaacttaaaaactttttactcaatgttgactctaagagtaatttggttctcaccaaaagtacttcttaccaggtattaatgatattaaagctggataatattgacttaataaatatgagaaatgatatatatggtcagaattaatggtaatatatatttatataaatttatataggtttggttagtgggagatggattaagtgaagaagaacaattgaaagcttcaaaaggaaccgtatttattcctttctctcaattccaacctaagaaactacgcaaagactgcttctaccactacactcctgcaatgttaactcctaaatctctcgagaatgtccactcttgtgaggtacaatatataataacattttatgtatttatttattattcgtattaattagtttgttaaatatatataaataacagtattaataattaattaatatatgaacagaattggttgccaagaagggtgatgagtgcatggcgtgtagctgggatagtacatggcttagaagattggaatgagcatgaatgtggtgttattcctaccactaatattaataataataataatgcagatttctctcattttcacaaagtttgggaagcagcccttcgacatggctttaagcctctcaacaatatttcatctacctaagttattattatagtattaatcataataagctgctttcatattattatatatatatatctatatatatatattatgtacacatgggataatcttgctataagtttgcgtcttttcttcatatgatcatcataaggtcctcgcattggcactttgtagaaggccttctctattaaattgtggctgtactagtaatactatgtttggagcactttcaaaaacaaaacaaagaaaatatgttcggatgatgttttatattgctttaattagtttaatactaaattttaaatataatacaaaatgcattatgaaatatattgttggaggatttttatttatttatttattttttttttttttttgaagaaaagcgttcatatattagataaaacgaattagacctcgcggtcattacaaacaagatgttcagggatcgagggaataggaatgcatcccaacctctggtaggtaaacgccctggacagcaaaattacaattcttactaatattagagaaaatacaagtaaaaagaaagggaggatctaatacaagatgagacatagttctcaagctctcacatggactcaatccggttaatagcgttgataactacccttgaatcactttcaacaataataaacttaaagccataagtcttcgcaacgtccagcgcagtgctgcaagtcactgctttaccacatggcgcgtcagcaaaatccaatttagaagtatgaacccaaatctgcccttattcaaagattatttgaacacttatattttattactcactagaattctcagagaatatagtgcataactgttgggttttat

SEQ ID NO: 199054 - DNA, 490 bp, Cannabis indica
tataatttttttactgaaatatatgttgtaactaataaaaatgtatgtatatatatatttttttaaaaattttttagaggacaactaccccaagcttctacgtgagtctgcacatatatttccaatgatatattaattaatagtaataataccaagtttttaaatcaatttttttttgaaaactgttagtaaatatagtgtatattattttagtgtaaatttcttttaataaaaagtaaaatttagaatttagaagatatatggatgcatacaacaacttttctttctttcttatatatatggagcataaatggagagtggggatgggattgggcgatgtattacccgctcattatctacctaatttctatccttattcagaggtgagagaagatgaaatatcaataaaaagagtacataataaactatgattaaaaaatggtttgaatatctttaaaataacttccttttgttttcaattttttttttt

SEQ ID NO: 199055 - DNA, 2243 bp, Cannabis indica
gtccttgtcacttcaagatactctctatgtgactctcttatgtcaggaattttgagtaacaataaaaagaggtatgtatcaattaaatataaaattagaggtaaatttgattaataaaagtggtattttttcaacttactctctccaaaaaggccaagaacaggacctatgagcatcacagaaggttgtacaatcactgaaaaatacaacatcattccatctcttttctctaatcaatttagtaactagaacaaccgctttaatttcaagctcaagaggtgaatcagtagtgaatacaagggttttaatctctaaaattataccatctgcaaaataggtcaccataacagcagtgccttcaaaatggtggtaaggccatccacaaaaatcctgatatgttgcgcaagacaaggagggaaataagtagaagagggtgccactagaataagggcatcaatagaaacaacaggattcttcgacacaaattcaaggacccgtctgtcaatcttataaatcaagtgggtaggattcaattcctttcccttatggaagagtttgttctgagcctaccacaaagactcacaaacagtcacatcaaagacaagacattcatgcctcacgtgagcttaaaggtatgaagaaaaccagcattagaaaagcaattagccaactcaaaacttgaatttaagtgaatattaactgctcgaatactccacttgctagagagccatataattttagccaattagcaatttcagaatagatgaatggtcgaatactgatccatcttacaaaggcagtaaggaaaaaagtttcttgtaaaattcttaagtctctctccagtgagaaagcaatccgtggatattgtccacaattgaagctgatgtctttcaagaagatgagcttatttccaaatggtagaccaaagaggagtatccttaagaaatctattcttgttcaaagaccaataagcagcttttgtggtaatctaccgttcaaaaaatcctttccaaaccagagtatcatttacaaaagggatgaagtctttgaaatcgtaagattttatctgccatgaacgggctaaaccacatagatacattttctctttgccaattaccttgagggtcaatcagactagccacataaacatgaaaagtgtaaccataggattgaaggcctctcgggaagaatcctaattttttgaaagtaaccacggagaatgccaaacatcaacagattgactagacccaatgagataagtgctctcttgaaagatgaaatcacgaactgcaaagattccgttagctacgtaaaaatcatgaagaggaggaaacacactctaataactcttattatgcaagtatttctccctaaacactttgcactaaagagattgagagtttgacacaatagtccaaccaagctttaagattaaagccatgttactagcatgcttctccgaaaacctaaacctccacaatatttagggttgcataaagagtcctaacaagtcaaagcaagatacatgtttctctcttccttacctacccaccagtattttttaatggctttatcaaatgcatcacacttttaattaacgtagctctaccagcttgagacgggagtttcgagctctatcctcgaagtcgattaatcactttgtaccaccacaattcattttttattcttttatgaaagcctcctttaaaatttttgctgttgggatttatttagggaactattgagattggttgatttaaggacttttgtctaatttcattcaattttactattttagtgattgtttatatattaaaccatgctccccgaattttgatatctaccaaatcatgtctctcgaactttgatatgtactaaatcatggcccctggactttcatctatgttagacttttttactaaaattggaaaaagtccttaaaaccaacaatctcaatagcgcaaggggcatttttaacaaccttaaaagttcaagaggcatgatttggtatatgtcaaagttcaggggacgaaaattctaattagccttataaaaatacatgcagcaattcatacaaatatttgcaaaacacaattagaaacaaataattatctttttttttacaaaaataccaaaagcaatttctgtaaacacattttgagtctaacttttgattaaaaagcgatatgttgtaacaaattaattgttgaagttgctgtctattcagtccatttttttttttt

SEQ ID NO: 199056 - DNA, 1404 bp, Cannabis indica
tttttttttaattattatttataggaaagtaagtatctaaagaacaactctaaggtacccaacactccagagtatatgacaaggcccagcccaaggagtaatttaggctgtagcccaagatcttctaccttaatccaaaaaaaaaaaaacattttttaatagtttatattttagatttttactaatgctaactaacacattttttcttttttaaaaaagggattatttcccaaatatacaaaaataataaaaaaattacaaaatatcagttgtacggaattcaaatattttttacgatttttataattttatttacaaaaaaatggtcgttgaatgtatttttatgttgtacttttgttaatttgctgttgattttttattatttgtatgttattttttgttattgttttggtgttatttttatgtagctttttttattgttttcgtgttgtttttatagaacattaaaaaaatgtaaaaaaaatatttaaatgtaaaaattttacaaaaaattgtgttatatgtaattattcctaaaaaaagacttaatttatttgttagaaatgctatatttttgttagcatgaaagacccaactattatcatattttagatttttacctttttatttgttagaaatgctatattttaaatttttgttaatatgaaagacccaactattatcatattttagatttttacctttatatactattaaaaaaaataaatgatttttcaatatgaaaaagggttcaatcaaactaacggagcaacctaaatcgcaactaaaattcacataacaacccacatagaaactaccagaaaaactacgggagcaactcaaactgtaaattaaaaaaaaaaaataatatataaaataattctctttaaattttttggcctaagaccctcaattagcttcggtcgagtagacatgacacccgctatactctctcttagctaattatcattatttttctttttttttaaaagaaaaatatgataattaattaattatatttaatcatgttcatcactcatataattaattaaataattagtctgtcgttagatttacatttccatatgatcaaatggctaatcacatgaagtgaggaactaatcattaataattggttcactagttatttattaacgtaaataataagtttattttctaattttatttttaattaaataacaaaattttaacgtagaaagtagaaaaggagaaagatcaaagtgaatattaattaatttgtactcaaaagaagaagaaaaggaaataaaaaagtgaagattactttaattttgatcatttttttagtttaataatattatttttgtcaagctttttagaatcttcaacagagtttagattggttattaagcttttaatacaccc

SEQ ID NO: 199057 - DNA, 644 bp, Cannabis indica
aaaaaaatatatttcccaaaattcagagtcactacaactcaaaatcgaacataatcgttgccttccatcccatcgtcgattatcgcccaccacccaccatatgtagacccaagctctaacagttagaaatttaacccttttcttaccgatctttgagcttttcttttcagcttcgatcttcgagtctgagagtgatgtcatcatttattttcctcctccttgaacgcctctcaacaccatagccgatccagctcagttttattcctgtcaacctttctattttgatagaaagatcaattatggcaatgcaactcatccaaggtcgaataatgtgtagtttctggagctggagtgtttactgagatttttgaaaattaaataaatagaacttcagaaataaataaaatagtaaataatgaacatataattttacgtggttcgggcgttaactatccctaatctacgagtcagttgtattggccttacaagcaagtattttaataatacattatgtgtttataaactctaactcttcattccttttgcttctcttgaagaagaagaaaacatgtaggattttttgtagatgttcgactagtataaattttatccaccccctcttccttaaaaatggaggtatttat

SEQ ID NO: 199058 - DNA, 1855 bp, Cannabis indica
agctcaagttgggacaagatttctaatcctttctacaaaaagagcaaaaaaagcccattatagccacaaaagtataaagaataacaacatttagcaaaaaaatattgcaaaatcaagtatgagaagagaacaagcatgagagtaccttcttctgtggagagtgggccaatgaaacgcaaatttcaggcgaaacatgaccaaaatcttcttcgtctgaaaagtgataactagctaccttgagagagtgagttaaaaggaggtatgtgagaatatatgagaattgagggatttaccagaaatgctctgatcagaatcagggttggcctgaaaaggaattcccttaagtaagaaaacaacaccattgttggagcctggaagagcagagaaagagaaagaggtgaaagggtgttaccgcagtagtcgatgggtgccgccacattggggtttctcttcttttcccgttttctggtttctgctgattactattttttcttttgggggaaccaaacttacgagagttgtttgtttttttgctactttctaacaccattttgttgactaattagcggtaagtatcggtcggtttctcagttttataaaatttaaaatttggttttcagtcttgatgggtgcaatctgaaaaccgactgattaatcaagaatctatcgattgttttgaactttggtttgatctttttaaatcgctcaaaccgaatttattttttttctttaaaatatgatccaatttattttacaaacacattattctacattttacaattacaaatatactaattaattattcaaaaattaattatcttattcttttaactttaatattaataaaatgataatatattaatatatattattaataactactatgcaaaaaaaaaacttaataaattaatatacatatataatggtcagttttggttttttcagtaggtttattaccaaaaaaatcaaccgttcactgacagttttaaccgttagcggtttttcgatttttcggttttggttccaacagtgttcgatatgttagtttgaaaagttttttcagttttctaaattttatgttcagtcttatgcaatacttagaaaaaataattaacttgatttttttaggctaccgagttgtaacattgtagtatacggtttattaataatatatctttaaatacaattttatagtaacgtaatctttctaacatactttatttaattttattataaaataaattaaaaattgtaaatgataattaataaattgatgcaaattaaatattttttactcattttacgttaataaataacaaaataaaagattgtttcttttttataataactagaaaacaaaatcacgcttcgcatgccattgtattttttttttttttttgtaacaatcatgccattgtattttatttagtgataattaagtcataaaattatatcatacttcatattttttattttttatttttttgttagtatgtgtaactattttactaattttttttttttttgatttgattagagattttcacacaaaataattttttttaattgataaatctctataaaaaaaaattatcatatgatttcaaattatatttttatttttctagtgaagagtatttaattttgctatttatttattaacttaacatccatcacgtgactcattctacgataaaactgaatataatatagccaactattacaacatctgcccgacgtagattagccccaaggagttaaagtatttgttgcgttgtacgtctgtacgccaacaggtttgggggagccctctgcccatgagattaatggttttttgatctcaaatccacgctgc

SEQ ID NO: 199059 - DNA, 580 bp, Cannabis indica
tattcaagaaagaatgttcagatcagatttcaaagccaaactagaatgtattttttttctgttctcaggctaattaagcagagtggaaatttgagcttagagaaagaccttgtgatgaacaattgacttgtgaaaggcacatccaacaggaaatgtgtcacctgatgaaaacagttatacaaattaggcaatgttcctatcctatttctagtcctactttccaaacatggccttaaagaagagttacttagatatcgttgataaggaaacgctcaccgacaaccgcccattgaggaagccctccgaaagcagggtgattgagaacctttccaagatctaacattacaacaaaataagatattttgataagtactgtacgtgtacgagcaacaacacaagtcatgtgactgtattctaattagttcaagatagttgttcaagcagaagtatttgtcaatttgaaataagatgaatggagtttcatcttaaaaccaattagcaatgaaaggagtaatacattcatgataatttatttccacacataaacaatataaaacaatataggactaaatctaatata

SEQ ID NO: 199060 - DNA, 1680 bp, Cannabis indica
cattcattatttttgtagctaattatcattgtaaatatttgaaactaaagattcgttttgttcatgttttatggagtgcagttcttaattaattatttatgagtgtggagtttagagttttctttgaaaagattttattagtaattttaatagataattatattgtgcgctccttatgagttattttaatatgtaattttagtaatttcatacaaacttatacgattgttaaaattatgagttactgcacttctttccatgcatacacttaatgacccaagaattaattgggagtcattttatatattaatataatattgcaagctttcagacaattgatatacagctacaaatcaagaatgaacataccttcggtttgaaaatcaggagaagatccatgaaaattgcataattctcagtaatggcaaactcatgcatcatgattggatctgatactgttataagaaccggctcatgcatgaaaccatccttcgaaataactcggttaattatgtatggaggagtgtgcacatagccaaatgtaaacatctctcctgcattaggaactttgtaatgagcaaagtgaagactcgccaactaaaaattatattttgtgaaagtttcctcgcctgtaaatagatcaaccttcagatgagctgtgaatgaatgtgtcaatcgcttgtcataatccagcaggccgagtgtttttcagatatccatcttccaagactttaaggacatttgctacgtgcaagtcacgtatccattcaatacaagtaaaatgtaaaaaaatattaattatctcaaaaatataactacagtttaagtggtattagaattggtaataaccttctctaccaggccaaaccccaacataaatgggatgctacatttcttggtgcaacatgcattttcttttttcaagggaaaactaataaataaacatatggtatgaaaagaaaaacaaaaaaagatacacttttgctatatttaccttacaaagagcatcatcactcccagaatatatataagatggccactttcatcagcaaaacaaacagtgttcacatctgactgcaaaatgaaagtcatgaaaaagggtattacacattattcagtacctataatggggcaaaatatgaaaacattgacttggaaaacaatgagtagtttcaacattaatgggtagatgaagcacaaatgaagaaaaaacacataaactgagtcaaagattccacattaagttttctatgataaaaagtagtatgccatccgaaaacaataagtgaggggtataataaagacttctatgatatggttatataccgagtgtgcctgaatccgaagggattgcttattcgccttaagatcgtaaacatatatggaatcatcactacttccagcaacaagttctcttccatcagtcgaaaatttcacagaaaaaatacccaaggaataacctccatcatcatcggcagaaaaatccaaaccttcatgtatttcctacaaaacaaataaacattttatatttcagagaaaggtaattttccaagaacagagatatccagtgtttaagttaaattttatgaacgccgaagcaatcatttgcagttgcattcttgcaacagtatttaaaaagccaaaatgacaaaaaatatacctcatgaaaatatataaaaa

SEQ ID NO: 199061 - DNA, 827 bp, Cannabis indica
tttctttcaaaaaaaaaaaaaaaaaataataataataaataaaatgaccaagtaataatcatttacctataagagcataataatacaataataatgacaataattaaaaataataaaattaataatagggataaactaaaagaagaaaaaggctatgctcattaattttgatacttgtaaattattaagttgtaatccattgtacattcccaaatcaattatcaaattttccaaattttttttaagtgtgctaattacaacttttacacttataattatatgccaaatcgttttcttaaatttttttattgtagaatttattatagttataatattatttacgtaaattattttgaataatttataaaattaaaaatagagttaatgttaaaaaaaattaaaatatatttttaacactgtaaattatttcaaattttttaataatttacaaaaataatattataacactataacaaacatatatttaaaaaaaattcaaccaacatatattttgaagcacacaaatagaagttataataagatgttcaccacacttatcttttttaaaatatatttatatttttatgatcattattaacatttcacaataattataacacaaaataaataataataataaaaaaaagagaatattatcacattgtattgatatatatatatcaaaattcagattcacttttacaacacctcaaccaatcaaaatgtgacacgaattataataaaaataaaaataaaaatctaaacatttccacaaatttccattaacctctactataaacctcttaggctttgtgggtttttttttt

SEQ ID NO: 199062 - DNA, 1299 bp, Cannabis indica
ggatatgtaatagttgacctcacattttgccaacagatagtagagtcatatttattactaatgcttaccacgtgtacacaataagaccaggaaagtaaaagagacataatatttttatagaggtttggcccccttaattagtgggtaatgacctactccctttttcattgtattagtacctaagataataccactcagatcaagagggttgaggattctgaagtggctctcctaagattataataggagaatcaagtaggtaaatctcaagtgagagagaagccttgcgcatgtagaagagagagaggtagaactagggttgaaattgagagtttgagagctttaggaagcttagagacttagaagaattttggttaggttaatgacctttatataggagagcttacaagagattaataacctaatatccctaaaaaacaagagctataaagtatttgttccataattaaataataaataataaattagataattatccctcaagaataggataataactgatatgtctcccctatatttgttggttgttaaagcccaaatcgattcttggcttgatatcctggatgaaggctacacactgagtgcctaccaggtgtaggctggctaaacaagtgcttgccaaggtacaagctggctaacccttcattagttagaggctggccgacctataatagccatagggccagccaaggtggctcgccagagcacttaggctggccaagttgttgtctgtttatcctgcttaaccactcaaacttctcattaaccaacgtgttgtgtagattacttggccttcttgttaacaatttgtactccacgtgccaatgatcttgcccacgtggacatgcaacttcatgtgggataaaattgttataacatttgcctctcaagtccctatgtgaacatcactacagatagggacgttcctggttagtttggacatattaagccttaagtgagtagatcttgcaatatttttatcctttgaaatatttgctctttcttgtctgaatacattccttagcaaaaaattgaaaatatttctgcatgttattttttgcattctgcatggaaagtgagagagggacccaccagaagctatataagcttattggtgtaactaccttctcattccgcacttgttcttctctctcttaaaagattgcacataaagaaagctcttcacttcccattgaggcctacaccccattgttctctaactcttgggatttttgcattgtttcgatgattcaagctttctgccatcttctcggaagg

SEQ ID NO: 199063 - DNA, 744 bp, Cannabis indica
tagggtctccatgcaagatatagtaaaatcgtcaagtagcaaccgaatggattgaagcgagccctcaaagggctatactaacatccctaaccagccaagagaagcctaaggctagcgagggtgagcatataggtcggccaagatctgggcataagttggctgaccaaaaagtaactttcggaccaagggagcttctgttcgaccaaaggaacctggcctctacaaggaaacagtttacaaagttatcatcaacttgtaaaaggcaggcctccacatcaaaagtctgacctcctcttggtaaggctatagtgacgtgaaggatcctagcacacacatgacctacaggatcctagcacacacatgacctgccaagttgtggtaggagcatggccggcaagacctcaacctgtaggccttggccaataagacctcccctgtaggtctatgggcaaccagggttaacctggcaggactctatgtacctccttaaatgtggaaagcaagctacctgtaaattggatcgttaacaacccaacaaactaatgaaaatatctacattgaaggggaaatttagtcttttgtatttaataaatttaatacgtaaatatctaaaggtttcattgtaaattagggttttaggattcctacataaaggccttaattctaccctagaaaacctaagtcactaagcctaattctagcctccaaataactttaagtctaaaacccttctctctctctctc

SEQ ID NO: 199064 - DNA, 1725 bp, Cannabis indica
taattttaagtaactataccgtatataagtgactctataggcaaaacgtcgtattccactattatatcgcataaaatataaaaaaatataatatttgatatataacataattaatacacatagaattcaaatatatctccgtaattacaaaaataataaattaaagcctatttttgataataagccctaattatctgctaattctcataataaagctaagcagtcatttaaaagtgttactaatggtagaatgacaagtagcttaggtagtgagagtataacagttatcactagatctgagtccttacaagataattttattacaaatattataaatataacaatggtatcaaagttaatagtgtgaccttgatcagaaatttggctaatactaagaagattagcctttagcccttcagcatgacattcttaagtctaggaagaccttcaaagttgagagttccaattcctatgatttttccaactagaacatcaccaaaggtaacttcttcacactacattggtctaatgttgtcaagatagtctttttcacctaccatgtgtctagaacaaccactgttaaaatatcacatgtgagaagcaataaatttaaaacaggaagaaccaaccaagaattgttttttacaacctatttttgtttttgagaaacatatttatttccaaaataattataatgaaacatgttttgtattgtaacacatttagatagaatgttatcttttattccacaaaaatagcaaataggaatgaatcgtcttctattccctttgaaattgtctttcttactgtgttgcttcctttctgtatcaacaatgtattttgctgaatcaacagaatcctgcaaagtagagatagaacgtcctaaaaataaaatctttcgatctaacaaatttggtatttgatttagattaaaccttaacaaaacccaaactagcatgacttgtttgacaagaattttgaatcatttcagaaatgttggaacctggatttagcatttttacatttcttttaagattttcaagttccttagttaaagaaataattttagaattttttgaattcaattcagattcacaacatttatttttctcttcaaactctctaatgttgtgaggcaaatatttatctacttaaccaaagaacgattttcaatataaatttccaaccacttaccaaacattaccatgtacaattccgtgaaagcgttctcatcaagttccgactcatctgaatctaatccaacttctttctcataatcatcagtcaaggtattgttcaaaaatatgatttttcctttttcctgcaaatcacttgacaaaacacttgttaatgtaactttttcattttcatcctcactactttcataattatcaatccaagtaacattgaagccctttttatttttcttcaaggtattggcacattcaaattgaatatgaccatacccttcacattccctgcattgaataccttttttattatttggaacgaaatgctttttattttcaacagttttcatgtacttttgaaaaaaaatttgtcaacaaggtcatttcaacatcaggaatattattttcaaaaactttaaaggcaatatctttgctttcctcactcaaggcgctttgcttgctctttttcttgatttgatgatttaactcaaaattcttaatgaaaccatgacttcttcaatcttcattttgtcaa

SEQ ID NO: 199065 - DNA, 990 bp, Cannabis indica
gttgttgttgactacttctccaagtgggtggacgcagagcccatgaatacaatcacctctaagaaggcccttggttttgtcattaggaacattgtatcccacttcaaacttccccacaaaattgtttctgataacgggaagtagtttgatcatgaacacttcatcgaattctgtgtttaacatgaaatcatgaagagcttctcagctgtggctaaaccacatgctaatggacaagtggaacttgcgcgagtcctttggtcctatcaaataatgaagagaacttcagtggggcacatactatattcaatggatttttagtttgaagagatcatcccagtagagatgacaatcccttctcacagacgagacacttacgacccaacccagaatcacgctctactccaagaatcattagatttgattgaagaactcccagaacaaccataattttagcttaaaatgaccaagtcaagatttccaagaactttaatgctaaagtcaagagtcatacatttaaggtttgagatcttgtcttcaggagagtattctcagcattgtaagaattgggagttacggccttaggactaattgggaaggacccgacaagattcaacacaaagtgggtaatggaacataccaactcaagagaatggacaaatcaaagatccaacgtgcatggaatgcatacaatttgtgtcgttactaccaataggccaggggtatggaaatcttaacattcctctgagttatatataattctatgtaatttttccttcttgatgtaagcctatggacacaatgaaataaaaatggaagaaatttacaaaagaattcacatgttagtctctgaccacatgctatgtttaaataagcaaccaagaatttagagacgtccgaaattcccacctcacttggggtacagtacatccacctatgtgccctcaaatacatacaacacccgcttgtcattattaatttttttttgttttt

SEQ ID NO: 199066 - DNA, 1909 bp, Cannabis indica
agaaaagaagaacaaaagtcacaatagtgcaacaaaatgagctacgaaagtttaaattcagagagtaacttgcaaaagtaaaacttaaccgaaaaaggctaatagcttgttaagtcaatgcaaacttgtatgaaaagtctggagatttcgtaactatagaagaagaacagaatttgatgaaagataagtaaacaaaaaaaaagataagtattgcaaaagagttattgctcgtgtttatatgcagcaaaatttctagtcatggaaccatggcaaacgttctgcattgatatgaatcttatgattttggttttcatttagatcagtgttgttaccaaaagcatgtttgactaataaattgccaaagatcatcgtcccactaagtttacttccgtttgctccagactcgaaacaactcttcaaagtgtcccacaaagaataagacacattccaaccatcaatatcaaaatctgttaagaataagaggggacttgattactatcctaaaacacatgtattaaactatgaattatgagtatgcaaataaccttaatgattaaatatgattacaaaggcaactctacttagcataataaccaaagtcattcatagagatacaaacacatgaaacatatctcattcaactatatattccttgttaataaaaaaccatattaatttcctcataaatatgctcctgcttcaatctcggccatgcttaccagtcacctcattgaccctcgttaccaaatttcctagtaaagtataaataaagtaccttgtcatgtcaagccgtagtcagactcataatgatagacctcccataaggttcactcatgtgaggtttcaattagttgagttgtattagtgatatgttttgtttctattagtataaataagtgattaggagcggtaataaggagttttggactcttgggagagtggctatctcgaattagctactgttatcttgtattcttgtattgtgttggacataggctagtgttttgtaaaaataaaagtaagagttctggtgtgtttgtgaggggttcttggctgagatttttcagagatcttatcacataattacctcagcacaagaatgttaagaagattaaaacaaacagcactaattaagaatacatcatcatcatgtgatagatgccattgaataaaataaaagattttgtttaaatcatatatcagatgtgtagagagagagagagagagagagaggttcattaatacctgattttccaactacatgcatgatgaatacaaaaatacatcttcgatgtgttgaatcttaggccaatcttctcctcctttctcacaccgttgctttaccaaaggacaatccagtatatctaatttagaaagggaagcaggcagcccttcttctggcaagcaccgcagcctttcacaattactaatatataagtgagtgagggatgtgagttgttgaaaggcctttccgttgagggtttcaaggttgctacaatgttggattccaactgcatcaagagtgataggaaggagcccttcctcaggaaacgattcatcttcccatccattgatatttaacaatctcaaacatgagagtctctgtagatcccatttactacggttctcaaaaagagcttttgttctccatagccaaatctcctctactacggagtgtgatccccaatctagaagtgactccaacacaggacaatctactatctccataagagatagtggggctatgacagtctgttgaatagttctcggaagcaaaacctccatttcctcacagtcatagatagctagatgtactaatgatggaaggtaacaaggcaagccaatgttaagccttggacatttatacagactcagttttttaagacgagggaataatatttgaccttct

SEQ ID NO: 199067 - DNA, 1397 bp, Cannabis indica
tggagcgcacgtatgagcagaacctggacagaacaaacactgcagtgccatcccagtcccagccacagattcaattaacatgtttcctaatcacttgagtatccacaatcaatgtcatcactacaatgcaagacggaattgagacaagcaaaggggcataaagatggccttcccctaaaaacccctgattaggatcaacaataacaatataaagaataagtccacttcacaaaattagtctgaattcttctttggtaggctcagctgaatcttggcccccaacaaccataattgctattctctcaacactgcaaataaaaggaatgatactgaatcaactaataataatgatctaattattttaataagaagaaaccttaactgacaaatcacaaaaaaacaatgagcacaaatatatttgttatttaatctcttgacttaattagcttcactagcacacttaaaacaaataagaaaattagctccaagtatcaaaaatattatagaaaacaatcattaccaagacataataagataaatcaataatagtaattataacttcaatcattttagacaatccaaaaagtgactacttagaacactcagtgaatctttaggctgttaatcattataaaaagtaatcaaattgaaagagaattactaagagctcatgtgacacacttataagccagctaaaattttcaattaacacccaaaaccgaccattcactactaattctaaaagataattattactaatacatatcacatcatccactaattagtaggtccctaataccaacaacaattttcaattaaataatacaagaacagaacagtaatactatggaataaaaaccaaagaataaaggattaaatttaaatatgtgtaattcaatatttaattacgtcaataacaaaatgatgttgttgcctattaactttctcaaaagtaaagcataaatttagagccaaaacggtcactagagagaaaaatatgaccgagctttgactagctactgcaagagtactgagtaaaagaagaataaaatagaatgagtagtaatcatcattaaagcgtgtgcaactcaagttaaaaagctaactaatcaaaataagatatccgattataatttatatgcatgtataattactaatttacggtatgcaattggttgagccaatgcctatggtgtctataatgatttttgcattctatgttggtggtactatttgaaagagcaagtaatgcttatgaacaagctaaatcaagtaatattaataaattggttaccaataataataataattaataataatgttgttttgaacaaagctgatgagaaaatagtagatttttatgaggtgaagggtcatcaataaaatgatgatgatga

SEQ ID NO: 199068 - DNA, 906 bp, Cannabis indica
ggctcctccctttcccaaaccctttcctccttttcctcttcctgacatttttcggttcttttccttctctgcaagttttctcttcgtttttcttagtggtgagtttgttgctgtggttattggaaatgagattggttaggctatttataggtattgggatgtttgattgtgaccgttggattaagtagcgatccgcgtagggagtgagtttggattgtgaaccgttggattagttttactgaaatttcatttgtgggaatttttgaagtgcgcgaattttgataaaatgcgccaaaagctttgtgaaagtgaaattatctaccgcgtttggctgtggcgggatctttcatttctttttctaattattgctattattaattaaattttattttatttttgttaaatgaattaaatttaaatttttataaaaaaaaaaattagacctcataatcattacaaaaagatattgtttggcaaaagcttacttgactatattatgggctgcaaaattaaataatcaagtaataaaagaaaaattataacataacaagttagtagagagacttacaatgctacacatagttgtcaattccctaactggaacaagtgcccttgagagtcttgatcactgtatcagaatcgctaacaaaaaagtctcagcttctccaatgggaggattagagaaattgagctagtttttaaccacccacaaaataaattcgttgtggttcctagccaaagccataatgcacatagtgtcgtctctaattttaacatcacagtttatcttgatctaatcaagtggcagtagggaccaaacaggggatgtaatagcctcataaaataaaaatagaccgaactcataatctaagtaacaaaaaatatagagtcaatataatatttaat

SEQ ID NO: 199069 - DNA, 523 bp, Cannabis indica
aattttaaaaaaagaaaaatagaagcatgctctctacttctacattttaaatatctttcaccgtaattccacaacttcatcttcattgcaaactccaacatcaattatcatactgcctgtcttctttgatggcaatattctgcaacaattcctccttggagcctaaataaaaacacatattgaggttaaacaaataaatattttgggataaactaaaaaagactacatttataaaaaaaaataataaaaagaaaattaccttattccacatatctgggtcgggtcttttgcgaacctcgatggtgtggatccgagaaggatcaggcattttccatgggcaggtcatgttggatgcccgattgagaacatagacggtagtggtgcggttcgattccgggtggaaagtagagttggccaagtaatagggaaagggtttttgacaagtgttcctgctgaaagggcgggtgttgaaggcgtagccagtgtagtcagctctttggtaccaattaaggaacgtcctagc

SEQ ID NO: 199070 - DNA, 777 bp, Cannabis indica
tttctttttccttttcttttttcctcgttatgcttattcttattctttcttttatgacccgtttaataaaagggttagccgtgtcaactcgaaaatgactcaaactcatttaaggcaaacccaatctcgtttatttcgtgcagatttcaagtcgtgttatctgatgccactcctacccaaactattcatagtgttgtaaagtagtatttttataaggttttcttacatgtatcaaatagaatgatgatatcagtttaaactactgttatgtcagcgccacatgtgtaattaatttaaaagaaatagtttaaattttttatttagttttgcttattttttttaaaaagaaaatcattaattaatttttttccttaataatttttgaaaaatacatatttttatttgttttaattttaaattacccacgtggtattaatgtagcaatgatataaatatctatgtcatcattatgtttgccacttgtgaccaaatttacatgaatgaccattaccacattgtaagtagttcaatgacaattttaatgggttgaaaatttcaaaaagcaccagtgttgtttagcatcattttacgtgtcagtattggtatgggtccaactaagtatcgagtcacatataatttaatataataacttttaagaagtatcgctaaccaatcgcaacgcgacacgtttagaaaacgctaggcaccactgatgcctagtagctgcattaacaacttcaatagtatgcatacaagaagtattgccctatatttttt

SEQ ID NO: 199071 - DNA, 672 bp, Cannabis indica
aacgtcgacttaagtaataactccagttttatctagcgaatcattttttagtaccaaaatttaatcaaagttggtgctagagtgagtattggttcaggttctagtgtagatgttcttgtccctcattggctaccgtgtgatgataacccctttgttatttggtcctactttagttgactataaggtgcaaattttaatggttgttggtcaaagagagtggggtgtggaggtggtgtgagatctttgtgacgatagagattgtgaccttatcttgggtattcttttgagttctacacttggtgatcattggtattggaagaaagagccgactaatttttatacaatcaggagtgcatacaaataccttcatgagttaaaaggtgattaggatgagaatatggagtctaatatgtggtgtggtctttggaatctcaaggtccctccaagagttttacattttcaatggaaagctttgtctgattgtcttcccactcgagtacaacttcattcaaagcatatgtttgtggaacttgagttcctcttttgtcatagggaagaggagactattgtccatacgttacttttctatcgtttcctcgttcttgttggaactgtttcggtgttgatttgggttagctaataatgggtgatttttgtgacagtcagtagtcc

SEQ ID NO: 199072 - DNA, 551 bp, Cannabis indica
agaaaatgttatttaggtcatttgattttagtctttatgtgtggaattatttggattagtaatagcaatccttattttgtccatagtgagttcaattatgctgaaattcggttagataatttaaggaaaagtaaaattagacaattcaaagtctctttctcactctattggggtcagtcacatctaacgccctatgagctgtaatatttcatcctctttctcaacaattcagaggatcttttgttgggaattcttaggaaaataaggcactagctctaggtaagcaagttcccttcttaatcccttaaattttgtggttttgagtttaagtgttcatgcgattttcgagttatgtttctataggatcgaattaagtttgattctattatttgaggttgatttcatgttattttgtctggtttaagcttagatagtagcttctagttgtgtttgaacaaagtttgagctttagagctcaaactttgctcttcaatggttgattgtatttcaatgggtattacttggttctattgcttgatttatgtttgttg

SEQ ID NO: 199073 - DNA, 662 bp, Cannabis indica
tcaataaactaacatttaattttgcctccattaaaattaatttttattatttttgttcatataaaaattatacttttattttttttagttttcatatttattcccatgaaatttatatttttaaattatattcttacatattcttatatttatccctataaaatttataatttgtcttaaaaaaatattattttcaataatactctattctaaaaacccatgttttcccaacccactaagttggcatactctttaaagcccgggaaagatatggacaggaagagatctaccataaatgtctggagatgatacgtgattactctgacccctaatgacttcacctatcctattgaggttgggggtacgaaacaaacgaaatgaccttttaccatttcctgaggtattggctccaagagcatcctcattcgagtatgcgataacaaatctctttgtgagaaggatctgtacaaagccaatcttttctttaattcctcactctcttggggtttcaagggcacggtacgacgggtagtccgaccgatgaataaaaaccaccttagtcgtaattatggaaaaagacataacaatgtcaagtgaagaaaaaatgcaaaagctcatacctggcattttgaagtccaaagagaggtttggcaccatcttca

SEQ ID NO: 199074 - DNA, 600 bp, Cannabis indica
aaaacattttttttttgtatttttacggaattttacacagaaactctatagcaattaacggaattaacggagcaacttatatcgtcaactaaaattcatatagcaacccacacacatagaaactatcatagcaacccaaactgttaaatttttttttttaaaaattaagaaaatagtatatagagtaattcctcaataatttaatactatcttatattgtgtagtattaaattagataaataattttttttaattttaaattaaaaaattatataaaatattatgaaattcattttattttttaattattttaatatatagaaaaaaataattattggaatcactaaaaagtggggtccaccattttttaagtataggataaatgattattttcttttaattttttttaggagaatgggattattattattaattctagtagaagaaaagggtaagtgtattttaaaagtattggacattttattttattaaatgataaatttgagtatgtactttttatttttataatagtatcatgagttaattttttatcaaaaataaaattagtagtaactcaatttaaaagtgttataacaagat

SEQ ID NO: 199075 - DNA, 1229 bp, Cannabis indica
aaaaatactacatattttttaaaaatttatgaatactttttaataatttttaaaaatactacatatttttttttaaaataaagtatccaataatttttattttacccaatctcaaccagccttcctccatactacatattttgtttaccacactttcaaattctaacaaattgtttacattttactataattgataaggaatatcttccatccactgatttttttttcttcaagacaacatataattattttaatttttgtaattaataccgctccaaagcatatgcatgtatttgtggacataaataaatttgaataatattaatgaaaggcgaaagaataattaagtgaatgaatttgggtgtagggtttaatagaagaggaaaaggtcgacagcttcaacgcaccgtattacgcaccatgtcctgaagagataaagaaagtggtagaaaaagaagggtctttcgttttggagaatgtggaagcttttccagtggactgggatggcggggcagtagattatgatcatcaccaatataccacggttgccgagctgtctagggccagaggccaacgagtggcaaagaccattagagctgttgttgagtcaatgctgggtgaccattttggtactcatattttggacgacttgtttaacagataccaacacatcgttgctcattatttatcacacgcttccacaaagtacatcaatttggttctttctcttaggagaaaggaaaaatcaactactgcaacaatagctgccaaccaataattatatgttaagacatttgtcaacctacctacctatatatagtagctataatatgatgatataaataagagaaatgcaagaattaatgaaccagtgtacctagtacccttctatatgttaatattgttattggtctacttaagtatcgaatcctatatagtttaatgtaataatttttaaagagtatcgctaaccaatcgcaaagcgacatgtctaaaagtgttaagcaccactgatactcaatagcaatactcatatataaataaaaggtactaagatgtattgtggactatctaatctatccttcataattaattaatggcactctcaaccacttttctactctatcctttaaaatataatcaaaaatctactttctctattaggatatgggcggcaaaaccacatggaatatacgagttatgacatttaaccccacaaacttagtttt

SEQ ID NO: 199076 - DNA, 611 bp, Cannabis indica
gatgcttaaattggcctacatttgaaatgttttaggtaaaagtttgcttgcttttgtttttgttgttgtagtgataaaattagaagttgaagccttgttctcactgagaattgtttcacatggttggttgtagaaatgggccattgattgcttgtgttttgtccattgcttccaatggctttttaaagaaacttgaaaaagctaagatggtaattgcaacgtttaattttcttctccaccatcacactgatttttttttttctttcgttattactatttcaattatatggataaattatacatgaaaaagagaaaagttaataagttctataaaattaagtgaaatgtgtttttatgatattttattttctttgctgttttatgtatccttttgttttgttttttttaatttgttaataaagaaactttataatttttaattttgtcatcattaaaaaataaatatcaattttactgttttgaccaatcaattattattcaaagtaaattcgggtttattgatatgttcattattaaaaaataaaataaaggtaaatttttggccaattcaatttcacttaattttcaatgctctatgcactacaaaccat

SEQ ID NO: 199077 - DNA, 1200 bp, Cannabis indica
acttaaactcattattcatctcatcaatctggcaagctagtgttggctactttccagcgtcaaaaaataatatgttgttatactccatctttgacaatagtatacataaaagtgatcatccttgttgagaataaacactactaaaatttacacatttagtgactggtgaccagtttccgcaaaacaacatctccatgaattggtgaccaacttcacgagaacacagaaatagactaagtgatgtcaaaatatcactcaaaatattctcaaaatatcacttaggaatcttaaagtacaatccttggacatttttacacttacccagtgtccatatgtcaacctaggagctgggatgtcacctaggcgttggttcatgaactgtcttcagtaaaacggtcataactcactcaatattgatatgattgatgcgattcaacttgtgtttcgaagatatttcaatgatctatcaagtcagtctctcacttaaatcgcaattctgaagctatcaacctcaaatttcaccacactagagttacaaaaataagttctgagttacccacagcaagtctagccgcgcttcgaaaaatgactatcactaccagtagctaatttttaccattggatcataatctatggtcaaaaatatctaatttatatttttcttatatttttttgggcctccttcaactgtaaaaggagagctccttgagcttgtttttcatattcaaaaaactatctacaaggtcagagtatctctctctagtttctctttagaaactagatcctaaacacttagtatttttttttctaattactatcctgtgaacaattaattcgaagtagatgtagctttgttatcattgtcacatggggagtgaactattatagattgtgtgtatctctctaaattttttacttaaactcattattcatctcgccaatctaacaagctggtgttaaccactttttagcgtcaacaaattataatatgttgttatactccatttttctcaataatatacataaaagtgatcatccttgttaagaataaaattttatagttttatatatggaataaataatatttaatcaaacaacaatcgtactactttgtttaaagaaactccttttttttttttttttttttagaataaaagcatttttgattaatcaacaagctagacctcgcggtcattacat

SEQ ID NO: 199078 - DNA, 1685 bp, Cannabis indica
tgccagtcaattatacttggggtctctgcaaatgagtaagattatatatatctatatatatgagctaaaaaattaatttatgagttttctaatatataacaattgacgtgattttatattttctttttctgtatgttgtgatgatcattaattagccaagttccaggatcagcttttaggaataactctccgtacttggagctgcaagatattgagcttcggagattggcttcaaacgactcacaaaggcgattctacgtggtaattattataatagattaataattgtcattaaacattgtaattattaatttacttctaattaggtattaacgactaattgtttgttttgtcttgacaggaagctgggataagggtacgtacagactcttcaacaaaaattgagtagagaaattgagcattatatatatattataatacactatttcccacttttttttagatttaattccctctttaaaaattcatgtacacacagactgcagttttcatgggttgcaggactggagagattgaaattggtcttccaattgagcctcaggtatgtacatatataaaattaatgcacttgatttcccattataatattttctcttacatttaattaattaataaacatatgtttgttgtttaatatatacataacaatttaaaattatgataagactaaacaaaacttaattaatctatactatatttctttagatgaagatgaaaatggatttaagaaattggtttccggaagaattttcaagtcaaagccaagttgcgggaagagaccaagtagatcgtcaaattattatatcgagtcaaacccaaattgtagaacagttaaataatccaattattattaagccgccaactgatactacttctaatcaaaatccacttgcagcttcatcttctaactcatcctctttaaggtcattatctatggatactaacagccctgaatattcatctcttctcttcagtattaacaataatccaaccccttcaactacaactaccaatactacttcttctcaaatacttagtataattaacaataacccaaataactctcaattgttattacaaccatgtactaccactactactactactacaccaccaccactcctcaccatgcctcatcaacaagcaatgcaagcctttgctagcctcagacaagcccagtttccaagctcggagagcgaagacgccgccatgacaaaagcaattctggcagttctgacctcgaattcgcctgatcctacttcttcttcttcctcttctctttacagcagtgatcatcatcatcatcaccaattgataaaccagaaatcaagtgctttcaaaagttatagtactactactcatcatattcaccatcatcatcatcctcatcctcgattgagtgatctgaataaaaatatgttcaagcgatcagtttctttctttcgaagcttgaatttcatgaggacacgtcagcgtctgcaagaagcggctgctaatgctgctgcggccggcaacactggaacgacgtgtcgtccgactacgagtactcagttgcaccatatgatatcagagcggaagaggcgtgagaagcttaacgaaagctttcaatcgctcagatcactacttcctcctggaaccaaggtaagatttaagtatatatatat

SEQ ID NO: 199079 - DNA, 980 bp, Cannabis indica
aatatgatcattattattgatgcttaaactgttaattaattatgattttaatttttgtgcgctcataataatgacgagtttggcttttcaaaatctaataaaggcagtggtgactttagaatattcatgcatatctctacgaacagcaaagacaatatgtcacgagaacgaatgaagaagaagtttacataaacttatcctcatcaagattcctgacagacacacccataaatacaattaaattaaagtataatcacggccttaattataatcatataataattaatatcggtaggcgataatcaaaattatttccctggaaattgtgatatatatatatgtgccatatgtttccctatagccaaaaagaaaagcacagaaattatataatagcgatatgcatgtgctattgatttggatatattacatccattattgcaaaaataataaaaagagatcgacaatatggtccaagaatgtcaaccgaatttttttataaaagtcagtcatgatcaactttcgtctttttatactttttatcttttggtacgtacccaaaaaaagacaccattagtggagatgaaaatacaagcatttattcttctgtgcaaaaaaaataatttattttattaggcacagtgctcgtcaattcaattgttttcgatcacgatttttattatttgttatgctcatcccccatattgtgataaagatcggttatatactttgatacacatggctcacttttctttttcgtatctatatttcttgatgtacatataatctttttgaactttcaaggccttttagtttttgtctaattagacgaggtagtgaatgtagtgctttaaacctctgatattcaattggattattagaacaagaccaactatactcttctcggacccttttcacagatttgattcgtattccactatactttattattatatacaaattactatatatacttaaacata

SEQ ID NO: 199080 - DNA, 798 bp, Cannabis indica
attattgaatcaaaattttcaattcaataaattagtactttctatactatcttcttgtcataaattatttctctgtagacatccatttgatcaattactaaacctataattctagagtaataattttttggagtctctcactatctttcattttaagatttttaataaaatctcttataagtatcaatagtttggcagtgtgtaacatttgttgttctttggaactcttcatgtaacgtgtcacatgcttgttttgtcgtcactgtgcccataattaataaaaaaacgttacatgccatgatttgctacaagtagaataatacttgagaattattttgttgactctcgtttaggtcatttttgtgggttttcgaagatgtaatatcttttggaatgatgactctctcttcatgatggtttatgttgaataattagatgagaatattgcttcagtaaattaatgatgaaagaattatgtgtagttgtgaataattggtttagtaaaaatttataaatatatatatatatatatattgaataatgggagataggtatataatgacttgttctttatttatccatatgtttgttatcgaagatagtgggatatataggacatttatgatgggaaatagtcaagtaagagacttgtttagtattaatggcctttctaattaatttgatggtaaatgatctacttaaagttgtttatatgtgtcatggtcaaggtttcataacaaaccaagattgatttgtaagtaatataatttattgtagattattctattttaatcatat

SEQ ID NO: 199081 - DNA, 1086 bp, Cannabis indica
ttaatcagtcaccttttccattcttggtgagaagaccacagtgatgtcacctgaagtattcattaaagaaggagttccatgctgcaggtacaacctgtctaatttagttgaacagaatctgtcgaccagtaaatatattcatgagtcctaaatgtctctcagctgagctttcttgtacagtgtcttttataaatggtgtggtaactagcttcttattggatatatgtgttcttacttcattaattgctttttaaccaggctagtgcaaaatgctggtgaatttgttgtcacttttccaagggcatatcatactggtttcagtcatggtgagagacctgaatgttttagtttttctcctttttaaaatcatggttattgatgttatgattgtacgatatagtgtagctaatttgtttgtttgttgtgtgcataggatttaattgtgcagaagcagctaatattgcgacacctgaatggttaagagttgctaatgatgctgctattcgacgagcttcaattaactatcctccaatggtgtctcacttccagttactttatgatcttgctcttgcattatgctcaaggtgtgttaaattagcattttgtaacattctttatggctgggtctaggaaaatatatctgaattttcttattatttatgtagaatacccttgagcatcggcagtgaaccacgaagttctagattaaaagacaagagaaagggtgaaggagaaacggttgtgaaagagctatttgtgcaggatgttttaaagaataatgacttacttcatgttcttgggaaagggtctcccattgtacttcttcctaggacttcttcagacattccactatgttccaaattgcgtgttggttctcatttaaggtcaaataccagtctttctatagaagaaatgaaatcttcaagaagtttcatttctgatgatctgatggtagacagaaagcaggaggttgatcaggtgaaagaattctatccagtgaaaggtaagcttgcctctttgtgtgagggaagctgggttccctctcgtggaaataaaagaacatctggttcaaattttaagactcca

SEQ ID NO: 199082 - DNA, 624 bp, Cannabis indica
ttttttttttttacttttgtgtatagccaccaggatatcaactgatgaagttgaaataaattcgaaaatgttagtggatataattaattataattttaaagaaaggtcttgcttgtgtgatatttatttaatttttctaatgtttctctgaggcatatttttcggcaagccgatagtgtttaccgaaatttttagaaactaataataaataaacaaaagctaaaaaaaaggtaaattaatgttacacataaagaaatagttagttttaatttccttgattagttgtaacagttgtaatagttagttttaagtaactctttgccttttctgtaactgattcttgtatgaatgatccctataaataaagttctcaactcacttttgggattgaacttttctctgctattctttgttctgtttcttctctggtttttacctaaaggttttacctcaattgaagcttggtcaagcttctacatgatatcagatgcctcccatggagtcttctaacccgtctggtcctgcagtttcatctagtagagcaattgcccaagaaaactcgtctcaatcctccaaatctactcctccgatatgggattcgttctcaagttctttatcttcttc

SEQ ID NO: 199083 - DNA, 784 bp, Cannabis indica
acaaatatatattagaatttataaagagccaatagtttataaaacctttttctatagtaaaataagaagagcatatatccaataggagaaaaacaaaaattaacaatcaataggtgtaagttttgaattgttaaaaattggccttacatcaataggaaatgatataaagctactcaggctcgttcacaatccaccctaagtgcatgcacaactaaagcatacatgaattagaggtacttcaagaaaattagaaaataaactagccaaatcagctaaaaaaacgtccaaataattacgtcaagcgaaacgcttagaatatgctgatatcaaaactaaataattagactctagaaatgaataaaaaagctccaacaaacaagagagaccaatctaacacttccatcaaaataactgaaaatttctctacattaataataaaataaaaaataagttcttacaaaatatcttataacatcaagtaaactaactataaaaaatagaataagcaaagtaaaaaaaaaaaagaaaacttatctcatgttattccaaaagtgatcttgaaagatcttgaaaacctctataaataagtaaaaaaaatatgacttactgtttgaacacaaataggatggggaaggtgtttttttaatgtgatggggtattgtttggaatattgtttaaattttcaaatactgtacaattttattttatgtgacttgcaataagaattattttcttatgcaaaatataatctttggttatacaagaaattatttttataaaataa

SEQ ID NO: 199084 - DNA, 1034 bp, Cannabis indica
gtgttaaaaataaaattcaaatattttactgtacgagtgattgtttttattatacatgtataaataactacttaaaccttattttgagttcagattgccttataatagagttcagattctcacacacatttgtcagaaccttaaagacactcataaggtaagtaggaatatcttgtaatatcaccttgataagtatttctcgatcacccaccgaaaagaagctccttttccaaccacaaactcgctttcacaccttatcacaaataccttcaaaagtacgtttcttatttctccccaccgcagttggtaacccaagatatttgtcatgcatagctaccaaagttagcctaagcaagctgaccatcccattttgatctaattggggaacatttgggctgaacgaaatggccaaattgtcaaaattaatcttttgtctcaaagcattctcataaacatataaaatatttttaataattcccacttcatccacattggcacggcttaatataaggctaccgtctacaaagatcaaatgaaagaccctaggattcgatcttgaacatcaaaatccaaataattcagagttagctttagcatgcttcaacaacaaagacaaggcttttgcacaaaagaggaataaatatggcgataatggacagacttgtcaaatacccctagtcggaagcacccattctctcgattgaccaattatcaaaaatgaatatttcagagtcgtaacacagtccataatcaaatcaatccatctattagcaaacccaaacttaccatcatttcctgtaaaaattccattccatacgatcatatgccttattcatattaagcttaagcactatgaaaccatgttgaccattatttttcttgaacaacgaatggagaatttcgaagccaacaatcacattatcatttatcactcgcccaacacaagcacactctgaaaggaggagataagagggaaaagagtgcctttcatccttagtgccaaagccttcgccataattgtatacatatcagaa

SEQ ID NO: 199085 - DNA, 1391 bp, Cannabis indica
taatgcatctgaaccctccacgtgtccatacttatgagttaacaaaagtaatagtaacagtgtaagagaattgtaacattaggtatttttgcctctaaaaataaatattaagtatttaagtgtatataaaatttaaaatattagataattatactgcaatttacccttcttttaaaggatacttgcagcgaaattatcttaatatttcttttataatttttatacgtataactctaataaaagaataataataaaagcatcttattatgtggtgatatatttccttaacttatttaatacataatttaataatatatcgacacgtatttttgaattgacacttaatgactgaaaaagaatacgtctgcaataaattcgtaagataatatacttttgctatcactttttttttttattaagatcatttgtgtaaaaaattataaaaattaaagggatttcgctgcatatatctttttcttaataaatattcgggtagactgtcttatgttttttagcattcaaaaaaaaaatatattctaattattttattataatcgtatacgttgtaattatttagaatcatgtataaaaaataaagtttaaacagttacttaatacgtatataaaataacaatcatacattgaataaaatatttattttaaaaaaaatcataaatgttagagagagtctcacattgttaatgtgtagaaaaataataaaatatataagataaattgattatttctctcattaccaattaatttaagatgtaacctcatttatcttatcttaaatttcaataataaattattttaattttttaaaaaattatcttatataattataacctacccaattaatttttttttttaccaaaacagataaaagtatactaaaaagcatcccttcgagaattgtattgtaaatttacccaaaaaaaacaataaataaataaataaaatatccagccatatttttgttttgaacaaaaatctaagaataattaaaaaaaaaaaaatgtatatttaaaaagtaaaaagtgggaggaagaaggttactaagatgaagacgtggcgtgttggggtggttctgcccaaagtgttggatagatttgactgctgacgtggctggggcccacttacttcaccgctttagatttgacacctggttttgttctatgctttatttcaccacaaagtacttggagaatactctacctccctaaataaccattggtttattattgcttaagttttttacacctaaattaattttctcaactattattttatttatacttaattttttaagtttaaattttaccggtaaatttttctaaattattaaactacttgctaaatttaaaatattattttatttttaaaccgtt

SEQ ID NO: 199086 - DNA, 595 bp, Cannabis indica
atttatttatttattaaattaatgtatgtttatattacacatatatcttttttaatatatattatcaaattaacttaatttatataaataattatgttttattatatattatttggggaggggggggggggcgtttatgggatatctcatccctagtaaattaaatataaatatgtgaaatctaatatttatttacaccattaatattatgattatgatgctctttaatctctttttataaatttaaatggcctttgaggttgttaaaattctttggaaaattaaatatagattgtttttattggatttagtggaaattttatttcttatatatatatatatatattttaatttatccataactcaataatgaaatgaattattgtatattcactggaattgatactatatatcttaataaccttaaaaacacaaaatacctcatagttacctacccaaaacaaaaacagaaataaccctttacaatcttaaactttgtaaggagaacatagtatttattaaaataatgatcaactagaatattaatagtataatttatcgcctaaacaatacatgtcatagtcaattatactat

SEQ ID NO: 199087 - DNA, 1366 bp, Cannabis indica
cggagtttaagaagtatggtcgacagggccttcaaggattgggccttacaaacccagttgcaaaacaacctactcgatggataccaccacctcttgattcctttgctatagcgattgatgcttcggttgtactggggaggggctttgaaggattggagggagtgatgcaggatgcttcaggtgtagtttgggtggtgtgattatagtgtgttgggtgatttctctattaatgtgatggagttgtttgccattcgtctgggcctgactcttgcgaatcaatatggtttcagtatctctattattaatagtgattctacagcgaaaattagttggataaataagcttcacataaattttagttttcaatctattttattaaatatctattctttattagttgttgttggtggtagttctcgcagcgccattaatttcacgttcgacgaatggtattgcccatacactgacaacttctgttactaatttaggagattgtatttgggcggatatttgtccaccatttctgaattctttagtaataacagatttaccttattaaattatattttttttttcataaagaaataatacataatataatttagattatagttcatatggataagctatgctgaaatgtactacacatattaattgtaccacacgatcgctgtttggataggcttgttgcagttgctttacaaaaataaaagatcatcatgcatgcaaaatatctttgctataaataattaatttatgtatatggacatggtttcgctttatcaatcattcaaatggttatagtaaatatagtaatagtatatatagtagctacagtatagtactatatatatatttggcattattacatgatagcatgtgtgcctcgatcatattatatattaactttaaactatatgaagagagggagtgttggagctgatgatgagtccagcactacgaagcaatctttccctaattgattgccattattattattattagtatttgtattagtattaggtaattcatcatcatcattgatattattattattattaatagtagtagtagtataacccatgttcaatgtaaggtctaggtttaaatcaggcaataatcgctgatgatgataagcagaacatgtagagaagtagtcctgattattatcttccaataagcaacttccggtgtccgatatgtcgtaatgatcttcgccgtggggttttgccggaactcgttcatttttagggctaatgttagggagggcggcagatgaagtagttgtggcagtacgcatattattattattagcacaatttagtgggaaggaaagaagaggagaagtagtattagtagttgtttt

SEQ ID NO: 199088 - DNA, 954 bp, Cannabis indica
gcaacacagctaaagcatggagtctctaaactacagttgggttgtgtaattttacattctcttttttttcttctttgaataataataataattagtaataactttcttgtattaataggatcagtcaatccaccaatatcatcgtttcacattctcataatctatattagtgaaatatcaaacaaatcatgggcacctacctacctaacaacatgctattgttttctgtcttctaaagattgtagtgttcagaaattgtaccaatatcaagtaacaaaacaaaaataacaattcaaaaattctggcaatattcaacaaaatgcagaaactacaacaatttagaccttgcttaccttttccctacttaaagttaagtgagtaataatatcaaataccatcaattacagaacaaaaaataaagaaagaaacaatgttttcttggaaaaagattgaaagaaagaatttgaaaaaatattgtttttatgtttgacaccatgaagtttttaataatacattacattaattaaatgtatatccaaaacaacactaacaaaagattaaagaatgaaacacctttctatcaaaccaaacagcaaaataaaaaaaaaaaacttcaaaaaggataaataatttataaacaaccattaccatttctaaataacaatgtctttattattagattcagatcgtggtgggaggctaagctgctcaaccctagattccgttaaccaaagaacgaaatcatagggtttccctcaatcaaaaaaaaatcgaatatttctcctaattccctcaaaccttatatcaagttatagagtaaaaataacttcaatgcaatgcaggtgcagctcctctcatgaggaaaaaaaaaaatgtcaatgtgagaacgtagctgcaacaatggcgtagctgaaaccggtcttgaacgctctgttcaatttttttttttttttt

SEQ ID NO: 199089 - DNA, 1653 bp, Cannabis indica
attaaaaaataaaaaagtacaaacaatttcatagaacatgtttttggaaaacactttcattttccttattaaaaaaaacataaaacttaataaaaaattattacaaaacgcatcctataaattaatctttttatatatgaaaaatacattaaaatatatgttatcccaaattttacacaggtgatgtagcatccagcatggtgacacgtggagaacgttgagaagtctggacgggtaattttccctcaatggactggccagagaattctatacttaaagctgataagtttctgtcttcaacatgaatcatccaaacaaaacatgtacgtgatagtccacacagaacttcattatctagtgaagttatatcctccgagcatgataaagcggatgaataacatttttaaagatattttccataaatatatccttatttaattattcaaatcaaatctctatttctataggattgacacgcaccaacaagaaataataggaaatcgttctagttttcctttttagttttatcggttttgggaaacttaattatggtattttttttcttataaatagtggagtcattccacggtacatgaatctgaaattatatgttcttgagagttattacgcagtcaaattattgtaagattttttactaagaattgttaagaaactcacttggctagctcgttgtgatcttgataattctataaagtaatacaagtaaaagaggagtaggctattactataatcacggggtcgaatgtaatatcccagaaaaatataatgatatttaattagacatattttattaaaaaaaaatatatgtgattatatggacagtagaataggattataatcttaattaagttaatttgagttaattaataaaatattaaatgagtaatgaagcgtaatttattaattacggagattttatcaaattatgtgaatattgtatagatcatttttgaaataaaatattttcaggtttggcgaccgaaaaaactcgacggattagtcgaaaaatgtcacggcaatttacgatgagaaatattggaaatatacctgactagtttagaaagttgagttgttagtttatttgggaaaatttgaaatgaccaaaatacccttaggctttatttaactcaagtacttaatggaggggcaaagtagtcattttattaagagatttattaatttgtcttttatggaatcttgtaggctgaagttaaggtttacaaattggattttatatttatttaagttttaaacaaattattcaagattaaattaaaatctcaaagaaacccccctttctcttccccttctttgagagccctagaaccagccgcaagtaagaggtttttcttcatcaatctatccactctaagctgaattagctagccctaggtgctgctcaagccttgaggtaatcctccatcttctcctctctgaatttcctaggttttaagctaggttttgttagttttctttgagatttcagagttgtaggcttagataggttctgagcatgatttctaagttaaattaagtttttatgtgtatgtttggttgattaattggctatttgaattgaattgggagaattgagtttaagaactcaaattttgctcaattatggtgttttaa

SEQ ID NO: 199090 - DNA, 820 bp, Cannabis indica
tttaataagatttaactaaaaaaaaatgttgaatttttctcatttttattttgcggaagtacgatttgatagttgttaaagtttatggggtaaaattattaatttacaaagtcgcactagcatttaaaaggaattatagaatggaacataacagaagaactaagaacatgtctgacattgttttctggttttttgttttcaaaaaatgtatttttagaaatgagaacatataaaatagtttttgaagttttcaaaatacaagtcgcatttggttaatattttctaaaaacaatactaaccaaaagttaattttttttaaaatagaaactattatttttttgttttcaaaaaataaggccaaacaagtttaattgttttcaaaaaaataattttctgcttttaaaaataaaatataattttttagattatgatgctaaatatgtaataaatttttgtaaaaataaaaattaaggaaaaaattttaataagtcctgggataaaattattatagtggaaaattaaagcgacaaaattattaattattcattaaaaaagacaaaaaggaaaaaaagtaaagagtgtgaaatatgttacagcctgttaattgtttggttcgaattttcaattgatgtgttaagatttaattggttggactttggctatcggtaaaatcatatccggatattagtgttgagtttgtagcagccctattttgaatgtctaattttagaatgtcttgacaatctataaagtaagaataataaaactcctaattaatgactgttgacacgtaagagcatctttaataatggtacttttt

SEQ ID NO: 199091 - DNA, 776 bp, Cannabis indica
ttaagtggcagatcagaaaacatgtagtgacatatgtaatagtaatatgtcaccacgtgtttttgagtcgacacttaacagtcaaaaaatgggtaaacagtaataaaattgttagataagatacttttgccgcctctttttttattagggtcacatgtgtaacaattgtaaaaattaagggggtttcgccgcaaatattccgtaaaaaataaaatgataaggtggaaatatgttcaaagaaaaaaaaatcaaggtatagacaaactatttttgttttagtattggtatttaggcatttttagagtacttaaaaataagatataatagacccaacaaaatagttatgggtgattcttacaatacaccctcttaaaagaaatgtactagtgcacctctattcatttcggcatccaaaagaattttacattataattatttgaaacattctgtaaaatttcaaaaatatcaaaataatttataaaataaaaaataatgttcaaacactctatttcatatacgtataaaataaaaatcttattttcggtgtgtttaatttaattttttaaaatcttccaggttgtcttatataattacaacttacattataataaaaaaaaaattaaagtaaaaaaattctctcaaataccgaaataaataaaagtgtatcgatgtattcttttaaaaattacattgtagaattttataataattataatagcttataaaaatgtttaactaatatgaggaagaaaggaaaatatatatgtttatatata

SEQ ID NO: 199092 - DNA, 526 bp, Cannabis indica
aatcgagcattggctaaggttgatgagaacaacacaatgaagcataaaatcactattgtaacattcacggccatgtttcacaagtaagtgttttggatttaattaggagtctcttgctatattggtgtatttatagatactagtggtgtggaaaatagttttaaattaaaggatagagattaatgtagtagcaatgttgctactagtctgttttttttttaatcacaagtttatatgcatatgtagaaactatatctcaaattacatccattcaattgttatggtatgttgtgctttaatggcttaattataatcaaaagattaacttttgttgttgtccaattatttatttatttatttattttgttatggttttttccgtttcattatgcactctccaaatgaattaagtagttcatttattagatattcaatgctatttataactaatagactgcgagaggtaatgaattactcctattaattatatttgtaatactgaaccctattaattatccttaataat

SEQ ID NO: 199093 - DNA, 2478 bp, Cannabis indica
ttttgaatctacattaatttggtgttagactttcttttatgcattctaacctttattttattttaaaaataatcttatattttactcctcaaataaaaatttattacaaaaataataattattgatttaattaaaacactaacatcgtagaaaatataaaataaaaataacaaaaatattaatattaatattaaataaaataaaataacataacactaagttataaagctaaaaagaacaacgtaaataaaaataaacattaagtgaaaataatttaatatgatcacttaagaatcttagccttaaagaatgtcaaaatattttctatatggacttgatgtattttgggaaacttgatattcttgagatgcttgatattgttagtaatctcttttttgcataattcatgtttgctcattttaaaaaaatgtcccgtatattaagatcaactatagaatctaaatctttcaataagattttgttctcttcctgatattcttttaaagccaatctttgcttttgaattttataattttttttctctagtggagttgctccaactaaatatttcaatgagttgttgattttcttctttaatggtttcgacaatagtacaaaattatttattattttttctttttgattttactttcttgtaccccaatgggtcatttagatgaattacctccgtcatcatcattatcatctaatatgtctactgaaaacgatgaaagtccatgagatgcagtttggggagacttggaatccactgggtcaatattttttgtagcattgatgttatctgtaaatttttccatatccttaagtatatcccaaacatgattaaatttgaaacctttcttgtaatttttatcttgagctagtagaatcttggctcaattcaactacaaaaatcataaaatataacattaaaaatgaataaaaataacaaacattaataataatttaaatgttacaagtacttacgatatcctattgagatgcaacacttggatttaatccttcaatttgtcttatgcatcctctgaatttggaaatagctttaaagatcaataacattcaagcatgcaatgatcttttgtttctatcttgagtgacatacgaaggtttggaattattgaaattattcgcgactcgagaccaaaattggtcactgaattagtttttatttattatagaattttcagaaatatcaacataaataagacatagatacatatcatctttgtttgtgtattaagaacttctttgagtacaatgagtagccattattttgtgagataacgtaaaagaaataaattatagcttgaattaaatatgtgtagaagaaaaatgatgcgacggcgatgtaagtgacactgagatagagttaattacatgttcacataatgactttgtcatcacatacaaaacaaaaataatcctgatcacttgctataatattgcaacaaatatatctagataaataaagttataacaaattgtgatatgttattgactaccctattcacatgattgaataagacaaattattaattattggaatattagactaatgaattaagaataagacaaatctttaattaatcatggtaatttactatatttttataatataaacaccacacgtaaaatatacatcatcttttgaatctatcttcaatcatgagttttaattttgcactccacttttcatctgataattcttttttagatgaggagaaaataattaatgatattgatgagattcatgcagaagaaacagtaatcattcacatgagggctaataataattttcaccttgttcatcatctaaatcaagacaacaaccaatacatttgtagaggatcaattccaggtggtagatttataaatcgagataaagaaattgttgatcgcaatttatttatagattattttattgataccccatagtacaatgattttatgtttcggaaaaaattttgaatgtcttgaagtttatttttttcgtattgttgatgctactggtgttcttggattgtctactcttcaaaaaataacagttgtgtttcgaatgatggcacatggtgtaccggttgattttagcgatgagtacattaaaataagtgagtccacaacaattgaaattttgaagagatttgtgtttgcaaaaaaaatatctaagatcacctaatgctgatgatattgcaaggttacttcgtattggtgaacaacgtggttttccaaaaatgtggggtagtctagattgtatgaattagaaatagaaaaattatccaacagtttgggcaggccaatatgcgagtcgtagtggatccccaactattattcttaaggttgtggcagactatgatctttggatatggtatacatttttcggactgtcatgttccaacaatgatatcaatgtgttagaggcatctcattttttttcaatcttgctcaaggtattgctcc

SEQ ID NO: 199094 - DNA, 656 bp, Cannabis indica
taatttttttctggccatcacccagtggtcacaaccaccttgttcaatggtggcgaccatggtcgcgacttgggatttatagaaaacccataaaaattatgaacgtcagttgtcgcggccagattgcttcatggtcgtgtgactacgggtcttacagagagccttgaaatcgcacattgatccatggtcacgactaggccattatgtggtcgtgactagggatctttatgaaaccctaaattgcctttaaaaagcctcatttcaaacctaaaacctattctaatccttcaatcactcttctaaactctctcagccgaccctacaccctttctccaccaaatatttcaaattttctcatttcatctcaattcctcatcaaaatcccattctaatatcatcttcatacccaaaatcaatcactctattcatcctcaagcttttcaagccattcaacaatggaggtgcattgaaaattcattcaaatagtaagctctatttcttcatcaatgctacattgtttgtttaagtgaatagagggtaatgtgattgggtattgatcaatattttgagtgggattgttgatttctatagaaattgtcgagactatttgcggattattagtgatattgtgtttattgtggattttgattgttctt

SEQ ID NO: 199095 - DNA, 502 bp, Cannabis indica
aattataggaataacatcattttcattatattattttgtatcatttcaaaagatacaaaatttgaattattatttaacaaaatagattatttgattagtaactttttccagatgcatagttcaaattatatattaattaccctatataaaataatttttgactccaaaattctctaagaaatttgaagtcaccatgaaaaaagggaaactcaaagtgagaaaggaagtccgaaataggactatgtcctaggacccgagtgctcggggcctcgcgagcccctccgactgctagtccccaagaggaaccctctttccattgtccttgatccctaaaaagggatccacttggcgcgacttaaggcctgggtggccatgaaatgccttttcttcctttgtactacactatttcacacaagaccccctatcttatggtatcaatttgaaatgaccattcgtactttgaaatgcttaggatagtggactaagtctcatgaagggttcc

SEQ ID NO: 199096 - DNA, 1438 bp, Cannabis indica
ccaataagcataataaaatgtggtaccaccaccaacaaacatgtcacatgtcacattgtcccaaacatgaatggaatgagtgtcattacaaaagccatgtattatttttgacaaaattcaatgcagaaaaaaccctaaagaaaaatgtaccattttctactttaccacttcccacacctatcaaactatcctcaaaagtcacataataacaaaaataaattaaaaaaaaaacccttaaaaattgttttctaatatataataatcagtaaagtcagaagtgtttatcaaatctactagtttaatccgagtcatgtaactctataaaattgattgagcacctacaaaaattactgagcaataggtgctcgaccaaccgtatgtagtcacgtgactcgggttagttggtaggttcagttggaacctcatcggtacccaaaatttagatgatgaaatatggctatttttttattttagttttaaataccataatgaatatgttgtttttttttttccaacttttttatataaatttattgtcatatgctgaaactaatttaagggttctcttcctttttgtcttctacaaatctcatagatcttattatatttgtattcaagtaattcatgtcgtttagttcttgtctttccaagactacttctcctccttattttttatattttatttttctggttaaatttcatttttactctttttactgacttaaatttccaagaactttatattttacccttcttttttttttcactgaaaatatttacccttgtttttattttacttttttttttcataagttgtttttattttacttggttacaatttttgttagtttgtttggtatcggcacatccctccatcattcttttttgttttacttagatatattatttctataaataaattttaatgtaaacaatatttttttttgcttaacaatataagcaatacttattcttctttcttcatttattaatcttgttttgttagctaactgttttttgttttatatacctttttaaaatttaaatattcttcatcttaaacacgtaaattgtccattatttcaatttcaagtttgaaattcaacataatattgtattttttttttttctgaaatgtggtaattaacaactaacactattctccatccacattacatatttgtttttaagagatcgttaaaaaggcaaatttttttttttgagtgaatttattttttctaaataaaatattatgatttctataattatgaacatatttacaaaagtgcatttgtcaaaccaaattggacattactttaacattagatgtgaatatgaatgtggaaaataaaactataaccaactcttcatcaagataattacaaaatagatatgtatatatctagttctcttaacatgttatacatgtttattgata

SEQ ID NO: 199097 - DNA, 1435 bp, Cannabis indica
actatacacttcataccagttccaaaacccttggaaattccctcaccagagctaatgaaaaaatcctttacaactaccttctgctttacattaagagtcacgcttctctaatcaaggacatcatagccaaccgcttctccgcctcatcgtcaaatcgcctctctggcttggtcgtcgacatgttctgcaccgacatcatcgatgttgccgtagaactaggggttccttcatacttgttcttcacctgcggcgcggccaccttgggcttaatgctctacctcacaagccacggaaaactcgatggcactgagccaaattccgaacaccaccacatatctacctatctcaacccagttccaaagaatgttttacctgattttgcctttgacaagcaagatcggtttgggagtcaaggcgatcaattaaaaaagaccaaaggtataatcatcaacacagtactcgagttggaatcccatgcgattagctcacttttggacggtgtaaatccaccagtttacaccctcggcccccttttggacgtaaaaggtaaaattaacaatcgacagtcatcagatcatgacgagatcctgcagtggcttgacaatcagccgccgaagtctgtggtgttcctctgctttggcaactacgggtcattcaatacaactcagctgaaagagatcgccactgggctcgagcgcagcggccaaaagttcttgtggtctgtacggaaacgccaccaagataatctcggttcaacaacagatttcgaaaatttcgatgaagttctaccagaaggattcttgaggaggaccaaggaagtgggaaggatatgtggttgggccccacaagtggaggtcctacgacacccggccaccggaggtttcgtgtcccactgtggttggaactccgtactggagagcttttggtttggagtgccgattgtgacatggccaatgtacgctgagcaacaaatgaatgcgtttcagttggcgagggatttggagttgggtgttgagctaacattggattttaaatggggcgatgaagatactgtagtaagttcggaggagatagagagagcccttaaatgcttgatggatggtggtgaaggtgggttagtgaggaagagagtggaggagatgagtaagaagtgcagggatgctgtgttggaaggtggatcttcctacgagtcttttggatgtttcattgaggatgttttgactaatatcgactccgataaaaatcacctgtccctacaataacaactttaaatttgtctactttatttatttcatatcaactacagaactttggaattgttaatcaaaaaataataattttcactattttgaaaatgcgaaaaagtaatttgctttgttattttaagtatccgtttgttttccttaattattttattgttttttattttatttta

SEQ ID NO: 199098 - DNA, 1290 bp, Cannabis indica
tattttttattaattattgaggcaaaaatatataacatgtgtattaattggttaattagatgatgatattcttagattatttttgtctttgtgcaaggattgtaaaggacgagttttttctgagtttggtattgtgttttatgatatgatttattttcttctatttgagtagttttttttgggatgtgacataatatattaatgaactttaccaatacaaattgacataaatattaataccctctttttagtcaaagagacaaaattataaaatgagactttatgatgagatgagatcatccctgttcaacttgcacccctctgtagtttctcatcctcttttttcttttttaaggaaattaatgtgtttttttttagcataaattactttcattttgaataattattaaggatatttatatatatgcagtctgcatttacataaattgatttattttcaaaatatatatatacaagtttttaccacaataaaatgtgggaccatggtttggttgcccatgagtcatttttgttaatatttttttttatatatatatttatgaaccatagcagtgtattcatttttgttaaattagtgtaatgaatttttttttttttaactattttagtttgacatgtgccaataaatattttacagctagctagctagctggcataagttaattttgtgcatattttatttatacataattaacttaatttatatattataattagctctctctgtttttgcttctattttgtttttgttctactttataattacaagatttaggatattgaatattgaatattgctactccattgaaatctctcattggtaagtaattataatatcatatataatttctcctcttcttctttttttggctgaatatttagcctatcactattatttgatcacttctaattgattatgtgttgaaatcattttgtgggatttatttatttaatttaatttatatatataggggtgattactcttgtttgagacttttcagtattattttgcaatgttgattatgtttgtttttgattatttcttctgcagttgttttaagaatccatggcaagtactaaatttttcaaaattatcactgaaaaactattgaacaaaatatgatggtaagttttttcttttttctaattacataaatatattaatgtgtgttaatttattaatttagtagtacttaatctatgttattgttagctagcttagttggttaattatctcataatatatataccacttatttagagtttttt

SEQ ID NO: 199099 - DNA, 3046 bp, Cannabis indica
ataatagtcgcaacattgtgtttgtaatacactgacggaaagtagtattggtcccaaatcgacaaaaaatttaatgtacttttttgcatcagtttttggcgtggaccaatgcaaaaagcctattttatagtagtgtgttaagtttaatcgcacctgactaaaaaaatgctgatattattcttcactatagcagtgctacatttgcaatttaaaattttgaaaatttattttctaactaaatatgaataaataataagtaattttaatttttcttattatttttccataagaagatagattttttaaattttaaagtagttttatcgaattgtacacttatgtggcaataagacactagtcatatcaacactttgttaaacaatgagataaaacttaacaaaaaatcctacatttcgacatggtaatagtttggaggaattaatttttaactagcaaacaaatttaaagagtaaaatttaatagtggtaatagtttgggggggaaaaaaaaaattctaaatagcttttattttatttattttttttttttttttttgttattaacaaactataaggtataataaattttcaaactcctggtttattttggtcactccttaggtatataatttgattcctatttttgttaatagcactaggcaatgagttattcatcttttacaacaatacttttaataatttgatgtcgatggtattttaatgaagcatattctcacatacaagattgccatcaaaagtgttgttgaaggaaacttgacaactcaaaaaacaaggattcgtacatgttatcaaggtttttggtttaaggacatatgcactttcaaggcccaatattaaccaagatggacctattccaaggcccaatcaaattaataaattagcccacaaacggagtcaggctacagctctagatccgaatgtaagtccaacttatagactcgacaaggttggaccactttggttcagaaaagactatcctgcccgaaagctgaaaggtccatcatgacaaatttcgatatcctgattgggttctaatgaacgggaaattgaagagacatccgaaaccttccgaataccatcctacgtggcatcctccagacacaaggttccactatataagatatttgttgttagtttttatggtccttagcagagttagaaaagtgaaagcatattttttaaaaaaaataatttagtccaatatgaacaataatcccaagaacctcaatatattatatatggattaaatataaactacaagaaaagagaaacaatacctcttgtagcctatcaagagatttttggctatctttacgtgttaatttatcgaacatttaatccaagaacttgttgaatagttcacacacaatcttccaagtcagcctcaacactcaggaatagagtggactataaaatttaattggatgattataattttgtaatcacagtatattcttaactcatgagatattttgatgagataagaaagaacaaaaactctcacaccacactataatgtagggcttatatatgtactatgtactgtgggatttgttttgattatttttttatcatataaataattaaaaataaataattatttaattaaatattttataggataaaatatttgtattaaataattaaataaataaagatatacttaattcggttaggattaattaatgaatatttatctttatttttgtagaattacataaatgctatgtatacatcattataggcttgacctaaaagcatcgataacagttgttttaaaaactatatagatgtgcacctctctctctctcaatcatagtgtcttatgagttgtgcacatattgtgataaaaataattgtcctataattaattttatgagcccatatttgttctgagtgttgagactatctggaagacattggtgtgaattctcccaaatcatatttcatggattggatgatcgcttgcatatatgataagaatcagggataccctgataagcattaacaagtatattgatttcatcttgtagttatatttaatatttgtaaatatgttatatttaaggggcttatatttcagagtatgagaatttaaataatttttcataaattgttttcgcttttttactttgatttgtaccataaaaactaacaaatagtaccaaagcttatctctatattcacacacacatatatatatatattacatactgtgttaagtaattttatatatttatatatatgttatatatgatgaatggatatgtagtttattcatgaatgtggatcattaattatacgataaagttgggttagaaattttacatggtttgaaagaaaatcatgcaaaccatttttttaataatagtataagaactattatatgtcatgtttagatttataccttgaaagtaagtaattaatgaataatatattactaaatatataaatacaaatacattataaatgaatatcttaattaatgaaaattaattaataaatataagaaaactccttattcatatagagagtgtataatcttgtaagagtaaaagagaattaagatcataccatgtgaataaaactagttattagtatattaaaatataaaatatttaatacaaaattactaaatacggtttaccaagcactaaatagtagtgacatgtgattttgattcagatcatatatgtggatatacatttaataaagatactatgtataatttgattatgcatgactaggatgatataaataaacatccttcatcaacatgttatttatcaaacaagagtaatttatatcataatgatgcccataagtagatctatctaaattcttagtattcatgaactcatgtttgtgttcattaagttctttgattcactcgttaaagtttctcatgagatgatacttacaatttctattttggaaacttaataacatggatggatgagaatatgctatacaataagtggaatctgttaagaccaatcaaattgttagcagttagttctgttgat

SEQ ID NO: 199100 - DNA, 689 bp, Cannabis indica
ttattccaatttttataagaaaaccgatataaaagggtactttttatctcgattttcacataaaaattaggataaaaatattttttttatccccattttttttaaagattttttatccccattttttttttaaagattttttatcccattgtcatgtatctcttttcattttagtgaaatctgggataaaaggccttaaaaaccaggattaaaagttttgcttgtagtagtgccaactattgtgcaagtgtgtaattgtactactaacaatgccttcagtcgcagagaacttattatttccaactaataacaacgatttgatgacgcgtcatcaaagaacaaagaataaccaacaatgaaacaaaaccatgtcacagagataagtctaaaatactcaaaactatgtcacagatacaagactcggtaacaaaaatcgaatcaatagcaaaacacccttgaccaagctgcacctaggtcaaagaaaaactgacaagcctaatcatagaaaaaaatacaacctcttgtaactataaattcaggaacgaaaaacaaataacaatacaatattaaaatattaagtcattcattccagtagtaaattgatgaggatttttaatttttaagataacatgaaagaaaaatcttggataagtgagaagaaaaatcttagtcaaagccatgttttattt

SEQ ID NO: 199101 - DNA, 1517 bp, Cannabis indica
gacactccacttttttagccaatttttcattcgggtccaatggatggtgaggttttcaaaccttataacttgaaatagacaatgagatatgtcactccttaatcaatggttttccccacttgacgtggaccgcatcttgacaattcctttgagattcttcaaacacaacgacacacttatttggcaataccactcatctggtgtatactcagttcaaacgagatatcattgtgcagcatcaccagaagatatagacaacaactcatgctcctcttcagcaagtcaatggtggaagttattttagtcactccaactgccacagaaaataagaatttttgcttggcgtgcttataatgatgcattacctgtggctactgcattggtcgaaaggaaaatcatcactgatgctacttgctccatctgccatcaagcttgggagtccattagtcatgctttattgggttgcaaatatgcaagggcagtttggcgacattcgaaccgtgtactcaactggtctaatgcatccacaatgcgaaagggtgattgtcttgttcactcgtctacaattttcacacaatttgaaatggagcaacttttttgcaccctttggttcatatggtctaaaagaaatcaggtgatacatggacaccaagcaaaacctgctaataatcttgcattttttgcagagaactatctgcataattttcgagtaacacaagctaaattcagagatactggtactccagcacagccccacaccagcacagctccaccagtcagtcctgtggacacctccagcaccaggtaacctcaaactaaatgtggatgctgcagttggttccaaaaaaaaaataccaagaataggagctgttatccgtgacaatgtaggcaatgtgaaagcaaccctttcaaaacgagtagttggcaatttcgctgcccacgaaatggaggccttggcaatgtttcatagcttaaattgggcacttcaactcaatttgccaattactcatgtggaaatggatgctctacgtgtctccaatactttatgcaaacttccatttgaattttcttctttccaagatttaatttcagatgtttgtagtcttctttccttttttcttaatgtaaatgtaactcatgtcaaatgaacagctaatatggttgtccatggtttagctaaatttgctttagaagtggatgaagcttgcttttggtcggattgtattcctccgcctataaactttgttgttgtaaatgatttctcatattaatttataacaacaatctttattctaaaataaaataactaatattattttattatttattttttgagattagatagccattaaaaaaatttcttatcaattctattattattaaaactaaaaaacaaattgctcttgcaattttattttatttaatgataattaaattataaaagtatgtcaaatttcaaatatttatattttatatatattgtatatgtcaagaacgtgacaaataaaaacttcatc

SEQ ID NO: 199102 - DNA, 2943 bp, Cannabis indica
cacaaacaatacaatctaacattgagtccttgtttaaatctgtcatgaccgtatgcatttacttttttatgtacacaattgagaagaaatttcagacttccgttaatacagaaaaaacaaaactttattcactattttattccatcatgattcttactccataaaaaatgagtaagtaaacacattcttgcccaagaaaagatttcacctatgatcttctcttttctaaataagaaaaatactacactgaatcattcaaatctgcattacacacacacagacattgatttcttagttctcttctacattgataaaaaacagagtaaatgaatcataagtaagacataaccaaacctgatcaacacagcaatagaagaaacaacatatagaatagcaaaactttattcattatctcatctttatccattcaaacttttattcatcatgatgagtaagtaaacatattcttgtccaagaaaagacttcacaatcatcttccccatagaaaaagactatacattgaatcattcaaatttgcatcacaaacacacacattgatttcttaattctaaatctttgaaagtgaaagaacaaagtaaatgaacaataaaactagacataaacaaacctggtcaacacaattatagaagaaacaaaatacagaaaaacaaaaactttattcctaatcttatctttatctaatctaattcatattcaaacttttctccaccgtgattctttcttcattacaaatgagtaagtacacgaattcttgtccaagaaaagatatcactatcatcttctaactaagaaaaagactacattgaattattcaatttgcatcacacacacacacacacacaacaacagacattaatttcttaattctcaaccttgaaagtacaagaacaaagtaaatgaatcataacttagaagaatcaaaactttattcattatccaataaacgagaaagagaacacaatcaagtccaagaaaagatttcactatcatcatccccatgaaaaagactacattgaatcattcaaatttgcattacaaacaaacattgatttctttattctcaaccttgaatgtaaaagaacatagtaaatgaatcaaaagctagacataaagaaacctgatcaacacaattatagaagaaacaaagtacaaaaaagcaaagcattcttcattatcttatctttatccattctaacatatattcaaatgagtaagtaaaatacattcttgtccaagaaaagatttcgcaatcatctccccttcagaaaaagactatacattgaatcattcaaatatgcatcacaaacacacattgatttcttaattatcaaccttgaaagtaaaagaagtaagtgaatcataagctagacataaacaaacctagttgttgggagagcccatctacacaactgaagagctggttcaagagctttagtgatccaagcaagctcaaccttccacttattatcaccaagtaagtcatcatcatcagaaacataagtaccaactctagactctttctcaaccttagacctcaaagacacttgagaaacaccaccacttttttgcttcacttcatcttcaaccttattgtttgagtaacaacggtaaagaatcccatacacaagcctttctgattcttgcttcttcaccaaattatcaatacaatctacaaaaccaccaataaaaatcacatctttttttgtaagaattagcccatttggtggataataaagaaaacatatagaaagaacttgcttacagagattattgaggaatcgtttcaaaaatgggttacccatttgttcttgtgttcaactgaaaaaaaggtttctttgaagcttttgaataataaccgatgtggtggttacaatcaccaggtggtggctggcggcgaggacagcggaaatggagactttgatctggactttgataagtgggcccaggcccattaaccaaaggcccaaattaactaaccgcaaaggcccgagggcaatcttgacattttgacaattcttcaaatcgggtataaatacaccaccttgtcaaacccctaaaaatcgaatcttattcttctagggttttcaatttcgaaccagagttacaattacgccgacataatcttttttcttctataaattcttcattttttatgtattttctttgtgtgtttgctgtagcttatcgttctcctttcgatttcacgtttttcttatgatatttgctttaaagttttgatttttgagaatgaggtgatgatttggatttttgttccctattggattgattcgccagaatgatggcttcaaatgtattagctctagctgatcgttctcctttcgatttcatatttttcgtatgatttttgctttaaagctttgatttttaattttggtttttgagatttgagatttgagaatgagatgatgatttggatttttgttccctattggtttgatttgccagcatgatggcttcaaatgtattagctctagctgatcattctcttaataatgtttttttttctgagattttaatgttattctgaacttaagtttaaaattttagaaaatgggcaaaattgtgtatgagaatgggatgatgacttggattatgtttccctattggtttgatttgccagaatgatggcttcaaatgtattagctctagctgatcattctcatctgctttgaaagcctaatttgaaacttgatttcaatgctctctttttacagagtttattttattagaaacttttacaaatttcatttttggatattaaaatatgtaaggactgagtttgacacataccctttttggatttataagtatttacttcatatattggccattgttaactgcattagagaaattgtgagtaaagctaaaactcttgtactttacacttttgaagatgtcatt

SEQ ID NO: 199103 - DNA, 2741 bp, Cannabis indica
tttttttttttgttaattacagaagtttaaattatgtgcctttttgattagtaatctcgtttaggggattagggttttgtaagtaacttgggtagcatgcttaattatttagggcgttacaaccaaggtcaatagccttacaaaagaaggctgatatacggttgtattgaggggcatccttccactgagtgacttttggaaagatatcaggaggatcttttccaacaacatgaaggagttcctcgacagagctgacggctttatcaagctagaggaagttgtcctacaagcccagacagaacaaatcagtaataggaaatcgaagggcatcctacaaccccatgaatttcaaggcgcacaagtaggcactagcaactctgcctaaacatctagtcgtaagaacactggggcaagggcaacaataatagctttggaagaaacagtcgcagagaggggaagtataacacttatcccatgccacgaaactagaaagacaaggaggagaagtttatttacttcaccctcctgacggagaaacctgaggccatcttcatggacactcagggaactgtcccatacaagaagccccctcccattaaaagggagttgagcaagatggacatgtcaaagttttgtcggttgcacaatgacttcgtccatgacaccaacgagtgtcaaaacttgaatagggagattgaattcctaataaggaagaacaatcccccatctgcatcgttatgtgcaaaatgaccagactcaggcataaggtgcccagaatggagatcctatgccacctccagtggcgggtcacttgggggtcattatcggcagaccccatatttcaggcaagactaccaaagctagggaatgctatgctcagacattccatcacgagcctaaaagtaacatcctgatcatcgaggaaaggagctccaagcagccaatggttggagagcccacaatctctttcatagaaagagatgcagctcaagtcaatttcccgcacaatgacccctagtcattactatccaaatcaagaatatgactgtgcaaagaagcatggtggacaatggaacctcctccaacattcttttcaaatcaacatatgaaaatatggggctccaactaactgatttggcaccctgcactcagtgatgtatgacttctttggccaaggtattgcacccattgggtatatcagattggcactcactattgaagaaattccaactaccaaaaatctaatggtgcagctcgtcgtaatcaacattccctcagctttcaacaccatgataggtcgaccaaccctgtatgacttgaaggcggtgacatccatctaccacctctacttgaaattcccaacaaggcatgggataggatgtttgagaagagaccaatagtcaacccatcattgttacaacttggtcctaaccaaagccaagaaagataagatgcccgctaagagctctaaagaatagtccaacaaagggcaatgaagtccaacccaaagtggggatgcaaacatagatcctcactttagggatcctacatatcgctttggacctatagaagagctggagggagtggaggttgattccatttctctagctagaagactgaagattgggaagggtttagcaccagaaataaaatcaatgctaatagaatttttaagggcaaacctaaacctctttgcaaggtcacatggagacatggtcagaatcgacccttccgtgatgacccataccctcaacattgatctaaacttttgaactgtacagcaaaaatggaggttgttggacaaagagtgtgcccaagcgcttagagatgaagtcaagaggctataggcccatgactttataaacggagtattctatccactttgagtatccaaccctgtgttggtaccaaaccaaacaaagagtggagagtgtgcattgacttcaccaaccttaacaaagcatgtccaaagggctgctttctacttccaagaattgaccaataggtggacgccacagttggccatgaaattctaagtttaatggacatgtactcaagttacaaccagattaagatgcatatgccagatctggagcatacaagctccatgatagacttaggcctgtaatgctacaaagtcatcccctttgggctgaaaaatgtaggggccacctactagaggcttgtgaacaaaatgttcaacgatcttattggcctcaacatggaggtgcatatggatgacatgctggtcaagtccaaaaaggtttggggcatgtggaagacctagacgaatgtgtcagggtcctcctcaagtacaacatgaagcttaaccccctcaagtgtttttttcaaactaggctcaagaaaatttgttggattcatagtcaatgccaggggaatagaagcaaacctagataagatccaagcccttttggagatgaagtcgcctataccatcaaggaagtacaaagcctgacaggacgcattgttgcactaagcatatttgtgtccaagcctacaaacaagtgggtgcccttcttcaatattctaagaggcaacaaaaaatttgagtggacaaaggaatgtgaaaaggcattctaggagctaaaaaacaattggcgcaaccacctatgttgtcaaaacccctagacaatgaagagttaggcgtgtaaataacattcacaaaacatgttgtgaatgaaattctaacaagagaataagacggtgtacaacaccttata

SEQ ID NO: 199104 - DNA, 954 bp, Cannabis indica
aaatctctctaaacacagtagcatatgctacaaataaatttattttgggttgaaggttttgagcttttctgggtatgaaaataccctcaaaagagaaaaaaaaaaaaagaaaaaggaaattaaattaattaaaccactaaaaatttatttttaacctttttagttatgtttagaatatcaattatcgatctgaaccttgaagaggcatttatttccatagggctggctttccaatgcactgatcatacagctagctaccagaacaaaaactcagatcttccccttaaattaatcataattattataaaataccctaataataaaaatattaggtattgcttaaattttaatttaatatatcacactttcattcacacaagtgttttattttttttttttgttttgtaacaatatataattctttcacactgttttggtttggggtatgaaacaaggtttttaagccaacagaatgagagtttgcacattgtataattaattataaaaatacaaacaaaataataaataataatattatgatgtggcaaaaaaaaatgcaatatttgtgttctgtatattttatatataacacgcatttaattccagtatttcaactcacacacaaaccatgcaatacaacacattttgtcataccaaataaatccaattccctaattaatttaaacacaatctctaattttcactatattgaaaatggaaaataaagtttgtttttatataaaaatggtatcggcatagaaatgtgtagtacaattagtttttaaatttaaaaatgatataaaatctcatatcacaaagaaagaatacaaaaatcatgtttgtacaacaatattttgaacacaagcaacttaattgaggtttaaagggtaatgaatgagattgaaagtaaaaaacttaatcagaaaaagacaaaaagaaaatggaaataaaagt

SEQ ID NO: 199105 - DNA, 829 bp, Cannabis indica
tttgtttttttttttttgaaaatcaatgctatctaatttattgaaaatcaaactcctatatcatactacatgaataaaataatagccaaaatataattttttttaaaaatggtgccaaacatataatttacaactagttttaatttgactcctaataatgtgaatagaaaaaaaaatattgtttatagttttctcaaatatctttctaatactatctaattcattacaatcgatattttaagacaattttttttttatcaactaaaacaaaagttttgaatgatattatgagatattacttattatatttaattttatttaaaaaattaacaaaaaaagttaatattcggttaaataatgcttcatgaactcggttaaactaacatgaaagaaagaaaaaaaaaataatgttaaaccaatagtttgttagaggaggtctccctttcaaattcccctcctccaaaataaaaaaaaaaaaaaaattgtttattttttatgtatcattgcataatgaaaatgagaaaatttaagtaaagggaatataaaagttacattatcaaaaatataatcagtgtatatttagttatctttacaagtatataaattttagggattttatttataggacatcaattgtcatttaacctgggaatttttatttttatgatttttgagatacaagtttgcaaaatatagttctttttatcaaaaaaagatatttgtatgggaaaattaagataaaaagttaaaatatatgagaacaacactataaggtaattggttaccatcagcctaatgtaacttgttacccttatctgtaatttacaca

SEQ ID NO: 199106 - DNA, 2115 bp, Cannabis indica
ttttattaattattttagattttacgtattaatattttatatttgaaattaataaaatatatgaaatttgggtgatgatttttaaagaaattgatatatgatgtaatatataaaattgaggtgaaataaagaaagtggaaatttttgtaatgtattttaaaagatagagtagagaaactgatgagagtgctcttataatatcaaaatgatgtactttgttacgttgcaacgttgatcctaaaatatagtttgttcattttattttcctacaaaaatcaagttctcatgaaccctcatcacaacattataggtgtattgttttgacgttgaaaattaagtttttatggtagcaatgttatgtggctccaaaattatggtttggaaagatccgtcttttgttaaaattacaaaaaatcttgcagtattccaaatttataaatgatttgttttggattggaattttaattaataaaaatataaaattattggtgcttcaattatgatggaagaattatatttgctttgaaattgtgaggatggtgaggaataatatatgttttgttgcgatgatgatcacaaaatatggtttgagcatatttttttccctacaaaaatcaaattatcatagaatcatcattgtaatatcataatatcgtaggtgtattgttttgacgttgaaaattaagttgaaaagatcattcttgaaaagatcgtgcttgttggtacttcattgttattaatcaattgcagctcacaaacctgacaacgctctctagcgttgaacaaagcttgtagagttggtcttgatgaaactatggttatttctttagtgagttaaacactgtcaactcacgaatctttggataagtggatgagtgctcacacatgtaacaactccctaagactcatgatcaagaaagcccaacgggatttagtatggaaagtgaccaacgaaggcatttattcgaacactcggggggcaaataagacatagtatacgggaactatgctcgttacatgagcattcacaaaaatcatggtacacgagagccatgtatatcacacacacctaggtatacgagagtcaggggttgcagtggtatttcgcacacttgagttagtatttcaatggtttaataaaatattgatgttatccctagtaactgagtttcttaatcctgaagtgctagtgtgagtactggtaagttcattaagttgaacaagcgcacgtatagactatttacacaccagagttaagcactatatgatataaacgcttgaggtcttacaagaatataaagatcgagtttataaatctaaagtgctagtgcaagtgttcctccttaaatcacaaaagtaaaaaagaaaacaaaagcatcatcaattacaaaaagctctctggaagtaggacgctgcatccagaaaagattgtctgattgattgaagaaaatcctcttggagtggggtgttttcccagttgtggtattcttctggtggctaagttcctcttcagtatgggacgctgtacttagcacgagtttaatccaatctttcttttatctttttcctcccttggagttttttctataacaaggttctatgagtcgaaatcatcaaactaggttcttcaaaaacctgtgatttcgcccctatacagaagatctggcgggtttttctgcactactcatcggcagtgatgcatctcacttatgatcataaagtgagctcatgcttgagcaccaagcacacaagcaataacccactacaccttaacagtggtccatctcactcacagtagatagcttcaacatacaaacttcaaagtttttcaccccagccacaaagagatcaacattgggggcaagagcagtcaagagcagtcaagctcaacaaaatttcaaacatcatcgcgataaaggtgatggttaataatcaagcatcacgaaatgttctaatcaagcatcacgaaatgtattaaagaagaaagcgaatgtaactggattggaagaaacttcaatctcttacaatatgtgaaatttggatagagataaagatagacaaagctctattaatgatgtcataaagatagagcctaatgcaatctatttatctcaa

SEQ ID NO: 199107 - DNA, 1021 bp, Cannabis indica
tgagtaagctgagttttaacaaagtatataaattatattaaaaaagtatcacaattagtcactattctaaaatttatactaaaataaataatctaaagtaatttccaattcaatccatatttttgtgaattgaatttgtatttaattaaatacactaagagcaaaatagtaataatttgattggattaacacaattttaatttctattttatataataaaaagaaaaggttcaaaatattattataagtgattatcaattgttctttgcttatctattaaagtaaagaaagagaccaaagagacataaaaatagacatctgagccggaaaagaacacttcaattcaaacagtacataaaaaagtactttaattattaattgtagacttaccaaattttttttaaaaaaagttatcaaagttagtcaccaatgaatttattaagtataaattgtcaatttggcctataaattattgattatgaattttaagatcaacagatagttaaatttttcgataataatgtttgaaattgcaacaacagtaataatttactgatattttatgtaattttagtatatgttagtaatttttctcatcaattgaacatatgattttattttatttaaatatatagttcaaagttaacctttgtaaaacataataaagataaatgaatattagtttagttagttatatattcaattgtaattaatttgcttaattcctgaaatgttaatcatagaaaagttcgtgtggcatttcaaaccataatgcatggtaaaattaatttatcagtttttaattggtatatatatatgtatttgatattaattcatgatattatatatatttatataacgctatcttagctatatgtatagtacttactgtcattgaattgatcatatattttgagttcaatcaaatgtatgtatattttgttaattttaatttgactaccaatatattcaatattaccatcaatattgtaatgacagtaactaaaaaaagaaaaagaaa

SEQ ID NO: 199108 - DNA, 796 bp, Cannabis indica
ggaaagttttatgaagcactcaaatggatgtagttataattctaatatttttatattacagtgtatactatagaaatttaaggatattttgctgttattttattttattttttttaaaataattgtacaataatttatagtacaaaaataaaatttaaacaattctttatacatacttttttgttttattatatatatttttggtttatgaaataaattgtttcaactctatttttattataaattaatttttgattaaatttattgaatatcttaaataattataatatacaatattatataaaaaaaattacaaatatttaaattcaaggaacattcatttttaggagtacacagataattaaaaccatatattatatatataaatttcctttttcttgattttggttacatgatataactggaaaaatatattcactcttaaaagacagactgacagaactgtagtcatttcagagcaagcttaattattctgctcactttctatttacaagtttcaaccgagtttacacagtttattacatctaaataatttacaaagttatacttaattatgtataatttagacagtttctttctatatttacttatatatgtataatttataagttagacagtttctttctatatttacttatatatgtataatttacaaagttaggtacctttcacaacagatttggattaggtatccaagaacggagtaccatataattaacatattaaataatcgaaattgatgaataatatacttatttatataaagatgaaggtt

SEQ ID NO: 199109 - DNA, 641 bp, Cannabis indica
ttaatactaattgagtattttcttctaactgttgtggaaaatgtatgttatgagctcatagtcgttctcccattgtgtcctttactttactcatatttatcttctactctgtctctatctgttggaattacaagagcagttttagtttaggatgtaaatatagaaggtatttaggacatttgttgatagatactttggaaattttttacaattggatcgagacatcaagatgatagaaccttcaatagcttgagtgtaagtaaatccatgaaaagaggctgaaatttttgccaatagtatttcaataaagtgaaaaattcatctgctctttcatgattttacttagaccattctctcctcttactccctcccataatcatattccatgataaagggagtaaatttttatttatgttcagttggcatacatgcttactgtttttcagctagcctatatttgaaaaatgtatggcctaattgtgtatgtatatatgtatatcttgtttacctttctgctttgattgacttttatataaatataaatatatatatttatatatgttactcggtatagtgacaacaaaataagattaatttatatacttttgttctcaatttattgtctaaatatagacatataa

SEQ ID NO: 199110 - DNA, 2043 bp, Cannabis indica
gtataaaaatcctattacaactaacgctgcaaccactttaaaaaccgaaaccgtaaatttgaaaaaaaaaatagtatatagagtaatttccgtattataaatatattatgaattggcctaatcaatatacggcctactaaaaattaaataacaaaaatacttctttattctaattttgaagccacatatttcatgtaccagagaatattatagccaattacttgcaatggaaggaagacggcaacaatgaaataacgtcgacagactgaaaaacactattagttccgcaaagtccttgcgtcgagacatataatcaaaaaatttaaatttgtacatttcgttatgggcaattaactcataaataaatttaaaaaaatgtaaaggtagctagcaatagcaaagtcccaagtgtataataacgataataattgagaaaatcccaaagaaaatactttatcgatcatgtgtacacaaagtggatcttgtttgatattttctctcttcatataaagccaaaactcatacatggacacaatccaatatatcaatctctacaaacccaaataaatctgttttttttttttgctatagatgatgttgtaccgttattgtgatgtttcaatttatatttagtttttatgccttggcaaagttacgttcttaatttccatatatttcactcaaaagtttcttattaagaaattacataaaaaatttaagataagttttactttaaaaatataatttcaattgtaccatatattttagtttgtgttattttgttaaagctattttaccatattacgtggtttttgtaatatgttgttggctcgtataccatattatttgcttttaaatattttttaataatttttgaggaatattttttctattattttatattattatttttttttattatttatttggtaactaattgagttttgttaatttttttgacaaaatagttatttttagttggaatttgatttattaagtttgattaatcttttaatttttaattattatatatggggcaggttttattgtttggtatatttctgtcttagaagacttaacttccagtacatgggacataaaaattagtttcaatacattgctaacaaaatgagtgaaaaaaaggcttcaaatataagtttttcttattaaaataataatattgtgttttattcttaatttaaaaattcataatattattgtttgtataccatttttttatatttatttatttcgcaagtgattttggtccaattgtttatttattttagatgtttttttgaacgtggtcttaagttattttgcctaaatttatataaatcgtgttctttgtactcatattctaattttagatatttttgactaaataattctaaaagttactcgacgattatttagatcactaaaaaatatatatatttctttataacccacaccactcacttttatatatttttttttcttaatttaattaaaaaaaaatagtttagtaataatgctatatatgtatgttattacaattttacagtcatggttagaaaaatctggtcacgcgtagagaattctatgttgccggctgtgcatggcttttcaagaaaagcatatatataaatataaatgaccagccaaggtggtttgaccaccacatcattttattcatttatttattttggctattaatatttaaaaaaaatttgacttgtaaacttcttcgtattatcaagtttatttgccgattaatttataagctcgcagccaatatataaatgtgtacttttttttttttttttttggttatgttttggaagtaaaaggagcaactttaatcattcaaccacaaacaacaaactacaaagcaagctgccaaaaactgcagacacaaacttacaaaatgttaattaaagacaaaacatcaactttcctgagataagaaaataaacaactcttaactttgacaattaacttgatttgattacttcacaccttataagtagagctataaacaaattcaaagatacatattta

SEQ ID NO: 199111 - DNA, 596 bp, Cannabis indica
aaaaaaaaacataaaaaaacaaaagaaacaaaagaaaaaatttcaggatgaaagaaagatgttgtgtcttatggttaccgagggtgtcttacaaacaagtaggtgttcaatatgatatttattaccattgaagattaataacttaaatttccttctctaggttctaaagggttttcttgaaactgcggaagctgaagtacggtcactaatttcgttatactctgaagtggtaagcctgttgtaacatttttcttttaaatgcgcaatgtattgctgcttcatagtatcttctcattgccctatagggaagaaacgcagattctttgtcccaatactttggagaggatccagctcggtgtccttttgaacaaggtatggaatattcttcacatgtaggcactgaaaaaagcacagtatagagttattattacagtttctagttcctttttattctgcacctcgagctaatctacgttattatgcatttttcttgctgccatgtagtttattttcttcgtaattcatcttttgacttgctaagctgtgtgagcgaaggggttcaggttgggtttgtcatttgattgatgcattttatt

SEQ ID NO: 199112 - DNA, 639 bp, Cannabis indica
gtacatcattcgatacttttgtgtaaattttttttagtttagctattatgagaaagctattgagctaagagagctcaagaggagtattagacgaacatcaatggcgaaatcatacaatgtaatttaaagaatattaaatttaagattgcaggcagtttatgtcttaatccttactaaacatgtctggtttgaatcatggtttcaattcaagccagtatatggagaggaataaggatggttattttgatcgattgcttataagtgcttgtttgccttttgttttaaaatcaaaatcgattatctatttcaaatttgttaaaacgattcgtatcttattttttattactgaaaatcttaaagaattaattctaatgaaaaaaaaggttatattcttattagttttatttatttgaacaaaaagaaagatcataactattagtaaacttgggaagcaagaatttggaaagtttgaaggattaattagatttgatttttgatcagcaagcaaataaacttgagcatcaagttatgtagcaatttcatttttctgacagcacaagaaaatgaacacaagcttggcccattgcaaaaaatagcccatgaggcccaattactatcacgttatcttctcaaatcccc

SEQ ID NO: 199113 - DNA, 1391 bp, Cannabis indica
aagaagtttctagctcatgttggaccttggtttttggtctctttggcttatcttgatcctggaaattgtaagtactattactattcttttattattttctctgttgttttttttttttgttgtgttttgataattatgaggagattaactttggaattatgttacagtggaaactgatcttcaagctggtgctaaccatggatatgaggtattttaattgattaaatataaatcaatatgtatatgttaaataaataaacataaaattgttatagtaaaatagtgtccaattattattattattattattgcaaacaaattatctaaaattctactttttttaattacttaattattaataaattatgaactatactataaacatttgtggtatttatagaaagtgaggggaaaaaataaaaataaaaaagcgtataaatataaattaatttataaaaagtgacaattttaaaaacaatttgcaaaccaagggcatatatgtaagattgttataaaaaaaaaggacggaaggaaaaacattattatctttgatcgatctcgaactcttctccttaacattaaaaaatgaaataataattataatttgtttttactgataattttatattagtgaaattatagacgtttagatagtgagtgatacaatatataatataaatatttggtctgccccatgtaactccatctccaaatattatataattaatcattatgaggtgattagtaataatatgtattttgtttcagttattatggataatccttattggattaatctttgccctcataatccagtctcttgcagctaacctaggtgtcactacaggtaataatttaattattattattattattttataatttataagaccaaataacaataatgataatgtttaatttataaattaggtgaagatgatatcattataagcatctttcagagttatgtaaagctgagtacccattatttgtctaagtattggtttatggttgcttgctgagctggctgttatagctgctgatattccagaaggtaatatacatatatacatataaatatatgtatcttcatcacgattaaattggttcaagataagataaatttatatatataaattatcaatagaaattatgtttctcttccacaatatgataagtatacttaaattttctttttttaaaaaaaaattaagcttaagccaatttttaaaatcacacttactattttatagtaaaaaaatcttttatattttttaaatttctgtataattttgttataatatttaaaatattttttttattatttatatttctagaatataaattgaaaaaaataaaaaaaaattaaaataataattaaaaatagtata

SEQ ID NO: 199114 - DNA, 932 bp, Cannabis indica
aaaagaaaaagaaaaaaaactacatttcacacagctttctcctaaatcaagcactatctaatttttttagtattaaatgtaacaattaattaactgatcttctttttattatttttttaattctaaagtctgattttcttttgcatatatcgaggtcgtccacctttgtttattttactttttcttgaccgaattcattttttatgaactctttgtcgtatatattagaatttacagtgtttttataatacatttttttgatcaaaagaaaagaatcttattaattagatttggaagtgttaggtttaatgcaggggttctatttcagaactaattactatacatcttataatattatctttctacacatttataatataagacgtactcatgaatatactaagttggcgtacacatatataagagctatgaatctgtaggggaaggccttatagagaattaaagcaggaacattgtgtttacaaacaccttaattcaatcttcaaactcaaagaccttaaccccctcaaattcttccttggcctagaaattgcaagatctcccaaagggatctcagtatcacaacgactctttgttttacaactcttgcaagacaatggtttcttgagtgccaaacttgcctccaccccatggagcctaacaacaaactcagcaatgattcgagcgatctcctttcagaccccactacttattgttaggtaagttcatttacctaacaatcactcgacctgatttaacttttgcagtaaacaagcttagtcaattcatgactacacctcgacttctacatcttcaagttgcacaccgtatccttcaatacatcaaaggaacaccaggccaatgactattcttttactccaacacaccttcacaactcactgcttatacaacatttgatctcccagaccaca

SEQ ID NO: 199115 - DNA, 1176 bp, Cannabis indica
gatggtttattaatgtggattacaattaagtgtaatgaatgaatatgtgtgtgttttttagggtctagggatctacaacatgtcacatgggattggaaagaatgaatgaggcagagtctatggctaagaatttatgtttgaaaacttgattagctacataaggttttgaagcatattattgttcatccaagctgctgggaatgagagtctggagttgttattgatttttgactttttttttttgtttgttaataattttcttaaagagcataatcctatcctattctttggtctcaatggaaatttaatgtggatattagtttgtgtctaccttataattgttccacacttacagtagtattaattagtcatttgacatgttcgttatgaaagtgagaatagaaaataaagatattcttttagtttaaatgcaaaaaaatatttactgtttttgtataaggaaacagatagctgaaacttagcgttttaaggagatagaatggaagagctaaattttgagtattgatacttttgaggaagtccattcatgacccaacaaaaccccacactccaattgtattttatgcaacctcttctctacaaattttatgtgatatatatatatactagattaaatttattagttatatatttaatttttttttaaataatgtcatacattatttaattgagtgagacaaatattctcttcttatgattttaatggtaatttttgctaggggaactcaaatacattttataaatattacattggcctaaggaaaaaagcattccacgtaaaactttcagattaagtcaaagtaaaacatgagatattaattttttgaacctttctttgtgaatcaaattatggaaataacctagcctttctaagacttatatactcaatgtaaattaaacaacattatccattctctctgaaaaggttaaatttaatatactctccaagctaaggtaaattatagcatctatatatgtaaactatcttacatcacatataatgaaaaatgattttagctatcatttttttggagcataaaatacttgctcaagcgaacccataatcccaaactccaaaatttaacattagttaaggcttcacaatcacatctttgcaagataaaaaacagaacaagcttctattttttttttttt

SEQ ID NO: 199116 - DNA, 1212 bp, Cannabis indica
acagcggatgaggtcttcttggcgacggtcaaggaaatgttgtagcagccgctggccattttttttggtcaattgacgatatgaccaactctcaaattaatatacccaagatgggggtgatatcttccccgccttgggcacaccttggagtgattgtaggtgcggtttccattatcccttggttttaactatggagatcttcatcatcccttcggtagtattcacggctgaggaggtcttcttggcgaatgtcaatgatgtgttgtaacattcgtaggctactctttggtttccaaggagatggtcgataccaactactgtcaagaacttaacagataggtgacagatagatgagatggctctgaggtcgtagagtgttgaccttccaaggagacttggtgtcaatcactatgaaggtagtcacagtggttttatgtagtggggttgtttcaactgttagtggtaatctaatttctccacagagaatgatgtcagctctactgaaaaacatacattagttgcttgcatggccccaaattctcccagggacaaacccattctttccaaggtctaaaacatacatttagtctatccatacccaggttcacgtctaacccgcacccgcccatacactcgaccacacatagaaataaataatttattaattacatttaacttacctaaaatcaagacacaaaaataaaccctcaagctaatcgtgctaagactaaaagttcccccaccccgaggcacatcaccgaattagagattagatcaaacccccctaggccctcttcccccctacgagtcatcgcgcgccctccacctcactcagcctcactcattccctcagaggattgcaccccagttactgaacaagacctccctctcctcctctcatcctctcctccatcgcccattgtcggcgttggataatattctctctcctcctcgctcctccgctcccattcagttaacacttagcaaccaacaacaagaagacatatttttttattatgtttcaaaatttattatctgcaaattaaactaggttattagtagttagattgtatattttgtgcaattttataaataaataaaaccacaaaaatatatatattttaatttaaaataaaaaatcaactcaccctcccggggcccatgaacccggcctaaccctgttatcacacgaatgggtatggatgctctttt

SEQ ID NO: 199117 - DNA, 1033 bp, Cannabis indica
cacaattttttgaaaacttttataataatgcttaaaatgtagaaattaaaaaaaaaaaacagatgtattaataatggaaaggtatattttttcaatgtgctggggctctaattgaagacaatatatttttattggctaaatttctgggggcagttttgtcccatgtggctcacgataagatttctatagctcatggtttggcgaaacatgcccttcggttagatgatgagctatcctagttcgaggaggttctaccgccaattgtggtttactacattattaatcatgtgtgattctgttcaccacataaaaaaaaagtgatgtattataaccatgcacacacaaaaaaattgacggagtcaactgacctcccttacttcttcataagtctaccatatacatttaaaaaaattcattgatttgatcatcctttttgctcttattgtaagaaaaaatttagtatttatgaagaaattgtaaattaatttttttatacactataaaaaattgttacttttagtgacaattttttactcacaacataaaatttttgtaactaaatgtgacttttggccacaacaaaaatttacttgtgactaaaacatagtatttagctacaagttgtcactaatttagttttagtcacaatattttattgtgactaaaaatgcatttagtcacaacaaattataattttagtgactaatacttttagccacggatcttttagttacaacatagaaatgataatttataattagtcacaactttaataatttttttttttgagtgatatgatcgttacattataattttaatagatattttatttaatttcgaaaaattataattaatatataatattaaaaatagaattcaaataataataagttgtatgcttatgttttattttataggcctatgattgattattataaaataaaattttaaattttaaattttttaaaatttctagaagacaaacacaatgtatgttataattgtactgtacactaggggtgttcgcggtgcg

SEQ ID NO: 199118 - DNA, 840 bp, Cannabis indica
tttattaaaattatttatttcaacataactttaagctaacatcatccattctacttaaaaggaatcatcattcaacacttttctttatattttatagtctccaaaacaatcgcaaacaatatactattttttctgtaaaaatgtaactattttttatttatgaattttttctcttaatttttttattttgaatggaaaactaaaattaatggcataattataaatatatatatatatattttttgagataagttataaatatatatagcattttgtattgtattaaagtctaacactagaattgaaaataattcttaaaaagtggattatatatataacattcacacattctattctatatcaactaaataaaaaacatgtaaagaaattgggccctttacatcattgggccctgagcagtacctctggctgcacagggagatagccgccctgggtaacatttaaaggtaaaaattaaaatatatatatacttttagtaactcataaagttaattatttatattaagatgtttatgttatttttcttttagtaacttttcatgttaattataaatatatttaagaaattaacatattataatcaaatataaaaagttaccatcaagcaataatatatatatataaattgttatgttaagtttataattatcatacaatttaagatactatttggtactcttataaattattttatttcgatcatttttctagattcaacaaaaaaaatatatacttttcatgtattaaaatgaccattttgaaaagtaggtaactatgatatcactcttgagctcaattgactaacaatgtgatgtaaaa

SEQ ID NO: 199119 - DNA, 1761 bp, Cannabis indica
ggacctcatggatcactgcgctaatctccatccatgcgatgcacctcaaatatggcatagacaaccccttgtgatatagcttctcattcataataacataccacggagcttggtatttgaactttttggagacagctcgatgtacggggagttccccatgatcaagaactgataaataggtgccatccaggagtgtgaattatccaccacaacattcaccccttggacgttgatgttggatttttgcaagtgaccaacagggacaataccatgttctacgatttctagatctgtggccaactttgccaacatgttgatgaataaattttgttgcgacattaggacattggtacccatatgctcgtcttttgtctgatactcgccagagatctgattcaacaccagttgagaatcactgtaaatattcacctattgggcctcgaactgtagggtgcttaagagctattgtccctatggggaggtgaaaattactccagctctggcccccttctccttagatgcaccgtcaacatagaccttccaagtgggtaggtggggaactagtcttcttggagaaaatcgaagcctgtgcactccgctacaaagtcagcgagggcctgcccttttattgacactagtggctggtaatgaatgtcaaactggctaagttccatatcccacttcagtaacctaccagacgattttggcttctgcagtacctgtcgcaagggatgattcataagtactctaatggcgtgagcctcgaagtatggtctcagcttgtgcgaaactattagtcagtaaaaggttagctttcgatcacagggtatgtcgactgtgtgcccaacaatcttttgctaacgcaatatactaaatattggacttgtcttcctctcgcatgagtgcgacgctaacagtttgatctgacactgacaagtacagaaagaaatcttctctttctacaggttttgataagataggagccttggtgagatgctcctttaacttttgaaaagtgtcctcacactctttagtccacacgaactttttgtttcctcgtaacacattaaagatgagatacatttatcgctagatttcatgatgaagcaactaagggcagcaacacgccccataacactgtggacatccttatgcttcttgggagaggacatgtcgaggaaggccttgattttctctggattggcttttatccctcgggcactgacgatgtaccctaagaactccccgaaggtgcactttttgggattaaacttcatcccatactttcttatgaccgaaaaaggcctctttcaaatcttggccatgctcctcagaagttttggatttcaccagcttgttttccacatataattccttattttggcctaactagtctttgaacatccaattcaccattctttggcatgttgctcctgcttttttcagtctgaaaggcatcaccttgtagtaatagatgctttatcagtttggaaatcgatgtgtcttttgtcagcaatatgcattttgatctggttatatctagagtaagcatccaggaagttgagcaacttgaatcctgacgtggcatccactatttgatcaatccacggtagcgagaaacaatcttttggatcggccatatttaggtctgtgaagtctatacatattctccacgtgccattgggctttgggaccaagatagggtttgcaagctagatgagagatataatgactcccagagaaagtcattggcagttagct

SEQ ID NO: 199120 - DNA, 1610 bp, Cannabis indica
aaaattaaatcgcaatagcaaaacataaccctaaccaagctgcacatatatatgcctaaggaaggccagcgagtggccgaagaaaaaaaacaacatcttgtagctataaatttagaaaacgagaaactcaattttttaaaatattaaatattatatgtaaattggttgtaatatatattactttactgcattaaataaataaataatatgtaatatgtaattttttaaatataccactttagtgcatgtaaccaacaaattctaatttcaattttggtatctctctttaattctatattaactttttatttttattcttgcaagaagagcataaataactagcaaaaaaaacaatgcatgtctttgtattatgctcaaacataataataataataataatacaatgacaaaaacaaagttacacataaatttttagtcacaccataaataaaattttaaattttagacataaagtgtattttagtcaacttaatatatatatatatatataaatatataatgatacataaataaataattttatcacaataaatagtaattttgtagtaacaatatagctaaactaaagtatatgaagtatttttttaagagttaataccattttggatattgtattttgtaaaaattattgattggaccctctattttttaaaatgataaaataaaccttgtattttttaaaaatagtacaaataggactttaaaactcaattttcaacaatctttttattttaatataacttatttgaagataatttactgaaatagatgtaaaaaacgtaacaagttttatcataacatctctaaattgagttattattaagttttattttgatgaaaaatcaatttatggtactatttagttctatttaatttggaaatattaaatataatttattatttaacaaaataaataatttaattaataaattttacaaaatagataatctaatacttaacctatttttaatagtgaaatctctatatatatacaaacctaagctagctatgtcattatgtaacatctctctcttactataaataataataagaataattaattttgtttgagtataactagagatatattcttctacctaataactatctaggtatatatgaaagcattggtagtgcatggtgaccaacataacatacatagttgggttttgatttgaatccttgaattgaagcttttgtttcaataatgtttttcctagattttttaatgaattgaatggtaaatatgacatcaattcctagatattaattattggattcatatatagagcaactttaacatacaacactatttttgtgctaatgttattttaacacaatattttttttctcactttccaatcacaacacaaaaaaagcatattgatcacttaaaaaatagaaatagaatattctttttatcattatattatattattaactcatttcaattattatgttatattagagatattattatgagttaattaataataatgctttaaaaatttaattaattgaagttaaaacaagttacacctaaatttaaattaggacaattgtaagatctaaattaaaaaattatatat

SEQ ID NO: 199121 - DNA, 2114 bp, Cannabis indica
agacaggtctatcaggttccctattctgatagcatgctcaactagtgcctggtcactctaaggaaccttctccccttttttgctcattttctcctgctcggtcacttcgtcctggtcaggctttgccttcttcgccttcttcacgagccttgacacaaaatctgctgggcagagtttgtacttgacacaattggcctcagtggccaggaaagtaatgttccgagcaacatccgacagttgaagaattatttatgccctatccttgtgccccaatgtgaagggagggcggtagtacgagggtatctactagaaccgagtgtggatggtgtccattccttggacaagtggcactcatccacaaagttccctatcttgctcacctcggagtctacggtgcccgtcaaccacttctcttcgatctgagaaaagtagaaatatcccgatgtgctctgcttgggagagtatttcagatcaaagagccagttggtgtcgtgcggggatggctcaccccatccttgtgaggcgtagaggatgaatagggcggacaaatacttgatgccctttgtagtaaactgtgtcagacagatgtagtagtaatctacaattctgttgaaatacgaaagcaagggtatcataacaccctgcttagtgtgagcgcccgaccaagcacagtaaccctccgttggacttgttgccagctcatttggggagggatgaaagcatttgacatcccctaagtaaccgtgcttctaaaaatttttcatcttttccctggttaccacgaatggaggagaaacccatcgagctcctagaacgccttatcttctctgaggaataacctcggtatattcctcagtgacattgtcttcaccagcctcttggacctccccagcctcaaacacaggttctccatcctcattaaaaccaccaaagggaaacctccgagcttcaccttccaccacaacttcagatggactatcaggattggcctcgccctgatcctccacctcttggactttagtgtccccaacaatgtcttcctcctcagcagcaggccgggcctattctacactcggcagtgttgcgaggtgagctacgtgtgggtcagataatgaagacttttgcacagtttgtttagttcgtgccatcatcgtattgttagacagacctggttggtatgtctggtgatggttacagcgaatgtagcaatgggtgtacatgcagtagcaggatttggatggcctacaggcaaggtgtcaacagtatctggccggacaatgtacgtcctattggacagtagatagcgcctccaccccttcctaagctcccaaatgaaacatccgtagccttcacctttggtctggccggggtaaaaatgttgttgcacttcagattctgaaaaggtgtatgttcgctagttatctcccaatcttcgaagcttgaattagagaggttatcactagatgaagattgactagcacaaaggcgaggatgatcctcgtataaaagttgaagcaaatcctggtcgatacgatgtttgcttccccaaaactcaccagggttcatctacaaggggtaggatacaagatgagcatttggccgggataacgaacgaaaacaggttggttatactgacaaggtctgatcaaatgatcagaaaatagaaatgttgcatgataatgaggtttaaaatccagaatttcaaaattttaatttacaggttgaatttcactaagccccgaatgggcaagtgaaagtgagtatcgtggaattgaaattaaaacgtacttataataaatcaacgtggttaagcatagtcaagatttcacattcctaaacctaaaaattttatggttctccaagaacaagttcaagaactatcaagttatgcagcagaaacccagaaaataaaattttcaagcatattagaggaaagaaatgaagaacttactcactgttcaaaactttagatttactcagatagcactgatcggtgtttcctgaagatccttcaaagaatttgaaagaaaatggatttcttgctctaattcttcaaaagcaaaaatggttaaaagtggttgattaaggttctcagccctatttataagcagatt

SEQ ID NO: 199122 - DNA, 1384 bp, Cannabis indica
tgttacaaaagttgtcttatatgtctattaaaaaggtgagccaaaactatccggaagaccctaaacgctctgggtctaaccgtcatgatatgtacaatattcacccttagctttagactcatcgcgattcaattttaactcttacttgcacatacacgtaataactgtgagtcgacaaaatcagtaaaaaaagcacaatcataaacataaatatatatttagaccgtaactaagcacctatacacctattcacgatctgataactgggccgggaacgttttcaacaaagtatgactaactacaaatcaagcctatactcagtgctctaatcgtactgatgtggtagcagttaattcatactatctggaggcctagcatatatatgttggcatctctgtgcaactctatgtacactttattgataccctaatatgctaatctgatggccattgatttgcttaacatatatttattggtacctttgtgcaactctatgtacacctcactaataccttgatatgttaattctaatgggaactaacaagcacactaaatatgaatacatatatgtaactattatactaatcttaccttgattgcaaatacaagcgtgtcggtaactctaagtggaaactcctactcaacaatttaaggccctaagtcacaatttacgaaaactagtaagtggtctgctaaattacatttggggactctaaacttcaaataaaagttttcttattgacaaatagcatgataaaatcctacacatctagaaaatactgaaaaataagattttgaaaaagtaccccaaaaaatggcatgccgttttcgagcaaacgataggctattttttttgggttttctgcatgaaaaaacggttagccatttttaccagaaacggcctgccgtttttacagcaaattttccacaaaatcccaaaactacaacaaatcgacaccaaaccttcccaaactttttagaacacttaatttaggtccaataatcataattttacaatcaattctaactataaaacccttaataaaaaaataccattgttgagctaagtttgagcttaaaattcaaacctagctaaaaccttgccaacaacaaacaatctacctaacaccagttcaaacatacttaatttaatccccaaaactcaattcaaacactaccaaaacccaacaatggccagaacctaaaattgcatgttaaaacttaactttactcaacaaaaaacaaagagaagtaatatctaggttttaccttagatttttcttcccaagttctccaaatcctactggttttccctctgaaaaatgaagagagagcttggttctgtggttctcttagggtcaaaactagaaggaagaagaagaag

SEQ ID NO: 199123 - DNA, 1300 bp, Cannabis indica
ccatacggatacatatacacagttagttactgctgaaaaagtacgattttcatgtaataagcaacagtattgctatcaacggtatggtagactggtagtggtattagtgtttttttttttttatatatttttaaatattatttattaaaacaaaatttctaaaactgatattaaattgtaccaatatatgataataaattattggtgtttggcatggtgcccttaatattttctaataagcaaacatgatttaaagtgttgtcgatggtcatgagaactgatcaaccaaattatgaagaataaaaacaaataagaataagaagagaatgaaactaaataaaagaaaattttaatatgtataaaaaacaataaaatattgttgatcttttttcaatattttatttgaatagtcgttttattttattaaaatagtggaaagtaattatattaaatcacattctaatattttaaaattcaacctaaaaaagtgaaagaaataattaattcaatttttattatatttcattttatttcatttcattacctccaactaaaagtaatctaactactggttaaaataatttgtgtttaaattctctctatatataatgatataatgtagtatcacatgcatatagtttaatttaaaataaaatatgattgagtttttaggtttgtaagatgttgttaaatgacttgcgagatatttatgtcaattttattaaacgttctgcaaatagtgttgctcatttcttatctcgagcattctatttagttgctgatcgtgttatcaagagtaatgatattactccaaattttaatcatataatcactatggattgcaattaataaattaagatgatgaattttttcaaaaaataaaaataaaaataattaaaaatataatattttattattagaaaacccaaatatataatgtggtgtcttatactttaattcgttataggtagattgtttcggaaaaaaaaattgttaggtgggttagaacgtatagaaaattatatataagtctaaaacttgattattgtctagctattatattttgggccatatctttgttatattgcatattaatattatattataagaggcaaagagtaggcgtgccaattcgtattgtgtgtcatatttttgttcatgacatgtctaattagacaacccattaaaagtgattatcggtagtttaacgattttttttaacattataatttttagaagaaaaatagacgtgaaacattaaccatccatttatttctttttataccagttacttcactca

SEQ ID NO: 199124 - DNA, 1293 bp, Cannabis indica
tctctctctctcaacctctcttgaggttattgaagatgtaaatttgccttgatgaaaagtcggtggctttattgttaatgagcatttttagctatgagatctgagggcattcttgtaattgcattttgggtgttctgctccagttcttccaatttaaaaatcctatttcatgttttgtttttgtttgttttaaataattgatttttctatgtctttggttttctattacatattttattgaagagtcatatattatgataaatgttttcttaggctatatcaatggtacatgacatgtgaacaatgttttcttatcaaagactaatgactgacctgaagtgtagaatgtataattcttcctttgtttaaagttgtatttgtctcttgctctttttgtaattgcaagattgtaatttcaccagcccaatgatgaaaatattggtagtttcaaatcaaataatttcatgatttttcatcaacctttccatctttgctttgcaacaagatgatctttttatttttattttattttattttattttattttcactctctatctctctctttctctgttggttgatgatgatgcaaactggttttaatgagaatcatggttatatgtttgagtgtacaaaaaattctctgctttaaaatgactttgaaaagttgttttctgagataacagagggctgtatcacaaatggactaatatgtttcatctcgtttgcactactctaaaatctgtgtttttttttaagtgttcatataatatccattatcttttattattatttgtttctgccgatgatgagaagttttgttttcgtatttatatgttcattgatttcattttgagcctgcatcttttctgctcccaccatcttctactcgccatcacctgcaaaagtcctaacattgattgcgtggttgtggtagtagtagtagtagtagtagttgtggtggtgatgatgatgatgatgatgattatctttgtttgctgttggtgatggcgaatgctgatgatgttggttgaagtccttgaagatgtgattggttcttaatgaattttcgatgatcatgaaatttctagtattatctctgatggcatttatctattgtttattgtgacatattaattggttgattatattatactaacatgtttttggccctgtgattggaaaactcatattgagaagcagtttcatggttttttcttttcgttttgcatcagaagcattgttaaatctacaaattgtctcttcacacacacacatacatgcatctctctct

SEQ ID NO: 199125 - DNA, 972 bp, Cannabis indica
gagaatacactgtaatacataaattagtgttgaggttgacttgaaaagaatgcatgcagtgtgaattcttcaacaatagtttttggattggatgattgtaattatactaaaagataatgaggtccctgatagactagaggtattatcttcttattattagtacttgatttaatctatatatattatattgagattcttgcatttatggttcttattgaataaaactagtttttttttatcaaattcgcttccgcttctaacttatatagaccatataaaaactaagaattcaaagatgcaaagccatgaggccgttcgaaaagaaatttacattcttatttttaatactcgtgtatacttagtttggagaactctcaattaacgtctttgatatcaagaagttcctactattagtaaatttgtcaattttgtaaaaaattgattgtaaatacattttatagtcttgagattggaaaatagggaataaacataaatattggtttaatcggataagtaaaagagtgttgtaaaagggtgttggggattgatttgtgagtgttgtaacagttttgattcaaagtaatacactaacttaaccaaaaaaaatagtatatttaaaagctgagtatttattacttaataaaaattaaaatgagagaacccttaatattcagggtgccactctatagacttattacttggactttggattttattttatttatttatttatttgatataaaagaccttgaaaaactgtgtataatattttattttagtgaataatatctttattttgttttatctaattgaggaagagtaggtggtagttggaacgccactccatgtgcctctctctcaccgtttcttctaagatttgattttgaatgtttttgaaaacaacacaacaattatatattattattagggtcatagtcgtagatagacggtatgtttcaacttgatcaatat

SEQ ID NO: 199126 - DNA, 1916 bp, Cannabis indica
aattaaaaaaatccttttattttacattttcacccggttatgctctcgcttacgacgattcaccaagttaatattacacatacttacaaaaaattagatcagatctcataaactatttacagagggaaatttgacaatccatgcttaaattgggtttaggcacttaaactatgctaccaattttgcaccatgaaaaatatgctacagttaaatttttccaatttattactaaaaaataaaaaagcaacacacacccaaatttgccatctctctctctctctctccctctctttgtctctcatgtatctctcttctgtctctctctctctctctctaggaaagtcacgccacacccacacacccacactctgccaatcaaaccacccgtcgtcggaattactgtcgtccgaccaccttacataatggtggagttggttggacaacctttttcgttttttttttttgtacaaaaattatgtctaaactaaattgtcgagaggaagctgattcagaggaggagatgatggagcaagaaaatgctccaaaattgctcctgaatgacagccatgggagatggaccagaatgtcaacatattcatgaattataataacctaaggaaatacgagactcaacaggggctcgaaagtgttccagggttgttttgtaatagactttccctttatgaggagaggcctagcaagcgtgcggaaggaggcttcggcgtttggagctgggtgcacagctgcctccgaggtgctactttgctagcttctgcatcgtggctggggtagcgccttttcaattcattccccaagcgtaccgcttgctgttagggtggcacattttttgtgttcaacgtggcaagcccgtgccgacgcgggaggagatatatatttatacaggatcaagtcttagcccatgataggccataagaagaaggtaggtttctacaggctggaacgctacactaggagtgttccttgccttacaagctttatgaagtacacacacgagttcagagactattatttttacacctgcgacttcccattgaagagggttcctacccttagtttggatttcaacactgcaagtaagggtcgttcccttctttagaatttaggattatgtttttcctccttcttaatgtattttgatatctttttttacatttgttagactgtcttcctcaatgacctttgaccccggagttggaagaaaggatagctttctacgaatcattctcggctaaagagttgcaagtgaggtgcttgttaccactaagaaccttcaggattaggcctcattgctccacaccaggacgtgacccaccttttcgtgaaggaccaagtccaggatgctctccgaggggatccagatgaggttaaggaggcaattgcagttatcactactgaagaggccttaaaggtgtaaaagctaatgaggagtggctggcggattggaagagaaaattcccaaattgcctaagcgaggctgaagaactcactattagattcaaggaggtagtgcagattgagggtacttcacgagcgagcacctttggtagtggtgagacaccctttcatataattagggctcccactctaactaacttaaagattgtcgattaatgtggattcaatccacatttcttaaatttagatcattgtagatattcatacagtaagtacttagataatgtagattgcaccattaggagtcccaaccactttgttccacctgtgcagcatcatttcaaagtggatgtgtttagtaaaatttacttcccaggtttcttccaacacgagactaacttaggtcaagagacattgctctttttgctaagaggaaagtcaattattctaaaattaatggtttggatcttcttgatgtcttgtatgataattgttgtaag

SEQ ID NO: 199127 - DNA, 1616 bp, Cannabis indica
  modified_base (1539)..(1539): a, c, t, g, unknown or other
agtagatttagaagatccaagaaagtagagctggggcacaggaagtttatgaatgataaatctgaatgtttatccttttcaatacctcacatcttcccttccaacaaaaaaaaattacacatcttttttatttgtaatggtttcattatgtatactgcattgtgtaattgtatccataatgtgctattgtttacttatatttagtgtaaaaagaatattcatattcttatatgttttgttgcagaggaagctagaaagagattttgtttcatctggtggagctccaccagtcacagattcagttcctgatggttgcagtgaactcaatgaagaggaggaagaggaggaggatagcgagcctgttccttctgtctctggtataattatatacccatcctacttcaaatcatattttaaatgtttggtacaagtctatgttgtttcgttacagtgccagtatatcatgtggatatatggctggttctgatcaggtacctttggttgcccacccaactttgtggttaatggggtctctgaatttgtctctgagggcttatgagacattttgaattccaattgaaatcagatgatacaaaagactaatgtcttatactatcagtaaaatgcttaagggaccgaaactgtttcttgacatcacattttctgaaaacagtttcactaagattgaaacaagcaccattcgtttgaaagaaaatgttggcagtttgtctttaaggatcatatcatgtattcacgtgaccaaactatggatatggaaacaagtcgaatcttgcagtactaagtgcatcaagaactgttcatacttttttcggtctagttgcaaatgtatctgtttggaattttatttatgttttaaggcacacgttttgttttttgcttttatgaatactgattttggattttatttttttgaagggacaacaatctatgacaatggtgatcttcaagtttcagtgacaacaagcgaaatcactcgtgaggacgacgatattgttccccgtgaaaggagagaaagaccatttgtgcagccaattgcagctaatcaaaagctcaaggtgcctgtggcaccgaagaaaccaatgaagagagttgtaagacacaaaccgaagaccaagtcgaagtccgaaaagagagggaacaaatcaaagggaagcaaaaggagcaagaatgggcggtagttgcagaggaacttccacatggctttgtttattggattattaattgcttctggctgtgcctcgtacagttcttccgtgtgtggctgcagttcacgcagtggcatctttagtgacatatcattttcacttaaattaatgatcattttggccagttccttcaagcgtttatcagcaatgtttccatcaaattcagttgtagctataccaaaacccaaatagtgttttagtttatgttttgtatggttaaatttgcaagcttgaactatagtttcagctgatatgatggagcaatggagcttgtcacatcaatttctgacacctgtggtgtgaggggtcctcncttcaaaggcaccgtacagaattttcgtcgttattgctaattgatatcacatggattcgcttttgaagtatgtgcta

SEQ ID NO: 199128 - DNA, 1526 bp, Cannabis indica
tattattattattataacaaatactgcaattattattttttaccacattatatatctttctctctcacacacacatatacgcatagacatatactacgtactcgtttaaattattctaatacaaattcaatatttatacattctccaagtcaatcgatattgaaaacgaaaaattattatcggtacatatatttcaattttttgccagtcagctagtgcaactacttttcaagtcaacgacacttgattccaagagtaagggacaaactgtactggtaaaaattatactaggcccaaatgcctcttacgacccaatttgaaattacaatccttcaagaccaagttagtgaatataacccactcatctaaaatacattgggctttggctaaaatacaaggtccgaacgagcccagtagttataagaccaaacaaatacaaaggataggaacgagtctataactgatccatatgaatcgatcattcctcctaaaaaaggagaagatcacttcccacgttcgttctccagtgtaaaggagcttgtccatcaaaggctctataaaaggagaacccaggagtcctgagggatcatctcatcttcactcactgaacactcactcaagcattcacgcaatacattaatattattattctcagtccttctccatcactctacggtggaaatatttattttctattttctttatttatatttggctattctttattcgaattatttactgacttgatcctcggagacccttcggctggcaccatcctggtgtcccaaggtctcaacggtcctttttcttttgttctacaggttgtcagtgcccgtgatccttctattccgatcattgtaaattttgccctctacatatatgtatatattatttaccattttaattaatataataataaaaatacaatattaaattaataaataattattgttataaattttagttgttgtatggttggaatgaataaataatgatactaaaattaacactatttttgttgttaaactaacacaattatagtatttatgattggagttgctctaacttatattatatttataaaacctatttatttttataatgttattgtgctcttttgttagaatgaagaaatttatattaatattcatttatttattattatgattgctttctataaattaaaaattaatatttcaaatactataaaaaaaattatttttttaatttgaaaacctttaggggcgacatagtcaccccttaaagtcaaaaatatttttctgacaaggctttttaagggtaattttattgcccctaaaagtcatgttaagaaatttgtagattacttttagggacaacattgtcaccctaactacaagtaatttttttgtcacccctaatacttctatgcgcgaattattagaggcgaattttaagggcgattttctatgtttttaggagtgactttttttaacccctaatacacatatatttgttgtacactataaaatttttttacttttagt

SEQ ID NO: 199129 - DNA, 709 bp, Cannabis indica
caccccttgtctctatttctctcgtctctgtttcagtgtttgagtaagtagcaagtgaaaagtaaaaggtgtttctcctctcatgaatgtccactgtattgaacatataatctcacttagattaaattttgccaaattcatcaaatgaaatagttgaagtcaattatttcatttacaaatgatttaagttaagaaataaatcaatttttgcatatattattagcggttgtggtagatcctacctatttagaaagtaatttatgagtaatgataacaaagattagacaataaactttggatacattgtatcaaaatgcagcctttgtattgataagttctttcgttaattattttgtttaatttgttgaggaagtatgaatatgatctatctatttgaattttaaagagttgagattgcgttaattttggttactaagcagaattattagtaatgatatagtgtttgactagtttttgtcgggttaaccagaacaaaccgaccaaaccgtcggtcgggttacacaattttttttgcttatttggctgggttgccttatacttttgcaacccatttgttacattgggttggaaaatatgtagtcaaaaccgaccaaactgaccgacgtacatccctattagacaccgtgtacccttttccataatcaaacctaatattatacgaccatgtaatattggacccaaactcaaa

SEQ ID NO: 199130 - DNA, 538 bp, Cannabis indica
tctagaaattcagttactcaaattcatgttctcacaaatgcactcatagacaaaccaaacataggcccagggtaagctaaagcctatgttgaaaaaaaatatcaccctttataaattcccaccctaaaaaatctcaataacttaaattataaatttaatattacacttcccaaacactcactgtcttatttttcttctttaattatggtaaatacaccacatataaccttaaaatctattaaactaataatataataaaaacatttcaactcactcttcttcgtgacaatacatattaatctctctttctcaatttgatagtgatatgcaacatgagaattgcccttagtgttgtaaatataggtcagactttttgacacagtacgaaattggcacgagcctgagaggcacaagcacaacctaccacaaaaaaatatatgatgaagcacgacacgatacaaaaatatgagcttagacatgacatggcacagtgcggattggcatgacacaacacagaaaatataggcttaggcacgac

SEQ ID NO: 199131 - DNA, 3261 bp, Cannabis indica
atcaaagaaagctctaacctgtgccacaacatccatcttcacaatgttccagtatttttgaaagaacccaggagtcataccatcagggcccggtgatttgtctgggtgcatatgaaacaaagcacgcttgatttcttcctcagagaccatgttgagaagttgctggttttgttcaggagtaatagtagtaggcgtctcagcaatgacagcggagtaatcagttgtagaagtggtgaataaactcttgaagtacctgaccataacatcaggaagacgatcatcccaagtcacccaagcacctgaatcatcttgaagatgagaaattgtgctgtgttttttttctaacagttgctttagcatggaaaaacttgttgttactatcaccttcacggagccacaattgcttagaacgttgatgccaaaatatttcttactggtttaatgtctcactaagcttcagttcagcatcacgaaaccgctgaatagaagtcgggtcacatccttttttccattgtctagcttcttttttgcatttggatatcttatggttgaagtttcccctatagtctctaccccaaatgcttaacatctccccacaatactttaattgttccattatgggcttaccaacacaatgcttccagcaatcactgactacccgtagagccacgcattttcgaaacgaaattgcctaaagggagtagtaaaatttcggatattaggttcaagaagcaatggacaatgatcagaggctgtgacttcaagattggtaagttgtgaagaattaaacaactgaaaccattacgaacttaccagagcacgatcgagacgaacttcaatccaagcctcagtacctcttccacgctcccaggtgaaagggtacccaatcaactcaagatcaatgagatcacactcaacaatggcctgattaaagccatccactagccattgaggataattattgccccctcttttatccaaataactagtaacattattcaaatcccaaataatacaccaggcaagacaagactccaatttaagagttctcaataaatccccaagttctaaaacgaaaacttctattgggctctccataaagaccggttaacctccaaggactagaagttgcttcgaaaatttgaatatcaatatggttgaaggaatatccacgtaactaaacttcagaatcatggcgccaaagcatagccagtcccccactatgacctctggcatcaaccgaaaataaaccatcaaatctcaatttaacacgaagcctctcaagcttgtctttaccaaaaaaaagtttcacacggaaaaagaaaattgtttcttttggatcacaagatccacaaggaattgtaaacccacgggttcccaagcccgcggtaattccagctaataatactcataatgaacggtgggcctggaaaccagcacccaccgaaagattttttgagcccatagaatcatgtacatcatcttcttcactaacctccatatccccactatgttcagtcaatactttattatttgacccaaccaattggtcttggcctaaagattgttgattcagcccatcatcttttatttctactattttgcgacttttagaatctaggataattaaactatcatccccctcttccagctcaccccccatattagaattactggtaatagcaacatcaatcttaccattacttcgcacaattggctccttgaatcgtggacctgccagcacattctgaacaacctccttccttctcgtatgcacaatcctgagatcctctccattattctccacattcagcggcccattgatggttgacacccccgctgcagcaaccccactaggattccggccgacgaacaatgcatccaactcagtaccatcacgcaaccattgggcaccaatcagattattcctcctcctaggttgtgctctcatccaaataccatacggtttgacaatattttctattggcatatcgaatagctttgaacaaaacttctcagagtggccaattataccgcaaataaagcaaaacataggaacatactcatgcttgaattcagcctaaaacccagtatcatccatggttctctgaagcttcttccttcatttcaaggggactgtgatatcaattgttactcgaacccgcatatactcatgccaaacatgttgaaaattcttaggatcagccttaatgaatgtaccaacaaaattacccaatttttcaacaacagcagccgatttgaatcctacttggagaccatatatctgaacccacatatccagcctatcaatggccactctcttacgatcgtcacccctttttagtttttgaaaaacaaattgaatccgattaaatgtccacggactaccttccacaaacctttccaagtcaatttcatggtaaaattgaaaaagatactgattggtgtcaatctctttcacatagactccatttcctagctgccaaagagacgccatgacatgtctcatagcttcaaagtcgatggcccgagcagtaagaaatcgacctacaatacacagatgaccgtgacccacttgatcatcaggcacaagaaaatccactcccaaatcaccatcatcctctccttcaatgctgatatcagcatagccctcttcaatgtcctctaacgccaaactagtggaagccattgtcgagaaaaccagaaacacaaaaaccaacacactagaagaaaacaaaacaatactttctcactaactcacacactcaccatgtcaagagacaagacttaattatattttatttacttacgcaatctttaaagttttaaagaaccagtctgataaataatccatccatccactgttgtactatgcataattattactatgtttgtaaaatctaatttattagtattaaatataaaaacattaactctaaaaatataaaactcttgaacttggctaaattaacattacatggatatattagcaaattgttttaaaaacataagcacaattaacagtgaaggggactatttacaaccatttaaatcttactattgtaaaattgtcttaatagtgtttatattcaattttgagtattttactcttctcatctaaatttatgacaaactatttcatttatctttattattataactttttgtttatagattattattatatcttttatcttactattattgtaaaagtattttattagtgtctatattaactattttactcttatcatctaacta

SEQ ID NO: 199132 - DNA, 1584 bp, Cannabis indica
tggaccccgacttaaacccggacccccaacccggatctggacccgaactcgaaccccagaccccagcgtcggtcccgaacaccagacccagacccacgatccagacgcggacccgaacctcggacctcggaccttgaatctcgaaccccgacccctgaccctggcctcgaacatcagactcggacccgaacctttatacgacctaccaaacgggccttatatgacttcttttttatatattatatagatatatattttattttacaaacaaatgtaacaatgggttgagaccaagtcaataaatttggatagtagttcccttaatttgggttgtaggatggtcaagtgaatttgagtttttcgaattaagatgcttttatttgggtttatgctatgaaaagttgtaataaatattttgattttaaataagattaaatcatttgaaatattttttaatattaaattatttgttaattccttttaactatattaattgacaaaaataatttataatcattatatatatcttggttgagttgtatattatttttcatatatattttatttgatttattcattgaagaaatatttggtgtctagattttctagttctgaaaagtaagataaatatagtaagtatttaatgatgaaattaaatttttttagagttatttccttccaaccaagatgcatacattattctgatcttatattgatattttaagtgatttgatcagatattgaatgaaaatttaaatagaagtttctatttttatacaaaaaaatttacacttactgccacgattctgtatgtacagaacaagaaatttctgggttgattgaagatttcttttaggaatgttttctatgggctatggacgtgtctagtccatgtatgagcattccactatgagtatattatctataaatatttatattggctactagattttctatctctttcatctctttgtatttcattcttattttgtaagaaagagtatcttaatcttgtagaggagagtgagttcgactctacctctatgtatatatctttgttatttttttgagtctataatcaacttaacaaaaaaaaataactgtaatataccaaaaccctaattaggaataattaagatttattatatattatagattaattagagagtaatgagcaagattatgatcctactaatcgaatttagtataaattaggaaactttactataggtgaataaataagtacaatttattaattacgaagatttatttagaatatatgggtataatatgagtttttttttgggttaagtcaaaactttgtattgcataatacttaaattacaacctatgcaacacctatcacgttggcatgctaattctaatacataaaattaaaccaaactctatcaatgaattgtatttttgttggcattatacctctaattttatactttacatcttgcttaattatttttgttaaaattgttgttgtataaatttttttgaatccataatgcttcattttggcagttccacaaatgatacaccatcgctgctactgaagtcaccataacctacttc

SEQ ID NO: 199133 - DNA, 1500 bp, Cannabis indica
gtaggttctctaattgctaccataatgtttgcagtagcatttacagttcctggtggcaatgaccaaaacacaggttacccaatttttccaacacaaaaaaattgtttcaagatttttataatatcagatgctttatcactcttctcatccacagcctcagtgttaatgtttttgggaatgcttacatcaagatatgctgaagaagatttcctcaaatcattgcccacaaaattagttataggacttcttacacttttcatatcaattgcaacaatgacaatagcattttgtgctgcccttttgattatgttgagtggtgagtctgtgtttattgctactctttttttgcttgctggacttcccattactctgtttgggtggatgcaatttcctcttttggtacagatttttaattccacttataggccaagtatctttcaaaggaatgttaaaagatggttataagaaggtaactatatatctatatatatattatttgtttgtgtgtaatgggttcttcatttttcattttaagtgtgtgttactagtgcaattacacttttgtatcaaaaaacaatgagaaaggggttttgttactttgtattgaagatagtggttgatttttatttattttagctcaaagtttgggtggtgaatcattgtaaagtgctctactaatctacatattctaatttagcgattgtcatctctaatatgcttttctacaatacttacttgatgagactcaaactttttttttgtgtatctatcttttgagataaaaaggattgtattaataatccaagattatttaattttgatgttgttgtgagactttagttttattggagaaaaactttgtaatctaatttttaaactttggtaattttgagcagactacggtacgtgtgtagttagttattacggttaaagttaattaagatttttgttttcagttattatctttaactactttcggttatagattagttaaagttctcactcttgtattatgtacatattgagttcattgctcaatgtaataactaataaacaagagattcagttttcactattcatcttctttacaaattatattgagtcttcattttcaatttcaagtatttataactagtgcaataacattttgtatcaattatatttataaaatcttctaaaacatatattctagtataattaattttctgtgttcaaataatgttataattttatattatacaatatcaatatttctaatctatttctaaaactaccatattttaaggcatttttgcaaaggtagcaaaacctataaaattgttatgacaccatatttttgtagttaggaggtggttaagaactttttgtatctttgaacaataagataataatgttatttataaatagatctctgagtttcccaaccaaaacaattacatttacaaccatggggtatgagtatatttgcaaacactaataaacttttaattaattgggctt

SEQ ID NO: 199134 - DNA, 1377 bp, Cannabis indica
ttgcacagtaattttgaaaagcagtgtagcacggctaaactagtagggtgttacaatatagctcccagacattccccttcagatcacaggactctaactatcacaatttccccccttttaagagttcgatgtcctcgtcaaccacacttttggttgggtcaaggctctgataccatttgtagcgtccctcgcttcaagcctccattaggcccttacacccacaaaatgatggctcttatacgcaagtacatcactctggctgcttcatggaatgacgactgaccctacaaactaaaacgagtatttccagggtgctttgtcctcacacgcacacattctgggaaaacttctcaggaggtcacccatcctgaaattaccccaggttaagcatgcttaaccgtggagttctttcatgatgcgctaccaaaaaacaagatgcaccttgttgatataggtggtaccaatcaatccatttaagtcctctttaactatgtagccccatacctacacagtctcagaatcatcacacatgatcttccccaagcgatgtggtattgtacagctcccgatctttcccctttagatcacgggattttgactatcacagatacaacctaaaacaactcttgacaactcggtacacaggccggtagggtcaatatgtacatttgccaaagaagaccatcgcctcatggctgctctaacttcacctagtccttacctgcaccataaagcactcgtgagttatgaggactcaacaagaaaagtgataaaggaaatacctataataattaaatatccactttattgtcattaaacaataacatttcaagagttacgtaatataaccaaccatatatataaaaatgacaaataaccatctttattacatcacattacctaattaggcaagtcgatgctttacttcaataaccataaatataagaatgagaaataatcattttccttacatcacattgtctaatcaggcaagtgcgttccatgacttggcactcacatatcgcatcacctaaacaggtgagcccatcccatgacatggcactcacatgttgtgtcacctaagcaagtgagcccgtatatcatattttcattgcctaattagacaatcgataatcatgtcacttgccatgccatatggtacattatacttttcttacttcaagtctcagttcaggtatgttggtcgacctatttggagaacgatcaatgatcctgggccctatgccataacaataaaagaacagttaaccaagtaatttagccttattccatgtccaacaattcattccaaggatcccttataagtctttagggtatccctacctcaaaatccaagaaaatataaaaaaaaaaaaa

SEQ ID NO: 199135 - DNA, 1020 bp, Cannabis indica
ttttattacactacattgcatatgatattcatatataatgatgagatgattataatttagcattttcttataccaaatatcatttgcttttttattttattttttatggttctttttcatcattatattatacaccaactaaccatcttataattagtactactattaaattgtgattatttaaaaaaaaaattacaaaaatacaattatacgaaattttaaatatttttattttatttacataaaatacaattttttatatatttttatgttatactcttattattttatcgttaattttttgttatttgtgtgttattttattattattttgatgttattttttatttgattttttataattatttctaatatttttataaaataccgtaaaaatatactaatgtatatgtaattttctcttaaatttacactcaatttaatttattacagggagaaagctttatcacagaaccaattacagcaaagctagttgatccaattacatattttacaaatgggtactaataatgatcataacaacaatattctctcttcattcatagatatattttctttttaattttctttatatttttttttttgggtaaatattagggtttgcaagttggattataggaagaatacaaaatcaggtagtggaagagtagtgttgtgcttttcaagagttggtccagttgaattggaagaagcacaagaagctgctttgggaatcaatgcctcagctttgatatttgttcaaccattcacaacactttctggccctgattttttcccaactctttatcttgacattcttcaaggaaccaaacttaaacaccatcttgcccttttcatgaggtaattattttaaccatgataaaaaaaaataataacaaattaattattacaataattgagtattattattagatactaatactagagatgttagcaacggtcttgagttaaggcgggtcaaactacatttaagattcacccagtccaggattctcaaaa

SEQ ID NO: 199136 - DNA, 935 bp, Cannabis indica
acataaacgactgttagactatgcaatagtattgggacataatagtaatttataaaaagtatgaatcactataaatatgtaattgtatagctattatgagatatgaattcagaaaataaaatttttgttcaattgagagctatctcaaaaagtgcatttcgaagatttgtcatgtcttgaaaaagacccatacatatgaacgacatgtcgtaatcttacaaacaatgacgtgtattaaattattatttatatatattaaagtggtccatcaatcaaataaccagagtagtgtttgttagtgtttcgagcctacattttgatcggacggatggaattgtttactgccaagctaacggtgtgacaataatctaaagggcccaaatgaatgagcaagcctcaagggtcagatgagatcagtgttagatattgttaattaggaacagttgtgaaagattccacctgtacaactgtgttgtgaaatttatcatagttgatatctatcttcttctatttcttttcagttaagaaaatgaagtgctgaacggcatctctatttaaattttcaaactaaagattcattccagatgccctaccaacacaacacacttacatgatcaagtaataacaacaattacattatttgatttttcttatattgtcgcttttcccgagagtgtttcaagttgaaatgttaaaatttgtttttagttgtgtcttttggattgatagaaaaggaaacatagctagaagatctatgttaacataaataatatttcattatttagttgaactttcaaatcaatattgtaatactggattgactgattgattgattttaccgtaattcaggtttgattggtactatctttttcttttttgttaaaaaaaaaaaaaaaattgtttattcaaatgaattggtaggtatacacgattat

SEQ ID NO: 199137 - DNA, 808 bp, Cannabis indica
ttttaaatacaaaattgaagtggtctaaaagaaagtctaaaccgcgtcctttagaaaactatatcattaaattgtattttacggttaaataattatcaactcagccgtcactgaaattacattattagttaataatgatttaactagtcttcctaaccctgctccaataagacatatattagtcaaatatagcttgtagatcttgaaattgattaatatagcttataaataaattaagtgtttttctcataagacaatataaatgggaactctacaacaattaatatttagttagctccaccatactcacatgattttgtgttgcttctttatataaacactctacttcaatcaaagctcaaaaggtacagaattaatatttgctagacatttcagagtacatatttacatatataaatcatgggtatatcattattattacttaaattggccattttagccatagcagttgctctaaatctcatgcagttgagtacagcacaaacgacacacgtagttggagatggcttgggttattggttggtccctccaggaggcccaatcgcttatcaaatttgggtcaagtctcaaacatttgtccttggtgatgttcttggtgagtatataaattctctaaataatcaatcatgtataatactttaattcttaccacataagttacataagtaatttctaatgggtatttagcaaaataatctaattttgtaatcattatgcataatagcgccttgttttaataatgtttcgtaaaaataacattttagacacacacccttgtcgaaaattc

SEQ ID NO: 199138 - DNA, 823 bp, Cannabis indica
tatggcctgtgaagctatagaggtgatattgcataggcctgtctttgaaggaagcctttcaatgcatgacatagagatcgagagacggccctaccaccgcagttgtggctgtgcgctacacaacacaaaggatagctccaccgttgcttgtactcatcatcggaacatatccttccccaagagaaatccatccatcaactcttcattattgacattgtcatcaacttcttcttcttcttccaaattctcttctcaaaactctagtcttattagtaactttcatgtcaaccatgactgcagaagacatcaatgaatggcacattgccatgtagatatgtgataggtaaatatttttattttgatcttttcatgttaagaggcttagtaatgatgaattatgtaaaaggaaaaagaaaaaaggtttagaaattatgaaacatttttttttcctttctcttgtcacttttacacttcttgatacctcaattaaaaaaatttgagcaattttcttcttattcttctcatcatttttatgtaaattctcattttaagtgctacattttctttatgaaccacatttcacttacaaattacaatagtgtttttttttactctttttgacaacattataaaattaaaaaaaaaaacacaaacaaacaaataaacttgtgatttttttctactctgttttggtgtgaaaatcactaggctctcacttctatataatattttattactttcacaaaggagaaagagtaaagttctccttgttttctcagttaatctatatatacataaattgtagtcttttgtcttgtaagat

SEQ ID NO: 199139 - DNA, 1364 bp, Cannabis indica
tcaaattggttggcacaagttttagaggtcttattgctggagaactgtgatgatgaagtttttataatcaccgacctggttgatattgttacaatgtgtggaagtacattaatatgggtgaaggcgtagaagttgtgctggggcttgaattatatttagtattcaagcgagagagaatcaagttcttttttggaagagtgtttgtgtactttgacatcttatacatacattgataaggttcctatacttgcctacttggtggttacttttgttattactattgctcttatctactcttgggttgtctgccggtcacctaattgcattgcagatgattttacattgttgttttccatcagtattcaaattgctgcagttttttattcttaagtttcaattgtttgagcagaaaccaaaggacatttcggcctaaaaagagtgctccctctggtagtaaggttagctcctttacaacttacagttttcaattatctcctgcatgatggaatttaatgtagatgtttctgtttatgtttaggctttcagtatctttagtattgagaaatctgttacactatgactgattaagactggcagtttttgttatttatttcctttttttgtttcttttcgtctcttattttcactctagttgatagtttgaagtgtctacccttatttaggagtatatcctaatctagtcttttgctatatcattatcctattcttatttgatgcagggagctcagcttagaaagcacatcgatgccactttgggtagtggaaatcttagggaagcagtaaaactcccaactggggaagacctaaacgagtggcttgctgtcaacagtatctctctccccccttattgcaatattattatctgtttagatgctttctcttctgttacatctgcactttttattgtctattatatttctgaatagctttttctttgaattccagctgtagatttcttcaaccaggtgaatttgctatatggcaccctcacagagttctgtactgcagagaattgtcctacaatgactgctggcccaaagtacagatacctgaactttttatttacctttttttcttttcttttccttcttttttttttcaatgtttttcttttcctaaaaagaaagtcatagcatcagtttgtgtgaatttggctttgtgataattattatggtaattagtaattgttttttttttttcttcccatatcattagtttgctcaaaatcatagttatatttttttggtccttaatgtgaacactaaagacaaaacatagtcctaaactaccacttggaacttcagtctaatacataatgctggaatttaagaaacattgtacct

SEQ ID NO: 199140 - DNA, 770 bp, Cannabis indica
taatacttttttattagaaagtgttttttcacttgggattactagatagattttgtcatgtgaataagtagttgtagtacatctaaaaatatgagagaccagcaatgagtgaattctacatataaaaggtaattaaaggaagtggaagcttcttcttttccatgtgagacaggaactttttttaaaatatggttacaaaagttaggttttcatacatgtgagtgtgacaattcttttggggaagaaatgaaagaatcactcaacaattaattataagcattaaaaaaatctggtaatatatgattgagagagagtgaaacaacaaatgcattaatgacaagtatcagagatagtcaccaatggagggagtaaaaactgtgtcatgtctcattgtttcatgtgataacttctaagttggagggaaataatactttatttagatatttaatttttggataagaggaaagaaataaataaaataaattcaaataattgagaaatttaatataattaatgtatcacttgtacgctatcagaaatgtttaattgatgtgacccatttgaagaatttaatttataaagaaaactatgccatatattacataatgtattttgatactctctcaattgattaattatgtattaccatgagtgacaaaggcgcatgcttaacattattcccttaaaatattggttatatttttaatgtcatataacttattaacatgaataaaacaattgttacaccaaacaatattaaaattatgtaa

SEQ ID NO: 199141 - DNA, 814 bp, Cannabis indica
aaaaaaataaaagaaaaatcataatctgacctaattaataataaataaaatctacacaatataaaatgatactaaactaattcacaacattaatagacttcatacatattgatataataatgtgtttaaacattctacatatgtacacattttaggttcacatattattatttgttgtttttatgaggtagtttatgtgcttattaaactcaaattataattttttttagaaaaatatataataattacaaataggtgccttttttttttggtcttaattataatgatatgtattataaggaaaattatataatgttttcagtaaaaattttacacttttatatgttgaaagtttttttttacagtattttatattaacaaaaaaaataataaaaaaattacataaaaataacaaaaaaataacatcaaaataacataaaaaatagtatacaaataacaaaaaattaacaacaaaataacagaagtacaatataaaaatacatcaaaattttgtattttttgtaaataaaattttaaaaccgtaaaaatatttaatgttttgaacaaccctattcttataatttttgtgtttttttttttaaatagtctcgtaattatattcaaccaaaaaatcttttttttttttcttaattgcaaaattttgatgtgatttagtattttcttttcaattcatttttgttgtatttttattgtttctattttacattttaattaaagctttataaattgagctgatttagagttagttttaggcatgacctacttgagttaaggttttcttttttttttttaa

SEQ ID NO: 199142 - DNA, 2036 bp, Cannabis indica
aaagatttttgtcctatttgtggcaaagtcattagaaaaagagaaagggagacaaaaaaagttgcccaaaaagttatgtagtactttcccctaactctgagactaaagaggttatatagttaaggtattcagtcgaggacatgcggtggcattactctaagagacccaaagaggacgacgtgcataggcatcctgaaaatgcagaggagttgaagcagtttgataggcacaatccatcattcacacttgaacctacaaatgtgaggttggatttggccactgataggttcaatccgtttggtaacatgagcaactctcacagtatgtggccggttatcttagttgtgtataacttacgcccttagaagtgcatgaaagcagagtcgttgatgttgtctctattgattccagggtgcaccgcccctaggaaagacattttttttgaattcttaattcactttccttcactcacgaccttgtcttacaaaaatctatttatttgtagtgagcatatgaacgagctacaacttgggggtgatcaaaatcttgacacatttcaggagaacgaatttttcgattggttcaagtctcatggaagtattgttttgtactaattttatcattcaatatgatttatgctagtattgattacatttttcactcaatgagagatcaatcaactctgagtggataaccttagaaaagtatcagatgagttgtatgccattacaaatccctctaatcccgttgtttattgttttcctagatgtattattaacagtgataaattcctaattaaggatcgggatggaaatcgtaacacccaaaacactagtattttggtgcctagtgaaggtggtcaagatttttatggcctactccaacaattctacgagttgacttacttgaaggattgtagtacaacttccacaactagacaatgtcgaatatgtccgagatgatataaaataagactcattactaagaggttcattttaaagaaagaatcaattacaaggacattaacattctcacttgtctttataaaagattctattatagtaacctttgcttttgttactcatttcaattcattcatcaattctaaaaccgtaaactagaggagaaggtatacagacaaccatattaatttttctctaattgtagtgaacatgtgcaagcattaaaagtctacttatagattaaacaaatttttcacgattggtattcattatgtcatctttttttaatgtttgaaaagagcattatagaattaattatataccagaaggtcagtgaaagtaatatttgttttatatatagacaatatgttatttgcaagtgatgataaaagtttccgatataatgtaaaataattcatatatgaaattattattttgagataaagaataaaaataatgtatataattttaattaataagagagtagccacaacatctctcataaaataaagttctgaattattcatcacacgatacttttatctttaagtgtaataaattaaactcaaaccagcatttataaaatgatctggaatgagtataaattaagaacattctttttgcttctatttttagaagtctaatatatgcttaagagtctagattagactttgcatttatttcaagaatgttatgtagtatcagaataactaaagttaagatcaccactttattttctcatactaagtgatgagttattttgaagatactaaatacaatattcacaatatattttattaagatcaactgatatttgattacatctttaagattactagtaagttgtattgtacagaaccttaattatcatttctattatagaagtgagattcatttatttttttgaggatacttcttgtatggtatgttatagagttttatactaggtctctagtttagaataatatttctaggtcactaaaaaatttttgcgacaaattcagctatagtatttatgactgagaactataagattacaggttgaaggtaacatatcgatattaagtatttagc

SEQ ID NO: 199143 - DNA, 735 bp, Cannabis indica
tatataaattcaagattctcaaactcaaacatcactgtacttatgaaaagaagttatgttcgaataccacttactctcaattattaacattagtgctcataggtatatgcaagaaaacaacatgttggggcagaataatattctcaatttctacatttgtcaaaggaaagagatccaaatttgctattaagggacagttagccaacagtcaacttccaactgcaaggctcttctctccaatgaccatccatcatttgatgcttaaaaatagccaactaactattttaggcccaaataaataaaactttttcttcctcacttggggggcaacaacttctctttccttgtatgtaattggacaatttatcaaacatttgaacacgtaaaaaaaaaagtaagattaactttctttctccaccaatcaaattggaacaaaaaaaaaagtgactttggtattgagatgctattttatctactacgaaaggtccaatcaaaaagtagaaagtgcttaggccttggctctcctcgaaggcacggccatcaatcttactattatgtactaggtaagaaatattaaacaaagcaaaacaaacgttcatttatggttcacatgttgccatcctattgggcaagccaagctatttttaatgaacaaaaacaaaatattatgatttttgtgacacttggcgaaatcccatttgagagtagaggccattcaaaatgtgttgcactttt

SEQ ID NO: 199144 - DNA, 1184 bp, Cannabis indica
tattattaagtgtaactaaactaatatttagatataaataaacacggtgatcgtaaccataaccgttgcgagcaacaaaaatttatagaccgcataattgatactaacgagtaaaatctcctagtgctttgaaattttcaagtatcaataaaaagtgtgttaaattattagcaggattaaagacgacaacacttaagaaattgcattcttctaaataggaacctgttaaacaaacctataatatcaaataattatcaaataatttataacgagtcatctataatattaaataattattttaatttttgataaatttatcaaaagttataatcatagtgatcctcttatttaattactttaaccattttagtttgaacactcgaattcattttcaaagtgattgaaggtaccagagtcatcatcagataaatgctaaaaagcactcacataacatcctagatgaatattagtgtaaataaataccatatttcatatatttaaatttttactaattttaaattaagatatatgaaactactatggaattatattaatatcactaaagcaataatcgtatactcaaaatataccaatttatttaactaatcaatgttattatagacgaaactcactattaaaaattagaaacaacattacattactaaatattatatttttatacatactttaagtgcaaatatcattactcatatcgaactgagtactctatacaaacacaacacaagaagaaataaaaagatgttaggaataagggataagaaaaagaagcataataaaccaaccaagcaaagttgtttctactcaaccacttcttgtttttgcacaagtcacattatgatgggaatttttctccaaccttttttctccataaccactcatcatgtcatctaaaccaaaaccaaaaccaaacacactttcagttaaaaacaagtttataaaactgttctattcacttttcctaatcttgtgtttttccctattaaatggtacatgtgtggaccctaattgatgtgtactaatgtcatctcatgataatgatatacatataatttcatcttgtaattatcataataaatccaaataatattcttgcaaaaaaaaaaaaaactgaaaatagccctcttcctaatatattcataatatctaaaatataaaaatatacg

SEQ ID NO: 199145 - DNA, 794 bp, Cannabis indica
gtggtaggatcttctatatagttggttccgaagtatagcgtaccttaacgcccttactatgatttttctcgcctgtttggggtccgatggcaacttatcgtccttcaagtactcaaggattggctgtctctagtctccggatgtgtccatcggaattttggtgcacttaacttcttcttccgctggaatactaggttccgagataaagtcgaatggtattgtccttgtgatgtggaggggggaagaggatcccaggccggccaaggcgtcgacatgcatatttgcttctcggggaatctggctaatttggaaatagtcgagagtcgcaatcaacttttttacttcggccaaatacctggccatttttagttctttagcctcaaaatctcctttaacttgttgaactatcaactgagagtctgactggactagtaccctttcggctcccatttccttaaccaattttatcccatggatcagagcctcgtactcagcatcattgttggtggctcggaaacccaactttatggattgctccatcatttctccgtcgggcgacaatagtattatccccactctgctccctctaacattcgaggatccatctaccttcagctgccagtcccttccggcggattccttctcgaactagacaggctccggagttatctcgaccaggaaatccgtaatgcctatcccttaatagccgtctggggtaggtattgtatatcaaactcgctcaattctaccgcccacttcatcagtctcccggatacctcgggtttgtacaagac

SEQ ID NO: 199146 - DNA, 1513 bp, Cannabis indica
tcaaaattagcatttaactaaaacattacaccaccaatttgatactctcatcaaattcccaccaccacagtgcagagaacaaaacccttttgaaaattcatctcattctcattgctatctctgcaaaaacaataatcaatgtaccaaattgttagctttaatggctaagaaaaactaattatgcatatatatatatatatgtatctgtatatgtatatatgataaatattgactattgagattgagatagagatagggatcaaaatttggggaaatactcaaaaatcccaaaatcccaagacaaatcatagccaaacactctctttctttctctgtatctgtgtgtgagtgtgattttccatcatattttctcatgaaccaaacagaaatataattaaagaaaacagaatgaatgaatggagagaattattatacctttccagtttcagtctcatcaggaactttgtaggtatcaattgtaatctcattcaaaaacatacccggaaacaaacactgcaaaacaatttcaaaccccaaaatcaaaatcattatcagaaagaaaaactaatttcgccggaaaataaaaaattaaaaaaattgttcgatttgacttacatccaattgcctctgaacgttccttggtcgcttcttaggtcggcgaggaggtttgtgacctaatagagagatgaaatcttcttcgatctctttcttcgcaagcttagccgagaatttgactctctctttattctccggtggcgataaccctctgacctgtctcgtcaacttaaccccattgttcgtctcacttctcaacggtgagtaattcgccttaatctcttcgattccagagttcttattaaaaccctgagcttcttcaacctcaagactaagcgaaaccttccttgccctgagcttacgcggcggcatcgaaccagattgagccgattgtttctcggcttcagcgtctctctccgctaaaagctcatcatttaacttctccgacacagttttcaactccaagatgagtttctcgctcatcgccgcgatcccttctttgccgtcattatcctgaaaaacaggtttaggagaacgaaacttacgtttctcagactcagattccctcctacgattgttcaaagagctctgaaatctcaacgaatcagatcgccgatcaatctcgccgccggttacgccgccgccgccaccgttcgaatcatccctcatacacctcaggtacttctgattcccccatttcaagcaaggaagatcgaaattgtgtagaggcttcgttctcgccggtgcaaccgccatggaaaccgacgatgtcttcaacactcgttgctgtgagacaccttccctcacgcaaaccatcaaacggaaaaagattcttcggatcagagctacgtgagagagaaaagttgagtaatttgatgattctagggtttttggatcgtgaaaagtagtgtttggttgctgagaaaaaatggccggaaaaatttgattttccgatggg

SEQ ID NO: 199147 - DNA, 764 bp, Cannabis indica
tttctgatgtacattatctcttatcatttttctttagagttattgtttctcccactaagagaaatgctaatcaagatactctagcaatactatgaacaatcatcttgcatatcgtttaataaaaaacaagaaaatattgtttaaaaatgcaagaaatttgcaacaatcttctataataaccctaaaagaagaaagcacaggtaataaatttcgaatagcatgtactgctatccagcaatttgactccaactccactttctgctatggttgagttttaattcagcttagctcttccttaataccaatttcttcagccaaattcggagcgccaatactagcaaaattacacaacctagccatcactaattcccctgagcgattatgccataatcaaacgcagttcgatcacagaaaatggcagcatcaacagttaccttgattgcattctctagcaacttaatccaaaatttaactctatcaccaactaaaaaaaattgaccgacttccattatacaagacaactcgtatatgagataagaacactatccgccataacatacttttgctttcaaaccaaatcatttcaagacttatatattttaatttaataatttaaatcaaaacaaaaaatcaataatgtttcaaaataatttcagaaaaaaaaataaggctaattatgatttttgcccttcgaattttgatatataccaaatcatgttccgtgaactttaaagaccgtttaaaattctctctaaactattgag

SEQ ID NO: 199148 - DNA, 853 bp, Cannabis indica
cttaattgctttagattagaaacggacggtgtggatttcaggggtgagaagctctttatgtctcaagaattcattaagatgatgtggagaagaactttgtttctcttggatgttcttaaacgcggttatagcttcgtctttacggtacgtattattaaacttctcttaatctcaattaataatcttataattaattagttacttaattacctatacaattaatatattacaacttttcacatgagaggcagtttttcttagacatggaatttaaattaaccatgtgaattaaaactggatatgcatatggttattttattttcttattataaatatatatataacgtcataattactagtatatatgaaaatgaagagccagctggtcaaattttttaacaatttataggcataatacatgaaattaatttttctagaaaacgaataaaataaaaagaaatttctaacttgttgaatcgatctgtcccatatttctcctacagtattacataatttttttttatataaagattaattaattaagtcaaaagtatttataatagagtataaaataaaaaatataaaaattttgatttctatggtgagaacagtgcgtaattaaggtgagttggaattaataaagtttaaagtaatttagagggtggacctttgttataggagttgggatcagaaaacattgggggatattattgacctatcaactaattaattcatttttcacatgagaatattcaatattgatccccacctctatgtcacagtactctaaatatttcgtacacgtgtcctcttatactttttgttttgggattacttatttatttatttatta

SEQ ID NO: 199149 - DNA, 887 bp, Cannabis indica
gagagcaccaggcgaagccctcatcaccgtcgatcgaagccagtctgaagctccaacctctgtcgacctgcgttgacctgtgtttgctctttctgtcaatgagaaagagagagacgacaaagaggagggcccgtttgggggatcacatgagagggaatgttattgggggtttgggtttctcggagttggggataataatggcccgtttggattgaggattgccggtgatagctcctccagagttggggaaggctgccacacaaagaggagggctagggtttgggtgggtgtcgtttgtggaagatgaatggtttcaacagaaaagataaaaaagaataagaaaaagaaaagaaaaaaaataaaaaaaataaaatattttataattttaaattatttataatatttaaattaatattacatggatcactaaaattttccacgtgtacaagggtgtacatgtggatagtccaccgtggcacttaattgtgatttttggacagaggtgtacagagcaaaacggaactaggggttaggtagttatgccgctaaaatttctgtttttatggttaagtgttacaaatcgtaaagttcaggtggtttagccgcaatatcccatctcttattacgattaatctccgtacctaaaacatgtactagaattattttttttttaatttttttttcatggtggtgtttgttatgcttacaacattatttctgtacatttttgaaaaatttcaaataattttcagtgccaaaatacatttaaagtttttaaatacgcgtagcaaattgaaatatcaggaactctattttcggtactataaattattcgaaatttctcaaaaatatacaggaatgatattgtaactatgacagataccgtc

SEQ ID NO: 199150 - DNA, 1386 bp, Cannabis indica
cgaaacaaactaattaaacgtaacgtaactaaaactaaaaaaaaaaaaaattaaaaaaaaaaaaaaaaaaaaaaaagtaaaaaaaaaaaaaaaaaaaagttaaaattttaaattattcgtagtaagtcgtaactaaaagtagtagataggggtgtaccgaaactttttttttttttttttttggaacaatctacactaccttttagatggagtatactatagtatatactatcaagttgtacttatatagtatatgacttgttaataatatctttcaaaatataatttttacagtaacatagtctctctatcacatttaatttaacttaataaagtggtagatgatatttgataaatgaatgcaaatttaaatattcttcaccctatttacattaataaataatagaataaacgacttttttataataaattttatttttatttttaattttttaatatttaaagtaaaaaaaaatatttaatttacatctatttatcaactattattcaccgcgttattcattttacaataaaactaaatagaatataatggaaggattacattatagtaaaatttacatttcgaaaaatattattaacaaatcatatacgtatataatttactagtgtaaaaaaattcatgcacaaaaatgttaattattcttaattttttattcttgaagcgttaaattgttaaattggatatttagtttacttttaaaatgaacttttttttttcccacatatattattttttttactttttcacaaatatatggattttttaacacttaaggaatttggttcttggttgatacttcttcccattattttatttactgtgatgtgcacgtgttgtaaaaatatgcctatgtaaaatctcacatttatgcatatattttcattaattcaggccagcataattcttagaccaaatttcttcttctataccaaaatcacaatgcttgtatataataagttcctttactgcctttaggaaccaaatcataacaaacttggatactccaagaaccatttttgtcaattaacccatcagtcaaatatgacccaaaacaaaaatgactaccttctatattcataaaaaaaaatctaattattttctttcaattattagccaaattacatattattatattttacaacagagatgtagaatataccattgggtgccccttatatgctctatgaaatcccaatagaatccccacaacaaaaataataggacaaagcacatgatacatttattaaaaaaaagcttcattatattctaatgccaaatattttaagcacaatttgggagagtggacactataaaaatatgcttgaaacttttacatttatgaaaataaaataaaaaagaagaaa

SEQ ID NO: 199151 - DNA, 5079 bp, Cannabis indica
tttctttcctttcttttcttttcacacgttcacacacacacataactactaatgattggtgagatataaatattttagggttggtttggtacacgtaatattacttaatacactattatgtttaatattgtcttgtactcactacaaaaatttttgtttttagtcacaacataatttgtggctaaagtaaaatagttgtgactaattacaaatcatcattcctatgttgtgactaaaaagtctatggctaaagatattagttacaaaaatcacaaattgttgtgactaaatgtgtttttagtcataatacttgttgtgaataaaactaaattagtgacaatttatgtctaaatactatgttttaatcacaagtaataactttttgttgtgattaaaacacatttagtcacaaaaaatttatgttgtgactaaaaagttgtcactaaaaatagctatttttttagtgactaataggttgtataaaattatgttagattatattgcactagtaaacgtaggtgcgcttcgtgcagttatataatagagtaaatataaatttttgttctgtattttaaaaattattgatcattctttttaattattaagttaaattataatttaaatatagtgctttgtaaaataaaatatcatgttatgttgagtctaattgtaatcaaatattttaatcctgacattaaaattttctcttcttaactctcaatatttattgtgattcgattcatgatctaattacactgaaccgattcaattacaacgaactaatctaatccaattcaattacaaaaaattagacatccaattacaatgaagggcgttcatggtgcaggcggtgtggtttttagctaatttttcaagccaaaccgcacatccaatttgtatatttttccaaaccgcaactacaatgcaagatctcaaaaccataaaaaccacttaatattagtttggataattaaataattttatacaataattatactgtgattaaaaaatttaattttgggacaattaaaaatgaaaatcaataaacttatttatattatataggacaacataaaaaatgattcctagacaatgtgacattatttctaaaacacttatcatcaaattttcttcacaaaatgacaaagcttcataaattaaaaaaaaaaaatcatataaaataccacttaatttatttattgtcctcctttatataaatatatacatagatagatagataggatagttaaattttaatttatatattgaggttcgcaaaataaaatataattaatgatacattgagtctaattgtaatcaaatatatttttaccttaactttagatatagattttaggcatattaacgtgatttataacttaattgtgcagcgcattgctaatcaacgagtttattaaaaatcatgtttaattaaaactttatataactaattgaaaattcaaaaataacatacttatattataacgggatcccgttacaaaatatttacataagttttacagtgcataatacaaaagtttgtcgcctagcgactatacaaaataagcccatgttgtcccaaagaccgtacgctccaggcctagccatcccgacatgtaaaatcttcatctgctcgctctcattgttgctcaaccttagctttgcccttacctacacatgcaaaccatatctgtgagtcgacagagtcagtagaaaaagtataatcatatacataaacatatatccaaatcgtaactaagcgcccatacacctaattacaatctgctaacaaggttagcaacgttcttaacaaagtatgacaaactgcaaatccagcctatactcagtactctagtcatactgatgtggtagcagtaattcatactaagtatgactaactgcgaatccagcctatactaagtactctagtcgtactgatgtggtagcagtaattcatactatctagaggcctagcatatagtatctctgtacagttttatgtacacttcacttataccttgatatactaatctgatggcaactaacatgcacactaaacatgtatatatatatgcaaatcattatgctaatcttacatcgttttttaattcatgtgccccgacgaacctaagtggaacagctactagacgaattacagacccctaaataacattaattataaaacgcataagtgacatgctaaacaactttttggagacttaaacttgaaaccaaaagtttccctatcgatggataacatggcaataccctaattatttcaaaacgggaaaaactagggttcccaaaaatgccccaaccagtagaccggttccccaaccacaattccaattttgtggggtttcctggggaccaactggtcgcccggttcctataggtctccctgaacaagaactccgacgaactcaccccacaacctcaaatcaaacccaaacagaaccataacttccacatcttctatttataccataatagacatatttcatgcaataaaaccaaggaataccgagaaatacaaaaatcaccattaaagacaaaagtttgagctctaaagcttaaacattgtccaaacatcaaaagatgtcatcagttaactcaatttcagctcacacaacaccaattccactttaaacactcaaccaaaacaaaacaacagcaaccttaaatcccaaaaactatacataaaacattaacatagaacttaagaaatcataaaatgagaggtctaagggttttaccttggattggatcactaaaaccttgtctaattcactgttttgcagcaaggaaaatccccaaaagctgctgttccttgaggattcgaacaaagggagagagaaagacaagagtcctcttaatttttcctatttcctctaatttctttagttttctaaaaactataataatcttaggataattaaacaaatagtgaccagctgccactctaaaaatcagtcaccacatcctatggtaaaatgacaaaaatacccctccccacaagcttaactaataaaattttctaggggtaaaatggtcattttaaatcctcgggtaaaacctgacatgtctaatgtctaacaaagttgccccattactactaaaatactaaactgtgattttaatggccaaacgccacgttctaatgctatcgggcacaaaacatgcgaaaacgcaaaattccatatatggcataaataatacaccctgaattcaaataaatctccgtaaaatgataaatcatagttaatattctaattcataattaaccctaattatttgccaatttccatgtaaaaactaagcggtccctacaattaccccccgttaaaaggattttttcctcgaaatctaaccttaatacaactctggatattgagccctcatgtcagactccaattccccggtggcttcgtccaccttactgtttctccaaagaaccttgaccgaagctatggtcttattccgaagaagtttatctttcctgtctaagatttgaacttcttgttcttcgtatgataggtttggttgcagctaaagatattcataacatagcacatgagcaggatctaaaacgtactttcgtaacatggaaacatgaaaaacgttgtgaactgctgaaagtgctggaggcaaagctagacgatatgccactagtccaaccttctcgagaatcgagaaaggtcctgtaaacctagggcatagcttgcctcttttcccaaaatgtctgattccgttcattggagacacccgtaggaatacatgatgtcctacatgaaattctacattttctgtgctttggatccacataactcttttgcctactctgagaggcaaagattctggccttaatcttttctatggcttcattagtccgttgcactgatttcgaacctaggtattttctttctcccgtttcatcccagtgaataggagatttgcacttcctgccatacaatagttcgtaaggagccatccctatagtactctcatgactgttagtatacaaaaaatatattcgtggcaggtacttgctccaagagccttcgaaatccatcacacgggctcggaacatgtcttctagtacctgcattgtcctttcagactttttatcagtctgaggaatgaaagctgtattgaatttcaatttggtacccatagctcgctgaagactctcccagaattttgaagtgaatatcagattgttatccgacataatggactttggagcgccatgaaatctaactatctctttaatatataaatctgcattgtgatccactataaaggttgtttttaatggtagaaaatgttcagactttgtaaatcgatctaccacaacccaaattaaattgtacatgcccgtaattctaggtaatccaaccacgaagtccatggtgacatcctcccactgccactcacgaagtgctagtggttgcaataatccagcttgtctctgatgctcagccttgatctgctgacaagtcaagcactgggatacaaatttcaccacatctttcttcatcctggaccactagaagtatggtttaagatccttatgcatcttggtagtgccagggtgcagtgaatatggaatggtatgagcttcatcaaggatttcacttctacattctgcactacttagaacacaaaccctagtcttatacaacatcattcctttatctgatatcataaaatctttcgcttgcccagttgaaacctcttctctgatcttcactaataccgaatcagttaattgagctaccttatccatgtcatctactagatgagggcatcagccactacgttggccttctcaggatggtaaaggattgcacaatcataacccttaaccaattccaaacaacccctctgtctcatattcaaatctttcagagtaaagaagtattttaggctcttatggtcagtataaatctaacatttctctccatagagataagggagccaaatcttcaaagtgaacactaccgctacaagttttaaatcatgagttgggttttagtgttcttattccattaattaatgggaggcataagcgatgac

SEQ ID NO: 199152 - DNA, 1057 bp, Cannabis indica
aaagatatagtttatagaatctgtacagtttttgccaagaattaatgatatcttataaaaatagaacataaggacgaaccattatattattgtttctttggtagctaaaaaattcacattcagtgttttcagcctagtcttttcaactttcaattttcaatgactcggaagataatttagatagcttaaaatcagaaagtgatgtaaggcaatatgagagcctcagaaattggttggtaatcaatgcaaaccaatttttttgaaccattggtggctctacataactctcaatggaaaattctgtacaagccaatatctattcaaatttgataagaaaaagaaaagaacaagctccgagcacttgagcatggttcttaggcacacaaacaaacaccttagaacatattattaccctctacttgatactggtatatgtgctatatatcagggaaaaacaactaacaaagggcacgacacgtatctaaatacctagcaaggagtatattaaaatcctaagaagggatgctaaactcaaagaacgaatttggattagatcaagcatgaagttttattgggagatatccaatacacgtcagactcttggaaaacgtgagcgccctttcttcttcaagaaatcgggaatttcgactgcactaccatcggtgtaagaggatggccgccgattgattccaaggctgatgtctccttgtgcctgcatccagtatgattttggaaaataagagattctgcattaattatgagaagatgggaaaggagaggagaggcagggctcactcatacctggactggccttccttcggtttcttcttggcgtttgaatccagttgcaataagagttatgctaacctgaatagaaacatgtgatagcaacatcatcaaccatgctgcttatgctaatttctttatttgtcaacttaagaatgagggtgaacttacttgaccactgagtgatggatctattacagctccgaatatcaaatttgcagttggatccacaaggtcgtatataacctctgctgcagcattcacctaccag

SEQ ID NO: 199153 - DNA, 594 bp, Cannabis indica
aatataatgtgcaactttattcgcagattatgaaacaaaataaatatgaacattagcaatagagtttaatatatgtttacatttaacaactaattgtaaaaggtatattaagagaattagatgacacattatttaatttaataattattatagaatattgttaactatttacaaaataatactaagatgatacctaagtgcaatacaaaacaaaaagatagagatacatatacaacttaaaacaaatcatacacttaaacaccacaaagtgaaagatagggtaatgaactaatgatccctagatttgaagagctttaagaattttgtagaataattgttttcttcttttaaaaacacaacgaaaaaataacataaaatggaaatacatcttctgaatttacgtcatgcaaatataattaaattagtgtagattgaattggattgaaatttaatatatgggtgcacttttaatgggtattacccatgaatgaataatattagaaaatttgagctttcatgattaatttttttattaaattagaaaaattcctcatttttattatatagactcggattggtccatcagctgaaaaa

SEQ ID NO: 199154 - DNA, 1710 bp, Cannabis indica
aaagtgaggtacctggctaagcagattatcatcggtgggaagcctcagatcgtccttggtgtttccattgtcagtcagaagactcacctacaaaacaccaaattcaatttggttaattggttgaaaaagaaaggatactattagttatgattttgttctctattggggatcttgaaactaataattgctatgtcggtacttaggagggactcgaacctaaaccttagaggagcaaacaactacccgtctaggataagttcttgtacactctttagagcacataacaagcatattgcgttaacaaagtcctagacaaaaatgatgtgattcagatactcatagaactaaaacttaaaactaataatcatattcagttcatgtatttgaatcagtattatggcattagttaataatgttagaacttacaaaaccatcttcagagatatcgattagctgataatcggtacgattaacatgaggaacctgcaaacaatttcggttaaaaattagagaacaaagaaccaaaatgaatcaaacagagaaagtagtcataacatttgaaccacaacaatgaaaatggccttacatcacagttgtgggatgaaggaacaatatcttcaagttttttcccattgaatatgtcaatccccacaaagtgacactttgcatgtccatgcttgccagttttcgaggtggaaacttcaacaacctgttcaaaagcatcaggaataaacagagcttcaattcatgatcttgaatgttaaagtaaaaacccaattctacaatagataaggcatcaagatatataaaggtgaggaaagtccataaatttcccaaaaaaggctgaaatatagtaatgattacatttgaatgtctcaagattcatggaaaattctaactaataatcaagacacctatgttgacacctatagtttcttgttcccaaatatttggagtgaaggggggagattagctcaaaaatattactgcttaaacataaaggagttcacaggaattttcctttttctaatatatattatccatatttttatccaaagtccgaataggctcaaaacatcgatcaagaaattctgacaattgaactaatctctcttgtattaagcttcaaaaggtaatagcaaaaatcaaatgaaaaacagtaaataggaaaagagaattaagtattcaattattcaacaaccccataattttggatatatattatatataaatatagttcaaagagaatccatgaaattattagtaaccataaacacaataagagtaaaattgaagaaaaacccaataaaggtaaggcataaagacaaaaccgaagatgaattttcacatgatgtaaagaaagaaaatcaatagagagagaaaccttgcatggcctgttcttgatgacgatgtagccattcttacgaatggtaccagcttgttgagggtaggtcttggacgctccggcgtcggccttagattcgaagtggtgttcctcgtccgacatctctctctctcttctctctctctgtaccagtgaaaatgatttctgcgagtagttattctctgtattccaagattttatacaagtctcaaaaatattctcacttccatttattcaggaaaaaaaaaaaaactaaaaactatgttattccaaaaatcgacatggccacgtggcatgatattatatgacacgtggcaagcatagtt

SEQ ID NO: 199155 - DNA, 1300 bp, Cannabis indica
cagttccactcctcaaactcccaaacataacctaaacaaaatcaaaagtattaaaaattcaatttttttttgtaatcattgaaaatcaaaatcaaaccaaaaaacaaaaataaaagctggatctttgatctataattgaagattataacaacgatgagcaagatcccataatcataatccaatgcagcaattgaaatcattcattcataattctcagagcataaaaacaaaaaatacgaaccaaaacaaacagggtaaggttgtaattgcttctctttgaatttgaaatgtgtttttcttcttctttggtccttggggatcgaatgaagcaaacaacaatgttgggattttctcaaaattttgtatttttaataattaatttggaattttggagcaaagagagaagaaaagtaaaggaaaagaattgagaatggtaaaagggtacgtaggaatgaggctaaaatggtcaaaggtggaaactttatatatgtaaaggccaaaggggttgtgaacagtcttactccgagttccggacccaaccacgtcggcgaagcaaccaaccttcttttctctaccatcaaaataaataaataaattattaattactttatttattcttaaaaatattataatactaatgcaatatagtttttttaatgttaaatttaaaataataacaagcaaaaaaaaaaagattttttttaagaaaaaaaaaaagatagaatgtaaaccctttctaaattatatttataattcttaatttatccttacaaaaaaaaatataaatttatgattttttttattaattatataaatactttctaattttaaaagaacttcccatcaaaaattatctttttataattcttaatttaatcctcatagattttttcttttttttactttttttggtaaatcagaagttttgaaattttaagatccctagttaaaaaacgcaaaacaccaaaaaagagtattctttttttttttaataattttaaatatttacatcttaatataataattagttaattaaattctaataggctaatcatttaataaaagatccaataggctaaaatgaacagcaacatttatagtttaaaagtaaagttttaattttttttttcctttttagagataaagttttaattaataattactgataaataaataatagatactactccttagtccttacaaaaaaaaagaataataggttaataggtactattgatgtccgtaaatctctctagtactctagtccatgatctatctatttgctaaatttaaggacaat

SEQ ID NO: 199156 - DNA, 645 bp, Cannabis indica
tatttgctaaatttaaggacaataataatcactttattaattctacttttttattttttttctgaacaacactttataattaacttcgttcattcataacaataataataataaaaatcttcatcaaataataataataataataatattaatgttacattaattcaaaatttcaaatgaaactatggtgaatgatgacaagacaaccgttattttgacacttcgaagactgaccaccaaaccaaccaacctcctcaactcttttatctctatgcatataattctaaataaaatatttagtgtgtttgctaggccatatgacatacttatgttttatgtcatacttttatataatattatttaaaaaatttattcagtataatataatttaatatataatgaaaataaaaaatattcttgatgatatttggtaaaataatatttttataaagagtcaattgagaatatagaacattgttacaagtcaatttataatgctgatgtgatatgtggtattttaggagtaattagcaatcttattaaatcaacatatagagtcaaattaatatagaacataacattacaagaaacctcaaagcatatagagtgctaaaaaagtaatagattgccatattttaacacatt

SEQ ID NO: 199157 - DNA, 1649 bp, Cannabis indica
tttatgaaaattgactaaaatatgcatacactacacttttagcactctattagaaatgcttttagatattctctaatggaagatgtaaatatattgtgctaaatttgacacaaaaaatgtacaaatatatttaacacaacatttgtaattgtgttccaatgcacaataacattttaagatttaaattggtctaaaaaaacaaaatatcattaatggcaatcaataattaaatatttaaaaaattactagtaatattgtaaataaaatatatttattaaagtatgtcattaatgatttgtggcaaaagtgtagtaaaaaagtaatatttattgtgtgttaaattcggcacaatactatatattgtgtcaaatttgacttaatttttagcatgtaccaaatttaacatatgttatagcatattattggagaaactttttattgaaaattactaaaaaaaaaaataacaatacactacctatttaacactctattagaaatgctcttaagcaccttaaggtgtccaatatcatactaacgagtcacattataattggctaacagttaaattaaattatatgaaattcgatattaaaatacaccgataataataccaccctgttgtgatacttgacataagatgtgctttagtattttcctattataaatggttttgtagggcttatcttgagctaacaatgtcagtatgcataacttgccaatagtttgcaaaagttgatgtctgataatatttgtacatttctaaaattaatgattaaaataaacttgaattacacatatttcttacacataatcacatgtaactatttgagtcacacaattaaaagtgatgtgatcataagccttagaaatttaaatgtatatctaatattactcaatttcaaattagtagagtaacgtaactcatgtttcagctcttcatatttagaaattaactttatattttatatatctagattatttattgatttttacaatgtatcatacattagtttttctgaaaaaaaaaaaaatcttcattcatttcaagtatagaaacaattataaacttgaattactattaagttaatgtagaaggaacaatgtagcaaaatgtaaaatgtccgtacaatagttagtgagaatgctctaattgttactttcattaaacaattaatatagcttctttctcaaatttgtgagggggatatttttggaattttctcatatgtaagcataaaaagtgtcattgaatcaagggctatgagagattggtcatcattttgaatggttgtgatggatagatagatggacagtgtttgagtgaatggggttgtagtagtgggagaaactatttgtaacatggattagaatattggtagtccttccattaaggaaatggtggggtcttcaatgcccaaaaattcaacacaagaaaacagaacaaaggctaggctatatgccaaccaaactctgtaaaagtaagctggaagaatggattttcctttgtttgtttgggaagaagaaagagaaagagaaagaaagcaatggtgcccacaaagcattttaaaatctttcataatggggttggtctcaattgtgttatgaaatgatgatgttgcttcctcttttatcattggtatctatctttt

SEQ ID NO: 199158 - DNA, 615 bp, Cannabis indica
gtttgatgaacacccctaatgtttagaatgttgggatgttttggagtcataattttggaccattttatccataagtggatagattacttcatgactaagtaaaggacaaaatagtcattataccttatagtaatagtactttgtttttagtgaaaactcttagataattctagtgagttttaggctaattaatattgaggataaaacaaatttaagtttatcttttttaacaatttaagacaacaccactctcctcacctaactctctctgtctcgacctcaccctaaaataaggaacccaagccttctttgccaaaaatcagagcaactcaagagaagttagcaagatttttggagattgattgtttagaagattaaaggtaagctaattctcctctgttctctttgaagttttaaggtttaagcatgttttcatggttttttttgtttaggttctgctaagttttgctgtttttagaattgagttttggggattaaattaggtttgtttgagctagtgttgggtaggttgggtgttgttggcaaagtttgagctaggtttgagttttgagatcaaacttagctcaataatggtagatttttgttcacagcttt

SEQ ID NO: 199159 - DNA, 958 bp, Cannabis indica
aatttaagagagccttgtgttgaggagactaaatctaaaacatctctataagtatgtgtggtgttagtttcctataaatcttaaccactttgaaagttgaatagttttcatctcattctttttgaagtattttttttggaaagagagagaacatcgatgtgccgttcgacggaaaatcatagattctgcatgcaatcaaggtgattaggcggccattcttcagagagcgccctacccaaatcgacttgagagtaaaacctcattcttttgaagtaaagctttggagaagagcaagaagagagtattgtgaatggttggatcctaagtataggtgggctaggtctgtgtctaagcccacccggtccagagccaaaaaaagaattgctattttttaaaaatacacacattcttttactgattttgaaaatactacattcctaaataagggcttaaatttttatttcttatgacccactaaaatttaagatcagccctatactgtaaaagagttgaagggggttctaaagtattttgtattgtagacgaatatgcaagctcgggtgagcgtgtaagatagagaaaaacacttataagactgagtaatctttagtcttgaaccagtatattttttggtatcgtttttactttactactttttatattttcttgttcactaagtgtgatttgtgttatatttgtgatttgttatttagattttccaacaaatatgattgttttgagttgcattgtgtaggtattgcccttgcaaaagtgattaacattgcaaagatgatgatgaaggcgaaattcaatggtaagactcactttgcggtaatgggagtgttgatacagatggtgattagggtcggccttaaaatattttggaccttaagaaaaagttaactactcgtctcttgttttaataatatgtaatattttttaaaattattaatttttt

SEQ ID NO: 199160 - DNA, 1563 bp, Cannabis indica
aataatactaaaaaaacctaacaccatgctcagccaaagcccattggatatatttacttctctaaatttcattgaattccaaaagagaaaatataatatttttaaactttcattgaaaaatatgatggttttatgtttgtcgactttttatgggcttggttattttttatttataattatatggtatttattatgccttttttttttttgttcttatcaatttaaaataccatattttattaatttttctctctcatcaaaccctaattttctaaattattttttctttctcaatcgctctaactccccttctctttcgactgccatccgtggttttcagtttgctcaccctattcttcttctaacattttattttcctcgacctattccaccagatcgttgctagctccagcagagctatttttaccattaatatataataacatcccactattcttggattttctgaatttgatcatgaaaattaagcactaatattattgtgctgaaattgttgagatcggtattttcgagcatattcgatcaataagtactactgtttgatcaaatgttacaattaaataatttcgaattaatacttgacaaggaagaagatgagaaactaccgcccaagcttaaagatccgagtagtttcaatatcccatgctcaatagggggttcgatacaaacgaaagctttattttatctaggagcaagtatcaacttaatgcccctatctatgtttaaaagattaaaattatgagaagccaagcccacaacagtgactttacaaatggcagatcgttctttgactcatccacgaggtataattgaagatgttttgacgaaggttggtaagttcatcttccctgctgatttcttaatacttgacaaggaggaagatgagaatatttctaacattttgggaagaccattcctagcaacatgaagaatattacttgatgtacagaaggaggagttaaagatgtgtgttcaaaaagaagaagaaactttcaaagtatttgccgcaacagaaattcctacttgttgtcgactggaagttgtaacggatggtcgagaagtcactaccaacaacaagagagagaagtctaaagaacgatttcaaactgttcgacgacgtatgaaaagactgttgtgtgggaattatgaaggtgactctcaatccaaggacaactttaataattgcaacgttggaggacagtttttttcgtttggcacaagggctcccatggatgcaagatgtggattccactcgccgccaccaccaccaccgccatactgacatgacgctcaggtaagttcccttctctttagttttaaatgtcacgttgaggacaatgtgtcactttagtttggggggtagtgaacttaaattttaaattttaaatttaaatttcaaatgtggaagttgactaaaaattgtaataagaggttaaaattaacattcctgacgtattagaataaaaagaaaatggatttggttttaattttttattgatatcttaatggaaaaatagatcataatggtctaattaatgtgtt

SEQ ID NO: 199161 - DNA, 942 bp, Cannabis indica
ttgccaaaaaagactttacaatagagaaacaatcaagcaacatttttccacatccgacttattaaaaaccagcatgcactagtcctgaaaaaccagattccgaagccatattggtaccaatacccactctgttccaacacacctgaacatactaacaagtaaccaagctatgaagaatagtttcattctcagccttacaaatgggacataatgcgctcacctccactctcttagttaacaattgtgtagtagtggggagacaattcttcactccagcagcaatcaagttgttgcagcagattataagcactccttaccgtaaataaaccagaggaatcaaagtgccaaatgtaatggtcttggaaaccgacaacccgtagaggtatttgtaggatcaggttgttgtctctctcattaaacaactcttttattaactcagcatcccaacttaatgagtctatgatcatcaggcttttcactgtggcaatagatagggccggatgagaggagctgacaaaaggatcagcggtgtctggcagccacggttcaccaagaacacttatgttatggtcgtccccaacacaccacctgcttcctttccaagctagctgttgtgcttcctagatactcctccaaacaaaactgggattatttcccataatagcattcaagaatgagccatgagggtagtaccgtgctttaaaaactcgagccatctaggagtctgttctagtgaggagtcaccacccttgtttacccaagagagctaaattaaaattccttgagtttctgaatataatttctctttttttttttgggtcgagcattaatgaagagtaaaacacctccacatggctacatatgtcacaggtacaaggttcttttaatgttattcaacactctaacggtgttccaaattttgacatcaaattcaaaagtatg

SEQ ID NO: 199162 - DNA, 1116 bp, Cannabis indica
tctaccaatctaagacactgttacattgatttaagcatataattaaggttattgggtaaatcatttctacaacttaaactattacttctctgaattcatatacaaactcttacattcattactatataacttcggtcaatcaagagatgtaaacgccaacttgcaacaattcatttccaattaataacacaagttcaaccaaaaaaaatcaccacaatccaaaagccattaaaaatcaaataccttagcattttctccgaactctttcttgaatataccaaaggaaccagggccacaaacatcatgagtcatcaaaacatcaacattgacccaaacattctcaccagggctcaaatgggttttctcagaagacttagcaaaaatcttttcggtcatagtcatggctgtcttgacctgattaaaaaaacaatccaaacccaaaaaaaagtaagacaccatacccatcaacgcaaatctcccccaaaatcaaatatagaagaaaccccaaccgagccagtggtggcgggcttgcgttccgattgctgcggagtcataacagaacaaatcttcttggagaccgttctcttgcatctctgaacggaaaatgccggtgatgacgagaaagaagagagagcagcacccaactctttctgagacaaaaagaaaacatgggttatgaaaatggtaaggaaatgggaagtgggtaagttaaaaaagtcaccttttttagaaaaggagctgaatttggaacaattgcagaagaagccatgagagttgggagaaataatttgcaaaagctttgttggtgaagagtattggtgtgtaacagaggcggcggcgtgtatgcgtggacagaaggagcctcgtgttcgagtgttatgttgagtttttatttatgtgaaggaaattgtgtctaatcagatatacatgtaagcctcctagtctcctactcctcttttcttaataaatctatttcacaaccactattatttttgagattttttcgtttttaatcaagatcgataacaatattacaaaaaaaacttttacaacttgaaataaataaatatataacccaaataaaaaaaaaatcacacaaatacttcttacacacac

SEQ ID NO: 199163 - DNA, 930 bp, Cannabis indica
caaaattacaaaataaattacaaaaaataatactaaaaaaaataaaataattaaaaaataatcataccacatccgcatatatatacctgattcaaacgtaattatactaaaatataaaagttcaaaaaaagtcgcaattcccctctttttaggcttacagtaaatcttttgattagcaacaggttaaaatttttgtcccctaaactttgacatgtatcaaattatgccccttgaacttttatcggagcatgatttgctacatgtcaaaattcaagagacaaaaatcctaataatagtatactaactagctacttttttataaaaaaaatatatatttttaataaatttgtacactaattacttatatatataataccaaaatgtatatttaattcagtaaaaaaaaatatttaagaataatttttttcaaaaaaaattaacaattaaaaattgaaagttagaaaggttacaattaaacatattacatactgatagacttttttaattattcatataatttattttatacatatatctactctaatataccaaaatgtatattcaatttagtaaaaaaaattatttaaaaataatttttttacaaataaaattaacaactaaaatattaaaagttagaaagtttactattaagcatattatatattaatatatacttttttaattatttatgtagtttattatttgagagatacattatggtaattttcaatttattttaatcaccaaatatataatcaatatactaaattaaatacgaatatgtatagtattctaatcatataaaaaatacacatacataacagttttatataatatacaaacatattttttaaaattaaaaataaaaaaccttaaagtatacgcgcggtttgaaacaataaatctaaatttaaatataaaaaaaataga

SEQ ID NO: 199164 - DNA, 672 bp, Cannabis indica
ataattactgccatgcataagatttttcaatgtacgatagtataaatattgatcttatggcctgttaattaataaataattgggaatcaattatatcatagttgataaaagaaagtgaataataaattttatttattttcatttttaaacattaataataatttcgtcatttaaaatatatttttataaaattattataatatattatagtttaatttaaaagggtaatatagtgaatttaggtgtttcgattatgttttctaataaaatgaacaagataaattattattattttattttcaaacaatttttataaataatatattagaaattacaatccaattagggattaaaaagtttgttgcataagtaaagaccaattatcatgtaaacccttcactaattatatacgacttctttgtatttgtactcatgatcaaaattataatttctccgtataattatttttattttttgattgtgattcattcaattcaatccacactagattgtttatagtacattcaatttgcattaagtgcggatttcatattttgaattcaatttaatccgcacaataagtcaaatccaaaaaggactcactgtaaaagattggcaatgagaataatgttcgcactataccactagattcctcacactagatttttgaat

SEQ ID NO: 199165 - DNA, 1095 bp, Cannabis indica
cttacaaaatatgtaaccttgaggactatcaccgccaatttattaatagctaataattatcaatagcaaccattagcctataacaatagattttgggattattagggaggctctcctattgatgataaatgccgtagtgttactattataagattttagaacaaaaaggacatcaaaaccccacgtcgcaacgtgtcctcaggctgcagagctgttcaattcctaaactgccacttgtaactaaaacacacgtgtcaatatatatagctgagtcaaggaactacacatacttcaaatcagagctaataagctattgttacattacactttgcggctttgcttagcaaaaatcagactcgcaaataaaattaagaagaagaagaaaatgagtgatcaagaacagccaagacgaccttacatcgagcaagaaccggtaaaatacggcgacgttttcaacgtcaccggcgaactcgcagagaagcctattgccccacgtgacgcttccatgatgcaaacggccgaagcggccatattggggcgtactcagaagggtggtccagccgctgccatgcaagctgcggcggcccaaaacgagagagccggcgctgttagccacgcagacgtctccgcttggctggagccgaaggtgtcaccgttatggactgacgtgcctggctaccgaatagtaaccgagtcagtcggtggacaggtcataatataatattaacaataataataataataataatataattctcagtggcatgatcttatctcgcttttatgatctttaatttgtgttatatatattaggttgttggacaatatgctcagccaacacccacggctcaactgagtgcagtgagtgaaataacaataggagaagcacttgaagcgacagccaagaccatcggggataaggcggtggatctaagcgacgcggcggcgattcaagcagcggaggctagagccacgggcagtaacgtgataataccaggtggcctcgccgctatggctcaatcggcggcgtccttcaattgcggaattgatctggacgagaacaagattaagctcggagatattctcactgtaagt

SEQ ID NO: 199166 - DNA, 1898 bp, Cannabis indica
agattcagttgttagttagaaagtttgttaagctgttagttgtttgttagtttgtaagtttctttctgttattactttcttgctggtttgtactcctttattgagcagtatatatatgctcctctgctttgtatcttttcagttgaatcaatgagaaatatacttttttatctcttctctcctttccttcttttgtaatatggtatcagagtcacaattgctgtgtggttcttccttcttttaggttcttttctgttcttaactaccattgttatggctcgtggaggagctcaaactcatagctcaagaagccaaggaaatgttgttgatgattccaataggttctctgttcttgaaccaaacaatcgatctcctagtgatgatcctcgcagtccctactacgtatcaaatggagatcagtctgtttcgagcctcgtaccaacaatattgaccggatgtgaaaattacagctcttggagaagatcaatgatggtggcccttgctgctaggaacaagataaagatggttgatggtcaattgcctgaaacagacacagatgatgaggagtatgatgcttggttcagatgcaatagtttagtcatatcctggatgcttcatgctgttccaagtgagattgcagatagtgtgatgtacttggataatgcaacaaggatatggtctgaactccaaaagaatgctccaaaagtctttgaagccaagagatctatgcaagctttaaatcaaggttcgaactctgtcactacatattttactcgattgaatcttattggggtctaattcaggaatttagaccacaacctgttcgtagttgttgtgctatgaaggttattcaagaatatcaagatgaggatagggtttttgaattcttgattggattaaatgagtcctatagcaatgctagatcaaccattttaatgcaggatccttttcccaacatcgacaaggcttttgcctttgttgttcaagaggaaagacaaaggggaattgtatctagaaacactgaaagtgacaagcctgcagagccttctacctcctccaattcaggacacttagctgaaagtgtacaaccccacaaaccaaaaatgatctgtcatcattgtggagttgtaggacatattatggccaagtgctacagacttcatgggtatccaccagggcataaactacatgtaaacgttccctaatcgaaatgctcctgggcctagaaagggaccttcagcaaattcatttggtgcacaaggagaggagcatgctgttgctggtaatatccaaaatgtggagcatgatcttgtggccacttttgactcaatgttagaaactcatgagcatgctaagtcaaaagatttctgaacagtctaatccatctcaatcatctcatcccttatttctcaattttatggtaaaaccctttccaatactcatctttcttgaattcttgataccagtgacactcatcatgtatgttgtaatcttgaaatgtttcaagatacttattctaatgactttattacttatattaaattgcctaatgggtcctcaactaaagtttcttgtcttggtactataattttgtccccaactcttactcttaaagatgtgttatatgtgccagatttccaattaaagttattatccgttactccacttcttgactctggtacatgaatattcacatgttatcataatcattgtgttattcaggacactttgaggacccaattgactgagacggctgaaagaattggcaaactcttctatctgaattttctaaatagaaaaccaaccttttcatttttcctttagttactgattcaagaattaccaatgatactatacggcactatagacttggccacccatcttgtattaaaaactca

SEQ ID NO: 199167 - DNA, 692 bp, Cannabis indica
ggaatcataatattaatgttacatattgaaactaaacatataataattattagacatataaaatcccctaattatgaatatgcacaaatcgattaaattacaaaaacttataatgtggacaaaaaatataattaatatgttaattaagcctttgtttagtatattgccaataatgcaaggtaacattaatattatgattccttccataatataatttacagtctttagtgataaaatgtaatttatattttgtaatcatctgtaactaatttatgatatagtgagtagtcctccctaaatattcatagtgttttatgtgttttcaattatcaaaattaaaaaacataataaaagtaatatttaattttatgtctactcaagaagagtagtcctccctaaatatttttttaagcacaactcgtcgaccaaatggtaattgcacccaatattaatctatctaataaaggaatattatttaattcaattaattaattttgtaatctaattggatcattatattagtgtacactctgattgtatttaatttttgatttaaataatttgtcccaaatggtaagtataaaggtttgtggcaatttaatatcaaatttaataaatttgcttgatgaattcttcataatacgttaaactcttttttcgtttgttcaccacttccactcaatcatactatc

SEQ ID NO: 199168 - DNA, 744 bp, Cannabis indica
ggatgttgagaattttcaacaagctgtctagaattctcaacaggtgtctcggggtgtctaaaaggccactttgcacaaaataatcgaaacaagaccattgtgcagggtatctggaaggccattttgcacaaaattatcaaaacaagactattgtgcggagtgactataacttgaatgctattttactaaacactatatcatatttaagctgctcttattattttcagtttgatacatgtgctggtgggattgaagattaatttttttcttagtttgacttgcaactacatatgctttcaggcatcagaaatgggtatacggattagggaaatggtgtcacaagattaagctgaacaaaatattttcaagaatcacagggaagccggaatcacaggtaggacataatcctcctcctaactcatttactttatgatgccctattaattttttttattttgtcatttgtagattgaacaggatacagatcgtgacaatttcatgaatgcctgggaagccaaggaatatgggttaatcgatgaagttattgatgatgggaaaccaggattagttgcgccactttcagatgctgctcctccaccgaaaacccgcgtttgggatatgtggaaagttgaaggaagcagaaaagctaagaagaatttgccatcagaggataaaatgttgcagaatggaaataatggcggtccatccgaaaaggaaacacctgcttctgtatgattagtcatg

SEQ ID NO: 199169 - DNA, 2042 bp, Cannabis indica
attataataaactatactaatttttttttccaaactaataaacttacactaaaaaaaattctttactcaaactaaatttttcctagtaacaaataaacacattattaatattgaatttaaaatgctataaaaatttatgaatatttattaattaaaatttcaattcaaaatatactaaagacatttcatgaaattttttagctacgcacactgtaatatcactaaaaataaataaatttcacaaaaaaaaataataatcaaattatacatatatagcttatatttcaaaaacataaacaatacctaactttattaaaataaaatctaatacttagcatattcaattaaactaacaaatatacatttattaaaatcaaaatattcacaaatatataaattttaaatatgaaaaaaaatacttatacatttttactctaatctaacatttttctctaatatttatacatttttaatgaaatttatcataattctacctaaatttcaacagcataacaactataatcagacgttccgaaaatttttaaaaacatgaaaaaataagaattaaaacacaaaatacaatacaatacaaaaaaataacattaatatataatacaaacattatccacccatccggctacagtacatgtatttgcagaacctactttactacggatgaaaatttaagatattcaaactcatctaacatgcatattccacccatccgacaacacaattaatcgtagagcctaatttcctatggatgaatatctaagatattcaaactccactaaataatttttttttaagtttttgtgattatacttttctccattaaagctagttatttttttagaattttttaattaaaattataatttggaccaaccaaaaattgacatgtggcattttattagtatttaacagaaaagttagaaaaaagactaacggacttacaaatatgttttttttttttttttttttttagttttgtatttttacaaaaataaaaaacaacaattttactcttttttatttccttaattacaatttgatggtggtaaaaaaaaacataaaattaacatgaaaacaacttacaaataacaaaattacgataaaaaaataacaagaaaataacataaatatatttatagtctgtattttttggtaaaaaaattactgttaaaaaaattaaaatttcgtagaatcgtaattagtttttttttttttttggggtatttattaaaatatcttttttaaaaaatggattctttggctaaggactcctaagttaaggcttagcccgttttaatcaaaattgacctattcttatataatattatctccctctcaaaataatatgtttccgttatataattttgtataggatggaaataaaatacattttaaccttattttgtaatagaatacttataataaggatcaaatgaatccccttcaaattaaataataaatatataaaataaagaccaatgattcttccaatatacatactaagttatcattaggtgcattatatatatgtttagttatatttttaatttttatttttgttagatgtatttttaaaattttataaattaaaggaaactacttattaattttttattttttttaaaaaataatatttaaagcctaaaaaatttgagaaaaataaatataaaatttgaaaatattaaaattgaacatactcccaatattaaaaataataataaaaaataataatataatgttacaaataatatattaatatttttttttgaaataatatattatttcaaaaataatatattaatatttatatatttaaattaatttaaaataaatagtattaatatttataaaattaactctaacaaaatatttttatattcttaaaaaattctattaaactaagaaatttcattaaatagaaacttttaatataaaaatatatattaaaaataaatttaataacaatttttaaagaaattaaattatccttaaaattttcaaataaatagtgtaaattcgtttatcat

SEQ ID NO: 199170 - DNA, 1432 bp, Cannabis indica
cttacctttttttttcttaaacatcaatttacattagattttttttaaaaaaaaaaatcaatcaccgtaatcatcattctcagccattgccatcatccaaaattactgttcatcatcctcaacatatccaaaaccagattcaagaaaaaaaaacttaggaaaaaaaacccaaaaaactcagatttgtacaattgaaatggttttccataatatatacacaaaacatattataataccaaagcatgaaacaaaatgtacaaatattgattctcaaagttgcacgtctctaaattatttttccactagatctatctctttcaatcgatcttctcttccaatctctaagcgatttccattcaaatagatctaaaagtaaatatcaaattttttattcaaagtagaaaaaaaaaaaaaaacccataaattggttacctgtttgccaagagaactcatccgatgcatcaacctcgaatttaaaagtctcaaaatggaaagccacatccttattgtaccttcctgagcttgcggtggtggttgcctaagtataggaaggtggtcgatcaagtcgtttttgaagactcgatctgcccaatcctcaatcgttaatggtgtgtttctctgaatcatcttttgtatagctttcatctatgattgtcaaaagcttctcaaactacaagttaatgtgtgcatgtgtggtaggattataatttggggtttttcagctttactaatagatagagaagcaaagttatagtttgcaatagagagattgagaatcaaatggatggaaataaaaaaagagaaccaaagggatgataaattttaaagaagaagaagaagaagaagaaaaaaaatgattttttaattttatgagatatttattaattttattatgtatttttctaatttcaaaatgcctaaatgaattttgaaataagagatataatttaaatgatgtgaactaataaaagggtgacacgtgaacacttggaagaaaatggagagatacttgcagaagttataggagtgtgacggaaggtatttttaccaccaaaaatacgacttaagtacttatctgctacatgacataaaatttaaatctttatgctacaaattactctaaaaaatatatattcttatagaaaagaaaaatattaatcttttggggacataaataaatgaaaatgacttttttttttttatagaataaatatgaaaatatgtgaaataaaaatgaaaattataattttacaaagacaaaaataaaaatatataatggtaaaaataaaaaaaatttattttgtgggagtaaatatgagaatatgtaaaaaaataatttattaaaagttaagtggagtcatgtaatttcacatgattccactctcattgcttctgataacactagtgtttaataacattattctattatatt

SEQ ID NO: 199171 - DNA, 595 bp, Cannabis indica
aaagcttcaatggttaaggactaattatatctcttagttgtatgggtttaattcctagagccatcttttttaaaaagtaaaatgtaaatattaaaaacaaaatacttttatgagatttgaagctttattttctagtaaaaatataagatggcttaactaataaaacaaggttaatattttattaatatatatcacctttaattataaaattataatctaactaaataaaatataaattctttatcctattttatttacttgccacataacgtttacattaattgtgttataaaaatacattttgtgcaaattaatctaaaaagttaataaatatatacttttttttaatgaaattatataaaaaaaattattaaattattaaataaaaaagtttaaagcggttaaatacattaattaatggtaaaaaaagtaactaggtatacgtaatttctattacgttgtcaaatttgacctatatttatatattgttacaaatttcattacaacttttaacatgtgagaattttgacacatattctttactactattggagcatcatttgattagagtaagctaaatataataatgtaccac

SEQ ID NO: 199172 - DNA, 1051 bp, Cannabis indica
tcacttgcttctctctcatttttggcactcactttcttagcctatatatatataaatacatataatattaattacatatatgtatatatataaattaaataatatagttgaattaagaatattaattaattaattataattaattaccagaccaaagatggaggccttcatataacaaaaactctcttttaaggacactatgaaagataaacacccctttttagctcccattgacgacttattattattattatgatcaccaccgccggcgatggtcgtggtagtcggcggcggagaagctgaggatgaggatctgatctcttccattaattcaatagagaaaagacaaagacagagagagatgatcatgaagaaagaacatcaccgtttcttgtagctatcaaagtttgatgattttcatggctacctacacgtggaggcttcaaattcacccacgtttccaaagcttcgagtagtttttttttttttcataaacaattttctttgtcacaattctcaatctttttttatttattacttttggttgtaacacaatgacacaaaaatattaatttaacttataacacactaacaatatactaaacatgatatgaaattttgcgagttcttagagaaagtttatgccaatcatgttcgtgtccatttttatatatatttttagtgtccaactatagtgactccatattatttgtagcagtcagtagtcccgtgatctgtactgggaaacataggataaaatttgtgcaaacattacttgaggaaggtcaagtggcatgattctgaaattgtgtaagtatgagactacacagttaaagagtgcttaaatgaattgattagtactacctatatcaaagtgcatcttattttttagtagcccatcacgaaaaaatactctacagttaagcgtgcttgacttgcagtaattttaagatgggtgaccttctgagaaattttctcagaaaacgtgcgtgtaaggtgtaactgtctaataaaagcttgaaacgggtacgttacattatcaacttagatt

SEQ ID NO: 199173 - DNA, 586 bp, Cannabis indica
caaccaaaggatcattgtgtggacagataacatggtcagattcttcctcactaaaggatatgactggctctgatatgcgcagttgtttaggctttctttcttccacaactatcactttatctttttattcatgttgtagggtccaagcatacctctctctagcttcgttcaagtctctaacgacgtgagggcctccaataatcactcgtaagtgtctgtccacaggtgtaggcattaatcaattgtgattgttggttgggcggccctctgatcttgatcgttcttgacatacttttacaagtgcgagttatttttcctgatgagatattcaatttctcatttcagattattgcacttgctagtgtcatgactgtagttcgcatgaaaataatagaatttggtggtatcccttttgctcatgtcttacttcatgggaggaggttttgtatggcaccatggactgggtcgttgtgaaaatagtttctatatcttcggtaagaagagtgaaagtagtaaactttgaggaattctctcgaggatgttgttcgatgttattattgaacctgcttttcttcctattaccttg

SEQ ID NO: 199174 - DNA, 1576 bp, Cannabis indica
ccagaatccccatcctctgttttcgtaaagcgctctcgtttcaaagaatcagagccctgctctattctctctctcttcttccccctgacttgagatgaaaaggaagacaaactgttctggttactctcagagccagctttttaactgtgaagttgaagttggaccatttgatggctttggagatcggccacctgcatgcatttctactcttgttttatttaacaattgctctacttcttcctgtcgttcctgcaagagaaagagaattagatacaaccaattgcttcaaatatatgagcaaaaggcaagataacagagactatcaaagcttacattaatataatcttgatccgtcagccaccataaacacttgtttgtgatgtcataaagctgtctgcacacaaaagacgaaataccagatggaagttcaacacctttaggaaggaatgcaactttacatggatgcagtaacgaagctgcaggaatcacatccttatgaaacgaatagaaaagttcattcggcgcagcatccaacaagatgcctttaccaagctttacttcagctggacgataaagccaatttacacctaatttcaacttattatctttgcctgttgttacccaacgaattattccaatgaaaggaggtgaatcttgaggaggcttaaacagagcacagtcaccaacggtgatcttgcgtccgtcctgtgaagaaaaaccagaaataaacagatataagggaaaaagaaaaagaagagaaaaatgtacagattatttatctgaaactttaaaataatataaaatacacagataatttatcttaattaattgaaggccaagcaaaacatcaagaaaatacatttagtgaaagaaaaagtgcttattgcccatttagaataaaattccgatatacaatccgtgagaaaaaaaagaaagaaaaagacaaaacaagggaacgcctaaagcaattagagtcatattctcaatttttctgctcgtcatcacgccaacaattcgctcatagttcagaaattgattcaattccctaatttccatcacattaaaattagaaaaaaggtgttatttttcttgattttagccaaaacacattctaaatcgcacaatccatataattgccatccgtaaaacaatgagaacaccagaaataagatcaaaacaaacgaaaagcatgtaaaaagcaaaatcaccgaaacccagaaaataaatggagaggcaaaataaaaatcaaaccttgtaaaacgaattgggtgaagatgaacacgatgaagaagaaccatcgactgcaactacacgcctagggactgtccacatgtgccgactccgtttcccctcttcaccttccctcccatgcatagccttgcattttccccaatttcagcctcgatcccaactttaatcccaacgagtaccatcaatcctctatccccttcaattacacatccacccccaattcaccaattcgcactctgcaaaaccctagatcgaccatacgaacaacaacgtcaaataatcagtcaaaaaacaagcaaaaaacgaaaggaaaaaaaaaaaacct

SEQ ID NO: 199175 - DNA, 1016 bp, Cannabis indica
attgatttttaattttttttttattttacacacatttaagttgtattttctttagcatttgaatataaatttttagtttagttttggataatcttaagaacatattacagttaaattattaaactttcttaaacactaatatattgcatccagtatttactttttattattaaaattataaattatattatttagatatagataataataatctcacctaataactaatatattttttcttcaattattaattctatcgtttttaaataaaataaaaaatacataacataaaatttaatatacgtgctttgcacgtaattttttactaattaaataaatatatgtccatacaaccaaattcttttattttttcaaagaaaatttttcaatctcttaattttatttcaataatcaatgtcatagtaaataatttcatcggtacaaacaaaagtatgaaaactattgagattaaaaaattattattaataatcaataatatgagatctgaataaaataactcatcacaaagctcaaaaaaaaaaaaaataatataagtgtatggaagctttattactcattcacaacacattctattttttgttaacatatacatagcacaaaataagtattctacaaataaaaaaaaaaaccaaaggccttaataacctaaagcttttgacaataatcctctgtgaaaaaaaatacaaattaatttcagttttttacttaataaactcaaatattttttttttaaaaaaaaaaagagaaaatcagattaaataagaaaaacaaataataataaagcatacctcctatttatgggacctccaatgtaagagccgtctagggtcagtgcttggttggaggctaagagatagctggccaatggagctcgagtggaaggaaaagagtttttaatataatgaacttttagtgacgacaaaaataacacttttagccgctacaaatatcgcccctaaagttatcaacagtaaaaatcccgcgaaaatacaaca

SEQ ID NO: 199176 - DNA, 1841 bp, Cannabis indica
aattcaaggaattggcactgtcaaaattgaaatccaagatggaaaattgcagagtcaggtatgtccctgaactcaaaagaaacctactatctattgggatgtttaacaaatctggctactctgtcaagattgaaggagggatgatgaaaactggccatggatcccaagatcttatcaaaggtcaactgaacaatggcctttattttctggatggtaaaacagttattggaagtgcagcacctgatgtacacaaccctacaacaagccaaagccgactttgacatctcagatttgcacatgtgagccaaaagggacttgaagagttaaacaaacaagggttgttcaaagagaaactgtaagaaaggttagaattttatgatgaatgtgtgcttgagaaggtctgcagggtaaaattcagcaaaggagaacacacaacaacaaagaaactagcctatgtacactcagatctttggggaccatcaagaattccaaccatggggggagcacactgtttcatgagtatcatagatgatttcagtaggaaagtatgggtatacttgttgaaagataagaattatgccttggatactttcattgagtggagaaagcttctagagaatcaaactagtaacaagcttaaggtactcaggatagacaatggcctggagtactgctcaggggaattcaagatgttttgtgctcaagaaggtattttcaagcacaaaatagtggtgaacacaccacaacagaatggcactgcagaaaggatgaacaagactctgttagagagggtgagatgcatgcttgtaggggctggtttggagagaccattttggggagaagccctcaagactgcatgctatctaataaacatatgtccttcagtgcccaacaactttaagacacctcaagaggtgtggacagggaagccaccaaattttgaacatttgagggtgtttggttgcacagcctatgtgccatcaaacaagacaagatgaagccaagggctctagggtgtatgtttctgggatatccagaatggtcaaggggtacaaaatgtggtgccttgaaccaggacacaagaaatgcttgattaacagagtgttgtgtttaaggaagaagaaactgtttaaacaacactgctggatgagaggcagcctgaggtggaccaatcacctgacaactctacacaagtagaagacacagttgaggatgagagtagtcatggtgatctaattagctaccatctagcaagagacagagaaagaagagaaagaaaacctcctaataggttttactatgctgacttcattgcctatgcactaactgttgcagaggaaatggataactctgaaccaaccagctatcatgaagcagtgggatagcttggttacaaactatagatgaggagaagacatctctagtgaagaacaagaataatggttagaaaaccataaggatgcaaactggtaggctgcaagtggattttcaagcacaaagagggaactcctggtgttgaagccaccagattcaaagcaaggttggtggtaaaggggttaacacagaaagaaggtgtagatttcaaagagatattctcaccagcggtcaaacaagtctcaatcagggctataatggccaaagttgctagattcagtctagaagttgaccaaatggatgtaagaactgctttcttacacggggaacttgaggagcaagtctacatggaggttccagaagggtttgacaggaatatgcaaaccaggtctgcttgctcaagaaaatcactctatgggctcaagtaggctccaaaggtagtgaaaatctcaggtttgattcctaca

SEQ ID NO: 199177 - DNA, 589 bp, Cannabis indica
tttttcaatcgtcctccttaaccgatttagtttttattagtagcttcaccatgattatatttaccaaatttgatcttcaccaccaaaaactcatttaaaagaaataaataaaaataatgaaaaaaatctttagtcaaataatagataaactcattcgagaatagttacaatcaacgtaggcaatttggaatttgaatgtaatattcgcagtatggtacttttgtacatatatatattaattgtcaatatgaaatgatactcaacatgaattaatgttccacgtgaaacacagccaaatctctctatccacaagaactgtcttgtcctggtttacctaaatgtctttatcatttatttagagtcgtccactccatctccataaatatatatatagatatagtttttatacaagtaagtatgtatgcgggtcctcaaaatcagcatagttttgatttgagccacatctcacgccgcccatcatgatattgtatggattataatgaagcttagctagccataccatttccttttgtatgcagcttggaaccaacaatttggtgtgggaagtgggaactatctttacacattt

SEQ ID NO: 199178 - DNA, 2277 bp, Cannabis indica
aaatataaataaaatattaatgatccaaacatcatgggaaattatttgagaatactgcaccatcaagtaaacttgcatggataatattatgccacgtcatcaccacgattgatccctagtgtgccacgtaatcaacaactttaagaaaaagattcttgttataatcatttctctccaaaaataaaaatgaaaaagctactctttttggcatgacttttgccacataaagtgcttatgacagcagaaaaggaaagctttcatagtttttttcacaaatcatgttttgttggatacccacaaagacatatagcccaacttagattctcaattgggcatttaggtgtccaagttgtcaattttagtccacatggaaattatagtgatttgattgatagtaaaataaaattatgttattagtgtgtaagtttattttgagcaattagtttaagtttctatagtttaattcaaaattgttgtttatgaaaattctttcatggccataattgcaataaaagtggctccaagagaaaaagacaagcactaaagcaatgagggaaaaagaaaaaaaatgtggaaaaaggtagtcttttcatattgttggctatttacatataatgattatttaaccaaaaaaaaaaaaaatgaaccttaaagaagaaggaagatggctttttaaaccccccaacaaaagaaaatgaaaattacccttttgtgaaaagaaaatataaagaaccttttgggagtccttgaatgatttcgcacccaaccaatcatattttcaaaatgcccttctctttaacatcttttgccacaattattgtcacattcacaaaaactatacactatacaaaattcctcttacaatatagatttttttaacttataaataaatgtgttttagattaagtgatctaaattgcagtgttatatatgcgtttctcttgggtgacatcaaacaaactcctttttttttttagatttcctctaggattagacttcattgactcatctctgggctccgacgtgcccttaactagatgcttggtagtgactaatagacaattgttacttgggcggcctagttcctcctttgctctcggtgtttttcttctctagtgactcactcttctaaaactcgacattgtgagatcctgtcaaccttgaaatttttatttgaatccaaataatcaatggagatgatgttagatgtggtagtggtacttttgtggcaatatatgtgttatcatcgatagttagaggcagtttgatagtcttttcaatttttaattttcataattaattgtgattttaaaatatagaatagaaaacaaattcttgtaattttaaaaatttaacggtgtttgactaatattttctaaaaactatttttaaatttttacttaccgaaaaaataatactttaatattccacaccacagcacaccacgaactcagctccacccctacctcagaccccgaactagaccccagaatccggacctggatctagacaccggaccaaaacccagacccagactcatgttggtttttatggtactaaattaggtatgcaataaaataattcgtattatctaattatcattgtagcaaattgttttctttttctcaggtaatttcaaaaattagcttatgaaaatcatgatctaatttctcaaatcgggcttctatttatagtagttaaatccatattaattaaatcatagttaattatttaaataaataaatatttataaccgaatttggttactaatatttatgagagaatttctcaactacttgaaagaacatctcaactaatagagacaaaactaattaattaattaacttaaaaagacaaaactaatagagatatacttaccatgtctgaattaagacaatgatggtgtcttttgtctcaacaaatattatcttaactgttttttccctatttaattaatttggaaaaaaaatttatttattataaaaataaataattactattttgctaattcaaatagatttttccgaataacattatacaactctttatcccttcccttgaaagtgtttcaaggtggcaattcggggaccatggccctataattttaagctccaataaactagattatttattgagtctcaccaaccaaataatttttgtttattaattccatgattactccactataaatatggagttaaactcttagtaattatagaattatatgtactgaattttattgcagcgtccattcatataattaatttcagtgattag

SEQ ID NO: 199179 - DNA, 609 bp, Cannabis indica
gcagaaaagaatccatttagataatcattttatggctccgatggcaactcgatcaacacgttcttacttcaagagaaactcccatcgaaattcactatgaatctataggtacctatcatgagatttatggatatttcctaatagtaagaaagtataaaaaaagtaattctttttatatatgttccaactactgctgctgattatatttctttttatcacgagatcgagatgctatacaaaggttttgtcgtgaatcatcgtatgattgttagaaattttattgtcatgaaaaataaatcaagatatattacaattcaattgtaaaaataatataaatgctaaaacaagaaattgattataaaaatgttacaacacatatacacactatatgtattaaatatataagtaaggtagaagaagaataattacaacacatataatatttataatataatataaaaaagaagatacatatatatacactcactcgcaaccttgagtatagattagtatggatcattatgacttgaacaaggttaagtataacacctttgtctaaaagtttatttccatatctctaatcaccaagagaactctctaagaaatagt

SEQ ID NO: 199180 - DNA, 1113 bp, Cannabis indica
cgttagaatatcttatttcaaactttcatcagcttgagaatttgaccttgtgcgatttggtgttgttgcgatcaaagcacctcaaaatctccaatcatcacttgaaaagtttgaagttgaggttcatttccccatttaaagacgaaacgaaagttataattgaagctccaaaactagtatcattttgctatgaaggacatatcaatcataatatatcaatagggtcatccaatttgttgaatggaaaattcatcattcttgatcattataagaaatatgaagcaaaatggtttattgatatgatgatttttcttgtgaatctcaattgctccatgaatattgtgagcctgcatatttactcagaaaaggtatgatgattttgtgttgttattttcaagtttttactattgtctatttgtctattttaatacattttcataattctatacttgaaggctttcatattccccccaaaaatgaagaagatatgtcgtactcctttagtgaattgggagcatcttagagttttcactaaatgtaaactagagatggaatcaaccttgagagatgctctgctgtggatttctccttctttaaagagtttaactatagtggaaagggcatctactaattgactgtcatcaatatgttttctttctaatattgctacctaagtacttttgagattgtatttagtgtttattggtagtttttaaatggataaatttgcatgtactttgcataagaacgaagtttgtatttcttacacatttgcttgtgcctgagtggatagaatacttctaacattgtagattagaattgctaattatgaagtttagctaatttgctgaggaagagtgctactttgagtttggtttgtgagatgttgtactcttattagttcttaattgtataatgttagatcctaatgagaatttctgtccctttttgtgtaacccctattttttgttctttaattagttttactgtacaaaatactataaaaagtaatgcttctttagtgaaatgtaatggtaatgataatagtgatgtaatacaataagaatggtaatgaaagtgataaattgatcaaattgtctttattttattttt

SEQ ID NO: 199181 - DNA, 1336 bp, Cannabis indica
acccaaagtggatagaatgctttataatgaagtcatgggcttgtagcgtcttgacttcatctttgaatgcttaggcgcattctttgtccaagaacctcctcttctattgtaaaggtaagatgtttggatcgatatagagcatgggttatcacggaggggtcgatttttaccatgtctccatgtgaccatgcaaagtggtccaagtttgcccttagaaattttgtcagtaatgatcttatttctggcgctaaacccttcccaatcttcattcttctagatggtgaagtcggatcaacctctacttcctcaaactataaagttgtatgtaggatccctaagcaaggatctatgtctgcatccctgctttgggctggactttattgccccttgctaggctcttctttagagctcttagcgggaatcttctctttcttagctttagacagggtcaggttataacactgatgggcagatttttggtctcccctcaaacatcgtactccatgccttgttgggaatttcaagcatatgtggtaaatggatgttatcgcctttaggttgtatagggctgatcagcctatcatggtgttgaaagctaagatagcatcaattacaacaaactgcaccatcagagttctagtggttggattttctccaacagtaaggggtaatctgatgtgccctatgggtgcaatgccctggccaaagaagtcatacatcagttgactgcaaagtgccaaatcagtaagttggagccccatctcttcatatgttcatttgaaaagaatgttggaggaggctccattgtccaccatgaatcttttcacaatcatattctcgatttgtgcagtaatgaccagggagccgttgtttgagaaactatcttgggcagtatctccttctatgaaagagatcgtgggctctccaagctttggttgcttagagcccttttatttgacaactaagatgttgcttttacgctcgtggtagagtgtctaagcatagcgctccctagctttgctagtctcgcctacaatttggggtcctccaatgatgacccctaagtgccctgccattagaggtggcataaggtctccattttaggaaccttgtgcttgagtctagtcgttctgcacataatgacacaaatggggattgttcatccatataaggaatttaatctccctcttcaaattttgacagttgttggtgtcatggatgaagttgttgtgaaactgacagatcattgatatgtccctcttgctcaagtcctttttgatgggaggtggccttttgtgtgggactgctcttggagttgccatgaagatggcctcag

SEQ ID NO: 199182 - DNA, 639 bp, Cannabis indica
tttttttttttactttttctgtttatgttgtttacctatttataaggaaaatatttaattggaacttgatgatgaaatgttaaattaatttaatgatgagagacaatgattaaattagtcaaattattaattaatattatttaaaaagttacgtatatatataccacccaaattgatcataattaatctattattttttatatcatctgctagaacttttcatttctatattcttagctaccagaagttattttttgctctccagttaggctcacgcctctctgagcagaactttaaggcggattaagtttgtgcctaggactcattcaaactcagggcccaaaatatccgatacatactaatacttacttacatatatatatgaaaaaaaaaatcaattttataaaacccaaaatataatacccttgacacatttccaatcccagtgcctcacttaatcagtagaatacaagaaatatatagttaagatataggagaatcatcttataatatttaacttttttttttttaatttatgatttgtgttgcttcagtaatttctatgtagtttgttatgtaaattttggttgctccgttagttactataggaatttgtacgagaaattaattccataaaaa

SEQ ID NO: 199183 - DNA, 1828 bp, Cannabis indica
gttggatcagctagagcacaagctactttatattgcagtagaaaagagataaatagggaataacaacataaacatgagaagcacacaaaccataaaacttcttaaccataaaacttaaagaaaatataagttcaacatcccttaaagagaaaaaaaaaaatcctttattggatattaatttttgattcatataaagattatattgtttggaggggtgacaatcaaccagctcatacaccaagtcactatggtcatttatctttttgtttttgtagagactatggtcatttatcttaatatagcctaattctgctatattattttccaactttacctgcaaaggattagattttggaataaatttattcaaccagcattaacttaataaaaataaacactcatagtaaagtattaagtgtctcaataatcttgctcatacatttggaagcttcaattataaacctagaagttaatttcgtttttaagagctcctcgcctactaatagtaaagacccatgtagataaaattacaagaaactaaaaccatgaatgagaattgtttacacatcaaaaattgctttaccaccaccccaaataatattttataagcaaagtatcacaacttgcaaaaaatatgtactcttcaaagtttttatattatcattctaaaatctacttacaccataatttcatcaaatagagaaaattatacatgttcttagttaaaattgccaaaagcacatttgcttcttctctttgagctttattcataaatttgatcactggattaactttatcatcattcacaagttgctcaaagataatcttagtcactactattaccatccaattttttctttatttcttctgaataaaacctattcttgaaactataattgctagtactgttagataatttaggaccacaactattgctagaagaatgagcatggaagctgaagcatgaaaagattgcagacaagagttaagaataagaatttcataatgacattctccaatcaaatttaattttcaaaggataaaaaaaccccaatttcgaattttaaagaaatttaaaaataattgagataaaaacaaaaaagcaaaaaaacccacttatgtttaactctattggatagtgaaatctgtaacaatatgaacccaaaatatatataagcaaatataaatatagcaacaatgcaattaatcaaaatataccacaatcagcaaagattcaatgaacaaagatccattgaattccaaatattcgttgacctcctaggatatcctccacccaaaattaaaacctcaaattctcaatcacccagcaaatttttgaaatgcagttcaataggaatcagaatcaaaccaataaatcaatcaaaatatatatgtaaaaattctagattgaaaaaaattataacctcattgatatttgagacatttacgaagacagagaaatttgagaggagaactatgaggaaatagcccaattgtttccacaactaaaaaatcaaaaacaaaactccccaaattcaaatgatctaccaatgtcacaacatgcattgtaaaagaatgacatacctgatagagtgagtaaatgttttttttaatggagtgagcaaagatttatacctctttaagttcttatccttcttctccgtgttcatcctctttaacttcttcttcctctttcaaataagccatttatttccatctgatttaaaaatcgtttctagatttttcttttcttttcgacttcatatatgcgtacattaatcaaaatagagagcaaaacattaattagaattaattcatttttcttaac

SEQ ID NO: 199184 - DNA, 1484 bp, Cannabis indica
tctccaatcttcaaaatttcaaattatactaaaacacactcaaattatattctatctggtaaatctctgataagaccaatttacaatctaaacattactctatgatgaaacagatgaaataaatccacttggcaattgaattaaaagtgacaaatattacatcaaagtgatcttttaaagacgttcatcttaaaagatgacatggatagtgttgggatgacttattgactaaagactattatgattggctttgctatctcgagttgaatgttgctctattgagttgcatatcatgacatcaaagctctatttttgtcttgatagtgaattgctgtcagttttatatgttcccgaacccatcccattttgacatcctgttaattaataatgacaattgctaagtgtaaatttattgtaatatctgtacaggttaaagggttgtcaagagaagatatagaaggtcataatgatctagttcttgcactactggagaggattgaatacttgatgcgacactaaatgttgccaaacaaactggaattggaaaacttctggatctcacaaaaatattaagtttgactcatcaggtgataatttttcgatgaatttctgaaaattaaatatacaatgattgtaccttttttattctaaataagaacttttcattccttatgttagacgagaactttgacgatgagtttttccaacaaagtgaagaatcactgtaagaagatagatagcttggttaaccctttgaagaggagaaatatcaatagcttgacgcctgaccacaccagcagatccaatacgagtggcatcttctcgacgatagggcactgagccttcctaaacctgaacatcctcgaagctccaatgattgaaaagcttcactttgtgttgctcttgaacaatcgcttctgccattgttagagtacagtcgccgacacggtacttagttttatgctagatattttctactttattttaaaataatacaataaatgattgaaaaaaatattattaattattatttgagattatttttacgtatattcaattaatgtaaattaagtctaactttttagaaaaatatctatttcttttcttctatacaagaagttgtaaaagtttgtaagtattataaaatatattaatatcaaattttgctttggtactaagcataaaaatggaaatgaaattgctaaaataatcccttcagcaaaaataaattttatttctttataagaaacccaaaacttttaaacttcttgattattgatgtgaatgatacacaactttctccaatatatgtgcatagatagctttcaagttaatgatatcttgtattatatattttgtgtcataataataagtacagatgcattttttatcgggtgaccaaatatgaagaagatttgcattcacatccttttctgcaattcctctgaataaagccataaaatacaacattaataaaagaaaat

SEQ ID NO: 199185 - DNA, 1119 bp, Cannabis indica
gcggcacaaaaaacccatgctaagactcctttgttgagaacctagaaattccaacttctaccaacacaaaaatgacctcaaatacacaccaaatcctaacaaaacatgcatatattcaacttcataactcacaacctaaccaacaacaatagtaagcttaaagaatgaatatcaagctctaacaacaccaaaatatgcaattaaccaagctctccaaaaatcattacaaaccaaaagctttacactcaaaattcaaagcttcaaaccctcaatttaacactccacaaattcaagctcaaactcaaaatttaaatcataattcccaaaaattaaatttcaatttcaaccctaaaatttcactaaagcatgctagatgcatatcttataaacctagaaacataaacaacaaagaaatcaccaatttcacatgaattcacaccaacgtgcattcaaaaaccttggcacaccttgagcacaaaatattaacacaatattcagcatctaaattcagagttaaaaaggtgaagcaactacctcaagcttcaagcaccaacacttcaattccactccaaattaagctttaatttctttccaaaataaaccaataaattgaaaaaggaaagatagaaaaacaagagagagcggtgcatccaaagggtagataaatccagaaattcaaattctaaattctactaaattcattttgttgaataatatggttaagtggtcaaatgactaaaaagcccctagggctaataaaaccacaaatgcatacaacaaggggaaaaaattatcataaataaaacacacaataattttgaaattattcctctatcaaataaatgccaacataaaatactaaaaatatattttgagctccaaccccatttcagcccaaaacacgtggttgtgactataccacgtcgacttgttagaaaacacttgcataaagacaaaataaacatactatataataatatagtccataagcaggatatatcatataaattatgattttacccttctcaagtcaaaattacaaaaatgccccttgtacaccaacggggtcttaaaattcaatttattgttataattctatatattaaattatataataat

SEQ ID NO: 199186 - DNA, 855 bp, Cannabis indica
tattttttctttatttttcatttcccttttcttttgtcctttactaaataatctcaaatattacgtctatctgtttttctctattttattttctcccgtttttcttctctaccaaaacatagagttaaattagaaaattaatctaaaagtatcatacatcaaaaagcgtgataatataataatagtaataaaagcttagttaatttttaaaactaaaatgactgtaagagcactctgaacaagctctctactatattcttcaaactacctcattaattttattttattttttattttacctcacacttttacattatatcatacactaatttttttattttttatttacattatttaaatatgatactttaatatatttcatttattttataaaagaaaaatataataatacaacacacgtatgaaaaagagttaaataaaaataataaaatatttgtagttcaatgaatagtaatctttatatttagttaagcactttttattgagttaaaaaaaaattgtataaattttagcttatttgatggaagctcaaaattataattttttttatgtatattttaatgattgaattattttaactcatctattgaaagtactctaaatattcatattctaataattgtaattatattttataaaatcacgtgtaattattgttaacaaattatatgatgtgtgtaagtatggtgtgtttggtttgtaagacaattaaggtcaattttaaagtttggtttgcatgccattatgaataattttgttttgtaagattatttgggttttatttgactatgttgagaatcatggggttctatctcaaaaccaatgtcatttgct

SEQ ID NO: 199187 - DNA, 1405 bp, Cannabis indica
aaaaactgaaaacacaaccaacatactcttagtatttttatcactagttttcagcaagttaactctagatctttgatgtaaataaatttctttttcatattacaaattatcaagataagattgaagatttttcaaattatctagaccctcattagttaacatagccttagattgcaaaacattgagctcattttgaatagcattaattcttttaaaattagtccaatttttcaaactattagaaacagtatattgagaatataaaaagcaaatcaaactatcctattagaacaattattccttgcagaaaaccaagtatccttgactaaaccattaaaagaagcatcatctaaccaataattttcaaaaataaatctactatcttgttcttatgtcttattaacactaagcaagacatcatctgaaaaaacaattactcccatcaatataagtcatgaaaatattattaacctgaaaaattaaatgttaccataactcataattaaatagacaaaaaatttgtatcattatcaatttattgaataaagaattgagacatgtgctaaattttttaagcaactacacaatagcctaataaaattttcatagtgccatattggtcaccgcgtgcggccatgctacttggctcttactttaattttattttatacttttctaataaagacaacatatcatgtacgaagaaaagataaatatctagcaaggtgagaaaccaacggtttaaaatgaaagctatggagtcagttcattaggcaacttgcataaaatgttattatgttccttttaaaaataaatgttattatcaagtgaaaagagatcgcaactggcgatagggacatcgtaatcgtataaaattaacggtggtgattaactgaccatatctttttgacgactgagtaattaacaactctcgttttcgcttgtatatgtataaatgtttatttttttcccttgctttttatgaaccatatataatcactaatatgtcgtattacgataataaatacagacttgactaacagtctattaagtaccacttgagtgacattaataataattaaagaaagattacaacccactaagttgtgtatatattattatttgtgaaattttcttttatataatagtgggaaggaaaccaaaatccaaatttgcatgtcgtgtggaatttatgaacgagataaaaggataatttatatttatctatctatctatatatataatgttattgttaggctggatgacgtcttatatttttcttgccctcttattttttctaattttttaaatttttctttagtactttttctcctgtcaagatgaacaatgcggctaagcgtgcacattatttaatactaattatattaatgccaaacaattaaaa

SEQ ID NO: 199188 - DNA, 2032 bp, Cannabis indica
  modified_base (2003)..(2003): a, c, t, g, unknown or other
gtggttttcgcgatgcacccgctgaaatctccaaggccagacggcttctctggaatcttctatagaaagtattggaggatagttggagatcaagtttgtgcgatggtccaggaatttttcacccaaaatactgtaagcagtaacttgaatcatactttcctttgcttaattccgaaaactactaatgcttgtaggtttgatcactttcaacctataagtctttgtaatttttgctacaaaatcatatcaaggattctcacggataggcttaaaggcattattaataaacttgtttctcctactcaatcggccttcatcccgggccgttggatagctgaatgttcaatattggctcaagaggtccttcacagctttaagaataagaaaggaaaacagggcgtgatggcgatcaaaaccgatatgagtaaagcttatgataggctagaatggagtttccttctaagagttttgcaagcaaatggtttctgtgctaaggcctgcaatttaatcatgagctgtgttacctcggtgtcgtactccattctgctcaacagggctccgttagctcccttcaatcctaagcatgggctaagacaaggcgatcccctctcgcatttcctatttatcttatgcagcgaggttttgtctaaattaatatccaaggctcagaacaggggagagttctcgggaatcaaagtttctcgaaatgttatgccaatttcgcaccttttttatgcagatgatgctattttcttttgcaatgcgaactccctaaatgctaagacctttgccgaatgtattaccacttatgaaaaatggtctgggcaattggtaaacaagaggaagagcggcctggttttttcccccaatactcattcggaaattaaagtggaggttaaacggattctggatatgaatttcttaagccacgaaggaaaatatcttcggaatccctttttcttttcggctagcaagagaaaggattttcactttatcaaagataaaatcatggctcggctggaaggttggaaggccaaatgtctctctcaagcgggaaggactactcttgtgggttcggttttgcagagtatcccaacttattttatgtccacggccagggtgcctttgaccttgtgcaatgaacttgacagatcggtggcgaaatttttgtggatttgaaactcgcacaagtctcgatacaaagctttcaaaagctggaatgacatttgccagcctaagaactgtggaggcctgggcttaagaagatttggggatactaatctagcacttcttgctaaattgtgctggatgatgatgaaggaagaagataagttctgggttaagattctccagtctaaatattgctctcgattagacatttggaaggtggataagcaggctggggactcgagagtgtggcaaggaatcctcgaggctagagctatttgcaaaaatggggcgggaattctgattggcaagggagatactgaattatgggatactccttggattcctggatagtcgatggagaagataaaggaaagttttcaatactctagaagacatagattttgtcaagtttctgatctctttatggaaggcactagaagatggaatgaagatatcattagaagcagcttcagaattgaaatggtgactgcaatcttgcaaattaatcctctcttgacggattcggacattctctttcggaaagcttctaaatcgggaactttctctgtgaaaagcgcgtatggtttaagtcaacaactgaggttcaaggaaaaaaaatgggatgtggattgatctctggaagtcgaccctcatcctcgcctgaaacttcttctctggaagatttggtcggacattctgcctaccaaagtccgtctacgtatggagaaaaaaacctgtgttttttgtggggggtagatgaatcagccttgcatttatctgctcctgcaatgttaccagagctctctggtttcagtgtaagtggggatttcgcncggtatccttgaattggtctatctgtaat

SEQ ID NO: 199189 - DNA, 826 bp, Cannabis indica
tttaagtcctagtaataacatcgcatgagttcaaaatcaacaactctatactaaggttcgattcaaatgacagtttcataattggccattaacatagaaaaatcttaactaagataagcaggaattttgatgcgaataaagagcatactcatgatataagcaatgacgagtgaggagatcccggctgaggcatacgagaccttcacgctcttcgctcgattgcgatcgagggagagatccatgaacacaatccccactccacccagcacaaacatgaaacccgaagacaaaccctcgattatgtactgcccgttcactcgcccagggaggaacaccacgggtcggactgcccctgtggctctgtcctgggtcgatccgatccctgggggctccacaatgacgtcgtacacgatgcccgagaccaccataaagtaagtcagaaggactacggcgtagactgtcatgggagaaggtaaggtcaaggtgggaagcttcaggcggagacgcggtgtccggagaaaactgtacgggatcagacggagtgcgtgaaagaggggatctatagaggaggacgaagaagagtcgccggcgccggtgacggaagaatgggtatcggatttaggagccattttggagaagcaaatgttgtttgaatctcaactccactcttttttcttttaaataataatacaaaacaatttcaagttttttttttttttattttttaaattcgggagagattctaatttggaatctcttttttctaaacatgaaactattatatcatcatataagtaaatacatagaataatttacagtgtaaatg

SEQ ID NO: 199190 - DNA, 785 bp, Cannabis indica
ttcagtttgaggattgttcttctaaagtgcgttcagttgttttgaatgattgtattcttaaaggttactacttttattctaaaaaaaaaaatcattaataatttactacttattataataataattttaaaagaactacttgcaccacgtgaatctcccatttattataataataacaaaatatatattatactactttaattttatatattaattgtaattaacgtgaatctccctttcattattataataacaaaatatattatactatttcgatttaatatataattgttattgtttttgactattgttggataaaaagaaataaattctaaaacaaaaacctaatccataattgcatatttgataactcgaaatatgttctggaaatacatatgatatagggtagtcaataatgcatctcttaaagatgctttttttctttaaagtgtccctattactgcacttagtctcgatgaacaactatttgttatataattttgtataatataatataaatcaaaatattaaagtttgacaaatgtatattaatattgaattgatatatatatatttaatatttggtgattaaattatattatatagtttaaatatatcctaaactttgtaatataaagacgttacaaatctgaaaatgatttgtaactcatgaatcacattggatgaaattgtgtaaataagttatgagttattagacaaaggggttatggtttcaaagagttacattgttagccataaaaaatgatattgtactcatttatatt

SEQ ID NO: 199191 - DNA, 1335 bp, Cannabis indica
gatttcgaaaatgaatgacatagcaatcttaccataaaaggaaaattatttgtcacctaacttgccaaaaaggactttacacaaatgatcaattcgaattagttttggtatagacttgggatatatggacaaaaacaagttggctttgaagcagcagcaaatcgaaaatcaatatgaaaatttgagtgaaaccaaactgatttagcatgtttgcagctaaataaagcatgtcccactgatgcccatatattttgacataaactacaagtaacagatgtgatgattttctgtttaaataatgcagcagcaacaagaatggagttttgaatcactctccaaccaaatattttgactttggagggaaggtttaagccccaatatgatctccaccattgttcttgagaaagagatgaagattcattggactccaaagcaattgaacaagcaaaatgagatgaagactctgtaaaagaatatttttatatacctcctatttattttaatatctaaaatatattaaaaaaaaattagattcatttattttaataatcatgtacgtagtttttttttaagagaacctacaaatgagattgtttttatttttatagtatgataaaaaaactatttaaattttatctttgacactgtaaattatttatagtattttaaaaacacgttaattacaataaaattctcaaaattatcactttgcttgcacttaatccctaaaattcaaattttagcgacaaaacccccaaaactcatatttcgttagcaatttactatttccatccatattcaggtattaggtgtcatgttagactattatgtgtacacaatgtattgtccatgtggacacagagtacacatgacacaattttattagtatacgtaaataaatattaaaaaataaaagaaaatttatagtaaattaatttaaaataaaaaataaaataaattaaaaattaaaataaatgataacatttaaaaatataattttttcttttccaattttcttcttctttttcttctttatttttcttcaaaaatatcatcacacccaccaccaccataaccatccataacaaccgccagcctaaaacacaaccacccaccactaccaccacggtaccaccacctctattatagatcaaaataaatatcaccacctccagccccacgaccaccacaatcacgacaccgccacctccaaaatcacacaaaaataaataaataaaaataaaatcaaagttagatctaacaaaacaaacacacacataaaaacgaaactctcagatctaaactccaaacttaaaatctatttctaaaagagtg

SEQ ID NO: 199192 - DNA, 592 bp, Cannabis indica
tatttttctgtttttttcccaaataattattattttaacaataaacaaacttttattaaaaaaaattaactttgagtacataataagaagagatgaaaaaattccatccaaactacatgcaacacaaagtcaatacaccccttttaaagaatctaatgatggaccataacccatactacacatgcaacacaaagtcaattagtcaacttttcattgggtagagctagtagttagcacgtaaaaatgtcaaacactatactcttagttattgattttctatattaaacttaatattaaaatacatcaattgtaattttgtcaatttgtattaacgttgtttgtttgtttggtgtttggttcttttcagatagtattattgattattattgatgttatattattttatataatataatatttatattaaatatataattaagttttacatgacaaagtattaattttgtcaaattgtaacatacattttggagttacaaaatgtgtagaatgatcacaaaatagaagttacaaatcctttaaattgataatcacttgaatacgtaattcttatctctttttcacttttaaatta

SEQ ID NO: 199193 - DNA, 667 bp, Cannabis indica
tctcaccttcacttccatccctttcttaagagccccagcatgcaagcgcccaatagctatccgtcctttatgttcatcatactcgatatttgttacctatagaatatttgaacaggaataaaatacaagagactatactatggatgcactgaagaaactataagaaaaattatcatgattaagacaagcatactggcttcatccaagttttgttaagtgtcaaaccaaacttcacaaattcagtgtattggaaaatctatctattaatggaatttcgatattatttggattataatatactcaagattctaaaacaaatgactatggcttcaaatgtttatagtagcgatggaggaaagtgttttcaacaaatttgataagaaacttttttttttcaattcaaacatgagaaaatgttggaattcttttttctttccctcttaaaatccaaggcgggaacaaagccgaaaggtcttgggattactactaaacatcaaaagacagatgaggtaaatgcgggttggcctactctcattttctaattatcaggtctagtccctgtaaacatatcaaaaactaatgcttcattgattcgttcctcgcactaatcaacagtaatagtttgttgctaaaagtctttgttcgtaaatcagagcttgcacttaaa

SEQ ID NO: 199194 - DNA, 1280 bp, Cannabis indica
tttcttgggcattaaattccatggcatcctctttctctgccagctggtaggacatatcatgaatatgttcttgagcttgcaatctggtctccctataatactccttggccccatgattcttcttaccaacatccccaattctctctttgttaatcctcttgatggtgtgtttcaaacgcatgagctttaagtacaaagttgtcattccctctctcttcatcggtctatgccagttttcaaccaccacatctttaaacttaggatgttttgccctgaagttgtagtacctaaacggtttgtgtccaattttctcattagaagccatcgatataacacacaagcaatgatcagatatagtctcccagctatagtgagctttagccgagggaaaattatctgtcccgtcttcatttacaagggtgtgatcaatccttgagtagattctcttgtccccatcttgattgttggtccaagtaaaacccgatccagtcttaaggagcttttccatgtggctttgtgccagccaagtagtagcatctctgatgtcattcaaggttaccatattaccacccttcctgtcttccaattcaaaaagagcattgaaatcccctcacaatcaacggtttggcattgaaactaagattgagcattcatccaacatcccttttctttcatctatagtgttaaaaccatacacaaaagtaatgctcatagcttccccatggccggccatcttcacatagcaatgaataaattgagggtcctctctaacaacaataattcgagtaaaacttttcttccatatgatcaaaatacgtttctcaatggtattactcgtataatactcccaattagcaaatttcttatccatcatttctctaattccactattctttaacttggtctccataaaccacaaacccctattttattcaaacaacacaaatcaaacactgtgttctacttttccattttattcaaccccctcacattccaacaccctatattaatgctatccataggcatcaaaaacaataacatagtcattattttcaatagctacctgagaagctacaccatcctccttttgttcctgtagcattgtgaaagagttgcttgagctttcggcattttctctagacaaactaggttgtgttgttgacagcactttagtcttctttggtatctcccattcttgttggtgttgaacattgcttgctgcaatttccttcattcccttcttctccttctgatgtctgtcttgtcttgctgttgttgtt

SEQ ID NO: 199195 - DNA, 951 bp, Cannabis indica
tcaaattatatataaaaaaaatacccttatttccagataaataaagtatttctgaaaaattcttactccaatactccattacactgaatttacattcatctcaggggccttttcctctttcaatagcagtttatacataggtctatcaaccaaatcatcttattctgagttttccacaaaaaatcttatgtcatcatcagctgggccactggcgatgataagtacaaaatcattactagaatgctctaaagaataatcacacatagaaaacatcaaaatagacatatgaacttaatttgattaatacttattttatccaaagcaaaatgagtctcccattgttctgtaaaaacagataattaaatttgaaacaaaatgaaccataaaagcaagaggcaaattattagctcttaaactgcaattattaataatactttatcaagtcattgaggaattatatcaaatactttataggtacacaaactcaaaccacctttagtacacacattttatcacaaacaactctaaaaactaaatcacatatataaatatgtggaaagagaaaaaaaaataacaataagtaaaaaatttaaagaacgaacaaactcaacctaaatacatatattatatatatatatataaaaatattgataactaaccaaaaatggagtagaaagccattttatgatgattggacggaaaaatcaccaagctagcggcgatggcgatggacggtaaataagatgttgttatgagccattcgtcaacaccaaccgcgcaaagaagatgactgaaactcaacttcatctcagataaatcgcaggcagcaatggttagggatggcggagtagagagaagggctggtggaccggcaaactggtgcgaggtcttggctcagggagagaagaaacgatggcgaatgaagaggatgaagtgtcccgttctttgagg

SEQ ID NO: 199196 - DNA, 1122 bp, Cannabis indica
ggcttgaacaaaagtcgaataggaattttttattgtagttctctggctatatgttccaagtcctcccttgagaaactttctactttgtaatttttaaaacaatcatacaccccactttcatatcttctatttccaaaaggggtaaaccatctacccctatggaataacttcactgtaaattgatcatccttattccctggaaatatgttaggaaccaataataagatgacaattgtaagagccttgaattaggctaaacttcaacttatttgacatattgggcgaaaccctccaaaacatttaacccccatgaaaaccgacaaaaaaatagcatgtgcaagtgtaccctacagacaaagacaaataaatagcaaatattcttttaggataactcacttcttcaactctttactcaatattcaaagtatcattaacaactcatctgccattccacttaagccacaaatcctcgaacctttaaccaaatactcaaccaataatcccactataaaaccaacattttctcactcacaaaccctaccaaccatctccaaaccagaaaccctagaaatgtcattacccgtaacgaaaaacctaaaaatgtgactacccataatgaaaaatcctacaaatatgaataaccagtgtaacttattgtaattaggtgggagatctccaaacaatcgcatgagataacgcaattccaccatcgacaatcgaactcctcctctaaatccaaaacacctcctcgtttccaatttttgataatggatgaccgtttggtttttcgtttttgattttttagtttttatgtttatcgtcttttcttttttctataatgagtatgttttagttttttttttattattattttaatcattcttttttaatataattttgattggttttgtttaagtttcttataatatgcttaattgcatctcacgtagaggcaagtaagtgcataattttttttacttattatcacttaggacccgcctggcaaatagcagagctagatcaatggaacaatacatagcaaaaagaaatagtaattttgggagttttactcctaaaatttcaatataaagattaatcatgctaaacttaaaattttaagta

SEQ ID NO: 199197 - DNA, 875 bp, Cannabis indica
agttaatcactggtaataaggtctcaaatgctcttttttcaagtgttcttcactatcaagcgatttggcctagtcaatttatacaccgttggtcctatcacagctactattacataaggaccttcccaattaggattaaacactccaactttagggtcttgtgtattgctagatactcattgtaacactaaatcactgacattgaaaagtctctctcggactcttttattaaaatgcatcgtaattttttggtgatatgtcgcattgcatatttgagagtctgcacattttttttttgtgcaggtcaaagggttccattataattcttggtttttatcttgatcataggattcacgtctatgagtcatgatattcatttccaccggtagcattgcctctgagctaaatgttagcaaaaatggagtgtgtcttatagttgtctttttaattgttcgatgggatcaaagcacttgtggtaactcatctatccattttccttttatcgcattgagcttcttttgatagtgtctttaagagttttgttaactgcctctacctggccattagcatgcggccaagacacatatgagaaactttttatgttcttgtttctctcgtaaaactctatgaatagatcactgtcgaattgagttccattatcggatactatcttaatgggtattttaaactgaaaaataatgtttttttatcacaaagtctaagactttttttgaagagatagagactcaagttttggattatgtctatcagttaaagaaatcgacctactatatgttttgctcctcctcgacctgttggtaatgaaccaattaaatatattccctaaatggtaaatggataaggcgaggtcatca

SEQ ID NO: 199198 - DNA, 1774 bp, Cannabis indica
agaatcatcgtgagaagtagacttagaccttcataaagcttatataaatagaaaattatcaaaatatcctcactcttttactgacatatacttaaacttagcgataaaatggtcatttctctaataactcacataatcactcctagttatttataaaaataattagtacctctaaaatactaaactatactactataatattttaccaaactgtcgagtttatactgtttccgatcataaacataataaatatgtatcatatacattcgacacacataatttcatgaaatctctataattaagtaacaatatcatattttcttaatttctaataatgtctttatttctaaaagcatatattatttcataatttactataatattaattaattattaattttttaatgtttaattatgtggtcattacatctttatttaagggttttctccttcatggggatcctcatatcatgaataagtgaaaacatagaacattgtattttaatacttttatttaatgtatatatatattgttgacctcatatttagccaacgacgtggagttaataaaataataatataagtgttttaataattaaaataataatgaagaactacaatcgacacataattttataaaaattttgtaatatcctaaaaatgagatattgattagcaatcttaattaatttagttaagtaataatgagggattatattattatataatccaatacataacattataggctagtattatggttgattgtacttatagtatggattgatgttactacatcagtgtgatcagagtgttgagtataaactgatattatggtcaatattactatatagtcaagaacgttcaagatgactcacttatatgctttagatgcgggtagtagactcatgataattaggtgtatgggtgcctacttacaaagtcagatatatatttatacttttcttactgagtttgtcaactcacagatatatttttatgtataggtaaagagaagactaaagcttattcacatggtgagttttgagctctcagtgaagattgcacatatccagatggttagaactggagtgttcagatcttcgggacaacatgatctcaattttgttagtcacttggcgatacttttgttatgctatatattgattatgtttaaaaaataaattttgggatcctgtaattttgtaaacaatttttatcttacgatgtatgtttagttaaattttttaattatcatgaaagttcttatgaaacatgattttatatcaaaccctttcattagtaaaagttagctcagcaattaagaaaatattgtagcgtgttagacagcataaagaactaaaatttattgttggtagttatctcgtgtttgtcttattgcccaaaatccaagccatggtcgaaccctatacgaatggcccatgaatttaatttttgccactttgtttcagtttagcttaaatgacataaattgtatttcttctaattttattatttatcatctaattatttaaatattaatttttatttaataattataaatatttaccgaataaacgtacatgacatatttattaattaaaaacttggaactaatcaaccatataaatcagtttaaaacaagagttcagattcatagctgaagggatttcaactcaatcgaagcaaggggagcttgtcttcgaatctaaggaaacttagatttgaatcttggttggttaattaatatctcactacaaaaaaatcttacttt

SEQ ID NO: 199199 - DNA, 741 bp, Cannabis indica
atacacttcattcttcatacttaccaaaccgatatatacttgattaaaagtgaatgtataccaaattccaaaaactaactatatagttttatttttggcattgttgcgcaccagtggtgtctagcatcatattgaggtagcgtcttattaatgattaatgatattctatcataattataacattatattatgtgagacgcgatacttaattccactaataatgacataacatcttaaagggtactaagtaccattggtatcttttaatattttttttacaagtctaacaatatagttagtaacactaccaaattccaaaaccataagataagaaatgaatagagacttttataagaaaacattaattcacttattaatttgccaaaaaaaaattattaattactcatttttataaatatcgtgatctagaacataacatctcaattaatttatgaattatttgtgagttattactcattaattgtatcatgatttcgctcttaaattgtatacctcttccatcttcatcaattgtgaattatttgtttttccatgtttaacttttggcaattgttactttgtggttgtcgcatgaggagtagagatctcactactataaaaaaaattctttttatgtccaataaaaatagtgatagagatagaaaagttttggggagatttcatatccaatgacatgaaaagtgagtgggaatgtgacaaatgattactatatatatatat

SEQ ID NO: 199200 - DNA, 1568 bp, Cannabis indica
aagaatttatttttctttgtgttttttaatttacaaaaataaataataaatgcaccaactcaatatattactaaaaagattaagaattagaagtttgtgtcttttttaattatatatattacatattataattttttaaaaatatatataattaagtgcggattggattggatcggttactttttgaggtcaaacaacatccaatccgcacaagtgcggattttagatttttcaatccaatccaatccgcacaagtgcggatattcgcattttgcggattggattggattggatcgtgcggattggattggatcggatactttctgaacacccctatatatatatatatgttatgagctgttaacttaggaaggaaattaggtgatgaacatgtgtacacgtaggtacgtagtacgtaacgtgttatgaaaaaatgactataaagatgaatacatatttcatcatttcatattttgttgagaggagaattattaattatagacttgatcaagatgagcaccaacaaagggcaagatcaatcatacccaatgaacggtggagatggaactttcagctacaccaaaaactcctacatacaagttttcctcaatcatttgtttttctttctttttttctcatacatatatatatatatatttataacaactctataattttgtttttctcttatggtttgagtctaaaatttgtttattattcttgtttactttattaggtaagctatccatgaagcaattgaagataagcttgacattaacgaattgttcttttctaataaatcaacaaacaatggtgccatatttcgcatggctgatttgggatgttcagttggaccaaacacattttcttctatgggagaaatacttgaagttgttaaacacaaatacttgaagttctctacttctcccaaaactacactagaatttcaagtattctttaacgatcatgtcactaatgatttcaacacccttttcgcttctctccccctcgataagccctactttgcagttggggttccagggtcatttcatggccgcctgttccccaactcgtctctccaccttgtccattcttcatatgcactcttgtggctctctcaacttccgaaagagttggttgatgagaactctacagcatttaatcgcgggagaattcactacttaaatgcctcaaatgatgtttttaaggcttatggagctcaatttgcgaaggacatggctatgttcttggatgctagagcgaaagagcttgtggttggaggtttaatggtgttgaccatgccttttgccccgaatggtgttactttttctcgagtacttatgtgtgttgtatttcatcttcttggatcttccctcatggatatggcaaaagaggtaagtcaattatttttgcctattgtatgtcgaaaagagaatgtttgttttctcaatgaaaaagaatatattaattactcacgaaaatgcgataaaaatagtcagatataataatacgattaaaaattcacacaaaacaaatgagtttaattttttcttaaatgaatttgggct

SEQ ID NO: 199201 - DNA, 950 bp, Cannabis indica
aatatttttagctcaccactattcatttaactacatgtagctaaaggaatagctatgagctagtttagctcaccatttacctcacttgttagaggtgcaattttatcaaattctttaaaattttagctaaggtgctattttaactcatctattgagaatgctcttaggtccctaattttaaaattttgacattgaaatctataaaactccaaatagtttgcattgtgtcttgaattcatatcgatgaaaaattaaagttatgaatctagttatttcagttatccttattaatgttttttttttaagtgatgatagattatgaaaaataacttaactcttttcagatcataaaggtcctaaactatatgtcatctattacatcttttagatagattaacatataatttttattaagaaataacctaaaggtcacacaggctatgtaaatactctcgtttcacattaaaacatatgtttattcaagtagagcattcttaatattcacttttcaaatttcatattaagattataaatcatgttaatggtgatcagtcaagaacatgtatcaaaacaaatatgaacaaattacaagaaagaagaaataacaaatcacattaactcgtggaataaatcattcaacattcatcatatccttaaattgagaaattagttcataacgtcaacattcaaattcatgtttaaactagaaatagaaattaagataaaaaattaaaagggaagagaaaagaactaggtggagaactcgatcggatcaccacgcttgctccaagagtcttattcttttgtttctagggttatattttctctaatattctctacaattcgcaacccctttcattaaaatagagtttttcagcccaaaaattgagaaaagaatgaaagttgcccttgtcctgtacaaagccatcaccgcaaccacaaacaatcta

SEQ ID NO: 199202 - DNA, 2037 bp, Cannabis indica
actaacagaattccatatgaaaatccaaaccccaatatcataacagacctacaaacaaattatcagaacagtcttgtcaagctctatctatatacaagcattttgctccaattcataccaaccttaatgagctcatgagtgacctaaagcaatttgtactaagttcaaaaacaaacatgtattttaaattcaagaacatgaatcataagctctctagttgaagttgtaacatattgacacaattagaaagacatgattgcaactcaccctgcttcctctttctaaagactcatcttctatgaaacgaatttcgggagtcaaccgcaacttcatacgccttcccaactcaccacgaacatatttggctttcgactttagcccagcaagagcaacctccttccctctttcatccccaaaaacagatacataaactttaaccacctacatacatttaaaaaatgaaaacaatcacataaataggcctccttcaatttatataaagaaaatcctttttttccttcctgattaactccaacatcatcaactacaactgaacaacagttcaatacaacttcaaccataatgcatcatgccataaataaagcaagacctcttcaaaccaagaaatcaacaaaattgcaatctctaaacaagtatctatgatttcacatactacccctaccattctctaaaataagatattacatttctaaatatacaaacacaatccaaaacccaaatgggaaccaataccagtccttaaaccccaataatatcccacaaacacttgctcctagtcccactcccacttatgttgaaattattctagtagaacaatactaaccaaagagaacccagcaaagaaaaaggtacctgcaagtcagatgaaacttcaacatcactaatggtggtaagagaagagagataacggtcagctcccaaagcagcttcaggtaaaatggcgtattgtaaagtggtatcagtaagaagcatatcagagagttcccttcttatctgcttagccaccattgccactctcctcggcttagccatacaccttatcgttaataaagaccgcgaactgagacgaaccccatgattcgtgggtttactccacgccgttaaacttaaggataacgataatgacaaagatgacgatggtggtgatgacggagtgtgacggcgatattgggagggtgagagcggtggatagtggagaaccaggtgtgacattgctataaaaatttcacctttttgcgaattttttttggtgtaaatatagaaaatgattagaaattaaaacattatccagaaaaagagtagatttatggaaactcaccagtaccagcaagagaagagaagagtgtagtgagtgattttgggttgaaatttggaggagaaagtgatgaaatttgggtcctcactcctcacttcaattatctttgatttcttttatcttctgcttaatatgattttgcttctctaatttttaagataatacctttcaaaaaaaaaaagataatataaaaattagaataaaatttactgattattgccactaatctggttatataattcttaattcttttgtagttgttttttgaagaagtttttttttttgaagcaaaggtcgaaacaattttggtttgaaaggagtgctcgtaaaaggatgaattatatttctaagttgtagaatgatagtggagcttggttactaaggatgatgggttttctcaaatagtaaaagactattttcaaggtctttttactgccttgaatgtcgagtgcggtaacatgcttgatgatataaagtttcgatttcagcttctcaaataatgatttggtgtgacctattttggaagtaggaagttcgtagggccttgtttaaaatgcattcagagaaggctctgggtcctgatgggatgagtttaggattttatcagaaattttggcatattgagggggcgtatgtggtaaggttggtttaacaggttttctcttcaggtgagtttctagttggcattaacgataccaata

SEQ ID NO: 199203 - DNA, 1298 bp, Cannabis indica
atattaccgttaaatatcaattggatgatcactgtatagacctatgtatatgtaatagtaaaattttgaaatcgatacagtagtaatccaattaatatttaatggtaatatttaactgaaattttaaattagaaataaacttaagggagttttacaactaaaaaaaaataaagaggttcatgtataaaaattaaaacataagtgaattttgccaaaaaaaaagtaaaaaaattaagtgtacaaaaattaaaacataaacagatttcgccgcaaattgctgatctttttatctcccattctttatgaaccatatctatgaatttgtgggtaccctccaataatgcaaatttctatcaccagacaatgtgaaaggctaccactccattctctctctcaagaaggaaaagatcagcttcaggacttgacttggagtcaactttttttcttttaataagaaaagattattgctacttatatctacttttccattaaaataaaaaacaattcagttagtttctcttatttttcaacttggccctactcaaattttccatatatttctgtccatcaccatcattatcctaagcactttcaccatccaattattaatatatattaatttttattttacaattgttaattgttaatatgcattgttgaaaattaaaatttaaaatgttaattgtgtaataaacgaaaatacagaactttgttttcctataaatatatataaattgtaaggttgagcatcaacttgttgcacatgtttttgaaataaccaataaactatacattgggatattaagaaaatgataacatataataatacaaaactttgaaaattaaaaatcaaagtgtaaaagataatgaatatgttccactaaaacgtaaagtttgtaataaattaaaataaaaggctaatctatataatgtggtcattcgtctccatagctttttacttctttcttggtctgcatgaaaatatatggttttcaattactcatggattccttaggcctataaaataaattaattaattagcacaataaaagctaaaagttaaaatttttactagatttaattattcacaaagcctaatacttaaacaaaataattatttaattatacgcatgaatatgataaatatatatacataaataaatatataggtcttttcctatacagttcagatatgatctaaaataataccatgccagaatttttataatataatactcattttcatcacgtttgtttaggtggggatcgagccccttaaattatttataaatattata

SEQ ID NO: 199204 - DNA, 1749 bp, Cannabis indica
aatcagcagtaagattgcaaaatttttattgcaaaaactgcatgataagtacacacacatatatttataggggaaacttacaaaaatactggaatttcggttaacttttacaaaaatactgtcacacggaaaaaatttcaaaaatactgtgtttttataaaacaccagtaaaacacaaagtagaacaactcaaaacaacagtagaacaccagtaaaacaccagtagaacaccagtgaaaacttaacacagtatactgcagtatgaaacttatagaaaaacacagtaaaaaagtaaaaaataccgtctgacagtatttttgtaagaaaatggtaaaagttagtataccatgtaaatttccctatttatagactggtagtaaaacgaaacaatcgtattaacatcaaattaaaataattacaacacggaattgtaccagctataaacattcattaaaccggaaaaaattctaaacttaagaatgaaaactatatttattcattaagaacaatcatctaaataaatagaaatacttaacattaaaccaattaaatgccactcttgtatccatacctttccttcaatatgcatgccagttatatttaactttgcccacattccaaatcccaatctctttcttagcttcacagcaagtattgcactcatatcatcagctgtcagaaaattcattcccaactccagaacctgcatttatgttagagcatgtcaactttctatattgaaaattgcaaccacccggaagaagtaaggaagtaagagagactgatccaatatcccaaaaagatgaaaaacaaatcttaccaaatgatcatcatcagtagactgacgaagaaccctcatttcagtaaatacaggtggatttctacccaaataaagacgctgaactgtggcttgtttctgcagatttgatcataaagattccaaaatgtatcaaaatatagtgatcaaagaaaaaggaaagagaagaacaaacggatatcatcaagtgctttttagcaccacacatgaagaagatatcatcatgtagtactacttgaaccagaacttttacctgttccacaaaaatgtaacctcaaagtattcatatacttggcctcaaaatcaatactatttcaaaatagcttaataaagaataaagaacagatatcatcttgcataactaaaacaaactatttctgtttcacaaaaattgccctcaaagttactagttgatctgaataacatatgtcagtgtgctaatacttgaatatcctctaatgtgaaacaaacacagcttgtaaaaaataaaaagaagaagctaatgccaaggaagtaacattaaggtaatagaatttgctcaagaaaaaaaccactcaacacttaaaagcacaatacttaatagttatacaagcactttgaaacgaaatcaatgagccaaataaaccatagattgggctttataattcagaagaaaaatcatacagcagtccacggtttgtacttctccaagaaccaaggaatgatagggaggaggatcttctgtgaagcaatttgttccatacatataggccatattttttcaactgcatggttcagccaccggactgtttcagaatcagtaagcacctaatataaaataaacaaaaagaatttcaataaaaggggggaaaaaagcactatgtcggaaaaacaattcagaaatcattcataactcccaacttaagatcaataaattcataaataaaaactta

SEQ ID NO: 199205 - DNA, 643 bp, Cannabis indica
taactttttttaatcatgtgcactaagtaactgattcattggctttcggtatacgtacctttatataaatataaaatatattatattgattgtgtactgtactagacaggcatatatacacacaaaataaatgaaacttatatatagactagactagtaatggtaatatataatccaaaaattatatataattaaatgtctggacaaaagttatagatctataaaataaaacaagactcaataattaatccagccagattattctcttaaataatcaaaatgtaaatatataattttttttatacattatacgcccatgcacgtacgtaacgtacgttctcatttcatagcagaaagggagtaaaattaagaggtaaaaaaatgtaataaatataataatttaatattatttatggatacaatacatgagatggtgagaataactttaattattgagtatgtaccacttttttctttttgccaacaattaaactttctttctacttttaaaaagttttgttctctatatatctctattagcatgctaataccaaaactatttaatataggaaatatatatttgtatttgtactcatctttactagtactttcttctcgctctttctaatctattcccgttttg

SEQ ID NO: 199206 - DNA, 761 bp, Cannabis indica
ctacttgaaataacatgagatatatattactcaacttaaataaatgttattttttatttaaaataattactgtcaaacttatttattgatatgttgacacaaaatacaaaatataatttagactttggagtagaaaaaataaaattgaataggatcattgatcaaaaaatggacctccaaaagacataacatgaccatgatcacctcttattttccaatcatcaacactgtacaatttttttgcatcaatgaagacttcagcattgtcaaaaataacttgtttatgagattcatcaatggttgtcatttgttcaataaatgaatcttttttttgatctcctgttgtacggaacccattacccatttctggattaggttgtcctggcggactgtatgcctctccaccccattccatgtacgaagctaaatctgtatttagagcactaaatatgcgtccgggccaaaacccgatttgagtacctgcttttccatattcaagccaccaatttccatttgttggatcctataaatattatatgtacataacaaagcaatacaatatattgtcaatgctactaacaatgaaataaatcaaaaattcaatacaacaaatatagataaaataaatcaaatacaaccgatgggaagaaaaatattcatttttactatacatagctacaatcaatgctaccaaaccattttgaataactataagagccgtaaagtcaaagcaatcatataaaaaaaatggttctaagact

SEQ ID NO: 199207 - DNA, 602 bp, Cannabis indica
cttgagaaacatgacaaatatacttaaagtgtgagctatatatctatatatgtataaacatttgtgattaagatcaactcaatatttgaaagtgtccatgtttgaaattgcaggatgatgaggagctgtaaattaagaggaaacattcctagttatattagtaatttgacaaagctaactatcttgtaattcttctacttttgtgaaacattgtgttggagtttcaagtttaaacacttatccatgacataactgacattcaagatttcgatttcgcagagatcttagcttcaataaactagaaggggaggttccaaatttcgaaaatgtaatgcaattgggaaaagtgtaagtactgcaaaaatgagttaggacaatcggttaagttctagaatcgatcctacaaatcggtttaagtaggaagaaatcatcaagaaagggccttacaatgagttctttttgaaaacttcatttcataaaattcttgcttcctcatatttttcttatgttgcatactgaataggtacttaacaagtaacttactcagtggaccaattccaaattggatcactatcaaagatactaactagtaagtttaagtt

SEQ ID NO: 199208 - DNA, 2431 bp, Cannabis indica
agagagagagagagagaatacttggacaacttattgaagaaaatgaagagtagggaaaaaataaagtaagattataacaatcattatcattttgatatgagaatgagatacatgatcagcaaaaatgacaaagttaaaaaaaaaatatgaaatttatttaattaattactctcatttacttatgtgtatatatttaacaatgtatagcttatataaattgttacgtgcacattttagagttctcacatgccatgcacaattaattgacttttcttaccataaaattagtttattagactataaaacaggcagtgtcacgccattattggtgggtgagaaaacataccttgaaatttgattgatccaacatgaaccatatatatttatgtatataccagctctataaaaaatataatataatattattattatgtatcatataattgttgtataactatatgacaatattattattctaagcagatttgtgtttatttgagcagatgcgagaaagtcttatcatcttgtcatgtgagctggctcagaaagttttaattatttatttgtaatattgatatgtcagggtcagccttcccaaaagatgacccttttttttcaacttaaatacccaatttttgtggtgaagtaattaataattgttcgccaatgcatgtaccgccagagaaaggaggaacttgattttctttatacattataatttattattattagctagcttaaggggatgtgtacaagatcaatattcaatcccaatatcatatatataacataacttaataaataagcttattgggccatcaacatgacacaaaaattattggttggtgtgcaaataatgccgtttgagagagttacactattaaaagagtaccttatttaaaaaaatacaaaacgttatatatgtaccaaaaaaattgtgtatgacagatttgtgaatcttattgatttcactaagtaaatttttctacccaatatcacaaaaataatttatgaactccaccaatatcatatctattttaaaaaagaaaaaataaacatcatcatataattcattgtccataaagaaaagagtacataatatcatattataaggtcaattagtttcagtttcaatgttacatgaatattaattgtggttattatacaaataattagtcctactaatttacaaaaaaaacaataatagtaataataattaattaattaatgatctagttaattagcaaattaatgtcatttttttagagtgataaattaatttcttcctcatcaatctcattaacaatctcacctctaatatgatcagaacaacacattatcgaagtagaagaattcgaattcgaattgactgaaaaacaagaaaccgccgaagagaaagatgtcgccgctgcagtcgtcgtcgtcgttgtagaagtatcagattccttaatacaaacaccagaaccgccgttgccgccatcccctccggcgccggagatatcaacgagcaaatcgacaaaagctccaacgataaacccatgattattttttccattgaccctcaaataccatcccaaaagctcttccaaacactcccaatccttaactccatgaatctcaaccatctcctccatcgaccgccgaaaatctccgtaaggatcgtcagactccatagccagaaccacgctctccttgtacggcagcgcctcgccggaaccagaactgccgcaaacaacggcgccggagccaccatcggagcttgtcttctcgagaatcgagctggtgtcggaggttccgggctcaaagaaaaggcgctcggaacgggcggcccggacgacggtctctagtgactcgccggcgtagtattcctccgactcggtagagaagctggctgactcggaggagttggtgaaccatgactcgggggtttcgacaactgcagtggggatggaaacgacgtcgtttgagtcaaagaaaacggagttaaccgtacggtacatgtcgtcggaaaggcgaaaggaaatggtttttgggtggttacatgacggccattggcgccacgtgttaccgttatgtttgttgctttgatgattttcaattcccttcttattggtattactactactattactattgctggacttgaagagaaaagttgggagcttcattctcttgtttttttttttgtttggaagaaaaatccaagaataatatattattttggattagggttttgggggaatttgattgaatgtttgggtttttggttcttgggttggtgtttggcattaatgagatcctaactaagcatttgctccagagagagagagagtgttatatatgtatatatttataaatatttaaagaagagagtagaggaagatgggaaggaaatgggagaagtgggacctttcatgtgtgtgtatttatt

SEQ ID NO: 199209 - DNA, 758 bp, Cannabis indica
gttcttctgtaaaattttcatatccttggaacacgtttttagtgtcgttatgatatccatttttagtgttttattttggtgaaatttattaatattatcaaagattttaataattaattactttattagtactaaactagtttataaaatatttttgtatatatcttataggccattgtcctctccaagtttaaaatataaattgaaatacttttatataatgtagtctacaatgaatttctgttattgatttctttaagatgctattgttcagtcgcaatcaacataactcatcttattattttccaaaataaatttgtgtaacatattattttttttgttttgtttaaaattcaaaatttttgttatatttactttggaaaaaagggaagaaaaactttgctattttaaacaaaagaatagtatatataccacaaattttgttagcgtgtggtattttatattttttatgttttttttgttattattaaatattttttctcattttctttttaatatatattattgcaatttaatttttttagttattaaattattatattaataatttgtttttactatactaaatgtatacaacgattataagtgacatatgtgatgaaaacgactttgaatatagtgatgagtacaagtgagatacaatgataataatgactttaactgactacgagtgacctacggtaattacaatgattttgaaatcatacgtatgatgagtaaactatatataaatttat

SEQ ID NO: 199210 - DNA, 792 bp, Cannabis indica
aaaaatcaaaagcgatgaaacagtacggaccatcttgaggattagcatagttgacataagcatagccaagagattgcctccgatgctgatccctgcaaaccctaatggagacaacctgagccacttggttaaaaatctcaaaaagctgtccttcatccacgctaggctccagatccccaacgtaaagcgacgcattaccaaatcccgccgccgtaaccggacccgtcactgccacagcagaggactgtgccacctgtccagaaacaaccgtcgctgaagccgccgccgccgccattgccgtttcaaaaataaattttaatagtaattaaaaaaaatggatagaaggtgtcgaaaactagggttttcgatcgatgaaattcttagataataaacgagatcaatcaataccaaatcactagggtttgtttctctgaaaggaaggttttcaatttttttttttttttggttttttgaattttttttattttttattttcttttctctgaaaaaaagacagagagaaaggaaagcaataaaagagagggaaggaaaagtgagtgaagattgggtttatatataggcaagggagaatcaaaacggtgcgttttggggattcgtagctttcgaggtaggttgatgacgtggcattacgtcaacgtgccacgtgggatttgtcgcgtgtttttagtttaaggacgttggaaacaaggttggtctggtcttgttgttgttgttggcttttattgtttttcacttgatatgttccaatacggtgtcgttttctataatgta

SEQ ID NO: 199211 - DNA, 1505 bp, Cannabis indica
gtaagcataacgaacacccccgtgaaaaaatttgaaaaaatatttcgacatgtgttttcgggcgtggaggttgactaagagattataacaggaggttaacggtatcactcctctaaccatttattgtaaaaataaatatttacatattatcaacatattaatttactctttagagtatttaattttttttttttttaattaaaaaaattaaattaataaagaatttttttatctgtaaagattagttcatctcataagtacgcaatgagtaacaaccagattaatatagatacttaattgtatatgaatattttattgacttgaattttccataaaattacaatggagaggtctaaattgagcttcggccggtccaatatcatagcatataaatgctataccatgattgctcaaaaaaatttgaattgggaattctacaagtcatcttctaagaggtagtggtttatgtccaaattattgaaccttcaatttgagctctgaatgtatattctggtgtggattctccaacctctttctttaggagataatacagatatcgatgtagtgaggtaagaattttgtgatttttgacgcgtcttgtcttcataatatggcatttcaagaatgtggtttttcatcagaataggcataggctgttgtctgtgaattctatgttcaatatcattgtcaatgattttcatggtaactgacaaaattttcaacaatgatgtgaagtttctaaacaatgcttgccctttgatgttgctcactttcttttgacaatgaggtataaaatatttaatgatgtggctcttaaaaaatctttgatgtctgtgaaagtggttgtaaaagatgacaacaatcaacttagagccctatatatgcaaagaagatagattcaagagtgaagttttcgaacaaggcttgcccaatgatgctactcaatgtcttttgtggccctgaaagactcttcgacctgcatttgagacctactctcgtcattcattcaacaaactcggaagtggcagggccggcccaaactttgggcagtttgggccattgcacaaggcctacatttttaagggcacattttttataggaaaagtttttttattattattattataaatacattaaaaaaatttatatttaaaagtttagaaacatatcttaaaaagatgaaaagaaataaaaaactagcattgaaggttttaatgtacataatttttttttaacaaaaagcccaattttaatcttttgcacaagactcccaaaatatttgggccggccgtgggaagtggtcagttaaacctaccacaaaaatagtagtttccctcaaatttgattaaagatctcaaactttaatatcttgccgacaattttattcattatatacactactacaaaaaacccttttaatatcctttttttaagtccaacaaaattattgttggacatgaaattttttttgaagagttttcgagtccaacattgttagactagaa

SEQ ID NO: 199212 - DNA, 1405 bp, Cannabis indica
ggagatgttaagaaaacgaaatcaatggaagctgtactgggaattgaacctatcaacttctcaaatgtggaggacgatgaatctgaacatgaagcttttccagctctttcacctagatcctcacttcgcgagatacagaggcaggaagatattcgattagactttgcacacttcatggaagctaacaagcaatgtaacagtgatcttaggcacggtaagaactctattcctcctgttcttagatcaggttatgttgtaaggagcttagattcttcctttcaatctgtgggaaaacctaatgtaaaaataacaatggatgatatagaagaggaggtttcattttggagctctacaattgtctgttatttaggagctaatcctccactggaggtgttggaagggtttgctaggcgaatctagaaagaaaaagtagacaaggttgggctcatttcatatggcattttcttgataaggtttgcaactattgaagacagggactctgttctaaatgggggttatacttttttcaataagaggctagtgattatgaaggcttggcatcctgattctaatttgagaaaggaagatattcgcaaagtccccatctggatctaactcgaaaatcttgaattgaagtattgggggcaaaatactctattcaaactggtaggagagattggggagccaattttggtggatgaagtaactaagcaaaggcagaaattaaccttcccaagagtgttagttgaagtttctatgaatcaagagcttgtggagaagattgaatttgaagatgagcatggacttactgcctctgtgggagttaagtacgagtggaaactagttttgtgtaaacactgcaaaggcttgggacatagtgcagatgcttgcaggaaaaaattgggagtgcaggcaaagcagcaatgggtggtgaaagagaagaaagtagaggggaagaaagaaattgtagaagatgctgaaggttttaaacctgtaactaatggctagaaaccaacagaagtttatcaacaagggaaaactagcactgagaatgtttttgacattctgcaggagcacacagaagaaactgatgctgactttcagattcaagatccaggaatggttaagaaaagaggaaggggagtacctcctcttcaaaatggatagaattctatcatggaatgtccgaggagccaacaacaaacaaaaacaaacttaatcaagcaattgattcatgccaaaatgttggtcttgttgggctcctcgagacaagagtaaggcagccaagcttggagccttgtactcaaacgttttaatggatggtgttttacgagtaacattgcatggcataaggtgggcgaatggtcatatcttggaattctaatactttcagcatcaacatact

SEQ ID NO: 199213 - DNA, 816 bp, Cannabis indica
aaaaaaataaaataagaaaggaagaaaagaagcggaggtccacgtaagcaatgagagagataattatttgtcaaatgaaatcaattagcaaacacgcgggtgctaaacgataatgttaatttttaatttttaattttaattaacaatttataccaagcggaggtcatatatatatgtaacataactagtttgctctcccttataaatgctactccttttcacattcctctttcctatcgtatacaactcccactctctctctctctcttccgccattaaagctctgttctcaaggttttccattgctacaacctcaacctattctttacagcttagtagaacaccctctcaaactatcggtatgcattcaactctgccttctctttcttttgacacgcacgctacgaacatggtcaaaaccttttttttaatattttatttatatatatgtatgacgaaacagtgttcttccatgaatttatcaatgaatttgaggaggcatatatgtttctatacgcacatatttatgaatgtgattggtatggtatggcgatggcttttgtttttgtttttgtgatgcttcgaactttaatttgttcattttggtgaccaaaatagttgataatttggtcgatcatttactcttttcgttgttttgctcttttttattctttcttgaatcctgaaaataaattgtctgggattctttaaactcttttcatttaaaattttgtttactagtgaacccaatggtaatcataataatttatttggaccatttttcgtgctttacggggaaccaatatttgagatcca

SEQ ID NO: 199214 - DNA, 873 bp, Cannabis indica
ttggtacatgtgtgtgaattattgtagacttgcttcttccagcaacaaaaaaataaaaatctgcagaaagaaattgggtcttgcttcttccagccaaaaaaaaaaatctctcagtttttacaagagtgtctagtgttatgatcactggtttggaaaagattaatattagattttgggagatgataaagcttcaaacaatctctcccaattcccttactaaaacaacaaaatccacgccccaattctgtaatttcacaagaagaatataacattttttcgtttccttagtctaaaagaaagtctctagaattggatttgagttgatttcgtttaagataaaatttttattaaactcttcaataaacccattcataaagatctgagattgatgaagtttctctctcaaaaacactaaaatcatcagatctaaaatatcaatgctcaattaggcaatcacggtgaccaatcggacccaattcaccttctttcttacgattataatggctttctcactttgtttgttgaaattcgattcttcgacatacaaaatgacgtacagttgactgtccctttagacaaatttggattcacaaacaagggtcgtctcgggctcaatatttcgaagatctcgattactggtaagaatttagagcctaatattgctaatgtctatttcttcctctgtatatgggaatagttgattcatatcttttagcagcttgaggatggtgagatcgattgtgctcatagatctgatattttgtataatgagaccgatgcggatcaagacatgcttcttttcgctaattgcaatgctgggtcaacagtctcgatgaatgtaaaatcggtgatgtacaatctattgggttttat

SEQ ID NO: 199215 - DNA, 1088 bp, Cannabis indica
atatgccttgggacatgaagatctgatatgaagtcatactatataaacaagcaaaacatgaccacacctttaatcagcggcagcgaacctatataagaacaaaaatatcttattagaaaaagaaaaaacaaaattaaacttagctaacgaaaataattaattttgagattttattatccattggaatttttcaaacaaaaaaatataataaccaaatatgacaaatgatcaaaatttattgtcatagtgttttttttttccttttgaaaatatagtttgtttactttttaatgttttggtttgggcgagagattttttatttttggaaaaacataagattgataatgtgattttcatatccacaaataagtaaatgtagatttttttttcttgaaaggaaggttatattattgttatagaaagaaaaaaataaaaaaaaaatgtagaaagagaaatgcttatatttagtatgaacaggaaaattatattgaaaaaaaaaaattttaattaatgaaaaaatttgactttttttttattctccatgttttctttttcccaccatttttcttgctttttttctccatcaccaaaaccgaacatagacaaagtaaatgcagattcagagtgtatatacagtgacaattaattgcaatttgcacccatatacataaaaatgaaatgcaacttatttatcagagcattaccatattatggtctctatacttactgatctaaattacatgaaactaattcctttattcaccaaaatatcttctgaaaaaatttcttcatccgtagcttgacagtcttgcccccttctatcctcaacatctttggaactcaagaagcttggctggttggttgaagatagaagcctagcccacattctatcagttattaccacattgttttgtctctcagtgattctctgcaaatgaaatgattaatatgagataactacagtcaatgaaccaaaattgaaaaagttctgtaaacaaatattgaagtaagtggatataaagttttgtaataaaaactaaaagacatgaactcacatagaaaggaatgtaagaatgtcttccattgac

SEQ ID NO: 199216 - DNA, 505 bp, Cannabis indica
cagttacaaaacatgggacttggaaccaatatacgtgttagacacaagaaacatactattagaattagtcccacattattaatatgtggaaataaattgtcaagatgaatgagctactcctctcattatcaattagattttgagatagacccatttatcttatccaaattctaatatggtattaattccacttgggctaccaccccattaaagaattttttttgttaagtttgaccaaaacaattataagaattttcactttttgtaaattctctcaacttaaggtaaaaatatagtaatagtaaataaaagccattagaaatcagtatgagaatcactctactcgaaaaatatgaatttggacatgacacaacccgatatatgctacaaattaacacgacacaatacgaaaatataaatttaagtacgagacgcaaaatagactagacaaaaagtacgacttttacaaagtttgatgattcgatgattataataataataataa

SEQ ID NO: 199217 - DNA, 1843 bp, Cannabis indica
ctctctctctctctctcgaactctctcgaactcttatgaaggcagcaaggagttctgcactttttagctttaatttaaaggtttccagcagaattttagtgtatcaattcaaggtaaacccctaagcaccattctctttgatttcctaagttctaagctaggtttttgtttgattttggatttagggttgctgtagtaattcttgatgtttgagtttatattctgaagttaagattatgttatttgagctgaattaaggttagtttgtggcctggcttgttgttagacaaggtttgagttttagagcacaaacttaggtctttaatagtgttttgagtttcaggggttgtttctagtttgtttctagtttttgttcttgtatggcctcagggccttttactttttaacaggcaactggtcttgcggtctttaatcctcactttaacttcttttgctagacatgcagttgtctgggaagctttgtctaatatgaagtatgccattcacacttactttagttgtgcttgtttgatgctatacggtgtgggtgcccccaagtgattgagcagacttatagtctcttggtcacttgcaattcaccaagtactatagaccttttcctatgtattttcttagagggacatgtttgtacgcatgtggaactaaaaataaagattaacgttaagaagttatcttgttagcaagttgtttgacacaatatcgaactgaaacactattttaattcattaattgttcttaaatatgtgttgctgattggcaacgtacattttttgtgtaacaaaagcttacaaatcaaagtcttcttttgaaaccacattttggctacctctgcacgacataccgtgcaggccatcactaaagagtgatggagacttagctttaaactaaattcctgcacggtaaagcattgcaagaaccactactaaagagtagtgttttgtacaagttggttactagtagacaccgagatgttctctattctagtgtcttagtacgagagctaactccatgttctcattttactcaccaaacgtttacgcagctttacttgttatcttgtaacttggtgcaaaacttctcagttttgtccatacttgttgtaggatctttggtattaagaaatatatttcggaggactaagcatcttgtgaagaatttcctctccttgacttgtttgttgaagtacctggaaaccttcttttgataggcaagcagtttgaggttggcttggtctcttctttcttctattttttcaagggattctactagcaatgtggggtttatctcctggtcttaacagactaaaagtacccttatctgggtgtctttttgacaaagacttactcaaatggctttgcccccgacatgattgttgtagagccttcatgaacttctttcaatagttgttcagcttctttcttggtaacaaatcttagaggtggcattgagataccacatttgtacattaccccatccaggactagatacttgccaactttccttttcattattcttggttcattcttgtcttctagaaagatttctacctagaagttgttgggttttatgccctaaataaaactcatttcaatataatcagatttacttattaataaagatcagaaataacattttatgttgcatggttcacatgatttatttcatgattatatatatataatgtatgaattctatttaagtccagaacatatgaatttgttaatgattatagtgttgtcagcacagtggaatataatcttaattatatgttcgaaagtttattccctgatttgtcagttcactggatttagactgacatgat

SEQ ID NO: 199218 - DNA, 757 bp, Cannabis indica
ccacccctcaaacgacagggtgattctttcactccgagtttgtcaatcaaaaattggaacctggctggtgacaatcctttggtaagacagtctgctacttgatcatgtgagggtatgtaacggatttcgagcttcctttgcatcactttgtctctgatgaagtgaacatctagttcaatatgtttggtcctagcatggtacactgggttggaagctaaggcactggcacccatattatcgcaccagataacagcaggtgcagtagaaggcagtttcatttctttgaacaattcttgcagccatgttagttctgaagctagctgtgccagggctctatactcagactcagtacttgaccgagccacaacagactgcttctttgatgaccaggagataagagagtctcccatgtaaacacagtaccccccaatcgattttctatcatctggacagcaggcccagtctgcatctgagaaaccaactagattgagttgtgagcctggtgagatgtgtatgccatggtgtattgtgcccttcaagtacctgagaactcttttaattgcattccagtgggctgttgttggagctttgaggaactggctcaatttatttacagcaaatgaaatgtctggtctggtgtgacacagatattgcaagcctccgattatactcctgtacactgttggtgagttgaggggttctccatcagacagagacaatggttttccacccaccataggtgtaggacttggcttca

SEQ ID NO: 199219 - DNA, 990 bp, Cannabis indica
attttcaaattaaagcaacaaacttgtggtggttcatagaaaacttctaaattacctccaatacacaaatctgagcaacattatctcgaagtccaagcttattgaactctatagattcttcatgcagcaacttgaatctaaaatggaggtacaaacaatcataaactagacagcaatacacgaaggattccttaacttcatccttattcagttttaagagagcagtacacagacaaagaatggacactgtaactcttgcactattttagtgcacagatgatcaaaaacatgtcattgcagtaaagtttgttcagtggttcagcaacaccaatgtctaccttaactgtgttgttctacatacgagaggttcatttagatatatagtaccaccataatctacaaaattaaattggtgaaaccacacagagaatgtgaaaatttatcactgcgataaaggactggaaattctttgacggctagatcaagaatatgcataaatatgaacattccacccactaatcaggtaaatcaacatctccctatttgtaaggaatgccatagattacagaatgaatgtttagcatcaaacatataaagacattgcaattaaaaatataaaatttaccttgatgaacgccaaaatattgcgcacccatcaataggaacaccagtacgcctctatattataaccaaagcatttattatattcttccttaaaaagtagcaaaccattactatgacacaaacctataagcagggcaatatcaaaatgatagtgttaaaataaatcttataactaagagattttttttttttgtcatagaacccctcctcccctctcccacacacacactcacatacccaactacaaggccataaacaaacttgtattgaataaccctcaatccacatcagaggttattctacatttgatggaaatagaaaaaggaaagaaagtgataatttgattgttcttcaccattgaaaata

SEQ ID NO: 199220 - DNA, 882 bp, Cannabis indica
atggaacttggatacacaaagagagggccagcttttccagtgcatcttagccttgttgccagtagacccctaccaatattgagcaataagtttatcaagggtcttacaaatggagacagggatgcaaaaacatgacatggcatatgaaggaattgcttggataactgctttaataagtgtctcctttcctgctttggagaaaaatttatgactccaaacctgaagtttagcactttctttctggagtatgtaatgaaaggacgagtttttagatcgaccaaagcactgcaggacgtgttatcaatactaagggcttgttatcaatactaagagtgttaaagaagaaatctttatcagaaacagccgtgtcggtgaaaaaagagtagaagatttagaaaagttaacagattgaccagtagctttatggtagagagaaagaatatcaatcctacaattattataagaagtgttagtaaagagaaggctatcgtcagcaaaaaggccgtgagagatagaaggagcagacctatagatagagatgcctttgaaattagtattgctagagtgaactcgaatagcggctgagagaccctcagcaaccaggagaaaaaggtaatgggatagtggatccccttgcctaattcctctggtaggggtgaaaggagggagtatagtattattgatagaaagcttgaaagtgacagaagagagacacctaatgataagagaaaccaaggaagaaggaaaaccaaaatgagtaagaatagcttgaatgaagccccactccacacggtcgaaagctttttccatgtcaagtttcaaagcagcccatcaaactttaccacctttacggtgattaatagcattaatgacctcgttggc

SEQ ID NO: 199221 - DNA, 1028 bp, Cannabis indica
ttttgtatttttataaaataccaaatattacagttcatttgaaacacctattattagtacatttgacacgtttattttactgtatttaatatattaaattgtaaaattgattaccttatatctatttcatatattatacatatatttatataatttatatataaagggtttcttggataggtgccttacttttaaaaatttacaattatagtaggtattttacaaattttaaagaaattctaaataatttataatgtcaaaaataaaattttaaataacaagttatacgcatataaaaaaaataagtatgcatactattctatatttaagatctattttcggtactataaattattgaagatcttttaaaaataggcacaatgcatattgtttattgagtttttcgtaaacccatggtaaaggaagattaagctaaaaaaactaagattaagaagaaaatgagatacaatttttatgtggtttgggtgttaataaactataattcacgagacaattttataagcacttggatatagtatttttacaactctttaatgtgcttattcgggactcgttagggtttcgtgcaataaaagcccattgatggagtaaaaatacataatttaatattataatttgagttattggacttggtaggtgatgcccaattctaaagagttgtcttccgtacgatacgtaccattgacagtgacatatttaggtgtgtgtcgtcgttgaaaaaaaaagaatgtcaggataatggatgtccctctaaaaaggtcatctcctttttgtcgtgcacatttctaaggtctatagaggagacaagttgctaaatttctcaggatagtgccagagatgtaccacatacgtaagcagtatctagaaagctagaccctttagataatcgctttagcttctgctcttagataaccgatgatagtattcattcccaatattacttttgtccttcaactttatttagcttatccataccatgtgaacgagacttcatctctttgaatatc

SEQ ID NO: 199222 - DNA, 1123 bp, Cannabis indica
aataatttaggagaatttttaaaacgaaacatagtttagtatatgtgtgaatgtttggggccaaaattctaattagtaattactataattaaatgaaagttacaatcattttgctgaaaacccctctaatttacccatatttacgaaaatgtccctttcttctccgtgagagaaccagaaaaactcagttcactcacttctctaaaccctaagataaacccaagaaagattcgaactttccaaccattgaaatcaaactctctccgacgagtttctggaagctatccaatgtccgctaatgtccgccgaatcgagaagaatttccaggtacactctccccaaatcatagcctctgaaagcctcaattttttggatcagtttttacctttctcatcgtccgattccaattcttcgagctcgctcaacgctaaagaacggcgtaaaatagctgttgggttatctaagatagttaaagtccgtaaaagtcatctattaaaagctttttctagagagttttccccattggtacttgttcgattaatggagcttttgggttgtcgagaaactgcatttgcattctttaaacttgcatttagagactattctgagaaaaatgtgagatcttgctgtgttgttgctcataatttagctgcaaggaatctaagattctatgcccaagatgtgatttcttgtgttattgctagaattggtgttagtagaagtagagaagttagagtgtttatgtggaaaggtcaccgagaattcgagacagattcatcggttcttgatacccttatgaggagttatttgaatgtgggcatggcaaatgaggcattagaggttttgaataagatgtgggaggtgaaagtgaggcctagcgcttcggcgattaatgttctgttcaagttgctgcttagaattggtgattatggtagtgtttggaagctttttcgggacatggtttgtaaggagccatttccaagtaattatacttttaacatgttgattctcgggttttgtcgaaaagggttactcaacattggagagagtttattacatgtgatgcgaaaatttcgatgtgaaccagatgtttttacttacaacattgtgatcaatgctaatt

SEQ ID NO: 199223 - DNA, 1081 bp, Cannabis indica
ttttttttttttattatttggaaaggctagtggtatcaattcctctttttatttatttgtatacatataagtataatatatttgtagtcgtactatgtatgtacgtagtattgattttttagtggagttgatggtgataaatactgatagttatagcggtttttatattagctagtctgatgtgtgaaaataaattgtgatacacaagatgaataaattattttttttattgctaattaattttgaaatagaatcttattcatcttattcccaaattctaaccttttatcttttccttttcatgattttaacactcctttgtctagggatattttaggaatgtgctatcatggaatttggatatcaaaaattaattggaaaatttgaatttccatacttacactattaaaattttatccctaaatgtatagttattaaattggtcatatatgaccacattactaatttctcaaaaatacttcacatttaaaatccctaatctcatcaacctctctcttcctctctctcaactcactctcgctcaacccacccgatcccaaccccaacccaatttctagatatgattcattctctctctctctctccaaaattacccactcactgtcattccattaacaacttggaattgtttattcaagtttttatttttttattaatatgtccaggtaaataattattcatatatatagatatacttttgtacgttatatatgtatataattattcatatatatatagatatacttttgcagatcaaatatgatgacgaagaagatcggatctgagaaaccattggggaagaagagggtccgatggggtccgatgggttgggtccgatggtcccgatggatgggtccgatgggtccgatggtcacgttgcatggggtccgatggtccgacgggttgggtccgatggtcccgatgcatgggtgcgataggtccgatgggtccgacaggttgggtccgatggtcaagttgcatgggtccgatggtccgattcgtggaggtctgattagaccgatagggtcgaaaagctttgcgccgtcgattgggtcggtca

SEQ ID NO: 199224 - DNA, 1395 bp, Cannabis indica
taaactttatcagttacagggttgtagagtgatgcttttgatgttgttgaagaaaaaaagatgatggtgttagttctgtgtttgttgtttaaggtgtattgatattgtaagatgattatattagttttccattttccgcatagaataatttctttgacttcaaaatgttaaaaaaatttatttggtgccatttcacaattgattgcattaggaaatgttttttaaatttcaaaatctttggccaagccgatcttctgcttaaacagaacggtatctgaaatgatttcttttttggttgtactacggattccaaacgaagcccctgatagtaaatgtggctattgttggtgtttgtttatcagggtaatggaaatgcaattccttgggctgctggttttgtgggtcagagagatgcgcgggaagcatccggtcttgttgtcgatatgatacgtcagaaaaagatggcagggcgggctcttctaatggctggaccccctggtactggtaagactgcactggctcttggtatatcccaggagcttgggagcaaggtaataaattgatagtttgtgattcataccttatttgaattcatttttttctactgattgaaattagtcaattttaaatggtcagtgatttgtttcaattttaggttccattctgcccaatggttgggtcagaagtatactcatcagaagtaaagaaaactgaggttttaatggaaaattttcgaagagctattggtctacgtataaaggagaataaagaagtttatgaaggagaggcaagtattggctgtcttgtgcttatttgatttcgtctttggcttgttttatggttactgatgtattagtagtctcatttcaggtaacagaactctcaccagaagaaactgagagtgtgacaggtggctatggtaagagcattagccatgtaattattggactaaaaactgttaaaggaaccaagcaactaaaattggaccctactatttatgatgcactgatcaaggaaaaggtaatgttttttctcccaagcatatttagccaggaagtttattttgattctgtttattgagatcttcctgtacaatttgcaggtagctgttggtgatgttatatacattgaagcaaatagtggagcggtaaaacgggttggtagatgtgatgcttttgctacagaatttgaccttgaagcagaagagtatgttccacttcctaaaggagaggttcacaaaaagaaggaaatagtccaggtttgttttttgtggactgaacttttggacatgtttccttatgtcatttggaagatgctagtcttaaactttgggcacttcctgtttggtgctgattttggatattgtgactccttgagtttgttcagaaagcttaa

SEQ ID NO: 199225 - DNA, 1209 bp, Cannabis indica
aagaagctctcaagatctggagacataagtggccattttctcactttttatctgatattctccagatatttaatttaccactagttgagaatcactgtaaatttcaatattttgaaccctaacttctttggataaatgtaagcccacaatcattgctttatattctactttgttattggaggtagtgaattcaaactgaagggcactatcgagctgatgtctttgcgaagaaactaaaattattccagctccagaacccttttcattcaatgttctgtcaacgtaggctttccagatttccagttctgcaattaattcttttggattattgttcattccagtagactcttcaatgaagtctactaatgcttaaccttgattgagactctcaactggtaatggatgtcaaaatagatgagctctatggcccacttcaataatctattagaagacactcttttttgtaacatttggtgaagagcgtggtttgtaagtacctagataaaatggggctaaaaatattgtcttaacatctgcaaggcaatcaataagcaataggaaagcttttcaatcattggataccttgactccacgcctaacaatatttttcttacataatacactgaaagttatacctttccttcttctcgcactaaggcaacactgatggcaagatctgacacaaccaaatacaggtaagacggttctccctcaaccagtttggataaaacttgaactcttactaaatgcccttttaacttttggaaggcttcttcacaaacggtagtccatttaaacttattaattcttcatcaaacattaaagaacataatgaatttattagttgattttgaaacaaatctactaagaactaagatccttttggttagcctggttagactctgaacatctttgtgctgtagggggaaggcatgtctagaagagcgtgaacattttttggattatcttcaattcctcggaagctgacaatgaaactcaagaatttccttggtaaaactccaaaggtacatttttgggatttagcttcattatatacttctggataacagtgaaggagtctcctaggtcattactatgctccttggaatttttagacttcaccatcatgtcatccaaataaacttccgtgttcttcccccaaacatccttgaacatcttattcaccaagcgttggtatgttgctttgac

SEQ ID NO: 199226 - DNA, 1250 bp, Cannabis indica
gttctcagcattacaggtacatatttagaaatttatgtatgtgtttatgtattatatgagatcttgcttttgccgcctctgtttggttggtgagaaaatttaggaaagaacagagtttgaaattgaaatctaacaaatatacatgtattgtatttttttttagggaaattagtgttttgctctgattatttagaaatatgaccttttagatgtattgggtatttttactgtgtcaatttttgttgctaaaaaatcgcaaaataaatctgatttgagaaaatatactataaggggatgaaattttttgggtgaataaaagagaagtttttatcttactgaattatctaatttagttgcatttttctaggaggaagagaaaattactacataatatcttaatgcaataaagagttggtactggtaggtatacatagatctgaaaactataacataattgagagaacaaagtttgattggctttattttaataactaacataactaacaactgaactgctcgatctaacatgagtcatgaggtctggcatgaatcttatcttatgtcttgtcaaggtggtttgaatacttattaatggttgtgctttactattaataggaattttgttaaatcatactctgtggtcaaactaagttaacaagagtgtttgtgtgagcattgccttttttcatcctagttcatgaagagaataatttaattttatctacctgttttagaaaagggtggctgtgtacaaactatttaggctgtgtttggtaggaaggagatagagtaggagatgaagagtttagaaaggatggggagtaggagaaatagagaggatatattggtattagagtaaatttggaaggatggagagtaaaataaatattaaaattattatattataattactaatacaaatatattttatttttaaatggtagaaatgatattttgtttaattttttttgtctttttctattttcttccaattttggtggaattaaatttgtgtatttggaggaagatggtctccctccatctttcctctgccttcctccttccttccctcttgccaaacaagagaattcatccctctccctctccatccttctctcttcctctaccaaacagtctgtagtgttgtaacaagctttgagattctctgtatcacctgcctttgttctctagtcttttcctttaatcaataagaaagatctttaggtcctattagagttagttccacattg

SEQ ID NO: 199227 - DNA, 1244 bp, Cannabis indica
caaatactatcaacaatattacttgaaacaatatgtaggatctaagatattaccgtacactattgcagcgacaccatagatcataatcttcttcttggcataagcaacttgccataaacgaaattcaccttcttttgggcaagcaatgcaaccatcatagatctcctccaagagttataattctcactttcctgtgagaatttttaggaactaggtttgcacaaggattgttgccatggattgctttatccaaatacaaacaagtatttgtttaaaaactgagaaatgattgtaattaccaaaattgttaccttgagttgagttatatgcatttgaacacctccaacatgagccataggcatagataaaaaaataagagagaagaagaaagaagaaaaaataagaaaatgagctcacaagtaacgtgactgtgatactatattaattttagagtgcaaaataaaaaaggaatattctcttatattgattaatgaaatatgtacatcaagtgtttatgtagaagctaaacactacatattaacatagtagttcattctaacaaatttataataaactaaccaactttactaatgcaatgcaatgcagtgcttaattacactacaaaaaatctcaattttagtcacaataaaatttatgactgaagataaaaaagttgtggctaattataaattatcattattgtgttgtaactaaataatccgtagccaaaagtattagtcacacaaaaattacaatttgttgtgattaaatgtgttttagtcactgactaaaactaaattagtgacaacctgtaactaaatactatgttttagtcacaagtaactttttgttgtgactaaaagttacatttagtcacaaaaaatttatgttgtgactaaaaagatgtctctaaaatagaagtttttgtagtgttaataggtagaggtgcaatatttaagcacttcgggttaagaaaaatttgatatttaaattttatgtctaattaagttttagtattttttatcaagaaaaagtttgaattttttaagtgttatatatattctttaactattaaatatttttgccgaaaatataataaagtttgaacgagatatatcttgggattggtttaaggttacaaattaaataaaaggttagatgagtgaataatgagcttaagtatgacagactgaatattttttttccttctttaaaattaatatatgatttgttataattaatta

SEQ ID NO: 199228 - DNA, 888 bp, Cannabis indica
agataagaacacctggccgcgcaatttcatagtgagaacactgcctttgcggacacgttcccagggtaaagcaacaagcatgcgaagcttgacgacaaaggtcttccataatccaggcttctcgaactgaaactcaccgcttggatacacctcatcagaaattttcactgcctcgctattaaccttaacctcagagtcattttctttactgtccttctccagtcgctgctctttttcatctccggtctttgcttccgaggaggaggaatcgaaagcttgagccgaaaagtttctagaaggttcgcgaagcgaggaggaagaggaaagcgctagggggccgcgaagactatggcgtcgaaaaggaaggcgagagagcggcgaaggaatcggaaaaggcttggggacggagaggattgcggtgacggcagagcggtgtaatggagaggtgaggtgagaagtctgtagaagaagaagcttggccatagttgagttgagctgtctaagagtgagaacgatcctctctgactgtctccgccgaaggaggaggaatccggaaggaatgggccaatcatgctggcgggaaacggtaagaaaagaaggatgacaaggttaagtttttcccacgtcaccctattacatgggtcgctttctctctctctcttttcaattttttttttttgacaatttttcatatgggtttcttatatatctttagataccactttttttattattaactgttaatcagaatatttatttcagaatatttatttaagtaaactggacattaatatttgatatgtgacaagaaagaaaacattacaaagttgagtagtcccgagtcatagcagtgaggggtctctagccctgtacccaggttaacttcac

SEQ ID NO: 199229 - DNA, 787 bp, Cannabis indica
aaaatactagagcatattattattagttcataaaactaaaattggatattcatataaacatctcaacaaggctagaaaatatatagaaaataactttctttttgttcttatacagaatatagatttacttcaccaaaacatatcaaggaggtagatggcttaaaataaagaaacaaatatctaactcaaacataatattggagcttgaactataattacacacagaaaaagataagcaatgtaaatgtacacaattataataagaagtatcattacctggcatgaagtaagaagaatcaactctcatatctttggttcaagtacaaaatatattttacctgaaatgatcatatgactaactgttttaagttacaaattttcattaaatgtttcaaccaattaagtagaaaaaaggaatacaattttaccttttacatcattgcagagtttatttcaacatgtagtttatcaaactctacataattgatgtgcttgatctttggccaatcttctcctcctttcttaaaccgttgctttagcaaaggacaatcgtagattgataaaaaagaaacagaagttggcagcccttcttcgggccagcattgcagccgtttacaattattaatatgcaaggttgtaagggaggtaagttgttgaaaggccttgccatttaatgtttcgaggttgttggaatactcgagatgaagcctggttagagcgatcggaaggagcccctcatcgggaaatgaatcacctacccaactactaattcttaagaactctaaag

SEQ ID NO: 199230 - DNA, 1166 bp, Cannabis indica
aaagacccctttatttagggagttatcaattgggaaaaatatagagtgtgaaagaaaaaaaaaatgatatccaaaaatattttcactagagttagtttcatgaaactatttttatctaatttaaagaaataaaatatgggataaaaaaaacttcaaaacaaaaaggtaactagtcttaggaaaaattattagacggtaccaatatagtattagaaatttatgtagtagactccctaaagtggtattctcgtagactccctttcgatatccatgagattagtccaaatttttttttatgatcgcatatattgtagctatttaagaccactctgaatgtcgaaaataaaattaaacagttatttaccacatgtaataaaaaaaaatagtcgtgtatccaacaaaatatataaatcttattttcaatattataaactactcaaaattctttcaaaattattcctttagttttatatatcaatatttttagaacttttttgaaaaaagaaatgttttaaattttttttataagttaaaaactaaatgaaaattttaataactaaatatttttccaatttagcaaattatggacttcacaaattatcctgataaaaacattattgaaaaaggtattcctctacaataaggtggcgtcgtacaaataattaacgttattttataatatctaattacgctaataacaatacgagaattcgttacaataccttcttagcatttctctattgacaatcataaccttatggatataactaaaaggaaaattaagcatataacatatttggctatgctaagaccattagacaaaaattaaaactaacaaaactctaaattgcttaaaggttcctccatatcaaaggacctgtttttccaaatatacaaaccacttttgatacaaaatcataaaaagataatacatctacaacaactacacaattagaagaacaaaaaaaaatgttttacatttgctaaaaggagagttgattctaatttcaaccaatattggtcatccattctacttcttgcctcatgttaccctcaaatggcatgagatctccattcccgtaaaagggtctcggtcttttcttgaacacggcggcctgtgattccatactcattgaagaaacgggcaagccttccaccatagagat

SEQ ID NO: 199231 - DNA, 1134 bp, Cannabis indica
gaagccaaatttaaaaatactaataatatttcaataaaaatctagaaaaaaacagagaacaagctccaacagctcaatccttagatattgaagacaaaaagaataaaaaaaatacacattgatagatttgataaaaaaactaattcctagatccataccagccgaacataacatacaaatttatgagagagagagagagagatctataccagttcttctccaacaacaccaccaatattgatcttagtctccaccattgtcattagctctggtgttcttcgccgagaaacatgatggggtatattgtgggtttgccggagttagcattcggcatgggcagcgccaaacagagaagagatcttggggcttcaaggactgaggagggagagagataggcatgtcgctggtcgttgagaagaaagagagaagagggagaggagagagagaaagacgtttgctggttgccggagtagaggagcaatgactccaattaagaggagggagatagagaggcgagatagagagaactaatttagggttttttgtttgtttcaggtgataaagagagatagagaggcaagatacaaagcaaacatttagggctttttgttttgtttcacagtttcaggcaacataactttgtctttttatttaaaatattagattaaaattatcttatatgacaaattaaataattaataaatttgaaattaacatagatatttttatagatatacttactcttgcccctgattttgcccaatatacgtgcaccaatcacacagggacacgtggatcaaaacatcttaatgcttgaattatttgctttgccttcatgtaataaggacgcatccgggacgtgcctcccgtagaagtcatacggagccccctatgctcccgtaagccttaataacattaaggcatctccgcgaggtgtcaggcttcccctaagcagtcatttcgcatttaatgctgcatgggaggaaacatgttgggactgctacacgcaataaagtctgacggcacaacccccaatctgcagctgcgaagtaatgatcatttaagtctatcgacgactacactgtgaagagtcacatcagtcaaaagacaataaggacattccacataaaagcc

SEQ ID NO: 199232 - DNA, 1044 bp, Cannabis indica
tattaatgatacactatatccaatttaataaaaattaaaaaaacaaaaaaaaaaatacaaatttataatacaaagaaggttaaactaaaaaatgaataactaattatatattaatattggaaagtacatataaattatgactaaatgtctaaaagtttattaatttcaacaaagccattaatataattaattgcacccctcataaaatataacggggtagtttattggacagtagtgtttagcacatgtcatcgcgattagttagtaatgttctctaaaaattattacattaagtaatttataactcgatacttaattagtgagtatgtttagaagtgaaactcttgtctggatcaaacgcctgattatactctccaactctacctcaatacattcaatagttatcttcacagctaccaatctcttattagcactatgaagctccatagaatcataaatatcttcactactgtaattactcacacgtttgaacttggagttataaccaagaaaggacgacgctttagccgatttgatctggtcaagccaaggcttgtcaataagggaaaacaaagactcaacaatagagatagtggtcactctaacttctttcaacacatcaacgacaatagaaagattgtcgtttaaagatgataatgatgatggaacgagtagtacaaccttatttaatgatcccttgagagagttcaagcaattgatagtctctttcttcaatttcttcctgtaacaattgtagtctgagattttgttttcgatatcggttgttaattccccaatgcttaatcgtctcaacgtgaattgaaggtcttggagatgttctttcacaagtaaaagaacatcttttgaaacaccacacacatccaacattctcaaacatgcttctgaaacttcgtaaacccttttctgatcttgtcgtttgttataatcaaccacaactgagtatcgtaataagtcgtttgctgtgttttgtaagtttctcaatccctcaaaattcaatcgtcccatattatatatatatatata

SEQ ID NO: 199233 - DNA, 542 bp, Cannabis indica
ataccaccagttcagctcgaatgacaacacgtgcgtgggtggccatgtgagccattggatacctctggagccacaccaaaaagatctttctattcactcgatataaacttattaactctaagaagtgttcttttttttcaatacaagactcaataataaggagactctaagtgcacttttctttttttaaatattcacacatacaacaaaattttccaatatatgtgttgattgcgtacaaggattcaacaaatacaaccaaaactcaatattaacttttctctctctcctaaaagaatatcaatattttgcaaatgaattatggatgttgaaatatttacatattatttttggaaatgacaacaagaaccacataaaaattgtccaatgttggctatttagcaattaagctcccttcactggattctttgagacattatcaacaatgcacaacccactttctgatgcgattactactgtacatctgcaatatatcaagtgataaagataacatgaagttgaatgtatgttatacctaagaa

SEQ ID NO: 199234 - DNA, 1589 bp, Cannabis indica
ggtactgagtgcatttggtacatcgattggtcgtgcaaccaacactaccaacactagtactttcagggtactaagtgtatgtggtatagttattggttctacatagtcaagaacgttcgagattcatacatgttggacgcaggttaggcttgtgattaggtgtattcacacctaagttacaagtcaggatatatatgtttatgatttatgcttttcttactaactctgtcgactcacagatatgtgcttcatgtgtaggtaaaggcaaggcgacagctgaatcgcagtgaatttggagttgaataaagattgtacatatctagatgattagacctaaagtgttcaaatctttgagacatcatggcctcagttttgttagtctttgggtgacacctttcgattggttatattttgtaaacgtttgaaaaaaggattcgggatcccagagtgcgtaaactttatattttatttgattagtaaagtttatgcttattgtaaaagtttttgttaaacacaattttatattaaaccctttaattagcaaaggttaacacaataatttagaaaaaaattagtatttttatttttacacttcaaagcagtatattttgtatttttacgaaaatctacataacaatccacatatcaaatgacggagcaatctaaatcgtaactaaatccacatagcaactcacatagaaactaccaaaacaatctaaactgcaaatttaaaagaaaaataaaaaaaataatatataaaataattcatcttatatgaaaaggtatattttttatggggtttccttctggactcgtccttcaaacctgtgctagggtttcttcgtgcgctgcctccatgttcctgtcgtcgtcgttgtcggtgcccggcatttttgtctgtctggggtctacaactcttggtgacggtagctctcaacctcgaaccacacgaagctccttggttcacgtcgttaaaggctttgtcaatccacaacaacacttagaagcaatcatcaccacctatgacgcctccttggaaatagactcccccaaaacatgtatgcatcacttcccacataaattcctcttttatctcattttttttccataaatgtacctgccctaatatggttttctccctattttagcattaaccgtatctccccctttaattttggcacaatttttccacaaatagacttaattcaccaacaaatctctgctcctccctagtttttcatcattaccctacaatcctcaaaattcactctgattccaggcatcctttggagatctgtaggggtactgacaacatctacccattgacccctaaatttactgatatgtagagccttacattcaatttcaaggcatttgttctattgtgttatctgtatgagctcactaattccttttgtcatcgtgtctcaccaacctctcagaggtcttctcacttcacgattatatcacttaatctttccactataaataccaattctccattccatttcccccccagcctgatgatcactgctcaaccaaagtcactccatcgctccaacactgctcaaacatattccccccaaccc

SEQ ID NO: 199235 - DNA, 669 bp, Cannabis indica
caaactagtacgatatagctttgaaattaaaaaagtgtttaatatgataattattaattattattatgtggtttaattttcttttgcttatgtatactcttccaatattaattaatttcacgtcgaaccaaactgtgtggtgtgtgcataccttgagaagttatattttgtgactaaaaagcggtggaccatatgtggaaatgggatcaatcatgaagacttgttaataaaaacacaaacatttattaaacttacacaaagtctttgtgtcccagtcaccaataaaaatagaatagtgttatgaataggtacttatggagttcaatttggccaccatattatatatggtggtgtcccatggccatatatatactcatatactatacataaatgttgataaataattaatataaatattggattactaaaagacatatttcattaaaataactcatatttttgtataatctctcccacccaaaaaaaataaaataaaataaaaatatattgtaaaagtatttgtaaagattttttattagacactactatatatatatgaccttgttgacctatatgacatgtataattgtatttatgaaaaaggacatctgaactatctttatagattattaattaacgctcatattcgattaacaaatggtatattat

SEQ ID NO: 199236 - DNA, 2675 bp, Cannabis indica
ttttttgagcttgttatttacttgtaccaatgctttgtacgagtctagttgcccccaagtgaccgagcagacttttgactcatagtcacttgcatttcacaagtatggtttttgtctgttcaattctttggattcgagcagacctttgtacacattcagtggtaaattcataacttgctaatagaattaacacaatctgaatttaaatatacatctttaatcatttattggtctaaactcttttgttactgtagtaagctacataaaagctactatattgatctaattcgatctttagcaaaatttaaacaaaacacattgcattaaaaagaaattgtactttcagaagtggtcatccgacgtgagtactttgtcatttcacccgaacctttgagcgtggtctgcccagaaggccatttacttaagagttaatattctcagattttgtacttggagggtcatctgaccttgtacttttactggtagtattttcttaaatgttccctatttcaataccttggtaccagaatgagtttcatgttttcgtcatactgcccagtttgtatgatcctgattctagaatttcaaccaccttatatggtccctccaaaatttgcccgagcacacctactgtgatgtctttggtgtccagaaatactcttctgaggaccatatctcacacttaaaacttctatgcctttattttcttattgaagtatcgagccactttttgttgatgggccaccaatttttaggtttcatgcagcttgtttttcttcgattttgtcaagtgattctcctaggagtgcatggttagtttcttgatcataagtcaatattatgtgggatggaggttctaattctacgggcagcataacttcataaccatatggcatagcaaatggagtctgtctagttgttgttttctcagttgtgcagtaagaccatagtacttctggaagttctttcggccgatttcccttagcattttcaagtcatttccttaaagtatctttaagtgtcttgttgattgcttcgacttgaccatttgcctgagggtgtgctattgcggagaaactgttttcgattccatggtttgcacagaaatcagtgaacaactgactatcaaactatgaaccattgtttgagactatcttgtgagggagtctgaactgacatattatgtttttcaccataaagtctagcactttcttggatgtaattgttgccaatggctcgacttccgtccattcagtaaaataatccactgcaactactgcatactgtactccccctttacctttaggtaattgtccgactagatccattccctaaatagcaaaaggccaaggactttgcatctgagttagttcgttggcggtgcatagggtatatttgaaaatctttggcatttatcacatttcttaacataggcctttgaatcctcaatcattgtcggccagaaatacccttgccttagtattttctttaataggatttgcctagctgcgttgttgccacagaatccatcatgtactttagacaaaagtcgtgcagcttcttcttgtgtaacacatctaaatagtgggatagagaacccccttctatacatgactccttctatgatatagtaccgtgcaacctttctcctaatcttctgagtttcatttttgttatatggaacttctctagtattgaggtaagctgtgattggtgtcatccagttcggagatgtgtcaatcatttcaatttcttctacacaggatatgctaggttcttcaaggaattgaattaggattatattagctttgttagctatattgctgcttgcaagtcgggctaaggcatcagcaattgtattttcttctcttggaatttgcttaagatcgtagctcttgaattgtgcaagcagatcatgtattttgctgagataggctatcatttttccccttgggcctcttactctccagatacatgatttactaccaactatgagtcactgctgcgttcaacatgtagttttcgagcaagttttagaccaagaatgagggcttcatactctgcttcattattggaggctttgaacccaaatttgatccccctgtgcaggtgttgcccccgaggcatgacaagggcaacccctgcaccagacagttgatctgtagccaacccatctacgtgtaatttctaagtaagtttgtcttcattgttgctcggctgaggctcttgtacaggctctggggttcctttcgaaatgctttcttctttgcttgtacactcaactacgaagtctactaaagcctgtcctttgattgttgtttagggttgaaagattatttcatattgaccgaattccacgacccatttgagtaatcgtccagaagcatcaagtttttgtaatatttggcgtaatggttggtcagtgtatacccaaacatgatgagcttgaaagtagggctcaacttccttgttgctaagagtaggcagtcagtgagcttttctatcagcggtatcgtccttaagcttcaacgagccttttactgatgtagtagaccgaattctggacattgttttctatctcttccaattcttccattggcccaacatttgtttttggttccctaaggcgaggatccacatctttgtccccgccttgggtggctccctatttgaca

SEQ ID NO: 199237 - DNA, 1190 bp, Cannabis indica
agtattcatcctagttgaccaaggagacaatagtaataaaacaaatactgatcaaaccctagaatattattatggggagagggaagattgtgattcggaggattgataactcaacaagccgccaagtaactttctccaaacgaagaaagggtttaattaagaaggcaaaagagctcgcaattctctgcgatgcagaagttggccttgtcatattctccagcacaggaaagctctatgagtttgccaacaccaggtttgaccactaatacatatatctttaatttttctttcaaaaaaaaaaaggattgattaataatcctaatttgctttttcataatattttgggctggaaaagttgtggattcggtattaattagctagctagtttggtttctaataagaatattttagtaaatctggttttcatcatatgtgttcttaaaagctgtaattaattatgatcataattaattggagaaggttttgtgtatataaatactgttttattatatagtactctgatttatggtacggcatgcagcattttgtttttcatcattgcatgggagtagaggccgcgcggtccgtttccctgcgagttaagcagatcaatacatgtttactatataaatatatatatatatataacagtacatgtttatccccatataaatatataaacatatatatgcgttgatatcgtgatacattaatagtactaatatatgtacctctcttataaatattatatgtgcaaacaaatattatttacagatatatctataaaatgtttgagctttatttgagaagtgaagattacattaaggttttatctcctctctatttttttttttactaataattaattattccgatccatataaattgatcgacatatatatagaaaaatttatccctaattgtgatctcagtcaatttatggatcagaaacaattaaggttagtgctagctaattaagtatagctatagaggagtttgaggtagctagaatattttttggtcataattatattatagatagcatcatattcatttcttatccattgctgcagatccatatatgtgtatacacatatatattatcatttcagtataaactataactggagtagatatactcatgatcagtttttttctaatatatatacatatatctatatacacacaca

SEQ ID NO: 199238 - DNA, 699 bp, Cannabis indica
ttatatacatataaatttacttatattaatgttagacgtctataaaagctaataacttgacctaatttacctaaataaagctttcggatttcattgttagctagtgatccatccaataaccctaccctgtcgcccaaaatattataatatataaataatattatatattagactgtcttttttttttttttttttttgtattctatttagtttattaatgcttaccatgtcaatgttagtcatatattttatatttgtcagaaattattagtaaactttatgtggcaaacactaattaaatataatatatataaaacaaaataagttgaaaaaacatatatacatttattgtgtttctctaataataatttatatcaataagcatatgtagaaagagatgggctagacagcaagaaaagaagtgaaagaaaaacaaaattagtaaaaaagagaaggcttacacaatagagtaagcaaaaactattatttatatatatcaagcccattatacaagcaagacaaggaagacaataacagaaaaagcaaaactaacataacttactatcaaaacagactaactaacaattaattagttaagtgacatcactaagcagtttattaacattccccctcaacgaaatggtgtaggagatatcttgaatttaactgtcaaatagttaaacctttcaattgagagag

SEQ ID NO: 199239 - DNA, 1349 bp, Cannabis indica
tttataatctggccagctactagtacggtcaaatattaatattatacgtcgttttatgtatttcgatgtcgttcaaggaaaaagggaagggtatttccgtaaataaacgaaaagaattcgggagagatcgaggtcccatgaatggagagtggggatcacagccaatgaaaaaacaaaatcgattaacgttaaagaaatacgaaggcctaggactttgggccgaaaatgattgggcataggaaacggttgtaatccaagcgcgtggaggagcgcgtgtggaaaaagaaagtggaggtacagtgaagggcggctgacaacagagaaagaccgaatgaagccaaaagtgttataaggccgtgtttggttgtgtggcagtggggccatcataaaatgaaaaaaaataagagaaagaaagacattatatcggaaagaacaagcaaagttggtactatagtagtggtaaatactacatatagtagtagagtagtggagagagaaagtagattgagagagagagatggtggtgggtagtgggtgtttttattggagagaagaattgaattaacgagtgtttttgtatttattagttacagcaaacccaagaagaagaggaggaagaagtagaaagagagtaaactagtgagagagattgagagagagaaaggaggaggaagaggaggaaacatgtccaagttcatcccaacacctctgtagcttgcttcttcatagcgtatcagattccaaaggtgtctctctcttttctatttttttgggattatttttctaatcccgtacacttcccactagtttccacctttcccattccttggttttttttcttaaaaaaaattaagaaaatactttttctgcttctggatttttcgtggggttcatttattggtgtagaatctaagtgggttttgctctatttgctgttttgagagtccttatacacggtgttgagatcatatggtaatgttgttgaagaagggaaagtggtcctggtaaagtcttttatggctgatgtttgttttctggctttatccctgatttggatcttctgcttttctggttcttggttttgcgtttgaagggtttttttttttgaacttttactgcatttggttgaacatttattttccataacgttttgtttgggatcaactagggttatatatatatgacgagtcagataaaggtcgggtctttattagtacttaaattaatatgtcaatatggtttggtttgtgaactttatttagttgtgagtcaattcatgcctaaaatcttaagcgatctgcaaactttattcttttcttttgttggtgattaggacatagtaactgcat

SEQ ID NO: 199240 - DNA, 1015 bp, Cannabis indica
acaaacttggttcacaacatcgcgcttcactatttctcagtatttttggaaaaatttaaatatttattagtaaatacatatattattattattattattattattattattattattattattattattattattataagaattaacatgtgttttttgtgttgggtcgtggtcatgtctcccgtggcagacctatatagaggctagaggtattagtcgagaaaaaatgtatatgtattttaattagttacaatatatctttataattaaaaatgataaatataaacgtaatataaatcccccttcaactttaattttggtccggcttattttagcatttttctttttacacttactaactattaaaatcaaaatactacgtacgattgaattttcataattgtgtaaatgatattttatttatttatttatttcttttttccctcgtattttgcccactatttatgaaaatatagtaaatttgtcaaacgtgcttttcacattgcattgcagagtacagttttgtgcatgcaaattttgatatatgcgtggaatgaattagaaaacgttacatcataactactgtatcttagatttaccaattcaatttttttttttttttcatttttgtaacaataaaatatattattgaaaaataataatattatacgtgtactaaggactaaacaatctagccaaattgaccatgcgaggaacataaattacagaaactcttaatttaaaactttaattacttaattaataaaatagcatcaataataaatatatcctatataattcactagatttactttacaatttcctttttattagacaagaatttaccttctctttctattttttttaggttctaaagtttaaagcttctttcatcgtgaaaaaggagtagtatctaaattgcttacattaatttttagtttaagctagaaaatatatgatctgaacttgagtattcttacacaccatatgacaaataattttttaaaaaataaaa

SEQ ID NO: 199241 - DNA, 931 bp, Cannabis indica
ccgaggatgatatttgtaaaggacttgaaggagatcgtagttaagatgatgatgacctttccagtactcacctagggttcatcaacaaaaggagggagacaaaaggtgagcgttggacgggggaaaagaggaagaacatgtttattataccgaccaagtcgattcaaatggaaagaaggaatttcattacaaaatgacaattctagatccaaaagttcaaaatacttagaacatcaaaaagttctgtgaaatccatgaatgggtgaatgtgaacaatttcaagccaaaagtggaataaaattagagaatcaaaatacctaagcatatgttagtcaaagttaaaagtcctatatatcctctactcttggatcaatcgagaacagttcaagaatacagagattttgcaccaagaaattcaaaaaaataatacatgtattcaacataaattgtataaagaagaagaaaagataacttactcactgtttgaagctttctgaatattctcgaagggtttcaatgatgaagattccaataagttttcttataaaatttgagaatgaagagagaaaatttattactcttgttttccaaaaaatgaaatgactaaaagagttctcatgaagctttagaaccttttatatatatgtatttgaaatagataataattaataatttttgagtttcccccattgacgttagcactcgttacagcagtataaatgtcatgcatgttctaccatataaccgttagtgcgtgattcgaggtacatctttcaagataggtattaaatgtctcaaacatcaaaaaggcatacaattagtcgcatcggatcaaagatgatagctagacatgcatcacctatctgatcaactttgtgactaagtatgttggcattcacctaggtgaggcgtggatgatatttcatcacct

SEQ ID NO: 199242 - DNA, 1488 bp, Cannabis indica
actgaagaattcaaatcagagagaaaggtaccctatttcatcacagaagcgttagaacccaggatgcaagatggcccgctatgactaccacttgaatttggtgtcggtaccaaggtactggaacgaagagcatgagagacgacagtactaataaagcagttgtttcctaaatagattttcttacattgatattcactttacgttgtggaagtgaatcggttgcctcatgagccgaaaagatgctatgaactcatttgtaataaaaggggcccaacgccaagttatagcccctacactattagtcgaacaacgcatcagtgtagtgggtgtcatccaagagttttttacgacatgaatcatctcaacatcttcttagcttggtgcgatgcttctttctagtaaatgttccactagaacacatatagtttgtcagcttcctttgtggtgggtagccgtgcaattagcattggaattttgttccctttgagtttgctcaattgaataatattaaaatttctgaaataaaaatttcactttcaccaagtatgaggccatttttattcccctcgcctggtattctccaagaactaccagttgcgaatcactaaagcatcttatagatttagcttgcagtcctcgtgcaagtattagaccaacaaacaaggtttcatattcaacttcattatttagggcctcgaacgcaaatttcatggcttagtggaatcgatagccatcaggtatgaccaatatatatcctgcccccaagcccttttgatcagacaatccgtcaataaacaatatccatgtagcttgactttgcttttgaatttctcttcttcgagcaacctagtgcatttatctatgaagtcggcaagagcttgtgccgttatggtagttcatggatattaagtaatttcaaacagttctagctcgacatcccatttaagtaatcgtctaaaagcttttggtttcattaatacttgtcaaaggggttgatttgtgagtatatttatggtgtgtgcttgaaaatatggatggttctttcttgatgcatgaaccaagccaaatgagaatttctccatgattagatatcttgactccgatcccaagagacgcttgctaacatagtacattggcttttgaacctttttgtcttctcgtaccaaggtggcacttagggatgtttcagttacagccagataaaaatataacactttgcttgtgattggtttgaaaaaaatgggaggctcccccagatgctttttaagtgcttagaatgtgcttgcattcttccgttcattctacattattacttccactaagaaaattgaagaaaggtaggcacttttttttttgatacaatccgatttagtgtgacgatgcgacaagtaagacatggtacatctttctttctttgaggtgaaggaagagagcttttatcttctctgattttgcttcaatatcccttgagttgataataaaaccaaa

SEQ ID NO: 199243 - DNA, 740 bp, Cannabis indica
atttacttacttcaacttaataacaataatagtagtgagtaaaatatataatactatatatatatattatatatgtagcaaaaccaacgataaagaaatgaaaaaatacatgtattataatttaaaactttagaaattactacaaaaccgacaaaattagagacacaaaatactttaaaattagcgataacaacacggaatgagataaaactcagatgagaaatgatataggtatatatatatatatatattgtatacaaaggacataaaaacagtgataaaatggaacaaaatgattcaataatttaagagaaagagggataaaaatacaaaccttaatgatgaaatgatttaatatggtggctggcgatggagaacaaaatagtgaattgaatgagagatgaatgattagtaaacaaggtttccgttttgagaatgaggaggagagtgtttaagcttttcgttaggagtttgagcttggaagagaaaccctaaaattcaattggcaaaattggaattttaaaattagacgaggatactttggtcaagtgaaaatttcattaaatatactttcagcttccggcaaaagctaaaatccccaagttggctaaaagctaaaacttttaaataaattttttaaaaagccatatttttaactttaccaaacatttttttactcctagctttttttaaaaatgcttttagctaaaattttggattttctaacaaaaaacaaataa

SEQ ID NO: 199244 - DNA, 924 bp, Cannabis indica
gcttaatatataatatagtttggtctcctttaaatgtttaccctggctccgtcgctggacacaatattatagaaatgagttgggaagagaggcttggtgaggatatcagctatgttggatttggaggagacgtggttcattttgatggtgccattagtgatcttttctcgaattaaatgatagtcaatttttacttgcatggtgtgttcatagtacacggattttctgagatgtgtatagcagcattgttgtcacagaagagagtttcagggagtctggtgtggatgcaccatccaaagaacctcctgccaccacatctcaagcaattcctactgtagcttatccagcagcatctgttgcaaaacctccagcagctcctactgcaacatctcaaatatcacctgctacagaatccccaatagctcctgttgcaacttcccatagaggagcttttacttctaccaaatctagcagattaattaagaaacctgcacacttccaggattacaactgtaacaacagtatttccaattccagctcaccctatcaccaactacctctcttatcacaagctatttcttgaagcttggagatgagttcttgaagcttcggtattttacatctaataccatattaagatttcagattagagagaaaagagtttattgatttattatttgataatcagattacaatggcaaaggaccaatatatatatatatagagagagcttaggatccaagttgtttggagacaactttaattaactttataatttaacataattaatttcacctaatcttaatatatcaatgtaaatagtataaaatacaagaatgtaaagaaaaatatatttatttaatgaaatatttagtataaattattggagttgttgtatcaaaaataaaaaattctactctaaat

SEQ ID NO: 199245 - DNA, 1308 bp, Cannabis indica
caccagaacaacacactcacacaagataaaagctacatagacaagtacgagaatacgaaagggactaaaataaagtagacaaaaagaataacgtataccaaaacaaagttctaaaaaagagaccaaaatgaacaaaaaacaatactcataaagagagcccagaataaaacactctagagagagcgactcatcttttaataaagatttaattgttgatatatcttgtcttattttctctctctccctagtgtgtctattactcatgtcaagtatattgctaatatggttggcttggctagatatataattaattactacacttaatcaaatagaatagtgtatgattttattataattaataatagtttgtaataatgatgacgagcgatataataaatacaattaattggttgaagcacaaggtactaggttttattgagcatacaataataagatatgataaaaagatattaataaggagagtaaattaaacttagtacttattaggtaattattaattaatgactcggcaattggttctgatctctccttcatcaccagtaagaactccaatggcacccatatgaaccatggaacgaccaaatgcgatcttgaaagtgttaaagtcacgaaagcttctcacaaggcgggcggcgcgtcggttagtgagaagtgcggcgtcagatgagaaggctcctttatattcagtaagaccaacgtagtaatggctatcaaagctcagagagctcttagggtccatctccacagttgtcctagggtttgccggtggcgggcatttagccatcagctctgtcgcgtagtcctggttcaaagcagggcctgtgtctcctttttcggtgaagttgtacagcctccggaacattaatggacaatgtgttactccaagagtgtgtgcacctgtaatttgttattattggggtcagattcaagaaaagtgcccacatatatagttaccaccatccttagcaacttttatagtcaaaaatctagattgcaaatcatgtattttgaacccccacagatcaatagaattgaggctgagagttctaggattgtcaccgacctttaaatgagctatagtttgatttcgatcataagtccctgcccgtaataacctgttgaatgtctacttcgtgataaaattgaaataagaatttattttgatcgagttgtttgacataaatacttctgtcgggcttccacaggtcagccagcaaattttgaaagactcaaaaatcaaaaaccttacccgtgagaaaatgacctacgaggcaccatctggtatcg

SEQ ID NO: 199246 - DNA, 1782 bp, Cannabis indica
gtttttagaaaaaacaattgctacacttgttatcgattgactagcttgaggcctcatacttagttcatctaattgtaaaaaaaataattaaatatcatttaaaaataattaattatttaaaaatttattataaaaagagaattttaatttgtgtagaaagaagtttaatttttataaaaaataaattttattgtaaatattataattaaatgacttaattgttaaaataattagagtaaggatttaaatataaataaaaaaaattatttataaatattaattgctaaaagaggttttgttaaagatttaattaattattttaagaaaatagttaattataattaattaattctaaaaaaggaatgtttacatattagtaacgtatacaagaaaaatgtaaccatgatgtttacaataaaaatataaccattaaatactcactcccaatgaaatataataataataagttacaattcagttacaaaatattagaagtattaagaacttgataaaatgtgtcacaatactagtgtaaaagttacaaataacttgtagaaaataagtaagagatcgaaaaaaagttacaaacacaataatgtaaataaagggcaatatcaagagaaataagaacaaagtataagaaatgaacaagaataactctccttatttacacaaccttagtgttgagtattgtaaataattaaacttgaagaagtataaaatatttgtccaaaaatctatttacacttattatctaagtacttgttatgtttagttacaagtaaccaatcaccaattgattatagtaacatgtttatagagattatgtctagaaccaaccctgagtacttatgggtccgagaaatgcattataagatgaaaaaaatgggtcctttattgttcaatttattttttatttcttgctttttcgcacgttactgcaccaatcagtacttaaagtattttttcccttaaagtacttgaagttatttttttttgaatgaaaagtataaataagatattaaaaggtaaaaatcatacattagaaaacatatcatttgaaagattagtaacacaaggaggtccactttggagtgtcattagtagtacctattcaaaatttaaaaattagttcaaattaaactctattcgtaattaatgtgattagagtttagtagattgagcaagctatgcacttttattggagggtatcttgagaaaggagcatgatcataagcaagctctgttgcagttataccaaaagaccagatatcaacactgcaccaaagtggtaaattcaagtcataaccatgcagctgctccatgatctctggagtggagcgccatcctcatggacaaatgtaccaacatgtgagttgtctttaaaagtaatttttggtatgcgaatgattaaataccgagagaaattcccaacagtagaagaaagtacttgaagttataatatatattaactatatatttcttgtcttctactgaagtgcggcaatggactttggaaatgtgtcaccagtattatcttttgggttgtgtaaaactgatttttttagttcatatatatgtaagtatatatgtattttaaggcttgagtttgggtgggccttagacacgggcctagctcgccttaacctataatcgggcctgattatgtcttaaaaaagtatctaaatacattttcattatatactaaacaaaaaagaacagttataatgtcttactaacttaaacatgctacaatacatttcttaattattgtgctaacct

SEQ ID NO: 199247 - DNA, 601 bp, Cannabis indica
gtaccagcagtcattgcatcattagctgccatttatagagaaattaattagcaggaagaaaacaaaataacaaagagaattttggaagaggaattgcacgatttgaagaaagagaagaaagacaaaaaggctttattactcacatcctataggatttgtcttacttccctttatttctgtctctctctctctctctcacttgtatttttacaattttgtttaactgaactaatatcagggatgatggttattaagttagttataagttaatttcttgagacatgaatagctatttaatcctatgtcttggtatgttaatttttaatgcatcattttagtaaaattgcaattgttcattcaactaacctccatatttattaattgttggggtaaatggcgtcaaaacccctaaacttttcatttttgtatcagttaaccccaaaacctaaatttgagtggtaaaacccccaatactcgcgttctgttagcaatttaacatttccgtccattttaaatgttaagtgccatgttggactgtccacgtgtgcatctacgtggacacaatgtacatatgacacattttattgatccacgtaaaaaa

SEQ ID NO: 199248 - DNA, 1280 bp, Cannabis indica
cgtatatatatgaaaatttcccttgattataactctttgatactccaagttttgaagcccaacccaatctttttctatttgtaatagtaatattacaatgtattaaaatatataataaaataagaaaaatttatataatataccaaacatttggaaaatattataaaattacataaacacagaaaatttttcattttttactctttaaatttttttatttataaaaatatctcttcagtaaaaattgtaaactgtttcttaattattttatagtttatttatagttgttatgaaattatttttttggttatttttagttattttatagttgttgtgaggttgatttctcgttattaagtaatttttttttttactttttactgagcaaattgtatttttgtaattttaaaactacaaacatattttataattaaaaattttaagctgcaaaattgataataaaacataaaaaaaaatgatatttttaaaaatttcacataaaataaatattacaaatatgatgatttcagatagtgcttagcaccactaatatctcacaacaatgctcgaaaagtttaacacacaatttatgtgtagcaaatttctatttgaaccacttatatttttagaaatttcaataattaaaaacctttatttttcttttcattgtgagtattagcttaaaattattctttaattcattcgtaaatgcaagagtagttttaactatatttaaaaatattttgattaacacccaaattagatttttaattttaacatttttcaaaaagaaaattaaaatacataatagaatttctagaaatgcaagatcattataatgtccaaaaattgtataactctcgttatatataaagggtattttagtcatatttatgaatattgtaaccctaggatctaattgtaatattttactaaacccaaggtctaaaattaaattttttaaaatatactccaaaaattattattgaattaaatttgagtccaaattaactgggttgacatgaattgttttaggtagaagatgatattttatattcaactcttcaaaaactcttttaatctccataaccagctcgattcgacgtcgattcttctctttgaatttcttaaaaatttatagtatgagtaacataaagctccatttttaacttgttcacattctcaatctcaatcaccacactatgagtaggaatgccaatgtaatggtgtctctatatacctaaaaaaaataacaaaatcaaaaaccaaagtgtttaaat

SEQ ID NO: 199249 - DNA, 1535 bp, Cannabis indica
tccttaactcccattgaagccataccagcgataggaattacgaataagacgtccaaaaacttatatcaagaggaacaaactcacagggaaaaaactaccctgtactcacaacccacaaacaggccaaaccaggaaaaaaacccgacgcttataaaccaagctagactctacacggagccattctattatagatgcttagtttaataattaaaatttagagataacttctaaccggaagagaaaaagaaaattcaaggataacttattggaatttttacacatagtacttaaaatcacactttttcttttgcagatttttttacaggttctacttgtagttttttcagttgtcctcaggttacctttttgcaaatcctatttttgtattttctttatcatttttggatattcagaaaaatatctttgatttattttatctgaatttctaaactgaaaattgttaggaattgactaaataaaatgaaaaaaatgatggaaaactaatttgctcttttaagacaggtgagtaaatactcaaacatgttttagtgagaataatataatttagcactcctaaagaatcttataaatatggaatccatcataaattttcatagggtggagtttattttataggattttgatcatatacatctttgaacataagcataggttaaaatctaaccctacaatttttcttttttgaatagtattgtatcagtcagcaaggtaatagttttcaagtactatagaataaaaataaatatatagattaagggattgaaaatgcatgacagaaagattttgttgaataaatttatgacttaacattcatatattttcagtatttccatagaggaagcagagtcttgtatgcattggttaagtcagtcccaaaatgcaacaaacaataggtgtcctttgctataggaaaataaataaacaagcaaaggacagaaacaattactttgttaaaactaaaatagtagtacagataaaaagaggtcatatgcgggtgctaggaaccggaagatccttgatcagcatttgcttgcacatccagtgccaattctcaggggtcacctcacccccgagtgatcgaatcacagacccaccactgcaggaacccactttgcaacattcctctagtgttaaacccttcacaaggccgtacaagaacccacttgcaaacaggtcacctgctccagtagcatcaactgctttcgtttcacctatggccggaacttggacaacctgttgttataataaaatgaattacgaaggttttgttgttactactcatgataatttcttcttgttaactaactagttaggattcactcacctcttttccatgctttgcaatgcagccattagcagctaatgtcaccacagcccacttgcagtggttggcgagaaattctagagcaacctctggactaactgtttctttacccctgcaatcaatcacaccaggtaagattatgaactgagtacaactctccataaaactatttagtgcatgtttggcatca

SEQ ID NO: 199250 - DNA, 634 bp, Cannabis indica
tttaagcatgtaaagtgaaatttcccttagaaactctaaaatccacactagcgaattggatgtccattcaaatgtaaaaataactaattcaatctaattcacacatatttatatatatttcaaaagttatatatgtaagtaatattttaaagttaaaagaatatttatgtaaaaatctaatacatatagtataaatatatttaaaaggttagtatataaaatatatattctatacttatttatacgtataactatattagaacgaaattaaatatatatatattttttttgcatatgtttgtttttttcctcttcatataatttgttatttttgattttgtatgttttaatttgcttttggagacattaaataacaataatttatttcatgttgttgttagttatgcgaaaaaaatattttttatcaatattatatatgtaaggaataaaaagtaacagatttaatctacactattgtggatttgattgaatttgagctaatgtatggattagattagatccaaaatataaaattcccactttatacagatcggatgcacaataagaaaaaaaaaagtgtgaatttgattggatgaacacccgtaaaaaacatattagaaagataacttttttt

SEQ ID NO: 199251 - DNA, 797 bp, Cannabis indica
tttttcattaaaataaaattgaaaatcatcaaaggacacacttaattaataattaatggtataaacaaatatgtataaagatttttgcaatatatatttatcatatcttccaacacaccattttattgagataatgtatttcatcgtttaaaacatatataatatagttttgtcactaatatctaaattaataatcgttggctttttttttttctaatctaagacaatcatattcagagacgaactacatgatcctaaaaatgttgtttgctcaaatttaaaaattaaaggcaatatatggtttttttttcctagtataaatatatactacataccctgatatatttaatcttaagtcgacctcacattctttaattaaacgaaatatctataaattaacaatacacttatttatttattttattttattttaatttttaattttttaaaaaaaaaaagaaaggtaaagaagaacgtgaatcgtgaaatttagatccaatgaatatatgtaagcatatatgtaaacgatatatattaatctaacattccaaccataatgaatacttttgaattaaaaactaattaaaaagcaaacaaatatcattgtctctcctcgtttatcttaataacttagccctttttcttctagtcatttcaactttaaattaaaatatcacacaacctttaattttgcataaaagtagaagattataaagaacgatttatacgaatttcaacaatgtatttcatcttatttatttgttacattcagggacggatccaggatttttatttgt

SEQ ID NO: 199252 - DNA, 800 bp, Cannabis indica
tgtggctttccaaacgcaccctgaaattttacattttgtaacacttaaatactaaagttttttttttccagctaaaatacataactttacaatttgttgccagtcgtaggtactttgacgttaactatcacatagatatatacgtgacagttactaattggtccacatcatttaatttttatttattatttaaaaaattcaatataaaactaaaattgaaattaaaaattataaaaaaaaataacaaataaaaatcaatttttatcattaaaataactaaaaaatataaaataaaaagatccctaatatctctcttttctcgcactgtctctacccttctgattccctagtacggcgtcgatgtccaacccgacaaagctccgtccctgccatcgatgatcaacacggaccttaaaaccatgatggtcgagcccccacttaattattttgtactataaaaaatggtatttaaaaacttggctatttaggattttgttctgcaaaacgaaaacaatcaatggcttacgatttagtttacagtagcaacaaatacgcaacacaatcaagaaacaatataccaagagatctctttcttcaagtaattaattaagtagtaaaacaaaaaggaataacaccaggtttaacgagtttgagccatatgtaatgctctatatcttaatcgaaactacaacaaccatatctttattgatatcaatgtttacaaggttataagaatctttacaaacttctcatagattacgagaaaatttttatctttctagtttagactctctctctct

SEQ ID NO: 199253 - DNA, 1062 bp, Cannabis indica
aacttgaaacttaatgttggactaaaaaaacattttaatccaacaatgctggacttgataagcgattctatgctgggaacccctttctagtccaactaagttggacttgaaacttacaaatttaaactatcatagatatctaaagtttacaatatttgttaaacatatacatacataacaaaattaacaaatattgtattagaggaaaagaatatatatctaactaatattgttagctaaatatttgtcgaaattaatattttttaaaaaaacaataacttaactaatgacccacaatgtgataggtccgcaaatatggaagcatatctgtcgcccactcttccctcatctcatcaatcatagcttttggatatgactttttatctattagctacaaaatataaaagaaaaataaaataaataaataataaatataaataaacataaatttatattgataagtagtttacaaatatttatgtacatctttcttaatatagtcacgttgattaaaagactgctcataacatagtagccacactctgcattaattacttggttgatgaggatactacaataatttattattgaaataattagatcaataatttatcaaaaccttaaattattattaaaatttacatatacttgttacgagctccttaatacttaaattttttgggatctccatgctcttttttattaagtatgtatcatatgcttttttatcagttttataatgactggataatttgttacgaccgtattaacggagtctaagtaatatacgtggtatgctgatcaggtaccaatataggtagcacacacccaatacttcctatatgaaaaataaattatatgtatctattgaacatttattatattattgtacttacaatatatatctatatatatgaattaagttttgataataaatttctagaataatgatgctttcatatgaggattatatggtaagaattaatggtttgttgtatgtatggtttgtctggttgcacaaataaacagtaaaatggtcatgtattgtctactggtaaagtt

SEQ ID NO: 199254 - DNA, 1610 bp, Cannabis indica
tggcccaagcttatttgtacgaatatgagggtccaatcacaactcacactaagccctacaacgattcacatgcatgggttctcatttcaaaaatgctggaagaggatgttgaaatcccaatctcaattgaggggtgcaaatacgttaaggaagtagcaaacatgttccttccttggcctaaatacctaattgtaacattcgaggtagcttttgttacaaattaattatcaatgattagtggagtttgaatatcttaaatatttaaccatagtgaagtaggttctgcgaatacattaattgcggtcggatggatggataatcaattattttatctattttatttgttattaggcatgtttgaaattttggggacgttcagttatagccattatgctgccgaaaatttggtagaattaggatcaaatttgatatattatatggtattttgtataggatccactagctcaaccatcatcaagacgtgatgtgtcgaagggaaaatggtccatgccttgttgaaaaggcagtggtgatcaagcagatctattattcacaccagagatcatgacactaatccccaagtcacttaaatagatggttgaagaattcctgtgagtctaggataaacatgagataatcacaattcgagcagtccgtggattcatagcacctcgtacccagatcacgatatttggagaaaatttgtagcaggtggcgttgggtgacttcatcggcaaccaggaaatactttttggaatgatgtatacatttctttaatttaattaaccttatcaaagatctactgaaattattataatacaattaatttaaataatatttaatttagctttaaaacaaataaatatttaatttaaattaaataatatttattataaattaataagtatataatttaaataaattaaatatttgaatttataatagattttaaactggaaaaaaaaaataaattattaaggatttagcgtcaattttaatcctttgacgtcaattattagtgcatatagcgccagttatttagatataatcgacgccataatgtaccctataacattggttattatcaaataaccagctccatagggtacactttggtgtcaattgtgttcgaccctatagcgtcggctggatcaagatcggtagcaaatttttccaaaatcgacactgaaaggccttattaaaacccgcttttgaagcccaaatttgtagtagtgtagaaaataaattgtctattcaactgtcactaactccaaaagaaagagaaaaagttaaaattatgaagttataacaacaaatttcataaaaaaaaaataatgtagtagtacaaaaagataaattaagttgtcaaaactaattagtaaaaaaaattcgtaatataaaaataagctgatgagttaatattgtttgcatattttaacgaggtcagtgtcttgttatttttttgttgtttaatttgtagttatctttttgttattttatagttgttttcatattgttatgttcaataattaattttttttttataattttaaaataacaacttaaaaattttaaaactaataatacagtaacaatgtaaagaaaaaata

SEQ ID NO: 199255 - DNA, 847 bp, Cannabis indica
agtataaggtaactggttacccttgcttgatttttccatattttttaacctttttcttcaaattttttgatcatatatattttaaatttaaaaaaaaccatacttttgaaaaaaaaaaatataaaaaaactgtaaaatttataatttcctgtattttacatagcaattgtcaatagtttcctaattttttagtaatgaaatgactcatttaaatttttttttttttctaaaaattaacccacttttaattttgaaataagaagtttaaggaaatagaataaataattaaggaggaccacattacataatccctataggtgtggtcaaattgggatttattatcaactgtttgatgttgatgctgataatacccatttgccacaatatatattttatatatatatattttgagtggggactaatgttcttattatacttatgtacaatccatgcattggttgaaagtgaaaggtggtgatgttgtgtcacaatgttttttttttatgaaactctttatgttaggagagtatttagtatatataatatactatttatatatatgagtatgttttttttaaagattttagtttatttttttttttttttttttttttttttttttttttaaattaatgtatagtgtatattatggttataatttttgttagtttttgaataatttgaaattttaaaaaaattggtagtatatatcctataattataatattaatatgaataatttatagtgtacatactcaagttttaatttttgttaccgtgtttaattttaactgtaataatacttaggtttatatttttagaatcatggaagtatttaagtgtcaag

SEQ ID NO: 199256 - DNA, 599 bp, Cannabis indica
tactattacatcctaagtgacttgaatggaaaaatgaaccccattctatgctcaagagtcacttctagtgtcagatttcaagaacattccctaatgtcagcatcttcttgctctaaattctagttttacttcaagtataaagaattcttaaaacagttaatattccaacgatgtcccttgtagtagctgataacatataacaacaattgtaagagcaaaagaagagatattggaaaaaaccaagaataggggagcccttatacaatctgtcaaaatactcagagattcataaatttgcatatttctctaaatgaggttgttggcaagcacttactttttaagcccattgcaatgtgtggatatggtttaattgcatttcttttttcttccatttgactggtttagtttgttgctttcaagatttttggctgaggatcaattgttcttgttcaaaatatcaggaagaggaaagagtgggacatatacgaacccattgtggatcttttatctaacgaagaggtggatgctcttgaagcaagagaagagaggaatgcacggtgaattagagtattgcagttgtaaccttcattttttatttt

SEQ ID NO: 199257 - DNA, 736 bp, Cannabis indica
tttttatatatatatatatacctggaagcagtgagatttaatacaaggaagttgaaacgagcatcaaagaaggatcacgtattagatttcgaaattggggatcttatactcaagagtgcgccaccaaaatattggaggaggttaaaagattagaggaacatttataagaaggaacgattcccaatacacgatgatcaaatcatgcaaaccgccatttctcacaaaattgtgaatttgaaattaaaagtagacaaaaaaaattgacatgaaaacttacaaaaccgtcatagacatgacaaataataataaataaatacatatatatatataaagagagacagttcttggcagtttcaagttatgcataagcataaatagaactaggggagtagtgtttggggggaaaaattatgaacagataaaaatgaaggcccaataaaacataaaaagtgcaaaagcccaaataaagtagatgcccgaaagttcaaaacccaaataattaacgaaaataagaaaggcccaacactagatggcctagttggaaacccagaggacaaaaataaataaaaagtacaaacgacaaaagcgaggaagataaaataaggaccattccccgaagaagtaataataagaaaaaattaggaagacgtacaaataccgacgaaaatttgaaagaaagtaaatgagggtttaaagcttatcacctccgaccgacagaggaagaccagatgatgga

SEQ ID NO: 199258 - DNA, 966 bp, Cannabis indica
aatacatcatacatcatcatctttagtactatcattactgagtgggtactagaaaaatctttctacctggaaaccctaaaaagcaacagaaaatatttaaatattaaagacatatattatgaaagaattattagacataaattatgcttatttttagttttttttttttttttctctgacatatgcattaattttttcaacttgttacaaatagttaccgaattattcacagtattgtaaagtaatttttttgttaaattttcacccatagttaacagaatgatgatgtgattgtttagacaattgttattaaacagtcacatataatcattttgtttgccacatgtgatagaacctgacagaataaataatttacaacactgtaaatagttcggagagtactatttttaactgaatatttcaaaggatacaataatatataggtcataattcagagacaaaaatcataaataatctataaactataattaatatatatatatttatataatattgttgagattttgatcatgcatgactaacctcaagggaagggtatccttataatcaattccatagccttgactagtactcatcatcatcttgatcacttaattataaacttaatttatatatacccacaaaggtttgaatacttcgagcactgcagctataaatatatatgtatatatataatctcagttttaataacaaaagttgtgatttaatgtaaaagatctatatattacttaaaaaaatatcataatatatatgttataaaaaatgaagtaaaactttgcaattaatatgtagttaagaaaattataattttaaacacataatactaattaaacactaacctgaaggtctcttatgcttagtactgtgggtgaagaacacattaactatatatagatattttgtactgatatttaagaagtttttatgtttttatttatttttttt

SEQ ID NO: 199259 - DNA, 1030 bp, Cannabis indica
attgagaaattatatcattaatgtctaattctaacaatagagcttattttctactaaagcacatattatcataaataataaataaatcaatgaaaatatgttaatttttatgtctaattatgcgatcaatacaattctaatgcaaagaagagaaaaacttaaggccaccttaacaagaggtggcataacactatttgtacaattaatatcgagctttgcgcattttaatttaataaataacataaaactgctaatcactcacaacaagccacatcagtatggttttggacaccttaaagtatctaataacaatagtccttaattaatcacaaaaagtcaagattaaaaaaattaccctaatttgtctgtatctcttcaaaaattgaagaaattagggagaattaggatagcgattctcaacgagtcgacaatgaccaatttcatcaaagatgtggaatcgttcaagaaaggcataacgaaatgcttcgaggcactcgacattgacgatgatagtatgctctcgcaggaggagctttgcaacggattcggctaggctttgccgatcaaaattgtgggaaaggaaatggccaatgatctgttcaatatggttattgggagattcaatgtggaaggaaagggcagcatcggtcgagacgagttcaaatccctctcgaaggagatgttgatggccatagctctagggatttgaggtactccgattcttcttgtgcttcatcaagataacttgcttctcattattgttgatcatgatttgcctaaattgtcaagaaagaaagataaaagatttgatttcttttttctttttcttgtttttacaaatatatatatatatatatatattagttgaatctccctggacgactaactttgatatatttaggtgttatttgattagaaaaataaaaatatagaaatataaataaaaatgagaatgaaaataagaatggaataaaattatatttaaaatgtatataaagaaattaatgaaaaaaatattaatttttatatt

SEQ ID NO: 199260 - DNA, 712 bp, Cannabis indica
tgacacgtatgggtgaggcttcatcgggcgaaaggcatagcccgatttgttgtgtctcagaatgccttgacctttctatagagaatccatacggctcgcgggaacaaatggcttcagctcttggaatggagtgagactttagttcacggatgcccttcgcatggccagtagtcggagaactccccttcacagagactcttcccacgagatgagggcctttgttttcccggagcatcaattgagggagttgggcagttgatgactccttgaacatctttaattaaaattcacgtatcatgctaacaaaaatgcaaataacattaactcataacagtaaatcaaatttcaaaatttttaatatttttgatataatttgttttaataataagaataattgttcattttttatttaaaaaataaattaatatagtagaaaaattcatcatgccatttcttatttaaaaataaaagtaaacaaagagatattatcaaatataattaaaataaaaaaaaatacaaacagtgaagaatcctcatataaaatagagatctaaaatgataattgataaatatatagaaaacttatcatataatttcaaaatcgttgtcatcatcatatctcatttattgttgttactatattcaaactcgttgtccttaccatatctcacttgtagttgccactgcattaaaaattgatgtcatcaccgta

SEQ ID NO: 199261 - DNA, 638 bp, Cannabis indica
ttttctttcttttttcttcttcctctggaacgcctaccctctctcttcctcttcttccatggacgctcatccgatactctctctgcttgtgcaccactgtcgacggaacaagagcattgtgttccagcctagaacctcgaaaaccttgaccccatgcagacccaaaactaatatgtcatgatggaatgactcagttttttcatctgagtcatatcctgacagtttgccatattctccttcttgataattcctaaatttatcctccaattgtattactcgcaattgaataggatccataggttgttgattcgtgttttaattaagttggttacgcaaattaagtgtatttcgattcaagtgctcgtgaaggtctggctgtcttcaatttaacctctcatggagatcaggttcacgttgcctttgcttgtaattactcacggacctagtccctgagtaactttcagactgaaaaattgtgcgagttacttatactttcctggtcagtaaaataatgtcgagatctgctcccatctcgcgtttgtctatttgttccagtcgacctactatgcccgtaggatcgcgattctcatgtacttgaacttacttcacgcatcccatctcgcattggtcttcttctt

SEQ ID NO: 199262 - DNA, 1141 bp, Cannabis indica
gtaagtagtgatgttatcaaccatgttaaagctttctttgattcatgttccttctgtactgaattaaatgaaactaacattgtgtttgttcctaaaaagaaacatcctgagtctatgagtgaccttagaccgatctcgttttgcaatgttttatataaggtaatttctaagcttctagctaatagaattaaaggaattctaccttcggtcatatctgaaaatcaaagtgcattcttctcgggtagattaatgtctgataacatcatgatctcctttgagataatgcactatcttaaacgaaaaaggatgggcaaggaggggtatatggctttaaaacttgatctcagtaaggcttatgatagagttgagtgggttttccttgaacaaatgatgcttcatatgggattcaatcacaaaagtgtttctttgataatgcattgtgtctccaccgttaagtatagcattactcatggtaatcatgtaatggggctgattacaccaagtagagggattcgccaaggtgaccctttgtcgccttatctatttctcatttgtgctgagaggttctcttcattagtcaaacggtttgtgcaaaaaaggtggataactggttgtcgtgtggctagaggagctcctattgtatcacatatgttgtttgcagatgatagctatgtttattgtaaagctaataatttcgaagctacgaatgtgcttaatcttctagctagttatgaacaagcttctggatagaaagtcaacattaataagtcatctgtgttctttagcaataacaccaatgcaatagtccatgatcaagtttgtagtcttttgggtatggcaccaacttctgaatataggacttaccttggactatcgtgcactatggggacaagtaagaacgccattctgggattcttgaaggaaaaaatgaaaatgaaaatcaatggttgggaaactaggttcctttctaaggctaggaaagagattttattgaagtctgtggcccaagctttgcctagttttgctatgagtgcatttcttcttacaaaagaaatttgctctcatcttgaaggtttaatgtcgaaattctggtggaaatcacaatctaactctaatacaaagggagtgagttggatgagtt

SEQ ID NO: 199263 - DNA, 2497 bp, Cannabis indica
atatatatatatatgaatggatatggtggctgcattgatttaatgggttaaaaatcctacgtacgtgtaggagggtcctatattatatatatataaaaattcaaacagcaattcaattttaattacaacacaatcacatgcatgtttcaaattgaaaggccttaatttcttcttttctataggaaaattaaacggctgaattttaacttgggaccggaatagttttattataccaagtaataatctacaataattctaatacaaattacaaattaaaatagaagaaaaacaacaatcaacaaacaagttaataactattattgatgtgacttttcttttttaaattttattttttctaatttttagtgttttaaaaaaataatatatatatgtataacatttacttattacaataataattaattaataattataattaaaagttttttcacttctatatttcaaaatattttttttttttgtatttttatgaaaattcacataattatcaccattattaataattgattccatgttttataactattgacattattattattattagaaagtattttttatttttttataactattatcattattagtattgaaaaaatatatcttctttttcttttaaattgaaaaaaaaattatgtgttgttgtctaacaaactagatgcgacaatgtggatcaaccaacttctcttctccctcagtaatatcatactccaccaacatttgttcttcctcctccaacctcatggataacagaactagccctaacaaaataaagaaccacacaaccatgaacaagacaatatagatacaccgacaatgaagtcacacaccgggacactttcactatgtcaaaagacaagaccatatcaatgatacccatttgttgtttcgagttttaggagagccttctcttcctattttattttatttttcagaccacaaacaaattttaaatttttttaaataatttgtcaaaattaaagtttaaacagttacttagtactacacgcataagaaaaagtaattacacatgcaacaaaatatttacattttattttttacactcttaattatttgaaaattcttaaaaatttacaggtgattctaaataattacatcatataccattatgaaaaaaatagactgaaaaactctcgtaaataccaaaataaataaaagtgtattaaataatattttttttaatgtaataaccaatttattgttgagagaaataatacattggtcattatacaaggaggaatttcttacaaccaagaaacctcgttttctatctgtagagcacatcttgctaatccatgtcctacagtattactatttctcattacatattaaagatatacactcggaaagagaaataacaaggatctaatagatctaataatatgatcccattaggatacagtctcagaaaactaattgacaagattgataataatttcagcatcactctccacaaaagaaacgaaaaaaaatccagttgcaagtaccattttaaagcatacgagattgctaatgctttaacttctttagggaagaaaaaaccagctatggatttagcaaaacaccccaacggaaagccatctgagtcacgaaccaaagcgccaatactaatagtatcattttcacaacgaatagcaacatccacatttaattttaacaacccagcagaaggtgctaaccaatgagcaactcgtgatgggagagaaatcttaacatcttgcatttgtgaattttgtgcctttagctaactatcataattagtggtgtgcttaaatcgatctaatttaatgacaaccgatcgatccaattataattggtcatcaaatattggatatccaattatgatcggattagatttgatattatttttgaatatccaatttgatcggatcgaatgttggatggggtgtccaaaaatctaatacatctaacatcaaatcgaactaattaatatcttcatttagtttgaatgagtaattaaattttatgttattatacgtaaaaaaaaaatatatgtatatatgaaaattaacgttaattttttttttgtgattggatggattcaattcaatctaatagatactggatttaaaatattgaatggatctgatccaatttaagaaatactgagtctaaaatgtggattgaatatatctaattcaacatccattaaatgttggatcgattgaatggctaaacttaattggatcagattatatgataaaatttaatattaatataatctggataggtctaaattaaaaaaatataaaatgtgggtcaatgaatacctctaattataatactaaattgtccaacttaaaattgctgaagcattcttaaatgaggtgttatgttttgctttattttgttcagtccaaagggtccaaacaagaataatgaaaatacagacatgagataatagagaatgtgtaatattagaattatcctctat

SEQ ID NO: 199264 - DNA, 590 bp, Cannabis indica
tattttttttttttaattttcagagacacatttgaacttccctacattatttaaagaagaagtatctctaattgaaacctgatcatgatcttcaactgctattgaagaatcatcccacattttttctcttttttttttctacaatttttatataaatggctataactcgttcttcatcttcttcatctctgaaaaaagttctaattataagccctaaagctttagaaatggggttgcaatctatctccgaaaaagaataagggaaaaaaagttagatattgatttttttacggtgattttgttgagctcaacagatggaagctcctgcaaagaagaaatctaaaattattaaaagagaggaaatcaaggggagtcctattgatgttggttaaaaggggaagaatcatgctcctcgtttgattgaggtttgtattgcatttttttagtttgtttcaggtttattatgttgattagttcatttgagtttcatttatatatttcgtattagttggttttagggtttatttctagttctcaacttcaaattcatatttctctttttaatgatttatggtacttgctgttgattt

SEQ ID NO: 199265 - DNA, 818 bp, Cannabis indica
aggtcgcatgaagagttgttcatgtacttagcagttagtgacatagtggttagtgttgtgcttttcagagaagaagaacaaaaatagatatcggtattttacgttagtaagatgttgttagaaccagaggctcgatataccacaatggagaagttggcacttgccctgatcaccgccaaaaagaagctcaaactatatactgaaacccatccaataacagttctgataaactatcccttaaggaaaattttgaacaagccagatttatttggaagaatggccaaattggcaatagaacttgaagtgtatgatgtatcatatctcccgaaaaaaattcctcaataaagactactcattgcgtaagtttttcgtcaccttggatttgtgtagcttcaaaatttgatacgggcatcgtactaaagattttgagtccaataattcataacctgaaataccaagggtcggttgtatgaagacatactatgaacagtgtagcaagtaatcaagtagtatgtctcacactgatcaagctcttgtgaaaaggacaaactcaagtcgtggtaggagtaagtcaagaggaaaatctaatgatagaagagacaatcgtgctcactcatgttcatggaaggaattcgagtgctactcttataaaaaaagaaacatttaaggggaaattgtgagaaactggccaagtaccttgaagtaatgagaaattaagaatacaaatgcacatcagatctactagtgttgttggtaaaagttttgaaaagtgacattgatgtttgtttgttcatagccgatgaaaatgtttctaactc

SEQ ID NO: 199266 - DNA, 1142 bp, Cannabis indica
acacaactcacaacttttttagttcgaaggtgaactaaagttggaaggcactcggaacaagcacgccacaacaaattagctatcttcgggggaactttcaagctccaaagtttattccaaaacagcgaggtctgatcatcataccagaaccccttatcctgctgcagaagaccataagcactcttcaccgaatatataccagaaacttccttagactaggatatttgatccatagccgtgggcgcctgcaaagggatacttttaattaaaagttgatctctaatctcaaagagatcttctatgatttcattatcccatcctccattgtctaatgacatcaaacttgcaacagtggctgtagcaagtgctgggtgacttgaaacaacaaaagggttcaatgaattcggtaaccaaggttcatcaagcacagaaatcgaattaccatttccaacactccaccgtataccccttcgaatcaaagcttgagcttctaggatacttcgccacacaaagcttgggttggaaccaagttgggcagtgagaaaagatccatttgagtaatatctagccttgaaaacttttgaagctaacgagttgggtctagtgagtaatctccacccttgcttccctaacattgccaagttaaaatcatgtaagtcacgaaaaccaagtccacctccttttttgttcttgctaagtttgtcccaagccatccaatgtatacccttatgagaattcttcgatgtttgccaccaaaatttggtcatcattctctcgatttctatgcttatctccaatggaagaaggaacacactcattgcatatgttggtaaagattgaagaaccgttttcaccaaaatttccttgcccgcctgagataaaaactttccttcccaaccttgaatacgtctccgcaccttgtccttcaggaatcccaaaacaatggtcttgttacgagacattgtacttggcagtcctaaataaaagctaccttcagccgcctctccaatgttgaggaagttacatacttgttgtctaacaaacggcgttgtattggcactgaagaagatggacaatttagccaagttgatttgttgaccagaagcaagctcaaatttacgcaataattcttgaatacgacc

SEQ ID NO: 199267 - DNA, 778 bp, Cannabis indica
gtagtggtgcctagagtgtttataaagacaatgaaagacaaaatattcaagcaagaggatcaagaggaaatgataaggcaatggccaccctccaaagtgtttgctattcatgaaagtgatcactcaccatttttctctaaccccagatgtgcttttctccctttctccttgaagcagccacttacatcaaaatcccataattaatctatgagacatgcgtattatttaatatttataacccatatactttgagtttgagatggatgttatatcttacatcatagcaaatattatgccaaatttacatcacttttttttatgaatcgaatacttatattggtcaacaaaccaactatttacaaagcagaaaaagaaatcttgctgaagtctgttgctcaagcacttccaagctatgccatgagcgttttttttagggaatgatgtcgaagttttagtgaaagtccgattctaattcaataagtaattacttttgttggatgagttggaagagactttgtcgtgatcacaaggatgttggagaaattggtttctgtgaccttcgtgattataatctctccttttattggaaaataaggttggcgattaatgactaccggaagtactttagcggtcaaaatttataaagctaggtactatcctaatggtagttttttatctgcaatagttcaggtaggggccaagagatctattggttgtggtagggatgttaatgtacttcttgatccatggttccttgatgtgctaaattcgtatgtta

SEQ ID NO: 199268 - DNA, 1263 bp, Cannabis indica
atggcataatcacttttacaattggggatccctttttaaaatatttccatacatgccattgtaatactgataaaaaatatgcgttaaagttcaggaacatctgaaagtacaaatcttgataacttggcaccacttgtcggataagttgatatgtacatttattggagaagatccctgactcatggttattcatacgtttctacctattacccacatagcacatgtgagtcatagagactcagtaagaaaagcagtaatacaacataacatctcattacacatgtatcagcaattaaactaaataagaagagtcaaatgatcacacattactcatgtaattaaatccaaatcaatacagatgcttagttgcaaataaacattaatataaaaacattcagtaatatacaattacttgttaaataatacaatctatacccattacttcataaactaaccgtttttcattattatctaacaaaacaaccttgatgcctaaataggtatcctaatatctctgatgttgtctaaaaagataattctgacatttatcatcgatattcaaacaagcatcgttgtctaataagacaaccctgatacttatttttggttttctaatgttatcatcgttgtctaataagacaaccttaatacctatcaccgctgtctgaatgatactgtctttgtcaaacgagacagcctagatacctagccaccaatatccttgatatgaaaaacctaacaatggtttcagtttatagtcatgacttttgataccaaacctttccgtatctaaatatcattgcctcataagataactttaccatcattgcttaataagacaacatttttatcattgcctaataagataactttttcatcattgcctaataagacaacgttttattattgtctaataagacaaccttttcatcacataacagtaataaccgtatcttaatatgatatgcaatgtagtacaaatatacttttcttacctttaatccagattcatgctgttggaaagcttatttaactaggaccttatgttactactaaagtatgttgaaattaacaaccaaacatgaattctaaaatgattgaattaaacatataaggagtttaggaaatccttacattgatcgtagtggaaattaatatctcatttcattttgttctctcacccttgttcgttttaatcacagagtgtaatcaagaatagaacctcgaatcttctttaggctgtgaaagactacatagtcttcc

SEQ ID NO: 199269 - DNA, 1325 bp, Cannabis indica
catggtggtgtggaggaagctatggctcatgaaagggccagaacaggaagagtttgaagtccctcatattgatctttaattaacaaatgctttcatatattcattcattgtctaagttcatgaagattgatgcttataaattatatgtaacttttgttctctcatatttttttttaaagcaataaagttgtaatgtaaattcttttgattttaataaaaatgtttaagggtgtgagtttttgcttctttcttttttctttaattttatgccaaatgtttttgataccttaaacaaaatgcacaatcaatagagatacccactttaaattgcatcttatcatgtagaatagttctctcaagtctccttaatgtaccctttctattttcgaaatgtgataattatatttttaatttgttttcttaaaagggttgggtatgtactatgttgtaattattacatgcttcctactaatttttgaatttcttttaataatttatggtattagttttagggttcttttagaatttttagatatttagttagttattaactaacttatatattttttgacgatctagtgagagaaattaagaagaaatttttttgagatgtaggttgtacacaagttgtatgtgttttatcacaactccctcaagcgagttttttataggtacaagacgccatctttgtccttgatcctttgagatcactctctaatttgagctactattctgcataaagattggttacattatttgagattaaacctcgttaaattttttgtctcctgttatcgatgctacaacattccgtcacagcttgtttttagttattttttaggttttacttaattgccattattgtgttattccgcattattattgaaactgacttgttcttgaagtgtgtcaactcacaacagttggtatcagagctccatggctaagatcaaagtttcaagaaccatgtttcaagtttcaagaacttggcatcaatggcatcaaccatattcgaattgacaaatttacaggaaaaaataacttcgatctatggaggattaagatgaaagctctcctagttcatcaagacatttctaaagcacttgatgctattgttctcaaagagcttggagatgacaagaagaagatttaagaaattagatcgaaggctcacagtgcaatcttgttaagccttggagatggagtactttgagaaatttttgatgggtttttggatgaagcttgcagccatttacatgaagaaatctctagccaattgttcagtaaaattcagtacacaagtatagctatttttctttattttt

SEQ ID NO: 199270 - DNA, 634 bp, Cannabis indica
tggcaaggtaacattcttgctaaggatattaaaacatattcaaataaataaaaatattattatacttgatatataaatcatttttaactattagatgaaaatgtaaaatttcttaatatatattattgattttgatatgtattgcgcatttgtgcactctaatctcatgctaatatttagcttttttttcaaacttaatattagatttgacaaccacattctttctctcgaaatgttatgtgcttagtttcttctaaagtctaatttgttgtagatggtattatcgatagaaattatctttaagattatttaaaataactaaaaaagtagaaaaatgatgatatgcactatgtgattccctttttagaaaaaaaaataatagatttgacaattgtaagtatcatatttaataatatcacttaggctgtataattttctcccaacttttgatatttttaaagatcattttttccattatactaaaacatagagataattttaattgcaaagattaatacagatttagaaatgattaacgattagttacaaagaggataaatcatattcattctaaaacaaaacaaggagtggacataagaagtaaaaaaccaattgatattgttagtttcattat

SEQ ID NO: 199271 - DNA, 1408 bp, Cannabis indica
aagatcctcccatactttgagctgtcggacgtgagtacgtagcaggacgagtgaaccaactcgaacgtgctccttcgcttttggatcgtccaactaactcatcatttcgatcctcaaataattgagccttagccatggcatcagcaagatccacgggtttagccaacaacaattcccgtcgtatttccatcttgagaccccatacaaagaaattcaaaaacaaatgctcagaaatacctgtcactttagtcattagatgctcgaattcggatcgaaattgagctacacgacccgtttgagtgagtttcgagatacgacccagggggtcatcatacaccgagtctccgaaccgcagacgcaaggcgtggaggaaggcattccaatccacaaatgagccactcttctccatccattgaaaccacttcgacggtaccccatccaagtgaaatgggactacagtcaaacgaaccgaatcatcaatgttatgaagatcaaagaagcgattgatcttgtaaatccaatcttcaacctctgagccatcaaatctagcaaccttcacacgcagattttttaaaatgccattgatatctccagcccctctatctgtcgaagcacgatagactgttgggcgaggttgtgccattcctgaactcgcacctgcttcggttggatgagaattcgccatatgcgtgaacatcgccggaatctgagcgaacctctcgtcgtttttagcttcgtggtcattcaacaactgggtatatctccccaaatgagcatcagaaaattctttgaaacttgccttcatatcttcgaacagagcagcgatctcatcgttcttcattggatgaagagcaatgaaagcactaattgatagcaacaatgtcctcttcgagacaggactagtctcccaagcaaactattgcaatttcattcaaaaaaaccagaaaaaaaaggttcagccaatatttatatgtttctcaaaacagagcaattagggaatggaaattacatctcaaagaaaataacaatatggctcagccatcaagccactcaactctcttcagccatcacgtaatccttaagccacttgggtctcacacggcttctttttccctgcgctggaggttcacgatcagccactgcagctccatcttctttgacagctgaagccgaagactccccttcttggtctctgttatgttgttcagcccaattgtcaattctttggttcattagctttggatcaattggtattgggccttgaacttgggctttggtaacagctaatttcatttaacaaaggtttgttaatatgctaagaatttgtttttgatctatataaagtacagatacattagtattataggagttataactttgtaactgtaatattgatcacatcaccatt

SEQ ID NO: 199272 - DNA, 3252 bp, Cannabis indica
actttactatttttgctttctttcatttattttatgtaatcactttattttgactcactcttgttggcgagaagtgaggtcaacagtctatcttatacaaacataatgttgaatattactaatagaaatactatctaaatgtgtgtaggggcaagaggagctgaatttgaaggcacgagattaggattgctagagtttaggccaaccctagcatcaacatgctagccaacctggtggtctgtatcttggctgaccacctcctccacaggtgggtcggccaacccctcatcatgagtctctaatgatgactcctcttgataggtagtgacttggtctacctccatctagctctcaaaaaatgcctttccatgggccaatgttctctccacaaaagcctgatgcccatgtatgagagactagcacgtgtatcaggtaacttgaactcataagtaagtttggaggacaaccccaatggtctgctggccattaagagcctccctcagtttctccttgtgatcatgaaggtcagacttttgctcgatgatgatggcatcttttgtcgtgttctctatgtttctagcaccaagcatagtctctaagccagaaaccattctctgtctctcttctaggagaatctccaactcaggtatggctttgtctttcaccacaagggaacctccaatgtcttcacctgctcttaaagagcatccgaggatccctgtgagccatcatgtgttgagctcagctttatcaaggcttaataacaaaacagaacaataatagtattaaagccacaacattggccggccagtccccccttgggacttttatggcagaccagcccttcaccgatacatccaaggtcggccagacacatgcaacaaaccttagggctagccagcctacacagtgccaagaaggtgaacaaagctaagagtacaacttaccagagaaagatcccaaataccagtagagtagagcttatctggctcgccatcaccaagctcctttagatcctcatccatgaaggggaaagctctctctatatttctgcggctacctcagtagccctctacccaacaactgaccctgttcctctatcggtcctccaagtagcctaaccagcaagccgtaccacaagctacccagctggtgcaggccctagcagagggggaggcagtgacgacctaacaacatctccaccatgagaagtcctagccaccttggcctttactcatcccgtgggctcatttgaaggtccccgagtcagacctctcagcctgaaagacatattagtaaaagaaagtagaaaagtcagaaagcaatcataaacattcaatacaagataagagtatggtgttatcaactatcaaataccatcatcatcagaagaggaactatcagagtccttgaaaatttccttacccttacctctagatatatgcatggggcaagtaggtcccttaaaaggctggcctctaggcctgatccagagagaagcatcaccaactggatcctcgttggccaggctaggcaccggcggagagtcttttccttcttctctagattctacaagatgtgagataaaggcacctcaacagctaagtcaccctctaccaccgagacttccgcaactctaagagtaggaggatataagccatacttccaggaattttccacattggtcaactggattatatttctctgctctagcgagagagataggatgtggtttgccctatttacaaagtaaggatagagcatctgaagagtagcactagtcagaatttgtagtgcccgatcctacggaggccataggcagtaaagtacttcttggcgtacccaccgaccttcaacatggttgcacaattagtgtcacccaaccataggtgaccaatctaacataaataaaaatacccagtcctgttctgcttcgaggcagacttcagaacaaagtagtattcgatctcgtacggggtaggttgaggccaccctagctccctatatatgacaagcatcattgaaaggtacttgatgctttttcgcgtgagttgtgcaggacacatcccaaagtaagaagcgatgtccagaaaacactaacgaaatggaaatgctaccccattctcaatgtggcgcttagatcacgccaaccaacccaaagggagccagtgcacccaataatttaaatgaggaatctgacaatggaaacccctcactaagccactagtaaggatcttgctaaaggcctcatcaaaaagagtagaagcagtagagacccaactatctccctgtgatctcgcatctagtatctccagctcgaaagattgctctgttacatgatctactccaagctttgaaggctcaccaagcctgttcagtgggttaccattggcctcacagtgacccaatggacaatttgggaggacagaacaagtcctgtacctcctcctcttcgccggtgcggcctcctcaagattagatttagtattaggactctcgaccccttggtcaatctctggctcaacattagcactgggctgagcaatctcctccacaatcttaacttgaccccttgtggccaccctagccacatgatggtcatatggaggtgccctacggagggtctgtctcattttggccataaatatgaagtaaatgagggacctacacggctgtcacctcccctagtcaacacctggtgctacctacatggaagaaataaagggaggtgagcaacttgataaagctatcaagtcaacagtacccaaaggttccttccaggcaaaacacaatgtagaaggtcaatcatcgatcaagtaccgtcttaagaacactaactaagacatattgcaattcttaagttgtataattaactataatggtttcactacctagccttatataaagtttccaagtgaaaccatgcataaggccacagttgtatatgcctccaagactgtcacaagaccctagtcgtggtcaaaagagagagaaaaactggctgcccacttggagccttggccttggtcggcaagggttccaggccttagtggctggccagatgccaggacctagtctagtgtctagcaaggaaccataattccaggcataggtcgaccagcctaggggtacaaccccttggtcggctaggccccttgatagcctcccttggccggccaagtcttgaacaagagctccttggccgacgaagatcttcatggattagaagtcatgttttttcaagaactcaaa

SEQ ID NO: 199273 - DNA, 574 bp, Cannabis indica
gaattttcctaattttttttttaccaaaagtagtactttgtgtaaattttttttgaatttaatattaacatttttcaatatcacacaaaagatttattattatttttttggttaggcaaaaaaaaaaaattatttaatgtcatgtaattcagggattattttagacttggcaaaaacaaattacaaaaattatggatttttaaatatttttacgaactattactagtatgtatagggatgaaaattgggtgggtaatgattaagcggggaatgcaccctccaactccaaccccattcccgctccccatttattctcccatccccgccctcaccccgcttaattcccaacgggtttgaggtaggggaatatccattaggtatagagactatattgggtacctataaagattaaaaaatatagataatagtaaaataatgtagcgtaatttaatatgaaaataaagagtttttgaatttaaaataaatattctatttaatttatactttagtattatataaattgtaaagacaaataagtacagaaacaataattaaccatatatatttatactaa

SEQ ID NO: 199274 - DNA, 1049 bp, Cannabis indica
catatccctatatatatataaattcttcttattattttcatggtaagttttttctctgtttttgttgtaattaaatgaatatattttgtttgttttaattataaaggttagggtaaatgagggtggagcaaatattcccttattcaggagtggagtaataggaaaagacaacactatagcaagacatggaattcatgggctttattgggtgttcaacatagacattccaggctcacaacttttccaaggaaataatactttttttcttacaagaacaaatagcaccaccccattccaagggatcatgtatgactatattcgtctagaggctccacctgatttcacacactaaatagtaatatactctctttgttattatgtcattagttgtaatattttggtgtacatatgtttcactcttattgaattgatagaggatttaaaattctcacccatttggtcacttgaaagtccaagatttttttcttttagcgaaaaactcaaaaagaatctcatgtttatcatcacgtatggctggtcctgaactttatggaattttatacaaaaatatgatattttaatgaaatattgtgcataaagtgacatttttgaaagttttggatgaaagaaaaattatatttttataaatgtaggggcttttaagtagatgccctaaatgggatggagattattttttgtccgcgaaggttaaatgggaccggaatgagaataacaccccccgccatgacgggacctattaaatatttaattatttttctaaaatatattttatatttataatatatgtgtattgtttagtatattaattaggattatttttatacattttaagttatatttaagataataattagtataagaatcgattcatcatttacctcacttgatagaggtgttttcaaattttagctaagaatcaattttattatttttattggaatttctctgaagggttcgacctgcttatgatacttttactatgggggtgacaagataatcaataaatttttatttttcaaaaaaacaaa

SEQ ID NO: 199275 - DNA, 1109 bp, Cannabis indica
acggttggagactgagaaatatagtgaagtggaatgaggcagccatagagaagcatgttcagagagttgtaaagactaaagaccctaataacaacagtcggtattggaggcaagttgtaaagactaaagatctactcaaaacacatttcaactttgttgcttaaacctgctgccaacattcagcagcatgcttactataatgttgattggccaattgtgtagatgataggatctattggtggctttgttgtgtatcttgggtgagaatcttatcccatggtctgccaaaaaacagaagttgttgcacgatcaagtactaaaagtgagtgcagatctcttgcaaatacagatgtagagcttgtcaacttgttgcatgagcttcatgtttcccttcctgaagcaccaattatttgggtagacatcaaagtacaattgcacttgttgcgaatcctattttccatgctagatctaagcacattaagattgacttcactttgtaagagatcaaattttggacaaaacactctcagttaaatttgtcccttccatcgatcaagtggtcaatgttctaattaacaaacctctctcaacatattgttttttctatctcaagggcaaaattcaaatggcttcaactcgatccattttatttgagaaaggatgttaactaacataacttcagttgtttagttagttaattagtgagaaaattagttaattgcttctttcaattatgttatttttcaatttcggttgatcagctttgttttatatagctctttgtcccttgtaataaaccttatggttataaataaagaatctctctttaatgagagataagcctgttatactttctctcttcttccactaattcttaccattcttttctctagtttttacctatcacaatcaagcttctacggagtttggtactactaattaaagaatattgaattatttagacctataaggggaattatacactattttaattttttttaaaaaaaattacagtgtgagttgcttcggtaatttctatgtgaattttagttgttatttaagttgctctgttggttgtcatgtgaatttttgtgtgaatttccataaaa

SEQ ID NO: 199276 - DNA, 1174 bp, Cannabis indica
acataaatttaatgcgaaactaaaatttaaagttagccaccgagggcgctgcctgttacctttgtagtttatgtttattataattataacaattctttacacctttttcagtactatacatatatgtgatcatttttttcaactcaaagaaagagacgtaagcttattaattatatttaataattataaacaatgagaaagaaaagaaatagacgtaagcactccctcacaaggcaacaaactcccgctctattttgtcgtaagtgtgtttgacattagttaacaataaataaacccttattatagatattttaaatttgtaaagacaaggacaaacaaatcttaataatcatcaaattaatattttagtaaaagaaaaaaacatactttttttagaaatgtattttttttcatctttatattttgaagcagttttttttttttttactaaaagtttatataacaatctaccgttaatctaaattcgcatatcaactcacataataactattgaagtaatttaaaaataataaaaaaaatattaaaagtgattcttttatttatttattttttttgaaatagaataaatatctatttcgaccaaattttatttaaagtttggctacaattttatttaaatttctagatattatatataatggcgggtcctataaattaaaagttatattattatggtaccaccggtgatttttttttttttttataatagataatgacttatatgtattctctatatagagtgtgcctatataacaaaattcttggtttatgagaaatttatgggtcactttttatttatatataataaaataaatctcattaaattaaaaaaaaatatgattggatttttactgttgtacatctatgattggattttctaaatatacttatgttatttagttggattttattctaaataagaatttactactatttatatattatacatatattgctaaagaatttttctatttatttttttttggtctcgatctggttataattgtttgactccacatctattctatataaaatgtggctatataaccgaatttttagtttatgagaaattattgtgtgactttttttttattaaaaaaataacaaattattagatgttgccgtaaaggggcagcatcatgtagttagttaa

SEQ ID NO: 199277 - DNA, 641 bp, Cannabis indica
ttttttcattctccacgggcctagcctacgccagacaccgagaaggatgttcttgacaatggaagcaggcatgtccttgcacccaacaacctttccaacacaggctttgttgataaccacatcctccaaagttatgtcctcaaataactctagcatttccatttcaagagtgctatccctctgcagaacttgattcattccttcatctattacctccacttcaacatccttgcttttcaccctatcctcagccataatactaaacagagaaggattcgaagagaatagacccaccaacaaaggcaccctgatcacttaaaacccgaaagaaataagattaaaactcacagtcaaacaaaaagactagactctaccatggagccattttgtttttatgatatagagatgttagacacatgtctccactactattgcatgatggtggttggtggcggcagcggtggtctgcttaatatgtctgatggttttgcataatctaaaaaatgttttcttgaaaattttccacgtcgcctagtctaccttattttccgtaaagtcaaataggcatcatttttagatatcgacaggaatattttagtcgattattttgaaaactcaattttgtagtagtaattgttttt

SEQ ID NO: 199278 - DNA, 905 bp, Cannabis indica
tttttttattattttaaatataatcaatttctgagcattatgtgttatttgtttttactcactttattgtagaactaattctgttttttatttatgtttcactgtctaaggaactgattttctcttagtttttttaattataatcgggttttgagttattatgtgttatttatttttacttattttattgtggaacataactattttagtttatgtctgagacatctaacttcggtgacgataaaaactcatatgactttttcgatgatgatgacatctccgataactttttcagcgatgatgacttttttgttgacatttccagcgtcgatgcctcctctggcaagttttttagcgatatttcttattaaaaattttaggctaattaggattgtttccccccgaactttgacatgtaccaaattatgcttcatgaatttttaaggtcgttaaaaatgcctcctgaactattgagattgttgaatttaaggacttttatccaattttagtaaaaaaagtctaacttggatgaaagttcaagggacatgatttagtacatgtcaaagttcgagggacataatttgatagacatcaaaatctaaagagcatgatttagtatataaacaatcattgaaatagtaaaattgaatgaaattagacaaaagtccttaaatctaaccatctcaatagttctgagacaatttttaatggccagaaaaatttaaagggcatgatttagtacatagtaaagtttaagaagcacaaatcttaattagctaaaattttattatctttatttataatttttcctttggtttctaatattttaatcgtttggtattatttatttatttatttatttaatatgaaagcaaactcttatttttttttctatagttacaaaa

SEQ ID NO: 199279 - DNA, 1097 bp, Cannabis indica
attctcaagaattgaaaaagctaatttaactccattaattatctctcataatgttttattttattttaattttttcactgcaggaactcatatagtaatattaagtaatatataatatggttcaaacacttgagagacagtaatagaaaatatatataatagacaattaactcactctacccttttcgggaaaaaaactcatactcaagtaaaaataaaaatagactgttaattaattattattattataattatttttcaatattacaataataatgggttcaccttcaccattcacgtgatctgatcaattcgtttggtaatatagaattggatgtagtaccatactgaagtaggccccaatgatttacatataatataaatagacattaatggctttaagcatgtatttgtaaaagagtattaattccccgttgccataaaaatatcataaagtcactttaagcagcggataggagcgccataccataaaaatatgaaaatttctccgaagtcattttcaactcttaaccctttaaaacaaaatatgtaaatattaaacaaaagaagcacataataacttgtccatctatcttttcttttttttttaattaccagtacatcagtattattcatcagagggagtaactcctgataaaaaaaataaaaacaaaaaagagccaaacttcctaaaaaaaactattttttaagaaaaaaaatatattactcttaggtatattagagcatggagttaacttggtgaggggaaggaattaattactcaaataattaaaaaaatgtagttagccaaacacaataaatttatttgataatttgattggttaaacgtaagaagtggccggaccatttaccttgaaagtagttagccttggtcatgcttttaagttgtcaaatactatactaatacaacacgttatgagagtatcaaaccatactatgtaatatatcttccttacctaaaatagaaagtgagtttaaaaaaagtgagctccaactatacaaaaatgaattctctaatctctataataaaaaataaaataagagagttccttaaattctttttttaatgttttaat

SEQ ID NO: 199280 - DNA, 1757 bp, Cannabis indica
tatagaggatctttgactattattggggtattgactcttcgataagtcaaatcactagggtattgaagacatcgttttttatcttttgtggaggagtcgcagtagaaggatttacaatgttaaacctttattttgtggttaaaagtcggggcttgcttgaagaaattcatatctacaaaaaagtggaagaattaaagatcgagaaatcaagcaaaccgacaggacatttttggcatatgtgaagacgtattaccttatacttgtcttagagcctacttggaaagacgttcgtcgattttttctttctatttcttggaaggttccttgtaaattgcctctcgctgaagtttggcatcagctagaatcaacttgtgctctcgcaaatttgtagtactacacaatagacgccaatcacaatcatagactgcaagactactcagaacctcatcaatttctacatgatctctagccaacactaatcgagctggtctacctatgagcacagataaatgttagcattcataaaagaaaaagaaaaaaataatgatcaagtagaaagatatacatcgtacgaggtcgacaattgaagtctattataattccttgaattttgaatgtgtagaaccactttgatttctaatctcccatattggaaatggtaccctctaccccattgacctcaaaattggcccatttactaaaacagtaaaaaccattgtcatggccaacattttttatatcataaaaatagctaaaatcattgattgtgggttctcgtcgagtgtattccatatacatcgcataaaacccaaggattatgcgatagatattgggcgtaagctggaacggagacacgtcgtaatgaatcaggatctcctttacaaaagactgaaagggaaaagtgataccgcagcaaataataggaatcgaaaccaccagtaggaataatcacaagattggtaaagggaagatggggtcgttgcatcgacataggcttcaaagtggcaatgtgaatcaaacttaacctttcaaatgttgttagttcgaacttcttaacccgtgagactaagtcttcatggaaaatggttcgtctagaggagcattgtctactgagtctgtttcactcccctcaccatcgacaccatcttcaaccccgcaagcaggtaactcaaagtcttcacccatctatttgacctttgcatctagagcaacttgtgggtaaataaaactaccctgagcagacaccgtggatttgctttctcgcacctctatggtaactagtggtccttctaactcttggaccatgtggtctatcttgctagtagataacaaactttctcgggctcctttcccaggaacctcgtcttctgataatgatgtggggatgaagctatcgctcttttgagattcatcagcaaaagccccatctccagaatcatgtgggactttagtttgtatatgtggattactttataaacaaaataaaaaaaatgtgtcaaaaaataagaaaattaagaaagaaaaaagataagatgacacgtagactactcttatgctttcttttatatatattaatttatgattgattgatactatacaagtaaaatccttaaataattctaggattactttcatattttcttttcttttattttttacaatgaacattcaaattagattttttattcttaaatctatagctattagatgttgtcttttttctctgtcaagtccgctagcttttcttgggcttaggt

SEQ ID NO: 199281 - DNA, 1964 bp, Cannabis indica
tataagcatatgatcaactactactactactacatgaatagtcgattttcaataggctgaaataaattgtttcaaaatttactatgtgttccaaaagtgattgcaattgagtaaatactgtattattttgggggatttttgtttttatagtataaattagtaaaaatataatattttttaatgagaaattttttaaaaaaaattaaaaaaatatagaaaaaaaaaacaggtatctggttacccttttatggtaattggtatccctcttgctactcttattgattttctcatatttttcaacttttctttaattttcctatatctttatttgatttgaacaaaaataaaaagtataaaaactcataaaaatttgtaatttcctcataatattaaggaatatttgcggcgaaacttccttaacatttacaattgttacatatatgaccctaattaaaaaaaaaatagcggtaaaagtactttatcttataattttattgtagtcgtatcatttttcggccatcaagtatcaacttgaaacacgtgacgacatattattggaccacttattaaataagctaaagaaatatgtcgccgcgtgttttagctgacacttaacgggcttaattgatacttaacaactaaaaaattgtaccattgcaacaaaaccgtaagataaagtacttttgccgctactttttttattaaggtcatatgtgtaacaatcgcaaaaaaggttttgtcacaaatatccctaatatgaatcgcataaagtctttagttacatatttagtaaatatgacaaaattaattatgtgtggtatttttaaaattttttaatacaacagtttcgcattaaaaattatttgttaatttcacttgctaattataaaaaataatttttcaaaacgaatggatcgaatcgaaacggattgtattagaaaatagattatatgtatatatatgtatgtataaatgaactaaccagtgtgagtttgaacagagctaatgagttgaagagaaactctttgacccaacaattcactcaaaggatcaataataccattcctcatgtcattgaaatccaacacatttttcttcatcaaaaccacattccctttaatcttcttattaccaccaaagattgagggaggcttcactatcccaaacattttttgcttaatttgatgatcaaaatatataaatatatatatatataaatatataaatataatggaatagagagaagaaataataaggttttgtttggtttgtgtgatcaagttagtgagatcatgcaatgtatttatagtcaaaattttgtgcttgcaaataatttcaatagtgattattttaattattatatgtaataataatacatatgaaatgtaatttaattgtattaactagtagtatctactaataattaataacttataataagtgtgttttaaatgtgatttaattagtaggtagagtagatagatagataaaacaaaaggatgatgatgttgatgatgaatgttttttgaaataattaaacactcatctttgttttttcaaaatgaatattttaggaaaataataggttgggaatgaggtgtactagatgtggcttaataaatccatacataaaatgtttctttttaattttctttttagagttttatattcacacccaaaaaatatatataatatgattcattttagatttttattttgcataaaattgatgtatatttaatttatacttacttttttttcttataacattctataaagatgcatatgtaaaataaatttattttaaatgttaagaaataaactatatgaaattgagtaaaaatatagagactgaaaaaccatattagtaccttgtcctgaagaaaacacgatgatagttgtagtgattagcagggtaaacccgaagaattacaacaaaatgaacttggccttgatcaggaaca

SEQ ID NO: 199282 - DNA, 1403 bp, Cannabis indica
gtgcaacccgcctaattaaaaaaaaaattcaaccccccaataaatttgtctgtttactcgggttaacccgtctaaaatgagcactaatatttattttttttttcacattgaattgttatattttagttattgtgataatgagataaatataaaaattgaatttaaagttcaaatcatctgccataaaaaaaatatagtagtttgaactttctattttttataaatttatataaattatataatatatagattatatataataaaaatatatatataaaaaaaaatctcttaatcgggttgatcgggttagtttgggttgattgggcgggttggtattattttcaacccgcccaatataaagattgagagggttatattttcgttgagtttttcagtttgcatttttcgtcagattatctcgatttgatttggacggattgttcaggttgggcggtttataaaattttatgcacagccctgcttttatgtacccaacaccacactaatataaggctttctaaatggttagcaattttttatgaatatcgagcagtcatgaatgtcgagcatttggatcgtcgggtaaaaataaacagaaagcctcctgtgttgatatcggagtccaatcttcttttgagatcaatgaacataccataccggtgaagaagagaagattggattttgagactttttctctcgaggttaaaccacatctttctattagaagggtgaagagagtgattagagacttttttcgtggagttggcccagcgtgtgtgaacaacgatgacattgttaacaaggtctgtgatgattctttggaagaactactggatagcgacaaacttgagaaatttgttggtgctaaggcgtctactgtggatttccaagctattttcttcaagatagtccgctagattgacagcatggaaagcaaaggctcgattgatggatttaggtattcccttaaaagaggttgaggatgagggttccactgtgggtttttcggttgttgcttctgtgaaggaggtggttgtccctcctccacaggagccatgagaggtgttggttggaactgtagagggccggcagacctctacagttctagaactgaaagccttgattcggttgtgctctcctgacttcattttcattaccgaattaaaagtgaatgttgttaaattggcacatactcttaaatatctgtacttttatttaaaattattgttcctattatgggttctgcggggggttattattttggccttgaaaactagtttctcttttaaagcatatttaaaaaccagattgttggcattgtgtactctaaccctgagcataatcctagttattatcttgtgtttatgggtctccctaaattccatgagaagaagaaaatccag

SEQ ID NO: 199283 - DNA, 2295 bp, Cannabis indica
gctattaccacacttacagggccaaacttttttaaaatatggtgctcatttcacattattgttcttgctttcttttaattatattacataattaatttattatttgactcactgtcgttggctagaagcaaggtcaatattttggtgttttcaataagagcaaaaacacaagttctttgtcttaagttttgacaggtaaacaggatggttgtacaaacctgtagaggccatgctgatcagggtgacctgatggtggcagatcccaacgtgcaaactcctcaaaacacgagaggaccaccagggacaaaccccaagcaggtgaatacacagcctcctcatgtatgccatggaatgactttccctctggttgggatcacaccaactgtacaagagattggaaacaccagttcggcaactgatcaatccactcccatcacagaagtcgcgtctaccactaatactcaaaggccaattagagacgacactaaaatccagaacctctgagcagtccttggactcaggcaaggtcatactaacgctttgcatcatgatcaaaaggatctctgagcagccataaacctagcattcaatgaacaaagacgtcaatttatagaatggagggacaaggagatggaagttctgaggtctcaatagacaatgattgatgatcgtactaggcagtccaccgtactaataaggagggcctaccaagtcaccaattaacaaccgactactgcatccagtattcccctaggtagatcagacgtacaaactcacagtggtcagtcgtccaatctaaggccacaggtccaacctgtgggccaaacggtagacggccaaatcttgccagaccgtcctttgggaggagttatacacaccaacttcactcctgctgaaattttaggccaacctatcggccaaacaagtcagacaccaaggccacgtagtacctcagtgtttgataggttgggtgtcgcatatgacctcaagaccgacctaaatcgcagaaaaggcttggacaaacaatacgttccaccaactgtccaaccaggtatccgtgcccaagatccagttcaaggagatcccaatgtggcacaggtcggtcaacaaatcgaacaagttcatccatttgtgcaagcacaattggatcaacttaaaaatatgatacaaggcctgactagcccaaaactcactgatctcaaactcgaccgggcacgcggatcacccttctcccctgagattgaagtccttgagttacccccaaagtttaaaatgccatcttggaaaatgtatacaggaaaagaagatcatttatcacatctgaactattttgagatgtagatggacatgcaagggttaagaggtggcgtacggtgatgaatttttcctgccacactcgcagaggctgcctagcaatggtacttcaaattgcctccaagaaggtttaactcgtggaatgccttctcatcagagttccatgcatagttttcctcctctcgtcaacttcccttacacctggaagacctggtcgaagtaaagcaaatgccaagagaatccctcagagcttatattagccggtttatgaccgaagctataaaagttaaagggctgactatagaaggaagattggctgtaatattggggggcattgagccactcagagagttgtggaagggaattaaaaggctgactatggggtcaatggctaaatttctagatcgagcagatggatttgttaagctcaaagaaacttttcagtgtgtggatactgtttaacaaaagaaaaacctgcaacgtgccacttcggtagggacgtctgccaagaatccacaataacatagcagctcaaattcaaatgggaagaggtctaacaatggcaacatgcagggtaatggaaagaaagacaaattcattggaaatgctgagttgcaccccagggaaaatgcctcaaaatttactgccttctcagtcctaaaaaacgacctagagacaatttatacgacaacttagtctatggtgtcgtacaaaaaaccatctcccatgaaaaaagatgtaagcaagagagatacatccaagttttgtcgttttcatgcagactacggccatgacacaaacgaatgtaataatttgaagcaagaaattcaaaaagaataacccgcatttacagaagtatgtcagggccgaccaaaatcaaagggtcggccaagtagacaataattagaaccaattgatgcccccaccaatggatggcatttacaggtcattgttgggggtccactgttggaaattatttta

SEQ ID NO: 199284 - DNA, 890 bp, Cannabis indica
cacacaattataaaaccataataatatttataaataaaaaaaacttaaattaattttaaaaaatcactcttaatgttttttttaaaaaaatattttgtattaattttaattttattttaaaatcatgtataatttttttcctaataaattttacataattttatcttaatttttttgtcataatatttaaaatatgtttctttttattttataaatatacttttttaagaatatgagaaggaagaaaaaaacaaaaactagtataaattaaaaaatatatattttatataaaataaaatattttttttataataaaataaaatgtttcttaaggcatgtgaaatatttctttattccaaaaaaataagattttatatgaaataaaaattattaaaataggacaaaattttggaacgtattcaaaatccaaacaaaataaaaaaaaaatggtgaaattattggaacccactaatatttaataaatgtccttttcctcttcaagggtaagttgttggaatggtagaactcaagtaaatgaggcatgtgaatgaacataacacaactaagaactaaccattacgtttatatgtgaaaaaaaaaaaaaatcatctttttttttattttcttcatgtgaagggtatcaacacattcatcattacagaccatactttgatatcaccttttaccaaaatcattacacttaataaattaataaaaacacccataagatgataaatcagtgacccaaaaaactatttgatcccttgacaaaagtgagacttgaataatatcattttagacacatgtgggtcatcatttccatatcttctatggttgtgaggcactattgtgtttgaaaagactgctaatgggcaactcaaaacttttcc

SEQ ID NO: 199285 - DNA, 1505 bp, Cannabis indica
taagcatacaaatagatattatgaagaagaaaaataaaactacgtttaaaaaaatcaaaaaaacaaggaagtttctagtaccaatccactagactaaatatttggcataaagcacgataaaggtataataagaaacacacctttccatcaggaagctgggccctatagacaactcccagcgtgcctgttcctattagattatcttgagaaaagctgtctgtaaattgctgaagggatgcaatactgaaaaactttgcagaagtcaagtgactgctagcattggtagctctggtggaaggctttcctataatcacgtcagagggtacacgaggctgcacaataaccttctcatttggaggaggagggggaggcggaggagggggaggaggaggaggtggaggcggaggtggaggaggcggaggtggcgtcattaaatattcatctagcgagccaaagtctatcttatgatcatgacgtttcggtattgtgcctaatctttgcacatttgtgtcttgctcattttgtggcttcgggatagctccagcttttctagtctctgtatgcatattctctttcggtctagttgcttcttttgtgactgttcaccaaaattgcaacatatgagacattaaaatcaacataagaataatgcaaaaacttaccagcttttctactaggttgaaaataaaaaaaataaatatagaagatttatttgcctttttgaatttgattggttggttgaaccaaggtcccattgtctcttggaggattttccctgtccccttgatatgcacctatttgatgccgcttggaaactctatcagcagatcttctttgtttactacatcttggaacgaaaaggacaagggctaatactaatattataaatgacaacaccccagcaattgatatccaaaccacctttttagtggtaagcgatttctttggttccccagattttgaagtctcagatgtggatggtccattagcttgttttggtggtgtttttccagtagggaaaaatggtgtcctagaggaaggtggtccagaaaatggtggtgaaggtggagaaggtggtgatagagttggagacgctgagggagataatgcttcagtagtagaattaaatggatttccatcttttctgcaataaatatcaagtcaaggaatgtatgtgtaaagaggtaaaactagtttccaggctacctagtgatataccaacccataacttaacaagttctcttatagctttcaacagtaagattctacttcctaacatagattgtatgattttacatggatttcaagttaaaaaagagatttataaatacaaaatacatatatttatatatactaaattgtgttttggtcgtaacagcagttctttgagcataaaatccatgcaaatgttctatttttaacttggaatatcgtttacagggatataacaagttatcactttattcattatcactttatgcattatcacttttcttacattgtct

SEQ ID NO: 199286 - DNA, 1213 bp, Cannabis indica
agtctcaagtggaaggaaaatacagcaaccatcgttgacgcacgaagctcaggtcgtatactgagagagaaagtaggggaaaggagcttcaaagaagcgccatttttgcaaagaggaagctcaaaaagagttaaagatgggaaaatgagagggttgaggggaaaggtgagagtggcagtgaatggtaaatagtgaaggttttggagtccgaaatggggaaaatgaatgaggttgcagacgaactgttctcgttgtttctctcacttaaagactacgttttcaggtttgtgtgctttttggtggttgggataatcacgagattgccctctttttcgtttttattttttatatatatttcttctgttttttgaattttgaaaccatggattttgctactccgtccctttatttaactaatattctcatacagtcccgaattgccttggagttttctcatcacggactaaacttcaatcgtaccggagatcaacggtggagattaagttttgtttatttattttttaatatttgtttttgttaaagggcccatactctttaattaataaacatcactgctctatttatttatatttgaatttgaaaaataaataaataaataaaaggtgatacttcattcatagttccgtactttgttttcctcaaatttatgtctaaaataaaaatgttgccatatttctaaggaacatatttttaactaattttgtaaaattgcttttatttcttgttaggaagaataatagccaaacataaatagtaatatttaaaaaaaaaaaaaaggaataatgaatgaaatatggtagtatcatagttcaacagcaggttttattttcatttttttataaatataaatatcattattgaagttgttcaatgattgtaatagtatcttcatcaaacaaagaaaatgattgtaatagtacttttttttaaaaaaattaaatcagatggatatgtcacagctataaactatgtatatttaattggaaaataactggcttcagaagccatttttaaaagttcactttgtttcccatacatattattattatcatcattattaactaaaaataaaacaatgaaacgaggccatcttcaacgattttaagtcgtgttatctttttattaatagagcagtataattttttactatgatgcaatggagtgtcatgtgatgcaactctatatttttcac

SEQ ID NO: 199287 - DNA, 832 bp, Cannabis indica
cttcagaaaaaaataaaaaaaaaaaaaaaaaaaagaaaggctgcttctactgtttggcggttcccacccaaaaaagatcagagtggggtagctattatgggatttggccaagtgcttagcttagcttagcttattagctctaccggtcaaagtatgtaagtgttgtggttttgatttgttaattaagtgtgaaacgaataatgaaaaattaactaagttatatatatatggggttttaggaaacttgtttaattattagatttaaaattcattttgggggttctattaaattatactttaaacatcattaattctatttacttattttttcttatttgtaatatatattttgggactaatgaggtgggcaagcaaccaaattcgggaacatgcttgttgaattgtataaaagaaagagaaccaccaaagccaaagattacttttcaaaagacttccagaaaaccaaaaatcaaatcttaagtaattgaacataaaataactttattgatttatttttatattttgaaattgggaaatggcaaaataattccatgttgccttatttttattatttttttaataattccatggaaaaatttggaaatggcaaaataattccatgttgcgttattaatacacattatattgttcgtctataaataaatacatatatatattttgtctctcgttttcagggttaggtttatttactctctcacagtaaaagtaagcactatcacattggttatcttatttatatttgaaaagttttaagttaatctaccagcttaatttgaccaagtcagaagcctcattacaaattacaatatca

SEQ ID NO: 199288 - DNA, 777 bp, Cannabis indica
cacattcacacaaatttatcatctacctgcatgtatgagacttgatcatagctcaaagccttccttttgacatttggatcaggtccatcctgagaaaaaaacaaataaatcttgtttgaacatctctttcatctaaacccatagattttcaaatggaagaaggggaaaacaatggcatacctctatttttttcattttctttttcatcacaaactgaagccaaaaaaattacctgggagacaaataagggatattttgaagcaaccgatgtctgatatctaacaataaagaaatatggcagtaggtcaggcataaactaaaatgattgtcatgaattagactaaatatacgttataaatatgaagcttactttagaatagacttaatggtcctctctagataatcagcacgattacatgccatgaccacaactgctaccactggtgcctaatgaattcaacatggaaaaaacaaaggcaattacagttagaagcaattattattttaaaaataaaaagagaacttgagaagaaaactctgctttcatcctgacctgtactttgtcaatcaatctttgtacacctttccctgaaaaaatgacataattgagttgctaataagaacaaatttcgtccgtacaaacacaattctaatagcaaatgtccatgatctaaatttaatttaattcacatgtctaacatggtgcaagcctctatgaaatataccattggaaatatgactacttccccctagtttcaataagcaaaagtcaaatag

SEQ ID NO: 199289 - DNA, 705 bp, Cannabis indica
tataattaaatataataatttgttgaaatatcgctaattatttttaaagcgccaccacgtaacaatactaataccttcataatactcttttatataacaaactataaaataacttattaaaaataaatataaaatattattttttcttttgaaattttcattttacattcttaaaaatacacctcatatcaaaaattagacgtcacactaatttatataaaaaaaaattcttttctttttatattctattctccccatttaccgttgtttaatttagaaaaacaaaatcaactctctctctctctttcaaaatttctcaactctttgtctctcacaccggagcacgccacgaatcacacccgaagtatgccgtactttcaccacaataatttgtaagtattttttaaacattttacttaaacatttagaatattatgtatttcatttacattagatttgtgtagttgttgtctgcattgatgttattttgttgttttttctttgaaattgcaagatttagtttttgcgtcaaaattggattttcacgaattatcaatgatttttcgattatatgtcgatggatttttgacgattaacatccaaaggttggggatgactctttttgacaatttatcgatatttttgcggtagtttttttttgatgaaatgtacttatttcttttatctttatgatcgatggtattt

SEQ ID NO: 199290 - DNA, 1283 bp, Cannabis indica
ataaataaaaaaaatatatattaattttagtgtagttttcaagagttgatttgagtcattggattaaatcaatgactataaattactattcctattaataagtaaaaattacaatacctatttgtattagctcccaaatataaaatccaactaagttaacttttagattaataaagtaaatgactacttagtacttattagtagtttgtttattaataataataaagtaaataaaaattatttgaacctttaaagaacatgcatgactacgatcaagaccgtgagaattattgattttatatcgaaaaagataatttattgattaagggattttttataaaaaaaaatatatatatttacttaaaaaaagggttttatttgtaagtacatcccatttttataacaataatattttgttaaacttgtatgattaatataaaagtcatttcaaaattgtaaaatcaatttttctagcatgaatagatagaaacgtataacaaatttgttcataagatgatatccaagttactttaggtgtctcattttatttttttaaaaaaactaaaatacaaattatcatttaacaaatcaaaaaatcgaattcaataacttttacaaaacaaaattatttcattattcattattcaattttgtactataaaataatatggcaattttgtacaagagattgagaaactaaatcaaacataataatacaaattaattagaagcataatttaacatacattataaacttgctaatttacttacaagaagtctaataattgactggccaagtacaatattacaaagacaaaacaccctatgatataaacaagattttataaacacataattacatattcatccttggcacttaaaacaaaacacataatagcccatgattggtcaccaaggaatgaaaatcaaaatgacttggtttggttctcattagtgattagttataatagccaatatgttccatgagttgggttttaacatctactaactcaagtttgagtcttttaaactcacttagataattctttagtaactccacatcaaatcccatattttgcaatttgttcaattgctttattatggaatcaacagtatctgttgtagtagattcttcatgcaatttcgagatcatgtcaattacatatgcaaattttacctttattagtcaaagctataacttcaagctcaatttcatttttagctgccaaaaactgaaattgaggattctgtggcaatttcttgaacacttctaatgaatccac

SEQ ID NO: 199291 - DNA, 874 bp, Cannabis indica
taaaaacatagccattactttagtagtaatcttatgaggtcatatgggaatttacgaagctgatgacaatactacttatcttgatcttcctaatataatgggttgaaagaaaatggttatcttgtgctttctcaaagataagttacaaaagcgtattcaagggtgggaaggtcagttcctttctcgagcaaggaaggaggttttactcgagactgttgctcaagcaattccaagctacgcaatgagtgtatttttgcttcttgtggaaacttgcaaggcgttagagagtcttatggctaagtttttgttaaaaactggtttgtcaactataagacatattagctgaatgagttggtcttggatgtgtaagcacaaacatgatggggggttgggtttcagaagccttagggtttttaatttggcgctgctaggtaagtaaggttggcgtctcctcacacatgagtcgtccttggttggaagagtgtttaaggctcactattttttctctagttcttttttaacttctgagttaggaaacaatctgaattttgtttgacgtagtgtgcttgaagctcaattccttgttcgtgctagagctcataaaattgttggagatggttcaaccatttcgattcttcttgatccatggctaccttgtaaaaataattcttttgtttcttcagatcatcctggtttctcgaatacaacttgtttagattggatgctaaagattgggatttagagattctcaatgatttatttacatcaggtgatcgtaatctcattctttctatttaattaagtacttcacatagtttcagtttttgatcttgaaagcttgaaaggaatgacttctatagtgttaagagtgctt

SEQ ID NO: 199292 - DNA, 1671 bp, Cannabis indica
agaaattgatccagacgcatccaagtatgaaaatcaggattacgtaccatagtagaagaaccaggagactctggtacggttggattgggccgtggatgtcttcgaagtaagatatcttcaagatcgtgagctctaatggcgggaagaacctgtgaccgccaaaaaaatagttgcttcgatctaatcttaatggaggtaagaacatggtggttggaaccacagtaggactggtgtaggtatttgcagagatcgccatggtcgcctgctcttgataccaagttgattctcataagcagaatcaaaaacaaagaaagagagaaagaaggaaagggaaaacaagtgatcttttcattacattacagagaagtgatacaagcaacatatttatactaaagagagagcccataagtgagctgaaacaacctaacagaaaagcctaacaaccttaactaactctgacagttagttactaatcacagctatcactaacttcctcaacagtttacagtgccgaaaatacatttgaagttttttgaacgcgcgtggtaaactagaatatctggaactctattttcagtattgtaagctattcggaatttttcaaaaatttacagggatgacactgtaactataacgaataccgtaatcaaaaaaaatatttccgcatgtgatttcgaacgtagaggttagctaaaaaattataataggagattgtaattagtattcctctttatttatttatttatttatttgttttgcttaacagctcataaatttattaaccttactgatttttttttaaaacagtggcccagtggccttatagattggtttaggaaaaatatattctctctctctttttttgcaaacgttatatggatttcttatgttgtctcaattcaatttctagtaagccaaaagtacacaaagacaaaataaacagaaatagtgtattaagggggtgtttggttttggttatacacaaatacttagtggctctttgtcgatgataagggctatctatttaaatgtgcttcttttcaagagtaaaacaaggactttgttattaatttattggttaaattatttatatcattcatacaaaaaaaaagtacttcataatcaagttgaataattagctgactcatcatatttgcatgagaattaattacgaacctatacatgactaattgagttaatctaatcatgattgtaaatgaaaaaaattacaggtacatctcttaattgaaagagtcctcgtcctgatacacttttttatatgttttgacaattagtttggaaaatatttttagtttattttatttttaaaattgtttacgttgtaattatttaacactacttataagttttcaaaaaattctaaatagattatagtaattaaataaaattagattcaatggcggaaaaattttcgttttggtttcagttaacccccaaaactcaaatttgtacaggataaccccttaaattactatactgttagtaagaacacacctccgtccccctgaccgcattatatttgcctatgtggcacagtccaagtaggcaattacttaccatgtcattaattattatgatgtggaaattaaaaaagaaattaatgaactttgttttagctaatacctaatcaagaaaaattaagggaaaaaa

SEQ ID NO: 199293 - DNA, 764 bp, Cannabis indica
ttttcattcctctaaaccaaacgccacctgagttcgaaaaccaagcaaacaactggcccgcaaagtattttgttttaaatttctattaataaagttttattactatggtagtgagaaagaagtaaattaagagcaacaactattttcaagatattatatatttttctttcaaaaagtaaaagattaaataagaaaaggaattatatgttacagaaaagaaatgctaaagcattaataatgacactttatttattttttaaaaggaaattttcttatttgaatgtttccaagatgaaaatgaatttattattattagttgtgatgtaagttatagaacatggacaaacaagctagtgttaaaaaagaataatgagaaccctctactttacactcttcctggttcgaaattcccctttattgatcaatgaaggatccaaagttgtcattaataaataaataaatcaaaattaaatatccagaatagtgtttgtcaagtcttcttttacagctaaaaagcttcttcaaagaggaaaaaaaaagtttgataagatataacaaagaatgaaatttgaaaataataacacaacacatgcatagatgatagatctatgctttttaacactctaatattatttgttgtttagaactatttgtgtgtaatgtatctggattgattgtttaatgttattagttgctgcaaataaaattgtgagtgatactactaaatatgttactttatgtaactaaatttctgtcacaaatga

SEQ ID NO: 199294 - DNA, 580 bp, Cannabis indica
tttttgcctcaaattttatcaatgggtgcttaatactttctagattgtagcaacttataattagttatttcaaaaaaaaaaaaaattagttatttcaataataattacactaatatattatttttgtactgaatctccttattaattcaacaaaaaaaaattatactttctaaagttgttccgagtacgttatattattttgggtgagtttatttaataaatctcctgattaattaaaaaaataattagttatttcataaaaattattacattaaattatataaaaccgaatatttaattacactaatattattttttgtactaaatcgtaacctttgaattttttgagcctcttacaaatctctttaaactattaaaataatcaaatttaagaatttttatctatttttactaatattaaggatgtaccaaattatactcttaaactttcatctatatcatacttttattagtaaaattaataaaaatcttttaatccaacaattttaataattttatgagttttttaacaacctaaaatattcctgagattccgaaagtttctgaaaaaaaaaaaaaa

SEQ ID NO: 199295 - DNA, 656 bp, Cannabis indica
tttttatatcaagttttcagtcaaaagtatttttttagtggatttttttcatccagttcataatatatgcctcttctacatgaggctttgcccttttagtatggtatgttctttgcatgcatggttgtgttatctatcttttaatgcatgtagctgacacgtgtcctaactcacctttttgtgcttatgattgacacgcgtccttaaaagttttcaattatattaaggtcacaaaaacataaattaaaattattatagagtcatcccattccaaaaaaaaaaaaaaatatagtgaataaaactttaaacaaaactaaaatgatagaatccaccgaataagcatctcttgagttctcatttgttgttgcaaattcaaaagaccaaactcaagcaaacaaaataacacggataatacacttatatatgaaatcatcaaaaagtaaaataaataaaacaatactatcataacgatacaatcagatttaaatctaaaaccatagaaaattaaaataaaataatatagaacatgactaaaaagagaaaataaatataaagtaacaaaactatgaactagaaaaatcaaaatcaaagaaataaaataacctttcctaatcgtgcgtgagcatgttggtggcttgtattgccccaggtgggtg

SEQ ID NO: 199296 - DNA, 930 bp, Cannabis indica
gcctttcaatccaatttacctctgcaatatttgtgtttcatgatatctactactgtttaccttttaaataagactctctctggcctactaaaagataaaacatcctaccaactactccataacaaaccaaatcaatattctcaccttcgaaactttggttgtcttacatacgcctcacatgttaccacaacaaccaagttctcccctcgagccagagcatgtgcattaattggttaccctcccaacatgaaggcctatactctcctagtccttcaaaccaagaaaatatttcattcaagagatgttctcttctatgaaaatatttatccatttggcaaagtctctcaaacacaccacatagataattttttcctacacattactgagactcatccatctcggacatatcaaatatcaattaacactgagaccagtccatctcaattgaacaaacaagacacacaacaatctcaacttaatgtacctgaggcaagttcatcacaccaattccccattactgaactcaatcagcctcagcacataaattcaaaccaccaaaatggaaaatcatgcactactagatcaggccatgtacaacaaactccggcttatctacacgattatcagtgtgacttagtgataacaaaaaatagtacacaccatcccctcattaactatttatcataccacaaattctcaccaaaattttgagcggctattctatccataagcctaatacctgaaccgacatcatacaaacaagcttccaaatacaaaatctagaacaatgctatggatgtcaaaatcgatgccctcgagaaaaatcatacttggattgtcgttccattaccaccaacccagcatgtgattggcaataaatgggtatataaaaaaaactcaacctaatggctgtccaacgttgcaaagcac

SEQ ID NO: 199297 - DNA, 4018 bp, Cannabis indica
taatttcgtgctcaatgaatcaaaaagaaaaggttcaaagggaaaagatcaattcatccctattatctttgatttggtgaactcttagggtctcattaatttgcctatccatggggatcgattgacttgggataataatcgttcaggagagggtcatgttaaattttctctagacaaggggttagtaaatgagggatggctccagtttttcccaaaagctattgtacgcttttcaaagccatataattctgatcataggcccatatgtatcctccctagaggtgacatagaaaagtttaaaaggaactttaaatttgaagaagggtgaacccgagatgaaagaagtaaattggtggttacccatgcatggaggtctattgtgcaccattgggccccgactcgggtcttcaaaaagattggtgccacttgggttccctgcttcattggcataggtctcagtatggcaaatttggtgtgaatattgaagagttggaatgtaggttgaatcatcagaaaaagctgtctgctggttcaagagacttggatgtggagagtgaggtccgcagagatcttaatgaggctttagaaaggaaagaaattttttggaaacaacgagctcgggtctcttggctcaaataatgggataaatgctccaagtttttctttttttcgactactattagaggaagatgcaacgctattgaaagtctcttggataagaatgacaattggctcaccagacaaagtgtcattggaaaagaattcactaaattcttgaggatattttctcagactccggatcgagactagatctaaactgctcagatttaattcaagacaaactttccgcaaatgagcaggaggatctagtcacaatcttcaatcatgatgagattcgaaaaactttgtttgtcatgggcaacaataaagctcctaggccagatgggatgtcagttctttgctttaagcattactgggattcggtgggggaggatttttgtgggcagtctcagacttttttaccactggtactatgcataagggggtgaacgctactaatttagtgcttattccgaagatccagaacccaaaaagggctcatcattataggccgatttctctttgcaatgtgtcgtataaggtgatctcgaaaataattgccaataagattaagtcttttctgccaagacttatctgccctacctagtctacttatgtgtcatgcatgaatatccaagacaataacgtcatcgtaaaagagattattcattcgttcaataggaaaagggtacagaaggtttttttgctatcaaaatcgatctagtgaaagcttatgataaaattagatggcaattcattgatcatgtgttgtgatcctgctatggtgcgtcggatgtgtttagaaactggatttcacaatgtatctcaactacttctttgaatgtgtgccttaatggaggtcaggttagcatgattactccgtcgtgtggcctttgctaaggagatcctttctccccttacctcttaatttgggcggctaagattctgtctagacttcttgaagaggcccaaggaaatggtaggcatttgtctttcccgtgaaggccttactctatcacacattttctttgtagatgatttaatcttggttaggagagcctctctagtagaagctaaaggattctggcactacctcgagaagttttgcacttggtctggtcaataggtcaataagctcaaaacataatatttttcagtaacaatacaccataagacttaaagaagggcattagagatgtgttggggattggagggctgaaaggtaatgtgaaatacttggggctcattctttttcgatcaatacaaaaagatgcagatttcaagtaccttgaaattgcaagggtggaaagaaaaagtgcttccaaaagcggggagtgctactcagatcaaatcagtgggactttcgatgcctatgtattccatgcaaaccacaaagctctctaaccatcttgtctctatgattgatagcatggtctgggacttttggtggggttttgagaaagggaaccatgggatccacttaaaggcttgggataagatttgcctccccaaatcaaggggggacttgggtttccaaaaacaaaagagataaatcaagcctacctagctaagtgggaatggaacttgttaaacgacaatcaatctctttgttttaagtatgttgaaagccaagtatctgaaggggaagtgagcttcttaattgcaaatacaaagactcaaatgcctggttctggaagagtgtagtaaaagtgaataatttcttaagaaaaggagtgtgtaaagtggtgactaatggtaaggatacgagaatttgggaggatccatgattggctcatggtaaattcttttatcctaaatctaatgggcgtcctgcacatggcttaaactagctggttgacttgttgaccgtcaatagaaagtgggacagtcagaagttgagaagtatattggacaatgacaccatttttgctattttgaaagggggcaacctgtctggtcaaggaaaagataaatagatttggaccaaagaacatagtgggcggttttcatgcaaattgaccaatcttatttaagcttttagaagagcccatctttgtgaggaggccccttctctatggaacaagctttggaatagtagagtcatggagagacataaggtgccttgacgtagtttcatgtataataatattcctcttagggccattctcaataaggaattccatgtggatgatgtaaatttcccaatttgtgggatggaggaggaatcaacggagtatttgttccttaagtgcaactttgctttccacctttggagatcttttccgtggggtatctatcctatgtctaactctggtatccgtatgtgagattggtcaagttcatttagggtttaaaattaagggcatcaatgtagatgaagtctttatctatgcttctattgtagtggatactattttgcatatcaggaatgaaaaggtgcacaataatttcttaaataatatgaactattgtattgattatatccactattcttatgtagattcgaaagttactctcatttttgttgttgcctcggtccagagggaggattagcagcctccacctcaagattggctcaaactaaactgtaatgttaaactgggtttggaaagttcttgcatcggtggtagctagaaaccattctggtgaagtggtttgggttaacacggctagattggatttttttagatgcttgttgtggcgaggtggtcgcgtgttgcttagcacatgaaatggcaaagctcaaaaggcacaagttcatcatcgtggagagcgactcaagagtggtgatcaatactcttaatcatgtcttcttgttgggagattgagaactattcttctttttacttgagattctctagatgttttgatggttgcatttttacttgtatccccgaaacttgtaactttgtcgcccataatgtggtcaagtggacttttttacccacaaatagtatggtagcttgtatgtttcttctattcgtgcatacttattttgtaatgaccgtaaggtttaatatactttatcaatgagcactctttttaaaaaaaatacagttgcaattttattttttaattctctttcaattttactaagaaaaaattgcaatgaagaatattttaaagaactggacaaattgttagcttataaatgataccacatttagtttaatacttttttttaaaaaaaaaagaagcgtataaataactaaaaatcaaacagttaactcatagggcctctacagagaatgtgatataagagcgagttacactcaatagaaacctaaaaaaacattaattgaaggccattagctgcatcatgggtcgtggtattacaagaacgagcaatcttataaaagttacaagacataaatgagttactcaaaacaatacatagtatatggtattgggtaaatgg

SEQ ID NO: 199298 - DNA, 555 bp, Cannabis indica
caccctcacctctccattgactacttttattaatgaagactcatattactatcttatttttatttacaccaaaaatattaaaaaaattattacaaattgaaaattcgaagcaaaaggacagaaccttctcttgtagattttgctgctgctgcttaatcaaagctctggaactgcactttctctctcctatttctttccttctctcactattgagttggtcagtttggcagccagctaactcttcttgctttacacggcttttgggattacctatcaaatcaaatcctctaaaaagtttctccacctttgattttctttttcttttttcccctttttaccgttttcccaaatctggttcttcatttacacaccaacaaactacttcttcttcttcttgatggaggaggtatgaatgaatgaataataaattaattagttaatataataaatgtagaatgtagacttacggcttctttcctttccccttcttcttcttaaatctaagctggctcacttcgtcttcttattgaggatgtaggatcatcaatgtaggcc

SEQ ID NO: 199299 - DNA, 1259 bp, Cannabis indica
ctatgtaaaattctgtaaaaatgcaaaaaaaaactaatttaaaagtgtataaataaaaaaccccgttttaaaaatactaagtattccatccaatacataaaatctttatatgaaaaaataagataagataaccatgttatttaaatatcaaaaaaaataatattttcaagaacttttaaaatttacatatatatttttttaaataatatagttttttttttcttaactcttaaataatatagttattaggaggtttttattgttcttgttgttaactctaacaccttttacgttaagaatttttttaatatacttctgctaagtaatatttttaatgaggatataattagtttagtttcaaaaattattctcaaacttcatgcatgtgaagtactcaagtaaatatttagtattaaaaaagtctcccctttcgattatttattttataattaactgattataataattttgaacgtagaagacaaacttttttgtgggcaataatcactaacattgaaccgatctatatattattataacagaaaaaatattgaacttttctatgatcgtatttttaaaaaatttgctatactttacacctaaaatgatgtgttcaggcctgtgattattagtaatgagaacaatttgttatacaatttatatataaaaaagcttttaacctttagacttgtatatcatcatgatcgatccctcctttaataatcaatatataaatttaattgcatgcaaaaacctttgtgtgcttttttagtacaatacaaaaaccttggtccatgaatcagaccacccagcctctaaattgacaaatgacaattcaatggtcaaaatctggctctttggaattttcaacgaaactcatttggatttttggtttgttggggtatgtgatcaccataggttaatgaactttcaagacatataattaataattaacaagttttcctgacaattgtagcctcaaatatttgtctattgtcaatattagataataatgataatattcacctcaagaaaaaaaaactgttagaataatattattgagttaaaccggccttctcgaacatctaaaatactctagttttcaaactaaaaaaaaaaaaataaactaaactaaaactaacttttagtttacgttacgtaccggtacccggtacctaagttttagttttcgttctaactaacgtaccgacttaaaaaaacttaaaaaaacgaaacgtagaagtttaacgtttactttc

SEQ ID NO: 199300 - DNA, 1099 bp, Cannabis indica
aagggcatcacaaccccaggatgacttcacagacacattcagtccggttgtaaaaccagcaacaattcgcatgcttctcaccattcctgtaactaacaaatggccaatcaatcagctggatgtttcgaatgcctttctaaatggttcactacaagaaaccgtgtgtatgccctagccccctggttttgttgatgatgaaaagcccacttatgtctggaagcttcataaagcactgtacggactcaagcaagcaccccgtgcctggaacgatactctcaaacaaactttattcaacaaaggtttttcagcttctagatctgattcatctctgtttatccgaggctctgcaagtgatttggttgtgcttttggtgtacgttgatgatataatcatcacagggccaaacactactgtcctacacaaccttatcaaggagttgaatcaagtgttttccatcaatgatcttgggccattacactactttttgggagttgagattgctcgaaacaacactcatgtatctatcccagacgaaatatatctctgatttgttagtgaaacttcacatggatggtgctaagccttctccaaatccaacaagctcttcccataagctttcactagccgaaggagaaccatttatggatcaaacactctacagaagcaccctaggggccttacaatatctgactttaactaggccagacgttgcattcattatcaacaagttgagtcagtttattcacgccccaacaacagtccattgggaagcttgtaaacggttatttagatatctgaaagggacaattaatgaaggcctactcatcagaccagcaccacgattttgtcttgaggcatactccgatgctgattgggcgagttgcccagatgatagacgatccaggggtggatatgcaatcttctttggaggaaacctagtgtcttggtctgccaagaaacaacctgttgttgcaagatcgagtacagagagcgagtttagagccctcgcaaacacagctgcagaagtacggtggctctgctctgttcttagtgaactcaaagtacctctgcctactgcaccaataatctgggttgacaa

SEQ ID NO: 199301 - DNA, 1693 bp, Cannabis indica
ccatttctgacagagtagctggaaagattcggcatcgcacatcacatgtgacttttttggagatctgtttgtatcttgaagtacttgatgtgtgcaagaggatcttctctcccaatatacatattccatactggcatcttgaacttaagtaagggcaaggcataaatgtatgccgagaatggagacccccttgacttatctagtttaaggtctgatggttttgggttggctaggccctttatcaaatctcttatttgatccaagtgtgcttgcacaaaagtatctaatgttgtaggaacctagttgagtggcccttcttggttcagctgtaaccctgggttggctagaccctggctggccacacttgggagagggtatgcccatggccgtccaactctagggttggcatctggctttggtcggctagccctaggttaggaaactagccatggttggccagccctcatttaggcagttgtccatggccgacaagctctatgctgggtagtgtctggcgactcgttctcccctgattggccggtgtggcctgtgtgttgacacaggtttgatcacactgattgttcaagtttgttaggtccaactatccgaagtgattgttcaatggtggaacaaaatcacttcaattctcattccttgagttgatgttgtcttgggggttttcaccttcttttggacctagccgattaaagataggctttagaatgacttgcttctaaatattttggagtaggattttttctcttataggccggctagaggctagccgagtgggggtgtgaatgagccaaagatacttccccgttccccagccactaggtgctaaagtctagttgttcccgccacaagatctgtttggtattaatttgtccatccttaggcaaggagaagtgtcgtcctcattcttgaagaacttggttggactgtttgtttgctgtctgcttgggcgtagaccctgcctgacctatcgacgaacctcctttggagaggatctctaataaaatcctttcctctccaagaggttctctcattgaactgccttattaggttactagcttccctgttatggcagttcagctctgcctgatgagcttgaaggatggcctcctagtcatccatccacctcaggaatttgcatctctattgggcgaaagcattgcaaccaatagtgcatggttcttcagtttggccaacttggcctatagcctctctaagtctggccaattaaatgtcttctcccaagtccacatgaggctcaccaatagctggctcgccaattcccaaacttgtttcccctgtatagtattggggaacagagttagttgtggtatgtgggggttgttccacattgacaaaaccctctgttagaggtgccaatggtggatctaccctgggcagtagaggtttttcattgggatcagctgggttagcagggtcaacaagactgatcgtgtcggtcaagtttgttgggcctaccgtgttggcagggttggcaagattggctacatccgttgggtttggggaaactccaatggtggctagaacacaaacattaggatcaacagtcatggggtcttgaggaagacctgatgaagtagaatttgtagacagagttttccttgttacagccatggtgattgatcgaattggtaaacaacactctcaatgaaagcac

SEQ ID NO: 199302 - DNA, 570 bp, Cannabis indica
cattgcccagttcgatagagcccttttatcatcgcggcagcccaaaaaggcttcaccaatgtggctcacactctctaacaccctataccctagagcctctccttcttccccattctttctcttttcttttcctctttcaaaattcttattagttttgcggtactaaataaagtatgtagcaaaaatatttattgttgattatgattgtacaaccctaaggatccccgtatatgtcatatattaaaccaggaagcaaaacagtgatgaaaatcacctcttgatggctatcaagaatccttactttcttttcgtataaattcgatcttcctatccagtgataataatggaaactcataccatagtctttcaagtcatcctcaacactcaagggttaatatgggttcataggatttacaagaatttatgttgttctttttccttaatatattagcaagaacactttaccaaataagagagaagaaaagtaatttagtccttttaagtttcctaaatgtatcttataaataaatttagaatatacaagtataattaaattaacattttgttttt

SEQ ID NO: 199303 - DNA, 1285 bp, Cannabis indica
atatctttagtttcacataagcattttaaaatttaacataccttctggatcacacgacaaccatacatctgcaaactcaaagttagcatctgtccagaaagttgatttgctatctcctttctttgctcaggacttccaagctcaaaaaactgaaacaataagtcaaaagtcaaaatgatttttttaaagcatctaaggagatcactagtctagcgttatagctaaataaaaataaagaaagatttggaatcatactttttgaataacatagtttccaaaaacatcagtcattaactttgaagcgtatggaacaacttctttgaagacagatgctttctcttcagcactgcaatgttcaagcttctgctgaataaaccgactcccatgttgatcaatactgaagttaaacacaagtgagaaattatttttccatacaggagattgtcaattatattttgagatcaagcaaacacaggacatacctgaactcaaatatgcgtccttccatatcagagagtccaagtctgggagaattgcttgattttaattcttccagaaaagataacttcttctgatcatcagcacattgaaagcctctttttccttgaaatccaggatatattccagggtttctgattgaaccttgtggaaacctcatttcagtatgtcgaccaaaatgatttgctccaccaactggagaagatggtattactggactagcaagaggagaggttggaaattgtgtcatgacacccatgaaaggaaactttccattaccactaattccaatttttcttggagagatgctcatgcttccatgtgttggagagtggaacttctgatcacctatgtaactagagaaagaggagtcttgttgtgtaaatggactactagttataccccttgggtccaactgaccatgttgaactgaactaccatacaagtcatgaaccgaggatggatagtattgcatatgaagaggattcacaaaagaaggttgcggcattgaaccaagccgcccataaaattcacttgggtgttgcaaatcactcacatgaggaataccgtgtcctgtttgaacattaccagtttgaccaatgaatcttggactagaagtagcaccaaatggcacttgaagtgcaccatgagaaggatacccagccattaatggctgaagaagtgtagaacccatggcatatccaggtaaattatactgttgagcgtataaattggactgctgcatattagtataaaatggatttcctgaagccatatatgttgctgc

SEQ ID NO: 199304 - DNA, 827 bp, Cannabis indica
agttaacagggttttttggccatagttttgggcttctaataaaatttggctcaaccccaagtgcaaacatgttgcaccaatctagtttttggtcctctgagaacacaaaagcttgtccatagccctgaactgtcccaggagccatagcatacttctgcttctcagccaaaggcaacatgaaaaagcccttggataccttctctatttgctctaccaaattctggtcaatcccatgatttatcacctaaagaaaaaaaaaacattagttcacatgacattattattgttattattactataaaatgaaagtttttatggttgtaatacctgaaaaaaaccccactcatcacaagcagttgagagctgcaaaagctcacttaaaatttcatcctttgaaccatttgaaagcttgtggagatctataatgggaatgtgagtagatgatattgatgaagtggctagtgttggcctctcagttttgtctcttacaaatctttctgggattttagacttagcctttctcaactcttggacatcatcaattttcccaactttgatggaagaaattggaactggggccatggaaactggattattattaactctagacttgggttgcttttggggttttgggaaggtctgtatttataggcagcagagtataacatgacatgtttattgtattatatattattttcctttccatttattatattgtgttagatttagggacccacatgttaatgatttcttcatgcacttttatatgttgagttatgcacttgaagatggagattgaatactttgatcaaacaaatgaggcaatt

SEQ ID NO: 199305 - DNA, 1046 bp, Cannabis indica
taatttcagatgattttttgccaataaattgacttttaaaagttttgcttttattatttaacttcgtggagttttgttttggtaaaatagttaatttgatgaagttttaatgataaatagccaaaagaaaatatgtatatttatatatatatatatatatatatacgtatatataatagactgaatcctggtttattaacatgtgatcttaacaagtgaaaaaactttatttgttgtgttgaagatttttttttcttacaaagttgtcccattccacaggtaagacacgctaacaaaatacaattaatattttaacatgatcatttactaaatcagaagctgaaaaatcagtcactttccaatgagtcccctgaaaactaccctagctcttttgaataatgtgataatgaattaatgaagaggttaatctttattagtttgctattgtttgtttgtttcaacagctaatcagtggtggcattcttgctgtattctttaattagcattaacatgaagcttgttgctgatttatcgtggaagccatttcacacgttgcttttttttttttattgatttaaaatctttgtttataggattttaactctgtaaaacttactgtgggaattgttggggaagtgcaatgtaaaatcacagtgattactttggtaagttccatacatctcaccttcacttcctctatatttatcttttatgatgtttatttagaccattttctttttttttgtttttttttttttgatgcacataatccaggtgtatgacttttactttctgcaggactatatacgattcattaattatctgttgatgtaaaatagatactgtatgcataataataataataataatggtgatgattcacacttccatattaactacaaagagccataagatgatggccttcacaactattctgaacaaagttaataagcaattaattgagtgatgtttaccgcaaaaaataaaaaataacgagttcagcaaaattgattataaaggagaaccactttcaaagataatgttgc

SEQ ID NO: 199306 - DNA, 677 bp, Cannabis indica
cgctctgaaacaagcttggtgtggccaaaagaatttatggtatagtaatggttagtgatatttccaatagcgatatgacagcgagaaaagtgttagggcgtttagtagtatttcttaaatgaatgtggataaaaatgtgtaaattattaatttctaacgctaataattattaaaattaaaattatataaacaaaataataaatttcaaagcaaattttctcatttttttgaccaaacaatatagaagaagataattttcctttattttcttcaaaattattccatcccttttagtttatttccttctcaccaagtaaaagttttttagttggttagtgttttatttttttttgtttattttaatgcttagataagtttagtcaatgtagatgtggaaattttgagtgaaattaaatataatggggtggaagtaactaaaaacttagaaaggatgtttgtttagtcaattacaaattattgaggcactgaattagggtgaatgaaacttgagggtgtttcttttctcactttacagcgttacaccattttttgataccaattaggttgttgttgttatcatccttttgaaataaaaattaaaaaagaggaaaacagtgcaatggatttgaaaaaaggggtgcattgaaaagactccaacattgtgaacaaactattta

SEQ ID NO: 199307 - DNA, 949 bp, Cannabis indica
tttggggctttgcccttctacataagcatgaagaactccataccagagtagcagtttagaaaaaaggctcctgaagcaaaaattacatgagaaggaacacttgattcaaagggtttcattttcttgactcacgtctgaaacattgtttaggaataacttttgtattctttgtaatgttatgaagaatttttcattttgaaaaatggagaaataaggggaatggaggttattttacttttgattctgtttcttaataaaccaatttgtaacactgatttagatttaattaagatccatgatttattgataccttaatctctatgttcaccattgtacatttcttttgctttaatacgttattgagttgatagaagaaagagctttcttgaaaagttgatagggacaaccatattagagcacttaaatgaccataacaaacatttctcatactaatagtaatcttcgtgtaattaaattagtacctcatcctcatgaattgagtatgattattagagcactactctttatcattcatccaattaaaattaaatttaagaataaagaacaaaatgtgattgttagattacaacttatttattgtttaaaatttaaattgcaagttggaataattagaaaagtcaggatttaggattagataatgagttggtttggagtggtcctttaccttccatttaacttagttgctttgtactttcttacctattttattgaagcacaagtttctctctctcaaaaaaaaagtacacaatatttatattaaaataatttttatttaaaaaaaggaaatatttaatcttttttattatatggttgtaaaaaataataaatttgttcaacatgttcacgagcattgccttgtgtctgtttgttttaggcaacaatgaattggttttgtctaagatgatattataatttcattcttggggtt

SEQ ID NO: 199308 - DNA, 515 bp, Cannabis indica
aatcttcatacctcggtgtacaaggacagaacttgtacagcttttacaaactctccaagtaaagttcttgactttgggaggaacttccaacttccataatattttccaccacaccagcagatattcttgagaactttcaagaactgaatggacattatagctcacttcataaccacttttaatcgtataaaggccttgagatgtacagtaccaaaccaaatcatactcatacgttgaggtacaaggagctaaacccaaatatgaggaacatcatttttatgaaatatggtggtaatatgagattcattctaggaaccattcacatttttaagagtggcccaaacttgacctagagtggttgttgcagggactctaggtgatgggtcgaggaagccaatggccattgtcttcgttaatatgcacttgcctatccgatttgattcgacctcgaatcccatttgcaatcaagatcctcccccatagaatactacaccaaataaaggagcttgacttgg

SEQ ID NO: 199309 - DNA, 1716 bp, Cannabis indica
aacacatcaacacaggtacactcgtctcttcccactcttgtcccatctgctatttttgttacacctcaaaatgtattaaaccgtacaacagatgtacctattgtcccacctaaccccactatacatggcaattcaacacatgtccctgtgaaccccactcaaccaccaacctccctaaacatggaagaacatgtcactctccaaaatatgcctactgttacccactctcccatagaccatctcgcaccaggacatgtggtccctactgccacacctacccttaaccccatagcacatcctgagaaccatttaaatcaaccacaagacccctcatacacttattcccactacatcccatactgatcatgacaatgaccatacagttcataatctcacacccagtacagttccaactatgccacacaatatatcaacacaacctctaaacaatgacaatcctattccaccaaatgtgactagaactcatggcatgcgtacaaggtctcaaaatggtattttgaaactaaaatcttacattgccaccaaacatccattgccagagtctctcttcccttctgaacctcagtcacttaaagctgccttaactgacacaaaatggcatagtgcaatggatactgagatgagtgctcttaagaaagctagaacatggacacttgttccatatgactcttcaatgaatgttattgggtgtaaatgggtacagagggtcaactcaacaaagatggttctctaaacagatataaatcaaggttggtggcaaagggttatctacaagaagctgggattgactttgaagaaatctacagtcctgtggttaaaccaacaacaatttgcactgtgctctctttagaagtttctcacaactggaatgtgtctcaacttgatgtaacaaatgctcttcttaatgagcccttgaatgaaacagtttatatgtgccagccccctggctttgaagattcaactcacccaactcatgtctacaagctacaaaaagcaacatatggtcttaaacaagctccacgacttggaatgacaagttgagacaaactcttgtgtcttgggattttaaggatctcgtacagatcacagctccttgttcatacatgggacaggtaccaatctcgtcattctacttgtgtatgtagatgaaatactcatcactggaccaaattccacattgatttcaaggttcatttctgatttgaacaaatcgttttccctaaaagatttaggacaagtgcattatctcttgggagtggaaagatataaagacaatactggtatgtatttgtctcagacaaagtatgtcgtagatttacttgtgaagttgcatatggaaggtgcaaaatcatgtccaaatcccacaagttcaagtgtaaagttgtccttaattgatggagaaccgtttcaagacataactttgtatagaagcacccttggtgctctccaatatttgtctctcactcgtcctgatgtggcgttcataataaataaacttagccagttccttcatgctccagcgattgttcactgggaagcttgtaaaaagttgcttagatatttgaaaggtactgtcaaacatatggctgcgaccgtcttcctgcgtaacacttcaagtctactccgatgctaactggggcaactgcatcgatgattccaggtctacaggtttatatttggtatcccttggagaga

SEQ ID NO: 199310 - DNA, 678 bp, Cannabis indica
ataataaattgcttaactgttagtaatgttactgccattgtctggttctagacttagttggagttgtattaacactagaagtctttttcaaacctgagaaacaaaaattttatttttagagcatgaatatgatttatattcatattttatataaatatataaatatttctaaataaaaaatagatcacgtggtattgattgttttcctgtctgttttagataatttcgagaaccagtaataaaaaatatatatctcatcctcctttaattgggtcatcggtaacgtacctcgactctcatcccattaagaatatggtatcgctttaacaagctattctcttagtcttaaagggccaacacgtgtttttttatattttgtttcgaccttgaatttttctaataataataatcaatttgctacggaaaatattaagaaaaatgtttatgtttagatgatttagagtttaagttatgatatttagggcctacataaacaacctatgtgtattttcaaaacttgatttagatatagttatatgttgttatatagattatagtgttgttaacatacttgttgaaatttttagggagccctttgacaatggtgaagttggcttggcgttctccgatttttgagttggtcgagaaattcttccaagcctacacgcacatacaaaa

SEQ ID NO: 199311 - DNA, 967 bp, Cannabis indica
tcaaaagtgacatttcttgtagtggtaataaatgatccaaagtgtgttttctgcaattgccagttgaaactaaggatcatttattctttgattgtcctttctctattaatagtcttagacagataaaattttggcttggtttggagacttgctctatttctttgtaggggatattaagaagaattgaaagatccaagtattccaagttcaagaaacaagtttactttgttagttgtcgcagccttggtgtactagatatggtatgctcgaaatgagaaaatgtgaagtttaaatacatgtagcttgcaacaactactgcaacaaacaaagtggatggtcaagaataaaattacttgtgtcatgtcaaagaaggtaattgagaaggatcgattatggttcgatttactttagttggtgacaaagacagaactactttagctccaaaaggggccatgacccctcctaaaattttagacaaaaaaagtttataaagcaatttaatgttaaaaattttattttttcaaaaaattatgaatttggcccccttttattattattttttcttatcttttggctcttattcttaacttctacctctgtccctggttggtgaactgttgtaatgtttgttaatttggtgtataaaactgtcaaggccttatgaaaagaagatgcatttaggttgtataaaattgatatgtttaatgaatattcaacttattcatcaaacaaaaaatttaatccacttgcgactttcctgcattacactgtgatgagaattatagggttccatctcaaaactaattggtgatgagtggagtagcccatgttcttatttatggctttaatactttttacattttgatccatgtgggacaatgttctccaatattcccactcagatggtgcctattttactcaccaatcttgaatcaccttatcaaaggccatgccatttgctcgcttc

SEQ ID NO: 199312 - DNA, 680 bp, Cannabis indica
attatttttttattttgaattttcttttggtagctgaaataggccaatacatatcacacctaaagtgccatataagcattctattagtcacatcacattagatgaaacttaatccaagtcccaaatttcagtaacatagatacttgaaggaaaaattttaacatgttaaaaggctttgggggcacaatttggtgtttgtcatgggtaaaattcataaataggccaaaaatataaaatgtaatatttttaaaaaacttaataacttgaaagccttcgttgccatggcccaattacttagcccaccttccttcggctaacccttaattgggtcggttatagtgctctactttatctttttgatggaatggtgctttacctacgtttaatgttttcacactcagattcttttctaaatggatataggtcttgtagctgtagctatatagctataggtacatcacaagtgttattagactcataattgagtcatgactaccaccacttattaatacatgacaagcttctagtgatatagaatagcagtgaacgaggtaacagtagttgcttgaattccaatcactgaaataacgtaaatgagagagagagagagagagagagagagagagagagagagagagagagagagagagagagagagagagagagagagagagagagag

SEQ ID NO: 199313 - DNA, 879 bp, Cannabis indica
gtatatagatttggtttatattttctacgacaatttaaagttagtaaattgttgattttatctttgtttttgtttttgtcagttttgttttgttgtagtatgagtaaattatcaagatttttttttatttttttaaagaaaaagattatgaaaagaattttattttacaaacaatattccttgtaaaagtgagatctaattttatgagacaaataacaaaaaaaaatatatacatatgtatagatagatatttaacagtactacaatagtgagagtaagaattacttgcaatctgagtcaaggaaataaaagcaggacaagtgtcgagttttatatctcatcacaatcttcatcaacgtcgagtgagactctatcgacacattttaaaaatgacatttaaaatgagacagaatctcactttgccaatgttattaagactatgaataattaaaatctcaccagtgaaattctgtcaataattaaaatttcaccaatcaattattatattactaaatctaaatgaagaagaagaatttgattaaatatgaaccttcttttttttttttttcttatatatatatatatttatatgagtgtatttttaatgtgtattaacaatataattataaaatttaaaaatttttatacttaattttgttatttaattatttttttttatttttacattataataagagttgtttcatgtgatatatataacaataatattaataaaattaaaatttaactatagttatttttaaaaataattctaaaaatcaattatatagtacttattaataaattagttcgtatatatatttacttaccattacgctatatttatagtctaggacaactctttttttttttaaaaaa

SEQ ID NO: 199314 - DNA, 546 bp, Cannabis indica
ctaaaaacatgtcgaaactgaattcatcaataagaaaaaaaagaaaagtcaagtctctcaaaaatagacaacttttcatatagaaaatttgtacgagaaatttcctaaacaattacaaccaattgggaatagaattttctataaaagaattggagtaattagagcacgaaattatcacaataaaattaatttaattgctcaataaaaacttaaattaattaaaaaaatattttattaattaatttgccgaaaaagactttacactacaatttgaaaacataaaaactataaaagtagtgttgttttatattagtctaaaactcaaactaatattgagatttgactcaaccaatcaagaataattgtgaactcccacctcttttaagttctttagaatataactgttttcagacttaaaccaaacataccctaacattttcttgatttttcttatattctttgtactattttttcctaatctaaatccaacttccaactttgagaatgtgtctcgcaaattttatctagcttctatttaataataaa

SEQ ID NO: 199315 - DNA, 750 bp, Cannabis indica
caccatgacaggttgatggtgaaccgcaacttaaagacggccaatacttctccagatcaccaagcaatgatgaaatctacaatgaagtggaatacttgtatggtgattggtgatatagatttgaagcagcacttgacatatgttaacaatgttttatgatatataaatatcactaaaacaatgtttaattatgtcatctttaaaagaagtaatatataatttacaaacagatacctctttctcattaaacctcttattagtgcagcaagaaggccagcttccatcattgtaatcaggccacaacccatctgccatacaagtacaaaaagcaagattatatattccatataaattaattatgacaagtgactcatttgaatcatgagtcggtaatgaactgtaataactttagtttcactgtttattggggataaatcccaaattggaaaaatactatttcacataatttattcatatttttgctcagaacagcaacatacattgatactttttcttcttcattcaaattttaaactttcatattaagaaaaaagaaaaaccaaacataacttttgcaaaagtaaattcaagtaactgtttgaaccaaacatatctagtcaaatgggttacaatattatattaatatgactagaaagatatcatatattatattatattatatactttaactaatttaataatacttacgtattgtaaactcagcaggagcatttgaactggaaaaaaaaa

SEQ ID NO: 199316 - DNA, 2290 bp, Cannabis indica
  modified_base (34)..(34): a, c, t, g, unknown or other
aaactaaatagattttggcaattgaacctcctanaattaccaaagtcccaatcaaatggggtccaaaaaattctcatattttgaaaattatcattttatatgtaatactaatattagatatcgatatcatattttgtatcaagctttatcatattttcaggatcggccctaattataaatcgtcatgcgggagccccatgagattaagagcttgactttggcatgtgttttgcatttaatatgtagcattagaaatgatctcaccctcacattgccaatgtttatatgtccaaattccattaatttacacataacatcacccattgcatttcatttccctcttttcaatcatatcatgaggattgttccccactataatattattcaaaccccactataatatgttttaattaataaatttcaaccaaaatacaaaaaaaaaacaaaaaacaaaaaaaaaaaaaaaaaaaaaccccactaaatgtatcacaaacatatattatagattacatctatataaataccaatatgctagctgttatagtgtgacatatatatatattggaagttgtaccattattaagatttacacatggatgttggatatattcatacaaatacatttaatgcatttttggcaatatatatctctataaattaattagtatatacccattcaggatggaattaaaaattcagagagcaaggggacaatattatatattaattagattttttttttggtattttattaatatggcttttaaattttcttcttattaatatatggtatatatatttaaaaaaatatatatgattaaataaatatatgatttttaaaggtttcttatttatttagaatgtaaggtgtttatataaattcctttcttaggcaggcaaggagatccttattaaaacagtagcacaagccctttcgagttatgctatgagtatttttttgatttcttttgagattgttcgagacatggagagtatgatggccaagtattggtgaaattgtctaataattcatcctcgggcatacattagatgtcttggaaacgtctttgtgggcacaaagataaagatggtatgggattcagaaaccttcgagattttaatctcgctctgttgggatggggacttttgattaatcctgattctcttgtgtcaaatgtgtttgaggctagatattttcctcagggatcgttccttactgcaactattggttcgaatccaagttttgtgtggaggagtatgttggaggctcaaacattggtaaaaaaggggcccgatgggttgttggggatggtaaaagtatatctattcttggtgaaccgtggattccgaatgttgagaatcctttgataatctctactcatccgagcttgactattgctaaagtgtgcaacttgatgaaaattgatggatcgggatgggaagaggagatcttcaggatttgctactgccccgtgacagattgttggtgcaggctatccctgtcttgtctccgccaactcatgattctctgaattggtcacttaaactttctggtttgtactcggttaagagtgcctataagcttttgcagcaacttaatggtgagttcaggctggatacctcaactgaagacatgttttggaagaagctgtggcaactcaaaacccctccgaaaatgaagaatctattgtggcgtgcggagaaaagatgtattccaacaatgactcagcttcaatcaaagagagtgaatgtaaatcctatttgtccagtctgtactatggctcctgaaaccattgagcactctctcttatcttgtccagttgtagcagcggtatgggatcgggtgggtattggtacggtaatgtagcaggatgtctcttttatggactggtgtatgaaccaatttgttttgcttgatattcggataactcaagcttgttggtagccttgtgttgggcaatttggaatgctaggaatgataaagtttggcgaaacaaagtgatggggattgaaagcattgtggcttctccaacaaactaccttaatcaatggcgggttgctcaaaattcgaataatgagatgttcactggtttcattccaggggatggggctgagcaatggtgtgctccaattggtaatagtattaaggttaatgttgatgcgattgtgtttagtgataactctacctatggtattgggtttgtggcgagagattccaacgatttttttgtagaaggcggtacaaagttgttccatggctcgatttctcctgtggctgaagcaattgggg

SEQ ID NO: 199317 - DNA, 1660 bp, Cannabis indica
aagctttgttcagtgagatgacaaatcaagatgtgcagcctaatgtagtgacttttaatgtgtggattgatgtgctttccaagacgggaaagatgaaagaagcttatgatgtgctagaaatgatgattgagaaaggtcaacatcctgatgaaatcacttacaacactttgttaaatggcttatgtcaaactggtaggcttagtcaagccaagaagctatttctttcctttcaagataaagggtttaaacctgattcatttagctacaacatgttgattcgtggactttgcaagaaatcaaagactgatgatgctttgagtctcttcagggaaatgactccgaggggagttaggcccaatgtagtaacatacaataccttaatacacggtttcttcaataccggtaacattgatgatgcccgcaaattgtttagtgagatgcaagttcatcatcttgtaccaaatgcgagtacatatgctgtgtttttgggtggactgtgcaagaacaagcatgtttcagaggcattggaaatttttcagggtctaaaaaatggtgagtttgagctgaatgttcaaattttcaatactctcattgatggattgtgtaaatcagaaaaattcgagattgcttgggagctatatcaaggatttgtccaaagaggactggtgcctaatgttgtgacatattcaatcttgatccatgcgctttgcgaaaatagagatttcgtaaaggcaaatgatatgtttcttgagatggaaaggaaaggttgtgccccaaattttgtcacatataacacactgatgaatgcttttataaaaaacaatgagctttcgaaagtggttgaacttctccataaaatggcagagaaaaatgtgccgcccgatgcttctacattcgccattgtgatagatgtactatcaaaggatgaaaagtatcgtcattgtctaagtttgcttccaacgtttcctgttcagaagcaatggagagtggaaacaatttgccccaagtcaatggcatgagttataatttacaatcttatctggagttgttcctgatcataatacgaaagggctgcaacgaatctctctgactcacctgaatagtttatcaatgtatgtagcacttcatttttttaatgctctttgttttctttctcctaccatagagtaattgtatatattagagattaactttgatagaatcattctttgttcacaaaatttttttttaaaaaaatcattattttgttgtctaattctgtataatacttccatttttttttttttggcataactaaatggaaattatgattccttgaaagggaaaaaaaaatgaaccccataaagtaaggacttcatatagcaaagtctttaacttcttcatagggttagaagaacggtatatggtcattgataagcaagacctagtccaaccagttcctctcacatcttttctttacaatatagtgagccttttccttgccacactctatctcggaaattttaggcactctacagtatcttacattgactctggcctgatgttatgtttattatcaacaaaattagtcaattcagtcatgttccaattcaacatttgttcattgggatacttgtaaatgacttctgcagtatctcaaggtggcttctatacttttatg

SEQ ID NO: 199318 - DNA, 973 bp, Cannabis indica
tttaatacttaattatatatatagcagtatgacacggaggaggttactaggcaccagtagtaccttttagtatttctcctatatattactacgtattaaaaatagtctcatattcataattaatgtgtggaaagataatactatacatatatatgtatttcattaaaaatatatatatatatataatatgtatagagtattattttctcattatcaattgattttgagatacaacctcacacacttgttatggcatcctttatctttatttctttttaattattattttttcataaattaagaaaattatatattaaataatttagtattgaaacattaattttacaataaaaagtgttaaaaataatataaaaaaatattatatttttaagtgatttaaaaaaaataaaataatttaaattgtgaaaataaagtgaatgattgatataattaatctatctaggtgtgtaaaatagaaagataacctactttaattagtggctatgaattatatatatatgtgttgtacttgtgctatattgtagctagctacatgtgtactgatccttttcgtttactagttttaatcatagatcgaaagcatagtggcatcggcacgccataaccttattagtgttttgatcattaatcattatcaatacatatttatagatgtagtgtgattaaatgcagccctatcggtgaggatttaattgggtgtaagagctatataatccgatggtttggagtgagggtacattgtagctattgtgtttttatgcatatgggatccaacaaaacactggagtatttttttttttgtaaacaaattcttctttattaaacggagcaattgctcaacaaaacagacaacaattcatatggagtcagtttccgtaataatacaattatctaataatcgagaattatttctgacaaatttgtagaacggtgacaaaagataaacatttct

SEQ ID NO: 199319 - DNA, 1338 bp, Cannabis indica
agtattaagttattaactactattaaatataatataataatactactgacaaccttaaaatgaataatattctttacaactcaccacctctgcttcactcatctcccaccaccgcaagtccaccatctcaaattcttatctccttcttcttctccagcaattggctcagtccggtgacggcgaggctctccctaacctccaaattctcccaagcgtcgactcctcctcctccaagaaagctccgcccatgctcattgcccagtcgcccactgctgccactatagcttttacatggtatgaatcttaaattttttatttgcattattttttctcattttttgaacttaagttatatctctatatgcctaggaacactatccacttgttttattgctctcaaagtcaaacagtatatatagtgtaacactaacagtacattgatatatatacccatcacgttttaatagtacattaatttttaacactaaagtctatggtatttttaaaaacaaaattttatttggggccaaaaataattcattcggactaagatcaataaaaaccgaactcgaccacaacatacccgacaaacctgacccaaaaattgctaaacccaaccacccgaaaattgggttcagttacacattttaaatacccgaaatccaaaagcccgaacccgaccatccgaaaacccaaaaatttgacccgtgtgcagccctagaagaagggagtccaagacaacatagattacgacacaaccccattccaaataaggccactctattccttctaaaattttgaaaattaaattttactcatttttaattatatatatttttataaataacatcaaaagaaatcctaataaaacttaaaaaactaatccaaataaaacttaaaaatttattttgtaacttaaaataaataatcgattcggattcgaaagcaatattaatacataaataaaaaataaacaatttattctgaaactgattcatgatcaattcgattctttgtcattctgattacttgtaagtaaatacactacaaatgtacatccaatttgcacaaataatatttaaattgtaaattggtttggattaggattattttcttaatgagcattgctatgagacacccatagtacctagaatcacaatgaagtgtcgctttataattgtttgacgattttcttattaaagtaaaacaaataaaacctgatattaaattgcactaatagtgatattacacctcacaagagtgcttggcatcatagcatttctctttcttaataaccctacactccataacatttgaagataaaaaagttaaaaaaaa

SEQ ID NO: 199320 - DNA, 687 bp, Cannabis indica
ttttttttttttttttttgctgtgaatggaaactgaaaagttttgagaaaataaatttagggttttgatgagagagagatttgtctttataattattataaataaataaaaaagatattttttttaaacaagaaatccaatcaaatcaacattaattatatatatattttaaaagcaagaaaatctcgagatcaacattaattatatatattttttttatcaaaattcaaaaaaaaaaattatagttttttatcacatcaatatttattattttagcttataaaaatattaactattttatcacataacaaaacttattaattattttaaattatattttatagaatactatgttttcttttataattttagaggcacacttacttacaaaaatagttaattattttcctgaaaagttatgatgtggtgacacgctaggtgggtcgggatacgtgtacgcagtcacgcctagcgtgtcactataagttaacatttttttaaaaaaaaataatagaaataacatgaattactctttagtgacacgcttagcatgtcgggacacgttgacccacacgcgttttgcatgtcactataaattaatatttttttgaaaaaaatattaattaaagctgaaaaaagtaaaatgatatagtgacgcgcttagaatgtcgggacacgtttacccac

SEQ ID NO: 199321 - DNA, 661 bp, Cannabis indica
acaattttggtaggctgcttaatgaattagggaaaagaattaaaaaaaaaataaaaatgtcagtagaataaacacagatgtgatgcaaattttgtatatgtttgttaggaaatttcttgaggctgctactgctaggatttctaatagtctctactacatttgtctttgctagtgccctccttataatttttttttcttattagagataacattagtgcaagccaatccaagcaaatgataactgtcatgtgctcttcaatattattaatattattcgagctttaattagttttaacatcaaaatggaagaaggtttgatttgttctttttgtcatataataacttcctgatatgattagttaataagtgtaaatttatatgctgaaataatttgttctatcatcatcgtaattctcttgtaatttatatgctaatcttgttaccctcgtcaactttttaccaataggaaaggaagagtaaatcattgagtgtatttacagaactaaacttttaaaatttgtcttaaaatcgacaattatgactatagctagctactaccacttcttgtaatattaaaaaaaaaaatcacaaactcttcaactcaatgcaaaaaaaaaaaaaattattgataaaacacaagttgttccatttagagagtggg

SEQ ID NO: 199322 - DNA, 935 bp, Cannabis indica
aaaaccaactgagtttccttgaacaattgaagaacataaagaaccccagctgctctagcgtggaacgaaaaagagagagagagtttgagagtgaaatagctttttccttgatttttcttaatttgaaaatattgagtaaaataaatctttttctttccttttatttaactaaattctcagctaaagtatacctaaatattcagattaataaatcaaattaaaaaccactaaagacaaagcataaatgggtaaaatgaccattttgcccttttcccacaaaacaacataaaggagcacttatgggtaatttgggaaactctaaaatctcgtctattctcgatattctcaatgtctaactattgtctcgctatactaaaaatactaagatgtgattcaagaagccatacaccgcgttccaatgttgccgggcaccaaaatatgcaaaattatgaaatttctatatgtgacataaaaatgcattctgaattcaaataaatcatcataaataattaatttaatattaataaatgattttcataatagaaccctaattatctgctaatttccaaattaaagctaaacggtctttacatgaaacatcaataaggaagggctccatagcagagaaaaaacagtcaaaatgaagcaggaaagaagtacgcctgagataggagagaaacaaggtatggaagaaaaaaggaggcgtgagtaggtagaaaacaaggaaaaacaaagaaaaaactgatggtagacgattacaaagtcacagagcaattttaaagataaacaatgtttggcaaaagttcctataagtttgaatgcctcaaaatccatgagtatgtaatttgatgggaaacaaaataacattgctagttgcaatatgtatacaacataagaaataatatttctatcattaggttttaattttttttttt

SEQ ID NO: 199323 - DNA, 1316 bp, Cannabis indica
attgtaatgcccctaaagtactcctataaagagtgtggtcagggaagggttccccattcgtaagagacagaacatgtgaggcacttgttgggctgggacatggtttggtaccatccaacttaagtttggttaagaggtctgcaatatacttcgattgagagaggtataaaccagctgaagttctataaatttccacaccgagaaagtagtgtaatggccccaagtttttgatgtcaaatgcagtattcaaatctgcgattatctcaaaaattagagcttcattaggactcgtgataagtatatcgtccacatataccaataagacaactaaagtttgaccaacccccttgaaaaataatgaattgtcagatttggacaggtgaaaacctttgtggaacaatgttgatttgagcttgtgattccaagctcttggagcttgcttgagaccgtacaaggccttgtttaacttgcagacatgaggagggtatttcggatcaatgaaccctggtggctgaggcatgtacacagtttcctcaagagtgccattaagaaatgcatttgagacatcgagttgggtgatttgccaattaaaagagactacaagagtgagtaatattcgaacagtggctggcttaaccactagactaaatgtctccttgaagtcaatgccaggggtttgagagtatcctttagcaaccaatcgtgacttatacttgtcaagagaaccatctgccttaagctttattttatgaatccatttgttgcctactaaagtcatggatggatgataggggacaagaaccccaagtattatttttaacaagagcagtgttctcggtttgcatggaagcaaaccagttggggtcattgagtgcttgttgtaaggatgttggttctttgggtaagagagactcaggtaaaggataggaggtggcatggtaggctttcgacttatggatgccagacttggatctggtttgcatagggtgaatgctgtgtatggttgttgtgtttggtaatggctcagttggggaaggaggggtaggattagatgttggcagaggtaatgactcaagtgtttgagttggttgctgaaaggatgcatctggaggcaaaccactagcacgatcaatattgatctaaggcccagtagctgctgcattttctgctgcaagtggtgctacagctgttggtgcgggtggcacttcatgggatggcacatgttgtacctcagtaataacatgaggtgtgttagtaggcatggatggtgtagaaaatgtagcagttggaatggtaaatgagggagaggaatgtac

SEQ ID NO: 199324 - DNA, 1373 bp, Cannabis indica
cttgtagctgtagtaagtagtacttttaaaagcacttgttttcaagagtggagtataatatatgttcttcattacaaaagaataatagtaataaaaaaatattatctctaaaatgttattggaagtattggttagattagatgtagttaggccatcacactatcatgtattggaatttgaatagaagaggtcgtagagattttttcatgacaagaaaagattgcttagatattatgtgacgttgtagcctagtagactagcatattaacatgtatttggagttggaagagcatccggggacaagctcagtgggaattgcagtccatccaattcaataaatgctaaaaagtcttgaaagaataggaatcagatttccttattttggaggagttctctgcatttttctgatcttcgtagttgcgtacacagacaatagcttcttgttgaagctactaacagtgattttaaaaaaaaatcagattaaaaaaaccgatttttttaaataataagaaataataatggagaagtagagatctgcaagcatgcaacctgcaatagatctactgctgtgtcttttttttttgtttttttgagtagtgaaatatactgaatataagcattttaaggttaattggttttttcatctgattttatttatttattttttttatttggaaattaagtggctgattagttgacatgttttttttttaattctaattttagttgtattttctgattagattgtaaattgctattaataatattgcttgatttactttattttttttttcttcttgaagtagagttcctcttttaccctccgattttattttttttaccactgcaaacgcgtatgtgagaaaactaacgtatagttgtcgtgatcagctaaaattagtttaaaggtaggtgaatttcccgatgcaaaaagttcatacaaaaatcttgtgataattgataagtgatgttataaagtaatttattcattaccttcttttttatatatgttatataatcttgccaatcaaggaagaaaaaaccataataataataaaaagagatgggcaacttacaaaattttaggaaaattattttgaatattatttcttaattttttttaaaatttttaatttcggttgctttatgtgggttgcatatgaattttggttgcgatttaggttttttcgttagttgctatagagatttttgtgtaaatcagtaaaaatatataaaaattatttaaagtgtaaaaataaaataatatctttttattgtttatttaaaattataaaaaaaaaaaaagaggaggcattgtgattggaaaaaagtaaattagtgaaatcacacactgcgctatgaacagattctta

SEQ ID NO: 199325 - DNA, 567 bp, Cannabis indica
agtcattccaataaaaaatttgtcaaatcaatagtgagatcattaaaccactcataactcgtaaggtttaattattattacatataaaccaatcatatattgcaaactaatacaccatactaattatatgaaagaacaaaaaaaggaaataccaggaaattactttgaatactaccacaatttagacttttggtggcaagtaattaatttgccagagaaaaaataaacaaagcattaaattttaaagataatataatgtcatattcacttaaactatatgtaatgtcatgttgatgaatcataatcatattgtttaaactaagttgatgtgataacaacaagctaataaaaaggtggataaatgatatatcaattggaataataataagtaatactaataaggtaaatgttatttttttgagaagtaaatcttgtttagtgaaaaataatcatctcacgaatgaaaaattcacttcacaaacacaaatttccttgaccaaactattattaatggtattgtcattttcttgtcaagtaaaattaatttcaaatatgttcttctttttt

SEQ ID NO: 199326 - DNA, 1190 bp, Cannabis indica
ttaatgtgaaatagtaatacaagatatcatttttgattttcctaacctaccaaattgtgactcatatattactatgcttatcatccaataatgaaaggctagcttcaactgcctaaaaagatttttgttattaattaatgaagctaactcattgaaagtattcaaaaggtaccaaaataattttattttaatcgattgtttagtggttgacttttgattaattcttttattgaaatgggtcagttagcattggtcttaagttgaccaatctcccataaaaacaataatttaggaagacaaaaacaaaactaataaatggaacaaataaaagaaaagtacccttcaaaaaaatgtgacagcacacatttataacaaatttatatatttaaatatatagcagctcatcagcttcaccttttgtcaaacttcttactaaaaccaattccatagtaatatatatatgttagtatttttacattggaatattacaaaaaagaaaaaaacaagaccaattacaaacatgtatacaggaaaaaaagacaatagtaagacaacagtagtaagcagatgatagtacgagtatacaggaatcaaacatgtatcaaattgataagaggtacaaatctgggctgagaattctttataactgtgaggaaatgaggcttggttctcagcacaaaaagctaggtgcaattacaaagtaattctcatactcagctcacacattctcactcactaaaaatactcagcaattctaaagcataatctaattcctataacagaattttacccacaagctcacagcacaaaacacccacgtgaacttctaattgtccttagagtaagaaaacagatacccaaatcataatgtcaatggctatataattaacatgactaaatgaagaggacgagaatgaaagttgagagcattaaaattatgaaggcctgagtttcttcgttcttctttgtcttggaaactatcaagcaggatgtgtaatgagagatacagagtgactaagaatgaagatagaatttgtcattaaattgtgggaaaagaaaaaaagaatcagctattttttcatgaaagtttccatcaattatacaacaagatgttctgaaggaagaatcaataaattgataaattactgtctaagtgaatttgaatgatacacaagttacagatttttttt

SEQ ID NO: 199327 - DNA, 917 bp, Cannabis indica
ggtgttggtagtatcattgtgtggatagcaatattaataacggtgattgattatcacgttagacttgtttgtatagaaataatagggtaactatagactacttgttagtggtgtgttttggccgtttcactctttaaagttattataataatataatttatttattaaaatgtagaatatatattttttttaaaatattttgcgaatggaaaatatattttatatatgaaagttgtttcgaatttggaacgtctctcaaaaaaataggttgggttgaattatatagagttaaagtgtgccctacccataaccaacctataattatatggcctatcacttttcgacccaatgagtcatgacctactctcaggggcggagctagaattagatgtgcagcggcggcggggggggggggaactaaactaaaatttaaatagtaagtcttagtacaccctcctaaagggttattttggtagacttgctatctgctcgacatttaaaagagtttttagtcatttttttatgattgcgtacattccaactatataggatcacctgtaaatttttttgaaaaatcaaataatgtacaataccaaaaataaggttctcatattttattgcaagcgtgactttttttcttatgcgtgtggtaagaaactgttaaattttataatgtatgtttgtatttttttttagtatattagtattctttttgtgaatttaaagttgtgttttggataataattaatgtgtaatattttaatttttatgtagtttaatatttatatatatatctaaatttttatgtaagctttattttttattataggggattttccgtcccgaccccgactccattaagggatttctcgccctatctttgatggggatcaataagcggggatggaaattaaaat

SEQ ID NO: 199328 - DNA, 1544 bp, Cannabis indica
attaaaattcttaatagggatggggatgagaggagtactctctgccaatttcccgccccgtgtgcatccttagttgcacccttagtatctaaaaaaaaaatttttcataagcttttgttaaagaaatttatatttttcttctttctagcaatatgtattaattcgctggtagattatattttttttataatatatgcatatgtatgtacacaccggtttattaatatatggagaaaagattttataatatattcaaataaaaaatttaaaggttttttcattgttattacactttaaaatatatatgtatatatatatatattttttttttgcattttaatggattttacacaaaaattttgatagcaattaacggaccaacctaaatcacaaccaaaattcgtataacaacccacatgaaaattactgaagcaacccaataaaacattctttattttaggtataaaccagtgctatttcattcatttggtcatttataagagaagataaagaaaacattaagggttggtttggcacattattgtattaaattatattttgggttatatttttattataaaattatatgtgatattaagttatataggtgtataaatatataatattttattataaattaaaatttaatgtaatattataaaaatagagtgagttacagcataaatagttaagtttaactctcggttgcaaataaatgtctaagtttaattttttgtggtaattaataatatctaagtataattaattctgaaacttctgtaagtacctgactgttaagtattaagtagattgatacgtgacaattcttgattggcccaaattattaaatttttattttcttaaaaaaataaataagaatgaacacattataaaaaaatgacacgtggataattccttgacatttaagggacagataatctacgaaattttagaaatataacttaagtattatcactgtcaaaaatttaacttatgtatttatttataatcaaaattaaaattaaacttaagtatttataccacaaattactttataaaaatataacataaaactcaatttgatataatatacattacgcctaacaccacttactgaacgagcccatattaatgtccctagccctaggtaatcctaattgaacacaaacgtacttaatgttatattatttataataatataatatatagattaaatatgtgtaataaactaataatatgtaacatatgacaatgtatattagttgtcatctttttgtaacatttgggagttacttgttactatgagtaacctccaccatcatcaccaacattaagagtgtaaaaagatgttacacatcttaatttgaaattcttaatgctataggagttatggtgtgtgtaggagttacatttgagtccataacatctatggggttatgagtttgaatttcaaatggtgatgatatcctaaacactatataaagaggtctaaggtgctcattttggagatgaagttttctatcaagaaagcactttgctagaaa

SEQ ID NO: 199329 - DNA, 1510 bp, Cannabis indica
aaaaagcacgagaagtatgtacccatttatttagtatatattgaattgaatgaaacttgtgagaacatctacctcgccaatgaaatggggtcgcatttcatagaccataaccaatgaggcacgcgaggaacaagcgagattcaactaagtactattgtttccacgaacatattgggcataccaccgaggagtgtcatcaattgaaagatgaaattgaaaatttgatttcacgggaatactttaggcaatatgtgagaactaaacgaattgagtctaatcagcctaataactcgaataacccaagattgtgacctccccccatagagggcgaggatattttaattatttttggagggccacactctacaaggacacattgaagaagatgggattagaagaggcaaaacaaagaccatgcatggtaaatttatgcagttttataggcgacagtgttgcgagctagcttaggcataatcgagcttcccttaactacaggagaaccaccgttgtctacgatgcaaatgcaagaatgagctcgataaagcacttgtccttgaaatttcctacgcattctagagtaggaagagttagaggcgactaattattggctcgagagtgttatcgagtggaacttcaaaacagaagatcctgtcatcaactaatagtaattctgactgaagaaatcaagaaggaagaaaaagatttggatcttagaatccaagatgataacaactaactcaaaccaattgaagagttagatgaggtgattcaagatcaaaacaatcccataaagtgtatttatattgggaaaagtttggaagaagaagtaaaatagaaattaatcattttttcgaagtcaaaccaagatcagttcgcttggagccactcagacatggttgaaataaacctaaatgtgatctaccatcacctcaacattgaccccaaatatccagcaatacattagaagcagcgaccattagatctcgagcagtaaagtacactcaaagaggaggttgacaaattgttaactaatgacttcatacgagaggccttctatccctcatggatctctaatccaatcctcgtaccaaaaccaaatggcaaatggagaacttgtatagatttctaaaatttgaataaggcatgtcctaaggattatttcccactttcaagaatcgaccaattggtagatgcaatagcagggtacgaattgatgactttcatgggcacatatttttggatataaccagattaaaatgcatgttccagactaggaacacacaagctttgtaacaaatatgggactttattattataaagtcatgccatttgggttagaaaatgctggagcaacatgccaatgtctcataaatggtatgttcgaaaaccatataggacaaaacatggaggttgacgacatgttagtgaagttagtgtaaagcgaggatcatacaaagaacctcgcagaatgttttgctacactcaaaaagtatgacatgaagcttaaccc

SEQ ID NO: 199330 - DNA, 2424 bp, Cannabis indica
atcaaaaaaggaccaaacattttgcaaattgtttttgaaagaaagtcaattgctatacggaacgcaactttcttttctttcccaatttgataaaagtggtaagtttcactcactttaacaagttttgattcaaaattatgaaactaaataattattagaacttattctcttattaattttcaattgaaatgttcttattaaaaaaaaaacttataaataaagaaaaaataaattatacgataattttattcaaaattgtatacgttgtgaggttaattattctaaacatcaatgacacaaccgcgcattgacacaaccgtgcatctcctattgacttaagagtttttgcatgtataaggacatatcattccacttaagagttttaatgttttttttagagatgacaattatactcgtgacccgcgagtacccgctcctaatagaagaaggcagggtaggggtcgaaatttgggggcaaggacatgtatgagtttaaatgttcatactcgagtcgggttcggagctggataggagaatagatacccgttctaatatgatatatgtctatatttaagttttaaaatattaactattataattaaaataaattcatgtttagatcttttattgattatattaatgagacattttagttttcatgaaaataaaatgacacttaaccacttattttcgattgccaattttgtatttactaactccatttattatacacattattctacttatgtttatttttatatgttttaatgttatttttacttctatttgagacatcatttttttttcacgaatatatatgtaatggatacccgttggggattattccccgtcgggtaatcctcgccccatccccactttaatttaaatggatattgggcaggtatgggggtgaatttaggaagcagatatgtgggggagcaatccctctccctgccatgccctccttacatccctacctatataaggtgcttagcaccatctcttgtacttagttagaattttttttaacacaagtttctctcaattctttgattctcaatttttcgtttccgcaatatagtatcagagcagggaagttaagctctccttccatcatgcagataatcttggtaatactctagtctctcagctacttactagtcaagataactatttatcctaaagttgagcaatgcaacttgctaattgtgttaaagacaaattaggacttcttgatggctatattcctaaaccttcaccttctgaccatatcttgtataatgcctagatgacgaacaacaatatcgtgatttcttggatactgagttttgtttctaaggaatttttttctagtattatgtatgatgaaacaacagctgcgatatggattgatcttaaggttcggtttcatcaaagaaatgggccacatatctacaatttaagaaaggatttgatgaatctcaaataagaaacacaaaacgtgagagtgtactttaccaaattaaaaacagtttgggaagaactatctaattacagactcacatgtacctgtaatggatgtgttttgtggtggtgtcaaaaagcttcaagaacactatcacatggaatacataatgtctttccttaggggactttcagatttctattctcaagttcgaggtggtatcttgcttatggatcctctatgagaattcaacaatgttcttcatctagttactcaagaagaaaactaaaggggagcaagttgctgcagatccaaatcttaccatggcctttgccattcaaggagacaaatctgctctacaaaaacagcttctcagtattccaagacatacccacacagaaggaatagatctttttgcacacactataatgttcttagacacacaatggagagatgctacaaatacatggatatcctctaggctagctacaacaaacaaaataaaagaagttggagaatgtattttgcaaggaaaaatagtaattatttattataaataaataatattaattttatattaaataaattgggaaaaagtatctttgtatggagtatggacaagacaagatggagccactttttttccttattaagagagtggtgcgccacaagtgtcttgttagggtaatgggtggtgacacctatactgtgtaaaaaccgtgtaggcacctaccataaaagatggatcccattgggtttaattttggattactttaattaattcaaaaattaaatatttatttaaatttaaaatttagttataaatatttaaaatagttgagatggttgagaaattctctccatgcagtttgagatattccctctaagtagtttgaaaagatttatctcatttggttaatagatatttagttaaatattaattttaaaataataatctgtaacataaatcggttaggtat

SEQ ID NO: 199331 - DNA, 830 bp, Cannabis indica
tctgttactactattctgttacttataaaaaggagcacacgtgtaaggctgggattaaatcccattatttcataaaaaaattaatacatcaaatatttatttttaattaatattacctaaatctattcctaatatatctttattaaattaaaaaaaaaacaaacactgaaaaaactcaaagctgcgactgaaatcgaacccagaaaacccccaaatcgcatccctaaccccccaaatctcacctcccaccgtcgaactcacagacgataagaaagaggagatcgacgaacgcgaccagacccaatgacaaaccagaagcacaccgacgacaaggatgaagctgaaccactgcttgagccgcctacccagatgagcaccatctcctctctcgctggtggacagatctagaagaagaagagacctttttattttccatctttttgtttggtaatatttatattttcggctattattaatgtcaatgtgttgaatcgttggaactttttttttttgctttatttttgtttgtaaacctgctttatttttgtttgtaaacctagatttgatacgagatatagttaaaaattttggtttgtgaactatcatttatttttttcttagatttgccatgttttgtgtttactttttatttaatttcaattattagtgttcttatgttttgaagaacctttcttcattactttgtttagaggctggtttgctcaagaaaaaaaatgatagatgaagatagagaaatctagtgatttgtttttaattaattagttattgagtcattaaaaatctaatttaaaagaaattaattattattt

SEQ ID NO: 199332 - DNA, 845 bp, Cannabis indica
tgatcaaattcattcatgattcatgaatcacacttgaatagtaagaacttaaatttagaatcatggatccacattgtgaatataatatgtattcaagcaatttaattgatacttaaattaatgaatttttttccattgaaaagtttatagtatctatgatacaatccaataaaaaaaaaaattgtctatgataataatatataagtttatcaattgacaaaatatttaatattttattttaatatacaaattaaatgtgcctccccaaaagtaacaaaaaaccgtgaaggcctttcatattagacaaagattaaccgtgaagtgtaaagataaataaaaacactacaagtattaaccatgtgaagaaaaaaaattgataaaaagtcaaaattaccatcattgtgttggattagaggcggtggtacacgatcattttgacttgttaagaattatgggattttatctcaaaactaattatagtgatgagtggagtagctcaagtttttatatatctctcaatactaccctaccattaatactatgtagacaatatccacaatattttccttcaagatagtagttattttttgctcaccaatcttaactatattaaaatggacatgatcactatctgtatagctgtgaatcagatagaatcgtacatgcgccgaggagatatggaatctaacactaaattaagaatcataaggttgcagcattctgatagtaattaaattttccttgatgtatggttcttgactctgttataggcgaattgtctttaaatgaattattcattcctttcattaaaaaaaaagtttgataaaatttgttagtatatattg

SEQ ID NO: 199333 - DNA, 1083 bp, Cannabis indica
acaatgtttttaagggtttattccacttcatagcaattctaaaaattatttatcaatgatttaatatataataaagaaaattattatactttttagttatttttctttcattaaatgaaattaatagactcggtttaattttaacattggagaaaatcatcatattaatttttttagattatgaatctatttatagatgactttctctctcttatttcatacccttacaataacagaaaatatttcagattaaaaaaatatttcaaattaaaaaaaaaatgtgaggttcaaacttttgactgagagtttcgaacttcttacctacatcaaaagtgttagatacctcatcacactagaattcatgtagttcttcattttcatcattttcttaattatgactcagcttatattataaagttatttatgaaagattaaatataataaaagattacaaacaaagaaaattattatgttttgtagtaatttttctcattaaatgaaggtaatgcactcgcaaaaaattagaagttataaatttaaatgctaaaatggggcgtgttattacctggaaaaatacgagaccatgaaattgaaaatcgataagcatcaaaatttagctttttcataatgtcgatatcttcctgcaaaagcaaaacaaaattctctaataagtgctagaaaaatagtatgttggatatcgacccacgtctcacattaaaagatgtaagagttatcttgaatataagtgttctacttactctattaatatgaagtttttttagaaggtatcgaaaaataaaaccgtgagggtttatgcaaagcagacaataacatactaatatgaaaatcaaggtaaagtagcagcctaacaaagtggaaaaacggggccaacataaatttttttaaaaatattatcatatttgacacatgataaaattcaaatcaaatttatcacttaatataacatgaactaaattgacaaacattaagtactactaattaactaaacatttgttagcaaaataataattgtgttaatcactatggatatgtcaaatcctagactattttaccaatttaggt

SEQ ID NO: 199334 - DNA, 809 bp, Cannabis indica
aaagaagaaatcataatgaatttgtgagaagaagtaatatgtatccaatgagaattcccatgtatgcggcatgtcaatcaactgctttttgttgttctttccttttccaatgtctaaaattgcttatctctctttgccgttgatcaactgtttttatgtttttatgtttttttgttccttttctattacaaacaatatctaaaattgcatatgctgtcttaaaataaaaacaatatcactactatctccttctttttctcacaaaaacaactaattctcctaatagatataagttttcattttttttcccctattttatttactttttctactagtaaaaagacaaataataaaaaaaagactaataaagtattagtgaatattcatttactttctttgcaaaataaataaataaatacaaaatgttgtcttataaaattaattgtttgggtttgtgcaagggaagaaaggagatgctttcgaatcaagaaaaactggtaacaagatgcagttaataaatgataggaacttttgtgaataactgcaaaacatataataataataataataatacaaaaatattttattagtaacgataatgatatttttagtatcaaaacaaacccagccagctcttaccccatatgtatttgtcagctcccatgttttattttctcacgctcctctcctatcatgtagattaccacgcgccatttccccaattaattttccaaatatttggaatttttttttttaaaaaaaatgaaatatgaaagaattaaactaaaatatgttaattaaaaatattc

SEQ ID NO: 199335 - DNA, 872 bp, Cannabis indica
aagagaaccgaaccagagaagagaagaagaagaggttcgaactgaaccagagaagaggtagaagaagaggtctgaactgaaccgaattgaagctcaagtatttgaagaatggctttttatagatgtgctccttggagatgctctaacgcatgaagtctactttcattgatgtcgttttgttccttgactttttccaaaaactgtatctttactcttctcaactctcaataccatattctctgtgcttggcagtggctctgttcggagctcactccctcactgctgtttggtaccatcttccataaggtatcactgagttttgagactgaagtttgaatctattttcgggtaaaggattaattaatcaacacttctctatcgtaatttaatcaatttgcttacaatatattcacttacataagaaatgagtatgatttccgtctcatttaaacgtcctctgcctttctgcgccaattttctttctaaattctttatttatttatttattttaaaaaaaaagttgttctatttcgatgcatctctctctctctctctgagtctgtaaatcctatttcactacgaatgctatacatgtgtgtttgtcatggataacttggattaaaaatctttgctcagtttgatgtgaatctttttggattgaaactttatctttcattagagcttttcaacttgcttaatggcaatgacttttgagttgggcattttccaaaaaaaaaaaaaactctttttgcccccaaattcccaatattacaatggttttggtcctttgtcagatgacactttttgttttggttttgtttttaatatatgttaaaaaaatagatactgttttcgtttctatgttctaacca

SEQ ID NO: 199336 - DNA, 1830 bp, Cannabis indica
aaaaatgttttgctacatattaggagagttaacctctaccatcaaatagcagccaattggcaagaacaaaagataagataagagaattttgacttggcatttctttacttctttggatcctcaaagcttggctttatttaactaagattaatttctacaaaactgaaattaaatagaagtttcacaaataagattatgaagaattgaagttactactttttctatttctatattctactcatttattgttcaaactgtaaaactctctttatacattttcctctttcactaacaatatacaaacatacatgtaatgcacttgaatgcatgaataatacttgcatccttgacatggtttctcacttctcacaaaataagctctgaaagaactcggtatctgccgcgcttaatacttgctaccaaaaatgcatctcaatgatggaggattgaactttcagtaaagggttcattacttctgctgtactgtacacagtagaacaactcaatctgtattgtcctccaatgtcgagaccgtgatcacaaacattggactcgatcaccaattatcagattgatcgaagagcttctactttcctgtcctaaatggcatttaggatcagttttagcttcttgctccttgcttttcaacttcagtccacttctatatgaacttttttgctcattgattcttgattatttcgagtggaagaaaagaaactaatgaaatttcttctgtacaaggattgtactgataccttttgaaaagtattagttgaagaagtaaggagaattaagaacctcttgcaagttaaagctgcctctctctggaatgggaggaaattccaattctggatacgaagtttggaagttttctagcaactgtcatcaggcagagaatgatacatcagaagttagataggggagaaggaaaaagagggtgggagagtggagaagaagcatgaaattgatactaataatggtgaaacattaagtcacaattaataacagactcacattctcaagtaccggcatgctatacagttcaacaaattgttgacgcagtatctgattcatttggtccacatcacacgcatgagtccagaacgagtcgtgcacccctgaaacaaagatagagaattgccatttgacgaggtaagcttccatttcaacaactgttcatacttcaaagttcaaatcatctcaatcaagagcggaaaagcaggaacaaagtttcaacaatttccaggaacagacacaagtaaacgataataactacatatttcgttgaaacaattcattagcactgcacaccgtacacaaattaaaagtgaatagcgcaactccaagctttggacagaggggaactaagagagaaaaagaaaggttctgtgattttcaacaggaattatggctcactgaataggtggttctaatctatgaaaagttacaagagacattataggaacatgttttttttattattaataagacactcgcttaaaatataaaaggcggttaaggctttttctacaccaaccaaatttacaatccccatgtccaaattgacagacacaaacctgcaaaacataagccagcatccctgcaggcgagagcagtcatcatcatgtgcgaaccgtcgagtgagtgaacaaaatttggaggaaatgcagatctctgtttcctcaaatctatctgaatacaataaaaatgaagctgcttagcaataatggaagattgcccacatcatattgaatgaatgaggtggtcatataaacttacagagctaccctctctctgcagagccaaaatctgtaaagatgtttttacctg

SEQ ID NO: 199337 - DNA, 2057 bp, Cannabis indica
atttttgttttttaaaatttcaagaaattattggagatgttgacaaaaatatagttcaggtgatgcaattatttgttattattgttctaaagtaattgtatatttattttatttattagtgtatttgggtcattttagtattttttaggaatatatacagcttttgttttaataatctgactttaaatctaggataaagtttccatataagtaataatagaataatactgcaccccatcacctccttcaaaaaagtatattattctaaaatttgacaaaatagaataagaaatttatgaaactccttccatcatttgaagccaaaagtttctccaaagcaaaaattttatttttggtacttcacttttttatttatctaacttttttctttctttgcattttcatcaaccctatgtttggatttttaatttttgatataattagctataatagctagccagagtactccatgcaatgcatatatatgctatacattttaacaatataataaaaagaaaaacactttgtagaatttatgataatgatttttcctgataactaatatcgtttttaaatcattctcctaaaaattttcacttattacaaaatgtttttgtttttttgctgtttggttgcacttttttatttgatcattaaaaaaagatgtgactttatcactagtggggaagtataactgtttagttgttttttttttttttgttgtttttataatgtcttggtttgtttggttgttttggtgttgtataaataagcagggcgatgaagcttgtggtggtgagagtagtttgattggaaaggaaaatgttggagttgttgttgacagcaatatagctcaggtgctgtaattttttattattatttgttgtaaaatttttgtatatctgtttatttgttagtggtttggtcatttttagtgtttttagaactttattttttttagctgtttagttgcatttttttatttaatcaacaaaaaaatctatgaacttataaactagtggtgatgtagatctgtttagttatttatgtgttgttttgtttggttgtataaattttttacaacaataataaccaattagttatttttttttgtttgtattttttttattttttttaggtatgtggatcaagttaatgctgaagacgatttagttcaaatggtatatctatacttttttttcttatattctgattattgttttttttttgtgtaattttttaattgttattttttaataaatacattttttgttagaattcgaatgattactgtccaagtttcaacttaatgaagcttattaatgagcctcagttgtttaatgatgatgctcccgtggagtttgatgatggtgggcaagttggtgacaagggtggagatgatgtcggtgttgcagataagaaggctatgggtagccaggctactgacgataacattacgtcttttgtgatgggtattataaatgagaaaatggatgatatagaaaaggtgtgtattgttttttttagagtactattttattatttgtttatgtttatcattgtttatttgattttttgattttccttttcttttgtttttttgttgtcaattttttttttcatttttgcaggagaaaagtaatcagaaggtaatttcattcaatgttttttttttcagcttgttttattcacatatttgttgttataagtttcatggttgaatggattttcatttttttaccattttgttgtattgctttctttaatttttcaagagaaaagtaatgcaaaagataaggttttggatgttcagcctattcgatcttttggtagcccttctgttggtgttagtaaggagttacgtgaaatgaaggggcagtttgttttttcttctggtttgatggatgtgcctttgtgtgtgcatcaagatgcgtttgatgaatggttttctattggttataggcctggcaatgtgtaagtcttttttttttttttttttttgtatatattatttgtttatgtaattaagttaagttttaatgtgttttatatgtgtt

SEQ ID NO: 199338 - DNA, 1648 bp, Cannabis indica
ttattcttaacttctacctccgtccctgctctgagaaatctagatatatataacatacttgttacattgtctaacaatgatcctagatcattggaaaaagaatgtctcccgcctaacaaaggcaaacacaattgcaaaggggtcataattaacaaatttaacgaaatttgaagaaaaaactatctaatatcaaacaatgtgcttgaaatactgataatctccatctttcactcctaagttaacaaccgcttgttctactcctccaaatgtactaaattgcataaaaaataaagaaaattagcaactaataaaatcactataatccatttctaatggaacttaaagtaaaataataataaaataaataagaaacttatctgctaaaaatattattctatagtaaagtaagcatatcatttgaagttgctaaaactcgaaatttttcatttcaataactctataacttcaataactcaataattttattattctaataatcaattactagaaaacactaataattataaataaataaataataatattttaaaaaaataatattaaattgacaataataaaaataataatttattttaaaaaaagaactcataaaaatagcaacataaacaatcacatcaaaggaaggagttgctcaaataaatataatgttagtttagatattttgaaaactcacaatatttgtaaatttttgtggcaatgaaactatactttaaaaaattaataactgctaaaatataaaattaacatgataaagtgttaaacatttatcataacaaagaaacaaataacctatcataaagtgatcatattttctataatcggttttttttttctctctgtatgagagtgttggaaaatccaacttgacaatcatgtcttttaaccagaatccatttcagtgttgctatttttttaagagttgactctatttactcttatctatatcaaacccgtctgcagtctttggtattttttcaagttaaaagttctttcttgattccagcctttcctattcctgattcctctgtttcttttatttgttccttttgttgtctcttgtgcttgctattatgggggacaatattgatgattcaagtggttcaacttcgattggcatagaacattctcttgaaaatcctgaagtcattatgaacattgatgactcccaacaaccttccaacgatgtcaatgagggagttaatgctgatgaggctaaggaagggtttgttgagccggaccccaaagacattaatgccaaaaccaatgaggatcttgaaaccttgtgtaacaacttcttgcagtcaatgaccattgatttggagccggcttttgaactcactgaggagattgtccgcacggggtgcttgtcagttttttttgatggaaaaggagtttcacgttctagacttaaagaaatcctaagtcagatatggaagcttaaaggatattggaagttcaagaccttgaaacccggtgtttggggtatattctttgacaaagaggaagattgcgcgaaggtgcttcggaacagaccgtggatcataaatgggaagctacttatcatcaaagaatggccagaggatggggattggtacaatgcggacatgcgtaaagccattttctgggt

SEQ ID NO: 199339 - DNA, 561 bp, Cannabis indica
tctgctcggtcacttggggggtaacaatacctgtacagagcattggtaaaagtaaataacaagctcaaataaacataacagtttgcatgaataattattaaaacaaggtgaagtgttcattgaaaagataaataaggcacaatatacttggggttaaaggcttcccggtcagctagttatctcaaaatgaaaaatataacccaagtttaaaaaccgcttggtcagtcattttgtctctaataaaggcccatgggcagaatagatagaaataaaaaagagaaaaatgcttcaaatagcaggggtcctgggctccttgtacgggtcagctttgtctgtgggggccggaggctcaacacattggacgacaggggtcttagtaccctggtcagttggaactgtagaatcgactgcctcaaggttttctttggctgcctgacccgcatagtaattaagatatgcctctttggaatcaccgaggtaattaaaatttccttaggggttggccttctgaaattcatagaagacttccaaggcagcagtttccaggctttccacctcctt

SEQ ID NO: 199340 - DNA, 2540 bp, Cannabis indica
ggtagattaaaattgctcgcataaagcaaagcagatgagaatcgctcacaaattaaaactatacacagattataactgctcacatatatacatagtagattgataactacttaaatatatcaaagaaaaacaggtacaatggaaatgctcccagcctaaagtatcttaagttggatcaaaacataaatatttagattgtgagataaaacacaataaataaacatatttagttcaagtataagatacgagacataaaaagtaaagatatatatatatatatataaataagcaaagttggcagtccaataatgcaaaagtcgtaacaaaataatgccattaggggcaaccattgtctcagccaaagagctattttatattttttttttttaaataaataaataatataaaaaaaaactaagtctaaatggtaggagacttggacgaatcttcttcttcttcttcctcggagtccactgcttcttactcattggttttctcgcagtaagccagtacctccgtagcaccgtcacccaggaagctcaggtccatgttgggattggccaaccaggctcagtaaatggatcattttgcaacatttctgcacctctccttagcatcatcctcgacaccatcaagctttttatttgccccattgagctcttcctggagtttttggcgagcctcgcattggtctttggcttctttttgaccatcttcaagctcagccttatgattcctctttagttcctcgacatccttggttaagcgtatgtcctccttctgggcatcattccattgcttcacgatgatctctgttgtttaatggatttgcggagtttagtttccagttgttggattttcttaaggccttggtgttgtgccacatgagacagaatggatgcctacaaacaaaatatatataaatttgaaagaaagataaggaaaaacaaagagaacgaggaaaggaactaaccgagagactaaagttgagactcttctcaaacaactcctcgaagttgccattattaaccaaatcctagtcgccagactgaaaggatttgaaatggcgccaattagaggtggcatattacgagcagaactggaagccggtacttcctgcttcactaggctaggggcaggaaaggttccaacaagactatttcaggtcttttacccgaagatttaacctagtgagtcgaaccctgggcttgctcgtcaatatccaagacggctggagtttgagagtgaacttgatcgacagttggctcgatgattatatactgcgaagcatgttttttgttggcagtggtcttccttaatctcttcatgggctctggattcgttctcgatgaagttttcgaggcaacaatcctcttctttccttttttgccagacgtattgagaaggttttctaaatccatatctgtgaggcaaaataatacatcaacacttattcaaaattagataatagaaaggtggggaataaactcccacttaaaggaagttaccataattatcagataatgaagaggaacaattatggtaattactaaattccctatatccagtgatcatgtaaatatcgtaagggtttgttggaaacaaatcccaatctaaatccagatgacttgccatatcaaagttagtaccatattgcttggcaattccgaagtaagaactagtgcaactaagttggacatgaaattgagtagggctacacatggattgggttgggcagtttttgggcagtttggcagtcttttaaaatcacaacctatacttgcccaataaaagtttgcggtgtgcaattttttaaggggcagttttatgcaattttttgagcggtttgggttgcttaaaatcaaaacttccaaagtacattgtcataaggaaaaaaaatattcaaccaaatttttttacctgttaataacaatgcataaaagttcttaaaaatttcatatcaatctttataaactccataacaaggcataataatagtccataaaaattttaaacagttcttataaagtgcatactccataacaatcttaaaaagatctttaaaaagtccatacaagttcataacaatccaaaaaaatccataatacaatctaagttaataataattcataaaagtctccataattaaaacaaaagtgacttcaaaagttggctccaaatgaaaaactctgcgaaataataaaaataaaataattaccatataaataataaaacttaatattaattaaattacaatacatattataataacaaaccttaacctctaatgaaaccattttaaaatttgacaacgctatatatcatttagtatgctcgctggaagtagttataatctactgcaaaaaaataaaaatatatatcataacaagataattttcttcagctattaaaaagtaatagtaataataaaatttatatataaggagttttcaagatcaaatagtatagagtgaatatttatcaagacaatgacaaataaatgatgaaatatatatatatatcaaataataaaaagttgt

SEQ ID NO: 199341 - DNA, 1165 bp, Cannabis indica
aatatttgttgctggatctattttacacgattctaattagctttgttgcattatttacgaattcactttgtctaaatgcaaattgtaaatgtattgttccatgcacctttaaaggacttgaagcctgtagttaccaatataacttgaatgtaacaaccaaacacaagaaattgtagaatactcaatatctaacaaaagaaaccccccaaaaatatttatttatttttcaaaatgagaatagaaagaaatagaaacataaaaaaaagaaataagaatgtaatcaaattcaaaatatataaaaaaaattaattaaagaattattaaattttttcaatactctatcatttcatttcaaaatgaaaagttgttttactaaaaatgatattccaatattttaaagtgtaattaaataaataaataaaataaaaattatttattttctttttcattcaattacaaaagccacctaagagtttagatcaataagattgacaaatttaccaaaaataagagaagagcacaaaaaattaaagatgcaaattaatgagaagatcattacccagaaagttgccactgagatctggtttatgggagaagataacaaaacagctcaaggttccaattgcagtagccaagggggaaggaattcatcaagaaaaaaagggaaaaaaaaaacaaggaagtggaaatgaagggaaatgaagatgagtcctctaaagtagagtaggtggtgagtcagggttgagatttcagctgagggtgcagggatgatgagatctcaaattcatctgttctgaggtaatatgctgctgcagttgagcaattccacggctcgttgatcatgagtgaagtgaaaataggaaatgaatttgctcgactagataatacaatactgaaattcttttcatttggttcttatttagaatcgtgtaccaatatgatattgtttctagattttgtgtagtatagtagttcatagttagctgagcatttgtttgattattttatatgtgaatgagatctcattagtcattacactaaccagtttttagtagatgatgtcattggtggcgtagcttcttattaggaatatacgacttcttaagccaacaaagttaaaaacaaatgaaagataactgagtactgatggctttggatatgtttc

SEQ ID NO: 199342 - DNA, 1138 bp, Cannabis indica
agtaaccattcatgggtaatatttttagtatttatgatattaaaattctttgtactcaaaaactttattctatcacgaacatcaattttaatgtttgcagtagaatttaaatactgacccttgcacattttcattttattcgcatgcaacttattattttgaactttgtttcatgtatggtaaattattcaaaaaatttcaaaaactgatagaatatactgctgtataaataaaatattttttttatttttacacttcaaagaattttttgttatatttttatcggaattcacatagcaattaacggaacaacctaaatcgcaattcaaatccacataacaactcacagaaaaactacaagagcaacccaaaccggtaaaataaaaaataatatatggagtgattttcttaataaatgtgatatacgtggtatagttcctccaaatgaaaaggtctctgcaaacgttatttctagaaagttgttcactcacgaatgctagtcctagaaggagtcttatagagtgatagtcgagttccaaaggaagttcccggatgactatcgtgtccactacaggtccagtcttcaaggtccttactctgggatggagttccagttggctagttgtccctcctagaatggtagttctgaatagttgacttcagcagggcgcaatcctattcagaagcatcatcaacatgtgcctttggtccacgagtccggaagctcatacattttctcaaaggctctgatacttaaactgtagacttcgctcaaagaggagttggttaagttagttatttctaacctcatttcttgcagcaactgactttatgatcttgatcctaagcctataaaacctaccttgactaattattttagaaagtgcaaaattgacacgagattcagaacttagttcagattgggattgagagtttgagagtttgagggagaaaagattgggaggtagagagagagaggtgcagagaaagagagagattgggttttgggtagaagaatcttctgtagatgaagaagattcttgggtgtaagtgtgagagttaaaacactcagtgagaactcaacagagaatcgcgtctccactatattgtatctattctcgctcaatcaataaagaag

SEQ ID NO: 199343 - DNA, 516 bp, Cannabis indica
tctagaatttgaattataattcacagttaaatttttgttttaaaccgttttttttttctagaattttgcatcaatcagtaattgtagatagttggattgattatggtctttttctcaagtgacattaccgaagttaatggtggatcttggacttactgggttgtttttctgttgccgtcctcatttgattccacaaaggttttgaggatgagaagcatgggtcgtggagctctatggtgagtgtaagaggtaattttgtaattttttttaggctaattaagatattttttccttgaactttgacatgtaccaaattatgtcccctgaactttttttgctgttaaaaatttgccctgaacttttgagattgttagatttaaggacttttgtctaattttagtaaaaaaattctaacatggatgaaagttcaggggtatgatttagtacatatcaaagtttgagggacgatttgatagatatcaaagtctggagagtatgatttagtacataaacaat

SEQ ID NO: 199344 - DNA, 579 bp, Cannabis indica
agagctatcattttctttcacatgctagctaacatattatgatgataataatgtggccctcagtttgttaggaaacacaataatttcacaaattaaaaccagtgaaaacataatcacgtatcataatattattacccatcaattacttaataattaatttattcaactgcggcaactgggtccatacaaataatttacatcccataccctctctctctctctctctctatatatatatatatataataaaagaaaataacacaaaacattctgtcgtactttgtatactcgatctccataatcatcatcatcatccgcattaattaggtatatatacatacgttaaatgattagttatatttccttttctccattcaaccaaaaaaaataatcgttacgaccaaaagattatcaatatattaaatttagtggatacgttcttatcttgcaaataaaaacttaatttttttaagtagtattttaatctagtaatcatataaaatcaaagtaaatttgttttgtatttaattattattttatttgttgtttgaatacaatctcatgtataaaccgcggtat

SEQ ID NO: 199345 - DNA, 955 bp, Cannabis indica
attttggttcaaggaaggtgatcacaatagtaaatatttccaccttatggccaacaagaggaagaagaataatacaatctcaaagctcaaaaaccaacatggaatttgggtggactgggacaatgggttaaaggatgttagggttgagtattactcttctttattctcggcttctggagctgtttgtactgaggttattgatagtgtggatagacttgttcctgcattggctaatgaggaattccatacacctgtttcggaagaggaggttcgcaaagccattttccaaatgcacccggataaaagtccaggaccggatggtatgacaccggctttctataaaaatttttggaatgtgattaaagaagatgtacttagctttgttcagcgtttttttgaaagtggccaacaggattcagcttgtagtatggccaacgtggtgttgattcctaagaagaagtgcccggatacgatgaaagatttaaggcctatagctctttgtaatgtcttatataaaatcataacaaaagtgatggctaataggatgaaaccattcatggatgctattatctcggactctcaaagtgccttcattcctggtagattgatctcggataatgtatggtctcttttgaagtccttcattatttaaagcggaaaaggaaaggtaaaacgagatttatggcgctcaaactcgatatgagtaaagaatatgatcggatcgaatggccttttttagaagctatgttgatgaaaatgggtttcgctccaagatggattggtttgataatgtcttgtgttacctctgcaaattatagaatcattcatggctgccatgaaatgggacctataatccctaccagaggaatccgccaaggagaccctctttctccatatttgttcattctctgtgcggaagggctatcctctctcatgcggaagtatgaaaaccatg

SEQ ID NO: 199346 - DNA, 2058 bp, Cannabis indica
tagcccgcctatgcctagggttgaccctgcgtgttgtgccaatattgttaaaggataggcccagtacgacccgatatttttgaatcatgctcggattcctgtggtactttgctcgtgccgacccttaaataggtcagcctactttaatattcgggcttaaattcgtgctttattttttttttatatattttttacaattactaaagtatatgtatattttatagcttagttatatttatatatcttttcaacaatattttataaataattatataaaaaaattattagcattagaatttaaatatttactataaatattcaaattttataatacaccctattactaaattaatatataactttcatttttcgatagttttaattaaataattataatattcagtcttatatataaattttattattgttattttaatttatttataattgataaattcaattattattattattattattaaattataaagttttttgatatatcgtgtcgtattttttagacttgtcgcgtgtcgtatctgtcaggctaatctattcatcgtgttcacatgttgtgcctttcatgtttctcgtgtcgtgtcgtactaatttatagtatcgtgccatattatgtccaaatccgtattttttgtacctagtcgtgcttgtgtcttttaagctcgtattatgtcaaaaaattcagcctgtacagtgcactattgaaaacagtatccgtatttaataaaactcgataaaaattataattttattaatattaaatatttatgcagttaaaaaatatattaaatttatactcgttacaaactcaaaattttaaattgtgttgtaattatcaaataataataataaatgggacccacaattgccccattccaaccttcctcaccgcccctaattacgtttgaaatagatgcaattgactcattttagggttttcaattaatgtgggctccttcctttacataataaatatggataagtttgaacatttaacttagacaaagacacattattaaattaaaaattaattatgtgtattcttattttttatatatagatgatggtgttatattatagttatcttataaaaattatttttttttttaaataaattctgattaatttatcatacaaaaataaaatttaaataataaatatatacataattaatttttaattaactattttgaaaactatttttaacattataaactactattcattatttgttgttgtaaataaatatttataatttttttacttaaggaggtaaattctattattttttgtaataaatattcattattcttgaaattaataggatgcttattataaatataagtataatataactgctacataactaattaaattataattttttcaatttacatacactacaataattatattgtgtttatttgtctgtaaaagtacataaaaaacaatagtaaaaaaagcgaaaatgaataatatttgaagtatatatatatttatatatatatatattatagttgattttgtagtataggggtgacataggccatgattttggataagtttcagtttgatacatatcctataaacaatattaatggattaatttggaactgaaatattctatcaaaatttacaatgatgtcaaaacacttacaaatatctttatataattaaatatggtaggtgcttgtcactaaaaatatgacttatattaattgataaatataaaagatcctatatatatagggatatgattttgtcccgatgtactttcacggattgtattccgtggtacattagatgggtctcagggtacattaaatgagtgtcagggtacgtttttactttttaatcttaattacccctagatcaatctcagccgtcagatcaaatagcttcctcatctgacagctgtcgtacatcacgaattacaatccgtgaaaatacaataatggaacaaaatcatatccctatatatacataaatgtttgatgatgagatcatgacaattataatgtatagaatcagttgataatg

SEQ ID NO: 199347 - DNA, 835 bp, Cannabis indica
cctcctcgtagcagtaagctcaagagcttgaactcactgagtatgcttttcttttcctttctgggcctactcctcaaagtgtcagggtttggtggcacaaacggtggaaggcaccgcaccgcatatggccctctcgatagttgaataattctatctatggagttagctactgatgttattatcgagtcacgtagttctgtgggctctttttgagtatttgtgtggtggtccacactttggttaccctttctttggccctcttcggtgataggaggttgacgttctcttactatagtggccggatggttttcttctgagtgaaccccattttcttagagacgatggcaatttgttgacatctttaaacttatagtgaatggtttaggaactaacgtagctagatcttatcgttctcacaaacgacaccaaactattgacgatgagaactcgtcaactaacttgttggttggaaaatcaaactcagaattaatatgaagaaaaagatgaaatataaattcaaattgttatctcaaagtagagataaaatgaaaactttctattactcttaatatggcggttacaagaataatttttcaaccacttcttcaatggaagagagatgtatttataaggagctctaatagctacaaaatacaagtgttccaaaagttgggggacaagattacttttatagcattaagatcatcacgttagacaggtagtgttgcggtagttgtcgggtgccagttagtactctgaatgagataaatagtgtctccattacttgtacttgtcgtgcaactactacttctttagaggttgcatgctttagcaa

SEQ ID NO: 199348 - DNA, 666 bp, Cannabis indica
tgtttgggccctaatgggcttatgtctgctagggcttctttggttgaagaaggaagaagaaccacttctcaacgactcagaatagacaacaggtgtagttagttaattaattaattattattagaacaaacaaaactatttttcttttttcttttttaaaatattggtaattttctagatttatgataatttattgttattatttctcttgttcttcttcttgttgtaatacaatgatatttcatttcattcaaaaaaaaaatggtcttgttgttgttgttgttgttgtgatatatatatctagatattgttatgtttagtggagtagttgtggtcgttattaataccagtactctgaagctagattctttttgtttttttaattagcattattttgagtatgtcttgtgattttttgagtttttattgagcataagtttcattctctgaatatatgagtaatccaaacagtttttaatttctttttctttaagaaaagttccaaaacagttttctaccacatgggcaaactgtttattttatttatttattgagaaaaatatgggcagactgtttctcaaaattagattttgtagtttctctaaaatttatgaaaaaaccttatatcgaacttgttaaattacatttaccacacatacacatgca

SEQ ID NO: 199349 - DNA, 554 bp, Cannabis indica
aattttttgttaatatactgtttgattgctttaggaactgtgaattttaatgttaaatgtagcacttctagcattgtttaccttacgtttttctgtcttctcatacttgcagtactggaaaaaatggaacctttgtaaatggtacatcacttgctccatcttcaaattccacaacttccggttgtcattcacaatatctcgaccgtggcagttctttcactagctctgtgatcataggcatcttatttttaaccttagtagtttcgttgtagaaactatatatctatttgtattcgtgcaaatctttcgggaaacattctgtttcgactgttggtggaagtcattagaaaacccaattttgtgtccccgtcggggtgtggggttttcgggggggtaccggcttgagatgatctatatttagcaagaagttgtaaggtatttgtccattggagtgtgtacaaaaaagaccaaaaaggcgattatttcagtttaagtttgtaactaactagctttgtaggaaaaatttgagttgtattctttgaactgaactgaaa

SEQ ID NO: 199350 - DNA, 881 bp, Cannabis indica
cctatactatctccacagctagaaggcgtttgatcagattatgcaaccaactgagggagtgggaagtaattcatatctcctgtaggtgtaattttatagtgcataatattgcaaaatgggaaaataccatcgatataattggattggtcttgcaaacccctctagaccccagtgtgttggatgactatgtttagtggccatctaacagtggctaggcctgtagaattaaaaccttaatccatttacaattttttttctctgctttatgttgtttcttttagttttcttatacgggtatatgaatggttgtagtgtttaatttttgtttcaatgaagttgggtgcttatgacaaaaaaaaaaaaaaaaaaagttaaaaccttagaaaatttaatagaattaaaaataaacatcaatttcttaagaaaataaaaaattactccttgtacttatttttaagatttttattactcctttggtactttcatcattccatgtgtgactccttttaatttttttaagatttttattgctaagaattaagatacataaaaataagaaattatatactcaaaacattttcctaaaagatatagggagaaattacaatttagtggatgttgtcatttattcgcgttttcagatagaagatactagacaaatgacatctaacaaaggtttaataagcttttgggcttacttttaggcccaggaagacttatgaggtagtatttttcctttataaatataatctcggatcatttatctagatctcatgcaatactctggatttgtcagcttttcgtagacaacaattatgacattttttggtcattgaagaatcctaaagtagaaccctgaagggtcattcgagaatggaagt

SEQ ID NO: 199351 - DNA, 1002 bp, Cannabis indica
atgaaaactacattacttttattcccattcttcatcgctgttgtatcgattttgttcacaagcttcacagacaaacccagcagatgtcgaagaaccgaggcctttctcctcggcatgctgcttacagtacggcttgttacaaaaattgcatttgggaagttgaagccagcaatccaagcacaaagagtcttcacaaacagcttcttcttgctctaaagactcgaaacatccactgcactctatgcatctcggaatgcaaaagatgcagcctttgcaacccattttcgccttacaggctttacttgcacagtcaaagaccggtctcagctctttgcatcgtgggcagatttcgatgtctatcgttggctggtctttgtaataatgtctgattgttgagaagtttttgtactcgtgaaatagaaggagaggccgctgtggcttttgctgctctttcgggttatgttgaagacacgaagagagtgtttcgagatggtgtttttgaatgtcgttaataccgtttatccataggtttttcaaggtgtggccttgttgagataatgtctttacagctctgatgactccctcggccgacaacgctgtacatcccggtatgaaaagctgaacaagttcgaaaaatagaaacatgttatgctagaataaaattataaaacattatcctcaaaaaacatgaacttgaattctaaaaggccaaagaaaagagtttgcttttcttgagaaaacagtagttttcaagaaactttctcgagaaccaaacagaagcatgccttgttttttcattcttggctttatttaaacaaaatagaaccattatcacagacatatacacatatatacacacaatgttgtacattgaacactcttgtcagtaaggtcaggctcatctcatgcatgcaaaaagcttaaagaactttctttgcaataatgcaattaaaaatacaaagcatcagacaaatataagtacaaatgctaatttgatattat

SEQ ID NO: 199352 - DNA, 1085 bp, Cannabis indica
caaacaggacaattgtgatgcatagctttttccacacaactatgtgaatccttcaacatagtcgaataacaacaacctggaacgaaataataacttctcataagcataagtgtcataagaaaatggaactccaaagccaagcatatgaaatttagaattttgaaaacttaccacatttattacaatgaaaaaagttctccttgcctccaactctgtatttcccagcacaagtatgttgttttattaaactatttccatggatgttaggcgataatggaatcggaaaaaaagaacaaagataagtatctaacctgcatatcccacattcattacaatggtattgattctttgaaacctgtttcccccaattaaaagagcttgttaatgcaaattgaacaaagcaatataagaaactttaaaggcctttgaaacataagagacttacatcatcgtcaaagaatttacatatggagcaaaagtaatttcccatacaaattccacaatggatgcaatgctgctgaacctgaaaggtaataagtaaactcattagttacaaaacagttattttgcttttattatcaaaatattgatagttattgctattatgatcaataaaatttataaaaaagggaacctacatcttgttctgtgtcacacaatgaacatattacctgaaaaaatcagaaataattcggagtaagcaatgaggccttgaaaatatatgcaaatataaatataaatattacaatttccaagcctgattttgttctatacatgaccacgagaagaagaaaagaaaaacaaacccttttcaaatcatgtcgaggaatgtcatgacgatcaagaggatcaacttccagtgagttctgatattagaaaagtaaataagcaaaacattgattttaggtttaaatataaatcgcaagataaaacaaaatgagataatcacagtacaaaaaagagaaaacccaaccttggattcattatgacaatgtctgcaatcaaatatttcatcacaacaaggtgctctaatcttacacctcctcctgtaatgtgagcacctacattttttttttttttttgaa

SEQ ID NO: 199353 - DNA, 555 bp, Cannabis indica
tgtgctttaatttcatgtttttcataactcctgattagacaaagacactataattttgcatcactactacatattagtgaacagatggaaatcctttaagctaaaacatacacttggaacgagaactatattgtatacttttctatttcttatatatatagcggtagctaaatcatagcttataatcacagctatatataaaaggcttaagatcacaataatatagtattacacaccatgcatatatatcgaataaaagaaagaagaagctctcaccccatctgtaaaagaaaaatattttaacatgtatgtagaatgagtcatacatgttagaaagtaaatacataagtttgaatatagcatatgtttgaaatttgaatattgcaacaatgatccacaattcgattcaaacaaagaaagaacaaaacagtcatccaagcatttccgtacaagcagacaattaggacttgcattattataaagaattgtagaaaaaggtaagcttcatacacataatatatatcattagtatgcaaacaaactaaaatataatgt

SEQ ID NO: 199354 - DNA, 1460 bp, Cannabis indica
gctagctatcttgaagactaaacccggactggacatgatagttatccaggaactcccttccggactcaactatcattccacaagactctttccaggatggataagttagctatccaggaacaacatccgagagacacttaactttccaggaacaatttttggagacctttttatttggaggaactataccatagttttgtcatattttctttttgttgtgattttttttttcatgaattataaaaattgttgcatatattattttttagttgtattatatttattttttaaacaatttattgatatagcactttaatttcccatactttaagagtccaaataaaaataaatacataaataacagttaaatgataaattatgagaatatatatttaaattgttataggggtgcacatttatacccgaaacctacccggtctaaacccagaaaaacttggaaaaaaatggatttcaattttagttgacctagttcaggtgtaacctggttttgtaccggtccgggttcaggtgtaatattttgaaaatccaaaactcgaaaactagttagtaatttttttatattttttttttgtatatatactatatatattatatatatatatgtctttttttaattatgaatttgtgagtgtgtgttaaattgttaatgtgttaatttatgtaatatgtatatataataatatactgtataattatattattttgtagttgttttttttggttaaaatattgatatttaaaaaaagcagagcctaactcgaaatctgacccaattcgccccacccggacttgaaacccaaaaaacccagtctccattcgagcgggttcaaggggagaaattgataattgcctctttttattatacattcaccaaaaatagttgcaaaataatttaattgaaatataccatgttttataattgaactgcctaatataccctcactataaggcatgttgtttatctaacaaggtatgttgtttatctagtaaaatatgtattttgtcgtattttaggcacgctatttacctaataaggcgtgtcgtttactttattttagggtagtaatttttgtttgttttatttaaggcatgttatttaccttactttaggtacgttgtttaccttattttaagacacacttacctaattgcatgtcgtttacctaaattaatgtattttatttacctaataaaatatgttatttaccttattatagggcagtaattttgtttaccttatttaaggcatgtcgtttaccttattttaggcatgttatttaccttattttaaggtacgttgtttacctaatattacatgtcgtttacctaaattaagacatgttatttacctaataaaacatgtcgtttacctaatttaaagcatattatttatctaaaataagtctatgacacatataaaatgattctttaattgttaa

SEQ ID NO: 199355 - DNA, 580 bp, Cannabis indica
ataaatatcaagtcccacacatttaacaattaatataagaaatttttaactgcttataatgcaccgcatcaagttagtattcgttataatacatgtaaaatgacttgtggcaatgctgaaatatatcttttgcatataaaacaaatctaaaatgaaaaaccaggttgtgcggtggctgctgtcatcagagatagtgcagggtgcttggtggctgctgaaactggttttcaacatggatatggctcggttttgttgtttgaatgtatggctatcaggcttggggtgcggctggttcagaggatgcaggccaaaccttttattattacttcgaataaccttattactgcagtaaacaacctacagtctcggcaagctcctagagcctaatggggggctcctcttctggacatcttttcttctaacctcttggatggctgtgtagggataatatttgttaatagggagtgcaataaggttgctcattctttagccaaatgggctattacacacaattgtaattctttttggttagaggttttacccacttgtgctgctgctataataaatgcaaaaaagtctg

SEQ ID NO: 199356 - DNA, 822 bp, Cannabis indica
gaaagagggtaaaattggttaaacatgacaacaccattttaaacctacataagtttgtgtgttgttttcagattgatttcttaaatctgaaaatgacagtaacctatttatattatacttatttattatagttaatatgtcaacttgtttggtaacaaatcttttttcagttataaacatgttataaccatacacgggatcaactcattttaattttgattttgattcttcgaagtaaacatttctttgtaatataagaaaatagacatgaacaaaaatgatcactcttaggccctgtttgagtacatttttagttttttataaagcattttcctgaaaaattctactaaagttgtattttctttttagagccaaaagttaacatttactggtaactcaacgagaaaaaaaatatgcttttggaacttaagactcaaaacaattttgtaaaactaagctaattgggactttattctaaataggctaattagaatttttatcccccaattttgacatatatcaaatcatgtttcttaaatttttaagactgttaaaaaaatttctcttgaactattgaaattattagagttaaagacttttatttaattttaataagtctaatatctataaaagttcgggaaacataatttggtacatgtttaaatttgagaggcataatttgataaatatcaaagtctgtagagcataaattagtagacggacaattatcgaattagtaaaattaaatgaaattggacaaaagttcttaaatctaataatctcaacagttcaaaaaaaaaatttaacgacaaaaacaaattt

SEQ ID NO: 199357 - DNA, 738 bp, Cannabis indica
atcccacacattaaccatggaaaaaactcatacctgtgaggaatgtatctcaaaacactccaagtgagctgtccacccatggaaataccaactacatagaatttggaacctagtcccaattgattagcaagctcctctatatccaaagccatgctcttcaatgtgcgctttggattaggatcactctctccataaccaggtctgtcaaatgacacaatgtagacacctagttcttgaacaagttcctatcagatcaaatgtagattgagcatttggtaagactaaaagtcatacatatagatcaaacaaagagaacaagatgagttaccggagataggaatctagcaatactgtcatgcctgcaagaatcaaagccatggacagagataattttatacttagcactgtctttcgacacgcctagctctttgtaggccaaatgtcttccatcactgagttttattcttggggctgtaactgggggccctcctggagaaccacatatcttaggtggaggaggttggattgcttggtatgcccatgaaacaattcccacaaacaacaaagctaccactttctttatcatacctgagagagattttaactttgattaagaacacagaattgggatcattaataacaaaagttccaagctaagtacaagaaaaatgaacacactttgtccagttcatatattgatttttcaaaacaatattttttctaacttggagtgaagtt

SEQ ID NO: 199358 - DNA, 897 bp, Cannabis indica
taaaagaaaaaaaaaactgtttatgtggatcaagaaattaatcataaaaccttttgggaataaggatttatctgttccataaaacacgatcaatattttaggaagatgcatatatacctttatttgtagcatattatattatcccaaagggacgcgatgtcgatggaccctttcaaaactacttttctactgcctactaacccatgtgtgtaggccatgtaataatatagtgttaagcaaataaaattaataatatattttttgatacttcacatgaaattatgaaagccttaacacctatatgatatttatggccggttctgagtaaaaataggtcataaataaaaaataaattgagcccttactataaaaataaatagtattattaaaaattattaaaaaatatgcatattttctaagaggtatttttttatttaggcctctaaaatgagtgggctttaagcgcgggcctatcctagagacaattttcagtttggttcttaattttgcaattctagtgatagaggttggttttgtaaggctatcaataaggtgacccataactgagacacgcttgacttggatgagctgatgcaaaactttgtccttaacaaaatatagatcaatctttatgtgcttagtttgagcatggaagatagagttagcaaccaacaaaactatgctctggttatcacacaagatagagggaggaccatgttgttgaatttgaagctctttcagaagaggttgaagccaagacaccttaaactcaacgactgcattgtctaagcttttaaactctgatatgtggatgatttggagatggtggcctatttttgagatttccaagaaattaaattacctccaaaatatatacaatagcctatagtagatctc

SEQ ID NO: 199359 - DNA, 1618 bp, Cannabis indica
cttttttatttttttatttgtaagaatatattttagtaaaataataaaccatttttttttgttttctaattggtagaatgttattattttttagttgtttttgattattttatagttttcttataattgatgtatagttgttataaagttaatttttcgttattttcttactttttgatgatgagaaaaatatacttttgtaatttctaaattttaaaagagttattttttttttttgaaaaaagcgttcattgataaaaaaaaagtttgacctcattgtcattacaaaataagtcttccggaataggaggaacgtacaaaataagtatttttataatttttaaacattaaaagaatatttttataaataaaaactttaggtcgtaaaattataaataaaatgtgcgtttggtaagaactttttaatcatttttttaattaaaaatgtaaaaatatcttccaaaaacatattctttaaaattattttcatttaaataaaaattttgaagaaaaacaatccctttcaattctttttaagcaattttttcttaattaatattttcgaatttgaccccaacctagaccttgggaccaagacccagacctagacccgtaccacgaatctcaaccttggcctcagaccccggacactggcctcgaccctagagccccaccccgaccccagactcggatcccgaccttggccccaaacccaaacctccacccagacactagccccgaaccccaaacccaaccccaatcctggacttggacccgacttcaaacccaaatcccaacctggatctcaaaccctaactgatccgaacctcaacttaacctcgaccccaattcaaacccgaacccgagcccgagcccgaaccacgttctctgccctagctgcgatcccgaacctcatccccaggcccggacccaaccccagacccaacttaaataaattcaacaaataattgaaatttacaaactttttattttttatttttaaacttgaattaaaaaagttttatagaacatttcaaaaataaaattttaaaacaaaacttttatttcatgtttgccattaaaataattgaaaacaaaagtattaacaaagccaccaaaacaataaaaaaaaaagaatttttaaaaattctccaaaaatcattatactacaaataatcccctaatttaaaatgattaggaataatttttattttaatttttgaaaaatagttttttatatgaaaataatcttttagcgaaggtgctaccgtgcttgaatatttaatattatttattgatgtttaaggcttttaaacatattattcacgtgtctgtcataatcaaactctttgaggtctattaaattaaataaacatgaaagagaaaaaggagggcttttaaatgaacttgcatataaaatatatttatatatatttttttcatttttaataatttatggtgcctaagatttttatttttctattattgccaagaaaagagtaatgcctagctatgaatcaagaaagtacaaacagctaagccaaaaaccatatattgtcattttcagatttcaaaagttaccctccaaaaaacgacgtcgttttcgaacgtagcttta

SEQ ID NO: 199360 - DNA, 508 bp, Cannabis indica
aaaaaaaaattaaatgtatattatccatattaaaatttgaatttgggtttatcaaataatcataaaattacaatcccaatttacaaatagaagatcaaatccctaatttttagattcaaaccaaaacacccaaatattataaacatgaaccctgaaatctcaaagaatcaatcaaaggtggctcttgataccacttgttagagttttcatcactcataaaatatgcaataacaagattcaattctataaataaacgcattacatataattataagtatgaaaaatataaatctagagagtacctttattgatctgaagagaaaaactcaaatagcggaagcgtaccttaatccataaatagtgacgatcttaatccatctttgtggtgattttgggtaacgatcttccaagaaaacaagatttagcattttctaattttctctcttaaaggggaaatatgagaatagaaattaactcttgtttcatggggaccactacaaatttataa

SEQ ID NO: 199361 - DNA, 784 bp, Cannabis indica
tatatatataaataattatataggagatttacgtaacctccctaaatatacatatttatatgcaaacgtattttatttttaagatagtggtggagtgggtatatggtttttgttttacttaattctttttgcatttatggtaatatagctaatttttaaaaaattctaaataatttacaatattaaaaataaatttaaatagcaagttacacatataaaaggtaacatggtgtgcattaacaaaatcttaatctatccacaaatattctccatgcattatgtactcattaaattaactagaagattgataaattttctgaatgtgatcaatgtatatatcatctatttattttatttaacttttttaaaaatatatatgacatagttctgaaaattaatttgttcaagatttatatatattagaattgggatttatgttttactcctttcggttttttattgagcttgtattatttgattgttctaccctcataaaaatattctttgtatgagacctctttttattagagaataatacattttatctcttttttcctctaatatgatattgttatacctgaaatttggtttcacttcagaaggtgacacgtgtcacacagtgaaatatatgaaccacctgatataataaagaaaaattacccacattactgtttttaaactttttttaatttacagtttgggtttctaaagtggctgtagcactagttgcaataggggtttttagtacgaatttttgttgcgatttaggttgcagcgctagttg

SEQ ID NO: 199362 - DNA, 1538 bp, Cannabis indica
atttcaatttgatatatatacaaattatactttccaatccaatcaaatattaccaaccattacaacagttataattgaatatgaatagttgaattttaattaaattgagtcgataattgtagtttaaaaattaattaaaaaccaatcaaaatatataatatataatatatattaaaacaattattgtacgtatttattaatatatggtaaaataatgtttaaaatttaattttagttgttgtttattactttattatagaacttattactcttgatcaaaccctaaaaaaatcttaagaacttgtatatagtttagtttctatatatatttttttctaaaatatttttttagttaatatatattggaagtcgtcaaattaaaatttaattgaaaaactaattcaatctaattattaaattgggttaaaaaaataattagattaattggacgctgatccttctatacaattaaattatcagcttaaaggatggtgcctcaattttgttggttggaaagttataactttcacgtgggaggttgttattaatagatttgctcaacatatttattattatattttttgaatgaaaatttggatattattagcgaatagcatcaactattataatatttgaaagtttggaaacaagagctacgagccatacaatgtgcagccttgttagcagaacgttgtacaaattgaatctcaacagattttaaagaatcaagttaagccttacattcctgaatcaataaaccaaaaggagataacatatggatcgaactatgtaaggcttgtacagtaagaagacaatcagtttctagttgcacttcccaattcttaccctttatccaactaagagcctcctttatgccaaaagcctccacctcagcagcctccaaacatcctggtttactaataaaaaaagcttcaacaagatgaccatgacaatcacgggccaccccaccagcagcataccagccctctgaagcaaaaatagcaccgtccacattgaccttaatcttgtttgaaaccggtttagaccactgctcccgtccttcattcgcaccagtcagaatgaacaaaggaccattcttttttgattgagcagttttccattgattaagattgactcaagcggacaatacaaccttcgatgctgaagaactcttacctttccatgttaaagcattacgagcgttccaaatggcccaacataccatcaccgcttcctcacgaccttctgcagtatcaaattgcaatagggattcaaaccagctagtataatccccacccaaagaacttattgcactaaccgaggacctgtgctagcaacttttagcaaaagagtaaacaactagcaggtgtaagatattttcctcctcttggttgcacattggacacaccaaatcaactggtacatgtttagtgagtcttcgtagcaagagtgcccgaaagagcacgccacagaaaatgcaacattttaggataactaattacctctccttaaggtaatcatagagagagagagagaga

SEQ ID NO: 199363 - DNA, 1293 bp, Cannabis indica
acacataatttttagaaaaaaaatatttggactttaatatttagctaatagtttatcaaatggtttcagtttgaattgttttattgaattatatgatattttatgcaagggattgctgaatgagttgcttttagggttgtagtgcaggattatttgttatttaatgcaaatggttacttttatgttgatgatgtagttcatttcaaggtttctgtatttggtgctttgacatgttatgcaaaaaattactgatatagtttcctttagagtttctattagtattgatataggaatttctatatttagtcatttgttccttgaaaccaaagttactagtgcaaatgttattgtaaaggttgctaatatagttgttggtgttgctaaaaatgtggtccattactaataaagttgttggtgttgctaaaaggttgctaacatgtcatttgttattgatatattcgaattgttataggaattgctatatttagtcacttcacatgcttgctgctttgtcatttgttgttggtgttgctaaatatttacttgttctctaccattgctccaaattatcctaataattcttcataaattaaattaaaaaaaaaaaagcagtataccaaaagaacataaaggacaaaaagctctttgtattgacaaagtttcaatatctacataccaaaaagatacagtggacaaaaagctctttcctttgataaagtttcaacatctatatacctaaaaaacattgtgtacaaaatgctctgtgctttgacaaagtttcaatatctacatacaaaaataacacagtggacaaaaagctctttgctttgacaaagtttcaacatctgcataccaaaaaacacagtggacaaagtttcaacatctagtcagcctcactctcatatccacaggtttgctttgtcattgcatatgaatataataaaaaagcaagcctggacctatgacattccaaatcaaaatccaccttcggaatctcctttccctctatgaaatactcagcaaatgagaacatatatattgcattatctctgcacaaaaataataaaaaacacaaagataaaattaggaatgtgagttgggccgggccgggcctgacccgccacaaacccggcccgacccgatatcactttagcctggcctggccaggcctaactctttcttttggcttagcgggccaagcccaaccctagataaacgggccgagttaggcccgacccctttttttaaaaaaaagttaggatacttatggtggttactgaattgccttagttc

SEQ ID NO: 199364 - DNA, 1404 bp, Cannabis indica
tcgatgatgggattttctttgccaaccaaaaaaacgaggaagttcagggtttaagagatttgaagattttaacggtgcccttctaactaagcttgcttgggaaattgcaactaacaaggagaaaccttaagtaatttctttcaaagtcaaatgtttactgagtttttggaaaattaaatataatgaaatattaagttcaaaaaaatagtattaagaagaaaggagacacgatttgttacgtggttggggcgccttagtccacgaggccgtattattagcttttttgtaatggagttcctacgacataaataagtattttttggttatgaaatttttaaatcaaattttttgaaccctttgcgtggaaagcatggtgccatatttataggcagctaagttaatgagccagacaaatttggtctgtactagggttttcttatcaaatgagtccactggtatgcggtaaaatacaatgaatttgtactttcataagctattgggctgggtaagtgaggcttgattccaaaaaataatttgttgtacggtgcatggtactgttaacattgatagctagcgtgtgtgctattgttgagaaagagaatgtcagaatatgggtgcaatgcacaaaaaggtgaacacctttttttactgtgagcctttgtggaatctaacggaggggataggtcgccaaattctttgagattgtgtcaagggcgtgccatgtatgtgctatcactacaaataacccttttagcttatgcttctgaatggcctccgggggcatccgtcttgtatttctaaaattacttttgtccttaatatttaattggagttgaactgctgatccaggaacttgatagatctaaatcttacttgaacatgccatccagatttatgttcacttgggagatggaccatcttgtttgtttgtttggactagttgatgggcctggtatcttagtggtcctccgcgaggggtcacatgtcacttcttcgggaacacagataatattttcccccaagcctccattgattgggagctgcaaaggcttgtcaccttcatctagatttgaaacctctttcagttccattaactaagttgcccacttggtattctcctttagggtacttgcatgagtacttctaaactcttcacattctgatggtataatccacgtggtggtatatcattggctcgtgcaagttacacaatttatgaagtgtgtgacgtgttaagtgtcatactaacggctaatgcatcagcgctttcttcgaggaaaatatcatcattaatactaggcccttcaattttgatgtttgcattaaatgcaacctttgatgttcctcgactgttggatcaatgaaaattatgttttttaggatttaatcttagcccttaaatca

SEQ ID NO: 199365 - DNA, 543 bp, Cannabis indica
acaattagggtagaaaaagccgctaatataacccactggtctttagaaaccagctctcacattcgtataagtgcccgagtcgcagtcatcgacctcagccaaaatcctaattttgacatcttcatcatccaacctcccccagtttccaccgggcaagattgacctcacaaaagtcgtccacctctaaagccactctttccggttaaccacctctgtttcccggcatccctgcacatacttgtcggagccttcgtgcactgagtaacaattgatcgacaccgacttagtaaaaccagcaacggaacgcgtcttcaattagatgaatggatagagagtaccacttagagcttggtagtaaaatagagaagagaaggggaagatccatgttttttaggatttgtgattatttgaaaatcacaatatatgttttatgagaaaagaaaaatgtatattaacaaatttttaatggattcccacatcgtgttctggctgattgggtgatttcttccaaagaagagaggatcgctcgattggaagagtgga

SEQ ID NO: 199366 - DNA, 596 bp, Cannabis indica
ggggctttcaagggatgcaaactaaaaacgactgaccttatctcctcgttggaatttcaaaccaatattttggtttgaaaagcgatttttttagtatttttggccaaaccttttaacatttttagttgttacaccctaattaaaaaaaagtggtgacaaaactattttattttttgacaattcaaaaacacgtaaacaaattaaaaaatttcattcgaatttatatatttttatggaagtttcgccataactattctttttcttaattaccaatcaaattactaggttatttatttgtttttgaacatcctttttgcccgaggaaatcttacatttttagttgttacaccctaattaaaaaaattggcgacaaaaccaccttaaattaaagagttttttccattcaaatttgtatatttttaagggagtttcactatcattttttttattaacaatcaaactacttatttgtttttgaacatcttttttgactgaagaagtttatcttcagacaatatttggtgatatgtgcacataaattgggaaaaaaaaataactataaaaataaaatgtatgtaatataggtaatatcattc

SEQ ID NO: 199367 - DNA, 1163 bp, Cannabis indica
agctattatatgtgcattacaatcaattattaattatatgataaaatctaattagcttatgtattacttactaatgaagaacaagattggatgttctgttgagacatgcaaatgcatcgcctgccaaaacatatttggtcaaagaaaaggtatgcctttcttttttttttatttttattcatttttggatatttttattattagtccagtctcaagatctataatttatcatgattaattaggagcaacaaaagaaggagaattacaagggtcagaaccaaatatgcactttaggtacaatatatcaacacttttgtaattatgaattattttgtgtaatatataatttgaatgctttctaattcaagctcttctatttcacagatttccaatccaacaaccacttgataacattatatcttcatcatcaataaacgattcttgaagatggaactcttgatccactataggctcaactctaaacagctgcaagtgattatttataaagtaatcgattgttagtttagatttatttgttgtgcggttcctaaactatgttttagttcctaaactttatttttagtaaattagtttttgaattttgaattttttaataattttaagtcctcacggttagtgatggttattttgtccctcattttttttttttttactttcttttaatttacttttgtgtggaagtgggttttattttagatattttttatttttataattttttaaagtacatatatatatttttaaatggatataatttttatttattttatcttattagttagttttttttttttgataaatcaaaaaattgtgttacacaaatcaatgtttacaccagcaccctatacatcttattagttattaccataacaaatttttacatgtattaaaatatgcaaaaagaaagtaatagaaaaagtgagcataaattaaaatgttatactttaaattaaagcacatactcttagcaattttttttagtatacatactcaaactagttaaatgatcaaacacatagaaacagaatgagttttggaccgaaatcaaaataaatgcaaaccaaaaaattaaacagataaattcaaggcaattatccttttgaattgagttttactctagttctctctcaagaaacttctcc

SEQ ID NO: 199368 - DNA, 680 bp, Cannabis indica
tttttttttatgatttaccaattataatttaatattatggttcgctagtactccgcaatatatgtatataaaaagtgtgatttattagcaaattagtataactaaaataatattaatctaaaaaagaaaaaacttaaataataataacaaaaaattttagatggatctttaatgtggtcattacatcttactaatttgagaaaattacatcatatacctcttttaacttaatgtttttaatttctattttttttttaaaatctattatgtttatttcttttttcaattattttaccaattttactcctatcacttcaggatagtttttattattttctaatcaaaattttaccccaacttccctacaaacctacacactatctacaaagaatacaaatctattacgtttgaaattatgtcttagttatgtgagtgtgtgatggtaatttaggtacaatactcataaaaaaaaatgtatatttaaattaaattttatttgaaaattaatttaagttaatataaaaaaagtgggtatttttcaacttctccctactaatttcatcaacaaaactgcagaggcttgagatttggactcttgtcgctcaaactataaggcctgtctctaatagagctgggctatgattattcgatgggcatggaccttgacagagaaaggttca

SEQ ID NO: 199369 - DNA, 734 bp, Cannabis indica
tcttagacccatttccttgtgtaatgtgttgtataagattgtctcaaaggtccttgccaacagattgaaaaaaattcttgaccaagttatttctgaaactcaaagcgcattcatcctagagtgtctaattacagataatctcatgatttcttacgagggatgcactacctgaaaaggaaaagaactgggaagaatggttgtatggcgattaagctcaacatgagtaaagcatacgacagagttgagtggggatatcttaaagctatgcttcacaaaatggaatttgcagacaaagttgtttctttatttatggcctgtattgctatagctcgtaatagaatattacactcagggaaggaatttggcaatatagttccaagtcgcggtatacaccaaggtgatccattatcttcatacttggtcataatttgtgctaagggattttttcgcttttaaaggattatgagaatagtcgtctcctcaggggtgttcgagttgctcgtggtgcaccagtaataaatcattacattttttttttttgcagatgacaactacatcttctgcaaggctgaagaaagagaggcgggtcatgtgttggaatcgctcaaaatatttgaaaaagcttctgggcaacagataaaatttgataagtcatctattttgtatagtcacaatactacaatggaagttcaggatgaaatctgtgggctattgggtattcatgaagcagatga

SEQ ID NO: 199370 - DNA, 673 bp, Cannabis indica
aaagtcatttcgaaaatacttcataggagtaagaaattgagccgatcaatatcgactttcgataaccaataatcgttcaaaaacgcgtaaacatagaaagaaataaatgggaagaaaattcttgatagtaaaattcttaccgattgagacgaattcgagctgctgttggtgattccttgctttattttccttttttcgaaatcgagatttcttcgctttaattttttgaattcgtgattatgaaaatacgtttgcggataatgtgttaaagaacttagaaaatgagaagaaggggtatatatagtgataaaaaattagagatgcttagtcacgcgtgaaacaaaagagcaatgtggacacgtggcagataattactagatgagcagtagaaaaggacagagactaattacttttaagtatttctcttttattaatccattccaaagtttctggccatgtgcgttccacgtgtcaaaatcttgaggcagttcagtaggcgatggctacgatttctcggggcatgtgggatggacggtgcgatggcgttgcactcgaaggttctaacttaaggtagcgcgcccctgagacacgtagtggatcttgccaaattcccaagctttcaataatttagtgataagatatttgttggtcaaagtattaaaattctacttaa

SEQ ID NO: 199371 - DNA, 2167 bp, Cannabis indica
aaaatttaaggagtataatttagtatatagacaattaacaaattagtataattgaattgaattgaataaaaattctcaaatctaacaatcataatatattttaagaaaatttttaactgctaaaaaaaattgagaaagtatgattggatagatttcaaaatttagaaataaaaatactaattaatgttgaaaaattaatgtgttttgtttttataatatgggaactgatgaagccaacgtttttctaatttaaaattttcgacgacaattgtattgaaatgtatgcttaagtagtgatatttttatgaattaatgagccttcttccttggatacttttccaataaacatataattgtacttttattttcgggaaaagagtagattaacatgttaattgcttcattaactggtctctaattaatattaattaatataaccactattttatataactattcatttttttgacattacgcgcatttgttttcttctcaccacactatttttaaataaataaataatataatgtcttttggagactttatcctccaatataaacgcgattacttaagaaaaatgttattaaaatttatatcttaattaatctacaatttttttaaaatattattatatatatttattaaataagttcttcaagaggaatcaacttctctccacaaattaatcaaagagattagggtcctttattaatgcatctttaatttctgtatcatggttaatattttagcaaatcaagtttcacttcccaattaaaacgaaattttctgagttgaaatgatattcaagtttttttttttatttttttttaattataagaaattactttatatactatttttttaacctttttttttttctaaatttacggtttgagtttctaaataagttgcagtgctagttgcaataggggttctatacaattttttgctgcaatttaggttgtagctctagttgcaataggggtttctatgtaaaattctataaaaatacaaaataatttgttttaaagtgtaaaaatgaaaaagatccaaaaataaaaaatgatgtccatatatatatatatatattgagaaatagaatatcataactcctaacgcaaaatctatataatgaaattggtgtgatccctataaattcacatattaataaatctagaaattattaaaaaagcctatataatttgatatatatatatatatgtatataaaagttgacttggatagctataactaaagacttatacagttgcaacaggctcatgtgcaaaggactcatataaatatatatatatatatatatataggcagagatctgcatgtactgtctagtgatcaagacttaggatactttcttcattttgtttgattaacaattttgtacttattattatctcagtttaagaatctaattaattacacaaacacaaacttatacattttattgtattttagtacttttccatgccctaacttaattattttatggctattaattatgtccttttagatttaactcatctctttatcacaatttcttgacaagtcataattaattcacaagtttctttggttttatttctatgaacaattacctactttgcagttgcatgcactctctttatctaacaaagattttttttatctatgtaataatattttacaaaacaatttttaattgttaagagaaaaagaaaatatgaatttcggaagaaaatcttcatgtaacaaagtgatatatggattagaatgatagtatcgatttataagtttcttacaataattgtgtattaattaataatttcaaaacatgtaaaaagaaaatatataaatatatataagaaacacttttaaaatgtaaattcaattgtttgaccataattaacaagacttttcatgaaacactgctagactctattttagtggatgacctttgaaattttatacatttttcctattagggtcggctccaaaattaaagtgtgtgaattatagccacaatatatatatttatttgaaagcatgtttcttgtgatcatatatatactagccactaggtttattgtgtgtacacctattctttcgtatagttatctttatttatagatattaattaatgggttaagaatatccttgatgattaaaaata

SEQ ID NO: 199372 - DNA, 1545 bp, Cannabis indica
gttttttatctccattctatgatttagtagaggatgtttcttatcttttatccttctttcctggagtgacagtatctcatgtgaaaagagatgctaatgaagcagctcatgttttagctaagttcgctcttcgattggatgaagattatatttggttggggaaactcctactccaattctctctgttgttattaaagattctaatatttaataatagcagtttttctcaaaaaaaaaaaaactatctcttcccttctctaatttctcttgccaaataagaagaattattatctcctttcatctttctccctcctcttctctccatcctactaaatatagtgtaaataaaactactaacttcgccctagaaacaatataaacagaagaaagaaagatcgctaatttcaatttgtagctactagttattggtcgatcttagcaaagccatgtgtacagtgaattctaccatgaatattagttacatcttaccggataaatttattctgttagaacatttctaatgtatagtatactatcctactaaattagtatggaatcttcatatcattctactctaagcatatactaaattagtgtgtatcaaatttcacactattaatagtgttagattagaatctacactaaattaatgaataattttgtcttttcattttaatccccttttttttaatttgttttaaaaaaatatcattattttttgttgataatatgtataattatattgtaaattagttattattagaaatataaaatgtgagattttttaaacaaaatatttttattaggtacacatttggtgtgatatttggtataaatacggtaaaattgttgtaccaaaagtaataatttctacattgaattggcaaaaaaatgtacaccaaaatagtataattattatagatggtctagaaataatttatttatgataattaattaaatactaaattctttcaataacatgatgatgataattagttgatcaaagttcagtgaattttttaagatttttaatatggttatattgtgcgtttataaatatacttttcaaatgcactctttctatttttcacatccaaataattttttataaaatgtatatataatattgatgtatgaaatgttttgtggagaaaattaaggaatattagtcgaaaattcacataagtaatgaattattagtttcgtgtcttttcttttccatgagttgaagcactactgtttttttttcaaacaaatagttctataacttctgttattaaattctttcaataacatgataatataactagttgaattcattaaattgttttttaaggctatttaatacgataatcctgtgcattaataatattcttgtgaacttgtttggtaagttgtcatataatattttgttaaacaaatattaatatgagctaaatataaactcatgataaacaacataatgctcatgatataatcgaagattacatattctatttagggtataaatacattaattgacttaccttccatatcagtattttt

SEQ ID NO: 199373 - DNA, 587 bp, Cannabis indica
tagtgtagtcagctactactagttgttacttggttgcccctacatgtagatatttattaatatttaatagaatcatccaattattaagaaaaaaataaaacatgctaagaactatggccattattagtcaacctttcttgtctttagtttttcttttgtttaaaatcatttttcacttttacttaattacctggtcccaccacacactgaacaatgtcactgatgatgcgtgtaacacaattgtttgttgatttaaatatacagaattattataaaatatagatatgattcctaatgattgcttattgatgagtagtccaaacatgtcgacatttcaagtacacttcaacttggcgggctcgtactatatgttgaaataagttagctagtgctgaaaaatggtttaacaattgactaaccaaaacaacactcaattttgaacattcctactagagcatctccttatttaaaagttttgaaatattttattttattttctacataatttttagtactcttccttttaaaaatattctaataaaataacatactttaaaagtaatgttataaatatatattatatattt

SEQ ID NO: 199374 - DNA, 737 bp, Cannabis indica
tttttgtttgttttattttctattttgataaagctaattctttcctaaagctaattctttcctaggtaaatttttgtctattatttaaccatttttatataataataatgagactaaactagaagggttggtagttataaagctatagctaattttgatatgagcacttttattgggcattgaacttgttgtgattagttatattgatatttaatattatttattttatcaatgtgtatagaactgatattgaattgtagtaatgacggtatcacctctttgtttagcggctgattttttagtttgtttttctaattttaatcataattgtgtctcaaatagggagacctcaaccctgattagaaagaaaaacaaactagaaacaactaaaaaaataataaattgataaatatgcttcatttttgttgatatgtgataatgttcttgagaaatgaattttgaaatatatgttataaatacatttttattgaaaaatttaaaatgtaaagtgaaagctaaatttagatactatcttttgtttgttttttttccttttcctttttattattttttctaaaaaaaattacaatgagatgaattacaatcttaatatagaacatactaggttgcacttctaatttcaccaaaatagtttccgattccaacattggcaagaatcacatatagcttatgtgatcactcacagactgctaattttataatgggaaatttgattt

SEQ ID NO: 199375 - DNA, 1120 bp, Cannabis indica
taagtcgcttgcatcatgggtcacaaaaccaacaccatactgttgagcctcattaaacaaatattaggggaacctttggagataaaattattctcgttcctgtcccattctccattcaggcaagtaatccctatcttattaagggtgaaacccatttattattagaaacaaaagaaattataaataaaaaagatgattgtatcaaaattaaaatattaataattaatatatataatattatttaaactaaaatgaaaatatttatttttttaataaactacaaaaacacataaaaatatatgtgtaataattagtataaaataaataaaaaaactaaatgggttcccgaggcgggggacgctaaccccatccctgcctcgtttaacattcagagataaaaattgtccccgtccctgctctattcctcattcaagaaaataatccacatcttattaggagcgggtacccagagccatacctaggtgttaaatttcatttcttaattatagaaatgcctttattaggcaggttttttcatctcttgatgttttattttttagataaggccagcaaaacaagtcagacacgataatacgattcgaaatccgcacgagagttaacgggtttgagtttgcttgttcgggtcgtgttcgagttgactcgtctaacccgtttaataaacaagttgtgtttggattagcacgggtaatacaaaactaacccgctattaacttatttaaagttattttaatactttaacatgtcatattcataaatgtgttattggttgatatgtttaaacaaaatatacttataaacgggttacacgggtcgtgttgtgtcaacacgtttataaacgaattgtgttcggattttattgtctgacacgattattaaacaaatcgtgttcggatcgaacatatacctattatacacgaatacgaattaccaccgctatttctattttttttttatttaaacatttatatattataatttataatttgggactggaaccttcaatacacgccttttcaagtcccctatttctagattctattgctagagatttaatattacacctttcttactcataattatagaagaagaataaaaaaaa

SEQ ID NO: 199376 - DNA, 3774 bp, Cannabis indica
atcacccaccaccactgtttgagggagaaaagcagttcttttagctccagccactgctttccccttagctttctcagtagttctcagagtagcatcctccacagcattgccctcactggcacttacactagtcacggtcgcagcatgctgagtggtagtataggaaagatcacagataacagaagagtggaaactaccctggctcaaaggagagccttcgtgagagagaccggtagtgtttgggatagggtcgattcccatagaatccagagaggcaacattaccacgagaggcagcatcagaggagcctgtcccaatatccgcagtagtgagaaactggctcactgcagctgcaagggattgatcaacattctccggctgtgcaggaggctcgtccaaagggacagagtttgagagatcaaaaggatttctcttaaaggttgatttcggaggggctttgagggatttgtagggaaggtcagggggataagcacggtcatcacatttttgaaggtaggttgtacattttgtgagagtgtggtcgaatagtccgcagtgaaagcaaatgtttggcaggttctcatatttaaaggtgagccatttttcacgatggatactcttgaagtctaccatgattccacgagtgatgggcttggagatgtcaatgagaacacgaacacgaagaaagagttcagagactttgaaaagagtaatcttgtcaacctccaagaaatctcccacctcatctccaataagcttggccagtttcagagatttttggccaaaagggatcgagtggacttgtatccagaaaggtgagtacctcagctggtttggaaggagagtgtctagtcctgctgggttggcacaggtgaccagaaatggtcaaaatgccatggctggccctcgaggactcttcgcatgtcgccctcatagtgaaactccaccatgaacatgccggacccatattcagagaaagttaaaggcccgcgggtaatccacgcattcctcatagccacttcgaaccactcaagcttgatggttctaggagaaaggattctaaaaaccaagcaaaaggttctactgggttggcttgcccccccagtatcctcttccaggtcatgaactacagcttctcggtcagtaagattaaggatttcagtcatgtttagagcaagagaatccatgggtgggttcagatagtcaggtaaagaaaatatgacagggagaggactagggaccaaaagttgaatgagcagggaacgtagcatgtaccaaaaccttaaatagaggactttagagaaatacctggagagaggaggcttgctgaagaaggtggtctgcagatgccatatcagtcctttcggtatctccgtaggatcaccatagctagtaggagcaatgatcgcctccaaccttgggtttttcaaaacgacggcaggcattaaatggaaaatagaacaaaccaaatggagagtgcaagagacaaataaaccttcctgcgaagtatctaaaaaagatctaaaacagatttacaacaccagagcaattaatatctcacagatgactggaggagcaataaatgaacaaacagaaataggtggaagtcaaaggcgaagcttgaggaggaagtaaatacacggcttaaatcaactaaaacgacatcatcaagatgaaaaaacgctggaatggaaccagattggtgagagtacaggagaaccggagatacgggatatcgccccactagaaagttccagagctatttgaaattagtactcattgcattatttttaaacttgttaattatcaatttatcttttacgttattataaatcacaaattagagtcacgtgattttcacgtgcacgatttacctagtgttattcgaaataggatagtcgagactagagaggatatctttttatagcggggggccttgcctttccattgcaaaactcaaataaaatactttgaatcgttgttgctcagattgaattgaggagaatcgtccgtaccgacccagccgccgctgtcttcaacctctcattcgaaaccttttctcaggttagcttatttctttttgctcctttctttcttacgtttcctgatctagggtttctttgaacttcttaacaaatgctcgcttggaatttttctgtttgctttacgatttgattttaattttgggttcttcatagctgtttaagatttgatttaggttttatctttcgattttttcttattagttcatgattaccagaagttgcttgtactgtatatatatatttttggggttgggggtgtttgagactgagtacgttgcgagcgagaactttccctagggaatctttactttgtcgaattaaagctcacagctttgtcctgatttgttattctttattttcaggtttgtagggagtgagtttatcaaataattagaatggccggtttgaaggaagttcttcctgtgccgaaagcaaccactattacccattatgatcactctaatgatccatggtttaagaagcgttatagctcatctgaagctgaaagggctgaagctgtaatcaaacccaatccagttcctccttacttaaatcgtgcaggctttgttcctcgtaaagtagaggattttggtgatgggggtgcgttcccggagattcacatagctcagtaccctcttggcatgggtagggataaatcagggaagcctagtgagtcgaaaattctgccacttacggttgacgcccatggaaacattgcttatgatgccattgtgaagcagaacgagaattcaaggaagattgtttactcacaacataaagatcttataccaaagatcttgaaaaatgaagtcgacactgctgacgatgaagatgaggagatggaaaaagtaattgaagaaacgacacaagaaacaaaggctgcccttgaaaagattgtgaatgtgagattaagtgcagcacagccgaaaaatgttcctaaacagtcatcagactctaaatttatcaagtataagccatcccagcaatctgcagcattcaattcaggtgcaaaggagagggttatcaggatggtagagatgccagtagacccacttgagcctcctaagttcaagcataagcgagttcccaaggcttctggctccccacctgtgccagttatgcattctccaccacgtcctgtgactgttaaagatcagcaggactggaagataccgccatgtatttcaaactggaagaatccgaaggggtatactattccccttgataaacgtcttgcagctgatgggagagggctgcaagatgttcaaattaatgataattttgcaaagctttctgaagcgctgtatgttgctgaacacaaggcaagagaagcagttgctatgagatcaaaagttcaaaaggagatgctcatgaaggaaaaggaaaggaaagagcaggaattgcgaatgttagctcaaaaagcacgttccgagagaactggtacagctgccccagcagctattcctatgccttccgagaaaagctcaatggatgcagctgacacacgaggggattatgatcgtccaagggagcgagagcgagaaagagaacgggaaagagagatggattatccaaaggagacaagagaggaaagggaagagcggttacagcgggagaaaattcgtgaagagcggcgcagagaaagggaaagagagagaagattggaagccaaagatgtagcaatgggcaagaaaagtaaaattacgagagatagagatcgtgatatcag

SEQ ID NO: 199377 - DNA, 1101 bp, Cannabis indica
agagagagagagagagagtagctagtggtccagtctgaaagtccggcggcgaaggtgacgagagagaatggtcgagtagagtactgagacggctgagagaagagaggccgattatggtttagggttaacaatggagagtgaaagagaaagaaaggcgttaaaataaaataaataaataaataaaattattctttttttaaaaaaaaatggaataaataaaattattcaatagaaaataattttaataaaaggattatttttatttttacacattaaactagtatttttattatttttatagaattgtacacaaaaaattttataacaactaacggaacaacttaaatcacaaccaatatttatatagcaatatatatataaattttcggagcaactcaaactgtaaatttaaaaaaataataatatatataaagtaatttccctaataaaaaatatttatagttagaattttttttattttttagatacgatagttaggattgtttaaaaaaaaagtagtcaaaaaaaactataaaaaatatatataatttggatttttatccaattttattcaatgttattaatttggtgataaatcatcttcttgaaatttaatatgtatcaaattatgcaatttaattatgttggactttttttattaaaatttagacaaaaatcttgaaaatttttaaaagacttaaaagtttataaaatataatttagtacatgttaaagtttaaggctaaaatcataattagcccaaaaaaattatcttattaggaaaaataattaaaaaataaaatacttaaattaattaaaaagaaaagtcactcgtaaacacaaaaaaattataacaaaaaaataaaacaacttagctataagagaaaaatattattagaaattaaaatttgtttttccaaaaaatatatatgtgtttttatttttattttttttataaaaatatgttttattaaattagctattttttttattttagtttagttattttctctaatttaaaaatgttatatgtgtttccagacgagtgatacgtggcataaaaagagaaatacagcctcgagcggtcactaattagatcag

SEQ ID NO: 199378 - DNA, 1358 bp, Cannabis indica
agagagagagagagagagcagtaaagaagataaactgcgagtctagctgaggaagatgatgtcaggcaactataccagccttgataatcagaaagtttctggatctgttcctgtatgtattcttttatgtatatataattgtctgtataacatgtgattttggatctatggctttctataattttggttgtatattttgtaggctgtgacagatccaggccacgttaccgtcaaattccaaggtaatcaacaaagcatttaatctatggatctcctcttgtattgtatttgcaattaatgtgtttaatcccaaaattattcagctaatatagcttttaagtgttttctgataagcaactagtcaaatagtctttgtttggttgcctggaaaatgtagcaacatagaagacaattactgagattcttatgttttggtgaattttgggaatattcgataattaatccaatttggtttggtttgggtctatctacgtatatactgaatagttgataatgtttttcttcctgttttttggtggtagaactagattttacgtttctgtaattctcaatgctgatgcaaatctaagcaatctttgattcttttctttttcttgagttgttgagaataatgatatgatgatatataactattgcagattcaagccttcagacatttcctccgtctgaagcacaagggaagatatcagctacttctcgacctcctagtgatgcagatggtatgagttttcgatcttgttaattaaattgctaatgtgggctggggttgttgtgatcctgtcccgatctgttgttttgctgtatattcataatccagttcgtatattggctttttggacctggggtctaaagttccattcctgaatttccttgtatgaaccacaactagaaagcaaagatattcttgtttttccactgaaaatagggtttatgcttatctgttttctgactctatctaacaatcaattaaattggtttgtagtaatcccatcagttcttggaggataaatattattgaggacagttttatctagatatagttagaacatctattttgttagagtcccacatggataatattttggtacataggttactctacttatcaccgattggtaattaaacttgggatctggttatctcaagaagatagttgaaattcgagtcaagtgctcatttcactaatcaccaattagttttgagatggagtactcaagtagtaattacaaaaatttgaaatgttaacaaattaattttttacttttgaaatagtacacattttcagcttcgtaacaaatgattcctaaaatacattgtttgattcttttttttttttt

SEQ ID NO: 199379 - DNA, 502 bp, Cannabis indica
catgctttgctcgcgcctagatagctctaatatccaaaagcttcaaaatacaaagtctgcctccaatcgagaaaagcaaagagtaaactgaaggaaggaactgtaacacaataaaattctaatttgggtctctactcgattaaagcgaacttatcaatttccctaggaatcatcgaagggaaagaaagttcaaaccaagtaaagaaacaaaaataaaaaacccaatcaagtctttaccaaacccacaaccgacccagagagagagagagattcgtcaccgaaaccacaaatactaaaaacaacctgattcgaggaaaagaaaaacgatccaaatttgaatcagaggaaaagaagaaagaaactcacttgggagaaaaaaaaagtctgtaaagagaaaacaaacaaaagtaggaaaaaacccaagtggggttttagtttttacaggatcggattctagattaggctttggagagatggttttaatggtcagacatgtgatttg

SEQ ID NO: 199380 - DNA, 2196 bp, Cannabis indica
ggatcaaatttcaactctcatgtccccatacacatgagcaaaatggacgggttgagaggaaacatagacatgtaacagaaaccggtttaactatgcttgctcactcaggattggatatgagctactggtggcatgcttttcaatgtgttgtatactcaataaatcgtcttcctactgttgtgcttaatcatatcagcccctatgaaagtctctttcatcaacaaccagaatacaagatcctaaagccctttggatgtgcaagttttcctcatctgagaccctattctcatcataaaatggattatcgatctgaagaatgcatctttcttggttattctccaaagcacaaaggatatctttgtgaaaatgctgctggccgtatatatgttgctcgaaatgtagtgtttaatgaacacattttcctgcactttccatctccagcactacacaggtaccatctaatgattctattaaatttcccactgctcagttttttaccaacaccactgaccatgcttctgctgtgtctactgtccctgttactgtgactgaggaaatcaacactactgctgtccctgctcctgcaccagaacacattccagttgctggaatgcacactgctgcagcatctggtgcaactgctgcaccttcaatcttgcctgctcctcagtctacagcctctgctgttgctgctgaaattcatgacagcagtgttgctgctgaaactcatgacagcagtgttgctcctagtgattctcatcctgaaatcactcaagttgttgctcaacaaaggacacatcgaatgaccacaaggtctcaaaatggtatccgaaaaccaaaagcttacttggccactcgacatcaactgcctgaatctctcttgcctagtgagccaaaaaccttgaaagctgctcttgctgatccagcttggaataaagctatgaacaatgaagtcactgctcttaaatccaatggtacttggacacttgttccctatgagtctcatatgcatctcataggaaataaatgggtacatcggatcaagttaaagtcagatggtagtgttgacaggctgaaatcgaggctagttgctaaggggtacttacaagcacctggaatagactatgatgaaacgtttagccctgtagttaagcctgtaacagtccggatggttcttactctagctgtcagttttaattgggaagttcggcaactagatgtgtcaaatgcttttctcaatggtgctcttcaagaaactgtttatatgacacaacctcaagggtttgaggatccatccaaacctcatcatgtatgccatctccacaaagctatatacggacttaagcaggcacctagagcctggaatgataagctcagaaatactctgcttgactggggatttcaagcttccaaggccgactcttccctcttcatttttggtactggacagaacttgattatctttcttgtctatgttgacgatatcttggttactggtcccaacacttcactaatcaccaagctcatttctgatttgaacaagatctttgaactaaaagacttaggccaaatacactacttccttggggttgaaattcatagaaattcggatggtatgtatttgtcccaaagtaaatacatcaaagatttactagttcgagttcaactagagggtgccaaaccatataccagtcccaccagcagctctcaaaagctctctctatccgaaggtacagcttttgacaatcctactctttataggagtaccttaggtgctctacaatacatgactctcacaaggccggatgtttcctttatcataaacaaactttcccaatttatacatgcccctacaaatattcattgggaagcttgtaaaaggcttctaagatatctcaaaggcacaatctctgaaggtcttttgctgaaaccagtttctagactctctcttgaagcctattctgatgctgactgggcgagttgtattgatgacagacgatccacaggggggtacgcagtgtttcttggctccaatttaatctcctggtcagctaaaaagcaacaggttgttgctcgatcttcaacagaatcagagtttcgtgcattagctaatgcagcagccgaagtgaaatggcttctctctttgctgtctgaacttcatgtttccttacaagacattcccattatttgggttga

SEQ ID NO: 199381 - DNA, 963 bp, Cannabis indica
aattgataaatctacagaaaactaatcataccatttcaaaatcgttgtcattcaaagccgttgtaatcaccgtatttcaattgtcactacaagaaaaggtccttttggcggcgctcaaagtcgtcggcaaaagtaagaataacgcgccgacgaagctttgtcggggcctttactcgccggaaaaagctaccaacaatggctcatcagcgtatcactttttgccggtgacattacgacatgcaccggtaaaagtatttacaccggcgcatttgtttgccggcataaggaccttaccggcaattggtccgtcggctgatgtgtccttgacaatgttttgctggcgagttatgtcaccgacaaaatttttggcggggatttggcgcctaatatttgccagcgagtttagtcgccggcaaaactaaattagaaaaataaaaaaaaaacataaaataatgttttgcctgcgaggaatgccctagcaaatatttttttttaaaaaataaaaattttacttatgccggcgacatatgcgccaaaaaaataatataaaaaatttaaaaattaaaaaaataatacttttgctggcgcatgttacgtgccggcaaaaatattttttgttttttaaaaaaaactaaattaataaattaattttaaaattaaatttaaattaaaaatcaaaatattattaaatataatatcaaatatattataaaaccgaaagttataatgttattacaaactatattaaacatcataaactaagtaaaagtattatgaattcataaacaataatattatctacattgtaaactaaaaaaaattacaaatcagcatcatcatcgtcgtcatcactggaaggggcagtctgtgaggagaaacctgctgcatggccagaaggctgaaatggtagaatcagaggtagatccggcatgttaaatcctagaccagcgctggccaattgga

SEQ ID NO: 199382 - DNA, 675 bp, Cannabis indica
atatcaaacagaaaaacaaagttaccttctgttcatatagacacacaatattttggaggacaaagaaactataacgccgagaaggctggaggtctcagttggggtacatgttcagtcaaatttaaaatttcaattggttgctacattttattgtttgttctgttccttttcgttatttctttacaatttttgttcattctttttcacgcaggaaattcaagcagctttacatacacttaatgaagggtcaagtatcgaagatgcaaaagcggtttgttcatctgatgttcttgagtggttttttaaatggaaggtctgtattcctgcaagtatttgatttattcaactatctccagctagttatagactttatgctatttgtttttgtattctttgtacaattataatctaatatgccaaaattttatgcttcctttacacttaaagatgtcgaccaatatttctgaaattcttttagtggaaagctatgcatttataataattagttttcttaataaagcttataaaatattttcttattttttattgatgttgttagtattttttttcacttcaggatagacttggaatatatctttcaccatttttacatgatatgcactacacatcttttggtcgacactttacagaggtggagaaacttgaagaggtaat

SEQ ID NO: 199383 - DNA, 920 bp, Cannabis indica
gtttttctttttcgttttttttttttttttttttttttttttgtgtatttttgtgcgtctaaaggagctattgatatctctaaataatgataaacaataataatagagtgcaattaatcgaactgcacatgtttaacttaaacgttatatagagcattatgccccacatgaaaagaaaactaagtaggaattataaaatgctaattaatggtagcatcaagataagtattgctttgcctctcttaatcatctatccaagaatatagaaagaaaaaataaacccattgctaataacattcttctctttccacacaaggtactaaagggtgtagttcctcctcactctaactgctattcctttcgacatttttttaaaaaagttccctaccattatagtgatatgtcataattaaaagcaacaattattcttttttggctgaaaattaaaagccgtaattatttcttaaaatttctacagagagatacatacaggatgaaaatagaaaacgtctctttaggaacagaaaaagaagaagtgaaattcgtcaaagaatgtaccgaccaaaaaataaagaagaaaaagaaactatggattttctcaataagtttatgatagtgaagtgacgttttcactgatcttattatatagtggggtttgattcggttcctcaacaaagctcatccgcggacgattttagcccagcgtattcatttattgtcgtacttttcgactggtcacttccaaaatgggctgtaactattcctcacgtcgcgacaatgttgacgtgttcgacagtaactggtcacttaaccactaattctaattattaaaatccacaaaaatagattagatgcattatagtattagatgaccatccctaatccattcttgtcacacctctcaaaattcaaaagctttt

SEQ ID NO: 199384 - DNA, 536 bp, Cannabis indica
taccgcccattgtctggctcgcggtgcttgttattggtcagattgtatttttgttagtagcaatgttcctagtgctattaacactgctgtaagtgccgatttggcatttcaattttaatgaagttttctactttacattactaaaaaaaaaaaaaaaaaactaaacttaaattaaaaaataaaattaagatattaataataacaaagctagatgacaatatagtaattttattgttaataacttttaggtaaataataactgttatctgtggaccatatgatgaaaacatcttaaaataaaaagaaatatagataaataataagttgtctgttgtcctaattaaataatattttccctctccctcaactgctttttaaatataataatatatattttttttataaaaaaaagcttgttattaaaaaagtttgacaatcatcaccagtcaccaccaccatctttcttccaaaaactcctcattagtcatattcacttccaaagccctacccctgatcttctaactctctctctctct

SEQ ID NO: 199385 - DNA, 1405 bp, Cannabis indica
gtcaaaaattgagtgcattgacatagaagtcaatcagctttgtctccaagtggcaatatgtttaactatttgatgttaaatagagagttggtatgtgttggaaaaaccacatctacaagttttagtgttctctaatgttgtgtattgaggccacaaatctagacgccatggaaatgagtcagtcaagcataacacaggtacacaatgcaattcctctacatttgtatttctcattattaaaaagtttgattcatacatagaaagaatgatgtcggttacgagattctatctcaaaatcaatttgtaatgagtgaagtaacctatgttcttaaatataacttaatatttttactatttatccatatatgacaatattgtccaataatgctcaactccctttattattattattattattattattattattattattattattattattattattatggtttatttgtagcgaaactctcttatatttgaggtgtcagttagtcataaccgttaaatacaaattagattattattttgttggtttcgagattttactattacatatacacagtgtttatccagttgatgtttaatgataatattaagctgacccttaaatttacaaagaaaaataaatttaagagaattttaccactaaataaaaataagagggataaatatataaaaattaaaaaataaagagattttaccacaaattgaaattatatgttgttattattatgtattaggattggatttctatgggctgtcaaacaaattctcaatattaactggtgtgaaacaatgaattattttgcctatcatttcttttcttctctctttttttctttgaaaagtcttttcttctctattatcagaatttcactagctgccaagcactcttgcccaaaaattcaataaagtcagaaatcagtgaggtaagtgttaagaattgcttcaaatatctctatttattttcttcttaattttcactattttattaattttttttttattttactttattctactttattttatagatagcattaattttatcaaaaaaaaaatgagatgattaattaattaaaaattttaaataaataattatttactttaaaatgtactaaattatgctcattgaatttttctgattgttaaaaattctccctaaactattgagattattagatttaaagatttttgtctaatttcattcaattttattactaatccagtgatcgccaatgtactaaatcatacttcccagactttgatatctaccaaatcacgcctatcaaactttgacaagtatcaaattatacctcatcaatttttatccatgttagaccttccttactaaaattggacaaaaatctttaaattcaacaatcttaatagttta

SEQ ID NO: 199386 - DNA, 612 bp, Cannabis indica
gttaaacttttttaaatttttaattaagcatgttacaattaaatttttacaatttttaccaaaccgtaaacccttataacaaacacaagtagcaaagttctcttttgataaaaaggatagagttccgcttcagaaaaaaaaaaaagataaaagataaaaggatagagtaccaaataaaaaaaatgaaaactatcactattctttttttttcccaaaaaaaattatatatttaccgattaataaatttataaataatgacgtgggtacaaatccaaggaaaggctcttattaggacttctgcctttttcaatctcttcaaaccctagaaactagaccaagaagaagaacaaaaagcttcaggggaccttacttccttaccttatcgcctactataaggttagatttgatttgttttggcttgttttactattgtatttttttaaatatttcaattttattagttatagggatcggatcttcatctttggtttacataaaaatcggataagtttttatggccctgaaatcgaaatcaaaatcaaaactttgatttgatgttctaagcttctatgatgatatttgctttgtgtgtgtatatataaatataaatat

SEQ ID NO: 199387 - DNA, 2749 bp, Cannabis indica
gaagatgagctacctctcattaactacatatagttgggagatgaactacttacctctcactattacatatggttgagaagtgagattttccttctataaatatggagcttttgacgagcatttgcaaattagggtgctacttggtgcaatcagattaatgggaagtctgagaaagagtatttatatatccaaactttgggaaacacttttgagagtttggagaaacacttcgacgaacacttgagagatattattagtgggaaatctatatttatattctgtatatttcctactcagattaataatattagttgcctactgtggagtaggcgaattacttaaataggtaattttgtatccttatattttaccactttgatatatactttttgttatttattgcttccgcgcacaataaattagtattagagccaaatatagcgatattctatatcaaatcaaactctcaacgagacgaatccaatgtcgcaggaattgcctcaatcggaggtccgacacactgcctgtagccgctagagtattgctgccagcaactaaattaactcaatcaaaaagtgattttcaaaccgagtcagcctatgtttcacccgttttcaatcgagtcatgcctatcgcagtgaagatgagagtgatgatcatcaaaaaaagatctcaactgaggtggaggttctctcaacatcaccaccaataaatcaacaattagaatctattgccattacttgaccaagaagggagattaaaaagcatgctagatagactaatatggtaccatctgcactcccagtaattgatgatgatgtctcatgcacttacatagaagttgtgcagagagttgacgacaagaaatggaagttggtgatggacgtagctataaaatctctacactagaatcaaactgggtgttggttcgacctcctaaaagaaagaaggttattggctgcaaatgggcctgtgccaagaaagaaagaattcacggtaaaaacaattgtcgatgcaaagccaaactggtagaaaaatattattcccagaaagaaagaatagattataatgaggtattctcacctgctgtcaagcattcatatatttgaatttccttggctttggtagcatagttggatctcaagttagctcaactcgatgtcaaaatagattttctccattgtactttaaatgaagagatttacatgtctcaacaaaatggttacaaagttccaggatgtgaaaactgggttggcaaactgagcaagtcactatatggtttgaagcagtcaccacaacaatggtacaagtgttttgacaacttcattaaagataagaagtacacttgtagctaatttgatcattcagtatacttccagaaccccaagatggtacttccatttatttactcttataagttcatgatatcttaattgcatctaaaagcaaggcggagcttaccaggctaaagactcagctaagttgagaatttgaaatgaaagatttaagagaagctaagaagattcttgggatggagatcacaagaaataaagttgcaagcacagtctttttgacacaaactcagtatctaaagaaagtactgcaaaggtttaacatggacaagaagactaaacatgtcagtacaccacttgcacctccttttaagttaagtgcaaagttgtcacctagaaccaccgatgagaagaagctaatggagtgtattccatttacaaatgccgttggttccttgatgtatgcaatggtatgcaccagacctgatattttacatgttgttagtataatgagttgctacatgcacaatctcggtaaaggtcagtggcaagcagtaaagtggattctacggtatatttatggtactatggatattggtttaaagtttgagagagaaaatattgatggtaaaaatctagtcggatatgtttattttaactatgctggagatttggataagtgccgatcaactacaagttatgtgttcgcaatggcaggaggaccggtttgttagagatcaacattgcaatcaactatagctttatctactacagacgcagaatatatggttgtaacaggggcattcaaagaagctatctggcttctcgggtttactaaggatttgagtattgttcagaagaacgctgaggttttttgcgacaatcaaagtgtcattttctaggcaaagaaccaagtccatcatggccgcactacggacatcaatgtttgattttattttgtttgtgaaatcattaatgaagagaatgttatacttcaaaaagtgaggaccacagataaccctgtagatatgcttacaaaagtggttatagggatcaagctcaagcaggagcaagtttcaacactgcttgaacttgatcaacatctatcaagcttagaatgcctaagatgcatgtggaggcagcacttatggttttttcaccaagatggagattgttgaatttggctcaaaaagtcaaattgtcttgaagtagcaaatatataattgttggaattattttactaggatcttaaatttactaataagtatgttgtttaacatcttaaatatgaacttctaaaacgatattaaataaacacatataaagtatgagaaacctgacagtggttgtagagaaatttattagtctcttccactcagtatctctaacccttgtatcctttctggtcgcagagtatcaccgaagatctgagcccgcatgtccgtctcttagatctg

SEQ ID NO: 199388 - DNA, 2729 bp, Cannabis indica
tgaacaaagataggattacttcagccattgcaaattaaagcactagtttgtacaaagggttcataaccacccaaatctcaaagatcttagttcatgtctgaaattaacaacataaaaccagaaaataacaaagtcatggagcttaagagaatattaaagagtagaaaatgatacaaaattaaagaggagagcaaaagaaatgagttggtgagctcaaatcttctctcttgaggttgccttcttctccttcttcttagtcttcttcttctcttctttgtaccctctttcttttttttctgtactttgctgaaagattcgtattgctcctctcattcaaagtgcagcagccatctatattttccccatttctctctcttctcgggtgccccctatttagggtactaaagtttaccctaattggaaatccaagtcattgtccacttgttcttttttttcacataagctgactcattgtacacattctcaccacataagcatcatttattcctcattaaagctagttgaaatttctgccacgattctcttacttggcttgccaattgctagtgataattgctacagcaatgacagtcagcaacatgtattttctgcttctttttcttcttgttccaaacactccccatcacctatttcagcctttttctgcttaatacacacaaaaacagtaacataagtctctctaacacttaatagcacacacacatttccatttactacaaagacacaacatactaaacacaattacataaaatagacactaactactcaactatacagtttaaaacttaagtttaaagataccaaaataactctaaatcttagagttatcaacgatttacaggcccctaaattatattattcgtaaaactgatgagttgacacgctaaatcactttttgggaaaaacttgaaactaaaagtttccctatcgatggataacatggcaataccctaaatattgcaaaaacgagaaaaactggggatacctaaaatgtcccaactggtagaccagttccccaacctgtattctggttctgtggggtttcctagggaccaaccaatcgaccgattcctacaggtccccctgaaccagaattccggttcagtgtaggaaacacacaaaatcaccccacaacctcaaatcaaccccaaatcacaccaaaccttccaggccttctaattacaccataatgaacataatccatgcaataaaacaccacaacacatccaaaatcacaaaccaccattagagagcaaagcttgagttcataaactcaaaccttgctcaaccatcaaagcaacagataaaacaagttcaattcaacaaaaataaccttaatctaacctcagaaggaaaagctacagaaccctaactcacataatcatgtaaaaaccttaacttaaaacttaataaatccaaggggaaatgtggtagaagggctccctttaattggaaacaccaagaacttgctagattatccagaaatgaagctgaaaattccaaaaccttgttgcttttagggtgctcgagaaagagagagagttggagagagaatggcaaagtgaaaatgtgatgtttttttatttcttatctatttggataaaatgaataaaataattgtatttctaacttaatcaaataaaaaataatcaaattattaactctacataatctcgcaaaaggacaagggatcaaaatggctaaaaagaccattctacctctcactaaactaaaaagcttctaagtcacttaaggatattttggtcatttctaaaccttaaataatttccgacattcccaatgtctaactaaatttccccgctactactaaaatactaaaatgtgattttattggccaaacgccgattccaatgttgtcgggtacaaaacaagcaaaaatgcaaaattctatatatggcataaataataaaccataacttcaaataaatctccataaaatgataaatcataagtaatattctagtttcataattaagtcctaattatctgttaatttccaagttaaaattaagtggtctttacacttaatattttgcatgctattagtatggtgagtcattacatgcacaatcccggtaaaggtcactgccgagtagttaagtagcttctacggcatatctatggtactgtagatattggtttaaaatttgagagagataagactgatggtaaacatcttgttggatatgttgattgactatgctagagatttggataagcgtcgatcaactactggttatgtgttcactatggcaggtgagccagtttgttggagatcaactttgcagtcaactgtagctttgtctactacagaggcagaatatatggttgtaacaaaagcattcaaagaagttatctgtcttctcgggttgaccaaggatttaggtattgttcagaaaaatgtggagaatttctgtgacagttagagtgccatttgtttggcaaagaactaagtccatcatggtcgcactaagcacatcgatgcttgatttcattttgctcgtgaaatcattgatgaagggaatgttattctccagaaagttggaactgtaaataaccctgcagatatgcttacaaaagtagttacaaggatcaagtttcaacactgcttgaacttgatcaacatctctcggacttagagcgcctagggtgcatgtcgacgcagcatttttagttttttggttttt

SEQ ID NO: 199389 - DNA, 689 bp, Cannabis indica
taagaattatacaataattataaaacattaatgttcagacaagaagattaagaaaaaaattataaattataatataagaagttataattaacgcttctcgtacatatattagtttaacttattttttatttatttatttatttaaaaaaattaaataaataaaaggagaagaggaaaggcatttaatgagattcatgatccaaacattaattatataccaatatatatagtctcaccaaaatctactaataattatgctgtagattaaataagagaagaatatatataaatattaccatgattgattgaataataaataaattgaaaagaacatattggttttattgcttaattaatagcttttagactttggtagtagtttaaattctttacagccctaataattatttaattatgcatgcttattaacttttgaaaattatgccctagctagcttaaattatcaatatttcaacaataattagaaaattaagtgtttattagggttatctcatggctctatttgactgagttttctgcttttaattatgaagctcttcttgaaaaagctattaaaatcgattttggttaaaattaaaagctaacactcactgatttttctactggtaacagaatgtttttgtagcttcagaaactcaaatacaacttctaaaaatatttaacactaa

SEQ ID NO: 199390 - DNA, 757 bp, Cannabis indica
ttgcactataaacataggttgtcatgtactaaataaaaaatataacataagtgggatgggaaattgtttttgagaatcaaatttggaaaggatgtatgtgaatagagagttatgatccaagtgctacgataaaagaaattctcttgttatgaaaaaaaaatacttcaaagaaaaaaattcatgttgaaaatacattaataacaagagataaattttagagaattttaacgttaattgtacgaaaaaagaagcattggatgaaaaatattgttgagagaaaagggaaattacaatgaaggtttttgcatttgattagtggttttgtaaatttatagtgtgaaattagcccaaatgacatttttatccaccatatatataagcctaacgttacatgtctataaaatccttgtgatctacatgattttagtttacaatattagagatgaattgattatgcaagcctagttggttaaattctagtcgttagtttgaaatgcatgttgaataattgaaagagtttaatgttgagataaactacccttggtttaagatttgcaattttttcatccaatcattaaattattattttttttttagttttattttttatcattgcttttggagatgtgataagtgctcatttgtacactcgtttttggtcattatttagatgaaatattatgttattcttaaagttttgtataaatttgataagttttttgtagtgtgcagttttgagcataaagtgataaaatta

SEQ ID NO: 199391 - DNA, 1633 bp, Cannabis indica
actttaccccaccctttcccgttagtaaagatccaatgagatctattccccataccgataagggccaatggctagtcatcaaagtaatctcgttgggtggggtaattggtatgcttgcaaacctttggcatgaatcacatttttggacatagtctacacaatattttcattgttggccaaaaatatccttatcttaatattttctttgacagacttggacctccggtgtggtctccacataacccttcatggacctcctacgtgatccgtctagcttcagggtcggacatacaccttaagtacaacatgttgagccctctctgataaaggacattgtccatcattacgtgtcgatgagcctaatactgtaacctcctggatacagtcctctcttgaggtagttctccttgtgttacgtattttatgatggggtccatccaactcggctcttgctcattagtagctaccgtttctttggttttgtttcttggctccgtgaggtgctcaataggtactacccccagcctttttattttcttgtttgaagctagcttagccaagcagtctgcctgagcgttcttctctcgtgggattctttccactttgtattctttaaactcatggagcgattctctgacaattgctacataagcaaccattttttctccacgtgtttggtactctcccgatacttgattgaccactaattgagaataactgacgacttctaccctcgcagcccctatagctctaaccagccttagccctgcgattagagcttcatatttagcttcattgttggaggccaggattgcgaagcatagggcggcctggagctggagtccatctggtgatatcattgttattccggcaccagatccactttcatttgacgcccaatcgacgtacactttccacgtcaacatcttctgggctggcgtactggtgatggcttctacttcgttacattctattatgaagtctggcagggcctaactttttatggagacgcacggaacatagtgtatatcaaactggcttaactccatggcccacttaacgagtcttcccgaggcttcaggtttctataagacttgccaaagtgggtgattcgtaagtaccttaatgggatggacctggaagtatggtcttagcttttttgaggccatcagcaggaaaaaagctaactttttgatcaacgaataccaagttttggcccctatcatgcgtttgctaacatagtatattgggtgttgaactttttcttcttcccgaaccaaggccgcactgacagcattcttggagacggccaaatacaataacatgtcctctccatgaatcggttttgacagtattggcagtttggccatgtgttcttttaatttctgaatgcctcctcgcactcttcagtccattcaaatctttgacactttttcaaaatattcaagaaagagatgcacttgtcggtcgatcgagagatgaatcaacttagggcggccaccttctcgatcaagctttgtacatccttatgtttctttggggaaggcatattcaacaaggcctgtattttttcaaggtttgcctctattccgcattgactaacgataaaccccaaaaatttccctgatttgac

SEQ ID NO: 199392 - DNA, 858 bp, Cannabis indica
atctaaaaattaattttagaaaacatcaaccaaatacgttttgtgttttgaaaacttaaaaaaaaaatagattaattttttgaaatattattttgaaaacaaaacacaatatcaatcatactttgagttattcatatttaaattctaacatcatcattttatttttatttcatatttagatgtttatatatgttatgtttggtaatatattaaaaatgttcaaagttattgaaaaagtgagacattaaaattctaacaaattagtaagtgtggtattatatatattcaataaataaatacataattaaaaaaaaaacaccatttcatgatttataattttatattatgcactcatttattaataaacttattaaaactatttattttatgattttcttacagtattaatattaagaacttaaataattaaatattaatctattttatcttttattatataatgcccctcggttgcattatacctagtgtaaaataaagaataaataattttaaccatttattttgaataatataaatgagaaattgttaaagtggtttataagtatattattttgtttttcatttttggaaaaaggaattcataacttatattaatcaataatcttctgagcctcaaaagcaattatgagacaggtcgatcatcataattaaaactaaactattcctctcactaataagaataaaataatgagataaatttatttgacaaaattacaatactatggcattataaggcagtcactctcaaaaaggagtaaatatatgtatatacgtaattaaaacacaatgccattcttttagagtacatacaaacatggaataattacataaaacact

SEQ ID NO: 199393 - DNA, 742 bp, Cannabis indica
ttatccatctttaagagatccgtagacttttgtactaattaaaatatatatgtatatatctatatgatgtaacttgacttatggaagcaaaacaactaattgcaatataaatctcgccagtttgagtgtcttactattaatgtttcactgcaaaggaaattataattttattcactatattcttttttctagtgaccttaaatggacaaaatataaactatttacaattcaaattttaaaactacagacaaaagaaaaagaaaaaggcgaagtaaaaagatatacaaaaaagaaaaagaaatagtgcttgtaaagaaattaatctcatatcctatatactagaaactaaaacaattaaaattctaatatctggataatggatatacaataatcaagtaaaggtattatttgaccataacaaaatttgtccatcaataagaaagaatgatggtgatcttcctttacctttgatttttatcgttgacacttaatttttttctttctcaaataggtctttcctattcacataagccatcacaaatatataaacaatttggtgtcaaatctatctatctatatatttattatatttcagatatggcatacaaccaatttggtgtcaaatctatatatattatatttcaaactaaaaaaaatcataaaaaggcgaaaagttaagtaaatatgcaccaagaataaaactgttccaataaaaaaccaagttgatttcaaaaaaaaaaaa

SEQ ID NO: 199394 - DNA, 1696 bp, Cannabis indica
ctactttttatattatatttaatttttttaacaataatatttattgtatcaattttcatgctccaaaaagcatcgttctacaccaccaaatgtggtatactgtcgctgctaatattactaaaaacacttggcgtcagatctatttagttttgctctagccagccacttcaatatttccaaaacggtacatttggtcatagcccaatgcacccacaggttgatttcagcccaaacataaacactcaaatagcaattaaagaataagtgctcctcagtttccctatttagcccacaaattaaacatttctcatgatcttggcatatgttgtatttaaacaatcgtgatttgaatctcaatctatctaatatcaccactcacaacataaacttgtgctttggtatagataatttattctaaattttcccttgccaatcaatagtgggaaaagttggataaaatttacatatccatctttatcaagtacatacctcttgtagtatatttggaaaagcattcagtcccatcaatttactcttcacttttaccacttgcttccaattgctggaagggggcgcctcataggccttctaatttctttcttctatatacatcgtattcacccatttgacccataaagtatcttgcttagactcagtagcccaaacatacttccaatagctgcttcattctattctttggttcttctgaatcccaatccgccttcttttttggttttgcacaagttatcccaagctatcaaattcggttcactagagtccacccctttccaaagaaagcttctacatattgaattaactcttttcaaaacctttcatggaagaatcataccttgtgaccaataacaatggatagcgagtaaaacataattaaccaaggttgcccgacccgcataaggcaagtttctctaactccatcatttgattatttgcaccatgttctcaatcaagacatcacagtctgaaacatgtagtttttttggtcacaaatcggagtgcacaagtagcaaaatggtaactggcttcttctaaaactcgaggcatccatcaccctttagatttcttttgtagtcatattacaatagaatatttcagacttggtttcatttggttgtagcccggatgtttgagagaacagtttgagtccttaaagcatacgataagttaatttaaaattaccgcgacaaaatggcaaaatatcatctgcaaagcaaagatgattcagtttcaattgctcacgtctttcatggaatttaaaatcatcttttcccccaactttcctcatcaatcttgatagatattccattacaaagataaagagaagaggagacatggggtctccttgttgaagaccctttttttcttcaaaaagcccatgcaaacttctattaaataaaagactaaatcgaggagtttgaacacaaatcatgactagatcaataaattttcttgggaacttgaaagcaatcaacatctcttctataaagtctcattcaattgtatcatatgctatctttagatctaatttaatcatacatttaggtattttcctgcttctccatagtgttttcaacaagccttgacaaatcatggaattatacaaaatgaaatcttccttagataaatctacttttgattttgtaataatggtatactagaagaatcattctcaatttag

SEQ ID NO: 199395 - DNA, 1228 bp, Cannabis indica
atccatcaaacagatgaagaactcgaaaatgaaggaaatcagtcctcttcctctatttagaagagacttttgaaacttggtcctaagattcaaatactagtgatgagtctcaagattcagatactaattaagatgacgtacccccacattttattgctcaatttgtagaagaatcatattcctaaagtgagcgtattatcaaaagtgaagaagaagaagcaactacaataaaactagaatccaatcatcatcaaaagagtaaatattctaagtttcaaacttttactcttgatgacattctcccatctaagtggcaagaaatatttcaagaattccaagcttggcttagcctggaaacacaagaaaccacaggcatagacgaggatgatccttttgaattttgtctcaagattcaccaaaactttgcaagattggtggactagcttaggcgaatacagacatatgactttcttgcaactcccatctgtcgtaaatgccctaagctatttatatgtcgagttttatggccaagacgcacaagtaactgaaagacttagagtagagtttttcaagctcaattgttgttcaaaggacaaaagagacttggaaaaacattataagagaataactcaatgattctaccaaataggtggcattgatggtctaaatctaaagcaagccttcctttcctctattccagagccatttggcgaagaaactttcaggctactctatggatcaggaaaaagcctaatgaatgctcaattagagaaattttccaactagtcttaaaagcccttgaaaaaatgtgctcctagaagaaatttctctaagaatatatgaagcaatcaaaaaaattaggcaaagtctacagcagacaagaattactcatcaaatgtcattctaaatctttgtgttcttacaaaaacccaaagaacagaaacaagttcaagacattcaagttctcaaagcacaaagggcgcaaaataacatttttgtaaaggaagcgcaactttcgaaaaaaatttgatcgatgctatgtatgtgaaaaaaaggttcattatgaaaaatgatgtccttaaggaaaaacagtcaagcttctcttgcatatccaacaaacaactgggatgtctcttgaggaaaatgacatagagtcaatcttctccacagatgatgaatttaactcaaaatctctttatgcattgaaacaatggagtgattcggacac

SEQ ID NO: 199396 - DNA, 1966 bp, Cannabis indica
agactaatcgatgttgaaagtcaaattccgctcattaaaaagataacttatagcttgctcttggcctctagaaagctaaggcaattcttccaggcacacatgataaaggtgtacaccaatcaaacattgcggtagattttacaaaatcctgaagcatcagaccaactactcaagtgggccattgaacttggctagtttgacatcacaaatcaaccaggaatgaccataaagctcaagcccttgcaaaatttttggcagagtgcacaaactcatcttttgaaatctctctagattcaggaaaaaataagagctagagaagaagtgagagcaagtgtagcagcaaaaccttgaagaaccaacatggaaactccatgttgatggaagctacactgacaattatttgttgctagcatttcccttataacaccaggggcaacaactgcacaaagtaatcaaatttggctttaaagccttaaaaaacaaggttgaatacaaagccctaatagtcggcctcaagctagcatatgaagtacgggctgacaacctggacatattcaatgactctgagttagtcatgaatcaagtcctaggtgcatacatagctcgaggtgaaagaatggtggcctacttaagtaagatccaagacttgttaagtcagctcaaaggctacacaaccaggcagatccctagagaacagaatggtacaatagatgcacttgcccttctagcaagcaacaccactaccaacaagccaaacttggtgccaatacagttcttgaaggaaccaagtattaccattcctaaagaagtcaacatattggatgatagtccaacatgcatgacacctatttcagcttacctcaaaactagagtcttacctgaaagcaaaaatgaggcaaaaaagataagaagaaaggctgctaggtatctaatccttgagagagcttctcaatgccgctcttaaggtgtgtcaccaagggtgaggctgagcgatgggtgatagaagcacatgcaggcttctgcagcaaccatgcaagggcaaagcctatccaaaaagatactctaaatggggtaattttggccaaaaatgattgaagactcgatggactacatcaaaagatgtgacaagtgctaaagattttcaaaaatttggagcgctccacccaatgagctcatgatgatgtagtgtccttgggccttcgcagtttcgaggaaagacctcattagtcaactccaaaagggaaaaggagggttgcagtttgctgtagttgttgtagactactttaccaagtgggcagaagttgaaacccttgcaacaatcacctccaaaaaagtccttgactttgttgtcaagaacatcatatgtcgattttgacttccataaaagatcgtgtcaaacaatggaaagaagtttgacagtgatatgttcactgatttttacaacaagcatggcattatcaaaagcttctttgttgtgacccatcctcaagcaaatgggtaggtagaagctatcaacaagaccctcaagtgcaccttgtaaaagtgccttgaggaagcaaaaacctgaattgctcctagaggtcctatagttgcacaggactaccaagaagatgaccactaagaaaactccatttactccggcttaggctatgagacaatgtttcctgtagagctggtgccatcgtttcataggaggacaacctatgactaggatgcaaacaacatattgctaatagaatcccttgaaaaatagaagaaagaagagatcaagtcaacctaaagctgcaagcctaccaacaaaaggtcacaaggcacttcaacaaataagacaaggacaggaaattctgcataggagacttgaagctccaaagagtgttcctgaataccaaaaatccatcacgaggagtgtttggacccaactaggaaggcatctatcaagttatagagtgtaaagaccacttagttt

SEQ ID NO: 199397 - DNA, 1524 bp, Cannabis indica
cagggcgttacagagccaatccaatttgtaagctttagcgaacaagtcaaggaatacatgtaatacatttaagccagaacctaactgtctcaggattaagatcttttgatctaagatcacctaagtgatattgccaaagaaaagatattacagtaagtttatgatatctgttcgactatcaatatcagtccaatttgatgtatatcaattacattcgatactagtatacattgccaacgcccttgaaaggacattccacatatcatcgtgtaagtaaactttattgctaattatcacgtcagtgtaaatctagtgcagtgataaattatgggactatagactttgaagcatataatcaatgattattttatactatgtagacaacactatataatcatgaataactatatgttcaagatttaatagaatttatatattaaatgtataatcgtgaaagtaaacatgtgaaccatgcaatataaaatgatttcttatcttttattaattagtaactctgattacattgaaataagttttatttagggcataaaatccctatagtttttacaatggacaaggggatcgatattgatgtatttggagttgtggagtttgatgattttgttaaggtgatgtttgttctgttgttgtggttgttgttgtattttttgttgcaattgttgttgttgttgttgttgttgttgttgttttcttggatgggtctgaaccacgacttctgcatgccttaagtctctatcccttctaggagagtgttgtctcatttccactttggccctcttggcctcccatttaagagtggaggtgacagagcgcttagaggcagtacctaccttcttcaggaatacctgaccctcctcgctgtcctaagataaaattgtggcttctgcaccatcttgattaggtaaaggggtggtgttccctaaagcagcttgcgcctgattcacactagcttgttggagaggcaaaacctcaaaaactgctttgccactagaatgtccgcagctctgagatgtccctctgagaaccttcactgttcaagctaatatatcttttgctaaaggggtcccttgggtgctagaggtagaatagggactagatagctttggctttttggctctcttagccttggttttagtatagggcttggccttttgtttctccttatctctcacaacttgagtcaaagtttgccggatagagcccatgatggatttcttgatttttgaatccagaatctctacaaaaccaagaagaataatattgtacttacaaaacaacaattaaacgatacacatgagtaaacataagcagatactagataaaagctaagactcaggcatgaaagtgaccattaagagaactatcatatggctttccctgaggaaataaagttatatctttctggttaaaaaagtttccgcactccttaaattttgggaaagacatggacaagaagggatctaccataagtgtatcagggggcggcatgcaactactctaacc

SEQ ID NO: 199398 - DNA, 1537 bp, Cannabis indica
gtattactaggtaccactaatacttaataaaaatactttggtaataatatctcaaaagtagctgagttataatattttgactttaaatgtttttgacttgtttcattataaaaaaaattacttttaatcataataaaatttgtggttaaaattaaaaaaaattgtgactaattaattataaatcaatatttttatattatcattaaaaaattctgtgactaattaaggtattggtcacaaaaattataatttgtgttataactaaatgtgttttactagtcacaatacttgttgtgactaaaattaaattagtgacaacttgtatctaaatattatgttttagtcatcgcttttaaaaaaatactacactttagttataagtaattttttgttgtgactaaaagtcacatttagtcacaaaaattttatattatgactaaaaaactatcactaaaagtagttatttttttgtagtgttagtcaatttgtaattcacacgtcaagcctaccatcgagttgaagatccgacccttgaccctcagatctgcgcattgtccccaattggagaaggactaccaaccctaagaagaaggtccctatagcactatagccatcccgaacctcccctcggccaggagtgccactcgcacggctagggttggcattggtaagtcgagagaaggtgagaaagaaaagataaaaaccctaactttctagaaagaaaaaggagagaaagtgtctaaattttactagttggacaactccattgtattaatttcaacacgtgtaaaattagtttctatagagtattcagcaagcattattgtttatttgtaaaaaaaatgaaaacatcattgtttattgttttatcaaatgagaaaattaagctgttgaatagtcaagttatgaagttttaacgtgggaactataaactagtggtagagaatcaatagtcgtaagtataatgttggaacatagtacatttttatttctccatttgaataaatacattaattagttttgtcttgcagtttacatattctagaaataattgaataatttttgtttttcttcttagaaataaatctcttttaatttgttaatttattgaatacattttgtcgttttattattatttgtatacaaattggaattcacttttgaattgttgtatgtatacaaattggaatttcatctagatgctatacatacacttttgataattattcatgatactatgatatagtcttataaatgttggggtatatttattttaaattttatttacaaaatattttaaataattattttcatattaaaataaaaatttattttcatcatttttttaaaaaatttaattgtttgagtgtggtctctaaatttatatccatgacacgtgcacacataatttatatacaaatttaacacatttatgtgacaagtcatttttgataagtgaaatttatcttaaataaaaataattgttacaattaattgtcacataaatgtgcgttgaatttgtgtgtttatttatgta

SEQ ID NO: 199399 - DNA, 1290 bp, Cannabis indica
ccacaacacttaattcaatttaatatagttgtggtcattgtgctttttcatcagttttatttgaatcagatcaattgaattaatagttgtatttttctcgctttggtttcattttggttgttttgcagttttgaaacgagcgcgtattttcatcttcatggttcgctctgtacagctgaaggcttagtgcatgtggtatttttgtaaatatttgtatgtggactgtataaatgtttaatgggccggcccaaagtatttttgtaattttttttccttttttgtatttttttgtttttttccctattatatattgtgaaatgtatatagcttgcgttacatgataatatactcaaattgagtaaaatatatattaatataaaaattaattagtcaaaaagagagctaccctctaggtaaaatatcattttctaatatttaccacaaatatataaaaagaataatatatttttgtgtggagcttttgtatggtttataattagaaataattctatagtatttagaactttttctctcaaattatggtatatgtattactgtatttttctgaactttttaactcattacaaatggtccttaagctattcacaatattgtaaattagttattctatcaagttttatcacacgtgccaaataaaataatgatatatagctgcttagtcgattgacacatcagtgatacatacatgtatcatttaaaattaaataaaataaaaattatacatttttaaaatattattaaactaaaaatcaattaaggattaataaaattttgtaaaactaaattacaaaaaattatttttttttggcaaattaattacatatgtagcattaacatgacactgatgtgtcaactagctaagcagtcatgtcattattttgtttgctacatgtgatatagaatgactaatttgttaaatagttatttaaggttattttaatcttttcttttattttagttttttatattagttgcctatataaagttttcttattggttgtatttttatacttttgattttgcaattgaatcacaccctaattaattctctgcatctcttctttatagattatttctcttcacaaatatttatcatggcattagagcaaggtttatgatagtaaatttcttaagtgtaatcacagcttttgcgggcgtccgtacaatcgtcatccatacagttcgacattctaattttcagtattgatttcttcgagttttttcttttggtattgatttttgcagcacaattttgaattttcatcagtt

SEQ ID NO: 199400 - DNA, 1001 bp, Cannabis indica
aatttatttaagtacaactgtacaaatcccaagtaagataagaatccaagggatgaagggagcataattaataagtttaagaataatactttggcattcactcaaagggaaccttatcaaaaccaagaagcctacattgaatcactgcttgtcgcaaagcaagagcctccataattctggctcgaaaaagcctgaaaccttccactccgccaaatcgccgatgccaatctggcctcattcctgaccaccgtacccaaaccgcccgtcccttaacattatcaagaacagcatccatagttatcttggaaaagtggcagatggcaacgaagtggattatattgtcacttggataagttaccttttcatgaatcattttgtttattctaaaccacaccctccaaagaaataactaataactcaactatatatctagatattaatgaagcaactaaattaattgtcttttgtccaaatcagaccgaaatcaccatatttttatgcattaagaatatgtacaaatttgattttaattataaattatattagcacccaaagcataacccatcctttttctttaagaataaaaataaataaataaataaatacccatcctgtaatctatttccttttttttttagttccaccaattgctcaggccaggtgacaaaattacaggctacatatccaaaaccaagcacatattcttctggccgaatgggcaacatagattgacaagcatcggctttcatgtacaattctacttaatttcttctttcaaaatgatctttcaaataaatggcaactacatactacacagacaggttatacaaatcctgaaaatatacgggatctgtctaggtgaaaagtacaactacaaattatgtaggcctcattttgattgacatcagcaaagatcttgtgtgtatccgcatttgttttgtgtcggtcaagacaaatcgttagatgtatcttcgtcctcagcaactgtaacaatctgctta

SEQ ID NO: 199401 - DNA, 2920 bp, Cannabis indica
atgatcaaaagttcttagttataataagagcaaaaagactatattttagtgtaacgtctacattttcaaaaattccattttggatttcatttttgctatatagaaaaaaaagagttaaaaatttacgatccttaagtccagtcaagttctagatttgtgagttttgggtcggtcgggccttgaacgaggctcttaagtttatctatcagtgtttgcaccaatagatcaacttaacctatctgttgatcgacctgtatcacatgaggatctcttagaacttggttaggtacatagtaatctgtattatttggctgaacggtaggaggaatttcctgtttgtctaatcttcttctacgattcatatcattcctgagatcgtgcacgctgcctaatcggtcaaagactgatttgcccagaggccatcgtgcttgggtattgtgagcaaggggttggctcgtctaccgtgtggtccatagtttgactctgtggcctcggattggacaacccattaacgtgtgtttagctggacgcccttctggcccgtgttgtggcccaatgggaatgtaagcatctgctactacctgttggccaatgacttgataggctctcctgattaatatcacgacctacatggaacgattgtcaatcacttcttgttgggctttcatgattttcatctctcgatccctccactctttgaactatcgtctttattcttcaaaagaaaaatttatagctactctagtatcttgctaatcgtaatgaagagtgttattgtagcctcatattttccctattgcagctcgtacgttctgtagtttggtgtcgtcaccgattgacctttaaaaatttgtagcagatggaattccagtatcgagggcattttgcttggtccgagtactagttgttccagtttcttgcacacatggagtgaacccagccagaggggtagtcactccttatcctactatttgtgggcttgttggtggctgaggattagtcgaatcggggtctgtcctggctcgatctctggggtttgtaggtgtctgcacgtttggatctatagccattagatttgtagtgttagtttgatttttcctccgtgttgttacaaccattttgggtcctgaaaatacttaaaacaaaaacatgtgtttctttgctctcaatgaaagtaccaaaatattgaccttatttttagccaacgacaatgaatcaaattaaagcgatttaagaatgattaaaataataaatataaataatgtaaaataaaaagaacaccagaattatagaagttcattttcttgatgatggtaatggcctactcccttttagttgtattagcttgtgagtagatgaataagaagaccttgatctctcatgaaagctcttacaaggatctctgagtattttactcttaaatctagatttctttaaatgaaatttgtgtccctaaatagtgagatgattccacaatttatagggattaattacatcaaattagtttcccaaaatcaataaggaataaaatgagaaatctgtttacttcctacaattacaataatcaaaatggaaaactaagtaggttttcttttttcttcattactacgatctatcccatgaatttaaggatattgtcgtgtcttacaagcttgataatatataggatatatctctgaagatattcaactcgtgacatctggttggtatatgtgaactgccttcatgatggagttgatcagatgttcttgtacaccttgttcaaaagttcaactccttctcactctaagcattagatctttatgcacggttccttgcgagagaaatcttctgcccgagtcacaaaatctggcccatgtgtcaccgagatggatgccacatcaccctgtatagaattttggataacagtctcgcttttagccgataacgctaagtccattaaagcgataagaattaataatttaacaataagaacacagagatttatagaggtttgaccatgtgattattataatagcctactcccttttagttgtattgttatggataattaataagatcacaagaagttggctaagtaagtttcttaagaattctcaagaaagcttacaattcttttacagcataagaactcttctaaaaaatatgatctcggatccctgaacaatggaataattccattatttataggaaaaaaattatatcaatttagtttcccaaaataaataagaaataaaaggagaaatttggttactttcctattttacaacaacatcgtgtgaaaattctactgaaatagatattcaattgacaaatgaaaaaggaaagtatcattaaagctttgcttcagccgcatttatcctgttcgaattagaagctgctcagacaatttcattcaccctgtgcggatgttccatactaatctttagataagttatttctggataataaatcactctaaacgacataccgaggaccgcactatccgtctgagtcttaaaatattctccacatgtcacagaaaaatatcacgtcactttgtgtagaaattggggtaacatatataataataaaaagatcttttgcgagtaaattatgaataatgtattttttttttattttaaaaatagcttttgaaaagtttttttttggaagaaactacaaatcctagcttcttccaaaatgacttttgaattaatttttttttaaattttattatccaaacacacttataaggatttttttaaaaaatttttaaaaagctaaaaaaagagcttatcaaagctaagtcaaacggtaataaaaattaaaaattaaaaaattcaggggagaatagatataggtaattgaaatgattttagaatgttataactaagaaacaatcagcgcttcgcgtccagttatattttatttaatgata

SEQ ID NO: 199402 - DNA, 1695 bp, Cannabis indica
tttagtttcaccaactccagcatcactaccaaatctcactacaaataccatttctctagttgaaaaaagaaaaaagttaatagtaaagagaaaagagaagatgagtagtggagaaggaaaggtggtgtgtgtgactggagcttcaggcttcatagcttcatggcttgtcaagctcttacttcaacatggttacactgtcaaagcctctgttcgtaatccaagttagttcactttttctttttttttcacttttgggcttcgaaccttggattggaacaaatgcttactaataagctttgtattgataagttctttcacttattaccaacatttttcaatttatgtatgaaaaaattctggctggctgaagaactcttgttttgatatgcagatgatttgaaaaagactaaacacttggttgaactagatggagctaaggaaagacttcatatgtttaaagcagatttaatggaagaagcctcttttgattctgctatcaatggatgtcatggtgttttttcatgttgcttctcctgtttttcagttatccaatgatccacaggtacacagtcatatatatatatatatatattcctatatataaatacatacacacatatattatactcactttagtaatgattcttgggttattttcaggctgaaataatagagccagcagtgaagggaacattgaatgttctgagatcatgtgttaaaagctccatctgtaaagaaagtgattataacatcttccatggctgcagttctaatcaatggcaaacctctaaaccctaatgtagtagttgatgagacttggttttctgatcctgttctttgtgaaaacatgaaggtgtgaattgttcttaacttttttgctttatcatttatataattcttaagcttattttacctcatctaacacaaaattggttttcctgtatacaaatttacatttctaattaggcctcaaatatttctaatgtattcttgcatcaaatttttagtgaatttttcctaatatacttacaaaatgggattaatttacaaaatttcatttccatactaaattccctaaagagcttaaaccaactgatctgtttttttctctggtcttacattttattttctttttcagatatggtatgcagcttcaaaagctagagctgagaaagctggttggaaatttgcaaaagagaatgggattgaattgatcaccattcatccaggagtaacacttggccctctcttgcagcccattatgaatgacagtgtcagtctcattatgaatctaacaaatggtacacatcatgtagttttgcaactaatacagttgatctattttcattttactttatttgtgtcttaagatttaagtgtaacttatttttataagcaggggctgagacatttcccaatagagtttattcatatcatgatgttagagatgttgctaaagcacatattcaagcatttgaaagcggatcagctagtggaagatatcttctaagtggatatattgcacacatttctgaccttttaaagattttacaacaactttacccttctctcaccattcctcaaaggtaattttattttatacttacatgttatttataaaatggccatttagttgatagtttgtagagatttatacaacatatttttgagtgtgtcaagaagattattttgctt

SEQ ID NO: 199403 - DNA, 974 bp, Cannabis indica
attgtaaacttggctacaataaatatttttttcatgccaaataataagactgttgttaaatggcattttagagtgtcataagtcatgatatattattattattagtacactttaataataggtcctacataatttaatatgaattcaacatgtaaaatcgagtattaaattgcaccaaaaaactaaggtatttttcttatatctataattgtatatctatcaaccaaaaaaaaaaaaggtggaacccttgaattacaagtgggctttcataaattcataattaatataattaatagattgattttttaggtattctttatcttattgtcaatcattaaaatctatggacccatttatatagttcaagttgaaggagtgaaattttttttagaggaaattacactgttataggattttaaaagttgtttggtacttttaagtttgattaatatacatggtattttttaggtatttttatggtatttgatatgtcacatatatgtaaattaggttttcaaaattcatatttaatgtttttatttgtttaggcagttttatttgtcattgttgtcagaaaagttgctagagtagctgtcggtaccagaaaaatcactggagtagctgcaggtgctgaaaaagtcaccggagtagctgcaggtactagaaaagtcattagagtagctgcaggtgtcggaaaaagtcgtcagagttacctgtcggcatcgagaaagtcgtcaaaattggcattatcatcgaaaaaattatcagaaaaatcaccaagaaatcatcaagaaactagtttcttgatgaagaaactactttcttagtatttttttcagtgattttatcggtgacaatactaattctgatgacttttctgacaccgacaacaactccggtgacttttttgacaccaacagctactcggacgactttttcgacaccgacaataaactccaaaaaagtcgtcagaa

SEQ ID NO: 199404 - DNA, 791 bp, Cannabis indica
taatacctgaaggaaggtgggttagaaggccattcattaacatagtcctgaagagggtggcaatggagtcttaagaagtctctccaattggatactttttcagtgtttacattaaaactggttgaaagtctagtggttttggtagggtcgtttgagtaaatcttcaacctttcatcctctggcatctgaaaaaactccttcgctatgctcaacattgtttctacaacctcctctgctattccatggttcttaacctgatcataaataataatatgtcatgtatttttcaacatcataattttataaatatatatatatatatatatatatacctgaaagaaaccgtcgagttgacaagcttggccaatttgttgaatgactttggagtggttggggccatggaggtcctgaagatcaatgagaggaatggagtgagcggcggaggtgtccagtgcggcgaggttagggcggtcggagattggtcggacatagtttgagggaacatgtttggctttggaagctaagtcggtaaggagtaggttacttgtgatagccatatatgattatgaagatgataattaattaattaattaattaaaccgactaatactttaatggagagaaactttgaaacttgtggatgtggtggtggaaaatgttgtagtgtgatgccaatttatagcgtcgtaaaagtgatgagattattatgtgtatatattttattagtactagtgacggtggaaccaacgagttggcaattggcacaaaaatctacaaaatgaaatcagttt

SEQ ID NO: 199405 - DNA, 1197 bp, Cannabis indica
aatgaaacatatttataacatatatggtcccgtttccaagttgagtttttcttcttttttattttatttgaaaaaaaaaagaagcaatgtcgttttcagcagtaagaatattctttggcagttatttccgaaaatgcccctagaccatgtgatgaagggaaggggtataactgtcaatggagtaatattagaagtacgaatgtgtacccgaggagtgtcagaagggaaatgataaagtgaccgacgtgtagtgtgggaaagtgacgggcaagaatgttgtcgtttttgtgaattcagtgggcgattccaattgggatttgggtgatcttttggagtggtccccactatatagggtctaggggtgagaggcacgtgaccattgtcccaccacgtggccccactttattggatttcgtggatgtgttgtctgtatccacgtagttgtagttgtagacttactaagcaatataccatacatccatgtgtggatgtatatatatacataatacatggcctctatatatgcataatgtaggtgtatattctctatattgattgcataattaattaagaaagtttttgttaatttgggaatttgttggaaaatttgcataaatgttatgttaaaaataaattaaatttgctatctcggggtgtctcccaactcgtactcaattgcgtacaaaacatgttcctatggatcctcactgtgtgttttgtaattctgatgaagaaatcatttttcaggttttggttggctgccattttgctcaatcatgttggcataggttgggtgtgagttacatttctctgcagaatctaccttcgtcgattggtttaaggcatttctgtcagggggtagagtggctttggtggatgagtagcatggggtatttggaaagatcgaaatgagcttctttggcaggggcgttcttctcaggctacggatgtggttcgagtggcaaggtcgtgtcattctagttggctgttggctcaagagaacagatttgaaccgctgttgtttgatgctctgttggtggtgcagtgtttgttgggtaaagccgcctcctggaaagctgaagatcaacacggatggggcgatttttgaggcaacaactcaatatggtacgagcatggtcattagggattgtcaggggagttaatcgaagctagttcctctttgcattgaggcttgtc

SEQ ID NO: 199406 - DNA, 1637 bp, Cannabis indica
ttagggcacaatgcccaacaaacccaacaaacaaaaatataaaagagtagtgttaacaacaaaataaacataatagaaaaaaaaaagtgaaacactacacactcatagcctcgcatttatacaagtgtgaaggtagtcttggagaagcaattgcttgtaatgggcttttcatgtaagtcaccattcctgggttttcactcaagtcaatatcatctggcttcattccatcagatgggctccaacaaaaatgatgcaacaaatgacccaacattgaagtaaccaagttaataccaagttgggctcccgggcaaacccgacgacctgccccgaacggtagtagcctataatcatgacccttcatgtcaacatcctcttcaaggaacctttcgggccgaaactcaagcgggtctttccacaccgcggggtcacgagcaacagcccaaacgttgacatggacaattgtaccctttagaatatcatagccaccaatcttgacgttatcgttagctttgtgtggaagcatgagtggtgttggagggtgcaaacgcattgcttccttcactatactttgcaagtaatgcaagtttgagaaatcattttcattcataactcgctccacaccgataactcgatctagttcctcatgcgccttttgttgcactcttggattcttgattacctcagccatagcccactcaactgatatggctgtagtgtccattccagctgtgatcatatcctgtctcaaataaattacaatttattagaaatttgatatttttctctccattttttataatattattgcactacaaatccattccagattctacataataaaaatcatgttaattaattagttatgattataaatatttactttatgtttatagtatgaataaatattaaataatatataattatgttgttgcatttttttttcacaaattaagttgttgcattttaaattaatataaagttataataactaagtccactcatttattgatattgacaaatttggatatttgaggcctaagagataaattataatttttatgattgtaactttaagccacgtggaggcaaggagggacatttccctctaaaaaataaatatttatatatttatatttcagtaaactacaacatgtataatagttagttatataatatgtatttttaattaaatatgatatttttattaagaagcggtagttttatttttatagtttttttttttttttgaaggaagttttatttttatagttaagatacttacatgcataattgggagttaatgttcaaatcccaacaatagtgttttcgttttaaatatttacactttattttctttaaaaaaaaaaaaaaacgtgaattctaaatttaaatattaccaataaacttatatttagaacattaatttaaaaactaatgctacatacacattttatgatatattaacgaagttaattaattgtaactcaattttaaaagagtaacaatacacacataaaagctacaatacacattttatgcacaataataaaagtataaaatgaaaaaaatcccaaatattaaattttgtttctttttattatgttgttgaaattaattatataaaaaatctagaatac

SEQ ID NO: 199407 - DNA, 1090 bp, Cannabis indica
tttttttatatatataaaataaaagataccatcctttaatatattatttgtattttggatgtttgtttatttttgcaagcaatatgttaattgaaagatcaacttcatataaggttaaggactaaaataatctcattaaagtaatatcatggtaaatcattttaaaacattttagtttaagtttcaattaatgttttttttttttcattttggttcgtaatgttaatgtgtgtaagacgataaaatttgttttataagatcagtatgattaattttattttataagatcgttatgattttattaagctttgttatgataaaatatttttcaaataacttcaattccacaagaggtattgtattggtttaagaaaatatggaatatcatagtgacactctcagcaaagaagattttattgataaattctaccatttccatcataaaattattggaatattttttttctaatatgaaaaatactacacatgtattaaatatttgatattaatccacttatttctattatttttttataaatgttttattgatgggacacaaacacaaattagaaattttcttttcttgtctagttttccaatatatttctttctcatgttgcaacttttagcatacctttaaatagataataatttttcttattggatagaagaaattcttctaaaaattgttattttaacctttaccatttaccaataataataataataataataataataataatccaacaactctaggaataaatatcccaacaacttttttgctttttttaataaccaacaactttttgttaggtttttttcttatattttaaaaatatctataaagaaaaagaaattattcatacactatttttaatttttttttttctaaatttacggtttgtagttgctccattaattttctggtagtttccatgtgagttgctatacggtatttaagttgctccgttagttactatagatgtttcttttaaaagtgtaaaaataaaaataataaaatataaaaaaaaaccctaaaaaatagacaaacataaatatattggatataataatcacactgaggaag

SEQ ID NO: 199408 - DNA, 540 bp, Cannabis indica
aaaataataaaatagtgctacattaagtgagctaaattatttctcattttaacatcaaacactattcataatttatatgtaaaggtaattttctatgtttttgggtttcttaaagtatttttcttaaattttttcttcatttttctatttttatctcaacattaataatttatttttaattttctctttcaatttttttttcttaatttaattaataaatagtatttaaaataggtgcttataagtaaattgtatagctaaagttaaggcctatttgataggtgcttatagattgtaaagacatttgttttgtggagtaacgaaaattttgattcagaaaaaaaaaaaatatttaagatataatattataatgttgtaaaaaaatataaaaagttagtgtatggcgtaattaatataacttatagcaataagtttctcacacacattagttaataaaattaagcaatgatcattaattaaagcaaaaattaatacattaatcagttatataacccaatatacattacttaattattctta

SEQ ID NO: 199409 - DNA, 671 bp, Cannabis indica
gcacgtcgcacgattcctttaaaaaagtatgataacactacctattaggcccgacgagtggtccacaaagttgtacataattatttaatttgtcattcattttgagatcatttggaaaattttgaaaactttagataaaatgagaataatatgagtgttttatttgtaccctaaaagtttataaaaacattctatttaataatttttattttataaaaaaaattacatgagcacctttaaaaggtgcaaaacttgtcgagctactcccgcaaactttgcgttagagttgctcttaaaaataatatttatatgtttattaccaataaaatagaccatttatattataactataaaagtgacacatgagtttgtaatataagtactcaatcttcgtttatttgtttttttttagaaaaaaagtcttatgttcaatgctgcaattatagatagactaaacctgcatttagcaagacaattttgttagttacagcaaaattcctcctcccatactttgtaaatttaagattgtcacaacgataaaaaaaaaatgcctttctacaaaagataataataatactaatacacacataaatagcattaataataagaataagtagaatttttatcctttcaactatgatatttataaaattgtatccttaaatttttct

SEQ ID NO: 199410 - DNA, 780 bp, Cannabis indica
tatcgtataccatcgtccaatatgaaaaaaaaaatcaaagaaatgcagattttattagaattcaatttttttactaaataataaacaaagaatacaaagaaaccataaattatttgaatagataacttaggatttaaatgaataatatcttttttaaaaaattaaccttcgatattcttggttcgtgattagggaattttgttggtggctcgaggtggttgggttgctttgtgagtggcgcgagggggactcggtgttgaaatttggtggtagttttgtgccatttcaatttagggaagaagaaagcgagagagaagagagatgagtgggggttttaaaataaggaggacattttttaaattttgagaaaattgacatattcccttaatatttcagtttaggagattaattagataatcaaattccctatcagatatgtctaaggcatatgatcgcgtcgaatggaatttcttagagactatgatagattgttttggatagaggaagaatggactaaaaacataatgaattgcgtgagatcggtttccttcttaattctcttgaatggctctatcaaaggtctctttcggcctacaaggggattaaggcaaggggatcccctctcgccttttctctttctcctatgctccgaagggctatcttgccttattcatgaagcggaaagggctggtcgcattcatggattaaggtcggtagcttggccaaaggctttcccgacctattttttgccgacgacagccttgtatttcttgaagctac

SEQ ID NO: 199411 - DNA, 1145 bp, Cannabis indica
ttttttttttttctttctaattgttgtaaacaacttagttagtctattgttgttgagcaaagcaatatctgcatgtaattgactatgtctgatttagctattaatggaaatttacatttacctttctaaaaaataaaaaaaaaaaaaaaataagtgtggcaaaaggttatgtgaatttggcatccctacttagatataaatatttttaagaaaattttatttgcactctataaaatgaaaaatcatcctaatattaaaaaataagtaacttattttactagttcatttcaccaacatagagtaaataagttccaacataaagtaagggtgtgatttctagttcattgaatagaagttgtggattaaatgataggtttttagtagtagattaaggtttttgcatatttaatttttgtataaaactcatttgagtattgtggaataaagtttatatctgtttgtggaatctaattttagggtatttttttaactgagttgtgggatatttgatttagagaaaatgacagtggtggtaatgatagatgtagctctaaataatttttctaatttttatttgatttaggaaaaatagtgatagtggtagtggtaaaagtggtatggtgatggtgataatagtggtgtgattgtaacagtgtgaggattgtggtcgtaataacattggacatgaaaaagaagaataacagaaaagaaaagaaaaaagaaataggagaaaaataaaaatttaataatgaactaataaaaatctgtcacgtatacatttgtgttgttagtcacattgtcatttaattgaccaaaatgtactaaatactaaaagtaaaaatggaactaaagtttgaagagttttaccctcaaaatttcaatgaaggggatagttgtaccaaactcaaaaatgtagatataactttataactttttgtggtgaaaaaaaaaataatttttttttatgcaaaattggttgagtggtttgtaaaaataaagtttatgaaaattttgatttgtaaaataactttataaaaaaatttattagcgaaataattatttatggtcagagaatgtgatcatcatggtcgcaaagtgtaaaataagtgagattattttacaagtatttaaaatggttagtttga

SEQ ID NO: 199412 - DNA, 551 bp, Cannabis indica
acaaacaataattttctctcctttcctttagattttatttgttttcaatattttctctctctcctattttcttttctctctaccaaaatcaaatatgattttttttttttaaaaaaaaaaacttaaaaagatagaataaatcatcataattaagaaagaatactataaaaaaattaaaaaactcatatataaattttacgtctagttataattaaaactagttttttatgaagaaactagtttcataataaaagagtgaaaaacgagtttttttaaaaaagaatcttcagtgagttttgctctaaccgattatcgtcaaatgagtaaaaatttaaaaattcatatataaattttttctatataattaaaaataattttatgatgtaaaaattaatttctaaatcatcgaaactagtttcttaatgaataatttttagtgagcaatttatctaaagattaaatatgagttttgaaaattaaatttacatgtaatatagtaaataccatgaagtttaaaaacaaaaaaaaaaaagtacataattaaaatagcc

SEQ ID NO: 199413 - DNA, 2230 bp, Cannabis indica
actgatattcaagccaaagaagctcaagcaagagttcagctcgatgattgccaaaatctactgtaacagtagctgttaaatgctaaactgcaccagcaagaacaggaagccaggtccaattatgctgccatttttaagaatttatttttttttttgcagcagaagcaaaactaaattgggcaaaagcgagagatgaaaactctgcattatttcacactagtatccgagaaagaaagagacacaatcaggttctcacagttgttaatgcagaaggggaaagagtagaggaaccaagtgacattattgagcctttcattcaatattatattggtctgttatgtttcaatatgcaggggaggaggccaatatagaagtgcatacttaaagaaggaaatctgttaacgaaaattcatgcaaatttccttatgaaagagtatacccgagaagaggtaaaggaggcaattttcgctattcctggtaacaaagctccaagaccagatggttttggtagctccttttaccagtaaaattggaaggttataggtaatgagatagttgatgctattatcagctttcttaaaacagggcagctgctgaaagaaatcaataacacagtcccaactcttgtgcccaagtcaaagtgccccaatacagtgaaggactataggcaaatagcatgttgtaatgtaatctacaaggcagccaccaagctaatttgttcgagacttaaatgtctattaccttacttggtttccaaagccagagaggatttgtgcaaggacacttctttgctcacaacataatgatatgtcaggatcttgttcgtcactgtgggaggaagatgacaaaggctagttgcataattaaattagatttgcaaaaagcttatgactcaattgaatggagctttattgaaaaaatattgtatggattgcactttcctaaataattcattcatctggtcatgatatgtattcgatcacctagattcttacggatgattaatgggtccttacatgggtactttgaagcaaaaggaggttgagcagggtgccaatgtctcatactctttgtactggtatggaatacctcacaaggatcatgaagaaagtagggcagaaatctgagttcatttttcatgatagatgcagagatctgaaactaaatcatctcatgtttgtagatgatgtgttactctactgcaatggatatttcaagagcatctactatctactacagggtctcaagattttctctcaaacatcgggtttgtaacctaatccttccaaatcggctatctattgtcatggtatgtcatccacagaagtgcaatggacacttgatgcattgggtttccaaagaggtgaagttctttcacttattttggtatccccatcagccacaaaagactctcatcaatggaatgaaccatcttgattgataaaatgaaacacaaaatcagatcatggagtactaggcacatctcttttgctggctgggctgttcttgtgaactcggctttgctagctatacacacctattggagccaagtaatgctactcccaaagaagattatcaaagagatagaaagtgtatgcaaagctttcctttggaaagggcagaaaatgatgtcaagagtagggcaaatagcatggaaaaatgtttgtcaagctaaaatagctggtggtattggctacaaaagagttgctgaatggaacaaagcggcaatgtttaaatatatttgggccataacaactaaagaagataacctatgggtaaaatagatctatagtgtatacatcaaagaggggaattggtggagttacctggctccccaacatggaagctggtattggaggaagactgtggaactaaaaggtatactcatgaacttaattaatccttctactttcacgcagactaaatacaaagttgcagaagggtataaaatactttgtcccatggttggtcgtgctaaatggagtaaggaattgtggaattgtggagtcgtttaaacacccctaaacatagcttcatgttttggcttgccattcaaaatagattgaagacaaaagaaatgctatttagattcaaaataggagtggattcagcatgccttatgtgtaatgggaatgttgaaacttgtgagcatcttttctttcagttctccttctcccttgattgcttaaaactaataaaaaaactggttggggtggcagaccaaagcaat

SEQ ID NO: 199414 - DNA, 879 bp, Cannabis indica
cgattatattatattatatatatatatatatacatattcagagaacaatgagcctgaaccctcaaacacaaccacattacccactccatcaaactcatcgtcttcaacctcgtcttcttcgtccaaaggaaacggtaacggccaagcttgcgccgcctgtaaataccagcgtagaaagtgtgcccctgattgtatattggctccttatttccctcacgacagccatagacaattcctcaacgcacacaagctcttcggtgtcagtaacattaccaaaatcatcaagaaactcgattcccctgccgccagagaacaagccatgcgaacaatcatattccagtccgatgcacgcgccgcccaccctgtcggcggttgcttccatatcattcaagaactcttgagaaagattgaagccacgaaagctgaactcgacctcgttaatcaagatctcgccgtctaccgcgccgccgccgcagccgccggcgtgccaccaccgccgcaggttcagcacgtggttgatcagaatttagttttgtataacgatgataattccatgtctaatttgcaacttcataatcatcatcaatttcttcattcgcacgttatgggtatggatgggtcagatcaattgcaggcttcacagtatgatcttgttcaggatgatgttagttcgtgggtcgtacaagattccggcattgatatgaagccttctactgaagaagcaggtcttgttgatgatcaagatcttcatcatcatgtcaaacctcttcttcaaattccatctgatgagaagattaatattgataatggggcagtacttgctgaacaccatcatcatcatgacccacggttggttttttcttcacattacatgttatt

SEQ ID NO: 199415 - DNA, 552 bp, Cannabis indica
ttttttttttgtatttttttcataccttctttacttgctaaatgcttacgaatttccaaaatgtgcatgaatttgtattaaacttatatttgatttctatttattgttaactgtagtatctgaaatgactttaaacagcctgactgtgtcattattaactggaaataagctctctggagctagcttcatcaagtggaaaaaaaacattaatattgctctcataggtgaaaactctttgtttgtgttaactgaagaagcacctgagcaaccaggtgagaatgcaaccaaaatagtaagagatagatatgagtgttggtagaatgctaagaataaagctcgtttatttatgctgtctagcatggttgataccttgaaaataagatttgataatactctcacggctgctcagatcatgaatcagttaactgaaaattttgggaaggcgctagatcaatcttgttttgatgcgaccaagaacttcatcaatgcacggataaaaccaaattagaatgtccatgaacacctactccagatggcgagttatttctagga

SEQ ID NO: 199416 - DNA, 1812 bp, Cannabis indica
gtgtatttttaaaataattcctatcctcaattaaaataagatatatatttatcaatctatttatactctataccctaaaataattaagtgtaccccttattatttttgtcctttttcttttcttaattgaaatcaaggtcatttggtgatcgagactattcattatcaataagccaagatattgatggaagtgtaactataagagaggaatgtgatgttttggaagtctttgccgttttgtaggggagagttggaatatttagatgataataattgattaagatagaagtatgtaaagactaaagagggaaaatatgaatttaataattaaaagagaggataagtagtcttatttcttacaatttttatatggtttttttggtgctcaatgctgtcataccgctattagtagggttgtctttactaggataaagtagttctacgaaactccccaagcttcctaatatcttttctttaagaaagttttcttaacaatagtccataattaaggtctctacaaaattgctagaaaaattagtttaaattttattttcatttttaaataaaatgcctttttgaaaatttgccctagccccaaataattagagaccgtcgattaaataaacattgaatctcatatattttagttggaaaataattgagttagcatggttaaatataagacatggtattttaatataccactcacccaaaaatattcttgcatttcaaaaaaatctctctctgactatgtaactaagtcttgtcgtctccattccgaagttctaaataatctacgagctcaaccaccctaaaatcttcacccatcgctcttttttctcattttttttaattttctaatttttttacgatatttaacaatgtacttacaattcacaagatattattttatggtagtgttaagcactactatactctattaatttgaatgctaaatgtatatagttggtctagtcatgatgacaaaggaagtttctatgaaaggtcacatgagtaatagcaaaaacccatgttagggattttgatctttaatttacaactagatgtgactgaaaatgggaattaaagatgatcattttcaatggggggctatataggctagtgtggtgtgtttatattttgtttgcttgctctttaaacgaatggttttgtttagatgaaaaagatgtttatattctgttttaaagggaaagaaaacaaatatatatatagatatatatgtgttgattgatgtgtttttggaataaaagaatgaatatgcatgcataatatgtatataatctacaagcttttaaattaatattggttaatttagagaaaaagttagattagatagatcccactaagcctaccactttatgtataatggaattaataaatgtacttacgtaattgtttgatattattaatgcatgcaactacaataatttggtatgttttttttttttaactatattaacaaatatcaatttcactagtgtaatatagttggtggaaatccttgtgtgatatagcttgcatagaaatataatttgcaagaaaaaaaaaacataataattgatatcgtaatttttccaaaaaatcaaataaaattgatatgtggtataataaagaggaattctcatttttttttagtttttaatgtatacgtttgtaaaatatgatattttattttctcaaaagatttattttatgggaaattttttttaaaaaaaaatagaaaatatatatatataaaaaaagtataagataatagttacctctctgattactcttacttaattttgtcat

SEQ ID NO: 199417 - DNA, 851 bp, Cannabis indica
tataatatacatacacatacatagacttcactgtacattgttatgatagagagtcaaagtttgcagttggaaaaattgagacactatcacaagctgtacaacatgtactttacaatatgaccaagctaccttccacttttcttttaataaagtaaaggatgctgttacaatatccattcctaaaaaaagtttattgaggcatcctctctattttggcattaatttttttatttttggcctgtcgaaattttgtgaaatatcctaaatgaataaaatgcaaaagattataaaaaaattgactaaaaaaattattccaaatgtggaaacaaatagtgctaaattggtgagtactttagtagatttagtgtgtattgtagaatttttctaaaataaatatgttatcatgaaaaaaaaattctaatgttaagtaaattgtcaacattagtgcagtcaaaatttaatgaagaaataaagaaaaagtatggaaactcattcattcaatttcacacaagtaaataatgtaattcccgttactatttattaataaaaatcaaatttagtgatgtttctctttcatacaaaaactggaaaaattcttcatatgtttgaaattgttattaccttacctgcattcttgtcaaagataatctataaaggtaggttgatttttttaatgtttaattttgggtagtgtgtttattttcttgggtgtccaaattaagtaggttatctattttggtttggcacatgcaaatcaaaatttaggtgtgaaagcggtggttttagaaaaaaacaagaagattattaacagttgatatgataaatgataatgatagagagagagagagaga

SEQ ID NO: 199418 - DNA, 819 bp, Cannabis indica
tttttaaaaaaataaatgatagtaatataattttgaatcaatcatatgatgaagagacgacgcacaatactttattagattgtttactttaaatgtccatattatttgacaatctcttaatattactaagtaaagttatacttagatgttatatattatcattcatgcatttctccgaggtactggtgctcaaagtcatacttatcatatatataaaagattaaaggttttttttttttttacactccaaaataggttttttcttttttttttttattaaattttacatagaaatttctattgcaactagcggtgcaacttgcaacaaaaaatcgtatagaaacccctattgcaactagcgatgcaaccactttagaaactcaatctgtaaatttgaaaaaacaaaaaaagttaaaaaaaaacagtatacaagataattctccaaaattaaatttaccatgtatatatataggaataagaatagtaaaatttaaaaattaaaacttattatgatgcctgcacggactcactactcaattaatatcttgattttctttgcacatacaaaataaattaaatacttttttttttgaaaaaaaacctgtatccattgcaaagagaattaaagttcaggatacaaattacaattaaaattttgatctttccaaaaaacttcctaatctaggcctaatgcaaacttcgcaagacgatgagcatcttcattgtgctctctagaaatatgcctaaaagtagcattaggaagagaagataggaagtttttaatgtccttggcaaatctgttcaatagtaagtgatgat

SEQ ID NO: 199419 - DNA, 854 bp, Cannabis indica
aatatgatcattgttctccttctctcttcttcctttgattcgtaatgttaatagatataacacttattaaaaaagttttaaaaagaattacatagttgaagagagtagaaagaacccaaaacccagatccccgatcggaacaatgtattatttcaaagtacaaacttcccaacttaaattaataaaccacaccgatcagtacatatcatgagttaaacatgggccggacgcttaagaggagtaactgctttctttatccgttcaaaagctgcttggagggtggtgagagatgtagcgtaagagattcggatgcagctatcgtctccaaacgcactccctggaacagctgcaacctgtaaagcaaggggataacctattagaaagaactgagagaagtagctatcttttttattattatttttcaaagcttcaccagcttaatctaaaactatcacttcactaatagtctaatatcaaggatttccattattagcttacctgccccttgtctagaaggtaacggcaaagagactccgaatcatctattcttccaaatccttcagcctctgctccgtagtaagagctgaaatcaatgaagagatagaaagctcccttgggttctgcaattttaacaccctccatcttaccaaagctttggaccaagaaatcacgccgctctctgaatgctttcaccattacagctactcctccccaccagcataacccagtcctaaggcagcaacagccgctttctgtgatatactacaagcaccggatgtgaactacaagaataaaaatgaaattagtccagtctctctgcactcttctaattcatcccagtctctacctacttg

SEQ ID NO: 199420 - DNA, 918 bp, Cannabis indica
tcaaattaagttcaaacttatgatgactacaacaggaggatgttgttaaaccatcattccacttaaatttagctatttatttattattttgaattatattaaatgtataactaagcccactctaaaatctaatcttgggtccgccactgatcggtggtgactaacagtaccatctagagataacacttttcaattaatttatataagattcaatatttaattgtactaataatagacatcttaatattaaagaattaattattttcaaattattaattgttatgtataaaaaataataacaattagatatgataattaataaagtggaaattaattgtttgtacgtgaatgaatgtggatggattagaggaagcatatgatgaggaggtaaggtagcagcctagcacaataaagttgatgccacgtggatgggttagacctttattttggaactttatttcatgaaagggagttaaatatccactaatcatctgccacgtgtatcattacccattgaaaagttgcagcgtcaaatagcttttactgcattaattttctttctcaaaacattatgtttgaccttacttttcatttatatgagaaagtgctatatatctaatttgattagtaatggtccaacaaagcttcaaattcagaatattccttgggtatctcactctatatatatagtatagtataaataattataaaattatatatatatatatggcgtatgatcgatgtgtacatatatatatgcatgtatttaaataaattattaatattagcaacaaataattccttcaatatatattatcttgtaacacctcctgtgatatataaatattttcttagcttgggaaaaagaagtagtcatttttatgtgaaacttgttatttaaaactaagggagtttaat

SEQ ID NO: 199421 - DNA, 1722 bp, Cannabis indica
aaacgatcagctaatgtggtagccaatgtgcccaactgaaatatgtaacatgggtaactattagaggcatccatttaattgattcagaggacaaaatctttttcttagaggtgatataacattagtgaaggtgggacaacttatgagtattgtccagaatcttaggtgaattgaaggtgacgattatgagagttgatctactcactactaggggaaatgagatcgagtggcatgagttaaaccctagtaattgagatataatcggggctagaagcgtataacagaatgttaggtagagcagtggtgtcgttaagatagagaagattatccgaattgcccataataatacggtgatggtggaaaatacttttaaatttgatcgaatggtcaatctactatacgagataaccattgaaatcttgagaaaatattatcttattagacaatgataaaaatattgttttattagacaatgataaaaaggttgtatcattagacaatgatgaaaaaggtcatcttattgggtagttagtgggcatgcattcaagttgtcagtgaatgtcggttatcttattagataacagagataattattttattaaacaataaattgtataatcaaatgttgtttgagatcgagagtaaatgactaggtataaaggtagtgttgactgcgaaagagtagaagtaaattgaaaccatacagtgaacttatagtggtaattatgtgaaaagaatacaagaatcccaggttttgattggttagcactggtattgggagactcattataagttagtatggtagcttataccaagtgattatcagtggaacaaagaatgtacatgagatacattttagatgaattcagaagattatcaaaatcactaccatcactaccaaaagcaagaaagagacttcaagatcaaggaacaatctctgattaattgttattacttaaggaatcaagaaatgaatactctcaatttagctatgggtacttagtatgagtaatattacctctatcgtatacgttgaatcaattaactttataacagttgtgacatgtaaatgattgcaaaatttaaaagttacatcagtttaagaggaattgatacaagttgaaataagttgagatgaacaagattcaagttgacatccagataggaactcctcaaggttaagtaaacaatatagacaaggaattgtaaaaggtcaatgaagggaatgattgaaattagattttaattaatgaagggataaaagtaggaaatacaattaggaacgacaagggcgcaccttcttttcgataacccactatgagcttactttagagttaagcgcacttaatttggagtaatctcagtataggaaatcttctaagaagttatctcagaaagcatacaagtgaggacaaagtatactagaaagattcatattggaatgcaagaccagttaccgttccaggaattatcaagaggaaaatgtattaaagagtaaagatcaacaaggcatcgagatgagtatattagtggctagacataaggactgctaattggatatgtatcagaggcaaatattcaacttgtcaataagacgaatcaatatatcaacaactagcaagatcatattaacttagaagattccacaagaagaataaaaagaaataattatggattatgtattaagattttagaagactatgggattttatgattttgacc

SEQ ID NO: 199422 - DNA, 854 bp, Cannabis indica
ttttttttttaatttttggaggtgtgttagggtcaatattgtggatcgattaattaacaaataacaacaaaagctactgagatcgacatagactttgtaaacaatcagtaatatatttcaataaaaaaaaacagtaataaatagaataaatatgaccaacaaaagttgtgcatattaaaagttccaacaaaataaatatgaccaataattaaaaaaaaaaatcaaatctcaattcttatccaataaataataaattattaagtcacttaaaataacaatattatcatacaatattatacatgcatgaaaaagagtttgtaggaattaatttagggcaacgccacgggtggcaccaccaccgcgggctggtgctggggctggggctggggccggagccacctatcaaaggatgctgcaaccggggctggagtaagaagtgtggctgacggcgacgagttggcaatcgttgcagtatggagggagaattatgataattttgggttgttctattggcttgggtggtccaacacttacaatagtagcacattttccagccttttttatttgtttgactatcataactgggtcaacatctcccaccaccgttactgtccccttttctggatcaaccccaacttcgtttatccctatatataaatttaaattaaattaaacatttatttattttcaaaattatatgtatatatatttatacttaattaccttcaagcttggtgaccgatgttagtacttccttcttgcacttttcacagaagatgtttacattcaacacgattttctgaaaatatattcgaaaaattaaagagacacaaaataattaatataaatatata

SEQ ID NO: 199423 - DNA, 1153 bp, Cannabis indica
agtcacactgagcataagtaacaaatgtaccagaaataaacctttcaaaaataattcagtttcctagggttccaactacggagcacagcgagcaaattgggtggtctgcgcagttttttatttggcggatttttaaaagtgcaacccataaccccatttaagcagcggttttgggtggattattgggaggattggattaaatgaaattaatgattaagaaagaaaaaagttgtaaattttataatctattagtttgttaaatctgtaaaagaaaaaaaaaaatatgtggttcattcacaacaaaataatccatccttcaagcatctttcttaaatgaagattttgttttaatgtaagaaattgataatacaaaacatataccagagtaaaataaaaagaatatgctaagaccaacttgcatggtcttttttaaccaaaaatatagctacaacaattttattattttgcatgaagaatgcattttaacattcaagtaatcataatagcccatcctgatctgataagaataatggattagaagatcacttttagatcaaagatgatattagaaagaagaagaatgaagggttgcaaataagaaaaataatctgttaaagataaccaagaaaagaaaaagtttgagaaacaagataaactaaactaaaactaagtagaagaacaagacagaaaaagaaatcaatacacgaataaaacaacccaaattagaatatcagatagaaccaaatcaacatttaggagtcaaagtaaatggaatctgtcccaaaaacattgaaaaaaagcaaatttgatcggtgaatacacaaaggaaactactattacaacaatataataccaatgctatggaattaagcaaccaaaacctttacagggtactacaaagtgcttcagaaggtagtttactcattaaaatcaatacacaaataaatataacccaaattagaatatcagatagaaccaaatcaacatttaggagccaaagtaaatggaatctgtcccaaaaaaattaaaaaaaaaatgcaattttgatcagtgaacacgcaaaggaaactactattacaacaatataataccaatgctatggaattaagtaaccaaaacctaaattacacggtaatatttacagggtactaca

SEQ ID NO: 199424 - DNA, 983 bp, Cannabis indica
ataaattttaacaatattttataagtaaattattaaaatttaaatatttacttataaataaaaataattttagttttatattatttttaataattttaattataaaattataatattcaatgttatatttaaattttattattattttaatttatttataattgataaatacatatatattaataaggtgtctacacatttggtaccatgtattttatcaatgtggaatttgatcctctaaaccaacttattatccaactcacttaaaccaactaactttctgttatgttagttagttagttggtgctatcattgtttgagttggggcctatatataagtctagtcttttcactttaagatatggttgaagagagagaagaagagagaggattagagagagttgcttagggttctaagctgagagttctgttcttgaagagggtcaagaacaaggggtgtactcgggttggtagagagaaaactgtgactgttttctctggtgtgtgtcgagtaccaacagggctgtgattgctctgattcttgtaatcgttttgatactctcttattcacatattaatgaagcattggtgatgtttctcagctggagtatggccagggatcatgttgatctcaaggaccggaaccaggataaaatcttgtgttgttctttgattgatttctggtttgattcattgtgttgattaattggtttatgtttatttttactgtccaagttgtgagtttattgcaggttttaatattgaatccttaatgttattttcgctggaattacaacaatcaaaatataagttaggtaccttgtcttttcaataatatttatttggtactctttattttaaaattatacatatttgatactctaaatttaaattttttgataaaattttatcaatacaatcaaactatctaaaattttatgaattctaaagtcaaatttaattatttgattacatacaattga

SEQ ID NO: 199425 - DNA, 953 bp, Cannabis indica
ttttctttttctttttcttatggcaacttcaatttctgctactgggtttaaaggtggtttgagctcttcttttcatggaagttggggtacttcaatggctggtgaagattacactatgttggttaaatcagtaccaacctatgttcgagttgggaggaagccaatcaggtctcaaccaatgatgaagaacatcaatgaaggaaaaggtctctttgccccaattgttgttgtggcacgtgatgttattggcaagaaaaggttcaatcaacttaggggtaaagctattgctttgcactcacaggtatgagaaaatatgagaatttttagttagcaattgacatatctgttataaagttttgaccttttttttgtatgtaatttgtaatttgtcccaaagatttggtttttatattagttgtttattcttataattctcaggtaattactgagttttgcaaagctataggtgctgatgcaaaacaaagacaagggcttattcgtttggccaagaaaaatggagagaggctagggtttcttgcatgatgagcttgaattctttggttggctttggtgccatgctgagaaagttcatgttgtagataatgtgataatctgattttgaagtcagaaaccaatctctctttctcactctcttatattctctttctcattcttcagtttctttagattgtaatattttctctcagaccaaattacttaatgataattcaagataattagtacaagatcgactcaaaatacagagcttatgaaaatatctttccttttttacagtgagttcactgcttaattttggcaactgagccacaatttttattgttcattgggaaaaattgtaagaatgtgaatatttacaactaacataacaaatgatcttacttgatggtggtcttttttttttccttttagtcaaagaagcaatgaaataatta

SEQ ID NO: 199426 - DNA, 1967 bp, Cannabis indica
ggacacttgactgcctgctaggaagtgacgtgtatcaataaaaatttgggataacagaagctataaaatattagttgggttttgagggttgtttttcaatcactgcccaagggtatagtgggggatgggattttctatggagattttatgagaaggtttggttgttggggtattcacaaaattatattgatttagtgatcactgctgtagggtgtagtgcgtatagattgacctagatttatagcaaaatcaactgaagtctcagaagagaaacatagaattttatgtataaacttcataaggaatgaattttgcattggtctttaattgggaattctaacattctggctagtcattatgataagaaaggaggtcaatcttaccttaattggttagtgaatggttttcaacaagtttttcatgattgtgggtttttggatttagaattaaatgggtattaatacaattgggagagggataatagaaaagtttcatgggtggaagttcatttggataggaaggttatcaatcatgattggattactttattttctctagctaaattatttaatttggagacttcatcatcagatcatactccgttattgctagaatcgcacttcacaataactcttatgcaaatgtcaaaattatgattcaagaatgcttggataggtgatttaacacgcgaaaaaataattcaaaatgtttgggatactcatgtggggttatcatttcaagagaaaattcatttatgtggagaagagcttcagaaatggggtaagtaagccactagaaaattcagagagcacatcaaggattgtaataagaagttaaatcagttaaagcaaagaactgatgaaaaaggtattcatttttatcaagagcaaaggaagattgaagtattttttttttgaaaagcctccaatcatcaggcctttgatatatcattatctagtgatcgagaaatgcaactcgatcaggagtcttgccccatcgagaggttttctaaaaacagtgatcaaaaaaattatggtcgtaggtcagagaccaaaatagtaaatacttccatgtcactgttagttttaggtgtaggaataatcagattatatcactcaaaggaaataatgaaaattgggtggattggtaaactagtttacctgatgctgtgctagattattttacaaatattttcaactttggagtctatgtgggaggaaatagtggagtttatgagtcttttcgattacaagtgattacaactttaaattaatcatgtcagtgttgtatgatgaggtaaagatggccctttttcaaatgcgtcctgaaaagcttctcgacctgatggaatggaccctactttttatcaaaaatattgggggtatcattggtagaggtgtagtttcagtggtttaattttttttttttcacttagaagtgtgttgacttcatttttagtcaacaacgtgcaattagtaaaacgataatacacataattaaggaataaagattgtcaaaaagttgtaaatgacaccaaatttatagaggtttggcccctaaatcggtaataacatactcctattttgttgtatttttttggagaataaaaagatcacatgaacctagtcaagttagtttcttggtatctctgaaggttacaaatattttggcaacacaatagctctctagagaatacagaattccctccctgaatagtgaatatgatccaatatttatagggaaaagatgtagcatatttatatttaattacagaataaagtatttaatatttgaatgagtcaatcccacaaaatcctctcatttctcctgattctcgcaatccctcaatgataggaatattgattggcctatttggaaggaaataagtgttggaatgaatttggacactttctctcgcgaggtatactggttggtcattttttgtgagatgattctttgattgttca

SEQ ID NO: 199427 - DNA, 918 bp, Cannabis indica
ctattgggagtacttgtacaatacaaataaataagcatgggaaattaataatgatgaaagaggtgtttattccactctacacaaaaaccaaaatggctgtacaaatttgatgtatcaatttgtcttgtcgattcatgacaaatatttatttgtttcaatatcgaaatcaagttggcatgctttattctttgtttaataatttttttgtgagatatatatatatatatatatgtttgctttattttcacctgctgccatgtgagattttgccccatttaatcattgaatatatattaatgggtaagtgtatagtacatttttttaaaagaaatattttgataaattctctaattgttttggtatttaggagagttttttagtttaatttttttattattatgtatgttatacttatttaagactacttataaatttttagaaaatttcaagtaatttacaatattaaaaataaaaacagtttttcatatacatgtggtaagtaactgtttaaacttttttttttcggcattgtaaactattcagaattttttaaaaatttataagtattcttaaataattacaacataggtactcggttattaaaaaatagactatttttttttaaaataccgaaatagataaagcgtctactaaaacaaccctttaaggtgatctactagaaaaatttcttatattaataaataatttagttttcttttttttttaaatgaaaaatacaaagttggaacctcttactctttcttgcttaataggtaaatattacagtttttgacgactaaactttctcaattatttttttacttacacttaatcttataagcttagtgaaaaatggttgatgaggtgaaaagtttaggtggaagaataaagagatatactataccattgaggataaaa

SEQ ID NO: 199428 - DNA, 1570 bp, Cannabis indica
atttacttttcttaatgtatctttgtaccatatttttaggaatctcaatgtttcagcacataatattgctagagatatatattatgacaagataagtagttagtttggagagcttacctcctttttctctgttgtaattgtaactttgtaccaattttccctgttttgtgtagttacaattactactcaaaaaaaaatctttacatgtatacactcgtggcactgaagtcaataatatatcagttattttcatgaatttgggtccaattctaagctataaaattcatatttctttcaacacaaactgtaaagttgttttgaattttattttcacaatgctcatcaaaataaaattgtaactcaaatggtttttaaatttcattcaagtgaaattaaatatgaggtttcttttcttaaacaaactcaatgtctctaaagaatacaagattcaaaaagttgaaactacgttcgatttgatttattttaaaggatatgtaagtaacctaattgttaagattaggtacaatcatactccacaaaaaaaaaaaaaaaaaaaaaaaaaaatactaaataaggtcattcacctcgacaattcccgaatgaggtcaatcacctcaacaaaaatttaaaatgaggtcattcacctcaaaattttcaaatgaggtcttttacctcaaaaatttcaagtgaggttttcttatcttaaaatgctaaatgaggtcattcactttaaaatgtcaaagtgaattaactttttataaagataattggaattaagtttgacttgattcctacaaaaagatacctaggcaacttagttgttaagattaagtacagtccacaataccacaaaattgtatacaacacaaatctcaaaattccataaaaggttatccacctaggattttttttcaactttttaaatgttaaagaattcctgaaaatggtcacgtaccagaattcttctatttaaattctaaaataccatactttgaactacaagtggcttgatctttcacaaaaaatatatgtaagtagctcaatcaactgcaattccaaattcactccaatttgctcaaaattatttcaaataattaaaatcatcataattgaaattaaaaggtgtttcatttaaataaaaggattgtaattaagaagttatcttataattttgaatgagtcgaacttaaattaattaaatcttatgctataatttaacataggtaaaattatactttgtatttatttaaatattttaaatgtaaaatttttacttaacaagaagttattccagcgtaacacttaacataccaaaatgaatagaaaagtggagaccaaaatggaattgaaatttggaaaattttaccctcaaattcagtgcaggaattgaatcaaaaaatttagttattagtctagcgatgtacacatacattttgacacaatgaggcaatatatatgcaacaactaggggtatttttatacagttctacaaaagtaacattgatattatagcaaaatttgtagcattgttcatcagatttcctcataacatggtcacagctacaatttt

SEQ ID NO: 199429 - DNA, 3315 bp, Cannabis indica
cttcttttactaaaaagaattgtatccatacacatttacatgtttctagagttcaaattaactactatattctagattaatctaatttagaaatcactaaaaattttaaataattttttctatacatacttgaaatattttagagtaattactattgtaaaaatgtataacaacttttaatgctcctccttagtacacattttggtaacttcaatcatgtatcgtagtaggtcgaatttttctcttggtagcgcctttgtaaaaatatctacaaacttttcttcagtcttacagtgcttgagctctatttctttgttaacttcaacttctccaatgaagtgatacttgatgcttatgtgctttgttttgttgtgaaatatgagatttttcgctttgctatagctgatttgctatcacaatagatatttgtagcttcttcttgtgattctctcatgtcttcaagtattcttttcaatcatatagcttggcttgtagtctttgctgctgcaatatattccacttcaactaatgattgtgcaacagttgcttatttctttgatgcccaaaaaaatatttctcatccaagtgcgaaagcatgtcccgatgtgctcttcatatcgtcaattgatcctgcccaatcactatctgtgtagccaattagttttgagtcacttgtaactctatactatatcgttaacccaaaatctttccctggtgacgtggacatcaatgtttgacacatgataggaaagataacatctcggagttgagcagagtcatagcggttgaccggtccctgtgcccaagttgactttgggaactcttgaatgggtgttcagattccaataagttgcttccaattgactatcttttagtattatgtaccatgaagacatgaagcaacaaagagtaggtcccaagagctgaaaatacacaaatcactcaaaaatcaacttgggcacctagggtttcacccagcacccaagttgacaaccctaacaagggtttcagtttctgagaccgtcttcgtgcaaataggtcaaagtttgtattaggacatgaactagacataccacgaacaaatttgaggaatcaaaatcaatttcagagaacttttatttttgagcacctggtgcctgggcacccaatgcccagattgacccaggttgacaatttgtcaacctgggccacttccaagcattggatcaaaattcaactcgcgcatcttctcttattcatcaaaaatagggaaataagtgcttttagggaagaaaaggaccaacctgggtgttagaacaaagtgaccagcacccacgttgacacctagtgctggcctagcaccaggttgacattttgtcaacctgggccgattctgatgagtttttctaaaaagtcttctgagaatatttcttgttttcatcaaagataaagagtcaactatttctggggaccaaatagaacttcaagttggcctgaaacttgacccagcgcccaggttgacacttgggactaggcttaacgcctaggttgacatattgtcaatatgggttatttcttatcaatttattgaaaaagtgttcggggtattttttccttcatcagaaataattaagatacaagtaagctcggggagaaaactacaattccaagggcctcaaaactgagctcaacgcccaggttgacttggtgttgggcctagcacccaagttgacaatgaacttagtacgttggtttcgatcattcaaatgctaattcaactctgagcattctccctaaaatggtcaaaaacagtgtaggagacctcatcctcgtgttttagaaccttggatgtatcaaaatgacatcctggaagctccaaaataagcacccatcactcaagttgacatatggcctggtgcgctgggatatacttattcgattttgattctgtcttgaccattcgtctagtttttcataataactgagagccataaagtaagaagagtaaaatttacaacttcatattttcacttttctgacaaggtgatttactttgaaacctggtagtttcgagtttcccatttctgcagaacaacaatatcttcgagaactagtgaccagctttgccagaacacagaaatggactaagtgatgtcaaaaatatcacttaggcataaaaaaatacatcactaggtgcattttcccactcgcccaacatccaggtcaacatcacatgtcaacctgggcgctaggcccaaatagccttcaataaaatggtcataactcactcaatattgatctgattgatgcaattaaacttgcattttaaagctattacaatgctctaccaagtcatgtgtcacacttcaatcacaatttagaagttatcgactccaaatttcactctcaagttagttacaaatttaagttatagcttacccgaagggagtcccacagacgtgactcaagatccaaaaattggcgatcaatctccaaagtaacttttcatatgatatcattatatttggtcaaaaatagcctaaatatatttgttttttcatattttttggattattttattacaatttaataggacctcctttccctataaagaagaattccacaagttcattttttaagttcaaaaaagtagacataaggttagagcatttctctttagtttatctctctagaaattagagtatcgagacttagttttttttataatcaatctcgtgagaaataaaactcgaagtagtagacgtagctctattactgtcgcgatacagggagtgaactattataaattccttctgtctctcatatatatacttaacttataattcattctcgccaatctagcgaacgggtgtggctcagagatctttgtccaaatttttgcgttaacaatttagtgctttcattgagagccacaactcaaggaagtcactaacaagatggttgtaacacgctcctcaagtattgaaacaagatccacaataattgaccagcaaactaggtgtaacgccctaaataattaggcacgctacccaaaatgcttatgaaaccctaatcccctaatcgggattactaattaaaatagcgcaaaatttaaacttttatattaaacagactgaaaaataaacttgtaatatatttaaacttttcaaaatagttgggatcccaaaaatatttacaaacttattacaagttctttcttactagccgacctaagcggcaaaacagaatacaaaagtcaacactgttagacccttaacccgcatggtctgatatggcttgaacatgtacattcttcatcttgctcctcaaactcat

SEQ ID NO: 199430 - DNA, 745 bp, Cannabis indica
acaatatatatttagccaaagaacgagtaacaaagaatagaagaatgactagcaaagtaaaatttttaaaaaaatatgtttaaaatctgctaatactaaatctaacgaagtagccaaaccccaaggccacagttcaaacactttcaagcaataagcttagagagaaagaggagaggagactgattatattaattagttcatcttatataaaacgaaatcattaatacaagaagaataaacatgccaccaaatcttactaataatttctgacaatgcataatagctaaagaatgagtaataatattattagatctagaatagaaaggaagactaacagaataaattcaaaaaagttatgttaatactaaacctaacaaaataaccaaagaaaactggttattaaatttcaaaaacacattcaaacaatcaaatttaaaaaaatacattctcaaaattatcattttttaaagctaaaacttatacctttttaagaaataaagtatccaaaatatggtaaaccaaaaccaattaccatcatctataaacggcatctatattagaaaagaaataaagtacaatttatttaattttctaaataaaataagaaatataggagatattattttggtcttttcataattccaaaatccaccactatataaatactgtgccctacttcattaacttctcttttatcttcctctctctctctcggtccaaactcagatccagggtttatcccgag

SEQ ID NO: 199431 - DNA, 2587 bp, Cannabis indica
acaactcataataaaaagtgtttgagtggggttattgctatgttgtagttatttttcgtttctccctcgaagccttatttctcatttctccgtctcttatgctcaacccatgaacttccacaactaagccaacctccgaccgtgtacctccatgatctccatcctctcatgcttcatcgatataccctgattcctatttattctcatgatcagtagtcgttttgctatgttcctttgttatttatttcactaactgagtcttcttcatttatgaattttaataatcaaagatatgagttccatactagctttattggagatgaagagagtgatccatacttttactgagactgatctcaatcatcctaaccaaaacacaaaattctttttagttgcttgttgtctatgtaatgtcatcaatcccaaaacctttattaagaaaatgggagatttttggactaacaaatgttggtttgaaattcatctttgaaatgcactctaatttatttttattaactcttggttgtccagtgtataagcacaggattctcgatggtgaaccttggcccttcaacaacaatctcgttgttttacactcaccaattgttctgcttaatgtctttaaggcagagttacatagagttcagttctgggttcagactcatcgactcccatttttaagtaaatctcgggctcttgctaaaaaggttgaagaatggattggagaatacattaacgttcatgaggaccctcttcatgaaggatggggccctttcatttgtactagatattagattgatatcaatcaaccaatcatgagaggaaaatcggtcaatctccctaagattcgggatgaacattggttagaattttgttacgaaaatcttcctatcttttacttcatgtgtggtctattgggacatcctttgaatgatgtgcttcgttccttgagttgattgacgatagaatcgatcctgaactcccatatggccctgaaatgattggtgaaagttgcctaagttggggtatgatcgatatcggaatgacttttctaaggccaatgcttaccctttcttaacctgcttgtaagaaaatccattagctcatctttccttcctttaatgtcacataacacttggctcttggttctactcctcatccatcacctctcacaaatgtttaatcttcctcaaaacatacctcaaacgactcgtttttaaggagtatagtacctgaatttccttcacctttcccatcatactaccaatcaaaatttccatcctttgctaatggttttctccctaatactaatgctgacattaactccatccataaccaatttaattcctattcctacacccatgttattactaacactattgccacttatcccccttctgatctccccattggtaactcaattggccttcagttttttgggtcgtttttttgtctacaaattacaaatgttgccattactattacaaaggcaaagggtagatcagttatcactatcattgttgccacatttacccctacctgatctccgcgttggcaactcatttggttatcaactttcggatttttcttgctaaagttcagatgttatcattactgctacaaagacaaaaggtaatcagttcaaattggtgaagttgatcataactatgggataataacacgattttcaaaaggtaagttgatcataataacttcaggaacatattgaaaaaatgtagaggcaataaacaaaagtgatttagcattgatggcaccctatctcaacaagtttcttctgtatcaatagattctactgagtcactgccatcctttccagtgggggctaccgataagaaaccctgctcacaaccatgaatatcataagctagaatgcattatgtcgcttgtgtttgcttgttcgtgagcaaactccccaactgctatttctcatggaaacaaaagcttctactagtgctcttaatcagtttaaacagtctttacattttagtaatggtttaaaagtttctcctgttggtttcaaaggaagaattatgtttattatgtcaagacaatgttgatgtatctttacgtttaatgaatacaaatcattttgattgttatgtgtcttatgatgatggccctagatggcatttctcgattgtttatggttttcctaaatcggttaataagaagaatacttgggctctgattaatcgtcttgatgatatttctccccttgatccttgaatgtttgttggtgatttgaatgaaattttttcacacactcacaaaaatagtgggccacttaggtaagacaatcagatgtgtgcttttcgaaccattttagaccgatgtttttatctgaactttcttttgttggtgatgactttacttgggctaaaaacaagaaaaatctgttgctttgaaagtataactggattggtgttttactaataaggtttatcctgacagcctctacttccaacactcacacatcttgaccattatggtttcagtaccaccaagaccttttagttaaggttatgtttctctaatgtcatccgaaccaacttgcaaaacatagatc

SEQ ID NO: 199432 - DNA, 2534 bp, Cannabis indica
aaataaaaatctgtaaaaatataaaaaaaataaaaaaatcgtaaaaatataataaaaaatggaatatgttattgtgtgccatgttgtgctttcataaaataaaatcaaacaaaatcaactaccataaccaagccaatgatctctctgccaaaattgccatgggaaaattacacagacaaacctttcattcatcttttaaaaagagttgcagacaagatatggtgcttttcaaaatcgtgcctttcttttcctagcagtgtattttgtgtctgcaggtacaacattccctcttcttctcatctgttccttcttcttcaatatccattccctgcccttcccttttttcgttattctttgctttttcctcggcctatgcctgtcagaaacacatacctgctaatgaataaactaattcaggccttaaatcacgagaccaaagattgtgcggtattttcgcatagagataagtagagcaagtggtgttctgtaaaagtttaccgtttgattttcttcatctccgctactttcgtcgtcttcagagcaactctctccatccacgcctttgccgtttggaacgcttgtgttaatggatggtgggccacaagtcagaacaaggtattctttccttttcttggcactgtttttaaaatgatttttactcaaatttagcagataataagcaaaaaggaaaaaactaagtttcttaatagtttaagcttgggtacctgtgaggaaaatcaacaaccacgccaccagcgaatccagcacgcatcgcataattcaaaattaacactcgttggtctatattttcaggatacacttgaaagactgctcgtgctccccttgctaaacatctgtatagagatccaaagaatgccctgaaaaaagtatttcagccaacaattacaaaaagatttagtagctagtaccttaaacagtaaaatgagaaaccaaagagaagtaattgacacaatattaattatgataagaatgagtcaaagagaaagagcaacatactttaatcttgctcttggttcgtgtgaggatttatcagcattgcacagccactgtaattcaacacacaatcgggaaaaataagtcagactgctatagaaattgtcttgtaatacatataaataaacgtctgaacagtactaataaaaatgtatgcttcgaagcttcgtgatacattccagatccaagggaaaaagagagagtgagggattcatatatgatatttcatcaactagttgagcatgaaaagattcaacaggtgaagatttaactataaaatcatatacttatcttgtagtagccattgccagtggaaaaaatatgtaataagagattcccatgaattgtgttgctataaacacgatgataaaagcaaacaaatagagccctttccccaatttaagtaaatgaacatctaaaattattcttcaccaaatgccacgattatgataagaaaaatgaagtcgactaacaaaaaaaaactaccaggagagaaaattcagtattaaatataaagcttcagctactctaataattattcctactcacagccattgtcatatgagcaaacaaattttaaagcaccaaataaaatgcagctctgcacactaaagctaacacaatgaattaagatttgagaagtcatacaagcttaatcaatcgtaagagcatagtcacgaaaagttaaatttgctagctgaatgaaattaaagcaacgacacaacaaccggcattttacatgtaaagaggagaggaaaaacaaatagtgaaagaatataaagtagacctgaatagcagagatacttatggccccatcaataactccagaccgaaatcccaatccctgaaacaagatccaatccagtagcttgtcattttacaagttgataaatgttatttctgttcttcatagtagtcattaagttgaaagttaatgtatcacaatatggaaaatgtgataagcacaatgagcatcatcttaggggtaaagaaattacctgacccatgtcaccaagtaatacatcaccttcaacctccctctccaacgcaacatctataatgtagaacaagattagagaaaatactataaatgtatatatgattaaaattcaaatcaaaataaccgagaatataagtttccacatactaagcattgaatcagagatatctaaaccgatccactcatgaccattctctgttagtgtctctccactaagtcctgacccgcaacctgaaattcaaacccatatgatatgtatgctattcttcaaatcgaaatttcaaagtaaatgcagaaatctgaaaatgggtcatttaccaatatccagaagcaacctgggaactccatcttcgggcaaggcaagaagttcgagagccctctccgtgagctctgattggattttgatgattcgagaagaagaggtgtacttcctagcttcattatcatcatagaatatctcaggtggcgcttggagttccggccgagatgacatgttgtttagagatgagcaaagaacaaa

SEQ ID NO: 199433 - DNA, 2361 bp, Cannabis indica
ctaccaacgtttaaatagagttatttttattcttagaattccaattttcttcgttgcatattgttaattgtttataataggatgacgagaaaaacaatactcttgtattggttgttgggaagtaaggtcgagtttcagaggtgataaaaactggtccctaatgtaataaaggtcagtgtacccttacagaactctgatttgtaagtaatgagggccgacttttcaataaataactgcgacaatatcctcctaataaaattgaaaaaaaaatatcacaattagacaggatattttgttggtattttttttttgaatgaaaataataattacaaactagcagcgcttaggcacacactactacaaaaatatcttatggtaagtgttgcctgttagaatgtaaaagatatgagtttaaataacacttctacaagtgttgccttatcatagtattttaaaatattacaaataacatatagcaacaccttaattaaaagtgatactatttaagaaattctaaatacaaatgcaacaacactttttatacaaacgttgctatatgtcatattattattttaattaattttttataaatattttctatctttatttttaaatatgctaaataatgcaatacaaaaagaaaaaaaagaaactaatcaaaatcatttttacgtaatattataataatatgtagtcacattataatgatattgcacaatctgctttataaagtaataaaacaaaattttcaataaattaacgtactcgaattataacaacaatattctttcaaaaaaattataacaacaatattgctaactataatcacatgttcacaaatgtattatttgtatgtggtcaaatatttgtaacagtgggatttctcttgaagattgggataattagtcaactgtgttctccactcacttcaaagttcaaaccatggaaatttgatccatgaagtctatgttgattgtatattgcaagaaataataaaagaatgatcaataaaatctggaagatagttgtgtttgaagtggaaaaagttcatttatcgaattctaaatgttaaacttcaaataaattcaacctcatcatgaaagaaaaaaaatgtcgtacaataattatattgatcaaatttatttcctaaaaataatcttcaaaattataagtttaaaatgaaaatattactaagaattgctcaaaagtttaaggtttaaagtttttgcatggatttcaaaaaaaaaaaaaaaattgatgctaaacacaacattgacttgaaagaatagtacaaaatattaatgtatactccaaaatatatctaagtatttttaggtggattcgtgaataaatgttaagaaaaaataatcgaacacaaaatatataaaatttttattgaaattatgatcaatttagaataaatataaatataaatattttatatttttttaatatgtatatgtattaattagtgggaattaccctgagaggaatgaagttttcatggagtttttctttttgtgcatgtagagtaagagagaagaaagtaaaaactgataattattataattgggagaagaaacacataattattagtgggaaagagaaaaaagtagtgggagaaggaaaaacaagtagtgggaaaagaaaaaataaaataagtcttttaattttttaaaaaatgtgttttacggttaattaattttataatcttatttaatttattaatttataattaaagaaaattaactaacaacgtttttttagaaaatgttaccttttaaaatattgaactaagagacaataacacttttattagaagtgttgttgtatgatgtttaatatattatttgaaaaaataatttgaaggggataaatctattgcaacacttaattattaagtgttcctaatttaaaaacataacatatttgcatcactttatttctaaatgttgccaaataagtgttgcaaaatatattttttctagtagtgacatatgctaacatgcttgtagtagcagaagaaggtaaaacatctgtccaaacattagatacttgggttaatctagcccacctagctaaacaaattagccactttattacaatttctaagataaaaaataaaagtctatggtattaaaattgctactgatccttaggatattatgaaccaagttccccagtccgttgtaaactctttccgttctttagagctttcacaaccgactgacaatcagctcctacccaaacatccaaacaagaccaacgcaaagccatatcaatatgcccaattgaatggcagcagtttctgccaacatcactgaaagaaacccagggataaactgagtttcagccgcaact

SEQ ID NO: 199434 - DNA, 754 bp, Cannabis indica
gagaaagcaaagtgacaattacatcattagtccaaaataaaagcaagcccccacttctacctaacctaggcatttccaaacccgaatcaaaatggagcttgtgcttaagattgtcaacagtattcttagccatcctagattccataataaataacatagtgggattacaaagataaactaaacgggagagattacggaatgcacgatcactcccaattccacgtgcattccagctgacaagtttcatggcggcgggcaggcctgctcggtggcaaggcctgcgcttccagatgaaatctctgtggtttgagggatgtcggagcgggaacgcttgatttgatgtaccatatacattcccattgtttgtttttaccatttcctctagataatctagatgtataactataggggctgccacgtcagctattatatattttaaaaaatgtttctcaacaagagggcaagaaagtgaatcatgaatatgtacattcaagttaattgtaatcaccgattttgtgtattaattttctaaaattgttgcttgattgtacgtcactccatctcatatttcgatttccatattagaaatagaattttattaaactccttaatttgtagttatagaaacatatgcagtgaaacaggataaaggattcgtcatattcatccctcgcactagaaaaaacacatgatcaaaacaaaacaaaacacatgatatttagaaacaataaagctacgtaacacgttgctcttg

SEQ ID NO: 199435 - DNA, 723 bp, Cannabis indica
ttatttttttttcccaatataatgttagaattaaatatatattttcttgcataaatctttttttttttaacaaccatcataaatgaaatttggtctatgaaaagaaaaattgtatatttttatttcttttgaaattctgtaaattttgctaaatatttttttatttttatttttcagtaatatcatcacaaaaccaaacaacattatttcagcccttcttcgccgctttcctctatcgttttcgtttagggctcaatccgtcgtcgttttgagcgtcgtaatcacgtcttataacagttttttttttctttttggtccctaataaatctaatttttatcatttagtgttctttaatttttatcctaaacggtgtcggttttctctttgaagcggaaatagggtattattattcttcgtcaaaaatacacacaccaattcttggactacaatctgagaaaacggcgtcgttgcggccatttacaaaattgtcttttccctcctctgatttctcgccggtcttccgttgccggaactattccggtgacctatttagggtttcttcttccaatccttcgctgtttccggtgacctatttaaggtatttgtttttcttatatatttttattttattattgaaaggctggcttcaatgggtttgattggtatgacatgggaaatatgggaattttgattggcttcaatgggagtgtatcaagcttgtt

SEQ ID NO: 199436 - DNA, 2220 bp, Cannabis indica
atcagaatcaacatcattcttctccaaatttggacctatattatcttcttcatcatcgtcgaattttgactcttcattatttttaccaaaattaatttgtatgaaaatcatgaaacaactattaacaactaaataacaaaaacaataaatgacatgaaattatcaaaataaaaacaacttaaaatgaaaaaacatacctcaacatgagacttgtcacaaaaataagtaaccattgtctttagttcaccaattacatccaacacacccttgaaattaaccttaacaaaatctctcaaaagagcaaagttatcacagtttattctgagaacaaataattttactgactttctctatcaaaatcttgaaattagaagaaccaacattagctgaagacttaactgacgcatgatcatcaataaaaatatcctcgaaaaaactatccagaggtaattgcttaaactcttcagaagtgggcctcaagttctgatcacttatagcacaataacatcaaaaaacaaacaaatacaaaaagtaaatttcattaaaaaaaaaagtaatagaaactataaaataactgcaagcaaactgaacacttacaatcttaagaggcaaataaaaaacctttaatgttaaatcttgtaaagctagagtacccttgccaagatcatcaccactgccccaattcaaaattctcagaatatgagaatgaagtcatttgccaaaatctcctaactttctcacacaacactcgtaaaatcacacctgaaaaacccaagggcaacccaataacctataccgaccttgataagcattaacacttatatgttcattctttttcttaacactgtgagcaacattacccttcaaagagtgcaatgtaagctcaaaagactctctaccccaagagtactcgtcctgtctaccactattaatattatcaatacacaaaatacaagatagcaacctttaaagctaaagcatcatcatccccccacatacaacctaaaataacaactttaacaaatttttgagtaatcggtttaacaccacgaaagtatgagtcaataatgtagtttgattcctaaacaaacttagatttgttacaatctctcatacaatccaaatcgcacaccatgaccacaaatatttgcccaaaattccttgacattcgactggtaggcctctcttaacaaaatatcatgaacaatttgagggtaaaatttaaaagacagaatgtctaaaaatttaccaaattatgtagactggaacatggccttcacattctgggaaagattctcattgagcttcctattcacttcatgattacaagtagacacaactttcgctttgtaatgatcaggaatttgcattcccattcttgaaagcaaacaaaaaaaagtaatgaaaaagtagaatgagaaaaatatatccaagcatcaatgataatacaactgttacgaaactacaagcaaaccactaagaatcaaaccatacacatttgttaggaattaggcctaataccaacaatgaacaatagaataataaaaataactaaaaaaaaaaaaaaacaataaataataagaaaaaaataaaaaaaatgtgaacatatatacataaaacaataaattaaaaaatagaacacaaacaatccaaaatacaaactaatatgtactaaaatgtttacataattgaaaaaacataaaaaaataaaaaaaaaaacatgaaaatcacaacaaaaactaaacccttaaatcaaattataacaataaaaccaacctaaaacaaaaataaataaaattttagggctaggagtaaaaataaaatgaaactacaaacaaaccttaggaaggacatctggttccttcattcttttctgatcgtcagatttggattaattttttcagacaaagaaaccttcgacttcttcttcacaggtcgacgatcacttttagcaacgaggggagcaaaatcagagtcatcatcatggattacttttccctttggacttattagcaactgatttaagacctattttgaaagcttttttcgcaatagagatagagaagcagaagaacggataatagtcattatatacacgaaatgaaagatgcaaaataaaaaaaaaaattgaatgaaaatggatcaggcaatagtataaaaaagttagagatggttattgctcgaaatggatatgatcgtggggaagaatgaattttttga

SEQ ID NO: 199437 - DNA, 3215 bp, Cannabis indica
ttttttcactcagcatgtgaccattgtagagctgagtcttctaaagcagaaatatactagtcaattaacctgcaccatacataagatttgagagatcaatcaaacttagcaaattaaaacccaactaaaactaactattttgccacaaaaaaaaaagtaacaaaactcaattaactaacaacaaaagataaaaaataatgatataaaataatagaaaaatttctcgaaaattgttaaaatataaataaaagcaagatttaaaacttatctgtaaaaattgataatagcactctttgaggttgtatccatgagcaaaacgagtcaacaacatactgcaaactagccaaaaatatgatacaaaaaccaaacaaaatggcacaaactaacccaaaaatatggcaccaactagccaaaaagtgaaacactatatccaaaagtactagagatcttatcttttattttttattttgatcaagaaaaagaaacttcattaatcgaacaaacaaattacaaactcaagcacttctcacaacaagatgtaaatatagattgtatatgcttaaagataggaaatgttctaaagtgaaagtagagttattacaaagattgatttgtaaccagagatcttatcttaaaataaaaagaaatagtaaaatcactaagatacctaaattaataaactaaaataaatttaaaaaatatttgattgataattaatataattttgacatctttttgggaagtcacttcccctcattttatcatgtagatgatttctcaggtcaccccctcgtggcctcgccttttcgctcttgtacctctcgtatttcgcgtccaaccgctgcgacagatctgccgtagacaaattatccccagaatcactaacaaaagtcattccatcttgattgacgaaatcactaggaagatccactcgtcttctaggcctaggaatcttcatcgatggtcctttcggtgcaaccctatctcgagggttagaagggcgtccaggctcgaaagcgtcagtggccttctgcatcctcgagggttgctcgactggtggcacatctttcgattgaggtttaggggcaattttttgcgagggtttgcctaccttgcctttacccttgtccatacgagggttcgcctaccttgcctttacccttgtccattcgagagttatgggttcctgcgttattctgctcacgggcttacccttcagtcatctcttccacagacggttccccgtctgtccaggtcaaaccattgaacttgttttgaagttgctcaatggtttctttcatcttagcagtaagcctttgttgttgctctagggtcgcctgtgttgccgctaactctttggttactcgtaccagactagggtcacgctcataatacaaaccatccttatagtatccatctttatagtagtcactatcatcgtcataatcttcagtattttggccatcttcatgaccttctacaacattttcattgttcacttcttgatttttcgccagtggtattcctttttgggttttctgtagcagctacgccccctccatcatttcccaccggtgcatcggctgcgcgagaggtaccttcctccataaccgtatctaacagagttcctttgccagtattgtttcgcgtcttcaccatgatctaaggacgattaacaccaccaagcttaatttcggctctcaatgaaagcaccaaaatgtataccgagttttttagaaactaaatagtttgagagattaaagaagatagcaagtaacgaataataaataagtagatttttatgtggtacatgcgttaatgatccttagtccacaagtctatattattagcctcaatgggcaagtgttttcaagattatgagatattacaatggaggttactttgtttcttttgttagagaaactgtatgtaaagaattgttccccttgccttaagaagaatgaggctatttataggcacacatggggtaaagggcataccctttacctacctagagtttcgtcttccacacgctactaaggtttgtactacaaaaggatgatctgaccattggatggtggcaaccttcttcatcgtgtggtgtacaacaactggtgaggactttcgtacaaccttggacatgtgtcgcgcagaggtctgtcctttgcgaaatagtctccacccaggcagttaggcaaaagcatactcgagggtgcgtacgcgcactaccacgatctggcacagtggacaagatctgattctgtatagaaaaagtaagctgacgtgtccaacgtctccaaaatccttaccgccttctgggatcctcaccgaaggatgttactcccggaggccatcgtctctcgttgcctcctagatcaagagttgtttcttttagttacctcgaatgacttatgtagtgaccatgttctcccattcgatcatgccacgtgtctaattgatgaaaacttggataacaattttaattataatcaaattattgcggcaatgaattgtatcaaacaactctagaaaatatacttggtccaactgttactttttgggaattttctcctacgttatagactttaagtggcaatcttattgtcatgggtatgaaagctatagttgtgttagttgtatacatgttatgttagttatgacagttattatagttacttagaattttagttggctttagagtaattatcaatctacattaattatcttgtgtacacctatataaatgggctatatggaggagagaggagcgtggttccttaagaaaaatgggggagaatatatatatatatatatatatatattaattaattacaatatatatttataattaaatgtggtgaatataaatataataataattttgacatatattggttaaattatctaatacatattatagaaatttaaatgcttaataaaaataatataaccccatcaactttagttctgggttggtctctgtatgcaagaaactaaaactataaatctagtcaaagaaattatgcattatagaaaataagtaattcggtataaaaggaaaatgtttcatttttctttcattttattatcagcattgtaattgtttatatgagtcgccatatgacgtgtacgggacagaagtggggtttgcacttagcgtagccgcgtctcttacaaagttgaactgaatttgttgttaattcttacatggagcg

SEQ ID NO: 199438 - DNA, 1132 bp, Cannabis indica
gacggtgacttttccgacgacgaagactttttcggcgacatttgatttttccggtgacttttctggcgtcgataactttttcggcgactttttcggttccggtgacttttccggaaaaacttattattgtttacaaatatgagatttccatctttttttataaaaatatggtataaaaaaaacccatataaatgtacaaaaacaaaaaatccataaccctttagctttatttatttatgccatacaaaaataaactcttaaaattttctcatatttagtgtaatttctacttataaatatatgataattttaattgaagtacttttgttaaaaaaataaaatataaacataatattttatatatttttacacaaaaaaaagaaagaaatttaaaaaaaaagttttaatttaataagttttcctccaatttaatatttgttctagcttcttcaattgagtctccaccccacaccatcttatcatgatcacattccatatctactataaatggatttgacatgtggatatagcttgtcttatatatatatatataaatatttaattaagttttttttgttttattttatcaatttaagaaattgtattgtatacccattttattttatctgttttaatttttatctttatattaatattttttaagatatattcacttttatatacgatgttatacccattaagttagtgtaaattaaatgctacacttaagagagaacaagtgtatattaaacaactcactcataaatattggtagattttaataaaatataatagaaaggtattttttattaatgaatataaagaatatgtatttctcaatttatctcatatttctaattaaaggtatatatggataagtatatatgtggcatttggtaattattttttttaactaattttcttgtttttaaaatttacaaaagtgtaaaatattttcaaaaaacacattttatataaaacaaattttattttttattttttaattaagaattcaaaatttaaaataaaaaagtcaagttttaatatatttttaaataatttttttcttaattcaatattttggacttccgaccagacccgaactaaaactccccccacgaccctggtgctg

SEQ ID NO: 199439 - DNA, 555 bp, Cannabis indica
actatatctctttcattacaattttacaattagattaatgtatattattttattttatttttgaatatgaatatgattaaataataaacctcaaagtcaccggaaagctcagactcaaggcgcttgataagatcctcttcatagagcctctcataagcttctctgatttgcttcctttgggttgcatttctatggcccaatatgttaatgatcaacttctcatcagttccccatcctattataaatatatataatattacccatttcaaaattaataataatactcacattaatataaaatgaatatacacatataaaacatatatataatattgttcaacctttacaagctttgtgaagaatttcagcgtcttcaattggagaagcattgtccatagcaattagtgttgccatattatagtgtattgagaagaaaaatagtttatagatatgtatgatatttattcttatatatgtgtatgaagtgagagtgtatatgtattcacttatttatatagggaggattgatgagtagtaagtgactatagtacccct

SEQ ID NO: 199440 - DNA, 786 bp, Cannabis indica
gtcgacgcaagcgggagaagaggatgagagcttggagcggtgaggagaagagagagtgagctctgatgatgttgttgaatgaaaaggtagatgggtttgaatgaggttgagatagagagtgcgtagctcaatccagtcgctttgccattactattatcattattgttgttgttatgaaaaagtgaagttgcagagaagaggaaagtggtgagcaataaatgggtatgagaagaagagaggaagccggtgacgatggagtgagcgtgaagttggtgaagttgtttgagagtattacagtgattcagtatcactctaccgacattgctgttattattattgttcatagaagtagctctgagcaaaatgaaaagaaaataaccttttgtttttggggttccctttcccattcccaccatggtttttcagtgcaaaactccatggatttttcatttttccttcaatcagttcattgattgaattgaagagcaaaatactgaaaacaaaagcgtggacggcaggattcgaacctgcgcgggcaaagcccacatgatttctagtcatgcccgataaccactccggcacgtccaccttgatgctacaatgctcgttatactttatataaacgtattttctagattttccctttaagttcattatatatatatatttttaagaaaataatattattttattttaaatattaattaggcaaataaaattgtatcatgtcaacaataaatacagtgtgtacacatagattgtttaacatgacagttaacaacaaaa

SEQ ID NO: 199441 - DNA, 992 bp, Cannabis indica
gaaggttcttcatctgggtgcaaattttgcaatgacttgcgcaggcgcaaccaagaacaacatcgtccaatccaaactccctttcattcttcccacccacttaaattatgtactgataaatttcaaacctttatatgcaactcttgccataaattgcatgaaaatattaatatgtattttacatgcgaacaatgtgatttcttcatggacgtaaaatgcatggttatgccccagccaacatggtacgatgaatttgaaagtgtaggtggaaagttcatacaacattctacacatcaacatcgtatgccacttattaaagacggagcaattaatgacgatgtcagttgctttgtctgtcgcttgaaatgttcaggtgaagtttgttatggttgcaaacgttgtgagtattttttgcatgaatcgtgtgcacaattaccacctcaaatttatggttcttcttttcataataaacaccttttattctttcatacttctaatcgtgcatttcgttcttgcaagtcttgcaacaaagaaaatctaatcttcacttatgaatgtcgtcaaggtgattgtattttatgtggggattgtgcctctacaattccacatggtgtaaagttcgattatcatgagcatcctctttacctccaccaaagcacagatgatgataatctaatgaagtgtgatgggtatgattcctattgcaaaaggcctaatctcaataattcagaggaaattaacggtacaaaatcgttaatattttggtgtgcaaaatgtgatttcaaagttcacatgctatgtgggttgttacctaaaattattaactatgactatcacatacattctcttgtactctttgatttggctttggaaaacgagtttggagaatacggttgtgatatttgcgaaggtaaaagagatccacgattttgtgcatacgtttgtgaagaatgcaagttcattgctcatgtgcattgtctaacttctcaggt

SEQ ID NO: 199442 - DNA, 2493 bp, Cannabis indica
gaaaaattataatgtcaagcttctatcaaactttagctatttcatatgtttttttagcttaatggatactattcaactaaatgtaaatatattattcataaagttaaatatattttgttatttatttttttttggtgtgatattatatattttatttttataaagtgaataaaaatataaaaaatataaggataaatagcagcataagtacccaaaattttatgtttgtaagcggcataaactcaatgtttatttttagcggcataagtacccaatgattgtaattttctttcaattttgtcagtacagactctgttttgaatttattaaaagaacatttggaagtaactgatactatatattactatctagacccgatgatcaaaaatttaggctttatatgtgccatgtttaagacaatatcagagtgtagactgacaaaattagaagaaaaattacagttttacaacgactaaaaataattattgggtttatgccactaattacaaagataaaattttgggtacttatgccactatttacccaaaatataatatttaaactagtgtatagtataatttaaaatttttaagtaaaatagataaagtaaagttttaaagaatagagtaaaaaattgtaagagtgacctaataagaatatgagtattgttattaggtataagtagtgcctagcatcttttagatgtatcgctttatgattggttagggatatttcttaaaaattattacattaaattatatgagactcaatacttaattagacccaataatactattgacacgaaaaaaaatcccaaacactagtgattaccttttaacatttttctaaaaaaaaaaacatatatatatatgtgcaaaataaataaggttggaatatttttgatgcataatttggtgggatgttatagtataagatagagtagtaaatgttaattacaattttttagtcaattttcacgtcttaaatcacatgtcaaaattatttttcttttcaaatttttttatagcagcatttgttatagttatagtattatttctgtaaatatttgaaaaattctgaatagtttacagtactgaaaacagagttcttgatatttaagtttaccgcgcattcaaaaaacttcaaacgtattttcgatactataaactattcgaaaatttttaaaaatttatagtgaagatgttgtaagcataacgaacacacctgtagaaaaaaaaaaaaattgaataaaaatatttcgacatatgttttcaagtgtgaaagttgattaagaaatggtaacggagaagttgacggtagtactagtctaatagtaatagtgtaacagtagtagtgtaagagtattgggaaggtaggtgagcgggcgcgcgtgccgtccggagcgggagagagttaagagtttgatgggtccggtcaggggggcaggggcagatgggggaaaacgacagaagatgttaggcatgggaatgggaagaaagggtgggagcgggcagttggggcagtggggaatgatcaggaccgtctgatgtgatcctgatcatcaaccaaatgaataagctttactagctagtcttcccctcgatcttcgggctgccccatctctttttctagctatgtctctatcaactctctttctttctttctttcagtttttttcttattagtactatatataagattcttttggcgcccaatgtttccaaaattctaatctatcctccacattttatttctttatttcttcttactatatagtttttacaatgaataagttaaatattattccaaatttatgtaataaattcttaaagaattattttggtagaagtttttatctgatttgatagttaggatagtttttagtctaattttattttcgatcgcatatgttttagctatttaaaattatttgtaaattttaaaattttttaaataatttacagtactgaaaataagatttaaacaattatttaatcactaccgcgtataaaaaaaatagttgcacgtacaataaaatacgtaaattttattttcggtattttaaacaattcgaaaatttttaaatatttacaggtaataattttaaataattataacgtataaggtgataatttttttttttattatatatcaaatagataagagttatgtcgaaacattcttggggtgtactacatttatcctatattatattgtctagctataatttaatttagggtatgtaaatatatatatataaataatatgagcccaattttgatcaattagccttaaaaaacataattaattcattatggttagacaaaattaatagcatgaacaagggagccagctcgatattgtaaccccctgcaaatatcacaaactttaacacaattactttctgactatatgcaaaattaattaccactatattatgattttttttttatttattttagttgtaaaaaggggggtctaattagaaaaggt

SEQ ID NO: 199443 - DNA, 775 bp, Cannabis indica
agtagggatggaaattgggtcgatagtaaatggggaatacaccccaatcccttccatgctccccatttatgcccccatctccggtctcaccccgccctgcttaatctttaatagattcggaatagggaaatccctattaagtatgggaacctatttggtacccataagaattaagaaaattttaacaataaaatattttaatgtaattcaaaataaaataatataaaaaaaaaaaaagagttcatgaattataaataaatattttatttaatagatattatttatactttatattttatattttgtaaaagataaataagcgagcactacaaaaaaaagaagtctatctcggcgagcctgatcctcagttattgatctatctcggcgggtttggtccgccataaatttaaatgaagagattggtggtgagtctatttcggcagtcctgaccctccatttttattggaggcaatctcagtgggcaaagcctgccagtaataatgatgcaatctcaatagtttatacttgtcgagataggtatatttttgtcctaatttaatattttttgacacctatctcgacgggcccgaccatccaatgttggtcaatctcggtgatttaaagagcccaccaaaatagtgtactggtggaaaaaaataataatttcccatactattacattgattgtatacaaaatttacaattcatatataatttacaaatatgttagataaattagcaataaacccaatatctatttctatataacatagaa

SEQ ID NO: 199444 - DNA, 623 bp, Cannabis indica
gttgtggcttacgacacacatcactttcttattgcttggatgagcttggaagcagtaaaaccatccttgtgtctgtctcccttttttgggacaaaaaagagttcataaaaaaataatatttcgatagggctgggagcaggccaacctcatggtttcaactgttacaaagctagtcctacaaaaactaagaaatttacaaagtaatcctgaagcgggagcatcgcgccagacatgagatgtgtttggctccatgcaccggaccctccatagttgtggttaggggtttttgtttcccgagccaagcagtggaaatgccttggtcctggggcctgattccattctcgtccacaatggtccttaagtgatggacacaagcatggacagtgtaactcctcaacttcctagtcggtagctctgtgtacataaggtgtgatcgggacaggaccctgcatcaccacatctagtggcaccacctgttgttgtgataccgcgtcttgagcaaaaatttgggcaggggctttagggtttgacatcctggcttgggagtgaagttctagaatttctttgtcaaaagcgttgaaattgtgcttgtgaagatccttcaagatgtcactcatctgaaa

SEQ ID NO: 199445 - DNA, 627 bp, Cannabis indica
ccctttaaatttgtggtacttgcccttagagtactcccatcaacttctcttctctatcatttaaaatacacactaaaatctcatattcttaatgttactttaattttatatattacactatacatcaaatttttttctataagatgtagagaaacatttgaaaaaaaaataaagatacaaactgaaaattttaaagaagcttttaaaagtgcttgtaggtatgagcggccaggccggggcaaaaggcataatcttattcctaatttgttctgcttatactttatttttaacttgtatttgttttctaatgtaattaaaaatatatatatttattaacaacatggttttacttttattattttacataatttgaaagtaaaaaaaaatatatttgtagtatagttcctctaaatgaaaaggttttcaaaagacttttcaggaaagttgttcacacacagaaacaggtcttggaaggctttcttgtcctttcgggaagggtcttcaagaagctagtccttctttggaaggggagtttcagatggctagctttttctcttggaaggtagttttggatagtcgactacagctggctttatcctattcggaagctccttcagtgagtgcctt

SEQ ID NO: 199446 - DNA, 937 bp, Cannabis indica
gaaatgataaaaaaaaaaaaaactcacctgcagattatttattccacactactataaattttaaacatattcacaccaaatatttgattggacaatttatccagtctaatgatgcatccaaattaagtggacctaattcttaaaactatataatgtaaaaaaataatgtttttgttttcagagtggcgtgtgactactcaggaaaaggcatagaattccacgttgagcgaggttcaaactcgaactactttgcgagcgcgattgtgttggaaggcggagatggtgaccttgcaggtgtggagttaaaggacgcttcatcccaaacatggcgacccatgcaacaatcatggggtgccatttggaaatttgacgctgcctcacagctccacccacctctctccttaaggctcacttcaggatattctggccgcactattgtcgccacagatgtaatccctcatggctggatgcctggtgccacttatacatcctacgttaatttttaatcctattatccttattattattattatcagaagctgaattgatcgtgtaatgatctgttgtataaaaggtcatgtgtaattctactgcttattaattataataattattatatgagaaatactaaaatgtactagctatcctatttaccatgtaaggtgttatattattatttatataattaagtatcatgttttacataacttaatataataattttataaaatataggtaatgatgtttaaggcatcattattagagcctaactatggatatttcctcttctttgtttgttatgatatgccccgtttgtgaagatgaatgtggtaatgggcgtattgatttttgaagttaacaacccataaaacaataactgaattgaaaagatgctttaaattgaccaaagactgaaatgtgagaaaagggtttgaga

SEQ ID NO: 199447 - DNA, 580 bp, Cannabis indica
agttagaggagttgggctaaatttcatgttttgggaatgttctttgggccttctctttacctttaatatgaaaacctttatgcaattttacaaactttttctccaaatataaaatgtcacacaaaattagattaaattagatatttcaactttaaataagttttataatttaaacactaacaatatactacactagtcatttaaaaagttatcgaaccacctatttatttatttattcaaataatagtttagaccctgtattgtgaaaaaatggaacatagtgatacgatgaactttattttggtcaaattttagtaaacataattttaaaacttcattttcttaaccgcaaaaattcaccgtccctaattataatgataggtagtttgatttaaaatatttggaataaaaaaatgataaaaatagagttaagtggtcagccccttatgtgggtccatcagtagttcgatttttgctatttttctcaatcattttattttttacaaatacgactcctttttgtactttcaatcctataaatgtcaaatctatgtattaaataattaaattaattatcaaa

SEQ ID NO: 199448 - DNA, 389 bp, Cannabis indica
aaaaaaaaaaataaataaactcatttatacacgtgtaagtaatcatgtatatcttattttctatactataaattaatataatcctaaataagtaccaggtcataaaaaagtaaaattaacaaactttttaaattacccaaacaaatagaaaatttaccaaagccccctcctatggaatatactaaactctaaagaaatctccaatacttgtttttgctgtgaaaaatttcgtccaaaaacaactaagtaattttatttaaggactaaagtatattttctttttgttttctctgtttggaaaatagaaattgaaaaccaaaaaaaccaataaaagacaacgcacactcacaccagtttgaaaagaaaaagtgtaggcacttcacttgcat

SEQ ID NO: 199449 - DNA, 1100 bp, Cannabis indica
ataacctaatcaaggccaaattgagacctttagaaaaaacggttcttcttaacctcagtagttccatgtctaaccttgagatgcttggtcgagtccttgtgaaaacccactaatcaactccctcgttcgtgtgaagctcaaactcgcatggtagtatcgggggtggaaaagacttatggcataatgataatgtttgagattgttgtcttatgggattgagccgcgaatggtgcacgaccatagatcatttcgtagatgaagacactatacgcccactagtccacaacattgttttgggacttatccttacaatttatttactaactgttgattgagatttttagcaactgttaattaagtatcagtaagaataatttagaaatcgatgagaattttttacgtgattgagacgttaatgagccttattccaccagtcacttttatcgagggttggaatgttccctagtttcaaagaacattcaatttacaacacacgaagttcaatatgttcgtaaatcctccaaaagtcccctttacatttactgtcttcaaatatttataggggagaatgagtttaaaggagaaaatggtacatatctgttttacctctagatactatctagtctttgtagtaggagtttagtgagacaagatttgtcttatatgtggctaatgtgaaagtgcagaatataactgtcactttatttacttaggcaaatgagttgtaagaatagcatggtcttttaatgatgttaatcttgcagtgaattatagtctcgtctataatgatatactttgaaatttgtgttatgcgaataattagatcccggatagcctatgatgtcggagctcgtgacttcccgaacggcaaaagtcatcattctcttaaccaccctcctaaaaggtgcgggactcctcctagatgtgtcttcacacttcatgattttaattagaggatttatacgacagtgaatattagtctcatagcaggtggactcctttgccatgtggtgcctcgtgtgctcgccacgttttttggtaaaaagtatgctcaaaatttacccccaagttccagcacatatattttgaggtgggacatg

SEQ ID NO: 199450 - DNA, 1186 bp, Cannabis indica
gactcttttttgattagttagaagaacatttagaagtaagtgatactatgtaatgtgtctagacccaatgatctagcaactgattttatatgtgccctatttaagataataattagaaaaaaaattacaattttacaaatataggttacttatgtggctaaaaataaatattagatttttaacacctacaaacttaaaattttgagtacttgtacagctatttacccttttatggtcaaacattgtaattttttggaaatttaatttacttatgaattttttcataaacattcattgaatagtgaaagtgactgaagattttgtgcccgtttatgttgttgaattgttttgcagtttaatactgaatgatttttgtgtattcttagtggctaagttgagaatatgttctataaacaacaagaagtttaaaagggtcttttttattttggtccttagagccatacctaaacttgttcattgtgaattcaggaattaatcactgtgtttttgtctttggtgtgtttgttacattatagtattatagttgttgccttgtggaattaaggaaagaagtaattgaactttaatatgtagaatttgaatataggagttggttttgttccattaggatgcatctagttcaccctcctaacacgttagatcaaaatatcaatagtcgggttgatcaactggtcattggtttgcttccacaaggtttgaggtttgactccctactatgtacccaaatattatagggttaggcggggatcctagtttcgaaaaaggaaaaaatagttgggtttgatcgaacggttgctaattattaaacgagtgttaaataagtgagagttgttttttatttttgcaaataacttgggcatctagaaagttgtttatcatagatagagtacttaacaccaagaaaacaagtaatggaaagcaaaatagtacacttatcatccgcgaggttgcacattcggtctttaggtgaatttgaaggatagagttgaacatttaaaatagctacaatgacttctagctgagctgtttttttgatagttcttcagaaaacagttgtagagatgatttagctttgaattatttaatgaaaaccaagtaattaaggaaaacaattattcatgttttacttcgtttaataaataactaaatgaatcgaattgaaagg

SEQ ID NO: 199451 - DNA, 1488 bp, Cannabis indica
tttagcaaaatcctaatgaagctttttgaaatcagcaagcaatgaagaatttaattgtacagattatgaaaagagaagttaaatatagatttaataatattatgaagaatattaaataagaggatttgagtttgtttggaagtttgtaataattaatcattttgtcaggtattttatttttataaaaagtatttgtagtttgttaatttggttttgatgagaagtacacatttgatttatttaattacatcatcatgaataataaccatttatatttgtacccaaaagtacaaacagctcaaaacaatttaaaatgtcaaatcaatacacaatacttcatgtagtgatattaacaactttataatattaaggctcaatcaaaaactgaattgcattaattcaagcattgcataatcaaaaccaaaaaacttactctaagtggacactgatccattctctttcacttccttattatcagtttttggctcactctcttttgtaacttttctttctcagtcttcaccttctcatcctctttatcctttaacttagcttcttcatcctcagcctgttttttcacagcttcttccttagcattctcaataacatcaaccaaattcttcaaacacatgtatgcatcatcttcatcagatttcggcatcaaattttgtagcttttagttgtttttttgctatttactttatttcagggtacatgtttagtttattttgggttgatctaatttatttttagttagttattttcttaggtatcgtattacaacaggttgatttctaattaattattgttttagttaatacaataaattaatatatatatatatatgtgatttgtagttattttgaagtttttttttttattattattttgtaggagatgatttgttatattgtttttaagtttcttttagattgatgcaatgtattaattcacatattaattaaatgagggattttagtttaactaattataaaatatgatatttttttagttgatattaaggttttttttttttttttgcattaagctgaataagtgatttattaattttcttattgagtcatattaaaataaacatatatgctgttgattttttgttattctttagttaatattgaattgatatgcaaatattttgaagtatacttttattttaattttttaattttcataattaaaaatattatgataaatttttcgaaaaaaataaatattgtgataagattctcgatgttattttctagttgtttattttgagttgtgtttgagcttattaattacaaagaatgtaaatatgcatattgacacaaggttaaggttggttaaggcggactagacagagacttagaatctagtccccaattgagtcccaaaaaccaaaatataaatatatatatatatatctttatatatatatatatattaaaataacacgtattattaataacttgttgatacctaaaccca

SEQ ID NO: 199452 - DNA, 1417 bp, Cannabis indica
tagttattcaaatatataatacatgctccttttgaactaaggtgcagtggaggccaaatgaatgatattgaacatgttttctggtcaccttttgaaagaaaaaaaaacatactttgtggttatgcaataattgagttctcaatcaaagctgagcttaaattcaactatgttttatgttggttctttttgagaaataatgcaactcacaatataattacttgaaggagtaatatgaggtaaaggaactgttttgatggctaaaactacattcattaatagctcctgtgatatcaccaccactgttgagctccattactaaattatttcttttgtcctagattgaaaaattcaatacattactcctaacttaacagagccagcctctcatttgttagctgatgatgatgttttaatttagatgtaaaattagtgctatttaaaataagagtatgcctcatgtggctagtcatgctgctcttatagcttatttgccttaaaagttctcccatgccactcattttttagtgccagcaaaaatatgaaaataattaagaaaacaaacttacaattgccttgatgctatcacctgaagaatcttcacaagttcatcataactccaagactatttctttcatttcaatctcaattcacaaacatttaggtctagtttttcctattttttgactcagtttcagctgccttagcctgctaatagaaagagttgatcaaattgatcaatgtccccaaacactatgttactgttcaatcttgtatgacttaccatattttaaaatatgcccaatgtgacaaacataaatggtccaatggaagagacaacaatatataactttactaaaactacctaactagagtcatatttttattaggatttattaatatttgtattagttgtcttaattattgaataattatatatttatgggttgatacaattttagattgtatattttgcaaaagttactaattagacttctattttattaaataataaaatgaactctatgttttttatagttcaattttagattattttttttaaaaaaataaccaacttaaagataattcctagcaaaaagagatacacaagatgtaaataattttgttacaacacatttatattattaatttttattttaacaaaaaataagttcagtattctatttagtactattttaaaaaatatcacaaccaatttatcatttaataaaataatagatcaaatcagtatcttttacaaaacaaatttaaaatagtatttaccctatatttatatataaaaataaacttttttatatatatatagctttttgtcttagtagaaatttcgttgtaagttattaaataaataacaaatgataccattattgaacatcgaagcaccagtggtctagtggta

SEQ ID NO: 199453 - DNA, 1426 bp, Cannabis indica
tagtcaattagaaaagaaagtaagatacaatttgagagagggataagaataggaatatataagaataaaatatttaaatatgatataaaaaattattatatatttttttattttgaaatgaataaaaattattttgttccactatgtaactaaataaaagaataaattttttattttattcttttatgattcatcccaatcaattattcccaacaaaacgcaacttaagcgtatattaaatcgtactattttgcttttatagcaggtgcatattttgtatttttgatcagcacataaactcaaatttaatccactttaatctctataagtgtaaatttaaattaattattttaatttgaatattttttaggggatattactcatatactgtttatttaatttttttttttcaaatttacggtaaatttctaaagttattgcagcgctagttgcaataagaatttctatacgattttttgttacaatttaagttgcagctctagttacaataggggaatctctagttacaataggggtaaaattccgtaaaaagaaaaaaaaaaaactgttttcaagtgtaaaaataaaaaaaatcttattttttaatattaattgaaataaataaattatttaaaaataaaataataattttaaatataaataacattaaaataatcaaacagacacataattaataaccattttctcacaagataaaaaaaactaaatccaatccttaattccaaaataagtttagataaagtatatacccacaccacacaatctcgttcattttaaatccaatttatacaagtgctgatatttgcactgtccatattaaaatagatcatatgaattgatttagattgaatgttacacaccccttcattacgttatataatagaaaataataatatcttatatgtgtggaataacgacttattcttgtttgtatgactttttatttttgacaattattcttagataactttaatcaattatatatttgcgttttaacttatataatattttggaacataatagctcctccaatgaattacagttctttcaaatatttaagatagattaaacggaatttacttcaactcaacgtagttctgtaaactttacactaaaataaataaataaatgaataataataatatatttatgacacacgaaatataaaaattaaaccaattttgaattaaaaacactacccaataataataataataataaaaatcgaaatgatgtgagattaaaataagacgattgttaaaataactccaaagaatggtggtaggttaatagtgtatatataatttacaaaatgatcacataacttcaaatataaacacgagtctataaaatgatcatactttttctcttatctaaaaatttggtttaattagacttttttttt

SEQ ID NO: 199454 - DNA, 1312 bp, Cannabis indica
tttttgaaattaaagctgttgaaactgtaacatcagaattatactctgaatcttctgtagttgttatcattttttcttttgtgtctaccttctgaactgccatgccactgttttgtatttttcagttattgcaaaaaaactactcttgtttgtgattcttgttctacaataattttatcatacatcttatttattgattatttgtgttaacatctgttacctttaatgcagtgcatgcatggtccaaaatgtaagctaggaaacttctgttcggttggtagaagaatacaagaagttaacattttaggcggcctcattctgcccgtctggggcacaattgagaaagccctttctaagcaggtaatctgttctcatttgctcaattgattttattatgttaaagaaaccggaagcttgccatatccaatgatataattatcatctacaaaagaaacaaaagaaaatataattatcatctaccattgtttatcccatcccataattagtatatatcaatgatgagataaataatttaagttttatatatttcttttatcttttttttttaaaaaagattgttggcacttgctcattttttacctcttatttttcttaattcaatccaatccaatcaatacttctatatctggctcaccaaagatgtctaaaggaatatcggctcacaccttaactaagtatgctttattggctactgttagcaagatttggtggtccggtcatcctatttgtattctaacttttattttgcatgatgcaaattttgaatgaataaaaaagatgtctaaaggaacaatattgtcatttactggtcagtggaaataaaagggaaattgcagaataatgtcatttatggatctttgtagtccattacgtaattagcttcagcataaaaggggataaagcagttctttaggaaatcctgattgaattcttgattgcttagccactggaattcttgttgtttatttcatatattggaaactatattttcagtagtttttgggcaaagattgtacattcatcaagactaattctatttcccttcactctcaagtataaatgtacatctagacattagtatatgattttcattgctgggaattcttcttttatatctcgtgtactttggctgattcatcattgtattatttattccttacaggcccgtcaaagccacaagcggcttcgagttgtgcggatagaaactactacagatagccagcgcattgttggattacttgttcctaatgcagcagttgaaacagtactccaaggtctctctctctctctc

SEQ ID NO: 199455 - DNA, 1222 bp, Cannabis indica
attgttgcagcatgaagaccaatggccactcctttaagctatcataactgcagcaagacctgttacaccactttgccaggaggcatctgcatcagcaacacagcagcatccgaaggatatacccaaccagattgaggttatcttcgagaccccccaatcgatcaccagtagtccgagacaattccaacatttcgagccatttagaaagaatctgattcttaagttggaccatatcaatccctgaacttttaaacaaaattctgtttctgaggttccaaatttcttgacaaacacaccccataaaacagagcaaaggcaatatttcctccttaggcacagtcaataacagattttcagcaaaatctaaaaaagaatcaccaagaatgttatcaccacgcataggaagaggacctgagaaccacatcacttttgccacaggacattctttgaaaatatgcatgctagtttcagagttctcgccacatatcaaacaatttttctcaacacaaaatggcaatttactacgcaggggtatagcttcatttaagattctccacagaaacgtaccaatccgaggatgtaattttgaatatcaaacccatctccacaatgatctcctctgtccaaaacgatgttcttgatcgatacgatatgcacttttaacagagaaaatgccattctcattgcctttccacactacctgatcatgatgatgaaggggaatccttgggatttccataattttcctcccaatatcagcaccaaaaacatcagtgaccacctctctattccatcttccatttgttgagatatctgcaacagtagtaattgagagagtatttctatctaagcttcccataagttgaccaaaaccaattgggtcaagccatggaatccaaggttgtgcccagaaatcaatagaacttccctcagccgcaagagtgaccgagcctttcagcacaatattcctggttgagagaatgctcttccaaagaaaagaatccccattccttggttcaacggcccaaaaagaggctctgctgcaatatttgctcaggaggcatttgacccaaggggggtcttgattctgagccaagctccaagccaatttagagatcaaagctctattcatatcctcgaaccgtcttagaccaaggccacccacaaactttggttggcagattttatcccaagccttgtaagccatgaatctatttttctc

SEQ ID NO: 199456 - DNA, 720 bp, Cannabis indica
attgagagttgatgatggtgttgctgaattattggcaaaagctgcatcaacaggtatgagactacctgtatgaacaattatctcaaactcaataggaagtccttcagtcctaaaatccttgaactcttgatgattgggattgtatgataccaaacatcgatctctatacgaaaacaaaatttcctcaccaccttgtaaattacacaaaactcgaaaagctttgttcctactcccattgaacctaattcttgttggaggagcactatccattctgaatcccattggaacataatcaggaatgacaatttctttactccaagattccttcttattataatccttcaaaacccaaatctcatgttccccaaacttagacgaaacaacagccgaaaggcgatcattcaacgtcacaagatgggtgagagacttgttcaaaccgaaatcgacaggttgtggtatgacatgaaattcctctttatccaagtcaaaagatacaatgtcaactagatgtgtttgatacctcattgttagccaatgaagatttccattgactaaaacatcagaagatggacaagtaataatcttatgaggcttttgatcaatacatctccattgacaatcctcacccaaattaaaaacataaactttagtctctttaatagttcccaaatataagttgtttccctccatataatacactatttcaatagccttataagt

SEQ ID NO: 199457 - DNA, 610 bp, Cannabis indica
tctaatatctcataatacatattcttgcaacaaatgatagttgagatttttgtatttcattcatgatttcttagacttttgaattgagaaaaatttaactaaatataatttcaatacctccatctattctattcttaattgtttcattttttacttttttattacttttaaaagaaaaaatctttaattaaactaataataataatagtaataatctctaagaacaacaaaaacaaaaatatttaactaaaataaactatatcaagacacaatattttttatacgtatatatctttcaagtattactctttttttaatatatatatatatatattctatataaaatgtggctatataacataatttttggtttatgaaaaattattgagtgactttattaaagttattggcccattgggcctcactctcggcccaatcctctagggcagctgcttcctttattctatatatacttaagttgttgtaaacattttattcttttggcatatagccgtgtaaagcattacaacaataataaaaggaatcttcttctctctgttatggtatcagatgtaaacaccaaaccttagcctccattttcttcacatcc

SEQ ID NO: 199458 - DNA, 1290 bp, Cannabis indica
  modified_base (1239)..(1239): a, c, t, g, unknown or other
tcaccatggatgttaaacaatggagtcctaatccttcaacgattcacaaagatgccatcaaaatgggaggaggaattgaaacgcttccccttgacagggagagttttgaatcttcccacaaaattaatcacccggaataatatgttatggctaacagcaatggcgggagaggtaatcgaaattcaaaaagaagatgcacagaaaattaccttgaacggatttttctggttcaaagtatggatttcaatcgataaacctctttgtccggggtttctttttccgagctatgggagtcgggtttggttgccattccgctatgataaattaccctttatgtgcttcagttgtgggtatgtgggacatgacttcagggcttgcgacaaacaccctgagaaaattactgatggagaaggtagtagcactgctgcgtatggtttatggttgaaagtggatgataaacctaaagaaaacagagggaaaaaatcaattgaaggggatggaaacttagacatgaaccgaattccaatcaagaagtctccaatggcgacagacgttgaagggaattattcacaaaaagcagatgggatctccacgataatgaattctgggtgttcgaatggtgaattgaaggggattgaagtggttccaagaatcacaaatcagaattccatacataaagaggtaccgtttcccaacccatccttaccttgtgattttatgaatctaatggataattttgatgtcaaacgggttgagaaagattttgagaatgagagggggactggctgtaaaagaagggcagaggtttgggagtctacgagcaggggtgaagggcctgagatagtcactggaaagagaatacatagagagaactcaacaatgttggcgaattcggatatgggatctgctaatgaagggagtgagtggattgatatccccatcactctagggaaaaatgtaacgggtgtaaactcaaggcagaagagtgaaaggaagaagagggtggtggctaaaaggaataaaaagattgatatgaagactaacacaccatgctcgactagcataaaggcttcggaggaacacttagaacacgtcggggaaggagaaggatccaggggacatttctaatattttggatttggtctctggcgtgaacttgaaagcagcgaatccgacggagctgggtcgccgagacaatgaatgccagtgtttggatgtcagggtctgggaccctggacngtgaagctcttgttcccatgtgaaagatcatcagtcccggtatgtattttc

SEQ ID NO: 199459 - DNA, 516 bp, Cannabis indica
ctcaaaaattctctaatgacgaggtcaaagaacaatacaaaataaagttgtacatatctctcatctcaaattatatccaccaaaaaatattttttttttggtaaatatgaatatttttgacaaataattataaaaaataactaattaaagaaataaaattaaatatggaaataaaatgaaataatcacacctattaaaaaaaatgactatataaaatcatttttaatacctctactaagcattatcctaaatatttaattatgtaatttttttttttttgaagggattaccttgataattttttaactcaataattacatatatataccccttaataaaaaaataattacacatatataaacagagaattttaattattgaatgtgtatataactaaatgtaaatatatttattattttttttttcttaatagccgtttcattgttatagtaatgtctttcttctagaaagtcacactctttgttgcttctttgaactagacggcgttattttctt

SEQ ID NO: 199460 - DNA, 1155 bp, Cannabis indica
cccggcttccatatccatttccaaatgttcctttgagtcccaaaccgccacttgtgatcttctaagtaggctgctttaactgaatgcttgcccgagtgagcattcttccgaacgacacaatccttttcattatgagacattctagcaatcttgaggatttaattccccaagtcagtaccaaatagctctaaaaaaaccatgacctgtgtaatcacaaacagaaaaaatcattgtagtactagtcaaatacatgtttgataagagctggtaaaaggcaagaaaattgaacgatcattcaaatgtatataaatatttgaaccctttttttttgtaagcttagagaaaaaaatgctaaaaagatgaaagtgtagacattcctaaactaacggttttaactgtctggtgttgaaactcaagactatagtattggcgtagggtgtgttagaccctattgccacaagtgagaattttgtgtaattgaagctaggcttcattgagagattgagtccgagaactcatttcataggaacaacttgtaattcaaatcagttttcagctcaataaagactcaaaaccatttgggctgttttattcatttctgcattgtgtttgattcggttcatcatatttttgtgttagttgcttaacttgtttctaatcacgttgcatttatttgatattgtcgttatttcttgatcgaggtattgaatcacaacaatatttatatacatatatatataagcagtactgcactgtctatcatcacaattatggtcagaatctaactttgtattggaatctaaattagtttattattgaaacaaataatgtaatgttaagaataaatgatgtattgaagaaaaattacaatatatattgatgtgtcatcaatttctacctcataattcaatatagaatgatatgatctggacggacagtgagttgagtgtgttggagtatatttcgactaaaatttaagatattttgttggtgatgaattgaggattataaagatacgatgccgtttcaccccccaaatgataacttcttcgtcttctctaataaaataaaggcatatatatactttatctttataaggcttggaatactcttgtcaatggatatgcctagtgaaagcaagggagtcttgctgtg

SEQ ID NO: 199461 - DNA, 1103 bp, Cannabis indica
tttcctccccattgctaggcgaagtgctaccgtcatacggcgtcttctacttccatctcgccttcatcgtgtaagttgtttgttctatatagataccttttctccgttgttagggcaaatggtggtagacagtagccctttttagggaaaatgatatgcatgtttgtctatttttttttgaatgacggtcatggtcgccgcctgtataacacctctgtcggtggatattcgatgatgtgtctctctcttgttattttttgctatttttattttttatttgatgggagcgaaatcggagattttcaggctctcgttccccatgtgccccttttggcaggtcaagactgcattcacacatcttctattcttttctcttggcgaattgttgtgattcctttcgacatacatctggagggggtctttttccagcggttaggggactcccattcccctttttgacctagggtttaatgtgggggctaactactgatttcttatctttcaaatgagtaaagttcttcaagatcttcacgaccatggtttcttcgggttcgaccaggaaattctcgagcttcaccaagccaatcctatgtcgactcctactgcaaccggcgcaaagtcttccaagaaggggccaaagaaattggccaccttggaggaagttatgaagggtccggtcgcttataagaaattttcttagtgttctaacgactgggaggccgatgagctttattcgacactaacttgtgcccatcagctggagaagatagtgaccgtgaatgggattaagccatctagctccgaagttaatcattgtctcccgagggacgaggagacgccaaatcataactacagtagttttggagcataaagccaaacccacctcatatctggggccatgctatctctccaagattatttcatcgattttttagtttttgtcggactttcaccttaccagctgatacctcaagcctaccgcttgttgtcaagcctttttattttaaaagatgagatttttttgggcccttcggctaggggtggcaatttatgtttgcgggccgtgttcgtattcgtgtgaagatccatgtataataggtata

SEQ ID NO: 199462 - DNA, 785 bp, Cannabis indica
tttttttcacatttaaattcttagttgacagagagtaatacattaccaattgctattgtaatttatattgatagtgacacttctagcgtcttctagaatatatggaggtgccaatataattgcaaaaattgaggaaaaaaaaagacattagtctgttgagaaagggcacaagagggatcgtacgtgtagattattttttggtagaacgttcgtgtagactattacgataataataatgatgtaaaaattgtgttttatttagtataacaaatttaattattggagacaatttttaacagtgtattaccaatttgacacactacacactctaatatcaaacaaggaatacagtcatttttctacttagaatgtcacctatttgtcccataactgcaggacacaaattgagatattaaattacaaagaaaaattgataatatataattatatatatatatatatatatttcccaagaaaataggtcactgattgatatcattaccaaacgcggtttttgaaggagttttttttatagataatcccacttattatatatatgtcccactagggaaaatatacattagggtggtgcaattaagttgcaaatacaaaaattatccttaaattaacttccccctttaactaataaaagtaattatagttcaacttttcaagtcttctacaaattaaatatcaaattatttgatgcgataaaaatacatcaaacatctaggattataagaatcccttttcttaactttgattatatttggatctcaaagcac

SEQ ID NO: 199463 - DNA, 895 bp, Cannabis indica
actaaagctctgataccatgttacagttcaagaaacaagaagaaagaacttgaacagagaaaacaaagaaagaggaagaaagatcttttattgaatcaattttttattaaccaaacagattacaaggaagtgtttatatacagctaacaaccgactcatagcaaatagaaagttagttagaaaagattacagctgtcccaactgcttaactaactcaactaatcactaactaactagggtctcttaacatgtataacttaagtcaagatgtcttaaagaagaaagggtagaaacccaatctaaattttttataatcaaatcataattatagctaagatcaagatatactgcaagctagtaaggtttccaaattgagggagaatttctccactcaaagaattggaagaaagatcaaggtattgtaatttggggggattaccaataaaacttgggaactgaacttccaaattcatgagactaaggcacaaatatctcaaattttgcaactcaagtagtaaagaacttatagcatatttattacctggatcatgtgacttagtcatacgatatcctgtaatatcttcaaaactaaaagttgaaggagaaatatcaaggctgatgacatgaccagatttattgtggcaacgaatttcgatccagtcgcaacactctcttttgtgttcttcactcccccaagaagaaagaagggtatcgacattcagatcttgcttaaacttgaggagtgcttctctttcaacgtctttacaccttatcatcatcaaaatcatcatattattgctacttgatgatgatgatgatgattctgtgctaacaactctcgtgtaaagcaaaatcaccaaaaagatcacaatcattttatgagaaaatgatctat

SEQ ID NO: 199464 - DNA, 890 bp, Cannabis indica
cattacactcgttagaaacctctgcaggcagtgatactaaaatgatcaaaatgaatatcataccaattccttcacgtcactcatatcttcaacgactacattccaattgcaacaatatctgaaaacatctgatctgcatgatcaaatttaccaccttgtagttgaattgaaatgaatcaaagaaaacaagatcataatttacacaaactgtagaaaaccttaacaaacactcacaacaagaagaagaggggaaaaaaacttaccactttaacatccttagagttaggattagctgccttgaattcctttctgaaatcatcccttgaacatgtgaaaaaacgttagtatcacgtatcctactagcacatttatgaaatgagtaatacaaagcagtagaaaaatgattacatgaagagaaagaatgtagtgggagggcgcttgcgcttgttagaagtattgtccttagacttcttaccaacgtcaaataaaatacctctctgttgtcttcttgacctccggaggtgcctccataactttggcatttgaaatgaacaaaaaaggttaagaataaaattcatcaaatgaaaatgaacaaagaaaaaacattaataaatcaagcaaaagaggacatgcatacccaaattcattttaatttttaggatagagactgcaactatggaaactgatcataaatcttgaggaaatgaaagaggtggtgttgagcaactgtcgagaacgaagaaatagagagaaatggagaggggaggatcgtggagattgtaaagaaatggagagagagagagagggtattcatggattataagagaaccacggagaaatgagtggatgggcggtagagtttcgaagaagggaacgacgggagagtgaga

SEQ ID NO: 199465 - DNA, 665 bp, Cannabis indica
  modified_base (662)..(662): a, c, t, g, unknown or other
aaatattgttcacatgtaccattgatatatagcctaagaaaacatttttcagctaccattgagagattaggatctagaaataacatgtatatttaaagagagtagtaaacaacccatcaagacgagtcgggtaattaagaaaaaataagcaataacattgactagaataaaatagttgcaaacttaaactgcaacttacatcaattgtcaagccataaagtagacaagcaacaactaaattgcttgctgaatcatcaaggttaaggcccaagacgccatcaacaatcgtcttcgccatcctgaaaaatggcacttttataaatataaataaattcacaaataaccaattaccagtagagagtaatgcagtgacataaaatcaagagacataaaatctggaataatcacagtaatgacaaagaatctttctaaaataagaagagcaagggtttaccttgaatcaaatcaatacaacatctctaaaatctgtccaaggttccatttctagttatatataagattctaaactcataacttcatctgataaacaacgaaatgaaaaatttggagcaaccatttccatcttaaacaaaccaccacacattcaaatttgaaatttcaaaaccatttccatctcaaacaatccccccccccccaccccnccc

SEQ ID NO: 199466 - DNA, 785 bp, Cannabis indica
aagtcaaaaccctctcgaccaaaaacttggtctcgacttcacagctaggttagaaaccctagcattgaatcaaaacccaaaacacaatcgatcagatctagattgatccagaccccaacacacacataaagataaaagtagaaattaccaatttttttcctgagattcacccaagaaatctcaagctacgttcccattgagatgttactcagatggtagctcgatcttcaatatgaaagctacaaagcaccattataggatcaggattctaagtcacaattctccctgtgattctctctctctaacttgttcccttttcttatgtatgtgttttccttctctctcactctctaactggagcattcttcttggagagacttctgatctgtgttcaagagagaaaaggaagcaggtatatatagcttcccttgtatgttattctaataaagatgcaaggtgcggattgctaacctatcagggtccggggctaggttcaggtctgggtccaaattaaggtccgaggttgggtccaagtttgggttctgaggtcaggttcggaatctgggtgcaagagccttgggttgggaccaggttttggtccaagtcaaggtcccaattcaggtctagaggtggggtccgagtttgggatccaggtctggctctgttccaagatcgagggtttgggtccgtgtctatgtccatgtccagggtatgggctttaggttttagggtccgcggtgcgagtttggctgcaagtcaagatccgggtccagggccggggccac

SEQ ID NO: 199467 - DNA, 744 bp, Cannabis indica
gagaccaccatctgccaacccaattgatacaaccaagaaaagaaaggaaatattgatgaagcaaagacaaagggataatgatgctaaggtctcagctaatgccaatagttagggattcatgtttcaagcattttgttaaaatttagtgaactttatgccaattcatcatatgaacatgaactatgttatgttatatatctatctaattctatggcaatttggtggacttgatgtcattttatgtccatctttttgatgccattaaattatgttatgtattttgtttaaaaaatacaagtattaggtcttttcagaaacttagtatctaaaattgttatgtatttggataaggatttcaatgtctttattctataggaaacaagttaatgtcttttgatgaactttgtatctgatgatgcaaacttaagagttgtatcttttgattgtatggttaagggttgtatcttttgattaattgtatggtatgaattaatattaatgtacaatattatgattatactcatttgtattatactaaattaaattaaacacaattcatgcaatagctctttaacaaaaaaaaaaaactgtcagtcattcatacactaaatcttaatagtacacttcttaaccttcttcaattaataataacacaactaacccttgaggtggatccaaacaatcaagatccaaaataagagggggaaagcttataaaaactaaaaaaaagaaaaccaaaattta

SEQ ID NO: 199468 - DNA, 2469 bp, Cannabis indica
attaactgctcttttcaattaattaatatatttatcagatttgtctcctaactgttactgatttggttgttagaccgttatgttagttggtaacctctgttagttagtcagttagttcctatttttatgttctttctgttagagttaagttgcaactctagtgtgttcagttaactctagttagctttgtctatgttggtatgtatataaatatctggtgtactctgtaacatttttcaattcattctgcaataatacaaatgttttctcttttctcattccgcaacatggtatcagagcgggaaagacaagctttcccttaaagatccaattcttctcccactttcttcttgctgtgttttcttctccggcgaaggtggcgttcaactcagttctctttcaattctccaacatcgtttctggtgtacctagttttcttggttctgtattctctattccagaacatcaatgtcgaacaacgatcaatcttctcaatctgaaattcgatccacggatcccaccattcaagaaaatcaaaattctcatacaagaaatcctgtcgaggatccttccaatccctattacctgcaccacaatgataatccaggcaacagtctcgtatctcagcttctaacaggacaggacaactatatttcctggagcagagcgatgcaattggccatatccgtgaagaacaagctcgggtttcttgatggttctattcctaaaccctctctttcagatcctatattgtataatgcttggattaggaataataatattgttatctcctgaattcttaactctgtatctaaagagatctcgtctagcattctttatgataatagtgcagaagcaatttggaatgacttaaaagtcagatttcatcaaaggaatggcccccacatttacaacctgagaaaaggcttgatgaacttgaagcaagaaagccaatctattagtatgtacttcactagactcaaaactgtctgggaagaattatctaattacaggccctcttgtacctgcaatggttgctcttgtggaggagtcaaaaggcttcaagaacaccatcacatggagtacatcatgtcctttctcatgggactctctgataatttttcacaagttcgaagtagcatccttctaatggatccactacctgaaatcaaccgtgtattccatctcatatctcaagaagagcatcagaaaggaaatcttgccaaagatggtgacagtaatcagaatttagcttttgcattccagggtgacaagaataacactagaaagcctgattctcaaggggctaagacacatcaacccaaacgcaataggcctttctgcactcattgtaatatccttggccataccgtggagagatgctacaaaattcatggatatcctcctggatataaatcaaatccctctaaagaagccactgcaaaccaggttcaaaccagtagcgattcgaaaggaacctgtgatgaaggaactaccctacttccccaactcaatgctatgcaataccaacaacttctcaatcttcttgctggtcaacataatggtatggcaaattcagaacctagcacatcaacagaagctacaggtatcatcttatccttaaatcttgttgttccccaaaatgaatcttggattatagattcaggagcaacaagacacatttgtaacaatgtaaggttatttcaagccatctatcccatatccaaaacaaatttaattctccctaacaatgagcagctttctgtatatcaaagtggatcaattatgatcaataatgacttgattctcactgatgttttatatgtccctagttttaaattcaacattatttctgtcagtaacctcacccaagataacaagattaaggttaaattctatactgacaaatttttcatacaggacaaccttcacaagaaggtgattggcagcggtaaaaacaaggaaggactttacattttgggttccaatgctacaccagaaactgttcttgctgtttctgctgatgtatggcactcaagattggggcacccttctaagaaacgcctttctttacttagtaatcagttacaatgtaacactaatactttacacaattctactccttgctatgtttgtcccaaagctaagcaaaagaaactccccttttctcataataatcggtttgctgcaaataattttgatttaatacattgtgacatttggggaccttaccacatcccatctcattctaatttcagatattttcttactttagttgatgatcattctcgtttcacttggatttatctcatgcaacaaaaatctgatgtctctcatatcattcctcaatttttatcatatatcaaaactcaatttaattgcatttttaaaaaattcaggtctgataatgcacccgaattaatcttcaaagatttgttttctcaacatggaatcttgcatgattttact

SEQ ID NO: 199469 - DNA, 1140 bp, Cannabis indica
ataggacacgagctttcagatgggtattcattcaaatgctcttactttttaccaagttcacgcagggaggtttttctatgctttcatgttccttaatctctctacaacttcacatgagcaaagcttcccctgaatgaaccgtaaagcggccgagaccttctgaaactgaagatatcatcgattctgactgagccgggttctgcaggttcagttttatcttttttgtagtcggaagaatggaggttaccagacactcgcacactcagttccttcttatgaggtgccccgacttttatattttcattgaaaaaatctattagttcttgttttgtgagctgctttagtgctgcaacctgtttcagaaccattgaaaagaattataattacatactttgtggcaatgttattaaacgaaatctttctgttctacagcataaattctacctctgtttctcttcgatcgaacttgagggtcccatctgaaatctctcgccagtaaactccagattcttcccttaagtttttgtgtttctcaagcttcatgtcgattaaagcatttacattgctctgtaacaatcaaaccagcaattattttacgctaaattactcaagcaaagcgttctaaactctaccgtgctgaccggcaaaaagatgatagcaccctatatggaataccacatcgaattataatctcaccttaaattcatcgtcagtcatttcatacagtttagtttcaaacatcttgaggaaagcttctactcttaaatctatttgtgctggaccctgtcgaaacggacacatatggtttacaagatattgcaatagcgaaactaatcatagaagtttgagtatgtgacagtacctttgctgtagattgtataatgaactgtaatccacggacaccactatcattcctgcataaaattgtaaaaattaattttatatattagtttttactcttcattttaaaaaagagaaaatgttctgatgagaaaaataactattacaaaccttgaaagcaagaaagtgatgtaaccaagttgctcaactgatctaagctgatggaaagctggttgctttgcaactagagcaaagagctgaagtttcgcattcattctaaaatcatcttgatgtacctat

SEQ ID NO: 199470 - DNA, 1402 bp, Cannabis indica
agtttgttttctgatattaaaatcaagtacgacaattcttttagtgatggttattctcaaaacatacatatatatatataaactaattcgattggactcataagtttgctcgtgtaatgacagtgacagactcgggagccactagtttttcatcctttgaaaatgagacctcaataaccacaactaaaggtgttctaaaaagtctaaaacttcaaacccttaagaaaagtattaacgaacgaaaccacatcttataaaataacaactatacaaagtacgtcgaaatactcaaacgtgcacgaaacaaataaaaattgggaagagagaagaaaaaaggaccatttgatttattttggaaggagactagagctgctaaagccacaagttttaactgatttctgtttttgtttttttttgtttttttttttttttttttttttttttgtaaagagaagtttagtctaacaaggagctttttatgttaattaaaagaaaagggattcattgaatgtatgaccaaacttaggtactacttattgtcgacttagtgggttatgaatgaaattaataaagttattatatcaacaaaattattgaagtaggctgcttgcccacatacgagcacaggttggcaagtggttgataacagcctgtaaattggcgaatatggctactctcttttaaggattttattaattatgtgagtttagtgagtttaataacagattgacaaatcaagtaccatatttctaacttgcatatcccacgcaaagtgagccttttttttcttttgatgtttgaaataaaaactagtgatttttatgatgaactactattatcatatagcaaaattaatttctgttacatcattttctaattttttttataacatagctcaatattctttctgattttttttttttctcgagaggaaaatgtgttacattgagcaatgttaatttacgatattcctaaagaaaccccttaagttaaaattattcctatttcacctttttttttaatgaaatataataaaagaggtaaaggctcacttggcttatttaatttgtataagaatttttcttttcaaaattagtaaacatttgtataagaactctgtagtaggttttaaaacttttaattaagaaattgtgtactttagaattaaatattcttcaacattctatctaatataattatggcacttaaaggcaattcatttcgtaatgttaactaaaggaatgaatttccaaagaaaaacgcttaacaaaaaaaaaaaaaaaagaaaaagttccacgttaaagcagaaaagtaagaaatttgaataattaatgttgaaaaattataccaaaaaaaaaaagagcaccacctcaacaaggtatcccaatgcatttttttctct

SEQ ID NO: 199471 - DNA, 683 bp, Cannabis indica
attctctttgtttctctgtaattatttctcttctacaactaaaatatatcgagtaaaatttatgaaaaagaacgtagacccaattctaggttgcatattaaatattttattcagtattgatagttgtacttcaacaaagagcacttgatttctattagagaatagaaatttcatgtgtacatgatttacttaaatattcattagaatataaatggcattgattgataaacatataattagagagattaacataccaagatacctaactctaattataaatatttagtggaggattataactcatgtaatgactatatcaatggacataattaatgtgattaatttcttctaaataaaataaattgtaagtttgagagtgcaactatgatttattagtggactaacatcatagttaataaattaattattgagccaagagttactgagataagtaattgttaatgagataagtaatttgttagagcttaaaactacatatccatttgtcccctgagtagcttgataacataaataaaaaatttcgtaaaatagaaaaataataatggttattatttaacatattaaaataaattaataaagtatcaattaattcaacatagtaaaataataaagtattattttaaatatattatttttgagaaaaatagtttacaaaaaataaa

SEQ ID NO: 199472 - DNA, 1158 bp, Cannabis indica
aaaagaaaaagaataatatactctcaaccttacatcatgttacaagagagtctagagtttctctttaggggttgagagcctgtcgccacttgagattctttttttcctctccagttatagctcgccgatttgtgggtcgacttgtgggttttgtagtggccatggttgggggggagtatttgattgtgcatttgaaaaagttctctgatggaggatcaacaccttttggtattggattttagcattttcacttggtggtcataaagtttggctctggttgcttctagtgtgaggtgggtttcgcggtgaggtttctgatttgggtcaaggatgtttgctgatgggggcctgcttcttgtctaaccatcgtggctggtttccctcctgtttagaactcatttttttgcttctattacggtggtccagcagcggcaatcttagatggacgttggtgattcgttggggttgggcttcattgtgaagatttgggagtgcatttgtcctttgggcctagggtgcaactcctcttggtggtatggttgatatgtgtggttgtggcagtaccctaattctgatttgtcagtgcttggcgatcttattaatctcttttggtgtttttatttcattatttattttttagtggttgtttcttttacttgtaagcacactgtaaatttaaatttagccataattaattcatgagaatgaaacaataaattagagattagaggaagcatactagagtccatagaatcgaccattgaatggtatgatcttctaatttaattctctatccccgcttgttccccattgagcatgagacaggaaattcccacaaggtccaatttatgttgaacttaagtttatattaaaaatttaattatataaaaaagtgaattacataaaattaatacattacaaattatttattattaaatatacttatttttattcaaaacataacttaaaaatttatatgaagttactaatatactagaaaaatacataaaaaagtattattaaagaagtacttaaatattaaatagatcccaacgggtcaggggcggggaacattaacatttaaggaaaattatccatccttgccccgttctttatttagatggggaatcctcacgagaccccatccccctttgggag

SEQ ID NO: 199473 - DNA, 573 bp, Cannabis indica
accacaccatctgataacaatgtcgatgttaacaacgttcaaaaaggggaaagtaacattccatatagtaactccattcttggttctcaagcccaatacctgagttggccatctaaggagtgttgggcccaacctaaggcccatgaactagtattaggggccctaaccattgacaaatatttcagagagcctacccttattaatgctatcctggacattgaagactttagggtgcaggaacaccttaatgggcctaggaaaagaaaggcctcagacggatttgtaattggtcctagcccacggccctgctcccccctaagcccagttgacattcaatcctcaccagaaattaccataccagagacacactgcaaacacgttgaaccagactcaaaccagctatctacgaagaaaggagatccgattgaactgggtttacaagggactcggggggctgtcaatttctcccctgggtcaactgatgacccttcgccatcgagacgtcgaggcaaaggaagaagcaacaaccgtaatcaactgggtgaagtgggcactccgaaaagaagaggaaga

SEQ ID NO: 199474 - DNA, 715 bp, Cannabis indica
atatatatatatattatatttgattattaagagataaatatatgtaccttcacaactcatatcttttgctagctgagtttctgatctcttgcaatatgatgagtaaactatatatgtatatatataggcagattatgattttgagaattagagagatctagatgtcctatttatagaattttgagtccaacctaatatttatgacttggttggcttgccctaaattatgtatacacatattttttaattactatatatatctgtatgtagtgtttgtctattattgactatacatataccaccaccaccattattgacattttattgttgtttttttttttttgtacttatctttcttatagtgtatgttatcttaaacatatcatacacgtataaattagataagtacaaagagaaaacacaacaaaatgtcaataaatgcacacacaatatagactataatatattactaacaccaagagtattttatatgctttttgtatatagattcttagcatatcctaatacaaatgtatataacttatggtttagtaaaacatgttttttagttaataatgacctatgttaattaaaggaggttcttgtagcgattactaatgttagcatcgtaaatttatgaataattttaattaataggttaaaaaaataaaaataaaaatataaataatatgataattattaatatgaagctcag

SEQ ID NO: 199475 - DNA, 1387 bp, Cannabis indica
tttataaatataatgcattatttctatatctgatcattcaatactgtatttctgttgtcatcaccatattagagtgttcaataccgtatctcctctgttgtttttcatcgtatctcacctgtcactatatctttactgtatctcgctcatcatcctcactgtatcattaaaatatcgtatctcacccactgtcatcaccgtatcactccaattagtctaataatttttgaatagtcatctcgttgatgaacatgtcttttttaagagttgtcttcttaattttataatttccactctcttggagttggtagaaattttttggattaatgagcattctagtccctttaatttatagtcaattatttagttaaattctttatttttaaaatttacaaatttgataatcataaattatattaaaaagtagaataaaaaataataaattaaatatctaataacatttgaatttaaatattaatttaaatggtacttaatttacataaatattataatagatactaatgaaaaatgttaatataataataactattatttattcaattccactaatatataatacttgtataataatattaacaaaaattctattaaaaaaaattcaaaaaaacaaaaataaaaaataaaaagtaaattgatggtcggagtcaataaaaacctaaatatatatattatttatatacatgttttatcataagtttttttattaattttattattataaatattttaaatcattacacaatgatatatacaattttaaagtgataaatttttctaaatcttctaattgttattccacttggttggacaatattcccactataataactgatgttttcttagtcaattgactttcttataaaaaaaaaaggtaaatctatatatctatatatttatgtaaaggagaagtatggagcagtgatgtggcgttctaaaaacactctaaatagcattatctcttctctccttaattcacttatgttttcaattttgtattaaatggcgttctaaaatcactctaaatagcattatttcttctctctttaattctattatatttttaattttatattaaatttaaataataatttaattgaaaaaacaaaaatacttaattatattaatcaatttttttaagtatatatattaactattttatcaaaaaatagtaaatataattcattaattaatataaaatcaatctaaggtatatatattctcaaaattatctcactttctatgtattttttcctcataaattttttgaatgaaattgtgagatttaaccttataaaatttttgagtgaaattgaaagatttaaatattatttgatagagatatgaattcactatgttgttttagatt

SEQ ID NO: 199476 - DNA, 1113 bp, Cannabis indica
acattcgtacgactttttatttattttctagaatgccaaagcatcatgttactaatgacaatgtacaaactgtgtgattagttactcagtctaagcaattcagtaacagttggtgtggccttccaaaacaaatggcatactaacctcaaaccagttattcaaaacctttgaagccggggataataacaagtccataaattccctgtcaacaaatcacaatgatcaaaatgaaagctatgaatctacatgcaagaacatgattaaagcaaacatatataaatatatgaaatcaaaggtaaaaagttcttacacaatatctttttggccgagagagagaccttgtcgaagaaaacgtgcccagaaaactgacttgtgtatcttatctttgaatccatcagtaaaagatgaagtatatttcaacgattcaggtggaggggaatctataagtggatccatcaatttgcagaatttctctagctgatcctcatatctagacaataaggagacgaagcttttgagataaactgataataataataatacttcattttctaaaagcaacttctacttctatagaaaatcacattcaagtggagaaagattccaaattctcaatctaaatcaaaaacaagctatctgcatgaaaagtaattcggttttgagtaatttaatctgacccagaataagacatcggcgtctcgtttggagaatttggagatttcggagtagttgagctccttatcgggtcctaaaagaagatatcgtccatccaaacaaggagtaaaagatgaaggacttcgctttcaacatcttcaacccatcacgccctaactccagctctctgtaatgccaaaacgagttacttcaaatacactgtatgtattagtgcatctatctatcaatacgtttatacatatatacctatatatataataataatagtatatcattgattgtaaagtggaaaaagttacttgatgatggaaggtcggaggagactttggagatagctacagcgagagaatttgaagcctgaaatgagttcctcagtcaccgcggcgccaccgatgacgtggcgacgttcgagaacagcgacagataggccggcgcgtg

SEQ ID NO: 199477 - DNA, 638 bp, Cannabis indica
gattatacttaaagatattcacacacacacatatatataatttttttgagccctagctaaaacaacattaattagttacatatatattaatttgtgagagattgtcccccctcctgtactataaactttgtttaaatgatgtaattactagattaatctaactaagtagagagtcatgtaccatatcatacactgatacaattgtactaagtgaatatgtaccttgaagaggaggaggaaggagtaagtgtttattattatgggaacgagcagcggcttgctccaacaatttgcgtcgttttcttttgtccctggccttgtgattttgaaaccaatagaagacatttttgccttcgattttgccaaagcggcggagcataatagtgatctcttggatctgttgggccgttggggttctctttccgtgctggtacaattcttctagcacaagcaactgctccggcgtcggtgtccatcgtgaactttgcatcggtacccctactaccacttcactactacttctactattctgatgatgatgatgatgatgaagaggaccaagcatcttgtacttattactataatctgattatgtcatatcatcatcaaatattaattatattttaaaacaaataata

SEQ ID NO: 199478 - DNA, 717 bp, Cannabis indica
aatttttaatttaagtttttttataacattaaaaatataatttagttttatttgataagtaatatttttaaagaataaaaattgaaagaaaaaaaaaattaaaaaaactattaaaaattaaagatacatagttttatataaaataaaaattattaaaatggatgcattaataaattgttggggtgtcatataatcatcttatttttatgaaaaataaaatgtccctttctttataattattattatttttttttaataaatccagtaccatttacaaaaaaaccccaaccgtataccacttaagaaaaaaaagaataatacttacaaaaataattgccccaaccaatctatatctcctttatctgttttctttgtatttaaaaacttaatgctattgcaaacaacaatcttaatgtttctaataacatcagaaatcaaaaaatcatcatttcaagcactccaaatataaaaaacacaagcagtaattgcaaaagcaaaaaccttttttctatttttgttgtgcttgcatctttacttataccaattaagatacaacaatgagtctcaatcttgagccaaagaactatatgttttaaggcacctcaaattaaaatagcattttgaaaaaataaatgctcaataaattcattgtgctgaccacaaataagacaatgaagatcaaaagtcacactgaaacaaaataaacgatctcttatt

SEQ ID NO: 199479 - DNA, 1689 bp, Cannabis indica
aaaaaaaaaaaaaaaacattgaagcaccttctagacgtctcatcttataattagttcgcgatactcactaaaagttattacattaaattatatgggacttgatatttaatgagaaatttgaatttctatgcattttataagggataattggttaggagaaccaataattagggtaatttttaaaataggacacttttacaaaaacccctaaaataccctcctcataatttctaaccctttctctctccttctcaactaaatctctctgcccacttcgcccgaaccgaacagcgacccccacctcccaccacgagacgacccccacctccgaccgagacgagtccgacggagacccacaacagcaccactccgacagagacaccgacggagacccaaagcaccatccacgaaccgaacccacaatgtccaaggtatgtttttattattttattttttttttttgtgagaaagtgttaaagattgagtttgtttgtgattgtgtttgtgaaacttaagattttgttaaatttagggaaatttttgtcggatctaagaaatgggtattattttgcttggggaagagaaagacccgatgggtccgatgctcggaccgataggggtccgatggtccatgttgatttcaaatagcaaggggcccgatgggtccgatggtcccttttgttttcaaatagcaaggggtctgatgggtccgatgctcggaccgataggggtccgatggtccctgttgccttcaaatagcaagggcctgatgggtccgatgctcgacccgatatgggtccgataggtgtctggtccgatgggatttggggggttcgatgggcccgattgcaggtactgtaaatggggggtaaaattgggttttagaaaaagttatcctattttacaaattatgcatagtattagtttaggggaccaatttctggatttattaagcatataatttcaaatttccttatttaattatactaatagcgatattaacatgtagtagtgtgctagacactagtagtatcttttaacatttcttaaaaaaaaaaaaagttaaaggacaagtatgatgcctattatctttgtgatgtgtaatatcaagtctcaattattttactttaataaagattatagaatattactaattaattatagagtaacacctcctaatagtgctaaacaagaaaaagaaatgcttactagaaggagcaagaatgacacgtgtccctactagtagtagccgtttgggaggcttagcttaaaaaaaaacagaattcaacaatccaaacggcgtcgttttgaagcctttccatttccacagtataaatacccctctcattttcccgctaaatagcaaactcattttccttcattttcccacttcccaaacacactcactaaaaagaaaaaatggagcaattcaaaggccagcctcgcttacccaaattcatcctcccaaaacgataccgtatcaatctcaaacccaatctcaactcctgcaaattcacgggctccgtctccgtcgacctcactgttctctctgaaaccagattcatcgttctcaatgctgctaatctatctgtcaaaatcgcctccgtatctttcatccccaaagatttggtaaaactttttcttttataatgatcttatggattgcgtgatgttagtttaaagtgattc

SEQ ID NO: 199480 - DNA, 882 bp, Cannabis indica
ttttttttttcttaatttgttgttgttgaatctacatgtgtaaaatgcttagaaatcctaacttggaatgtagaacacaaaattctaattatttagaaggttaattaggatttttttccctccaaattttgacatgtatcaaatcatactccttgaacttttaaggtcgttaaaaataccccttgagctattgagattgttgaattgaaggacttttgtccaattttagtaaaaaagtctaacatagatgaaagttcatggggcatgatttagtacatgtcaaagttcgagggacatgatttggtggatatcaaaatctggggaacattatttagtatataaacaaatcaataaaatagtaaaaattgaaatgaaattagacaaaagttcttaaatctaacaatctcaatagttcagacgaaatttttaacggccagaaaaaattagggggcatgatttagtacatgttaaaatttaaggagcaaaaatcctaattagtcttatttagaatgtataccataatagagtttaggcttacataattaaaaacacaaactttaagttctacacattaataaaatatcacattaaacaaacttttgaataaaaaattcttgccaaattgtatcgcagactattacaaatacatcgttgaatatcattttgcatcaaaaaccaattttttgtggtgccagccccaataggtcattaaagatcaagttttcataacattatcgcaaatacgttgattttaatgattaggagaagaaaaaaagacatcaacaaaaaatcttatacgtaaaagtttgaaacccatgagttaatattttctacagttttagtttaaactgtagaaaatattttgaaaaaaaaaagaaaaaa

SEQ ID NO: 199481 - DNA, 1319 bp, Cannabis indica
ctggtttgaataaatgttaaatacatcaatgcagtattacctcatttgtaattaggtggctttaaatatgttacacataatagacacagtgtcttcaatttattttattagattaaattttattctattaatcaaatagcaaaattccatgctgattttatagtcagtcaactccaaagaattggtcaaatcattaattgtatctttatgtaaaatattgataattaagcagtctatgttgaaatcacgttactctacaaaaagacaaaaaatggaaaaacatgaatcacgtagttggattcaatggaaaacaggtagtggtactggtaggaatcaatgtaggaaaaaaccaagtcatatcattagatcaaagtcatcattcgtcaacgcagaatttgcataatattatatgtttctcacaatccttaaattagtggccaaaagccagaatgccataacaaatcttagcaacatgacactccacttttccaattccctaccactagtatgggcaatcactttcttcttcttcatcattccacccaacattttcttatttgtaaaggcttctcaatatgactcaacagaagaaccacaattgagttctctgtttcaaaccgattggtgtaagcacaagcatctcttcaacagaagcaagcattattattgccaccagtcaggtatcacttgtgaccaagctggtcacattactaaaattcgtcaatctttgtttaaagatggcatgtattctgcgagaagaagaatactccaaagctttagtgcgtcttgctttcaacatttagttcatctggatctttcatggtcaggactcgagggggttatcccacctgaaataggtgctcttactaagctcaccaaccttgacctctccaacaatgctcttacaggtcagttacctctttcactaaccaacctttcccatttggagaaacttgatcttagcaataatcaactcaacggttccattcctcaacaacttggcaacttgaagagtttggttgaattaaatttgggcaacaacatcttaacaggtgcaattccctcatccattggtcgtttgatcaaccttactatgttaatattgtggggaaatcatctcaacggctccattcctatcagcataggaaagttagacaacttagttcatctttatctttcctctaacaaccttagcgggtcactcccttcctctgtatttagattaaccaagttaagcattcttgatatttcattgaaccaactcagtggtaatatcccaattaccttgggtaattcaaccaatttaagctacctagatc

SEQ ID NO: 199482 - DNA, 980 bp, Cannabis indica
tacagtctaagccaattaactttccactttccataatagcagtttaattttctttttttcttttctgttttgctatatatgcacaatatacacaatttaatatatataattagccgagtaatttgctattttgatacatacaattttagtgtacgtacgtccacacacactacaatattagggaaaagtagtaaataccaaaactaacactaattaatcactgtttaattaacagtgggaatcatcagtactagaattatgtagcaaacaaaccaacaaacactacaaaaaaactgctacttttagtgacaactttttaatcacaacataatttttttgtgactaaatgtgacttttagtcacaacaaaatattacttgtgattaatacatagtatttagttacaagttgtcactaattaacattaatttagtgttatatggttctttatattacatattcattaatagcattttttttaaaatgtaatcgcataagttttaattacattattattatcatatatatatatgaagaaatattatattttaatattgttataattttttaataataactattttttaatgttatgattgttaaatttatagtaataacatttaaaaaaaatgtaattatatagtttttaaaaattattatgataagaaccatataagacataaaacaaattttggtcgccaggaacaaagagcgtcatgttcctctgtgttgacgaacccgaaactgagtagagcaatttcaaaggcatgatgaagattctcgaaacaacatgtccgatcaagatcgtgattcttttcccttaaaatactccaacaccaccataagaaatatcgtaataatttgtaccctattcgcgaccaaactaatttccagtgctttgtgattctatgcttttcagggttgctccatcaaaaccatcgtcgttgtcggggtagcaaggccaagggagaagggagaaag

SEQ ID NO: 199483 - DNA, 1203 bp, Cannabis indica
acacataatgcccatcaaaataaaaataataataataataataacattcatcataaaaattaatatatacttaattcatttatgaattttaattaacatccttaagtactagttataatggaattggatgaataagcaaagcagcaacaatatctttagtgatttttccaacgtgtgtataaccatctccaaatttgaaaataagatccataaccctagaaaaattaagagcacgaagtaatataggtgaagctacttcagttggcttcacaaactcttcatttatttctttccatgcattaattattagcttattcagttcatcataggcttcttcttcacaaacaccatgttcaatcatatagcattcaactgctgaatgttcctcataatcatcttcctcaaactgtacattatgtaaacaaattaattagaccatcacatcatatatataaatttccatcaaaggtaatgtttttgataaattcaatcacactagctaaaaacaatatttacctaatcaatattaccgaaaaatctatcttattagggttcaagttcgatcggtaactgctaaatgtaatataaatcaaccaattactaatacatgaacaatgtgggacaaaatacacatgcacacacacacacaagtttaatcttttttgataaatttaattacatttgaacgaatacagagagaaagaaatgaagatgtgaaaatgatgaaaaggctcactcaaaaaagataagcttagccacttatatattgatcaaagtaagggatgagtttgttacaagaattaagagattacaactcacgagaagttagttaagacaactaaatataacaaagaaaataactacattataactaacttatccctaatatccccctcaagttacacttgggcagctaagtgttaacttgtcccttaagtggatgaagtggctgactggcagaggtttattgagaacatctgctatttgaaaatttgtgtccacatatcgaacatctagcttgttttccaagaccttgtctctaacaaaatgtagatcgatttcgatatgtttactgagggcatgatacacaagattagaagcaagagagccatcatctaaattgcaacaccaaagtatagggcaatgaggctatttgactaagatttcagtaatcagagactgaatccatgtaagttcagaagt

SEQ ID NO: 199484 - DNA, 1479 bp, Cannabis indica
tagggttactattactattacatttttttttttttttttttttttgaaaggtattactatacctttttgcttaatacaattatatatataattaacattaaatctgttcataacatatcacgccctctcctggttctttatatatatttattttaattagttatgtatatgttatttaatgaataatattaattttattaaaaaatatttttattaaaaaatttaatttaagtgctatttataaaaaaacataataatatttaaaatttattgttaattatacataattttagtttaatcataacactttttatttttctcaaaaaaaaaaaaaaaacaacttttcattttataatactctttattttttaagaaatatgataccgtttctttatttttaaataatatagaaaaaatgatagtagaattaaagatatgtatttaaaaaaatactatattatataactatatttaatataagataaaagataaaaaaaaataatatatatcatacactttttttattttctttaaaataattatataaaaatattttttggctaaaaaaataataatagaatttttttttttaaatatgtgcaataaattttaatttaaattataatgttaaaagaacacatattttatgttaaataataatctttaatatataacagagacaaatatgtgtaatcaaatatttataaaaaaaaaaaaattttctattatatttaataaaatatatatggatatcgatataaatataaatatatatatatatacatatattatatttgtatgaattgttaagaggaagctaggtagctagatcaagtgggttttgaactttaggtatatattagctagtgagattgggataactttttgtttaaataataagttccattgttaagacaaaattattttaatagttaatattgtaaagaagtataataaaacttctatttatagtgctcctactaataatgtttctaccaaagccatgatgttaattataccaccctctgccctcttctgattaatcgtttgatcaagtaataaattaaagcagttttggatcacacactagtggtgctcagcatttttttaatgtgtcgcgttacgatattggttagcggtactttataaaagttattatattaaacactatgagacccgatatttaattgcatttatagcgatacgtaggagagtgttagacaccaataatgttctttagcatttctccttttatatatataatttaatgtactatttaatttgtttaaatttgttaggtattgggcatatgagattttgtttttttttttgtaaaataaaatcatcattttattaaacgattaaattagttaccaaacaagataacaactcaacaggaacattgtccaagttgaaacagcgatcagggtggggttacaaccgtctctagcaaaaaagtgagcaactatatttactgat

SEQ ID NO: 199485 - DNA, 580 bp, Cannabis indica
gccggagctaccttgcctgttcggtagcctcgtcctccgttggatcggcttctatcaacggtattgattggtttaagggatttgagtgggtcaacgtcgaccgtctgatcacctcctgctcctccgtgagttttttcttgggcttgttttctttcttgttcttctttttgactcagttgatgtagctctcccaagaacctatcgtcccataccatacctgacgagccttgtctcctaaacgatgttacagatctctgtaaaccagccatggcctctctctctctttctctctctctctctctctctctctctggatctttctatatgaagaaaatagaaacttggctttataacgaaatattgcaattttcgatttggggtatatttatagggtggagaaatttataaaagataaaaagattccaactttcataaacattaaaataaaaaattaaatttgaaagagtattttgtggcataaatatttaagtttaacttgtagttgcaattaaatatctaagtttaaatttagatatttatgccataaattacttaattttaaatcatttttaaaaattac

SEQ ID NO: 199486 - DNA, 581 bp, Cannabis indica
tttttgaattgttaacgatactcctcaaaatattcaattttttcgtaaaatgagtgacgtggtggatactagtttataaatagatgcaaattatatattttttttactcttttttacgttaataaataataaaataaaatacttttttaataataatttaaattcttacttttatttttttaattattaaggtaaaaaaaaataaaaattatatgatttgcatccatttattaacgatccaagatccttagttaaaaggtagtatcttatagtgtgttaaaccaatttaagttttacacgttaatttattttttatttaataaaaaattaaaattaaataaacaaaagaaatgaacatatttaatataaattaagttaattgacgtgtcaaacttagattggtttaacacagtatgtgataccattttttaacaggagttcttgataattaaaataacagtggaacaactaaaaaataatcgcgtaacaatagtaaaaacttaatacagtagaaagtataaaaaatacacaatattttaaaaaaatatcgccccgtggtgaaaaagaaaaaaaaattaaaa

SEQ ID NO: 199487 - DNA, 730 bp, Cannabis indica
actgcaatatggctaagattgtcatcttggtgttttctgggtagggtggtttgaaagtttaagtttcgctttttcgtgcccgagccattctttattttctaattgagagccattagggctcctaatgggactgttgcttagctttctctatttctacaattcttgtgggttcccgacccaatgtttaaaggtgacaccctgcaaggagggagtttccaagcatggagtctggatgggagctctcctaacaattttaggggaggctctcctcaataccttggtgatccttacgacgtagggtatttaattgtttgggttgtttttcattcttttccctttcagtggctaaccttaatgatgaatttgacctcgaggctgtgaacatcgaggatgtaaaggttgatgtacctgtggaggggccctaacgagaccctgctcacgaggctgccccaaaggagaaaacaagaaaaactacaacaaagggaaaagcaaaagcctcatcctcatctcccgttatttataatgattccgtttggagatggatcagaacattaacaaattcaagacttataatatgatggaaaagttgtccactgagggggagtctgcaatattcccagactggtgtggaacatgttataatttgtgagagaatttgcttcccagtgcaaggatgggttcagctcttgaagctaggccatatctcgagtggggcacacttacccctgag

SEQ ID NO: 199488 - DNA, 1682 bp, Cannabis indica
tttttttgtaagctaaacttgctttaagaataaataaagtcaattataattgtaaactgaagtaatggaaaattgcttccactccaaattataattcatgtctttatataacagcgtagatattttgagtactctacaagcttaaaattttaaataatttattattttgtaagtatattttaaaataactctttttacctgtttgttttcaacagatgagtagattacaatccaaattattattattttttttatcttcattaatcaacaaacaaacaatcaacttacaactcaacacaacaaaagcccaccttacaaagaggtaaattttaacaacaataacctctcttcatctttaacttcttaaaaataaaattgcttaccctatacttagtatcttttcttatcatctctacaatcttttgaacactatatgaaaaaccattgaaaatataagtgtttttattttgccacacataatacatggtagctgaaaaaaaccaatgcaacaactaagtttacccttttgtttcccagtcgcatagtccattgttgcctcttctagtcggcgaccaagcagccccgaaccagccatttatacccttcaaaacttgctgagaaaaaatgcaggagaagaataggtgcaccgttgtctcatcacagcaaccacacactggacaaaacctgtgtcaatatgcagaattcgaagagatgatcccgagtgagtaagctatctctttctacctgccagcaaataaatcgatgttttggaatagcaaaccgattccaaacaaatcgttggtgctcaaattaatcaccatgacaaaggctcttgtataacttattgacacaaaatttacccttacaagtagcatcctccacttcttgctgagaaaacatcaatctaactttgcaaagttttttccagtaccaactagtgtcatttttaagttgatactgccgaaagctttgcccttttaaatacacatggttgatccaacgaacccatagagcttttggatgatgattgatagcccaaacatacttcgcaatcatagccttattccacttagcaccttcaccaaaaccaaggcctccttgctccttaggtaagcaacattagtccaagataagatgaaacttacttcttgtatcattgttaccccacaaaaaccacatacaaagtttgtcttgattgtgttttgaggcaataagaaaatgttcatccaataatacctcaaacccaacagaacagagttgattagttgacatctccctacataagaaaggtgcctactagcccaagtgtgcagctggttcttaatcttcttgagaataaccccacagtcctccacttttcactttgttggtctcattggaacctcgagatactttaggggaaacaccccttcctcaatctataagatttcaaataaatcagacttgtcccttttaaaattccactaaagaaaacctaagatttttgcaagattagctttgagccttgtcttgttactaaactcctcaaaaattcatttaacacaagccatcgagcctttattagctttgcagaaaataatgagatcatctgcaaaataaaggttaataatttacaggtttttgcattgagggtgaaaccgaaactccttctcacttgctccctgctgtaataaccgagtaag

SEQ ID NO: 199489 - DNA, 742 bp, Cannabis indica
acaaggcttttatgataataacacaacaaacaagagaaagagattgaaaattgaagagagaaaaaactcacaaagttaccaaagtaaacacaatgaagtaataaaattttaaacatgacaataaaatactaaggcatcactattgctgaccatcactgaattttaaccaatcatatttggaacatctctcttatgaatctgcagcttcatagtttttacatagaaaccaactttgactggttgaaaactaagcaatgatcaccattggtgatatttagcattgtttaaagtatgagaatagaaattgtagtttgaagaagaccaagccctcccaactacatcaatctagatcaagtatcccaaaatttgagagaaggatctttacttgatcaacaagatcagagccagttgcatactctgttagtagtccaacggcaaaaccaaacattgcccatctgcattcacattccaaatattgggaaacaacttctcaagccaaaaaaatagactgttaaatgaatatattcttataagtaacaagatactatactgatttagtatactccaataattattatcaagaacatataccaaaccaaagctataatattagctagtaaatgagtatgttccctttaattacaattaaaagaatagtaattataattatactatacagatataatataaaaagattacatatgaatgcttattgtttggtttagtaaaatagttagtaatt

SEQ ID NO: 199490 - DNA, 3141 bp, Cannabis indica
tacagtgatatctagtctttgaccgtgctagaattattattattattttttttttttaagaaatagcaattaatctttcttttttttcttacaattgcgacggtttaaaaattcggtctggtttgactcgcgccggtttaagaaccctgatgggtcggacgggtcaaaacactaacggagtggggctgaccaaccccatttgctatccctacagctaatagggttgaaactttgtctgattgtttgagttttctcaagtgattctttctctctgtttttttttcaattatttatttacttctgtataaaggggtatgatttacctattatccaattctcttttcttttttccttctttttaataatagctaggttttatagtgtttagttctaagatttagaaattgtgtgtattattaccatttgaaacgttacaatatgaatatatgtgttaataatgaatcataccagattttgttctaataatctgaatagaaagatttggtgtaaggaccagggccaaagaaagtttcataattttctgattttggttcaataaaatttttttctgtttctttcatgtgaatcccatttgtatgtatttgtttgtacatatattttgtttcagtactgtactgtgtttaagtttgggataattctatatcttggtgttggtgaagtgtttggtaacatcgtgaaacttctctccaaataaaatctaatttatggtttttctaggcaatttgaattgtaaatattttcagtttgtaggatttggaacaaagaaaattgtatctatttcttttttcttttaattttgttattgtcaatcaatatactccttttgtttctattttttgaaattatatttttatgttcttagttgtaattgtgtgaaatcagtgttcaaagtgctggaattttcaaaggcctaattggatttaaattggctttggtttgtgtctccttcaaactagaagtttaatttatgaggcacaatttgcagtggctgctatttgttggagatcaaattatccaaactggactttgatgtctttgtttgcttgttttctctttctagatctgttcattttctgagttattatatgacttgtgttggttgttggttttaatcttttgatgaggttttggtcttagattttatttatcacttggaaatgtttaatatctgctgcagtcgttattgttttaattcagtctggatgaaagttttgtcttattaaatatacaaagatgatgagtatcgttttggtacacaatttgtgctaggcttctgctaacttttttattccctctctccacaggggttaagcagtttttggagtggtaaagtgacaagcatttgatcagaatttggtgctggtactcataagaagaaatagcagataagtatttgtagtgtgtcacaatgtcggtgacagcaggtgttagtgatactgtgattgctgtcagggataagcttagaggtaaaattggtcaaactaaagttaagaggtattggcctggtaaagctcctgagtgggcagatgacgccgaagaagagggagatattagaatgtccaaggcagctgccttggagaaagcttttccaacacaagaatattctgaaactgtgaggaaagatgatcccaggctgcgccgtttggctgaaagtaggatagataatcgcgaggaagtgagagctgaccataggcgtattcggcaagcagagattgtttctacaattgaagaggaagccagaagacaggaaggtttggatgcagaggaagatgatgcagatgctttagaggaaagaaggcggaggattaaggagagactgcgtcaaagggagcaagaagaagctccacttctccaatcagaagatgaggaagaagtagaggaagaggaggaagaagagtccgagtatgagactgattcagatgacgagcccactggtatagcaatgcttaaacctgtctttgtgcccaagtcagagagggatactgttgcagagcgtgagcgtcttgaggctgaagagctggctgttgaagagcttaagaaaaagaaattggaggagaggaaaagagagacgaaaaagattgtggttgaggaaatcaggaaggatgaagaaatccagaagagtttagaacaggaggcaaacattgcggatattgatactgatgatgaaattaacgaggcggaagagtatgaagcttggaaggttagggaaatagccaggatcaagagggatagggaagagcgagaagcaatgttaagggagaaggaagaaattgagagggtgagaaacatgaccgaggaagaaagaagagagtgggagaggaagaatcccaaagctcctcccaagtcaaagcaaaagtggagatttatgcagaaatatttccacaagggagctttctttcaatcagagtctgatgatcatactgctactgctggaccagatggtatctacactcgtgattactctgctccaaccggagaagataagatggacaagactatattgcctaaagtcatgcaggtcaagcatttcggtcgtagtggaaggacaaaatggacacatcttgtcaatgaggatactactgactggaacaacccgtaagttctcgagtctcttaggattgatacttattgttttttcttcttaaaattagttagaaactacaagttataaggttctcgttcttctttgaatgtgtcattacatgcattggaatttggctttctttctttccttcctttttctctttgatgaaaggaggactaggaggaagccaaaccgaagtctcattctaattttcatctcttagattcttttgttgtttttcccttgattttgtttgagatttttttgcatacttattatacaaaaaaaaaaaacttttgtttcttgttcgcacttgcgagtggtgttattatttcctttgctggacaaaattcagacatgcactgttcaacagcaaatccaatgtgcttcatccttacattatatactcaaggaatgaaagtaaatgatttgaacaacattgatagaatgtcttatagaattattttatgttagcacactcatgtaacttagcttgtttatccttaactatatttacacttgaagattatgtcatt

SEQ ID NO: 199491 - DNA, 2045 bp, Cannabis indica
atgacatcaaataatgcttttttattcctccccaccaatgacgagtgccctaaatacttgccgtaatttttgacaacattcacattacttaagatagccaatctttatctcaactccattggaacttttttgccaaaacacatttttgacttgtgaaaattgatcatttggctcgaggctttggtatacttattcaatagctcatagaaacacttacattcgtcttccctcgcctaaaaaaatatcaagctatcattcacaaataataggtgagaaatagacaaatctcttctcccaaaccgtaccccattcagcctccccgccctctcctcatgttgaatcaagcttgaaacaacatagaataaaaagagaaacgtggataagagatcaccttggcgaaggcctctttgtggtgtcacggggccttgtacttcaccattaacaagaaaggagagttgtacaaaagtaaaacatcccatgagcttttggacccattcttcacagtatcccaattgaagcataacaacccttagaaaactccactcaacccgtccgtaaaccttggccatgtctaactttattaatgccacttttgatccattcatgaaccgatttttccgcatatagtgaagtccctcatatgctataataattttgtcgtcgataagccattctttcacaaaagcactatatatgggactcggagatcacctccggaagagaagatctcattccgttaactaagcattttaatactattttgtaaatgacattacataaactaatagatcgaaactccttcactctctttggctcctccactttagcttatgattattttagtaaattaatataataataaaaagaataatattttattttattaaaaatattataataataaagattattttttaatgttgtggttggagtaaatataatttttaatattaaatttgatattaatgtgacatcaaatttagtgtcaaggttagagatactctaacaacacggtagtgtaggttggattaagaatgagtagtattaaaacaataaagttcaaaaataaatagtaggtagtttgaagaaaggcttgtatagatttatgtccaatcaattaattgtatcgttgctaaaaaaaattaggagagttctatttgcactccatagaataataaatacatcatattaataaaaaaatataaacttaaaaataatttttaaaaattactcttaatattatttaaaaatattttcctcacattaattttatattaatttcaatacttattttaattttattttcatttattttttctaactcatgtatattatttttttttctaaaaaaatttcatataattttttattttgattttttttgtcataatatttaaaatataatttatttttgtttgataggtatattttttaagaatatgaattggaagaaaaaagttaaaataatttagtataattaaagatataaattttatataaaataaaaattattaaaatgggatgtctttaaaataattttggggtgtaaacaaaatcttccaaaaatttataaatatattcagtggcagagccaacccaataatttagtgggggtaattttttttttttttgaaccattaatgaaaaatataattttattgaaaaaaattataaattttgtgggaataaaaataaatatatgtgaaaataaaaataaaaaaatataaattttataaggatataaataaaaatatgtgccataaaataaaaaatataaattttataaagatacatataaaattatgcaagagcataaattaaaaaaattatttttctgcagttaaaatgtaaaatgttaaaaatttatacacaaaatttacatagggaaaatgacctcacatgggcaccttgcctctgcgactaaatacttcataaatgtattgattttgatcgaacggaattgtaggtatagtaacatgaattccaattaaggtttctgaattaattatttcattttgttgactctttctattatttattatgtg

SEQ ID NO: 199492 - DNA, 1886 bp, Cannabis indica
aatagtggaaaagtcattccactaaaatgacatttttaatatgcaaccaaacaaaggaatggaataaagattgtttcctttcctttctatttcattttattacctctaaccaaaccgccacttaatacttaattacataacactgaggagagtattagaaagagaaatagtaaaaggcatcagtggtgccaagcaccctcctacgtgtcaatatcgctattggtctaatttagtatcgggtctcatatagtttaatataataacttttagggagtatcgctagctaataataagacgacacgtcttaagggtgctaggcaccacaagtgcccaatagcaatgctctattagaaactaaaagtactttttagcaattttcattaaatatgagggttgagtttggccaacctcaaaccatatcattattatgtggccaccaggttctatatgatttaatatatcaataattattctcatgtgggttgtctttttctcttctaaattactcaactaattcatttaagtaacctatatatggtactagtctactagaccaatcttaattatttatatttctttaaaacctaaagtttaattatgtttagtgctgtactaaattgtataagaccaataaagcaaccctaatataaatctaataaacaaaacaaaatacattgtaaattggcgattccaagccttgtggagtcattacaaggatggtgccaagatgtttcattttaattttttttaatttaaataaattaatttccacaaacagaatctgacattatcttacttaagtcttaataaccaaataaatcagatccttcattgtaagaaatcacaatcttcagcgtgatttaagcttaagtattacaattattgctattattgttaagttaattatattttgtattattatcctaaaataataattgttatatctctataataccctttactctgttttactcttaactaactttactgttgattttttggtacttttattgtggcagtagaagctagcattgaaagtactaaactttctatctacttacatttactattttaccaaattaataattatgatgataaaataaaaagtaattccagctacttacttaaataaaattattcaattttttttttttaaagaaaaggtcaattttttctacaaaaattgaataaattttaataaaagctaatcaattatcaatcttctttcataataatcaaaatcttcacatggtatataaaaatattgattttgttctgtttttgacaaatctcataaaatctacttcaaatttcaaatatgataatataaagaatgttactgcaaaacattagtgatatcatattttaataagaacatttaaatagtaagtttcaacatgtagagtactatagatattattggtgtcctatttggaaaataactatgtaattgtatttgagtgtaattttgagtaattataagttttgatacatagtaactatgtaattagaggtaattgataaatctcaattatattctccaattttgatgcatcaataagaattaagtaattaagtgtatttataaaatattattatttttagataattaattttattaaaatactaattcatttaccataaaaataagaattcatgtataattattacttcacattcaaatatactgtattttaagataaagtataatcactctaatatataattattattttaataattacacaattctctatctaaaccattttcatagcaaataccaaatttgacacttggctcacaaaggatataagtttttaagtttgttcaatgaaccacttgagggtagttcaagtggccataggagagtgcgtgtgttggaggtc

SEQ ID NO: 199493 - DNA, 1111 bp, Cannabis indica
tttttttttttttttttaaccatgaatttaaaataagatctttagcaactatcaggaatatataggtttaagcgaattaaattttaagactcttcaaaatatattataaaaaaatattcaacctatgatattatataatgagcattcttattagtcattagcggtgtttagtatttttttgatatgtcgcgttgcgattagttagcgataaaaattattatattaaattatatggaacttgatacatataaaataagaaagtattaggtataattattagagcatgttttatataagaaaatattaggtactattagagcatgtttgtattattttctgttttttcaaaaataagaacaaaaaaaaataattgggttaaataattttttttttaacatttcttttattaagttataactatttattatttataatacatttaattttattttaataaaaatttagtaattatttatttatttttttatgttagatttccaaaataagtaagtcttacacatgggctcagcctacctagggccggccctgcaattatccgatctaaaaaaataaaaaaaaatcactaaatttaaaaagagcccgccattcgtgatgtggaatgagagcccattgtaatttggaaaatatgtaagatccctgttcttattttttttttattataaatttgattttgaaattgaatttggtgcatcttatcctattggtaaataaaaaataattaaaaaataagcaaacctgtaaagtaatttctttgaaagatttttgtttaaaaaagttaatttcgggttcacttgttagtaagcaatccatccagcactctttttttattttattatttattttattttatttgaaatgtaacttctattaataagcaatgaaagttctagctgcaactcataatatttaaaatcttgtcattccaaattttctaatgcattatttgtaatattataggctcctttggaacatcatacttaaattaaattgtatatcatacttttatataatactatattaaattttaatttatactaagatattatatatttatgtatttataaaaattaggagaattaatctatatact

SEQ ID NO: 199494 - DNA, 731 bp, Cannabis indica
ataaaaataaaaaattttgttgtcactacaatgtgtccttgtttattagccacacaattaaaatgtaaatgtcccacaaaaatataaaattatgtggctataaatagtgacacatttttaagatgattgggaatgtcccaactattactctatatgacattttttttttgaactcactctatatgagatttcaattatgccattttcaactcaaatttaatgtgattaaaagtattaattttaagttttttaataaaaaaaattattaatatctaggtcatcataaaatcttagtaattgtgactatagtatatttttttataatgcatgcatgcatgtcatgagttagagaaagaaaatactagtactaaagacactaataaaagagaataatattctatatggacagatctaatcaaatatataatccatatatttatatatatctataggcacataaattaaatatgtagttaataagaagccattgcaatcaccaatgtattatatgcacactttaagatatgctatgtacattttaagctagctaagacatgagggtctaccacacctttcatatactccctatttaatacatatatataatatagatataaaaaatctaagtactagtatacactatatatatagtacctctaaaatgaggtaaatctttaagttcattttactaattaacaaaccgagattcttaaatacataaggctaaacta

SEQ ID NO: 199495 - DNA, 796 bp, Cannabis indica
cttaaagtaccagcagaatttgtgtttctgccaatcccaatcccatactgtataaatccatcacaaaatacagcaaccaaacattccttgaatacattgaagaaagtacacacaagacagagttaaagtgccaaactaccaacagattccagtcttaatggtgcgggaaaataaagaaaagtgtagagccgagaattaaagaatgagtatgaacataagtgagataagataagcattgtaagagaatagagaaaaaatttaatagagaaactttcacttacaatgccaagcattgcagacgtgagtaagaacatgaatcctattagagtaatctggacaaaaaacaaagcatttcccattagaaaacttgcaaatagccacagatgaatattacaagaaagaagagtttataaaaaggcacaaagatgctaagagcggagaatattatgacataccacgttcggactgaagaaaccagaatccaacatgcgtacaggaaggaaaagttagtatataatagaaagataataatgtaccaaactaaatttaacattgagaaattagtgaaacacttataaaaaaaagctaaagctcttagttgtaatttaaaaattagaatgactaaagatattccattcgctaagtcgacaataaactgcatctgcaaccataaataagtgaacatttatataaagaaaaaaaaaacaccatactatttcagctaagttataaacaggaattccacggactttcgaattaccttccgaaaaaatggattatcaaaaaaaaaaaaaaa

SEQ ID NO: 199496 - DNA, 663 bp, Cannabis indica
tttcccatatgacatttaagggtatcagatcgtacgagctgggcctcggacgcgtgtcagctaagggcttctcctttttgaatttccttatccctagccgttggattattttggtcaagtacacaaggatacacatgctctgtacgatagcctgtcactggagacaacctctaccattgtacccgaaaaagcccgatcattatgtccatagtctgacgcatttaggtgaggcttccgtaggctaaaggcgtagcccgatttagtgtgtctcagaatgccttggtcctttctaggaaaatccatactattctcgggagcagatggctttagtacctggaacgagggagaccttcgctcacggataccctccgtgtagctagcagtcagggaactcctctttacagaggcccttcccacgaagttggtgcctttatcttcctggagcatcaattgaggaagcaggacagctgatgacttcttagcctttcttgattaataatccatgtttcatgatgacaaaatgcaaataacaatttgttgggattttatgcactaaataaaacacattaaaatctaatctgatttgttatcaataaaaggttagaagtcatttatgtttacatattgtttttatgtttgaggtttaatgtatgtacaaaatct

SEQ ID NO: 199497 - DNA, 545 bp, Cannabis indica
cgcgtgtgaggaaagtgatgatgtggtcgaatattgtcggcaacaatctgaaagggcggtgcttgtcgtcgattgcggtttaaagggatggtattggttgatggcaagcctcaccactgagaaggatggatggcaaattgtagaagtttgttattttttatatatgtatataatgttttttaaattttaatgaaagaaaataaaaaaatgttattaaaggttttaataatttttttgttatgtaaatgaattttaaaattttttttattaattcaatgattttcaaaagaaaattatgatatgtggaccaataaactttcggtatgttacaattttcagaactaggaatggagcttttaaattgggtatctacagacgaatgataatttcgagcttggggatctatactacaatttttcgatattggggacttatatgcatcaaagtaaattttttgaagacttatgccacaatttaatatcaacacatgtcatttttggaagcaacactaacaaatatgtcaaaatgagaactaatggacttac

SEQ ID NO: 199498 - DNA, 1539 bp, Cannabis indica
gattaaacaacaaattagacctcgcagtcatcacataaaatattcaaagggatggtggataacggaatatcaccaaccaacttgtgggaaaaagcccacttagccacattatgggcaacacaattacaagtcctgcttatattagagaaaatacaactagaaaaacaagaagagtgactgttacaaaatgagacatagttactaatgacccaacgggtctccttcccattgagcgcatttataactaccctcgaatcgctctccactatgatatactgggctttcacttccaaagctgcagagatagacaaacaacaagccgccgcttccccacagagcgcatcagtgaaatccaaacaagtcgtgtgaaccttcaccacctcgcccagatggtttctggccaccagtgctaaaaacatgctatcaagccccactctgacaccacaattctgtttaatccagtcttgaggagggggagaccagcattcctccaggcacggaacggggatagggaaaatagtagcacgcaagtctgcaaaagaaaattgaatagaatcaatacaatttgtcaaattcaaagtaatattattgtggaccttttcatttcgagtacgccataaattgtcgaccacaattgaagcataaaggaagacctcttccccatttaatcccttgtgagatagatcccagatgaatttgacccaatcccatagtctgatttcgttatcttggatggggtaaataccccaaggagaagagcgccagacatgaatagctatatcacaagtaaggaatagatgtccatagtttcttcctccctcccgcaaagagggaacctcacctcctcaatatgaaatctcttcctaatgactgatctaagagggagagccacaacacaatggggagctctctccaacgcttgagagagataggcagatttgcaggagaaatgtccatcctttttaagagtccaaacccacttatcctgcaccaaaccagacgaagttcctcctctcaatatagccgacattgtcacccgatcaaacaggcaattgagtttatgaacatcccaccggccatctgaggtgatcagatcagccacaaaattgtgatccccagcattagaagagcggggctttagtttgaaatcctttaagtgggggatccaaggatcctcccagattcgagtatcccttccattcgccaccatcttgcacgcacctttcttaaggatgttcctggttttaatgtttttccaaaaccaggaatctgaactcttagaatcacaattaagaaactcttttcctttaaggtattttgcagtaagcaccttacaacacagagattggcttccattcaagatgttccacccccactcaatccataaactatgcactattcctatatttatatatgaatgctcttatatatccttgtttaaaatggtaaatgagcgttaatatatgatagcataaccaacgacttagttcctttaatatatactagttggaatgtttacgctacatacagttcaccatc

SEQ ID NO: 199499 - DNA, 531 bp, Cannabis indica
atttatggtattgtgtaaaacaaagaaaggcatcttcatgtaatctggtaactcattgattaatttcacatcccatctacaaaatcaaatataattattataattacatacaaaaattaaattagtgtatgtcatttgagatgctaggaatttgtatttatgaacaaaaagtttattatatatagtatccaacaataacttataatctaaatagccaggatataagtatccaatataaatatatatatatatatatatattaattattgcatatatttaaaataattagggtcataaatgaataatatttttcagtttgtagttatatacttatttttttggggcatattaatacaagactcatttagtaggtcgtataatgaaataacaaatatcactatgtttggataaaatattatattgtattaattattatgactataaattttattacaatatgaatcgtagtatttaatttacacatagcaaacgattcgtattagcctagattataatatttataaaaagtcc

SEQ ID NO: 199500 - DNA, 1013 bp, Cannabis indica
ttaaatctaacaattttatagttcaaaaaaaaattaactaacgacctgaaaagttcaaaaagcatgatttgaacaggtctgcccctaggctaggcaagctaggcccatacctactgcgaacccaagcctaagccttaacttttatacacatatataaatatgttgagaaaaagactggtaattttgtgaatatataatgtgaaataggcccaataatgcctaaatccattaccccgagttattttttaggcccataaaatgtcatggccgactatagatttaatacatgtcaaagttcggtaggtaaaaatctcaatttaaattatatctcaaatggtactatatatatatatattttgacatagtgatgaagatcactatcgaaatattatatccaccattgaatcagagtagctctttgtctaatcgaagaagatgctttgctaaactatgagttgcgggagtaagaaagtaacatgagacaaaattgtccagaaaaatttagacaataaaactataacgtaataaaacaatacactaaaaaagcaaatgcttccgtttgtaacattaaaaattacttgaaacatcacaaaatgagcaccaaaaaataaattgtactagaatataatcatctataaacaaaataatatattaataaagtactaaattctactctaccatttgattctaataagtaaaaattaatgaaaaaaatcataaaaatacttagccaaagatataaaccttttgctatgtatagtaacttattatcacccaactatttataaaccactaaaatttaataatcatacaacattacctataaaacacgataatttcttaattattatcaaaatgtaatgtataatagattttccttaataataacttttcaatggtgtgatcagaataaataaataaataaataaataaatcatttcatatattatttgtatatatgagatataacgtggaattaacactattattaacatttaaccttgatttaataa

SEQ ID NO: 199501 - DNA, 1303 bp, Cannabis indica
ttaatctgcacatgaaattttattttatataaatacatatattacgattatttattttttttattctcccttgatatcatgtatatccgcttttctctttgtatgaattaggaaacctaatcttcgaatgcattttgttgagatttttatatttataattattgtgtgtatcccaattatacagatcgtgaggactagaagaagcgaagatagagaagtgaaaagtttaatatatataacttctgaaggaattattgtggcaatttgtcagtgagtactgtgtatatatatatatcaatttttttgtactgaaattatttctaccatacaataatgaaaatcacattatacaagatatgattgagaattccaaggacggcagtagtgattttcctccaagagaggatgatcaaggcaacttaaaagaaggaaaaatcactacaaaattagcttcaatatcatctaataataccactactactacaaatgctagctcaagcacgccatggttaaggctgaaggatcctagaattgttcgagtttctcgagtttttggaggaaaagacaggcatagcaaagtatgcaccataagaggattaagagacaggcgtgtgaggttatcagtaccaactgcaattcaattgtacgaccttcaagatcgattaggccttaaccaacctagcaaagtggttgattggttgctcaatgctgctaaggatgaaattgatgaactccctcctcttccaatgccaccttccggtaacttttctctgttgacgcctcgcggtttagaagccagtaatgctgctatgaatgccaataatcaatctaataatgaacaccaagaaggattcaagaacatcaacaatgagagtagtgaatggaatgttggttccagcagattgcccgggtctaatttttggagtaatagtaataataataataataataataataataataattcatcttcagataatgttgtttggagaggcaaatcaaaagaggtaggaagaaatcgaagtaataatgatcatgagaaagaagaaagagaagaagaagaggaagaagaagaagatggaagaagaagaagaagcaaataataatggtaatgaaggagagaacagtaatctgtttcatcaaagacaaaatgttataagtcatccttttttcccaggtatgattaacaataataccataccaagtggttaccgttgggagcctcagaattatcctttgtctttcttaggcagcggtggtttcacatctcaaactgatagtcatcatcatcatcaacaacatc

SEQ ID NO: 199502 - DNA, 1665 bp, Cannabis indica
tgattaatttaagtgaatacaaaatacaaatgaacaatatttgtagatgtttctggacaccctttcttctaaaaaattgtattcattttcttttatttttaaacaaatttgtgatcaatcactctttttttttcttctttaatttatgtgcttaagaaatttcactaatcttttgtcatcttaactcattgaaactctaatatgcacctacaaactaatcgctctgtgaatacattgtttaatattgttactgcatcttataagggtaatgataaactaaatgaggctcaagctcaagtagttgttaaatatgctattaaattgtttttgaaagctcagccactcaaaaattgatctcataactacttggacagagaagtaacaatcaaaaaataagtgagaatgactcatcatttcccatgccacaaaccgtattgggatatagaaccgaagaatcaaatctctaggtgagaattaacagcctgccacatcataaacttatgcttcggaatgcttaccctaataccaaattgcctacttgtatttcacttgaacttgttgctgataccaaattaattgtatcaaaaaatactcttcaagtcaataccaaactctaataagagtactcttagttgatctatttgtatactagtagtacatatttataatagttacacaatactaacattttactgttaagctcctatacttttttatgtaatagttgctgcgcaaactgttataccataaattgttaatgatcgatgaaattgaatttaagttcatgttcaaacaagttgcacctcaaagtgagctggagattctcagtttgggattctattttggtttctatttctagcttgctcaaaatatttaatgtaactatacatattatgatttttagtacaattacaaaaaggagttttatattatcaatatttgaattaacataaatattgttgttctttttgttgagataattattgttattgttatgattgtttataaattattttaatttatagttgcataacaatataaatctttaccgtgtcaataaattcttattcatcgtgacagtaccagtatattttgtgagtgttcaaaataaaatgttttatataagaagaatagtttaattttttcattgccaattaatattgagagattttttttttctttgataaatttgagagataatttttaaaagatttcaattaattaattagtttttctaataattttatttattattttattttaaaaaataatttaattattttcaacttaaaagagatggactagtaacaacatgatatgtttcatcctaataagtggaatcgtcacttagaatagtagcaagggaaaatagaaaaatgtaacatgtagtatgtatgtggttaaaaaaaagttaaatatatgtgtataaatttggaaaaatatagtatttatagggcaattagtatcccttagttactaatattagtagtagaaaggtttgagtacaacgtacgatttataaaacacaacaaaatgaaaccatacttcaggggtattctgtggataaaacaagaaaaaggaaagatattagacgtttatcacaagaaaactggtagctgtccatcaaacagagggtcagctgatccatccttactccataaaatt

SEQ ID NO: 199503 - DNA, 723 bp, Cannabis indica
gctctacattatcccaaatggcgtttttcacatcttggacactcaagataaggtcgccatctcttgttcccaccttgcctactagtctagtcaacctggagcctttttgttctatcccataattggtggttcatttagtttttgctccatgatctgcttgtaagttgactcgatatatttcaccgcatccattggtgcatcaggaagtcttggtagtacaagaacagacacaagatgagcctattgttcctttagatcttggatctgttttccattattgtctaatcatataatgcataacaaaatttacatatttctagtgttacatcaataaagggattctcttccttaccgtttgccctgagcacatacaacttgctaatcaggcaattcaattgccctactgtataacttgtaacacatttaatccatatcttccaaatacttaaaactcagatagatatcaatatcaatatgcgtataccataaacatattcttagtatagatagtcagtacactatttcttcccattatacaccatagttgtctaagaaagtaaggcaataacaaataacataaacaattactataccacgagttgacctgtcttcacagaaaatgtacatatttgaccagtctttaggacctttaaaaccatagttgctctgatactaaattgtaacgtcatattccataggcatgccacgtgtgtgattttataa

SEQ ID NO: 199504 - DNA, 1105 bp, Cannabis indica
cacattcatgcattgtttttctaattcacacattgtttattaattaatatacatatatatatgcatgcccactacaattataaatttccttcggttcacaataattgagtatagtttatcaatcctaattttggtttggtacgacgtaaaattgttttaatttttttttcttttttttagaaatatatggactaaaaattattaatttaatcatctgtaattaaattattccgtcaattatatttatatttttgattaggagaaagaattacgaactttaaaacgtttttttttttttttgttgaggaaaaatgtgaaataattaaacgtatgtttatgagaatattattccatcaaatattaattatataagtacatcaaactaaatttgaatcatattaaatataaacattctttgaaattgagaaaatccatacctatataatatattttttaagtgcctgatttggattttcttttttttgaataaaaatattctttcatgatttatttgtttttttacccaccatataaacataccctctatctagatagagagtatactatataattgagatcttttcaattagttttatttatgtaattataatgtaattacgtagtcaaaaacaatacgtacaaattatataattacttttaattacactcaattttctcgtaaattttcaaatgcacccttaaataacagtgagttcgtacgtagttcaagtagatgtatagtagatatattctattcggtttcaattagctaattacaaaaacgctataagctaatttttttttttaaataatttcttaataaatccatctccacctcgctttgaaaatttaggagagaattggatataattaaatgtttaattatataattttacttatttgttctatataattatactgtctaattactcaaaaaaatttatgttaaatattaagtactaaaaattaatattttcttatgtaattgtattaattattttgtcaaacaaaatattaagaattcatatgtaattaccacgttatatctaaacacgcattgtatttaaaaatatagtataatttgtaaagtaaaacgatttgagag

SEQ ID NO: 199505 - DNA, 856 bp, Cannabis indica
gtgtggacaaatctgatgccacagtcacatgaatttctaagtaaatgctttatggatgtgagaaacatagatggcttaatttggccttggaaaaatatagtttaagttgcgtctatttttgtttgagttggtacttgccaatttttattctttcatttgcacttagttttcacatcattgctacttttgttgattgcatctttcatccttacagggtgaaccagattgtccattctatctgaaaactggcaggtataagatttcttttgcttaaataatttatgatggaagcatgtttttttctctctaaattattacgttcttctgaaaataaataatgagttaaatgctttaattgctttcttacacagctgcaaatatggtatcacatgccgctatagtcatcccgacaggaatggtatgtatatttttatggtttttgttgcaggaatctgtttccatatatagtagttcattgaatagcatgcttaaagcatttcatgccgagatattatgcagccatttatccccctgcagctgcacttggacatgcccttgttgcttctccagcagctggtctgaacatcggagttgtcaatccagttgcttctttgtaccaaacaattgaccctagattggctcaggtagctctaaattgaatttcttctacatatgttataggtaattgggttgtgtcattgaaattactcttggggctatgttactttctctttctgacacagaccaaacataattaggggtatatgtttccttactactgttttagttcatttaacctgattaaatgccatggctgatcactgtaaggtgcaccattatttctctctctctctct

SEQ ID NO: 199506 - DNA, 926 bp, Cannabis indica
caacactgttatggtatatattttttagtttattttttcacaatttttgttatgagtgtatttgattaacatggaaatttcaataatttatttttttaaaaaaaaatcaatcaaacctaaactctttttaattggtaatttttgaaagaagaaaaatattcaaattcagatcttcataattgccatgtaacattgcaacacccatcctaccaagcgacatacgcgctatctttatgctgattatcaatgttatgtgaagacagtcatatataacacttgtgaatattggataaaaaaaatcgagactatcaataggtaacaatcccttttaaaaaaaaaaacgaagaaatcttaaaaacaataaagtcggtaactaaatagtcgattaggatggggaattttctttggaaatctgagtgaattgctctatacttctatattgatgttatgaaattctgatacaaaggcagcaacagttgcgtaaatccataaaatgaacacaacgaaaaatgacaaaaagcacatttccaatgtgatattttcttcactcgaaaaacataccccaaaaacttttgcatcttcaacagcaatgatagtaactatataaccagcttaaataagcagtagcattagagagagagagagttatctacgtcaagaaaataacaataaatctgaaatagcatcttcttacaagtaaactacaaacaaggagaccaaaaaataaatgaaaaacaaaaaaaagcccaagagaaataatatgaacagtcgatgcatattatgttaacatttttgtctgctgcaggttttctcaagcatgagaccgatcacacaaggacaatcatgcttagcatacaggattatattctgatcactagtacctctagcagggaaaaagggtcctggcttctaagatttgagccata

SEQ ID NO: 199507 - DNA, 888 bp, Cannabis indica
atttgattagatttgaattattgtgcaaattggattgaatctaataaataaattcctacttagtgcaaatggaaagcactataagcaaaaattgaatgaacactcttaatttattctttatggtaataatgtactaaagtaaaagaaatgtactatgagaatgatataactggagattaaggtatcaatggatcatcgaacttaactaaactcaattcagtgtctacaaattggcccattacgaaaaggaatcacacacctcaaaacagtaaaagagcccccctttcccctgatttccctatttctcaaaatgaaaaattcttcataacattacaaagcatacaaaagtaattcctgaacgatgtttccaggcaagagtcaagaaaccgaacacttgaacatcaagtgttccttctcatgtagttttagctttaggagcctttttcctcagttgccgccttggtatcgaattcttcatgcctatgtagaagagcaaagcaccaaacaacgccaaattctgcaaaagataaaatcaaaattatttaaacattatactatggctgagaagttaatagtaggctatcatttccctccagataatttgattgctaacctgagtaaacttagggaaaagttgagcgaattcctttttctcaacatcatagttatagaaatcatacaatatgggcgtcacaattgcctgatgaagaagctgcattagaagaaaacggaacataatgaactcatctgtcaattaaaaacataatcaccacaacagtttgatcaattagtttggacacaaaccagtagataggctccaaatgagctgccaaatataaaaagaagactcccaagtcctttcaaggcaattgccgcagccaccaagtg

SEQ ID NO: 199508 - DNA, 1170 bp, Cannabis indica
aaatttattgaaataattaaatatataatttgttatgcttatattaatattctctattgatcaattgttttcctctaataataaattttttaggacttcaaagaaatacttcattttaattttataaggtataattattaaataaaagttaaaataaactcataatttaaaattatatattatatattttggtaacattgtacaatgatcaaaatgtaattaagtttttcatttaaaatggggtgtatttataattattattgtgcaaatataatttctctattgttaattaataaaaaaaattcaagaattacattattattttgatttggatatagattcatataattcataattaactaaaaatacaaaatgatcattaaacttttgaaccagatgaaaatatttttttttattgaaaataagtggatatgaataaaataaaatacatttacaataataataattaataaatcgctgacactgaattctatttcatgttttattgtagagtaccgacaattcttacttaaacctccataaccaaacccgaaacaaaatctagtcaaatacttacacatcataaacattactacccaaactaattttttccttaagagaataaaaattctgaataataaatttggaagtaaacatcgtgtgagaatcttcatcagataaccaaaatcataagcaccttgaaaagtaacccatgtaattttgttgttgcaaatgagtttgtaatgtatcataacttcaagaaaaataagcagagtctatcccctcaaagcaatttctttcaaaatttatgccttggttcttcaaccaattaatagaatctggagcataagaatcacgtaatatattaaaatctctaaaattaaattgccatatgatgtagtgtttaccatcatttgagagaggcaagtttccttccgaatccgtgagtgtgaaaccgagctgaataatatttagtaagtctacattcatttttagtacgtggtatggaataattggcagaagtactttttctctttttacattaagattatgataaacacatcctggaaattcaacatcgataaatatggtagaatatcgagaaataagtttagctattgtttcaaattctatgtgcaagttatggtgccatacttctctaatcactat

SEQ ID NO: 199509 - DNA, 1286 bp, Cannabis indica
ctaatcgccttgtcagtaggattgatggtttggtaaggaatttttggtggggttttgagaaagaaaatcatggtcttcatcttagagcttaggacaaactctcccttcctaagtctcggggtggactggggtttcgaaaatctagagaaatgaatcaagctttcctggcaaaataggggtggaaacttttaaatggatgtcaatctctttgctgtcggattttggaagccaagtatctaaaaggaaaggattttctcagttgcagttataaagactctgattcctggttttgaaaaaacgttgtgaaaaccaatgcaatattaaggaaaggggcctgtaagttggtagctgatggtagggatactagcatttggagggatccttgaattcctcatttaaaaggtttcattccgaaaccgattggtgatggtagtctgagtcacaacaatgtggccgacctcttgatgacatgtggtaattgggatgttaccaagttaaacagcctttttgatcatgagactgtttccgcaattttaaaaggtcgcaatccttcgggtcaaggaaaggatagatggatttggaccttggaaagtaatgggcaattctcttgcaaatcggcttattcaactcaagttttggaaagagctcctcactgcgaggtggctccatcgctttggaataagctttggaacagcaaaattttggagcgccataagattccttggtggagtatcctatccaatgctctccctgtcagagtagtaatcggaagcaggtttcaaattgaggatatgagctgtctgatgtgtgggctgagggaggaatctattgaacacctatttctttcttgtgatatggcgtttcatatttggagatcttcgccttgggacatttacccagtttgtgacaccggcattcgcatgtgggactgggttaaattcatttggaatctgaaggacaggggtataagagttgaggaggtctttttttatgctttaattattgttgacaccatctggaggacgcgcaacgaattggtacacaataatttacctcatgtgaagaaatgcattgactctgtttgttattcctttgcagatatacatgctactttcttgccttgtcctgcgccgatattgcgggagtcttgggctcctccttctgaggagtggattaaaattaattgtgacgttagagtgggcttagagagtatgtattctacagttgtagcaaggaatcaccttggtagggtgattcgaatccactcggctcggttgaatttctcg

SEQ ID NO: 199510 - DNA, 1707 bp, Cannabis indica
ataaaagtacaatacatatatatatgatagtaaccaaccagtgcatgaagattcggttaatggcgatgtctcatgactttaaatatatatatatatatattttgaaattattaataaaaaaaaccccgattaatttaacatctaatacatatttaattatctagttttagggaataattttatctattttggtgccattgttaaggccgattaaatgttggaatgtgttagttataattaattagattctctcctaataataaactctcataaaaaacttggggccactaggatttttctggtcgacacctatagtactatcacgattatcaaatttcaaaaatatacatatatataaaaaaattaaatacattattattatagatgataatttagtgtaatcgatcgataaactatagcaaaaaaactatttagataagcatgcatgacaaacacgaattggcttaacagtaacaccttttgttatggttccaatcattatattttgcaggagggacaagatgagtaagacatgataattatattaccactactccaaatagattggattttgattttttttcttttttaaataaaggggtttaagtatcattatatatggggttgacacgttaatccatttattatattagattagttttgccttataattcaaaaatgacacttaaaagtgtgtatacttttctattttaaaagagtcatctttggtttacatatctaaattagttgaataagttataaacatatattcctatcaagtgaccttaaccttagtatgatatttaaaatctaggatttcgattagtaaatgtgtcgggaattaaatttagtatttacttataatattgtgatacattttagttttgaatatatatagtaattaacagctactattactaacctcaagatgatcaccgacgttaacaacaaaagaattaggaatgggtttgagattaagccatgttccttgatgttgtatctgaagtccttcaacttgttcatcttgaagaagaagagtgagcaatccatagtcagagtgaggtggcattcctagagttaactcaggctcaggacatgctgggtaccagttcatcacaactatttgactcccctcttcactaatatctttattaatctcatcattatcatcatcatcatcttggttaattagccctaagctctcaagaatagcctccatcaccatcatatacacggatttaattcccaatgagaactcaacagctgcttccctatatatataaatacatatatatgatcataattatgtactcatttttattacaatctcatgcaataatatatacatataagtgcttaattaattaccttagatcaaggggagaagaaggccaatggtgaggaaaattttgagacaaagcaggatggcaactaagctttaagaaatctctccaacaatacactttatcattattttgattgaagctagttccataacgaactggggaacacatgtcattactcatgtacttggatctttcactcgaaggcagctcaaaaaatcttttacttgcatctttcattctatcaataacatctcccttaataccatggttcactaactgcatccacatacatatataatcttaatttattagtactttatatattagtatagaaaaataaataattagttgccaatttttt

SEQ ID NO: 199511 - DNA, 1086 bp, Cannabis indica
cgaagaaccaacttgacaattctacctagcaaaagaccgcttcctggtaggagaagggacagttggggtgtcattaatacggaggctggataaaggaggactgcttaggaaaggcagagatggctgagggtacatgggtgccttacctttggaagttgtgggacgggtggtggaagtcataatggggtgggttgggagaggacagtgaatagtggagtgcaaagatggagactgagtggaagtggtaatgttggatgcaggagcagtagtgaactcgataaaagtagtggatggagaggaagtgacagcaggggaagtggggtcagccatggtagacacagttaaatggtctgagtggtcttgaaggctagggtgaccaatgttagaaagggaaggttgttcctcaaaaggaatggaagtcgatagttcataaaatacttttcttataaatggatttggcaggggcacggagggcatctttgtagcttaaactgggaggaaatgggtgatgatcacagtgatggagaaattttccacatttgttaaaggtgtggtcaagcttaccgcaatgatagcaatagtttgactaccctcataaagaaacttgagccacttagtgagggatagtttcctgaagtataatattattatacctaacatgaccgtaactgtaaggtataatattgttattattataattgagttttatatattttaattttataattattataaaaagtattaattatttgcaagacgttactttgtgatggtgttagatactaaaaaattactaattcattctttaagggatttttcttttatcaattttaattaagctgaatatacaattatttaatgttatagccttaattacattttaataaataatatgtcagtattttatttacaaattttaaatttttttaattattttttaattacttaccgttaaatagtttaattaaaaattgtataatttgtttagattcacattataataagttgtgtcagaaactaatcataagttataagtttgatttattacaaaattatacagaatattttagtattttagttatcact

SEQ ID NO: 199512 - DNA, 872 bp, Cannabis indica
gttctcatgcctgaagtaaggaccaaattattacattatgcttaaaataagcactaaagctctggagcccatattccacgtgatcataaggttttaaattttcaaacctgactaaccaacaacacaaagacatgttaaaaaaaaaagattattctattgcttgctaaacaactaaacatctcaagacaaaacattagaagaaaaaatggttctgtggtagaaaaatactaaaatttctgataatatttctaaggaaatcaaaattcaatcaataatgtttaataagcttttgtgccatttcattcttaaaaacaagtagacatcataataactgcaacaacaatactattattccccgagaaggttaggcaaattaacaattaaaataaatgaattgaaaatcattttattagatataaagagaaatattttagtgcaacaaaaaagattgagcttaatttgactactaatatttaaacccaaacttaatgacttactgggaaagaggaatgagtgcacactacaagcaagttaatgtaacatgtgaagtaaatctttgaatatggtcgagtttgatgaagaggattttgaagctgcaatcttgtttttatgagccaaatgggattggtgcacgatcaaacttgtcaaaatagaattatacttttaactataaggaagttgaaatgccaaaggccaaataggtctgactgttccatcatactaatcatatcaatattaagtttgtagactcacgaacctccagcttccgcagcagaaccccataacttttataaaaaaggcaatgaattggcaaaatcccaaacaatcacccaaactcgcaaaataacgaaacctaattattcactataaaa

SEQ ID NO: 199513 - DNA, 1567 bp, Cannabis indica
cagtcagcatcacagaaaccagtgagctcaaagttggtggatttagtgagatgtaatccataatccaaagtacccccaatgtacctcaggattcgtttaacagcagcccagcgtgcctgtgaaggattttgcatgaactggcatactttgttcacactgtatgcgatttcaggtctggtaatggtaagatattacagggcaccaaccacagatcgatacagcttgggtcttcaacaggatcactcccataagcagaaagtttgaggctacttgtcataggtgtggaaatagacttgacttcatgcatcttggccttgcatagtaagtccttagcatacttagtctgacatagatgcattcctctatcagtgtgagaaacttcaattccaagaaagtaacttagcttgcctaagtccttaagagaaaattgcttgttgatatcagcaatgatgtgagaaatatgatcttggttactgcctgtgataatgatatcatctacatacactagaattagtgttgtagatgtcttggtatgctgaataaacaaagaatgatctgcctttgaaggagtgaaaccaagagagagaagacagtgttgaagtttctcaaaccaggctcgaggagcctgcttcagtccatataaagctttgtgaagcttgcagaccaagtggggagaatattcatcttcaaaaccaggaggttgaatcatgtaaacttcctcttgcaagtcgccatttaaaaaggcattatccacatccaattgcctcactgtccaatcttgagcaatagccaatgtaagaacaaccctgattgttacaggcttcactacaggactgaaggtctctgtaaaatcgaaaccaggttgttggtggaaccctttggccaccaacctagctttgagcttattaacagacccatctgcattctccttgatcctgtacacccatttacatcccactggtgttctccctgcaggtaatggaaccaaagtgtaggtaccatttctttttagagccactatttctgtgtccatggcattgttccaatgcttgttttgtaaagcttctttcaaggtgagaggctccctacagaccatataggtttttggcttagaaataccagatttggctctggttttcataggatgaatgttacctgaggaagaattagagatagttgtgctattgtttggtacaacaggttgagattcagggagagtctctggcaatgggataggcacatgggattgagactgagacacattctcagctgagacaccaggtgagatttgttgttcactagtatcagggtgaacttcatgaaactattctgtgatggtattaggtggagtttgaggaacaggagcactaggtctgggagtagatagtttgagagatcaggagaagtgttatggacattgggtatgtgaccagatgtaagacaagtatctgacatggaaacaggtgtgatgggaacagagagtttggcatgagggaagctatgttcatcaaacacaacatcccttgagatatataatctcccacaggcatcaaggcacttatagcct

SEQ ID NO: 199514 - DNA, 1343 bp, Cannabis indica
ttttttttttttggttttttttacgtacttgttcaaaaccataaccaaaattaacacttctggaaacttaacttattacacacccaaaaaaaaaaaaaataaactacactataatgatatgaatgagatatctatgactgataatgataatcaggtcaggtgtaaaaaataaaatatatcaataaggaaaagtccccgtcattcgaatatgatcaagggtcctccgaagaccatacttttgtactgcccgttgaccggctctgtatccatctccgtagaccggagaaatatctgattcaatttgatgcttaaagaactcaccaagcttcttctcatagagtgatcttgtccctttttttgctgcagcggaggatgaagaggaagaagcggcattgctatctaagccagacgtgagttccgcttctaaccacatatgagctaccacttgacaaatcccttcttctacgtcttgacttagtgttcgataaccttcaagaaaacacagcaaagtttcgttagaaccatttgagagactaccaattttcgtgaaacaaaaaagaacccagttaaaggatttttatgtcgactaattttgagatatgtatcaaaagaaaagtcacctttgagccgtagccatgcatgcatcatctcatgagcaaggatggaccctgtcagcaacctgcataggcagccaaaacatgtgttttacgtttataccagcttcggatatacttatcttttgataagaaactatcaagttgagtttagtttctctgtcctttaggcctggtttggaaaacccatttcaagttgctaaaactcgagttgtaaatgcaaagtgctgaaagaatttaccttggaagtccatacaagatgagaattgcagtcacctcacagcgacgtgttagtttgtagggttctgttatcatctccactgctcggtttcctgctccaaaccttggtcgctttgaaatctgaagattttcaggttagaataagttgctcagcaattatcaatttttgctaaaaacaactgcacagtgcaaacaatatagtttccagaaaactcttacagtgctgatagtttgttcctccgagaggcagagacctctggtctcaggcatgtgataatggccctgcccattgacaaacattgaatacaaatttagcatagaaaaagaaaacaagactctaaacaaatagtctaatgctacaacttattatgcacagaagaagcaatgacacacatctccagcataaagatactactagctagagaataataactccttatagtgtgagtacacttggaacagttgctagcacttttccaatacttgaaa

SEQ ID NO: 199515 - DNA, 918 bp, Cannabis indica
tgataaatctcaaattttttaatcacaattatatgtacactttttttttaaaaaaaaaaaactcacattttttttttggagttttatatatattatgttgtagttgcgtgcaatgcacgtataactttttttttttaagtattgtatattttttagttgttatataatctttttaaacataagaaacatcatggcaaattccactactaaaaattgtatatagttaaacacaaaatttatcccatacaaatgcacacactacacaattatatgcaagtacataaaaattcttagtgtgaacccgaaaaattttcttgatgacatgaacagtaatgtttgacatgtggcaagaaagataatgtctcgaagttgagtagtcccaagtcatagcagtcaacctaggaggggtccctagccctccccctaggttgactttgtgatctccaaaattgaagttcggacttcaataactcatttgcaactgactatcttttaatattttgtaccataaagacatggagcaaccaaattcaagcatgggaactaaaagtacatgaaccagcacctcgacattaaacttggcacctaggacttcacccagtgtccaagttgacattcttaatcagggtatcagtttctaggactgtattagtgcaaacaggtcaaactttgtattgatacatgaactagacatatcactaacatatttgaagcattagaatcagattcggagaaacactactacaaaaataccaatttgcatcgattatcacattagttaatatacaaaaatgatgcaaaaaatatgtgtggaattttagcatcattttaagatctgaagcttttaagtcgatcgtctttatttgcatcggtttacaaacgatgcaaatgggcaaaacttaaaaattaaaaaaaaaa

SEQ ID NO: 199516 - DNA, 1905 bp, Cannabis indica
cttggtcttaaccttagaggtctatatcgtgccttctgttgtattcacaatggaagaagccttctttgtctccttggctttcttgacagcgcaggaggtcttctacatcctcttgaatgttagtacggtaaaggatgtcttcctcgtagtgaacagtaccaacgatttagagaaggaagagtcttttgagaatgcattacaaggattgactcattgtttattatcgataaatagccaacaccaaatgttctttattccctggaatatcgggtaaacactatttaagagataatttaaaattattttctatattataacttgaaattatttttacgctatcttattacatacaccccaatataattttttagtgtgcattggatgctaaagattgttgcgccagagaaaattatctatttagatcctatacatggccacaaagttcccccacaaattaatgcaatgttggaaaggtaataatttaattaacaaatcttttaattaactaagctatttatatttatgttaatgaattgaaatgttaatataatttttaaaacagagcatccaacattatcggagaattaaatgcgtttcttggggcgtggccatgaattttactagtaaattatccaagacaacctaaaaaccaagaatgtgatttttatgttttgaaatacatgactgacatcgtcgcacgtgcaaaccataatcgttatatagccgataaaaaagatataagttttaattattaattatcttatttattatattaacaaataatatatataaactaatataaattttttacttctttttacagtttggagaaaagaagacatacgatccaaaaactgaattgttaccattaaagcgatagtggatagaacaattgttattggtgattctcgaaggcttggacgattgatgctgaaatgtataagaattgtttttctctaccttatttttttaggttaacttgtaattagatttattaacttgttaacaactggactaattttaaaatatttgggtaatataattataatttttttaattgcttctatgaaattaatttaagtatattggctaatcataaattaatttaaataatatttaatttagttttcaaaaaataaatatttattttaaattaaataatatttattataaattaataaatatatactttaaataaattaaatttctaaatttataataggttttaaattgaaaaataaattgattattaaggatttcgcgtcgatttgtattcctttgatgttggttattagtgcatatggcgtcgattatttgtatataaccgacacggtagggtacacttcagcgtctgttgttttgaactctatagcgtcatttggataaacaatggtagtgaatttcgccaaaactaacgctgaaagcccttaaaaattgcctttaaagtccaaatttgtactagtggatattctttaaaagttattttcttaagttatataagacccgatacttaattacacaaataatagtatgacaccaagaaaagtaataggtactagtggtgcttttttagcaattctcataattttttgtaataacttttatggataatagctaattaatcatagaacaacaccttgaaatggtgtttgacactattagtacttgagcatccccaataataacattctttaaggatgttaaaaatttacacatcatctaaaaatataataatttattttatctttcctccacattatttttaacactcttacttctaaaaacactccaatgtataacactctttaaaaatgctataattatgtcctcacacattattatttaatatatatcttaatttttagctacaataactttataattagtttcaattttttattaaaa

SEQ ID NO: 199517 - DNA, 1160 bp, Cannabis indica
tatagggagaaaaatggcggaagaggaggcaaaggctttatcctacataccagaaacaatattgaagaagaggaaaaccaatgaagaagtagcccttaggaggaaagcccaattggagctcaggaaacacgctagtaagaaagataagaaggagtatatcaaaaagcccgaggaatttgtcaaagagtttcgctacagggtaggcaacattaatatatatatatatatttgtacttgtataaagatgttctaattgcaagcgtagttgtttagattgatatgtattccgaaaaacatattgtttgttcgagatttagatggaaaatgcttaaaagttatgaatttggttttttctatgtatttcgaaacacttgtgttttatttgggatgagaatcattgttaaacttgctctggtgtctttaaattatcaaactttattaaggtataatacacatccaggttttgttagttgctgtctgattcagttagctctttatatccaaaaacagctacacttatgtactttaagcatcatttttctttttaatcagttttgaaccatctatttctactgcacgagtgataaccagagggatgcaaattatattttaggtgtgtcttttgctgtgtaccaagctgtaggtgggttttttccccaaaaatggatcatggaaatagaatgacctataacagctacaatacattagaattgttgatgacctagatcatgaaatgacttttcttgcttgattggcttattgagtaatattcttacatgctatttctatttaggaggtggaccttgtcaggatgagacacaggttaaagaaaaagaggccagagttggcgactccaaagtcgaagctccttttcatcatccgcatacaagggtaggttttcaacatatttgtatgaatttcttgtctggctttctattgactgttgtcttctgtttatatcatttgtctttgtctagaacaaatgacatgcatccagcagttaggaagaccctttacaacctgaggttgaggaaagtgttcagtgctgtctttgtgaaagtgaatgcttcagtaattgaaaaattacaaagggtggaaccctatgttacttatgggtatgtgactagacttcttcattgctatttggttgtattattttt

SEQ ID NO: 199518 - DNA, 1160 bp, Cannabis indica
gtattaagtttcaaattttcttatgaagccataaattaaactatctagagtacgaaaaacaaacaaaaaaaagtacataaaaacaaagtaaatttacataatggctaattaggatttttctccccgaattttgacatgtaccaaatcatgtcccctgaacttttttggcagttaaaaatttcccatgaactattgacattgttagatttaaaaacttttgtctaattttagcaaaaaaaatctatcatggatgaatgtttaggggcatgatttaggatatatcaaagtctgaggggcatgatttggtagatatcaaagtctggggagcatggtttcgtacataaacaatcaatgaaacagtaaatttgaatgaaattagacaaaagtccttaaatctaacaatctcaatagttcaggggaaatttttaacggccaaaaaagtttaggagcataatttggtagatatcaaagtttggagggaaaaaaatcctaattagcctaaattaaataacaagaaatttgaaaattaacttagatatttttatagatatcctaactataataattttcaaattcataaattggttattttatgatatgatttattatttataattcataagttaaaaaaaatgatatttatgactattttatcattttccttttgagaaattttataaataatatcatatacattcaaataacctagatagttttgtacaaatttaaaaaaggcttagtattagttaatatgagatattttgagatataatttaaaaaattatcatttatttattattttattcttaaaataataattgtctaaccatatctattttaaaattactttatttcattatttttaattttaattaaattataacgattagaaaaaggatatgaaaaatatctagttcttatttcttatcatttttcttattagatatttaatttaattggactaaataattcaaatagaacataaatatattaaaattagtttaaaattgaaattttgaaaagatatcttaggtttttctaacaaccctaaattttaaaattaagatagttatttaaatgataatttaactatataattaataaagatctgaattcatatttgttgacatgtaatattgtttgtttatctaaattgttta

SEQ ID NO: 199519 - DNA, 2014 bp, Cannabis indica
ggctaaaaaaattaccaacttggtgcgggtttatgataaattattgaattatatacttatattaaatttttttgcccacatgcaatttttttttttaaaaaaaattgaaaatgcaatccaactagctatacaatttgagtttttatttttaattgtgaaaagcaaatgggagagtagtgaagaagactagagtgaattttattttatttgagtgcttttaatacatttacataaaatgttaccgagttgtttgtgaaagagactagagattagagattagagatttttttttttttttttgtaaaaaatagtttcaaaaaacactattcattagcaaatagttcaaaggggcggaggatttattaaaacatggcatcaatcaaaataaagtttcaaatataaaaagaataatcaggccaccaaattgtgcttgcagtagctattaaagtaaacttagttaaataatcaactactacattaacagttctacaacaataactaaaagtcacaatattgaaataagaacataaaattctaatattgtcaagaattaaactcaaagaagaatctaaagctaatgaattattaagtttatgaactaaagtttagcaatcggagtcaagttgaatattgttgatgtcgagtgtaatgcattaagatacgatatttcaaattgcaaatatctctacaatttctagaacaataatgccacaccttccaagtagcagaagcaagcacattaccatcagaatttcgaatcaccatgcctaggcccccactgcatctaccaaatcgatagttgtgtctgagttaactttgaacaacccatggggagggggaactcagcaagggaccacgacatcagaattcaattacaaaacttcgaggatggttaatgcagcaccgttgttatcagtgtggtaggcaaggagatagtcgatcacccaaggactaccaaagttcggcagcaacgacttttttttgcggactttctttgtttcgtcactcacaatggcaaatgggtcgccaagattgaaagagcaaaattttccgaacttgcacaagttggctacatccccaaagagcatgatgagttgtttccaaataagtagagcacattgggcaaatattgtcattgaggaggccatgtctttgaagattaatcatagtagggatccaactagataataatctccaaacaaagctttttaccttagaatgtaaattaagtttccaaagccaccaagaagtaccagaagaagaagcgatggattcagttatatctcgatagccaaccaataactacttttcactaaataaaatccatgcttcttaagactatacacgagtttatctggagtatctcccaaaagtcaaggtataaataaaatggctaaagcctcctcgctagagaaactattttgaactatgaaaaagttccaaccatgcaccactagagttccgaatatcagacaccaaagcatcaacgctcaaaccaataagagtgaaagagataagtctcgtagaaagtaaaagccaacaatccttaaagacgaaaattgtagcccccattgcccacagccaaacagcacccaaatcaaataattctttattatttttcttgcattgtcttttataatattttaaagagtgtctacacatttggtatcatttgttttatttaaatacaagttagttaccctatatttttaataattcttatttagtacctgtattttaaaatcatacatatttagtacttaaaatttatttatttttattaaattttatcaatataataaaactgtttaaaatttaaaaattttgaatttaaatttaattatttgatttacatataattgagattttgtttggttaaattgataaaattgtattgaataaattttactttagataaaaatacaagagactaaatatctttttcataaaaatacaagccacgaggtattaaataagtatattcctttatttattttaaattctattttatggc

SEQ ID NO: 199520 - DNA, 2392 bp, Cannabis indica
taatatgtttatgttatgatttgaggcataatgcctaaatgttttgacttacataattattataatgcagtatataatgtaattaaatattagttcttacgtttttaattaataatcattaaaaaaattactaatcattcacaagacgtcattttaataatgttaagcacctttaatagagtcggtttaaacattgggcaccttggatcattgcgtaagactcccatttttctaagacccaatttcttcttcttttttttttttgaaaaaaagacctatgttttttttttcctattatacataaataaataaaaaaaaattaaattgaaagtttatgaacgaatttttgcttttttttttaaaaaaaaaattaataatagaattatggtcttcatgtaaacgatttttttttcttaagggcccaatttcaaacttttgctcaaagcccctaaaatgcttgagtcgattctaattactaatacctaataacaaaattttatatttttatgttcaaagttactttttcactttttacggtattttataaaaacataaaaaccatatgaaagtaacaagaaaacatcaaaacaacacaaaaatagtttacaaataaaagtaaaatataaaaatatataaaaagaccatatgtaaataaaatctaaaaaccgtaaaaatattaaaaaaattgtacaaactgtatttttgtaatttttttattatttttgtgttttatgtaattaaccctaatttatataggtactttgtttttatatgtgttattaggtgctacacatggaaaacatgatatcaatggaaattacctacctaaaggaatacgtcttagggcaagaattgcagttaatttaagacctgttaaaggtattcaggtacttataaaatatgttattataatttgtttaattaagtaataatgttgtaattaatttaatttaataacataattatgtgtaaaataggatcttgcagatttaatgtctaagggtacgaagtcaaagtggggtaacttgtatgggtttatccttctccctttcaaaattgctttacgagatgatccgttggattatgttcgtgtagccaaatcaacggttgataagaaaaagaactctggaggaatcttctgcacttacttacttaataaaattatactcaaaactttcggaattaaggttaattactcttactctatgtacccacttaattaattatgtttatcactatcattatcaatcacaaaataagtacatgtgcaatgttagttccgtctatatttttttgtgatttttaaaatattgatcgtgtgttgagtcggctcataaaaaaatataagttgtgtcgtgcaataattttattgggtagacctgacacgatattcaagtccaataatttcgtatcgtgctttatttggaccgattcttcttaaatagaccaacttgttttcttatagggtagtctcaaattagtgttccttatttttgtatttttattacaattggtaagttaagtactaaaaaataattataattattataatttgaatattactattatttaatctgatacataaatatttatcattgttattattataaaatcattgacatttttaatgtgtaatacttttgaggtaaattattcgtgctttcaagcttgtagtgccaaaatttatatttttcgtgtcgtgtcatatcgtgtttaaattatattttttatgtcgtgtcgtgtctaagtatattttttttcatgtcaattttgtgctcgtgtcatttgagcttgtgctggcttcgtgtattattattgaaattaaaaaattagttatataaattatatattaattgcaggctgctgcaaaagtatcacacagagcagcttttaatataacaacaggtttctcaaacatgattggtcctcttgaagaaattagtttttatggtcatccactttcttacattgctgtagctgtttatggctttccacgtgtaagttttctcttttattattacgaaattataatctcatattacaatctcttagttaatttttacattcgaaatcatatatcagaatatttttctatagttgtatttgttatagttacaatatcatccctgtaaattttaaaaattcaaaatagtttacaatactgaaaataaagttcatgatattccaatttaccacgcgtgttaaaaaaattcaaatatattttcagcattgtaaagtagactatacaaatttttttacaggaataatatgtagctatataacgaacaccaccatgaattttttaaaaaaaattccggcatttaattttaggtacgaaagttgattaaaagattgtgacaagaggttatcagtaacacttttattattatta

SEQ ID NO: 199521 - DNA, 879 bp, Cannabis indica
ggtgagattggattttatgatcgttggattaagctatgtgaaaaatgattggcgaatcgacggctgtaagtgtttagcttggtaagcttgaccgcagtggattattaacgagtaactgctgtggagtccacgtaggtcagtggaaaatggagtatgtttttgtgtgtttggaacttgtaatacttttcattggttagtaaagtaagtggaaaataagacaactatgttctatagattgtaattaagtttatcttttgttaaacataaataagttgagaaagtaattgataaattacatggtaatttctctatagaaaggtttgtcccaaacagttttgatcttttaagacaatactgtacaaaaccagctcaattcaacattcatttacaagagtttgatgtcaaggaatcaacatcattagactccatctcaagggattcgggtacttgaacttcgtcggtaagaggtcgttccctccggggaaagcaaacgaagcagaagcgagaatgtcggtttgagtaacacaaacaatgggtgagaatccaatgttctaataaaaacctccaagaacattgaattaggagcatcctaacttagtgtacacaacaatattcaagttccacaatatatataggagcattggtttttggagtacttgaacatcatcggtaggagagtgttgagggaaagcaccggcgccagcaaaagaagcagaagcgagaatgtctggaagactgagacacaagcgagaatgtcgatttgagtaacagaaacaatggtgagaatccagtgtcctaattaaaacctcgaaattcctctaaaccaagcaaagtttgtctccattgagagctttttcaacattaaattaacatcacagt

SEQ ID NO: 199522 - DNA, 1219 bp, Cannabis indica
tttttttttgttttgaaaaaaatcatatttatgttcctattataatacaattttaatgctttaggtatatgctttatcaagagataaaggcattccattttcgtctacgtggagaaaaatacacccaaagcacaaagttccctcaaatgctgtatggctgtgtgctggaatgtgctttcttcttggacttccaatcttgatagtcaatgtggtcttcacagctataacttccatctgcacgattggatgggtaggaggttatgcagtgccaatctttgctagaatggtaatggctgagaagaacttcaagcctgggccattctatttgggtaaagcaagaaggccagtttgcttggtagccttcctatggatttgctatacctgttcagttttccttttgccaactttgtatccaatctcttgggacaccttcaactatgcacctgttgctttgggtgttggtttgggtttgataatgctttggtgggtattggatgcaaggaaatggttcaaagggccagttagaaacattgagatagaaaatgataagatatagcatctataagaaaatggaaatgtcttaggcttcttaggaactttgttatgtttcttcatcacatgaaattatagtttcctttcttctctcatttattatatccagtactagattttagtaagattctatcatcaaaacctgtcaagaaatttagcaccattgtttaagcatgcacagcatgaatataatgttatctcaagaaattttgaaccaacaagatcattgagacatttcatcaacattaaaacgggtcattaattaggaaaatattttacattattggcacacactcagcactctttcaaaattaagcagcaccaacaaaattaccctttcccaaaaaatcactgagactaggtttggaagcaattatttaattactatatattaattacattatatttttaatgcaagtcgtgtttgaatatcaagtggtaattacatgtacatttatatcgtcatgattgggaagacacttggtaattatatagtaaattaatattgtgtaatatttgatataataattattattattatttaacaaatatttaaaataaattttagggaaattattccatatactatttttttaacttttttttttcaaatttactctttgggtttctaaaatggttgcagcgctagttgcaataggggtttcaa

SEQ ID NO: 199523 - DNA, 1887 bp, Cannabis indica
  modified_base (214)..(214): a, c, t, g, unknown or other
cgaactaaaaaaaaaattactagagacatagattttagtatatatcaaaagtttcaagtgaaaaaaaatttactaaattaactttattataaagtcttttatcttttttattgtttatttttttttaaaaaaaaatttctttagttatatatagcattcctcttacacaaatatataattttcccttaaaaaataaaacgttttacaaggtgancgtttaaaaaaacttacaaaaatacaataaaaaaaaacaaaaaaatgtaatacctacaatttcaaaaaaaaaaaaaaaaaaaaaaacaaaaaacaaaaaacaaaaaaatagtgtccattattaatgagaaagacaacacaataaaatctctaacaaagtgggccatggatcaactactatctaatctctgagtctgaatctggctaaggagagagagagagtgacactctcactctcatctcatatttcaatttcattaccattctttctcactcgccacatttgggtctctccgccatgtccgacgtcaccaacctcttacgccccgtcggcggaaccgagtacagctggtgcaaggccgtacccctcggcactggaattactgttctagccctctctctttcaaacccacctgatatcacaaatctccaaaataccctccaccatttccaaacttctcaccccattctcaactcctacatccacttcaatcccataaccaaatccttctcttacttaaaacaccccgacccacatctccaaatcgaaccctttgatcttcaatcaacggctcagattctccaagacctccaaaaggacgcacaaaacgacgccgtcacaccttttcaactcattctcgagcacgagctcaaccgcaatagctggctcgatcccgacgtagatgctgacgtgttcttcgccagcttgtattctctgagcgaggcccaatggtgtgtggtgttgaggcttcacacgtcggtgtgcgatcgagcggccgcggcggcgctgctgaggggtttactgaggaaaatgagtggcggagaaagggaatttgagggaaatggggaggttagtttgggaattgaggagattataccaaaggggaaaggtaataagccattttgggttcggggagtagacatggttgggtactcgttgaactccttcaggttgtcaaatttggagtttgtagacccaaattcgccgagacaatctcgggtggtgaggcttcagatgaacccgcttcacacccagaatttactcgctgtaagtaactattacctcaattcgttaaagttcttaagtttgactttgagttcaaaaagaaaaaaaaattaacttaattatattttcttagttcattttgtttgataataattttttgtaattaatttaagaaaacaaataattatttttcttttaaaaaatatgtattagatttgttgttcgcggactcgagcaggatcagtttaataattctgtaaaaaaaatgaaatcccaacccaagtaatttacgagtgtagattggtttaaattagtatgagtctcatttaatataataacttttaaaaagtatttaccgtcgcaaagctgacatatcaactttaaatataattcttttagtaaaaggattgagaaagtcaattcaaacacaaacttagctgatataagataaatttaaacctgttaattcttatgctaatttcaaatcatattatcgtgtttgacgtgtttttgtaagtacagattcagatggtaatttctcatatttagaaaataaataaataatgactttttcctttcgaaataaactaatgggagttcacagtcacggctattattttgcgtgttttatataagggtaaatgctattttgaaccctctattttaca

SEQ ID NO: 199524 - DNA, 777 bp, Cannabis indica
tctcatttcaacactgatttcaccatacttactttcttggacaacttcaatacacaagccatagtgatctctagcaatgaaaccatacccaaaactcttgccattgtcaaaagtggctccgtcccattaactttaatcctttcttcatcagatttagtccataactgctctccatcacagttgttatgacccgtagcagtgggaaaagatttacgagaatcttttgcagttttctattgaaccaaagtaagtttagctaacgtaaccatacaagcaatagtaggtgcctttttattctacactagatctcttctatgccttcataatgaccagtacaacatgcccactagagagatttcagcacctgtccaagaatcacagccttcgtgaaaccaagtcgcaaagataacgtcaactatctcgtcttgaaccaaaaacttccctccaacactgttgagaaaatgaacaagtgactgtcacatgaagtataggttcagggaaagctttacaatcagaacacactaaatccaaattaacatgtttactcttaagttggagattagttggtagagaaccaacacatccactccacaacatatcaccaactttcggaggggatcctgtcaaatcactttcaaaagtcaactaaaggggtcatcaatccatctaccaccagaaagttgcaggaacttgtaagctgatttcacagagtaaacttcgtgccttttttggaccaaaaccaacaatcacttgtacaagaaaaactaagaggcagct

SEQ ID NO: 199525 - DNA, 1294 bp, Cannabis indica
aaaaggtagatgtgaaattattggtatgttatagccatattttgtaaaagttatttgttcacgttaattgtcttaatttgattgggcatgtcgtttgaatgagagagagagtcactcaatcaaggcatcacgcttcttcaatcagtcaaacagtactacaaaattattattattataataataataataaaagggagaattattctctctctctctctgaagttaagtacttcctcaacaagcagacccaaagaaccaaactttataagccatttatttatgatatttcatccataacttcactcactcactcactctctcctctttgttttcgaattctggctatgagattttaaaggttagtggctttcttcccaattttacccagttatgtatgtttgaaatttctgaaagagtgtgtttttttttcttctttcgatttctgtctttttctctatgatagatagatgtaatgtgaataggacttctgggaaattgttaatatgctgattttatgtggaaaattgttttttgtttggttgataattttcgattcagcatttggttcttaattctctaatcataaaaagcaatgaccattttcattttctgttttagtcttgtaattgttaaagaacttaaatgtttgggttagtgtttattgttgtgttaggcttttaaagttacatattcatattgatcagtcctgaatatgaatgcaaaagaggaacatgaagtttctgcattatgtaatttagaatagtaatagcgtttttgtgggttctaatttttttcccccttactgtgattatgatgctatgtattgatatcgaatttgttgtcctggtagaaaacacaaccatgtgatcatctatgcatttgtaatctttttccattttcattattcagagttggagagtgtgatggttcctcatgagttgaataatttgcagattgatctgagtgcagttctgtttttatttttaaggttccttgtgtatgttggaatttctttttcttgtttataagtgtttttctttaaataattgtacagggctcagttagagtttgaatcttgaagctgcttaaggataaagatggaattagaaagaaaggaaaaacgttgtgtggtaactcaaatcagtattggcggatttgaccgcaatgtcaaagcaaaagacctagtcaatttcttagaagatgaagttgggcttgtttcaggtgtaggttgaaaacttctttgacgcctgcagagtctcatccaaattttgaggtcattgatactgcaaatctt

SEQ ID NO: 199526 - DNA, 800 bp, Cannabis indica
aaaagaaaatgaagatccatctaaaagtgttatatcgttattggtataattaagtattaggtcccacataatttaatttaataactattatagaatatcgctaactaatacaaaacgttataccttatagcagtactattttggagtatttatcaaaataattcctcacaaaattaccacaataccaaaccatcttatttaatatcgtggtgaatgatcactcttaaaactgattgttacagcaataacaatgttaaagaaaacacaattccaactagaaccaatcacaagatcaaaactagaacttagatgaaattagacagaataaacttaacttgagaaggaatgaatcatggatctttattgattaggaataatcactagtacacaatgagacaagtccaagaatacaactcaacacaatgaatgattacaaaaaatatcccacactaagggaaatcacttctagagtaatactctcactacattcttcgacacacactcactatgattttggactctctctcttcaaacttgattctgaaatttgaagtatgagctttggagattggacatcagaactcatcttgagagagtagagatactcttatttatagttgttggtggggtgctttttaagttgatattgaagccaactgttataattaacaaaactttctttaaattcatttgatgtgtaaatagatagacctaatgacattcagaaattaatgaatttaatcccaacaaatattaatttactaaaaatataattataaaggtccaagattttattatac

SEQ ID NO: 199527 - DNA, 811 bp, Cannabis indica
atttacatcatctgaagtcaatgatgccttgaaaagcatgagtgctgataaaagtcctagtcttgatggaatgtcagcgatattttatcaaccaattgtgatatttttggatctttggtaataaaagtggttttacatgtgctgaatgaaggaggtaaccctactatttttagcaaaacactaatcactttgataccaaagattaagaagttgaaaaccatgaatgactttcatccaataagtttgtgtaatgtgatctacaagctgatctcaaaaatcctagtttcttggttcaaaatagtcctctctcttgtcattttcgagactcaaagtgctttcctcacaaataggcttatcactgataatattcttgttgtttttaaacttatccacagtttaaaacatagaacacgtagtagaaagggttatgctgctctttaacttgatataagtaaagcttttaaccgagttgaagggtctttcttagcagttgtgatgggtaaaatgggtttaaagtgtgatggatctctcttattatgacatgtttacataccaaccagttctcttttcttataaatggtgacatctctggatcaatcgttcctcaacgagatttaggccaaggagaccgtctttccccttacatatttctcatatgctctgaggcattatctagattattgaaataagaggaagatattgggagactcaaaggcttggctgtatctcgtcatgcacctaccatctctcatttattattttcagaggacagtcttttgtttttcctggctgatgaccgatcttgtggagt

SEQ ID NO: 199528 - DNA, 908 bp, Cannabis indica
ctggtttaaatgaatctttttttcctgttcgtgctcaaattttgttaatcgatccgtttacccccttgtctaaagtcttctccatggttattcatgaagagaggcaaaggaaactaaagaatccccaaattcccctcattgcttctgctcaagaaaataaccccctgctgccgctgctcaaaatccctcagcatcagcagcctcaactaatcctagacctgcaaagaaaatgaggccttattgctccaattgccataaacctggccacttaaaggaaaaatgttttttcttaattggctttccacctggctatggagataaaaagaaatcagagcaaactccctctgttcatcatgcatcggcttctgcagatcaatatggggttcttgccaacttgaccaaacaggaagatattcaagctattatatctctcctcactcaaaagctgcaatcaactcctactgatgcatcaaagccatttgcttcacatgtttctggtaaaatcaattcctcttctactcatttatggattgttgacaatggtgttacacaccatatatgttgtaacctttccttattttctaatttgcacaaaacaactattactaactcgatttctctttccaatggttctaccactaaactggttagatcaggtgacatattttttttttcaaaagacttaactctctataatgttttatatgtccctgactttcaccttaatctttttagtgttcctagttttcttcttccaattaccaatacaattttattcactcataactcttgtattcttcagggtacacaattttattgattttcccccatgttctatttgtcatttggctaaacaaaaacgattaccatttaattgtcaaaacaatattgctgaatcttgtttcgat

SEQ ID NO: 199529 - DNA, 633 bp, Cannabis indica
taacataaaaaattactaaccactaataatgtgctactatggtattagctatactaaatgcctgaatacttttttttaacttgtgtgagagatggattataaatatttatcatcacgtgtaaaaggaagtaggttagggctactcctcatatagtttttttcacagccaatgctttagcatgtgagacagaatcgtaccatatacatatatattaataaagagacctatatatatagctatgtgtggtgctagttgttataaccaaatattgtatgttttatagtagggattatatatagtattgtgaaaatgtcgaatattaattagacaaaatattcatattggggagcacgatttagtgattgtttatgtactaaattatgctcttcagattttgatatctactaaactttatgcccccccaaactttgatatgtactaaatcattactcctatgtcaaagttcagagaaaaaattactaattaacctattaattaatatatattattcttccacttggggttcttgtcttacttgcatgataatatttaactaattaatttttatatagaacgtacgttggcccaaaggaggggttctagtcctctcctctacgttaaaatgttcaata

SEQ ID NO: 199530 - DNA, 1208 bp, Cannabis indica
ttaactaaatttcttagtgttgtttccacactataagccttagccatcatgggagagataccaaagggatacgcaataaagtacaagtccatcaaaacaagcatgtctctaaaaaaatgatcagaagtacgatgggtacaaaggtccaagtagtggagacatccctattgtcccactcggggtacaaactaacactcgacaaccacttctccactatctgtttgacacactgatcttcatggtacaaaaggaattttgtacacatacttttggaaccacttgaatttgagaaccattagagctcaactataaaagctttatttgaatacttgtaagggggttggaaaattattacttctataagagagcatagatattcaatacaacattatatttatccattgatgttctgagtttctcttaagcttttcatttttatccttttgcatttgattttctaactaaagtttagttgacaagttcttaccgtcaacagtttccaatagtcattttttagttttttgttctaattcacctttttaaaaagggtaattagtggcaaaaatcccttatattttaattttcatacacttgacccttaaatttttttagtagtaatactattcccttaagtttatatttatttgtaaacttgaggtgccaattaaatttcattgttaaatgtcaaataagattgtcactctgagcaccatatacacttgacactaaaactttgaatctaataaaaacaagtcacatgtacatatctatacatagtgacaatccaactagtaattacggtgaaatttaactagcgcctcaaatttgctaagagtaataaacttaaaagatattgtgactaaaaaataaaatcaaaaaattaagtggataaaattaaaagataaaaaaatttagccatgaattatcttttaaaaattataagaaccaatcagcttaattttttttttccgatagaatctcgttcggaatgacaaaacagaaaattaggtttttggataaaacaaaaatttgtatgtataataatttgccacgttcaaatgtgcgttctgttttgtgtaatggatacatgacaaagggaaagcaaaagtttggtagatagatagatagatctctgttaataatgaccggtcacctatcacttattgacgtctggccattatttttaatgttatataaatatggttgat

SEQ ID NO: 199531 - DNA, 812 bp, Cannabis indica
attattttaaggttgttttactgttagtttctttcatttctttagtaaagtacttagatagttgttcccaggaagttatggaatggttggtgaatttgtcgaaccaactactcgttcctcccattagagaagttgagaataaagtgtatcacgagtatttgaaacattagttgcttgcattatggtattgaaattgtttaggcgagccacatgatcagttgtcatatcatattgtgtgacatgtgggtttttaaatccttgaggaaattgagaagtcaagatatctggatggaatggttctatttcctcgtctgagtcgtatcctaaaaattttccatactctccatcctagtatcgcctgaatttatcctccaattgtattactcgcaactagattggatccacgggttgttgctctattggttgttgcctgcttgtattttgatttaattattgtaaagatttagagcattacaattcaaatgctcacgcaggtcaggttgtctgtgatttaactgctcaagaaggtcagggtcgcgacgcctttggtcataattacttactaaccttattctcgaatagctttcggattggtagctttgatagttgctaaaactctcctggtcatctcgataataaacatcgtgatcctccttcatcttacgtttgtctatcacgcccatgagttcaagtggatctactttgcccgtgggtccttgatcttgatccacttggatctgtactcgatccagtctcttttggctcttctcgcattggccttccccttcagaagagatttgacacatgacccc

SEQ ID NO: 199532 - DNA, 800 bp, Cannabis indica
acaggctaaatttagcaaattaagtatatatatatatataaaagctcactaatattattcacacatatatagagtagaataacataacaaactcgcttttctaaatataaattagttataaaaaaagaaagataaaataataagtttgtctttatgaaaaactatatacatattataacatagtatatataagcttactaataagccacctaaagagatttcttgattggaaataatagtacatatatatatatataattaaattaggtaccttgatcaatagaaggttgatcatgatgttgttgttggatcatcatcaatggatttttgtgcttcaaagcgtgaattgcaccattattcatattattattattattattttcttgctcttttcgctgtaattaataataagtaataaaagttagagagagtactatatattaatttgtatttttgtatacataaaaaacttgtatatatatatttatataactaattataataacctggtgatgatgatgaggaagatgacgagcattgcatgcatgcaaagaagcattaagacaaagaagagtgaaaataattagggcaacacaagaagacatattgatattcattattacgatcgagattatcgaacaaatcaagtatatattatatatagccttagtacagttatagaatatgtatttatagttatataagttgagtttaagagtatatatagttgtgtatgtaataggagaggatgcgtttttgggatatatatatagtaaatgtagagatgagatgagatgaga

SEQ ID NO: 199533 - DNA, 798 bp, Cannabis indica
atatatatatgtcacgactctaggttgtttctatttgattttgatggaatggttaacaacttttaacacaacattgtacttttgatgattttgctgaaacaaattattaatgagggtatgatcataaaggtaacattttataaaaataaaatagtcaaatttgttaaaactatttgccaaacactccttaaactaattgtatttgactcactatatataaatttagtattacaattatttattatttttaattaggatataataaaattaagggattatttcataaatatgcaaaaattataaattttttatatttgtatagatttttttttatatatatatttttacagattttatttattttacaaaaatatggagtattgttttgacgttacgggaaagcaaaatgatttgtttctacaactatacaaagtattgtttttccgtgatcagaacaatgttggtttggttgctgctatggaaacagcaacgtgtaagcaatatttttggttgaaaaaaaataaacgaaccagtaaaaaaaatcatcaaaatgtaaataaaaaataaaaaaattcgtgaaaatataaaaataaaatccgttaaattatataaaaaaatattttttaagtgtattatataaaatttcataaattaatgacctaattattaataagttagacaaatatatagtttatgactcaattattatgccatgaaaaagttggagaattgcatatacatgaatattttttgagaaattttcgcctataaactaatttttttaacttattttttttt

SEQ ID NO: 199534 - DNA, 584 bp, Cannabis indica
tctcgatccccttttacaatggtctttgaaccctaattatagaagaatgaatggagttttggatggatattaggctcatttcctcttttagctataatcactaagggttgtttctttaagcagggagtttttctcctttgtaggcttgttatctaggcccaatgtagtggtttggtgagacaagagcctacatgttgcggcctatgggattgttatgggtgtgagctttctgtctgttcttgggaaaggtgtgtgtcaaaaaaggaatgaggagaatccctaagaatatttgcttttggtggtaaactaattttactgcttgtacgaaaaggacatgtaacaatacaatccctaggaatgatctgacacaagttgggaccacacgcgataagaggatccaagaggtctcgatccttcccggaggctcaagcatattcaaattatatccaaatgctctataggattagaatgaccttctgggaggctatcttcttcctggagctatatgttcttgagccccaacataattagtcattagtaacctctaggctagaccccaccggacacttgactgcctgctagga

SEQ ID NO: 199535 - DNA, 1238 bp, Cannabis indica
tttaattttattttaaattaaatttttcatatataagaataaaatatatatttaatttatcaaatttttaaatatatttgtatcatatctattaaatttttaaataactattttttacattaaaatattagttgtaaatatttttttaaaaatatgtatatgcgtaaattgtattgaactgattatttttacatgtcaatcaacatctagcacaagcagtgacggacccaaaaattttactttgtgggggcttatttatcattaaaaaatatttatacttacattataatcactctcaataaatttatttaattttgtggagatttttctactatcttagtctataattatcaaattaaaaaaaatacatttaattttttaaaatacaatatttttattagtggtggctatagcccccacataattagtagtgggtccgtccctaagcacaagtatggattttgaattttctaatctaatccgatctgcacgagtacggatattctcactttgtagattagattagattaaatagtacaaattgggtattttatgaacacccctattctctagctaaacacacttttattttaacaaatgcaatatcaaacgtaaactttctacgacactgtatatatttctttaattttaatttgtttagggagcataggagtaaacatgtgtcgccttgacctatattttaaaaagtctacaataatatggttcgtgtcgtgttgacccataaaagtatgtgaattgtgttgtgtcgtactaatattttaaagagtaagtctggcacgatctatgagcctatatttttgtgcccaactaggacttgtgtcgtggtttactcgaaaagtttgtttttcataaataagtaaatttgttttcttatacgggcttgaattcgggtttcacttttctactatttttttttatgattaatgagttaatgaataaagtaatatgtattttttaagtttcaattatttttatataattttttatctataacaaattaatattagtaaatacatatgtattattattactactgttattataagaatttttaatgtggtgcgtttgggctatccatttatgcttacatattgtgtttttgagcttgtcatgtcgtgttgtacttgaattcattttttttttttttatatcgtgttgtgccatataccgtatcgtgcccaaactctatttttttcatactaggtcgtgcccgtgtc

SEQ ID NO: 199536 - DNA, 866 bp, Cannabis indica
ataaatatatattaaaaaaacctagtccgagtccatacatacatatttataatatactgacaaacacgttaaatgtgatttggtgacccattgcagatacacaaaacttcatacttctttatgacgatgcctacatttgtatggcactgaaataagtagctggtcccactcccacccaaaaaaatgagaaaaatatttggaagaggtcttaaaaagtctctacaattctcttaaatgagtaacatataattgggtgagacaaaaattaagttgactgaataatggaatggaatggaagtggtccaaccaaacgcggccttactcataattagcgtagctaacccattatggcattattatatttatatgattaagaaaaagaaaaaagaaaacagtctagctctcctctcacttcttccttatccagttttcagatttgttctttctgtttatttggaccatcctacaatatccccttttatgttacactttcacaccagattagagtagagtggcttttgtaaaagttttgatttttaatttcttaaacaacaaatataacaataatttttttctaacaaaaatgtgtttgtaagtttttttttttttaatttaaatgaagaaagaaaaagtaaagtcgtgagagaaaatgattaaatagaaaatgaagtaaatatttatataacaaaaaaagtacaaaataaactataattaagaaaataattatttaaacaaatttgagtatgtaaattattcaaaattttaaagcttattacgacagcaatatttaagcactgtcattaaaaagaaatatcctgcttccaccataatgtatttttgggaacttcaacaaaaaaaaaaaaaaa

SEQ ID NO: 199537 - DNA, 837 bp, Cannabis indica
aaccgactacaccacccagacaagatgctaggatatcagattcttttttaattattacaaaactacaatgtaaatatgacatgacaagtcctgatatgtgagctaatgaatttggtgtatgatccccataaaaaactgtatatgattggttgtatgactagttaagaaacaaaataattatagtgcgaaaatctagttgctgatcatgatatcaaaactttgccaagtgttgagaatcatggggttccaactcaaaaccaattggtaatgagtggagtatgatcttatagatggctcaattctctaccatttattccatgtgggacaatgtccacaataataagagactaggagatgtggctaaaaatagctaaactaaattacatttttactttattattctctttattcatagtacatatatacccacccccacccggcccccttgattatatatgttaccacaggttcaatcacgggagacagctttttcaaaaagctagatacttggtaaaaatttttggttctgtaacaatgaaagtagactccactactaatggaatatataattattggcagactatatagttaaggatcgtccttcccataattgtccctttacatactatacatatactttataaatttatagattaagtgttcgtgaacgtgaaattaataataacattattattgtactctcttatattttaatgttagtgtaggtagtaggaccagtggaccacgtacattctaatgactagaagtttgttgtcgaacgtcaattctaaggcagtcaatgaaagaaaagtgaatcgactgaatgatacgatagta

SEQ ID NO: 199538 - DNA, 727 bp, Cannabis indica
ttttttttcttggctaccaaacagaatattgctttacttttattttgtacatctctatcttttctcatttattctttttttcttctctctcgtttttttcctttttaaatgttttggtcccatgggctcctccattcagtcttcgttttcgttttcataagttgcttgagttcggattttacttgactttttcaatttattttggaccattataagagtcattgtctttagtaataactttaaatttaaaattcaaagttacaatgaattgtgtctgctctgtaaaataaatctgggttttgcatttttggtcatttgcagatatgtcgtctaaactgtaaagctgagtaagtaactcaaaagtatttgcccacttgggtggttcatagttgaggagggtataaacgacattttcattttggtaagtccttttcatattaataataataataatccaatagtatattgctatatgattcttcattctttcttctccttctaatttgttttggttatgtcatcggtatatacccatttaaacaaaagctcattccctcattgttattttttttaaaaaaaattgttttttctgaatttttgaacgaaaaaagaaagatgaagacaagggaatttttgttgatttgtgaaatgggttttgtcagaaacttcggcttaacaagatagtattgattcttttgaatcggcttttttttcttttaattttttt

SEQ ID NO: 199539 - DNA, 708 bp, Cannabis indica
gtatgtcggtgatgatctccgacaggaggctcgtcattggtttcggtaagagaaggttgaaaatgagataaaagagagtaattatactttataacattgagcaatataatcaataataatatatgctatatagatcattcttatatatgcatcgttaaatttaattttattaccttcttattaccttcgatataagcagtgtacttggttgtaatttacaaattgtcatcagtgccgaacgcttgcggccaaatgattgattgaatgaaaccaaaatagaacgaaagaactccaagaccactgctttaggacaaagatcggcggaatttggacattttgaaaggaaccgagccacggcaaggacgacattgagctgagggcgcgggacatcggctacaaatcaaagacggctacgatgtagcacaattgctatgattggccgattcgttcacagacatggtcagaacaatcaaaagtagaattatttttatgtatatacaggtaatcatcatcaacctcttcatcattgttagcatcatcatttttccactctatatttccactcattgttactgtatccatgtaattaatcgagcaaaaacgattattttcatttaaatagtttattgatttttgagtacatgcatagaatttgtgaaaaattattcaagtgatatacttgatatacgtgcactgcattttgtagga

SEQ ID NO: 199540 - DNA, 2051 bp, Cannabis indica
tcaggacaatgacttttcacaagctgagagagcctacggaatgcacgtgtactctccaataatattttaaacattctataattatgttatttatttttagtgattaatttacatatattctcaaaatatattttgagttgcagatgttaacttcactattcgctccttcacatattattattttgagtcaaaaggaagattatagttgtgttttcattactttgttttatactaaaaaaaaaaaagaaaaacacttaaaagatcaatctaaaaatttgattttatgtttatatgaacaatttatgtttattggttttgttaggtctgaccctcaaattagaggtaaggtcgcgctaggtttctattataaaagcgagatttggtaaatacgggtcgagtcggcctatttgtatatctattttcatacaagtcaaagtaaaattatatgaaaaattagtaatttattacttaattatcattaaataaaagttataatttatttcatatataatttaaaattttttaaacatccgccgcaaagcgcggattgtttactagttaaataatataacaataaaaaattaaattttaagaatttgtttatttcatataaaaaaaattagggttttttttatttttacacttcaaaacagttcttttttttttcgttttttttttttttcatatttttacgaaattctacatagacaccctattgcaactagcgctgcaatctaaattacaacaaaaaatcgtacactattggaagcaactactttaaaaacccaatttaaaaacccaaaccgtaaatttaaaaaaaaataaaaaaaaaattatataaggtaattccaaaaaaaaaaaatatatttaagttttttcattatattaaagtcttggtgaataataaagcaaagatttccatataaaatggaaactctaagaagaaaatcatagaaactcaacaacaaaataaatcaaagaaataaacaaaggtacattccttttctcgttcttcccttcttctttaccatatttctaaacataaattaagaaaacttgcattcaacggtgtcactaacactgacttcactccctttcatcctctacgaaatacattttagattttagggttctcttcaacctcataatttctttaattttcgaagacaaaagctctgtatcgcccccatttttaatgagtcatggtgagtgaacgttacttcacaggttttatttattctatttttcaattaactatttttttccatggatgaggaaggagcagcttcggttgattctgatgagaaacataaaaagtgttttcaattcatcaatcttgatcttctttctctacgtggtttgttgagaaaaaaatgtggattttgtttttttttttctttttgcagtgttgattattgattaactgtcatggcggtacgtgatttaccattcaaagtgggtgcatcagccgaatcaagatcatttagcgagggctttcgcggtgcgtggttccgctgcaaggtaaaattatataattcaaattttgtgtggcttcttgggtttgcattgctatattcgtttgctggctctatcaacggtggtggtaggttgcattatgttttctgggttgttaggattccatattcattgctgcagttctttcgtatcacattatgttattacagtttggttgtaaaactacagtatttgaaatttgatcatataagaataaaatgtctagtttaggacaagtatgtacatgaagaagggccaaatccttgccttatcacttgctatataatttagttagtctcttctttagttgggcaagagatgtaaagctgctaaaacatatggtagagggtcagtatattctttgtgatccttcttatttatcacattggttgactggattttcttctgttaaattgcatgtttcttcaggcatgtgatttggtccaactaagatcgaggttcgagtcttacctacatagcaattgctatgatttcctcgtaccataatattgtagagttagacgaagagcttagtt

SEQ ID NO: 199541 - DNA, 914 bp, Cannabis indica
gtttgccaaaaattactctttgaggagggagaccaggtacataaaatagagttaaaatgctaaaagtgtcttcataactcgtaagagtctaaattctctttaactctttagtctttctttgtttaaataaataaataaaaaactagttggtttggttcgttaatccattttgcagccaaacgagcccaggaaaacaatggtagagatttcatcatcaataaatataaatgaagcttatattcattcaaatattaatatttgaacttttaaaagaaatatattaatattttcgatggtaactcttgaaactacctaataataatttatatattaaattatttgtatctgtaagtaaatctatttataaatataacacatatttcaatcatccttaataatttctctccctccaaataataaccaactcccaaatacatctatattccaggacaggcggagaagaagaagaagaagacataagaaattagggttttttatttaatttttaattaaatctttttttgtttggtaagggtatttaatattgcaataaatttttaactatcatcaaattattttgccaccactgattctttgatgccacatcatcaaataaaccaatatctgttaaaaaacttaacagaaggggaacattaatatagtggtaatatattggggagattttttaacaatcagtatattttagggtgcacaagtaagtagtgacataagttcaggagaaaaatttgctaattattctaagaaaaaagtaatcatgggaggaaattaatgtcaattacatatcacaaaattgatcattgttaatagattaaacaaacaaaatatttgtcaggtatatgtattcagaacaaacaaaaatcagtatatatcagtgttaagcaaaaattttacat

SEQ ID NO: 199542 - DNA, 1112 bp, Cannabis indica
attatatatatatatatattaatatttatatatgttgggcccgctctttcatcttgtcgggccgctacctgccatggagtagtgtctcccctccaacgaaactaccttatgccgccactatcatcacctttgttaggtggactttcgactcaggtcctaacatcgatctctccatcttgtaccttgtcgggtcgctacctcacctgactcccacattagtatgatattgtccactttgggcctaagccctcactgttttattttgggcaccttcccaaaaggtctcatattaatggagtagtttccatcctttatatattcataattctttccattcctagccaatgtagaatttttggttgcattcccaacaatatatattgaagttatgaatatgtgatgtatatatattacaaaatagaaggaaaaattattattcaaacaagttaaaaatacaaacaaacacaataagaaaagaagattgatgaaataaattttgaagagaaagtactaaagcagaaaagcttgaacgacttttaagaattttgtccaaaaactttatttgccgcactagtttagatcactttttagctcatagaaatgacgagtttacatacaatattgatgaagaatccaataaaagaaaagaatgtaagagagatgctcattaattactaacattgtatgtgagatcactctcttaattaaaatgtcgcttaaataaattcaattgaaaaaagatacaaacttgtgttgcacaacgagagccacaacactgccatttctattcatacatgcagtgccatagtgacaccaatatattcattacagtaatgagacattttaatttttatgaaaatatttatagtgatgcataatcatttattattgattactaattttgtatttactaactccatttactatacactattccacttttattgttgttttaatgactttttatgattatatttttttagttctttttggaacatcatttttttttaaaatatatatataataggtactactaactcttaatatacatccctacttgttaaaaattgtcgacatataatctattctttatattgtgtagtaaaattacc

SEQ ID NO: 199543 - DNA, 1269 bp, Cannabis indica
agtaaaattttcaacatcgtatttggttacaacaatgattacaaaccaagctctgataccagtttgctgtgaaaattcaattaatgacttacgatgtaattttactggactaacaaacacgcaatcaagaacaatactataagagaattgcaagaatcaagtaatagattaaagcagtaaaacagagaaaaatacacaccaagtttaacgagttagagttaggaatgtaaacggggcagggcgggtgcggggattgctcccccacccccatactcgcttcctaaattcaccctcatacccgccccaatacccatttaaattaaagctagagtgaggcggagattacccgacgggggaaggatttctatcgggtacccattacatatatatttttgaaaaaaaaataatgtctcaaagagaattaaaaaaaaataatcataaaaactcagtaaaacaataaaattaagtggaatagtgtgtatagtaaaataaaatgaagtataatcaataaaaaacctaaaacatgaagttattttaattgtagtagtcatgattttaaaacttaaatatatacatatatcatatcggggcgggtatctattcccctgccccaccccgtttccaatccaggtatgaacatttaaacccatacttgtcctcgcccccgaaagtcaacccctattcccgccccattaggggcgggtaccctcgggtataattgtcatccctaattagagcattgtgcaatgctctatgtatcggtcagaacaacaacagtcatatctttattaatatttgtgttttcaaggttacaagaattttttcaaactattacagagatcacaagatgaactttctctctagtttagaccctctctctctaatcttagacaatcatgattttctctcaagctttcaatggtctaattctctatgggttataaaagcaatagctataaatagattttcatagttgctaaaattagttctgattctatcgtggctaattaattatgtctcaattctctaagttagcaccgacaacatattccatgtctgcttcagaaacgtgccttctgtacggacaatctggaagacaatcacatgttccgaatgggagttcaagattgatactagctatctagaagtacgtctccagatttataacaagctattcaaaaaactttacttacagaagataagctttccagaagaactattcagattggccacaactttacaaattaacaaagttttttggatgaacac

SEQ ID NO: 199544 - DNA, 1592 bp, Cannabis indica
caactgcgaatgaagagaccacaaccactaatggagaccacaaacgtagaccacgaatggagagaacatgaacgaagacattctctctaattttgtttttttttttttttgagtcggttggatagtgtccgatataggttcgataggaggttccaaaatttaagtttttgaggttgatggtgaaggtctgatatagatttgatggtggtctaatgcttactaactgattggtggaattatttcgtatccgatggggaataggagtctaatggggtctggacgtactgagtctgatgttggagaacgtattgagtccgatattagtctaatatcagactcagtacgtccggaccctatcggatcatcatcagatagtgtcgaaccccatctggacacaaaaaccctaccaattcgttactaagcatcaaataatcattgaccttatatcggaccctcatcgaacacaaaaagcctaccaacctattgctaagcatcgaacctacatcagaccactatcagaccttctccatcaccttaaaaacttaaattttggaacctactatcgaacatatatcaaatactattggatcaactcaaaaaaaatgaaaaaaaatcagaaaatttatagagaatgccaggttggtgtgggcttgtggtttgtatttgtggtcttcgttcgtggcagtggtctctccgtttgctgttgaggaaataggttgacttgggctcgaatggattgaaatggagtcgagagggtcgatccgattgaatttttagtgggttgagtgctcgtggaaggtggcagtggtgttggatggcggcggtgatcttggatggtgaaggtggcagtggtgttcggttcttttgaagagagctagcaagaatagagggagagagcgacgggagtgagttgaaaattgagagggataattttttatttaatgaaaaattgatttaatctaacaatattgatacactaataattagaagataaaatttagcctaataaatgaatataaaatcaaaatttccctttaaaattagtgaaaaaaaatatgctaattaggattttcgccccctgaactttgatatgtaccaaagcatgccccctgaacttttaaggtcgttaaaaatgtctcctgaactattgagattgttggatttaaagactttttttcaattttagtaaaaaagtctaacatggatggaagttcaagggtcataatttagtacacgtcaaagttcgaggggcatgatttgatagatatcaaagtctggagagcatggtttagtacataaataatcactaaaatagtaaaattgaataaaattaaataaaagttcttaaatccaacaatctcaatagtttatggggcatttttaacgacattaaaagttcaggaggcatgatttagtacatatcaaagttcaggagtcaaaaatcttaattagctaaaaaaaaatatgtaatgtaattttaaatttttctcttaagcacaaacatattctccctatgaccatggcttagcctgtgtacacccttattagacgtacataaattaggaaaaaatttggatatcaaaacttgccat

SEQ ID NO: 199545 - DNA, 1481 bp, Cannabis indica
gaatctgcctacagttcctgttatctgtagtgataacgtgagtgccagtgccctagcctcaaatcatgtgtatcatccaaggactaaacatatagaacttgatgttcatttcattataacaaaaaactgctactcttagccacaacataaattttttgtgactaaatgtgacttttagtcacaacaaaaagttagttgtgactaaaacatatatagtatttagctacaagttgtgactaattttagttttagtcacaacaaatattgtaactaaaaatatatttagtcacaacaaattgtaattttgtgattaatacttttagtcacaacacaataatgataatttataattagtcacaatttttttttatctttagtcacaaattttgttgtgactaaaagtatgattttttgtagtgtttgagacaaagtcttttagaaatgagtaaaaatttgatatattcctccacatgacaaaatagcagattgtttaactaaatgcttgtcaccaactaaatttcagttaaaaatgtcgatcggtttagtttttttgtactaaagcataatttcatcttaccaagaaagaaagatgcagttgaggaggatgtattagaaaatcttcaaaaaaaggtgctttttgctcccatgagtgagctactggatatttccatgctttgaggaatttctttcctcctttctcttatctttctgtcttttattctttctggtcgtgtgatggcgtctcatgattctggtcaaggctccatgaacacagaggataacgttggatctgctgagggtatagaggtgcttcgtcaaaagttcttggaggaggttacgttggaacttgagcctgacttcgagattagtgaggaagttgcctagagtggtgttttggctaaacttttcggtaacaaacctctttcgaggggtagagtaaaacatattctgactggcatttggtcatgcaaaggtaaatggcgtttgaagacgatggaggctggtctttggggctttttctttgaacatcatgaagataagattgagattttgaagagaaccccctggatcatctccaactagctgctgaatgttcgggactggcctgttgatggacactggcagagtgttaacatgtccttggcagccttttgggtggaaatccatggccttcctactcccttcctggctgcccagaactctgccgttatcggagccaaagtgggaactttcattcaacatgatggtgcggccaatggagttattgctaggcgtggattcctgaaactaaaaatcgatatccttattgatcagcagcttcctgctggttttttcctaagtattactaggggtcgacgtgaatggatacagttcaaatataggaagctccctacattttgtttcaattgtggctttcttggtcatgaacgaagcatatgcaggaagccaaaggcttttgcttacccaccggtaggggatgc

SEQ ID NO: 199546 - DNA, 1655 bp, Cannabis indica
ataatttaatctaccttacattaatccgtccagacatttcctattcagttggagtattaagtagatacatgcaaaaattgaagaaaccgcttttggaagaaatttgatgagtaatgaggtatgttaaagacactatagattatgggcttctatacaagtataatggagagatcaagttgattagttattatgatgcagattatgccggagatcatgacacgtgataatcaactactggttatttgtttaagattagaattggagttgtttcttggtgttgcaaatgaaaacagactatgtgattatcatccacgtaggtagagtatagagcagctgctatagtagtacaagaaagcacatgattgatacaattattaaaagatttatattaaccattcaattactcggtgccattgtcctatgataattaatcaactatttgtttagctaaaaatctagtattttatggaagaacaaagcatgtaaaagagcattattattttttaagagagaaagtacttcaagaagaaatagagatgcgaaaaatcagtacagatgatcaagttgctaatatattcaccaaaagcttaagcacaattatattatcaatatttagagatcaactaaaccttatcaaacgagaagaagcttgaaaaacatttgataatgagacagagtgttaagagtcattattaaatctagaatctatatgttgaaatattttaaaatattctaataaatttataagagaaatcaagaacactcttaaaagttttagagaaaacttagaatgacttgaactaagattagatagttttagagttatttagaaaatagtaaaaagtgattaattagttagtaaattagaaaattctaaaaatatttagatacattcttttgtagtctataaatagaaatgaagtgtgtgcttatgacgtaagtttgagcaagagagtttaagtgtgagaaaaagagtccaaagtgtgtaaaaatataagagtgtccagagtcattgtgtccaaagtgttaaaagtttgtaagtagctagtcttcaataaattaataaaagtgttgtaatttcttactctacattctgcaattaatcactgatttagaccataaaatctagtaggccttgccttagccaagaaccgaagcatatctacacaattgtacacaaataaatgaaaaacaaaaagactttaacaaagtagacaaggggatcccatatttgcctttcccaaaaagacctctgacaaaaggccaaaagcacatcaccacccaaaaactagccaagtactccccaagccctacctcatctcgtccaccctcccacatgctcaatcccaatccagctacttctacaaacaacaatgttgtgggtggcacaaacaacacagaatcatcgaatgtaaacctaccagcgtttacaacctccttatcttttgaattttcagtgccttgtgtagtactactgctcctagtcttatcattagattctttttgtgttacttcaaaaacgatctctgaaattcccaatagcttaagtgggaaacttactactccgaataacattgaagtggttgcatttatttttgccattttcaagttgttccaccatgcaataaatgattggccatatttacgataagagt

SEQ ID NO: 199547 - DNA, 1746 bp, Cannabis indica
aaggaaattcaaaagaaatcaaaggaaaaattggacaacaatggtgtaggaatgtttgcaagaagcaaattagagtctagggatatcaggaatggtaatcacaagtcaaacaataagagtaaccattccaagggcagtagcagtggtcaaagaccaagatcgagttccagcacaaattcaaaggcatgaaaacaatgctactattgtaagaaggagggtcattttaaagatgagtggagagcccttaaatcaaaactcaacaaagaaaagaagaaggattttggagatgtaggttgtgttcttgatagatatgagtctgctaatgcccttgttgcatcaagtcaagccaatggtgatgagtggattcttgacccaagttgttcttttgcagctttcaggaacaagatagtggtttagtcttgttagaagataataaaagcctgcaagattgcaggaattggttttgtgctaatcaaaatgaaaaatggatcagaatgaaccagtagagatgtgaggtatgtccccaacctaaaacgaaatttgttatgtattggtgcactaacacttaaaggttgcagcatcaagattgatagttcacttagagttttgaaagactctatagtggtgatgaaaagaaatcttagaaatgggatttactacctagctggcaaaagagttgttggtagggctgcaatagtagtcaaaaatgaaggaatggaccagacaaagctatgacatatgagatttggacatgtcagcgagagaggactacatgagcttgagaaacaatgcatactcaaaggtaaacttggtaagaaattggatttttgtgaaaattgtgtttatggcaaaagttacaggttgaaattcaaaaaagccaggaacacaacaaaggcaaaactggattaccttcactctaatctctgaggtgcatctagaataaaaacaattggtggagaaatctattttctaagtatagttgatgactatataagaaaggtttaggttttcttattcagtaacaaaaatgactcttttaacaactttgtcaattggaaaaccttgatagaaaaccaaacaaataagaaaattaaaatgttgagaactgacaatggtttggaattttgttctgatgagttcaacaggtattgccaagagactgggataagaaggcacaaaactgttatcaagacacctcaacaaaatggcataactgcgagaataaatagaactttgattgaaagagtttggtgtatgatgacagctgttggtttgggaaaacagttttgttatctcatcaataggtgcccctctgcagcactgaattttaaaacccctcaagaacagtggacaagccatgctccaggagttgatcacttaagggtttttgggtgtactgcctatgcacacattagacaggacaagctagagccaagggctctgaaacgttgttttattggatattctgatggggtaaaagggtacaagctatggtgcttagaagatggtttcagaaaatgcatcatatgcagggatgtgattttcaatgagagtgaaattcctatgaaagaatcaaacacaagaaacaagactcagacaaagatcacagagagtatgcaggtttaacttgaagagactcaagatgatgctagacatgatgaaacaaatcaggaacaagttgaagacaataaaatagatcaaggtggatcttagggatatcaacttgttagagagagagagagagag

SEQ ID NO: 199548 - DNA, 1173 bp, Cannabis indica
ttctgttaaatatattggtaaaattttagttaagtggcaaatgtaattggttgggacagaaaatgagacaggaattgggacagaagatttgaatccctaagactcaatgttttgctcagcattatttgcggcataaatattatatcttttcaattgcatacgcttaacacattttttttgatggattaaatactatgtgttattttattttctacggattaaataatatatgttatattattttgttgctaaattttattaaatctcactaaactaacttgtatcaattaattaattggtgttcttgagcagtgatattgttgtttctgtccccttatctcgaggtgtcatatttctttgttttatgggtatatagggtactcagtctttgttggaatgagtatataatttggagctcattaagttgttgggttatagtgtataattaagtttaactgaaaaacaatgtagatgttttcaaatggtagagacagatcaaagtagaataagcggcagatttagtacagaaaccgaaaatgaaaacttcatgtaatacatgtgaggtacaaagcaaagtacgtcggcgtagcactagctagtacataataatgaacttggcccatacgtactactacttatcctaatgcatattatataacacgaacatacataatataaaaacctaactatatatagaagaaacagggagtggtacagagacccccaccatcatcatcatctatctagctagtacgtgtagtttttccactttatttcaaagtcgctacgtatatacatacttaataattatagtaattaagcaaattaagacaattatttaatacttaaaccgtgtttggcagcgtattggactaggtaatccaactcacccttatctacaaacccgtctccgttcttatcggcaaagtgtcgggctcggaaggctctccagccaggagcaaaacaccaaaacttttgaacgcatttttgagctctctttgctgagccgaccgtctccgttggcatcgtatcgctcaaaaatgcctttcaactgtttgtcgtcgtacggatgagtcaaaaccttaaaattaaaacccattcgaaaaggcttatttatcagaattgatctaaagcagaaagagctaaaaatattatagtagtttgagatgggaa

SEQ ID NO: 199549 - DNA, 2010 bp, Cannabis indica
taatgacaaagcgtcatcttctctgcatgttcaaataactaaatatggccggaactcccaaccacctactcaactaaatgattatatttgcactattgatggttcctctacttccacgacttaccctttgtcgaacttcttatgttatgacaggttgtctccttgatatcttgctcctattttagccgccaatgccattttgctcccgccagctataaagaggcagccactattcatgaatggaaccaagctatggacaccgaaatcattgctcttgtggcgaacaagacttgggatgtcattcctcttcctcccggtcaacattctatagggtgtatgtgggtttataactataaacataatgaaaaaggtgagattgttaggtgcaaagcccggttggttgccaaaggctatacccaaaaacacgggataaactaccgtgatacttttgctcctgttacaaaatttaatactttcaaaatattactttctatttcagcaatcaaaaattggtccttatatcaattagacgtcaacaacgccttcttacatggtgatttgcatgaaactatttacatgcaacttcttaaaggctatacaccttcaggattcatttccaaaaatgctgtttgcaagctgaataaaagtctatctggtttgaaacaagcctctaaacaatggtatactaaacttagcaaatatctcttatctaatggttttaaacaatcttcttctgaccatactttgtttatcaagaatactaataatattttttttagctattcttgtatatgttgacgatattgtcattgcttctaacaatgatggtgttgtctagatttttaaacaaccattacactctactttttacttaaaagatctttgcccattacagtttttttttaagattggaaataggtcgttctttggctggaatttcagtttttcagtgacctttgacgcttcaacttctcaaagagacaggtttcttgggagctaaagttgtctctacccccatgtaacccaatatcaaactaagcaaggatgttggcactcccctttcggacccaaccacaaatcgaagacttattggtaagctcttttatttgttcattactcgtccagatatctcctatgctgtcaacactttaagtcagcttttacatgagccgcgtacccctcatttacatgatgcacatcgaattcttcactatctcaaaggcacaccaggccaaggcctaattttttatgctaattctaatcctcatttgtgtgcttttgctgaatctaactttaaaaatgtagaaccacaacttaaaaatttttcagatgcagattggggctcttggattgacacccgtaggtccatcacggggtattgcgtcttccttggtctcatggaagtccaaaaagcagccaacagtttccaaatcctctcatgaagttgaatatcgtgctatggctcaggccacatgcgaaatcacttggatctttgctcttttatctgacttaagcattcgtcacactagtccacccgtcttatattgcaacaatactacaaccatacacatatttgaaaacccggtgtttcatgagcgtacaaagcacattgacattgactgcgttgttaggtaaatgcttcaataaggtcgtctcaagcttcttcatgtctctataaaggataacatcactgacctcttaaccaaaccttttttcccaaattagttttagatgcttgtatccaagatgaatgttaacaacttgtacacttcatcttgaaaggggtgtatttgagattgggcttttattatctattttgggctgttttcagctttgtgtatataccatacttttcccattattgggttaattttaccattttcctaatatcttgtaaaaaaaaaaatacttttacaatgtacaaacagaaaaattaaaagtccccactggtctcgttagtgtttctcaaattacttatgagaaaagtatgtacatgatatattggaagag

SEQ ID NO: 199550 - DNA, 450 bp, Cannabis indica
atatttcatatcttgcaattgatcgaaaatcaaatatgataagagaacttatatataaaacgaagaaaaaaaaaatctgtccaaataaacatacggagccgattgaggaggagggcgattctatgcccccaatttcctttttataaacttttgataggtttttctatttttaattttttaaataaaggatagaattttattaactcaagtcaaataacaaggcattgtgaacctccataggaaaatcattccttggaaacacagtccaaaagaagatgacatgcaaaattaaataataattatatacatgtaattattaataactggcttcccaaaattaaacaattcataatttgtgtatttatttgcactttccccttccctctgtacaaatggctctcatacatatatagtaacaaaacttgttagttgatgggccttacttttcac

SEQ ID NO: 199551 - DNA, 1012 bp, Cannabis indica
gagcaatcgctctccaagatagagataaggttcaaaggaacactgttaatggaaaacacacgtttagctaaagaaacagagtgtcgggcaacatagtgtgcagcacggttcgcacaggttagtaatcaactacaggttaaaatttaatgtaggggaaaataaggttgtagcaataaatgtggagaggagtaggtggagggaatggaaccctagcaagcccatagctaagcctggtggagagcgagcttcacacagaagaaacagttcaactacaaagttgtttttttttttcaaaaaaataaaataaaattatggtgttttctgttatgtaattatgttaattgaataatctcttttatgtttagaaatattacgagtacatagttactaattagagatgactattattttgtaaatatatacatttgggtatgtgtatatttatttatacaatatatgcatgatgcagatctatttactttttctttaattctctccttccttggatactgtaatagaaccaaaaaaagacttatcgtatagaaccccataaaaactggaataaagttattgaaaacaaagaaaagtatttttggttgaaagagtgcgattgtggggaatatgtaacttgcaagtttcgtagaataaggggataaagtggtaaaaactttacacaagacactataataaattaaaaccctaattaatacacatatatagagagagtgatctatagtatgtatatatatatatgtgtgtgtaatactgtgggttgggtttggttggttcgaatcacattcacattcacatgggcaaagatattagtctttaatggcacttgatggcccttttgaggaagtttctttgatgatgatgatgatgatgatgaagtgtgcaaaactgtaaagccaaaaccttttagagattcgcaaacaaagctgtgaaagcaacttttcccattttggctgttaaaaacatgtatgtatatatatatatatatatatatatatat

SEQ ID NO: 199552 - DNA, 1631 bp, Cannabis indica
tatatatatatatataaaagctcaattattttagatccaatttaaactttattttgattctttaaccaatgtattgtaaatttttgggctcttgttatttattttgggaggagtttatatgcgataactcatttgatctataaaatgagttttggggttagctctgagtctgtaattgctaatgataagctctctgttttgtaaaatgggcaattgcatgtgattttgtcgtaacagtttttcagtgaatgacaagaaaaatcactttttgtgaattggggttggtcaagttttattttttggggctagggatacaattacaattgttaatttatgatgatatcttgcattgtcttgctttgtatgtgagtttgtgcctgtgcatggtcaagttcatgtgtatgctatgtttgttatattactgaagataaaaatgaaaaaaaaaaaacgagacaaaaaaaattcaatagctcatttattttaagtagttttcctatgaattttcatctatcagttttatttatttatttattttgtagaatgaaaggaaggttgtatggactaatgctcacaacttttctctaaacttagctgcactagaaattctatctataaatggataaaacttcggtattaatctatatgagtagttattgaaattaaagctaaaggagcaatattaaacttatatcaagaagtttagtattgctccttttattattttgtactctgtaatttttgaatgtcttcaaatggcttgttctccccggtcagaataggtggataaattcattcccttagaatcgtacttgagagtttccgacctcatacaactcaacagtcaagttcttttagtgttcctatatcaaattgaataggcggagatgggatttgaacccgtgacctcaaggttatgagccttgcaagttaccaagctgctctaccccgagctgaagagaaaaaatgggaactaggacaacataaaaaaactaaaagctcgaccctccctctctatctatccaagggatggaagacggtcctttggtgttccattccattttcatgtttattttatgtagttttcttataattttcgtgttgtttctatagaaactcgtaaaaatatagggaaaaaaaaattctttaaacgtaaatatgtaattttttaacaaaaaattaaccttatgtagttattgttgggttttatgccctaaataaaactctttacaatctgattagttatcaatataagaaatttgaagtgattgatgtttgcatgaattttacatgctaatggtttaatatgtttaatatgtttattacattcatacacacaaaatcagttaaatccagatcatatgtttattcacaattacagtatcgtcaacacagtggaatgtgattgtgatcatatgaatcaaaagttttggtccctgtttcatcagtgttattggatttacactaatgtgataatcagcgatgatgtgtacttacacttggagtaagtgttatgttctttccaggacattagtaaagtatactagtttcgaatgtatggagtatacattggactggaccgatattgcaactaagttaagatattacaaacttaccgttatacatatctttcc

SEQ ID NO: 199553 - DNA, 1222 bp, Cannabis indica
atttcttttccataaattcactaaacaattttggacattgcaacaaacaataatatatttcgaattcgaatacattttatatatttagtagtgtatgaacagagtactattctttgatatatcacgtcataattctatttacaatttttcaactgaataagttaacaaaaagctaagatctttcgctaattttcaactaattagagaaagtcaataatgtagggagtgaaaaatcctatttgcattaaaaaatttaaaaaattatgcctataaattaactagatgtaacttcatatgaaattcatacatttcatgcacgatcatatatcgttaagagtatagaagagaaatattaaggtaaatatatatatatatatatatatatatatatttatagaagtgaaaatgagtaacaacagagaaagagtggcagtcacagaatcacaccccatgaatggtggagatggaatttacagctacaccaaaaactcctcctttcaggtttctatatatatatttatatatatactattcaataatccttaaatcaaactttcactacaaaaaatcttacttttagtcacaacaaaatttgtgactaaagataaaaaagttgtagctaattatatattatcattattgtgttgtgattaaaaagtccgtgactaaaagtattagtcacaaaaattacaatttgttgtgactaaatgtatttttagtcataatatttgttgtgactaaaactaaattagtgacaacttataactaaataatatgttttagtcacaagtaataacattttgttgtgactaaaagtcaaatttagttataaaaaatttatgttgagactaaaagattatcactaaaagtagcagttttttgtagtgttcatctttgattgtttttaaatatatatatgtgaaaaattgtttcataagaatgtctttatttattcactatatatatagtgttttaattataaatgttgtttttaaaaatcatttaatgacaagttgtaattatatatttatatatatgtgcactttactatgtataattgtattattagaaaaatttgagtttttatacttactcttataatcttattaaaagaaattatataattgaagttgttttatcgggccaaaaataagataaaacaaaattagagttgagttagaaaaataggaaaaaaaaaaaaaaaaaggactaaatataaata

SEQ ID NO: 199554 - DNA, 1004 bp, Cannabis indica
gattatacttctatattttttcactatcttttggatttttgaagctctaaaaacattttaatgcttggttagccaataattatagattttagctttaaaatatgcgcctttatatgaagctagctttgagagattcaattacttaaattgaaatagtgatgggtaaattaggacaatgatacccaatgtttaaagaatgtaatagataaacacttaagtgacggttggttgaagatagtgaaatagaatgaaataaaaaaaaaaaatttaatattctatttaatttttgtttgcattttaaaatattttattatatattttaaatttaatttcattctattcttatttatatatgaatttttagtctcattttcattcttatgttttcattccttttaaccaaacaccacttaaatttatttttttttggcagtataaatacgaaaagtcttacaatatttgcctttacactaccaaataatttttaaaaatttaatgaaaatatattttaacttataaaaaaattaaactaatccaaaaattatagaaatattttatttgacaaaaataatattttcgattaaaaattattaaaagaaaaatgaatatctaaaaaatatttattaaaactagtaaatgtataaaggcaccaaacattttgttaaaagtttactccaatagtgtgttaaattataatgcaaaaatctcaaataatcaaaattgattcaaatttacattagaatatagcatgatacaaaatttgcatcacaataaatgctatacatttatatttactattatactatttttaatattttattattaaattttagctaacatactcctttgcattaagtgacttgcattattattattattattaaattttacatttaatttgcatcacaataaatgttatacttttatatttactattctgcatttttaatattttattataaattttagctaacatattcctttgtattaagtgacttgcatta

SEQ ID NO: 199555 - DNA, 1145 bp, Cannabis indica
ttgaaatgtcaattcatacgactatctaagttttctttcttctatcttgttcattgtcaattcactatttcaaaatataaaatttaaattaaaaactaaatagagcatcatatgtcatagtctggtattttcctctaaatattggtagacagtgtttggttcaaataaatatatacatagaaagagagagagagagaaaccagtcaaggcgattgcacgtgtgtggatgattaattactacataactacaaactatgatatataattaagtttcttaatttaattaattcctcatctttttttcttctcaatctagaagactggaactacctaacaaaattaaatacttaaatctttatctatagatacatcgaaaattaaaataatattaatggtcaaacaaacgtacgtgtgatcgatccatgtataataaataataactacaaaagatccatggatgaactcaacaagatttcatgtcaaatattttgagaatccaataagctcatcatcatcatcaatttaaatatataaataagttttttctattaactatatatatatatataaataagttatgttgttcatcatgctactaagtttgaaactttttatctgaatttttctaattggctaagtccgatgtttaatttgcaatattttttagtaagaaaattaggtttcggtatttttcatcatgtttgattgtgtaccttcaaattttatagtacatattcttttttttttttgatgaaatagtacatattctttaatttttggcacagtaaattattattaccccgttaacttgtgttattatttttttattagcatatatatataatttttttttataattttctttatttttaaataatatataaatataagttgcgatttatatatatatcccaatgcttaaaattgaaagtgatttgtttcttagtattgaaacattgtcttttctctaataaacatatataaacgctcttgttacacacatatatgtttatagtaaattaataatagaaacttcattttgagaataattattttataattaattcccaataacttacttttaatttctagaatattaattacgtgtaattaagaagctaagtagataagtttatttaatgtta

SEQ ID NO: 199556 - DNA, 861 bp, Cannabis indica
tgagtgactctaaaactgtttagcgacacttcactgcgcgtcagtaatgggggtgactagaaagcgagttattagtgacccttcacggcatttcactaaacccttttacagtcattcattgcacatcactataaacttttaaagtcccccattgtcagactgtaaaaataatagctatgtttatagagtgtcactatatctattttttttatttttttattttcaagaaataagaatattataagattttttataaaaataaaaataatttttatttggtaaaaaaaatcacaataatatattaatttttttttcgaaattaaaattagtaatacaaagtatgataatctgaattacatgtccaaacgaatcaacaaacacaataaaaaaattaaactgaaaaggtgaaatatattacaaaaacataatactcaaaataatttggaacacatagaaaatgtatacaaaatccaaaattaaataaaacacattttgaaaaaaaaaaaaaaaacctaaaacaaaaaaaatcagattcttgtattaacaataaatcagatcatacgcaccaccatacatcacgaacattacgctatcgtcaaaataaatcccaacacctctatgtttgaacaccaagcccgtcaaaccatgaacttcaggccccaccctttgtcaaccacgagcccagaacaatatgaacaccaatcccgtcaaacccaaagccaatcttaccaaaaattagtcgaacacgtagctcgtcaaaccaataacatcattaaacacgaacaccatccatctgcacaaaagagagagatagagagagagagagagagagagagagagagagagagagagagaagaaat

SEQ ID NO: 199557 - DNA, 888 bp, Cannabis indica
agccataaactcatctcatacaagtcatattatgctacataccaagacaaaatttaaagctaaattccacgagttaaagcatataatcacagaggtttgaagttgcaccttctttcggccttgtttctgagctgcttggtttctcttcagtattttcagtatgagaagctgatttagtatggttatctgtgtcatttgctttgatgtgaaaatcatcatttcttccaatcggcctaatcccaggttctcttttatctttgataggcccaccattcttggagttcaaacttgaataatctgcatatcatcatgtccatgttttcaatgagttgcatcctattaaaggggatggggaaaaaaaaagcattccaactacataatgttcacttctattttctcatgcattgaccttatgatggtactaaattaaaactagggatgactgggatgagggaaaaaacatacacgattgtagtaaaaaggggaaaaagaaaaggaaatggcttaatatatcaaaactgttgaaactaaataaataatacttgcctttctgggccaatggacgtcgtgacaccccaatttgcaacttctcaaatggaggaggaccggccccatcattttctttggatagccttaaagaagaacgtgagaaacctgagtactttttattcatctgccactcttcataaagtgatggaacaacacctccaatcacagtaataactctaggattcaaacagactataccgcaatgtatggcagctttatttttcaaacacacctgccattcagaacacagaaataaattaactgctggaattgaagtctcggagtaacatgctatatgccaaaaaaaaaaaaaaaaaaaaaactaaaaaacttaagttc

SEQ ID NO: 199558 - DNA, 516 bp, Cannabis indica
atcaaccaatatacaccatatgcaaacacgggccaagtccggaatccacaaacacaaagctttccttgccacaaaatatcctctacttgaatccttattacccactgaacctaaaactctcaaaggtgctcttgcagatcccaaatggaatggggccatgactgaggaatttattgccttagttaaaaatggaacttggactctagttccttacaaacctggtatgcatgtagtaggcaacaaatgggttcaccgtgtgaagctcaatgctgatggctctcttgccaaatgcaaatcgaggctcgttgccaaaggctatcatcaaactccagggattgattactcagagacatgcaatcctgttgtgaaaccggccacaattcggatcatcttaaccatggctgtctcttatcaatggaaagtaactcaacttgatgtgtctaatgcatttctcaatggtatcttaaccgagacagtgtttatgcagcaaccaccaggttttgaagacaaacaata

SEQ ID NO: 199559 - DNA, 1669 bp, Cannabis indica
gccctaacctggcatccatatatatctgtcattttctaatcagacaatcgacaagtaggaaacttaacaacggttcccgtttatagtcatgacttttgatacctaaccgttcagtatctaaatattgttgcctaataagatagcctatcgatcattgtctaatcagaaaatctttacatctttgtctaataagacaacctttttatcattgtctaataagacaatatttttttcattagctaatcaaacaatctttacatcattgtctaaatagacaatctttatatcgttgttcaataagacaacctttttatcattatctaatcagataatctttatattgttgtctaataagacaacctttttatcattgtcaaatcagacaatctttacatcgttgtctaataagacaaccattttatcatataacgataataatcgtttcttaatcttgatatcaatcgatttacatacgataataattatatctcaaataacatgccatgtagtacaaaatacttttcttacctttaatctagattcatgcatgttagccaacccaagtggagaaaattcttggtaatcttggctctatgtcacaacaacggtaaatcgataagtgtctatcccaaaacactgcttaatatttgtattaaacgatttaagattttttaccgaatctcgtggtataaataccctaaaataatacatatactttggctctaaaatatataacatattgtagagctcgttgcaaacttcaaaatggtacatagaacatctaaaatgaacacccgagtaaaaagtaatggccaaaatacgatttttaatcctaccaaaaacaacaaaaatggttaattgttttaaaatagttaaccatttcgtcacatggacaaaaagaaaacaaatttcaactacaaaactccaccaaaacttaaccaatttattcaaaacttcacataacacttatataacatccatacaacaattttaacgtaacagaactcaaaatcatgcacttaaacaaaaagtgtcattaaagctcaagcttcgagctttaaaagctcaaacttgattcctatctcaaaatagtagaaaaactatcggatgaacatcaaaaccaatccaataggatctcacaagtaaaaccaaacactcactgaccccataatagctacaaaacacaaagtcaaaccttaaaacctaagcttttccacgaaaaccataaactaacccttacctcaagcttccattcttcataattcacctttagatgctacaagcagaaggaagagctagcttttgggctgaagaaaagaaaattttgatggtggtggtggtggttgtttgatcgcacaagagaaagagagaaggggagctaggttttgatacattatgtttatcaatatatatacaagaacaataacaagggataatgataacaataatgataataataaaaattattttatcatttcttagccactaaaaaatttctaacgttaaggtatttggtcaaccttgagtactccaaaatactccgacaatgttaaaaacaacttatctcaataatcccataaacattactaacgaaacctgtcgtgacatttttggcatccgatcgggtcccaggatcgtcgaacataaaaaatatttttatttcaccaat

SEQ ID NO: 199560 - DNA, 591 bp, Cannabis indica
aaaaaaaatctatttttgcttttgaaatttgaaacaattgacttaataatataaatcgtaagtggttatatcatggcaaatgctataccattgtcatgttaagcttcatacgagcctagtcttggtgaatggtcataatatatagtattttgaccaacaaatgtttgactactattttcaacctacaagaaaatgccatctctatttacagtattttgtcaggaaaaaaattctcgaaattataaagcaagtaggttgaatgtttgatgaaaaataatatcttaaaatttaactatgctatattaacaaatacaaatgaatgtgatttgtgcacattctatctccagatttttgagcttaatagtaattttagagaccactaaagaagaataaattgtgggttatacatagtacttaagaattaagatggttgttagctgaagttctcttaaccaggaataccatgaattaggtccaatataaatattaccataggattccaactccataaagtaaccatgtgtaaaacatttaacaaactagttgaaacatgcaccttatttaacacatctaatcaatatatatatatat

SEQ ID NO: 199561 - DNA, 769 bp, Cannabis indica
atcaatgaaaaaaaatcaattcagatatggaatctatcaccaaaatttaacgctggatttcccacgacaaagacatagtttttaaccaaaacatatctttcatattagaagtttctctttgaattgggtagcatcttctgttaagttttaccattgaaatcctgattttttacccatagccaaaatgagagaaattaggcctttaagactgataaagtctccatatgttcttctagtggcattttttatcatcctcatcacttgttgcattgtcttgatcaattcatcaaagccatcatcctcatacgggacttgtggaacaacaaacactgcttctcaaaacccagtttgtaaaatagcatatgctttcattttgatgtcagaagttaatatacaaactttttcttgaagttaatatatttgtgcattttgttgtcagaagagcttggaaagaaatgaactggtacaagcactaaggagagtatccatggaagacagaacagttatactaacaggtattgttgatgaagcctggacgagtcctggctctgtcctagacctctttctggaaagctttcgactaggacaaggtactgaaatgctcttgaatcacttgttggttgttactattggaaacaaagcatatcaacaatgccattccttgcatccacattgcttggagctcaccccaattggttccatcaacaatttactgttggatgtgctcaaactaggttacagtttcttattcactgtaggttcttcacat

SEQ ID NO: 199562 - DNA, 781 bp, Cannabis indica
cttgagcttcttctaaaaatgtaataaatgaattactaattaagatcgcgcaatcatgatcatttatttttaattattattaattagttgtacaataaacttatttggatggaagaaatcaatttatttattttatttttttgttattttaagatcatagtctttctaacaaattaaacaaaaggaaaaaaaaatttataccaaaactcatcattaattataaagaataaaaatatatatgtacttactagaatctggtgatattagataattcaatggcctcatcctcttataattagctcccatttctaatgtgtatctttattaatattagctatagcttaattatgttatggcttttaataagctagaatttgtatgaacagatctctcatggaatccattgttttatattacccaattcccagataataataataaaataattattatagaaatgtgtaatataagaccgaattaaagataacaattattcaatattgccaatatgtaatgtacatacgtatagcttaaaatttttaattgatttcatttgttatttttattatatataattatatcaaactatgagtataatattagtacaaaaatgtaacgtctagctctgtggtctcatacagaaacccataaaccgaaaggctcattgtttgagaaaaaaaattatatatattatatattttttaattaatgcaaataaacaataatgtctataagtggagtggttatagcagtaatacatatatatttaataaaaaaaaaa

SEQ ID NO: 199563 - DNA, 646 bp, Cannabis indica
ttttttctgcacaatttacatattttcaaataatcatattcttttttataatattctctataatcaaattattttcaatacctcatatcaaacgtttacttagtagctactaagtcatcataacccaattttaataattagacaaatacaatatttggtgtgattttataaaaaaaaactccaatataattataataaagattgaaattttaaattaaacatcataaaaaatatatacatttttttttaaaataattatagtattattccaaccaataaaactgttcatctcgagaatttcgaccagccaattcacgtgacaaatgcaagttgatcgataagtctaattacagagttgtcgaccaacctgcatcaaaatggtgtttcttgactgcctcgtgttgccaattcggtggctcacaagcttgcagcttgggctgctgtgaataatgtatcacgggtttgtactgaaggggaagtagcaccctttgttgctactggtttctagtttgttgtttcaataaagttctctgttgcatcaaaaaataaataaaaatggtcgaaattctccatatgaataggaggattctaacatccaacttatccaatacattgaaggttatttttttcattcaatttttttttt

SEQ ID NO: 199564 - DNA, 1387 bp, Cannabis indica
gagagagagagagagatgggtgaaagtcatttgagacagcaagaaatgatctgccattcaaggtgaaacacaatttcagagattgaaaatagagaaccatacatgtataccaggtatgcagatgaaacatttcattaacacagaaaaattaatcgtcatttaatttcttaaaaatatatatatatatagatatagatatagacatgttggatgagcggaggagaagcttttacttaaaatcaatcataaaacattcacagtgacagtactgtccttgtctgagttgattagaaatattttatttaccgtacacaatgatcttattaccaatccatgcattaagaaacatcatcacaattttgcatgcatataaagatacaaccatttcataacattgaggttgagcattagcatacatagcatataaatactcccttttattacaagcctaccacccacaagatcaaagaaaattccaacaatgaggggaaaattaaaggcaaaaagagacaaaatttgagaacctttcacaatccacttgtactagaatgtacatatttctcaaaaagtaccagtcctaattggaaatggactttgagcagagggtttttgacataaaaggtcttataaaaagggtgcttgcatttcatgatatgcagagaacttccaagcctaggtataatgcaataaattgatacaagtattctgaaataagccctatttcaaaacatagatttcaggaaagaaatgaatgttaccatcaatgtctaaaagattgatattagtcttttagctgacaaattattaaaccaaagttatcttttttctttccacaaactagaaaaggtaagagccaagatttgacctacaaaaaagtgtgcacggcaagtggcaactaaatgacatattacatgagcaataagttgaagaaagaagacctgctacactaacttcagctctgtacgtcttcttttccacttattggtgtccttgataaggaataatcagatctaccaaggatacaactgcactgcacctctaatttaggcccagttcggccaatcttgtttctacagattcaacgaactcatcaaatgcctaaaactactattcaggaggaacaaaagagtccttcaaagagaataatcaattcaaaatcagcaaatagttgatcaatcattagaactactacaactaggatcaagaaaaatatttatttcaagttaatggaaagaaactatgcttaacattagagcatcactgtatagaaattaatccttaaaagtactaacacaaggtaaatagactcattgattaaaaacatattatcagttacctgtataataaatgcctatgtaacaaaattcttgtggcttaacagaatatt

SEQ ID NO: 199565 - DNA, 893 bp, Cannabis indica
ctagcatagcatgcagacacgcatttacatattatttgtgtggtttatctcaccatcaacgccttggaaaacgtaggggtatgtctctctttgtgcagtgacaaaatatgtatgccacaatagttattgttgttaagaattaaaactacctatttatttgtgattaaagttaaatttaaatatttatattataaatatttattatttatcatttatttaatgatattatttttatttatgagtttttatggtatgtcatttttaatgaaaaattaaaattctattttaaatgattaatcttttgtactcatcccaccactagggaaatatgcaaggatagtgtgggaacgggattaaaatactaaacggaagttgagttacgaaagtacttttttttctcacctattaattgctattacttgccctatttgacaaacctattgtgacatgtttatccttgtcaaaccgtggtagagaaactaaaccctaactttcctccgctgacatcgaacagaaaatggagctatttgtgtccttgggttgcttaccaattaccatatcagggtgccaacattcactcgggggcatacgtcgaagagctaaaatcaaaatggagaatttcaagttttcggggcacatgaaatcaccactaacatcgaacctagctaagccaaaaattttaatgtacatgcatgcattgtcgcattgacagttgttccacctgacctcacaaaccatatgcgtgttgctagcccgctatgaggttgcacttaacatttggctcatttctgagatggtacgagtgctattaagaaaaaaaaatatttatatatatctaattaaaattgaacaaataatggatcagatacgacaacaatcgaacatgaccaaat

SEQ ID NO: 199566 - DNA, 860 bp, Cannabis indica
ttatttatttttcatctattaattcattcttttctattattcattttctttaatattaaatttatgacgcacgtcctacgtcgtgggaagccaccaccctttcctatattattattatttaagctttttgtgatttgtttaaagcattgctactacatatataactaatattttttaaaaattattatattaaattatataaagtttaatatttaattataatattaatacatataaaagatattaaacactactaatattttttaacaactatttttattttttttcaataacatgcatgaatattattgaaattttgcttgctcactcatacaaattttactattattgatttttaataacatgaatattattgattttagcaattttctttactattaaccagaatgaataaactgtggcagtggagttttttcaccatgttttacgattatatattgaatcttctgcttgggtcttatccaaatttcactattctcttttatttcagcttaaaaaaagaactatactacagtaaatattgtcaaatatagtatatagttgcgtgtgtacgtaatacaggtatattatccttgctatttaaatatgtttcaataaatataaaatcaaaaagctacaactctcaagaaattacaatgatttatattactaggttagattttggtaattaatggataaatattaattttgtgtgattaaatctattaaaaaaaagaagaaaaaaaatatgtatattttgtcccacacatgagtgatttgtggatttataattataaataactctatgatagattcaatgtagatggagagacttacaactaaaaatacaagaacaagta

SEQ ID NO: 199567 - DNA, 1032 bp, Cannabis indica
caggttaaaaaaaatgtaaccatatggttacaataaaaatgtaaccattgaatagtcacacatatatatatatatattatatttatgtataaggagattgatgacatcttgtcatctttttgattttgtttatttgtcttttaaaaattttttaaataaattatttttaatttgttatgtatattttttatttttgtatgtttagacacataaaatattatattttatgtaatggtgttatttgatattttaaagtgtccaacaccctattaatataatatctaataattggctaattttaagaaagattagtaataatctataaaaattattataccatattatgtgggatctgatatttaattgtactaatgatgatactatttcgacagtattaaacactactaatatttttaatcatatctctaatagtattgcaaacacgccatagagttaattgtattaggaatatatatggtttcttaggtggtactagacaccattaatattttttaaaatttttctaatatgattataaagttgatatttaatattgtatcaatatcaatataactccttgtgtggtattagatacactaatattttttttaacattttattaaattattttataatatttgaaccagttataatacatatatgtatacatttaaatttatgtattctagattttagtttcgtttattcgagtggtattgtatggtcatagagtaaatattaattattttaattatgttatatcatattttatatagtactatatatttatactttttagaataaatttggaagttgtaatgtatataaatataaaatttataatatcaaccaatatttaacatagtattctatgaaaatgtgatatacctcacaatttgataaaatatataagatatataatcactacaaaaatattacctttagtcacaacaaaacttataactaaaagtaaaaaaaaaattgtgactaattataaatcatattaattttatgttatgactaaaaagtccg

SEQ ID NO: 199568 - DNA, 1240 bp, Cannabis indica
ttatatatatatacctggtgtttgggtttaacgtccagagactgagcccctcaagacaatgtccaatgatagatgagacctccacagacattttcttatcaagcttattattataacaatcggagtgatgatcaccaccgttgatcatcatttcaacatcatcatcattatcagcatcagcaatatgagctaagatatcaagcatagtcaccatcccaatgtaatgtttcctcacagcaccagtttgcttgtcggcttccaatatcatcgagccgccggctccgatccagtggccaggcggcgccgccacagggacagccaccaccttattggctacaagtgcgctcatggtgtgagccagtgaagccgtgtaaggcacctcaactagcctcctcttattgtcaaccatcaaatccttgactttcttgtctcttagcccttgagcttccgatgagtacttcagcttagaacccatggcggtactactgctgtaatttgcttcttgcatatttgctaattaatatttaattattcggtttggtttttgtgaaattggataacatgatagacacaatatatacatgcgatggattttgagtgagtgagtgtgcatgaggttgcacgtgtcaagtggcaagagatgagtggtttgcatgctacacgtacgtatgttgtatacttgccacgtgtcatattgtttttgtttacgtgtggatgtttcattccttattttgctttttgttattcgggagatcgaagatatctgttattaatttttagctcatatacgtataaaaaaaaatattagctcataatataggaaagtctcataaaatatatgaccaaattttaagagaaacgtaattaatgtggttatacggtataaaaaagcttataatgtgtgctctaaaatcagcatatgggacaaggatatatatatggttgataaattttatatgaaagaagcaaatcaacattagtgaaaggccaaaacattagtgaaaatataactacaaaggtacattgactggtttctgtaatatatagtcattttttaaatttttaatagggtcatatcttatttgcagtaaaataaaaaatcatcgatgaagaatactgcaatttctttatttttccgttcgactaaaactaaaaatgaaatgttcaaatatccattactattggtgtggtcattggtcaatgtaagttctatgctattaattgttatcggacagcgctc

SEQ ID NO: 199569 - DNA, 958 bp, Cannabis indica
aatccaccacccactccaatttgggagcccaaaatctcaaccaagttaaacctaaaaaaatactgatgctgagttgtaacaaccaagttatcagacatacaaccccaatcaactacagagaaaagttaaatgtaaaagtccatccaaaaatactattaacaaataaaacttttctattaaatgggtagacaatcttcatctgagattctaattcaacatgaatatttggtcccttaaattctgaaacacgcctacaatagcccttaaatggatccttgcaaatttttactggagtaccagttgcaccatcatatgcttgttggaaaacatattttatcatgatcttacttttactactcaagtatgttagattaatctaatctaataccctaacattggttcttaaaaaaacataaaagatttgagaaatccttacagtgtgtaatgaccacatacttaggatatagattagtaggataattagcattaatcatttacattttatggttatatgttaatatcttgtgttgtgggttctatttttaagaaataagcattaggattataattttctcaattctggagattttattaaactctaggtgtattgtttatgctatatgtgaaaattaatatttttataatttttgctcggtaacgataaaaaatgcgacagatcgatggtcggtagagtcacatgagttagtttggaatatcaggttttaggcgggattatgattattgaccattttatctctaagccttaagattgcttaagagtgaagtacggacaaaattagaattttgccatttatttggatgttgtctttgggatattgtagatttatctcacatgttcttatttgtggagctagaataaaaaaatagaatcatgggtttatttcatttatagcaaataagaaaatcgaaagaaatcttatccttctctctctctctc

SEQ ID NO: 199570 - DNA, 521 bp, Cannabis indica
attgttgtcgcagagcttgattttgggcaaatatagctaaagttaccatatttgggagtggaagcttcactattttcgaaacggccaagaagacaaaaatgccaaacatgttacaattccttcgtctgtatgtgtagtctctttaattggctcaaataaactttcatgttcttatttatagatatttctaccaaaagattagtaattccttcctcatgtcaaacatcccacaaccctacattctttctactctatcctgtgaatgtgtgaaacaaatgagagtgggactgcagtagtttggctttatcaagagtatagtctccacataaaataaaagtttttttcttaaaaaaaaaattgtatcaaaattgaatttttcccaccctaacttatttggaagatttgtattaagaaaaaacccaattagatgaaaccaacttggaaaatatacgagaataataaactactagtctactaataaaaatatcaacttcgcggattactaattaatttttttttta

SEQ ID NO: 199571 - DNA, 1758 bp, Cannabis indica
gcttttctatttggccctatcacttttttgattcagttcacatacagtggaattagttgttttttgcttggatttgtatattttggggttgcataattgtttgacatggggcagcctaaatcaggaatactaaacatgttgctggtttgaattgaaatatggaaacattgacactgaggtaaccgagtgccagtactgcaaattgttgaatctctttttgctggctgacaagagggattaggatctgatgataatctttacttttgtggtgtgcctctgttagagtgttttacttacgttaagctgcttgtatttatcttttctttgcagctcaacaacgatgctgtgaatgtcataaacatatcaatgggcagcattttggcagtgttgatgcagcaatttgtgcttcaaaactggcggatgtaacctttattaagccgtttttaaagggcgtcactctgggtttcttgacactgagccacttccaaaaaatgctttaagaaatcagaaactaaagaattgcacttagtgggaatactgcattgcaaagcgtaattccttctcagctcagatcgtgacaaaaagttccaaaatttcttttcataattgtcaattcccttagacaaaacagtgcaacagataatacaagatcaatgtaaaataaaaaaaaaaatcacttcctttctttgtatatctctctttctctctctgttggtaagaaaaaaaaaagaaacttttagttataaatataaccgttgtaaattttataatattacttatctaaaaaagatgtttatatgaaaacgttgagaacgaatgatagtttaccttcaactttcaaaagtcaaaagataaggaaaaaaaaaatcgacaactgtgaagatgtccattaattttttgtagtaccaggcacctcctcctgacaccccacattaaataacaaactaaagaagaatccatatacaaggaaaactaaaaccaacaactttaccagaaaatgtccaaacaacaagacctgatcgagtcgtcacactgaaaatgccacaccattttcccatttgtaacactggtgaaaattgaattacagaagcagccaaatattttaaatgagaaaaacaccttgttttgaacgcctattaaaaacaaaccaaaccataatcatgcaattctcgttttgccaccacttgtaaactataactatttcattccttttattccattcttttaaacattgtcatgctggtgcagccaacaaacttaaagaagaagaagaaaaaaatgtcatcttcatcttcttcttcctcttcctcacttgaagtcatcctcaccagctctcctgatggccccatcattgcatacgatgcttcctctggcacggctgtaacccacttttcgaccagcagatcaccccgccgaggcctcaccatcgtcgggaaaacttccattgcagcatcccacatctctcctatcactgcttctggctcaattcatctctataactggtggtgttctgcagcttttcataagctccctgtccctgaacttgtggctcctcttactgctacccaggatggttcttatctctttgctggtggcctttccggcaacgtatatacactctcagtcgcttcaggggatatactcaattcacttcctgctcatactggaccagtttcttgtcttactatcagtgaagatggctcacttctgatctcaggttagaactaacacattacatgtctttgaaatagagttttt

SEQ ID NO: 199572 - DNA, 642 bp, Cannabis indica
ctttatttataatgtattatttcaattctttgaaaataattatgtgagtagtactacttctttattaatttttttttttatgacatgaaagacgtgcacatataattggttccaccatcatacatacacaataatatctccacatatatataattatatatgcttgttaataagtattattatagtatatatataatgctatatatacttttttgaaaaccttgtccacggggcctgaaccagaattaaagtcctaatgtttctagattgctaaaaggtaataatttgcaatgatttttcatacgtggttcgataatattagttggtttaacaagttattaacttaaccattagctacttttttattattttttttttaaagaaaagttatatattatctttatcgtgtgtagagccatttagcccacttaagtacgattctaataagggcttttttaaaaaagaaaattaataaaaaaaaattcttttggtaggatgtcgtacggacaaaatgcttagttagaacccacttaacaagacaaagaaatgcattatatcatcatgtacaatatttccaaaagttatcttccattaatttaattaataataataagttaaatacttcaatatagtgtagttaag

SEQ ID NO: 199573 - DNA, 2853 bp, Cannabis indica
cctgtttaatgcagacagcatcctgaaaatgacgactattacaagaattatgatgacttggaggcaagtatttgttgtcactgcattgtttattcattttaaatatctttgttaacttagtggatcactttgtaacagatgcacttccgtcattcccattttctatgtgaagatgaagcttgtcttgcaaaaaaatttatagtctttcagtctgaagctgaaatgaaggtgacttttctaagagcatgggagtgatgtatctttttattttaaggtttatgcagttcttgcttcttgttccttaatgcttttcttccctgttttttcacagaggcacaatactgttgaacatggagggcgtatgtctcgttctaagcgtaacgctgctctacaggtatgtacaatatttttaatgtgttttcaatcatatttggtattattttttgtgtttgtaaatcacttgtaactaccgaggctcttccaggtttttgtgcatttgttttatctatatcagctaagttttcatagtctaaatttgggttttatgtcctatttggaaactgtaacagatacctacgagttttagatatcgacaaaatagcgaacaagatcaccgcagaggaggaggaggaagaggaagaggaaggggatttggcagaggaaggatgtttcgtcgtgatttttcagaagaacaactttctttggccattgaggcaagtctggagacatctataacagaaagcagcacattagatgatccaacattgtccagtgggcaagctgcccctggtattggagatgcaagtgatatagactcaatcgttcagccatttgaatcattagacgctgctgattctgaaaaatcatatcgatatcttcaagcattggggcagcactccttaataaaaccattggaagaatctgcatttcctcctctgtcaacagcacccggaaccagtcaatctaaacccaactcagatggtgtaccaaataagactatggcatctcatctacggcgtcaaagcaaccacaaagtgactgttcttaattcaggccaagcttggccagcagctaatcgtggacctcaagtaccgcctaataattcatctcaagcatggcctataatgaatactacgggaaactcggttagttttagccagaacaagatgtccactggtaatgcacctggtccatcaacttatgcaaattccgcccaaactcgatcaactgcaggtcatggactgcattcaactagttcaacgagggatgcaggtaaccttggtaggatcagtcactcttctgctcctaatctggttcagaatgggtctactgagccttctagttccatttcagattttcctccaatttctgcagctgcacatactcgtaaattgccaacaagtacccagccgatacagatatcagagaaagttaacattgcaaataagtctttagtggaaaagattcggagtgctcttgagtatgatgaagacaagtatgctatgtttaaggaaatatctggacagtatcggcagggtttaatggactcagatttatacattagttatgtagcgcaatttggcctgttggatcttgtccttgatttagctaggttgtgtcccgatgcacataaacagaaagagcttattgaggcctacaatgctagtgttcgaagcaatattaagggcgggaatcatagggcttctggtggaaatgggcgcatgaaagagagtaacagttctaataaaggtaaaggaaagtgtttagacaatgaagataattcaaaatctacaatagcggatgactttataaacactgtgaggaaacttcaaagtaacgacaagcctttagaggagcatgtagaggtgttatcaaaagatgggtatcgtgctgccaaaggcaaatcaaaactgacaaacaatgaccaacaggaggaattcttaaataataataaaaaatcagaggaattgaaggatctggtatcaactggtactggaaaatcagaggatgtaagtgggagtaagcaacgcaagaaaacttcgaaattcctcagagttaggctcggtgatggttcagcggcggcacttttggatctgaataaatctgatcaaggcccagcagaagaggcgttggttgggaacgacaactctggtggtgggttgcctgttcgtggtgtttggcgaaatggaggccaaaagctgtttccttagcttttttcagatgaaagagaaatcttagaaaagaaatagtttagttctgctgttgatcttttgaaagtggcaggggtggatcttcacctgatgcatggggtcagttgtatctaggttgatttcagtcagtttgacctcttgcacgaggcctttgtgtggcgtagtaaatttgttattttttgggttggggaacaggtttttgcttaaatacgggttactgttgtacttgaccagccttttgtcattaataactgtttatatgatactttctaatgagaatacattactgttaaatcttttgaattaatctctacttaaagttggcgattggtatgattggctgatcagaacctgcgcatacattacagataactttatatatttaggaatgtcaatctgggctattttcgcgggccgggcccccggcccgacgggccgaccgtggcccgaattattcgggctctttatcgggcttctggcccggccaggcccggttttaaaatattaaaaaaaaccctaaatcccctaaaaaaaaaaaatcccaaattctaaacctaagtgcatgtttgacatcataactaaaaaactgttttttgtttttaaaaacagaaaattgtttttaaaaataatttggcttgtttag

SEQ ID NO: 199574 - DNA, 854 bp, Cannabis indica
gttaccccaaagggtacaacactatttttggagaagccataaattaattttgcgtaaagaaccatatttttaagttggagcctaatttctcataggttgacttgaaaagaatgttcaacaaggctccattatctatcatactctgtgacactatcatgtttgtgatttctactttgacgaccagggggttgttgtgaggataatggacatgggtgacatcttttacaccgactaatataagtgtctcgtttctgcacggctgcttaggagctcgctccaccacagccaacacttctcctttttcctcttacttgattgtacgagcatacctttcttgggatttttgtgtatctcgagtaatatggggtcgtcaaataataacttgcaaatgtccatctacttgtggtgtcattagacaattatggttgctttttttgttggggatccctctgattcttattggtctttacgtaccgatttatgtgtgggttatttctcctaatgaggaactcaatttcctccttcaagttgttgcatttgttactatcatggccaaaatctttgtaaaaatgacaaaacttggtggtatcccttttcatgatatcattttttattggaatgggtctcttgtaggggattgttgaatgggtcaccatgaaaacattctccctagagtatgtgaggatggttaaagcattgaaataaggagctttctattttcccttcttatcattctttgagcaattctcattgtgagaccttttaccacaagtttgttatggttacagatgcagatgaggctggtgtggacaaaaatttaatcaggacggcgttactctagccaaaattgtcca

SEQ ID NO: 199575 - DNA, 456 bp, Cannabis indica
ttggttgaatatatatatatatatataatatatatgtagttacaaaaatgaaacatgtaaaatcaactataagttttgattattttgtgacataattaaccgtagctgacgagacattgtgtaaccaatttggtctctttaataattataacacgtttttttaagccttggcagttagataaaactaaatgataattgggagagttatgcatttatttttgtttagaaacaaaaccaaattagagatatcagagtggcaattcggtaatgaactactgtatataatcactaataataactacacaactcctgttcaattgtttgtttgactttacatttgttcgggtaaaaagactcaaaattgatcaagatattatggtaacattggtaaggacattaataaatttgcaattagaagcataatgtatctttatattgactatatatatatatata

SEQ ID NO: 199576 - DNA, 2129 bp, Cannabis indica
aaaaaaaaaactgtaacaaaagtaaattccaccgtgtcacaagtaacaaaacgaaaaaaaataggaaaaaacagtaagtgggtgtaaactttcccttaagttatttgcctaaggtacgaataaaaattaagagtaatttaggctggctgatgcgaaatataccgagtaaatttaaaaaaaaacttaaattaattttaaagaattactctctagttttttttttttttaaaaaagaaaaatttcccatgttaatttcattaattattttagcttttttcttttattttttaaattatatacttgttttttaatttttctaataaaaatttatagaatttgttattttaattttttgtcttaataattaaattatattttatttatttcatatttataaatataaaataaaatattttatactaggttgatgttacgtataatacacttacgtctaatttttttttttaattagttaatgtattttaatttttaagtgttatattaaataaagttatatgtaatttatttaaataaataatattattatattaaaaagggtgtctacacatttggtaccctgtgttttatctaaatacaagtttgataccctgtatttttaataatacttatttggtaccctgtattttaaaattatacttatttggtactctaaattcaagtttttttttataaaatttaatcaatactatcaataatttaaaattttatgaattctaaattctaagttatttatttgactacatataactgagaattgtttggttaaattaataaaattgtattgattaaattttattttaaggtactaaatatgtacaatttaaaaatgtgaggtaccaattaagtattattgaaaggtactaaatgagtatattccctattaaaaattaaacaaatcttttaattagataataaaaacgtaagtgagactcgacactatatatgattatagaaaaaagtatattacatacgataaaatatatcgtattatgtgattaaaaatatatatattattgtttatgtatttaaatttaaattaaaatattcccatataaaaatatttagatagtttttatttttggataaataaataatattataaaattaattatgaatattatattttttaaggaagaatatactaatattttaaataataaataatagtatatttgattaaagttaatagctagagaaaacaaaaaattacccttaaattaaaaattcatgtacataattacattttataaataaaacaaaataaaaattattaaaatgggcttacttcataaatttttaaatacaaataaaattctgatttaattaaatttccattttagtccactgagaatttgagagatcccgtgattttatatattttatacgatattgattattgaggtgtttatacttgatatacgtgtatgatagttagatatagtatcttccacatgccttgctctcctctttcataggaaatttattgtatgctctacagactttttcttttcctatctatataatcacaatcaattatcaaatcaaattattaatatcaacaacaacaaagaaaactctttctagctctctcattttcagccatgtctctcctctctgatcttgccaaaataaacctctcaaacaccaatgaaaagatcatcgccgaatacatatggttagtaacttagtatgtataataacaacaataataataataataataatatatttttatttattttatattttttgagtacacgtaaataatcaatatttttcttatttttcaggatcggtggtggatctagtatggacctgagaagcaaagcaagggtgcgatatatatactaatttttcacttatatgtataatttttttaagcccaaaaatgtatatttaatggaaaatgaaaaaaaaaaaaaattgtggtgtgtaatttacagacactgccatcacatgtgacagagccagcaaaactgcctaagtggaactacgatggttcaagcacaaaccaagcaactggggacaacagtgaagttatcttacagtacgtaaattataagtataaattaatatatatcaacggttgtgattaaatgcatttgata

SEQ ID NO: 199577 - DNA, 1704 bp, Cannabis indica
tgtataatttatttatttttatgtttttgatgcgaattattcatttttatttatttattattatatatttaattttaattattattatatatttttattttaatttaagttttttttttaaaaaaaaaaaagaaataaataaaatagtccagtctattcttaaaccaaacacaggattactttcaatataatccaatcttgtccagtgcagtccaatccttttcagtccaatccaatccaatcctgcgtaccaaacgagtcctaaaagtattatatattgatattctttaattatatcaaaacaatataatattaataaaaaaattgttaaaaaatattattaatgactaatattttttaaaaatatattataattaaatatcacatctcatataattttataaaatatctttaataatcatgaagtaactgtaaaaaaaaaaaattagagactattaatactactataataaataaatgcatgttacagactcgttttataagaaaatgaattcagatcgacctacgagaatctctctgatgttggagatctttttgtttgaatatataatttggcatgtgatgctcatttgttttattaatttcggcttcaggattttctgtcgtattagaattattacaccattcccaataattttgcctcggagctgatctttgaatcgtggggccttagtataataatatttttgtcaggggccttttccatataaaaaatatatatttttaaattgggtcttctcttatttagattttttagattgttaaatattattttaaattttatattttacaaaaattattaattggactttttattttgttaaataacaaaataaactttatactttctaaaatggtataaataaaattatgaattgaccttttctcaaaataaaatttaataataatccgatctaaaggtattatgacataactgtttacattttttatatctgttcgtattaggaattgttttcaagttggctatattaaaaaaaaaaatatcgaaaattaaactaaagatcatatttttatcattttaaattataaatggtccattttatcatttaacaaaatatagagtccgatcaataacatttacaaaatacaaagtccaaaatagtaattatccattttagacaaatgtgtaaaccgtgtatgaattgtattttataaaagaaaattttacataatatattaaaatattaaaaaaaaattacagaaatacgttaatataagaaaaaataatgtttacattttgaaattttttatttatagagatacgtatttagtaaaaataataaattatttttttatatataatttatttataggtgtattatatttatcaagagtttgtttttctgagttttttttttaatagttatcgtgagagtgatttctcgttgttgtttcaaagccataacattcattttatacgatctctctaagtttagggttagaataaaatgaactttctagaaaaagataaggaaaaattacataagacactattttttgtaaaacatttacatttttacgttcaaagaatgttttctttttacatttttacggttttccaaaaattaacacgaaaacaacataaaatcaacaagaaaactacataaaagtaacatgaaaataataacaaaaaaataaacatacacataacaaaaaatcaac

SEQ ID NO: 199578 - DNA, 1344 bp, Cannabis indica
tttaattattgaaattaaatgtacgaatggattgataatgaatttaatctctatgtaatcaaaggacagttgctttgtatataaaggagtgatccaacatgaaatggacaagacagaaaagccttgcaacagtggactaagtaaatcgtgatctgaccgaaccactatattcctttatgttctttatatttccagtatacttccagtatgtttgtgttcatagctcgaatactcgcctctaggttgagtactcgcatattctctgctcatatctttattataatatttattttggtgttgtctacattcctccaataacatttggcgccgtctgtgggaaaaaaataatttgttgatttcagagaaatcactatggctggaaatcagacgacgggagataacaacgcttcatcaatcaacatcagaacaatgaatgttcaactcccaggtaatggaacgactcctgtcgacaccatcaacggaggagtgggacgaacaaccattactcttcttaatctattccctgaaatcgccattcatgttggagaaacgtctacaccaacggccacagtggggaagaacctgcctataacacctgtcgtggtaattgaaggtattattcagttgaccaccacccaatatactgcattacaagataaaatgctggctttgcaggctgaaatcaacggaacgtcccctcgagtaccaaccacccgctcagataaccctcaagtaactaatactagacgccaaactaaccgcactcgcagggaacgcaggaccgaacaggaagggctcaacttaaatcagccaacgccgagagatcaagtcgcacgaaactccaatcgcgaagtacagcaagaggaggacctaaacaacgcaacccgcacagtaaggctcagccacggaatgaggtaaacgatgctgaatcttgttcttcatcctcacaaagttgcactcctagtgtttataccaggtcaagttctgtggaaacatcacgagaaggaaggtatcaagttcacacgggtgatctttgtgatcaccataatgtagtttttagggtgcggtcccagacgccccaaaatcgcgaagagcctcgtgatccccaattgggcgatcaaggcataaacaacggtaacaacccagtagatattactagcccgcctaacgcaccaactgtgactactggggtagtgatcctagcaaatatagctacagttgcaactgcaccaaacacgactcagaacaacgccatcctgctagggggtgttgatcagagcattttactacaagcgctaaaaataatcgaacaacagagaatgcccatttacaaactccatggga

SEQ ID NO: 199579 - DNA, 576 bp, Cannabis indica
atttaatcagtttgggcctgatttttttggtcaactgggccccagctaatgttgacccgcccacttagcattcaaccctatactgcacccatcatcatcatcacattcacttccctcttctcagtcgtttgccattcacctgagcccgtagacaccaaatcgaaccccaccttcgattttgcatgaacccatagcctccgttcgcaccaagcttgacccagccacgaaccagcaacatccaagccgtctgcagtcgacttcgcccgaactcatagcaacccgaatcaccattcgaactaatctcaaacctcccaaccatttcatccattcaacccgagccacctccaagtcgacaccaacccaccagaaatcaccattgtccaatcgaccagccggcaaacgtatcaccatttcccactcgactgaactccaaccgttcaactcagtttaaccatcatccaagtcgaacccatccctgtaccaactgaagacatcacgtccagcacccaatcaagccgagccctttccagttgaaccaccaacgagttcacactcacctccgaagcaccccagtcg

SEQ ID NO: 199580 - DNA, 1362 bp, Cannabis indica
gtttaaactatagtttattattaattatgtttttatcaatatttttgtggggtgttttttttttttttttaaatttacaatttgggttacttcaggagtttttttgtgggttgctatgtagattttcacttgcgatatagattgttccattagttgctatgtaagtttttatgtgaattactgtaaacatgtaaaaaaaaaatatatattttaaagtgtaaaaaataaaaaaaaaataaaaaactcttatttttttttttaacttttccattaaattttggacatgtataataatgcctatataaattttttcaaactataggtataaaaactatattatagaaatttctctgtaattataaattaaaatgttgagaaaattataaaaatgcatgcaataattcaaaaaaaaaattagagacatgctgttacgtacgataattatattattttatataattacaaaacatctgtaaatctgtaccctttcaaaaataaattatttactagtattgatttaatttgtcgataaatgtatgaagcaatttgttagaaccttggaattatttcaagtcatggaaaaaaaaaaaagaagcgattttgtgggatctgcgtgggctattaggtgtccttaattttggtaagtttttccattaatgaagttataagttttcttattaaacctatatataaactgcatgtacaggattattatttgatagtaaatggaattctgtaaatatatatccgaatgaaattttatataaagtattcatcttggcaatattatatatatacattacagtttcgagatttgaccacttggtaataataacttttgaagtagatcggccctaattataaagtgacaatcagcagtctttgttgtctgtttgagtcaactttattttatcagtaataatttgaatatttttgaaacaaatgatcttaaaagtaccataatctgacatgatgagtttcatgttttcggagttgaacactgtgtatagttaatatccaatgtatatatatagttgtttttaccaatttacatttactgtatatatatgtttctaaaacttgtttcatatgttaaaatatttggctatacaaaaatcaaattaagtttgagaatattactgatttttagtagttatatatactgttatgcaagtactgattgtagataatagcttaacatcaatgtgttttcaaaaagctgtggaaggtgataataaaacaaattttcaaaatactattatactaagggacccttttaaaaatgcaaaagtttatcgtttgtattcttttgagtacaccaaaatttctccaaaaatttgtgtttcttttcttttttttttt

SEQ ID NO: 199581 - DNA, 949 bp, Cannabis indica
caattaaagggcagacaaggctctcatctcagatccatttcattatatgtatatggtttgtgtgcatattcatatatttgcgtcattctttgaaatcacttttcaagtttggtgctatacgtacaacattatattataaaaatattatataatatatgctattgttttgcattagcatatgagtggcattttggaatatgagtcagtgttcaatatttaattatatttatttatgtaaagataaattatttatatgtttatgcactatattttggaatgggtacttgtttgatatttttgtgtctttaaatttgaaataaactaattgaagtaaaatgttaccaaagtaacctcttttgcttaaatttatctattttgagataataagatgtgtgtattttttgtttatgcggtcaataatcggcccaaagaaatattattgattggccaaacatgataattataaagtttttatatgaacaatatatcgactcaaaagaaagttgttgtttgacagaatttatgattaacatttgatttctgtgttgagagtactacttacaagttgatgtttctgtctaaagactaagcatcaatattgtgctagatatcttatttcaatggatcgaccactacagttaaatgaattttatgtcttacataattattttattatattattttagtatgttatgacatgaatttctattatgtgagcttatgtacttatttgttcttaatttgttagttactgcttatgttgctaatattactgccaacatgaatttgttattatgtgagcttaatttgtcattttattgaattaaaagagacttatgtagtactgtcatttagacaaaatttaatttttatttctattttaaacaattatggttagtcttattcatttgaaaataataaatttagtctcttttttttttttaattta

SEQ ID NO: 199582 - DNA, 661 bp, Cannabis indica
taacgcaaggagaatgaattactcattgcttttcagttgtgtcttaccagacacttggccaaataatatctgaacgccacgtatgcaagccaatttttacgcgtacaaaaaaatttaattacatgtgtaataaaatatttaaattttatttttagtactctaaattatttaatttattttaaatgatcacgtgatgatcttaattcataacattaaaataataataaaaaaatgtcatatattatcacgaatacataaaggatgtaccaaaaagaaaaagagtgtaatacaattccttcagtgtaaatcaaaaaaaaaaaaaaaaaagaccatgtatagatttttccgggcttgcaaaagtacatatacttagctaatacaatagatgggtcagacagcataatggttgttgattagttgttttattaattgaagaaggaacataatagcagtcacatggatttgtttcgtgcttaattattcaaatgatcatgcatgttatatcttcctttccccataagtcacttaattattaaaaaagaattccaccaattatattatataattttcaaacatgtatatacccggccatttcccatttgcttctgatcgatattaacatgaatttatttctatcctgatgtaataaaaattacaatat

SEQ ID NO: 199583 - DNA, 1762 bp, Cannabis indica
cccaaacttcacagaacagtatattaactacaatacaacataatccaaaccttcaaaacagaacaattcaatcattgaatcaaattcacacattaaagtgaagaaaactcaactttggcttcaacaaaccaaactcaatcaagcagccatagaaacaacttaaaacaatctccaacatactcaaaaacctaccctaaacacaccccaatcttagtctaatctctacagccacagaaaagcaacaccctacctcaaaaccaactcaaaacttagagtatccaatcaaaaaggttgagaagttacctccaaactcttctacgctgacttggggcaagaaccaactggaaaagaagaagaaaatggctgaagaaaaccttctaggtggcttgttttaggttgcacgaacgggaagaagagaggaggttgaattttttttggtggtcacttagcttctaagtaatttatagtaagggttcttctttttctttttttttttttgatagacaatcagccccctaaaataaaaatagaaagggacaaagcaagtttatttaaagaatgactaatttaccctcaaaagtaaattaaactttaaaataacctaggggtatttttgtaatttcactaatccaccaaaccgacattctaaaattctaaaatagtgtggaatatccccaaaataatccatccctttatgtcatgatatttctgaccacatcatccaatttccacagtcctcgggctcgaaaatatatttatttcaaaaatggtatccacgatatccacatatctcaatataaactccgttattaataaatgacgctctatataatcattttatagatttcactaattgatccaagtaatatcataatcttacgtcattaccaaaataattacatatttaataaaatatgtctaattaaatatcatattatttccgggatattacactaagaatcaaggtgttacattctcaacaataaaaaccatattgagacttaaatttttttcattcttcttagtattaagagactcaatttcgttaagaaaagaatactccatcatgagagaagaagagataaataaaattaagaaaaggtaagtagtaaattgaattatgaaatgaagagaaatagtttaagatatgaaaagtttatgatgtatatcattttttaaatatcttaatttaaaaaaaattgtgatgtagatcatcaatatgatacatcatcaattttttggtagagtttagagaggtaatcattttttaaaaaaaaatgataaatcatcaatttttagggtaattgtgtgatatttgagtgtagtttagagttatcattttctgaatatcagctttttgtaaaaaggtttttttttttaaaatgtgatatttgatatttaatttgagtttttttttttaaatttacattaaagtgatcagttttgaatattattttttaaacgtgatatatagttttaaaataagatatttgatatttgggttgattttttttttcaaattaaattaaagagatcagtttttgaatattagttttctaaaaaaatatttttttaaacgtgatatatgcagtagaacctttatttaagaatatatttgggaccaaccaaattatattctaattgacaggttatatgtaaatagacttacagtagcaaaaaaaaaaatcaaaacacaaaaaaaatacaagtgttgacccccaaaaacgatcaattgacaattgggtcgtatagatctgatgct

SEQ ID NO: 199584 - DNA, 1911 bp, Cannabis indica
ttataacatgttatctaaaaccttaaaattatatgtgtaattattagaatacttacagttgttgtagcaaagtggaatatgactcttcccgttccattttctaaactttgttcctttctatcgtaaattattatcaatcattgattccgaatctgcatagaacccaaatcgaagcaccaattctacaaagtcttcttcaatgatctatgtgttataatataactatgtgggaaagtgttacaacactatataactcacaaaatatatagagggaagagagaattatggacgacgacttagagaaagggagagagcttttcagagttttctaagactgaaaactgagatgtagaaagttcttctatagccttccttttatcgctaaaggaagaactatttttctcccattaattaaataaaaaagaaaagaaaaaataaaaataagaaagtaattcgttactacctgtagaggccaaaattaggctcaggctcaagtcacatgcgatgtttcctaagaatgctcaaataagattgggttggactacttgactagttatgacgatacaatcaacataccaagccaagcaggcccaaaaccatacagtcaagttagacattaacattatcaatgatccaacattgaggtcacgatgatccggcccgtatacgagactgagtcttatcactcatctaaagatctctaaagtgatcagtcaaactaacaacgcaaataacgatctccttgattaagtgggagaggaacgcttcacaagggggtgagcggtcattagtaacgcctttccatggatgcctataagagtcactctcaactactgagagagacaaatcaattttcagtcatctcaatacttcttacttattgttcactctctcattatctcaaaaaccacaaacttatttccacagtcaagataggcggtaacttagttcaatcatttactatgatcttttttattacattgttaacaatcttgctgacttaatcgtcagagtcccttcggcttgcacgatcttggtatcccaaggtttcccgattactctcttctttgttctacaggttgtcggtgcccgtgtacgagcatcttcgattgattgtggattttagcatctacaatttgccgccctccgtggggccctgacaagttgtaatcgagcaaagtattttgacctttatcattcagtcaacccacaccagagaaatggtagagcacatggaggaaggagagatcaatgagaaacagaccatctttcgtgaacaacttgccactctcacggctcaaatgaaagaaaacttagagcgcactcaagcagtggaaagagaaaatgtgtcgttcaagaaggagaatgccgcactaaaggtccagcctcagtcattgactgcttcgatggcaacattggacaatagtcaaagaagatccaagttccaattgatccaataatcacttgacgatatttaattaggaggatcaagccaagtggcctaacaaccatcaataataggggtaactaacgtcgtggttggacaacaaacaaccacacccaatcggaatatgggttcaacagtcaattcatcacccattcctccaatagtcaattcatcagccattcctccaacagttaatttgttagcgattcctccagcagtcaattcgccagccattcctccagcagtcaattcgccagccattcctccagcagtcatttcgtcagccattcctccagcagtcaattcgtcagccatccctccagcagtcaattcgtcagccatccctccagcagtcatttcgttagccattcctccagcagtcaactcgaccaacctgattgtccccgaaggttctctaaaccaacaatcccttactatagtaaacaatgcaataattgatttaa

SEQ ID NO: 199585 - DNA, 512 bp, Cannabis indica
aatttaaatttgaatcaatttttgctatgtgataaatttaatttacaaaatgaactatattttaataataaatcattaatttatatttctattaaagatgttgttaaaattttcttcttactaaataagttgatattttataatagctattaatttgtgcagtgcaaataaaaaatggacttggtttaaatttaaagtatagacatggtaagactatttctaatagaagatttaaaatttatgttaaatttaacatacaaaataaatttgtgctatatttgacttaatatttacaattgtgctccaatgcaaaatatgtaaaaataaaaaaaaaaaattgattatattaaatcattgatggtcatttaatattttattaagaatatatagataaatattcttttttatttaaataatggcaatatggtaaataagaaaatgtaaactttagtaaaagtcaataaattataataattagtgctatatttgacatacaaaataaatttgtgcta

SEQ ID NO: 199586 - DNA, 1991 bp, Cannabis indica
cccacaaagagagatatatttcagttattacttcaaaattatatatgttttctatctcaatcttctcacccaaatcccaatacaccattttacttcctcctcactctcaccacacaacaaactcatacacacttctcttttcacaactcactatttttctctacacacaaaacacatatttataaagttacaaaacttgagcatcaagacaacttatagacgttatttctcattattcaggctaagtcttgtgaatgagattctccacataaatagttatagattctggataccaccacatcattattggacaaatacacagaatttgatttgtgtattttgcttatttattcttttattttttttttcaggttcatcttcttgattaatcatttaatattcttagtattaaatatttatttattcaaaataattatttttaaattaactaatcttgaaccttatattagtcatatctaattaattctattaattatgataattaataaatttgttagatctcatgactaatcatgtcagatattaaaataaatgattccagtttacatcctatcttgtttagatcactgataatctcaagtgattctaatatttaagattacttaattaataaaaatatttatttcgcatttcataaacgatgctccaatatatattcttttattaattatctccttaatcttaaattctaataatgtgttataaatagtttcaccactagaataattattttaatatactcaaaacatatttaatactcctactcaattagacaactatagtactccattatccttgatcatgttattaagacttcttcttaattcatgatttgaaatttattacttgttaaatttcataatataattattcctaaatttcaacaattaaacagttattgtcttatattttttaacctgggaggatggttttactcctagcaacccataaagattgatgtggagatccaagatacatgcatggtaagatgttcgagcagagtcattggtggacatccgaccagctcgatcgtgtgatcaacttgcaggcatcgactaggagatatgagttgtcaattttagaagtgatcgatactatctccaaacttgcatgtcacgaaacaatccctacttttgtgagattatttcgtacattcagagaataaaggcaatcaacctatattttctatttttttttattgtaattgtggaaacatgctaatttcctattttatttcttatagattaagagaaatcattcttatgtaagtagatcgtataaatagtggtctcatctcagtatttagggacacaaaattaatcaaagagaacactcaagagtgaaatcacgatctaagagtaaattattgagagatcattgtaagagctttcgagaatgaatacttcattcttttatctcacaagttaatacaattgaagggaagtaggctattaccactatcacggagccgaacttctataaactctagtattttctttacttattactctttgctttctattatttctttaatcttattgctttaattaagacacaatatcgttggctaaaagcgaggtcaacataaatagaatagaatgattattccactttgaaaaaaaaggccatcccaatacaaaatgataaaaaatttaataattttttagttatcaattttattttatacatttaaaatttaatttttattcccatgtttcgtttcttccaattcttgccaaaaattccacacagacttagggacaaatgttatcctgatttttacactgtgacgtgacacttgactggatgacacatgtcttacatttttcaatttgggaaaatgattttacttctagcaacccataaaaattgatgtggagatccaagacatacgtgcatggcatgatgtccaatcagagtcattggtggacatccgaccaactcgaccgtgtgatcaacttgcatgcacc

SEQ ID NO: 199587 - DNA, 1918 bp, Cannabis indica
acttttctgcaccagtttcggttgtttgatcttcaataaataatagtctttgcaaaagtttacctttttatgtccccgtgcattttgatgcatcaacttcagacatttaggaaagcaaataaaagtaaatgattggaaactatgaacagtagtaattgattattttgaggacggatagtatataaggaaaatttatctagttttatttcttttgggcattctagttagtatataaccttgttgacattatcgaatctggacttgcagttgggggtcttttaaatgctactttcggaaatgcaacagaactaattatatcgatctatgctctgaaaaatggaatgactcgtgttgttcagcagtcattgttaggctcaatcctatcaaacatgttgctggttctcggttgtgcattcttttgcggtggccttgcttttcatgggaaggagcaattgtttaacaaggttgatacttgatacatatgtttcttcttttgggatcgtcagctttgtcccccgaaaaactattatcattctgatttaagttggtatgtgcataataggcaactgctgtggtgaactcgggattgcttttgatggcagtcatgggccttctttttccggctgttttgcactacacacattctgaggttcatttcgggaagtcagagatggcactttcaagatttagcagtgtcatcatgcttctggcatatgctgcatacctttttttccaattaaagagtcaaaggaatcaatatgtacctatcgaggaggttgttaacgattataccgcttctgtatttttggttctttatatctaaagctttgaaatttatgtttctgattatgaaattgaatattttctgtgaactcaggaagggaatcagactggagagagctcagatgatgatgagactcctgagatatctaaatgggaatcaataatttggctttccattatgactgcttggatctcaatcttatctgaatatttagtcaatgctatagaggtattgccttttggctcctgatttcttcgcttaatctggtttaataatttcttgttcggtaatgaattagaacaccatgttctcgctctttgcagcgccaaaagaaaaaggctcgcttttaatattatacaaaatattagattggcatatatggacacttgttttcggtgttttgctattacagaatgttcaaacccttcttgaaggagccgttaacagatctgtgagttgtaaaactgtttgtgtagggggcgtccgtcgctttgaaaattcctattgcatttatcagtgtcattttgctaccgattgtgggcaatgctgccgagcatgctagtgctataatgtttgccatgaaggacaagcttgtgagttcgaacgtttctactcacttttgtcttcaaaggttttttttttcctatcatgaccgactgttaatcacatcaatcaatcttctcttcaggacatatctttggcagttgcaataggctcttcaactcagatagccatgtttggggtatgtacacaactttgatcgaagcattatattttcccgaagttttatttgtttatttatttttgttgtcaatgcagattccattttctgtaattgttggatggattatggggcgtccgatggacttaaactttcaacttttcgagactgcaacattatttataaccgttttagttgtcgccttcttgctgcaggtttgtttccattttagtcgaaaaatgtaccctgttgaactgatttaccattcaaagtgagtggatccaatcttaatccaattgtgtttttgttttgtttgtaggtaagggacctctaactaccttaaaggattaatgctaatccttgttatctaattgttgctgcaagtttttttgtacatgtagatcctactctag

SEQ ID NO: 199588 - DNA, 1525 bp, Cannabis indica
ctagtactacttttgtctctctctctctctctcacgtacgtttcttctcttttgttaattttgtgagagggtgtaatttcatttagcaatggacaatggcaaaaatcaatcccaatagaaggactgagttcaactactgcaagaacctatgaatagaaatgctgtaaaaaaagaaatggttttgatgttgtttaaagtagctatctcttacctaaccttgcttagcatttgggctagactatcaaggtgtttgttctatatattattattttaaatttgtatatatatttttgaaggagtttattaatttagaggtgaagaaagttgttaaagagatagagacatgggactgagaagaaaggctgtgtttgtttgttggcttggtttttgaagaaggggaggttggaagagaagtaaaattaatataaatttaattttttgtcaatatatttatatttataatttaaaattatgttataaaaataaggggttgtttggtactaccattgtttgcttggctttgcctccacatgaagtttttataaatttatttttttgtagaaaacatacttaagactttggactttgacggaacagagtttctaaatggaaaacgacactacctctcttctcttcatttccatctctctatacgatgtgctgttagggaatagggactttgattgttggagtaaaagtacagaaacctcatattccatttctaccaaaaatcaaaattatgggggtaccttcacaatgatcctttttttcctcttttctttgggggctcttctttgtatttgatttgtatggtattttgctacatgtggttgtaccctctttttttttctttcgttccatattaaagatttaaaagaaccaaactattgatgccaaaatcaacattgattctcaactttcaaaaagattattcaagaagagtagttcattaggtgagttgagtcaattaaagttgatcatttcacacaacaacatagaaaataatgagtatatatgttcaatcaattataagcttcagtactcaaaatagacaaactgaccatattaattattcacatagcatggttcacgtgatagttccacttagtatagcattggggtaagttgaataatacctttttattcatcaattaatcaaatttacctataattttatatttatttgaaacatacctctttttatatgtattgtacccaaaatacccttacataagagaatcacatggggagtatcttgaagtgacaggggcaaaattggtacaatgtttaaaaaagaagtaaaaatgatagattttaaaaaagaaggtaaaaataaaagagtacaatataaaaagggtatagagtgtaatttcctcttacttaaactcattaagattttaattgttaacaaggccggccctgaaaaaataggggcataagacgatataaaattttgggccccttaacaaataaattaaaaaattaacctaaaaaaattatatgctacatttcataacataaaaat

SEQ ID NO: 199589 - DNA, 810 bp, Cannabis indica
caatatcacaattaaaaaaacttaggaaaaagaaaattaatagtatatttatggagtaatcaatcattttctatatatactaacaacaaataatctctatatgaatattcttcattggttaaaaaaaaagggcaaaatagctcaattttagctcgattaatgaaagttcactttgaccacattttctttctttattttagttagggaaagaattattttagagagcagtttctggggttgttatgaatgttatgcatcataatattaacactacgccactacctttaaccatttaaaaagtttaaagttggacccatgtatatgaggtactattagtctattacaacattcaagaaatgttgtattaatctcaaatacatgtgtactgtgtataacccacgccacttttcaaccaagaacaaataaaacagcaacaatgccttagtgttctatataattttcattaagaaggatcaattcaaaactaataacacttttaaagaaaacttatttttttgaaatgacaatatggtagtcggaggtgatgaaatagaaaagaactagtttttattttattttatttttaaattgtattttaaagtattagaatgtcattttaattaaatgattttttattattttagtagaatgtttatttcattttgaaaaagaaagaaagactattttaataatcaattttttataggttttaaattcaatccccttcttattgtcattcatatgtttttattcctttccaaccaaacacaatttaaaatatgaataattttaggaatgacaatagggtgg

SEQ ID NO: 199590 - DNA, 1471 bp, Cannabis indica
gagtacgtgttataaatatatataattattcatggcaccaagaatacctaacaaatttcgaaaaaaatactagttaataactatagtaacttttagcatttctgtcatagtgatggtcctaaaaacttcggtgataattaatattaatgataatacatcatacatgatcataattatctttttattgagaaattcaatatgaaaaaaagtaaaaggtttaatctaccgtccactttaatgattatttataaatgattgcttttgataatttgcaaggtggaaaaggaagtgatttgctgaaatctttaaattggagctccaggtggctgtagactattggagagtactactttgtttatgaccctaattaaaacatgataacacacaggagaaggagattatccatcatatacttggcttttattagccattacgctcctcccctcataattttggttctattaaactcattgttattattgtgtctttcttggataatgacacttcacttgtatttttcttttccattttaactttttagccataaaaggttcaattcaaaggtctccacctataatttttaatttttagtgtgagacgagagtacctgtcttgatttttgtttacctagtaattagcttaaaccctcatgaaatgtctagatgatacatggtaaatattccaaaatgggatacttgcagcaaaatccttttaatatttataaatattagcatatgatccttataaaaaaaataacgacaaaaatatcttatcttacgattttattacggttgtactattttttggtccattaagtattactttaaaaacatgtggcgacatattattagattatgtattaaataagctaaagaaatatgtagccatgtgtttctgagctgacacttaacgggcttaattagtacttaacagccaaaaagtaagtataaactatataaaaaaatcgtaaaaataaagtaattttgccaccactttttttaattaaagtgatatatgtaacaattacaaatattaaaagaatttcgccgcaaatatcccttctaaaatatatgtacagtagaacaagtcctaatctcattttcattgaaatattgttactaaatatagtagtatccactatccaacattattacaagtataataattataaaattatatatataaaactttttatttaattatactaacaaaaatataatatacattattacaagtataataattataaaattaaatatattctttacttaattacactaataaaaatataatatgctttaagtatatctcttcctcatttttcattagctcctctcgatctatttctctagagaattgctaaaaaaatatcattggtgcttagcactttcctcagtgtgatactgttgttatatttaaaattcggctacacttcaaaaactaacatgtgtcttgcggtggaatatgaacc

SEQ ID NO: 199591 - DNA, 1022 bp, Cannabis indica
acggctatagacaaatgcaaataatagttgggcagggggtgttttttttgtatagatttgggcaggggccttaattgaatttggtttgtatgtaaaggagtttgattgagcaatacaactgagtttattcatccaaatgaagttaaagcctaataatgttatagtagtacgtgtgaactaagagatggtgaatctctagcctaatccacaggagaatagcctattttgcttgcaattgatcaatcaatcttcaacacacaagctcagttatacaataacgaagattgaaactcctttcaaaactgagacctccaagaattgaaatttacaaagtgtagaagaaagaaaatgaatgtcgtcgttcaattaattatagacagtagtcagctcctacaatatttcaaacttatatattaattccaatccaaactaatctaatatggctattgttgtggcaaatttctaacaaactcaactaacttccaataaaagagaattgttaaagggcaccattggtgcatagcacattccttaatgtcataccgctataggtgtaattaaacagcgggtcccatataatttaagaaaataatttttaagaaatatcgctaactaatcgtggagtgacacctgctgagcaccacaataaaacaaatatttcatcaaatgtatagcaatcccaacaaaaaaaaaataacactagctaattaatgacaaattacaatattacaaaaacttgtctaattcatttttttcatatgatagtccgtagttttaatacaaatttcaaaaacaagtacataaaatatataaaatctaaagtgtgagcacaaagcaaattaagacaccctagctgatttcttggggcacttaattaattgtacgtgaaaatattaagcaaaggttatctatcctatatatcttaacattactttaattaaaaagaaatattatgaataatacgtataatgcaacaacattgtaatctcgtactcatgctcatctaatatgcaggccagtag

SEQ ID NO: 199592 - DNA, 850 bp, Cannabis indica
acacgtgttattaacccatcgtgaagatgacacgtgtgagaataagttcacacgtggtttcttaactatttggataagtactatacgagctcgacaaataatggaactgaaatataattaatattatcttttcatttaataaatatttactgttgttcttttcacatattgttccttcaaatttttttagagttagtttaaaaaaaaatgttgcatgacactaataatattataaattgcaatatattattaagattttattattataattttttttttctattaaattttcttagtttaatgattttaagattattgtgagaaagttttatacaagtttactatctagatttttatggtccttaatttgtgttatatatttaacattttaactagatatgaaaactcatatttttgttaaatgtataataatattttgataatcattatatatataataaatatttgatgaaaataataataactaacatgtataatcttattatatttttaataaaataattcattaaaaaaacaactattttgaataaagtgttataaaaatgatctattaataaattttaatatactttttttaaaaaataatattgacataaaatatgtgttaaatctatgtatgaagattattattagatattattaatgctattagcataagagttttaaaaatagttagtaatattctataaatattattttaaatcatatgagatttgatatttaattggttggtgcgtctaagatactacaagtatattttaagctatttctctcccaacataactcttgctttccaaatctctcacttatatttgcctatgagagactc

SEQ ID NO: 199593 - DNA, 597 bp, Cannabis indica
tgtctcattttacgcatccaattctcgcagaattaaactacgaatcacgatctcacagtatagagtaaagtaatacataaatggaatcataatgggtagaatccaaggttacgaaagtttgtccttttgaggggaatacatgtttgatagctaaatttctggtgaagaattggggccggtgtatgtataccttgtattagagttcattggttattatatatctcgatctcgcagagaaagctaggagtcaaatacgtatagattttcaagcatttttcatgatgccatcatattatcgtaagggaaatctgaaattcaacttaagatgagatagtttatcctaaagcaaccaattcacacccattataggtaattattatatctctggtgcacttaatgcttagatgtttttgtgtgagatgatgattcattgttgttggaatcatgggtgcttaggaaggataagtaaagattttagtgcaaaaggaagatgcctgtaacatattaacagtatagacacagttatatgacataccaagttatatgtcctttttaggtgatcaaaatgtaaatctattttattagtgaatattacta

SEQ ID NO: 199594 - DNA, 708 bp, Cannabis indica
tttttttttttttttgaacaactaataatttttattattgatatcttttctttttttgacatgactattgatcaaatctttaaactacttttaaattaagaagacgaaataacaattaataaaaataattaaatgaaaggatagtggtatacattctcatatatccaaactatattttattccatatatatatataactataatatatatatatggacaaaatgtgattattttttctaataaaaaagcacaaaaattttgaatttgaatttgaaactgagatattacctgcatatttaaagcttctcaattattatttttaaaataataatgtggatttatatgaagaagtaaggcgtgtgtaatacatagaactaaaataaataaatgataataaatttatgaaaatattttaagatatataattatagaaattattgttaaaaaaaataggggtcttttcaatattatacctaaaattgattttatttataaaaatacctttaagaaaattatttgcacaaataccgattgccacgtcagcataaataccgaaatataaaataattaccgaaaattgaaaaaaataaaaaaatctacgcttccagaaatttcagtgttttgcaaattttaaaaaaagcaacctttaggttgcttttgatgtaaataatatatcaattagttactttttattagtaaaaaattaaa

SEQ ID NO: 199595 - DNA, 623 bp, Cannabis indica
ttgtaatataactactacaaccaaataattataagttaccatatcatctataaatatttttatataacacatatgcataccctatgccacgagatccaccagtcacaagagactgttttcccctcaagactccatctctcgtccgtacagttcgtgttcttcgttgcagccatgtccatctgttgtattttgttaatctttttcaactattggcttttctcgttttctcagtttgtgtaatttttagtagtcagaaaaaaatgaagaaaaatttaaaatttgttgtcacatactcacagcacactacttggtaaataacaaccacaaaatagctgagcggaggtttaactagaatcactcgctaaaatcagacacatagaaagtcacgccaataataataataatgaaatattaggaaatccactcaaattctggctggtccatgtaatcttttaaaaaatctacattacactataaataataggagtatctctaggaatacattaaattaccttatcactaaatttagtatcaaaaaagtattttcactctaactacaacactaaaataaaagttaatatcatattaattatcacttttaaaaaagtatattatttcaacgt

SEQ ID NO: 199596 - DNA, 875 bp, Cannabis indica
aaaatcaaaagaaacctaaaactaaacctccatgtcatctgtctcttctcacaggtttaatctccgggggcaccttcgcccaaccccggcaaggcattctaccacaaccgatgaacgagattcccaccaccaggatcgcaagaattagagcacaccgaagcttgttctcgctctcaatctcgcttgagttctctccactctctcagtccctctctttctcgatttctctttactcaaagccggacggagcaaatccggcagtccatggcccaaacaaactttaccgcacgtaacgaagatacgtgtgaggagtctacaagatacttggtgttggttgagatctgggcatcgacgaaatctattgtttgtttaaatctggttgattaggttttttttactggatctataatctacttatatctttgtccacgatgaagattttttttagaattttttgtaaataatgtgttaatgcaacctggtgttgccagtgctagggttgcaatcgcacaagaggacgacgatgatgtttctgagcagactgttgaagtagtgtagaagagaaggcttcttagggtttttttttttgttttaccttttttattttcttttgtttattgcatcccaatttgagtgacctaaattctttttcaaggtattatagatgaggattttcgtgggagaaatttattgggtttttttccttcaattttgggatatttgagtagagctttgtttgttggattggttaaatcagctttctcttagtgagaatatttttgagctttaagtgggtgaatggttttgggtgagaaatttttttgagatctttggttgaagtatttttttaggtttgggatgcctctgttaagaac

SEQ ID NO: 199597 - DNA, 1616 bp, Cannabis indica
cttgaagcggggacattacacttaattgcaccaataacactaataacgatataacacactaaacaccacatatcccttttaacatttttgataagattttaatacaagatctcaaaacactttggttagggtgtgttggcttgtgtaattggaatcatgtgtaattcagagtaattaaaagatttgacatgttcatttaattaggtaattacacagtaaactgtgtaatttgatgtaattgagaggtcttaattacactttctaattctcatgacatatgtataattacaaatttgggccaagtgccaaaaatatctattacatgtgtagcttttttttttattatataaattactacaagaaaaatcacttttaccaacacattttgcaaattgcgttggcaaaaaggttaaagttttaccagtgcacatttgtagaggctaaaatctaacttttaccagcgcatttacgcgttgggaaaagttatttttatcagtgcttttcattttatgctcgcaaaagttctaatactaacgttgatttgccaacatatccgaagtaaattccattttaccaacgcaatactaaacttttgccaacacaaaaatgtgctgacaaaagtgatatttcttgtagtgaattttatttttggacgagtattactattgggtacttcgtagttagtgatatttcttaaaaaatattgccttatatgagactcaatacttaattatactaatactaaacataataatttacaccaaatcgaaattcaaagagttatgcgattgcttaggcaagacgatcagcatatgtcgtcgccactccaccgtcgttggccatggtgaggaagagacaaaccatgaagaaatgttacattttattttaggttacaaagttaccagaaactataacttgaaaaatagaaaagagatgttacattttggttaccaaaaggttaccaacttgtaaccttaaaattagaggagaaaagttacacttaggtttctcagtttattggttatatattagaggaggatccaaataagtataaaagctaaagtgatggcaacaataatgtttgatacaaaaaaaactatctggtcaaattatgtaaaacaaaaatggtataaatctacaattctaaattttaatatgatatttctaaaattaactccactagaccattctataaaagttacttttttagaagagataattacacaagacactattttttgtaaaaaaattacattttaaagaatttttctttttttacttttttatggttttctatagaaataacatgaaaataacaaaaaaaatcgtaaaaaaataacatcaatataataacaaaaaataacatacatataacaaaaaatcaacaacaaattaacaagataacataaaaagaccgtattttttgtaaataaaattaaaaaaaccgtaaaaatgtttaaaattccgtgaaacagtatttttgtaatttttttgttatttttgtgtatttgtgaaattatcccatttatagaatgaattttgtgtgacaaatcaaatttgtgccacatagtcgtttgactgtgggcttgtcaacttaggcccaactagctatgagg

SEQ ID NO: 199598 - DNA, 3212 bp, Cannabis indica
aatgtagagctgattggttggtcctatgggtaaccttattctcatgcatattgtagctggataatagagatcattttataccacttgaacacgtgtcaagcaaaggttcaacctttaaaagtgacagacacatgtcactccaagctttctcctttccaagcagtattctgtagtgttcgtctggtagaaggatggtggtggtgcacgcactgccatgtctagatgtaagagacaagatcatattttgttaggaaaaacataattgtcaccttgttgacctggctcatgagaaaagtcgacatccacgaacacccatgagggtcggtatccacaacaagttactctaatgagcatttggggagccatccaaaacgagcctttctactagtcccttctgggtttgggagaggcatttcctatctcgcttttgggaagaaaatcttcccgggagaaggtttctacatatttctttgctttgaataattcttcaactcgggggaaccgtttaacgactgtgcaccttttaaaggactctagctcacgaagaatcaattgagccttttcaattaaagtgccacgtgtcatgtctttcataaaacacagattatatttacccccaagctttcaggatgcaatgtggtccagaaccttgcagcccttctcaactttttgagacaaacccatggcatgtgggactattagttcgtctcatattccaagagttgtcatcatttaataagtcacataggccttattaacgtggcacatgggcagtatcttaaatgtagttactagtgtcacgcatgtgtgggagcatatttttttagaggagttatactaacgactgagtgattaaaatgactcttcatttaatgaacacattcctcgaggcatgcaatgatgaatgtcaagtgttaggattgaacattaaatgctaactcttcaactccctagccgttgaattggaggatactcttcaattgaaataatcagggtcatttagttcaaagggtaaagacttcaactggtccataagtaaatttccaaagtttattcatattcaatctttgtaagtctttctatcttcttcgaacttaaagcttagaagcctcgactcaccttaccccctgttcgacaaaaacatagggtaagcgtcacacacttgagtccagcgtactgcatccttctttaacccttcctattattcggtaagtaactcaattcttgttggcttttgaataatttcatgtcagaggtagaaatgctaagttcaagcaaggtgcgatacatattgcatgtcagacttatagaacacttgttcattgaaatgcattattaagataggactgtgtgtgaatctctgtgctttgatcgtgtcagtcttattctgatgggctgagtacgatcatgctttatttttgaacaagcttgcatgactccgggaatgagactatgtaaccactatactggcccgttaccttcatttttggacaagggtgtgtcgaaggttgatccattggggaaggatacctgatccttctatgtgcccccatttaagagtttgttgttgcattttgagtaatctttccatgttgattgtgctcgcaggtaccatttcaacaatcaaaattctaagccctaggaaagagtccagtttgacaagcttcaagcgtagaggagattccacaagatagaggaggaggcaagatactgaccctcaacaagccaacaattcaaccccttttgatctgctgccttcagctccacaactatactagcaatacctacggcagtgcccatagccgcagtagcctccatattaatcattttaatcgcactgtcagcgacctacctctcttcttgagatcccttcaataggcttcaaattcttcacgacaattattcccatggaatttgtgctatgcagagggaaaaggatgtcgaacatgctttgaggaggtagcacaaggaagagtggaggattttatgcatgagagcaaacagactttctgctgtgaaaagggttgaaacctctgaaggtctttttgccactgttcctcatgggccaatggtggacattgaagccctagaaaagtggattggtgcctaaagtagtgagggaagttgcaccctttgaagacatgggcaacctacagtagcactaatgtgttcaccctttcccatgtcgccaaacaacaggcagtaggggtgagctttgacttttatattcttgttcttactgctatgtactgcttttgttttctcatgttttgttcatgtgctaggcgaccttgatgatggagagggctgttaaagaagtaggcacccttatcacagaacttgagcatgtaaaatctgataattaacaactacatgctgccaacaagggccttctaggtgaaaatgaagctctaaagagagatctcaatgacttgaagaaggagaaacagttgctacaggtcaactatgccaacaagcccttctcctataaggcgttcgcataattagtgagcatcgataggagaccatagagagattgcgcgaggggacctcccccagccatctagcagcacctgaaggctcggggcttgaattccttcatacccttcttcttttccccttttttttgttttaacttggattttgggggaacaattttagtaatgccctaaccgcagggccatctgtaatagccttagaaatgttcatttggcttttatatttaatttagtttcaagtttagtgtttgttttttgcttgataggttgacttttagaacttggtgaagtgtttggttccaatgaccaacacttcagtaaccttttaaagcatacaatattacacgttctttcctggaggaattgcaaactgtgttccctaattgctttagaagttacggagcctactccctgtctatgattctccaagttaatcacctcaagccagatatgcaactatgtttttgttgtgtgtgtgtgtgtgtgtttttttttcttggattagtgaaggaaggaggatcaggtatgcaacaaagccctagccaggttctttttttagggaaacaaggttgggcttgttgtgatgcttaaactgtccttccttgatcagggtgacaaggttgattcatcactcagatggattgtcctgagttcgttatgagagagctgcaagaccattaagggtttccagacatgcttctattttctcacttc

SEQ ID NO: 199599 - DNA, 1510 bp, Cannabis indica
acccaagagcatcataaccctttccatgctttcaatcatcaaatttcagcaacaactcaagtaaaataaacagcaagaaagctacctcaagttagcaagaacaaagccccaaatcttcaaaattaagctttcttccacaagcaattcaccacaaaattaaagctagaaaaaaaaaaatgagtttttcagagagggagaggctggctgctagggccaaattcacattttcaagcatttaagggcaaaaatacaattctcatatttcatacatgaataataaatttcagatttctcatataaaaataaaatgccaaccaaacatcccaaaattgtatttcggcccgaaatccggtttagtccgaaatacccgattgtgactataccgcgctaacttgtcagaacacacctgaaaaaggacaaaatatgcatactatataataatatagtccataagcacataattaaattaaattcatagttttccccttctcaagtcaaaattactaaaatacctctggcttaccaacggggtcttaacatgtcataaatcataataattcacatataataaattacataatactataattccacaataatactcaattaactagctaggatttgctaatacattctcttaatctaaggatattacaagctgactacaataaaccagcaaaccagtcgaaaaactcaacagaattcagatttcgagagacaaaaccagtgagattccaacaggatattgcaaaaggacaattcacgagcacatgggagattgtcttagctgtctcattatagaataagcagctggtttcaacagggatatgccattgcaataactgaacacgagtggggaggcatcccgataacgccttccaaagaaagtgctgaatttttaggggattcttcatcttccacagttacttccaacacttagaattctccccaaagctagtgcttcttttctgttgctgtagtaactgatatgcacttttgactgagtagaaccccaagatttcttttgactagaaccaatggtccaaacttgttgaatcactaaggggtatacccagaatcaagtcatcgtctctatcctcaaataggccacggacaacatccacatcccacgccctcctcccaacatgaaacaagcaatgattaatgaaattcactagcccaggatgattagtaataacatacagattagtatcatgagggagccacggatcaccaacaatattaacagaggtaccaacaccaatgctaatcctagcaccatctttaatcaagtcaatagtctcgtgaatactacgccatttgaaacttaggttatttctaagaggaaacgataagaaaaagccatttgggtaataccttactttataaacccgactaaccagagaagtgtcgttcaacaacaaccactagccttgctttcataagagagcaaggttataatcgtggagattgcgaaagccaatgccatcagcatatgctttgtatttta

SEQ ID NO: 199600 - DNA, 690 bp, Cannabis indica
ttttactatttcagtgattatttatgtactaatccatgcacttccagactttgatattttatcaaatcatgccctttctaactttgacatgtgctaaatcatgctccctaaattttcattcatcttggactttttttattaaaattgaacaaaagtccttaaatccaacaatctcaatagttcaggggacatttttcacgatcttaaaaagtttaggggcatgatttggtacatgtcaaagttcgaggggcaaatatcctaattagcctatatatattgatattagaattattttttaatttactaattttttatttgaagtgagttactatttgttatatagttattttttattataatttactaaaaaaaaaaaaaaatgaaatagttgcgcgaaaaaaaactatatttcctagttagataaaatttacaattaaaattttttttaaaaaaaagagggtaacattttgattttttttttatgtaggaaaaagggattaaatggttcagattctttctccacttattcggttattttgacaattctgagaatcacgtgtcagctatagggactttatatttcaacctgtcttaattgagtcttcggtaactaactcaagaatttccatcacaaatgacgggtattaagttaaataaccctcttccaaagctacttttgctaaataactt

SEQ ID NO: 199601 - DNA, 983 bp, Cannabis indica
tttttttttttttgggttaagggaaatattttgactttcagtaacttgatactgttttttttttcttcaagattgattcacttctcatcaagaatgttatatagaatataacattttccaattttgtgtatcaaagaggtaagttttctgtagaagaactctttcaaaacaaaatctctttactttactcatcacaagttttatcaaatgatttttggttgctcattgcacatggaaataacagttgttgatgttgtatgatttggttataaaataatagaaatgatgtatccatttggatttactttagatattggaacagagtcaccctttaacataaatttagttgcattgttcacaaatagcatgtatgattggacttttactatgtgaaagaaaagttatggatttatatttactataatgatatgatgtgattatatcttggtgcactacttactacaatactttatgtgcttgatatgatgtgattacttattaattaagaaatatataccacaattcaaagtagatatatcacatttaataattaatatagtatcataatgggaaataaaaataccaaaaaattagtttaatattccacaagttttttttcctttcctttcctttttcatataccatagaaaataaagagaatacaccccaataaaatagatctatacctcaaacttaaattactatttcacattttgtccctttcgttcttcatatactaatatactcaaaatatattataatatactttatctttcattcttcatataccacctcacatacaaataatataccacattattaaagttatatagaatatactataatatactttatatttcgttcttcatatactacccctcaaaaataatatatcacattattaaagtaatatactcgaatatgaatatattgtaatatactatttttcgttcttcatatataaccccacataaaaataatat

SEQ ID NO: 199602 - DNA, 1218 bp, Cannabis indica
aaaatatacgacttgttaatattgacccctgaacatttacatttataaaattttagtccttctattagatttcatcctatttttctattgaaatactgatatgtctttataaattagtaattttgtctcctaaactttaacaactatattaatcataccccatccaaataaaagtgagaaagattcaacttttttttttgtggtaaatcataaaatattaatttagatcttacaaaaaattatcttgaattgctaaggaaattaataaagaaaccaaaattttaaagttaattaataagcaatttgaaaaattaattattttttattaaaaaattcatttagatttaaaaaagtatattgaaaattcaatttgtgtacaaattaaattttacgagaacaagtttgagtctatttgtttctccaaaaatttagatttgtttaagtaagtataatattttttttagtttaattttttagatttattttaagaaatattttatatttttattgtatttttaattatttttcattattttttaaaatatgtgtttataaatataaataaaataaactttcaaaatattttttatgaataatttagattttttaagtaaattatttttttttgattaatttaatacttttatcaattttttaaataattttttaagaattaataaaaaattaatatttaaaataaacttttttcaaagaggcaaataaatttatcaaattttataacggtaaaaaaaatagaacctaatagaagaggtatgattatgttaccactctattatagtggaaattgttaataggtatatatttaaagggacataatcaagtagtgtcaaaagtttaatgggcaaaaatgctaattattctattttttattaatgagttaccaaccccattttgctaggaagactttattcatctccataaatttttgaaagcacaacccccctcgcgatttgggaagataaattttatcccacgttttgagacaaaaatcgcggttccctttttatttcctcactaaaaatccttggccatgccatctattttggacgtcaacagttatgaaagtcttattgtttgcaaagtataaactgagagggccacacaaaccgattcaataagcatgactcgaccctctttggaaagagtttttacttttcaaacttgaagctttgaagctaggttctccaagataaagtt

SEQ ID NO: 199603 - DNA, 1149 bp, Cannabis indica
tgtttgagttttctcaactgattctctctgttttgtacagagttctacattggcattctaaagaatgtgatttagctattatttagttctcttttctttttcttttttcttctttttaataataagttaggttttgtcatgattagtttgtaatatgtgtgttaataatcatacaagattttgttctgttctgtatggttccgagttttgttctcaatatctttacatttggaacgtaaggaccagggcaaaagaaactttcataattttctgattttggttcagtgaaaaaatctgtttcgttcatgtgaatcccatgtgtatggtgtttgttcctacatatattttatttcagtactgtgtttaagtttgggataattctatatctttgtctgcatgaagtgtttggtgacataatatctaatttatggtgtttcttggcaatttgaattataattattttaactactcattgtgacgaataagttacctggactggaacaatgttgtgttgttgaatggagagagagagagagagataatttgtagttagataggcattgattatataagtaagatatagatataaagtctctgcaactccaaattcttacatcataatacaattttttttttatacgcaaatgtatatattgaaaataattaaccctaattacaattgttatcttttaaggtttatatggaggaggcggcgagggatgaacaacccactcaaccccaagagcaaggcgaaggtggtcccccacttcctctgcctcaatctttatcggaatctcaattacaagaaggagtagatgatgaagaggaggaagaagaagaagaaggggaagaagaggacgaagaaccaaaaaatgaagacgacgaaatgattgccaaagttcagaagttgatggagaaggttacttcttcgcctgataaccctaaccctattgtcctccatgcacttgcctccctttttgaaactgaagagtccaagtaagtctttttttattttggggtggggtggtccctcacttgctccgcctcaatcattatcggaatctcaatgtgcttgtttttttttcctgttttattagctcgattatttatttatttgaagttattcgttatgtggtaatatttgtagaa

SEQ ID NO: 199604 - DNA, 756 bp, Cannabis indica
gttatgctcgctaaaaatacgatatgggcttaaacaagacgctttagcaacacaatgagcaactatatttacagaccgtttaataaaattcaaaaacacacaattaagagaagaaagtaaagaacgacaatcttgaaccaagtaatcaaattgagatgtcattgaaactgagccaagaacaacctgcaccaccattagcgcatccgactcagtcaccacctcagtccaccctttgcgtttgatccaactcaacgcttcttttactccgataacctcatcaatttcagggcctacattccccaaacggctgccggaaatcccttcaattagcctcccattagcgtcccgagccacacaaccaaaaccatacttatgctccatcgcgaagataacaccgtccatattaactttaatggattgagacaccagtttttgccactgctccaaaccagatgagggaccaaaaaccagcaatggacccgacttttgaacacgagcagcagtccattgttgcagcacagttcgggccgagtaaataacaccaactgctgtgcaattcttttgcttccaaagaacatcattacgagcattccatatagaccaactaaccatagcagcgtcaacaccaacttcatcagactgagtttcaagaattcccaaaaaccagctgctaaactcattagaagccccatagatcacagtcgggcttgccaaattctaacatgattgtgccaaccgacatcccataagcacatg

SEQ ID NO: 199605 - DNA, 715 bp, Cannabis indica
aattaggtttgggtccggggtctaggtctcgatttgggtctagggtcgaggtttgggttcgggttcgggttcaggtcggggcccccgacctcagccctagacccaaacctggaccgtagatctaaccccgcaccctagacctaaatctagacctgaacctagaaccgaaccccgaaccctggacccaaacccgaacctagactcgaaccctaggcctgtacctgtacccgaaccacaaatctggaccaggccttggactcggattcgaacctgaacacgggacccaaacctaaacccaaatcgcataccccaatcccaacctagaccctgacccaaacctcgaaccccgacccaaacctgaaccccaaatcaagaccgagacctagaccctagacccgaactgggacttagaccctggacctgtacctaaacccaaattaggacttggacccagaccttagacccgaacccagacctggatctcggaccgggactagggtcaaagtctgaggtttggggccgagcccggccgaacctggctttgggttcgaggtccaagtctcgacttgggtctggggttcaggtctggggttcaagttcaggtcagggttagggtcggggtccgggtttggggtttgagtccatgggtctgggtccgaagtccatttccatgggtttgggtttggatatgaggaccgggtttcggtctgagtcc

SEQ ID NO: 199606 - DNA, 733 bp, Cannabis indica
gtctaactttgttggtaggagagatagcaattggtgtcattctgtcgtgtttgtattaacacatttatgacataacattatagtgagtacgaacatgacatgattattaattgtgtcaagaccccaaatataaacatgacacgattacttagcaagtcacacgacacggcacaataacgcgtttaataaacgtgtcatgacacaaatccaaaaataacacgtttaacacacggttaaatatgttattattagaacttattttatcaagatctcaattaactaacatgtatgtttgataataaataataaatctaacatcgtaaaatatgaaatgcataaaactataaataaacacctaaaagtaggattacttacattaatgacagcgaagtataatgactcattccgttcaataatctaacactcgaatcctttctgtagcaaagtatcaccaagtactgaacctggataggtttccttaactctgataagcaatcgttcttcacaatcttctacaaatgtctgagtgtcttcttgatttgtgtgggcttgtgagatctagggttgaatcacttagaatcctatttgaaaaaactctctttctatttatggccttcacactaagtttaagttagatgagataggcataaaatcaaaagataattgggcctaaaaaccaatccatggtcgaattccctatgagccatagagttagatatttgtcactttattt

SEQ ID NO: 199607 - DNA, 1030 bp, Cannabis indica
agttcaaatattaatgagatttgttttatttttgttttattattttattatatataaataatattttattattttattaaatataaataaaaagtcacccatgattttctcataaactaagaattcagttatataggcacactttatatagaatagatatatatatatatatttggaaaagcaacgtgcaaacacatgattagtacactatattaattttataccatgtgcataccaggcatatatatatgtagctagactgattctcaagtcaaacaaaggaaaaaaaacaaattatcatgatttgagaatcgtataaaaaaaatttatattaataatccaatttaataaacaacatgttaattaagccaatatatcatacagtgaaaaatatatatatataattatacaggataaatatatatatatatagactatgtaaaaattaaaataccctttatatattttgactctgtagaaatccagatgattcttctcaaaagaaagaaacccaaataataaaactggaataaaagttgcaagataaaaagatcgtcaaaaataaggagataagattaacatatatgagtgttaaatcaaatatgaaaaccttggactctttctcttgaacgaacgatctctattgaagaagatgattataagattaacctatatatgatgtatagtttattttttttttatatactgaatattgggaaacatgtaaaattattgtcaggaaagtttacaaaaatattacaccaactttataaaaatactgtttaaaatttaaaaattacaaaaaatacaatttaatttttagtaaaaaaaaacaaccctatataataacttaataacttaacaaacatcaaaaatttaataacaaaataacaaaacattgatataactacaaaataaaaagagaaatggagagagaagaaaaaaaaggggaaaaaaattcattgaaaaaaaaagtcacccaaaaataaaaaaaatattaaaaacaaaaagcaaaacaaaaaacttttta

SEQ ID NO: 199608 - DNA, 1163 bp, Cannabis indica
tactaaattaattaaaaaaaatatcatatctatttatttactaaccttttaatgcacaccatcattgaactccttactctctctccttggtttgatagaacgaaaccagagtacccgtaagagcatctccaatccaagaaactttaaaagttgtcacaaaatttcacatcacttcaaagtataatattttattttctctctcatccacatcatttttagctacttattactaaaaaatactccaatacttaacaactttaaaattgctatcatagttccacacactataatttaatatattattcattttaataataaaaaatatcacagtaatatattaaaattcatatattaataaaaataaatattacatgaaatttaaattacaccaaatttaaaaatagctcaaaatataacataataataattaaccaatccaatataattaaaattatttctaaatttagaccatgtgtgttccactaagtctgcctgaagattgcggtgaatgtttctatcacgaatttcggtatttctttgaagcatagtcgggaagtcggaaataggtccatggcatacttcaaccgttggggtattggtggagccttcatcgtaattaaaatcaaatgactcgtatatttctctttcatcttggatagtcatgttgtgcaatatgatacatgaatacataatatctttaagagcatctctttgctagaatcgagccgaacctcgtataatggcataacgagattgaagtactccaaatgcccgctcaacatctttgcgtacagcttcttgacattgggcgaataattttctcttctctccttgaggcaatgggatagttttaacaaatgtaccccatattgggtagataccatctgctagataacaccccttgttgtactgtgtgccatttatcataaactcaactcttggagcttgcccctgtaagatgtcagtgaataatggtgattgatttaaaacattgagatcattattggatcctgaaacaccaaaaatgcataccaaatccaaagatcttgtgacacgactgggtcgagcatgattgtcagtgcaccgtgatcacctcgtgtgaatttccctttccatgcaactcgacaatttttccatttccagtgtgttgacttcgcttttag

SEQ ID NO: 199609 - DNA, 590 bp, Cannabis indica
attttgagaccttgggtcgtagtccgggtttggggttcggtgctaaagttggggccaggtctggggttcgggacccaaacccgaaccccatatcctttgtaaatattatgaaacaagttaatacgaatcatttgttatgtattaaattatacaattcacattgtattagagcttatttggtaggtcgtataaggactgtattgtattaaataagaaatgtattgtattaattattacgacaaatttttaatacaatgtaagttgtattatttaatacataacaaatagtctgtattagcttatattataatttatttataaaagatccggaatcaaccccaatctctgacccgaacctgaactcgagactcgaatcgagatctggactcgaaactagactcagacccagacctaaacttgggactggacccgaacctgagacccggacccagacatggactcggacccaaacccgacctagaactaggacctgggacccggacccggacccaagacccgagacccgagacttaaactctaaatgggttggatttagattttaatttttaattaatacaatataatatttt

SEQ ID NO: 199610 - DNA, 874 bp, Cannabis indica
ggataatacttttggtgaccctttatattttaagtgacacataacatgagagactaacacttaaaatttagagtttgcttatgcgggtcactaaaagtcattgttaactatttaatgagctgcacaaaattgaggttcactatgtagtgtcactaaaaggatagaagtgtctcttgttgtgccccaggtcccaacctttgttgcacttgatatgtagcttcttctctcagccagcttccatccaccttttttttgtcttccaaattcaccctttcaattggagacaagactattgcgtctttcatattttgtggtacatcccactcgcatttgtgtcctattggataaactgttccttcataagttgctagtaaagtttttttgtgtagtaatctgagcagtagttgtataggtccatgttcatctcctttaacacgaacacaatatatacatagggtatttcatcaattttgaacctgttgcacgtgcatgttctctctttgagtttcactgtaaatgattctttgattttggttacctcaaacaaataatcagtgggtgattttacctatgttaattgaaacaaagatttattatacatagagaacaactgtgggagaacactagaataatgctaaaaaaattcttatagccccataattattatgtttaccaatttgaactccataatctaaatctcacatttaggttcaatgaatatgtgtagctttttagtagcatttgttctgtagattgtgcgaatgtagtaaatatattttgtacttttgtcctattattatgtgtccattgttacactaatgctctcaagtattccattagtgttgtaatttttatattatttgttataatataa

SEQ ID NO: 199611 - DNA, 1586 bp, Cannabis indica
actcaagtgaactccatatacgagaacagagaactataatataattaaataaagaaacaaaagtgactggttagtattattattattagttactatactcattctatttataggtaagaagaagaagatatataaattaataggattcagtattttatatgatagacaaatgagtaggggagttattggaacttggggaatgggataataaaagattaagtcaacccgacttctttggcacacgtgttggtccgacattacatgataagagttcctttgtcgtgacacgtagaaccaaacgccaaaagcttctcacatatgaaagtatggttgggccactctaatcttacgtggcaacatcttgtatgttggttggctgctcaactgatttgatggtggcagatgatcaaatttttatttttttcttttgtaaaacaataatattaatacatacactaaaaattataaaatcattcaccaaaatattatactttatatttaattaaattgatcaaaattttaaaaaatttaaaataatttataatataaaagttgtgtttaaataatttatcttatattggtataaaataaaaaaaataatatattatttaaatcttattttttacatattaatttttttaaaatttcttaaaattttacaaaatatcaatcatataaaacaaaattagactaaaaaatatttgtaaattcagaaacaaatacaatgtaagcatataatatatttttattacataatatatagtatctatcatatatatgtagctacaacattagaaattataaaacagaagcatcgtattgttgtagacattattgattattccaaaaggcaagttttaattaagtgtcaagttaattagtttgttgtaatggaaaatataattataacaatgcatattaatcccttttaatgtgatctcgatctatatattgcttctattctatatataatgtgatactaatttcttctgcaaacttctttgttctgtttaggtgtcctttgagttaacatggggatttgtagttaaacaaatagtactgtctatctatctttttccttgagagagatctggcttgttaattagcccaaatttcaacgagattttgcttaaggctattattcatttcgtgtcatgactcatgtcaagtattttacataatggcggtgacaaaattaaattaaaaatataatgaaactccaataatctctcgggaaaatgaccaaatctttctatatattacttatgctgataaagaaaagagtactaaaagagaaggagggtaaaaaaagaagcaggtgtcttattataaataaaactagcaatattaactaggctattttctaaactttcaatatctaattttggagtaaaaaaggtattgacaaatataccctttttgttaggcatatacatatatatcgcatgcatatatatgcctataaagttattgtgctattgatatttactctattattttgaacgttttaattttgtaatctaagtccgaaataattaattttttgtaaatgaatgtaagccaaatgtgatttttttttaaaaaaa

SEQ ID NO: 199612 - DNA, 975 bp, Cannabis indica
ttattattattattattactggtcgaactcaagagaataagatcagaaaatcagaacccattctttaagtgattgaaccacacaagccattatgccccttcttttttacctttgaagtttgtgtaataataataataatatttgctacacatttgcaggtgtgtaaaatcgatgatatcttagttttcttcaaatgatctctcatgtttcagagcccaagaaaaataaaaaatcatttttaattttatacctcaaccctgaaaaaaccaagttcacattccacgaataaaaatgtattcgctgtctgtgttgctaattccacaatcgtagtttgtaatcaatattagtatgttataaccttttcaactctctttatatctgcttatgtttttagatcacacatacgcacataaatacatttagggacatatgaaaatataccatatggaaaaaaaaaaaaaacgatgatctcaattcaacattattggtttattactttttctatggaatatacatgtatactatgtttttaggaatattttaagtttcatttataagaaacaataataaaagaataaatattcagatcttatttttgttcagtgtacctaatgaagtttgcgtagccatatacatgcagaaacacctcaaattaatcataaaaaaaaacggctctagaattattaactagctagctgctacacatgatccttattatcatatatatttatatataaggttatagtacttgttggtagttggtacattacatagtactttctttagcaaaatgataattgaagggatggagcttaatgcctagctaagattcaagggatgaagcttaattcctagcttatactctccttctctatgttttttttttcttaattaaagtacctattaaaaaaaaaacttttgccatttaatcaaataataaaaaaaaaacttttgccttatcatatatatatatat

SEQ ID NO: 199613 - DNA, 2725 bp, Cannabis indica
gagaaccgagcataaaactaattggtctgtagtcacttaactgttgtggctgctccacttttgggatgagagtgattaaagttgagttaatttcaaacatatcagccccttcattcaagagtgcaagaacacaatttgtaactaaagagccaacatcatcccagtgcttctgaaaaaacatagccgacatcccatcaataccaggtgatttatccggagccatagaattcaaagcttcctccacatcagatctagtaaaattttgggttgaaatcaagttcatctcatcagtaatggaagtattaatagcagatatcactatatcaagagcatcaccatcctccccagctgtagtgaatgaattggaaaagaaagaagatgattcaactgcaaaatcggcctctgatctaagaattctaccatcactagatagaagggatttaatcttgttgttattgtatctagctttggctcgagaatgaaaaaaatttggtattagcatcaccacctttcagccaatcaactctagccctttgttgccaatacaattcctccttctccaataaatcatctagaattttttcagcatcaagcatttaagtagtgtgggtagtagaagaatgcctactattgtacaaagaagcaacacgttgatgagcattattgatgtcatttttcatctgttcatacttcccaaaatgccaatgttgaagagcttcagaacaagcagaaatattctgcaaaagatgaaacatggaaccatcagtggaaggattagaccagttcttaataataacatcctgacattcggagtccttcaaccaaaactgctcaaaacagaatcttttatgcatagttgaagctggccgatccagagcatgaagagaaacaaaatattcaatcgcctggtggtctgaactgaagtagtccagatgagagatgtgattctcattaaacaactctttccaatttttcattaataaagcctcgatcaagtctctccttaacaagtaacccattaaaattcctatttgtccaagtaaacttatcacccgaaaaagccagaggagtcaagttgcacacatccacagttttcctaaattcctccattaaggattctcgtcttagaggacccccttctttgtcatcattagataagagttcattaaaatcgcccataattaaccatgggaccgatgtagaactaggggcaaagctttttaataagttccaagtatgagatcgttggtgagtttcgggagaaccataaaaagcagtaaagtggaaccgagggcaacaatcatacaaaacaaaaacatcaaaatgattcattgagaacgaattcagagttacatcaatatcatccttccataacaacaacaatccccccttcaaaccttgcctaggaacctccaatccattgctaaacttaaggacagaacggacacgattaatagaattacagactaatttagactccataataaaaagcaaatgcggacggtgcttttggacaagcagtttcagatgtctgaatgccgaaggattgcccaatcccctcgcattccaacttataatcttcatcgctccatgcggggttgcttctccgcaacatccgatgaagaaaatgaaatctcctcaatagaatccgaaggagtatcagaaacttgttgagggtcgaactcatttggcaccttgctgctcccactgttactgcgacatctctttaacacacttcgaaaattaacaagatcaacttgtcttttgaaagctttaccggagctactgtcatcttgaataacctcatcaatcataatagccttttttttattcttaccagaagtaattgtagcatcattaaagataggacatgatcctttcccaaaagcagaaacaatttggtcagatgggggataagtggcaaaaaggctgtgtttcggtatagtgttagattggcctgtggagatggaaatatgaggatcaacagaattggtcaatattgatgaagataagctttggaaaaaggaagggaagggtgacggtaactcaggaattacttctttttgtattggagcatggttattaggagtactattttcggcttcagtgagtgaggaagggtgaggatttagcttggccatacggtttaggtaggtatttgtgttagggatggttgaaccaattgatttcctggctagtctagtgagaaaagggtagacattggcttttgaaaagtcactccgataacgatcataacccgaattcgaaagtttatcgcccaacataaaaggatcgtaagggaggtcagggtccctaccagcatccaccaattccaaaaaaccactacacttcttaaaagggtgacccaaaactccacaatgaaagcagaaaataggaaggttctcatactgaaattctagccagtgttcatcccgaacgtgaggaaggttaacaagctttcctctcatcaaaggttgggagatgtcaatccatactctaattctgataaaagacctctagccctcatgaagagaatcttcatagacgtcaacatagtcaccaatccattccccaaccttcttagcgagcgctttggatttgctaagaaaagggagaagatggatttgaacccagaattgcaccttggagaaatcaccagtcgaaacactctgtaagtgatttggtgagtgtagcaaaatgagatggttgaaataatgccaaggtt

SEQ ID NO: 199614 - DNA, 1027 bp, Cannabis indica
cttcttcttttcatgttgtgaataacattttcatgtttgaaagattcacggataaccgaaatttggagcaacatgtatagagaaagatcactaggaaaaagagctgctaaatgttttatctttgtgctttgaaagtagtatttaatgttctttttacaactattttcccgcaggttagttctatttattttttatgttacatcagattaatattggtttatcaagcttcttccatggggaatgtgattggtataaactgaattttggacagctttttcggtttgaagcaggatgatgcaataattgggggacatattttagtgatatataatctttggccacagtagtcttcacattgagaagaagaaacacaacatttttgcttgtcttatatacttacttgatctctttttctttcttcatcttctcctccttattaaatctctctctctctctctaagatggaatagcacttattgctctccctctatatttcggctatggaggaaaaatgagagagtttagggttctaaggttctatttaggggatgtttggtatgggaaattcaaaattttcactttaatgggaaagcttaagagagtaatctgaagttattgtatttggttgtgcattggaatcttattgtgattcctatgaatattagttttatgtatttggttgggtatggaaatttgtttatttttaatgttttttagaaattaataaatacttttttttggtttaaaagaatacaaatttaatgttcacagcgaaaaagaaaaagaaatacaaatttaatgttgggtttttttatttttacacttaaaacagttttttttttttttttactagaattctacataaaaatttttagggtaaatagtggcaaaagtacccaaagttttaggtttgtaagcggcataaatctaatgattttttttagtggcataagtacccaatgtttataaaactgtaattttcttccaatttcatcagtacagaatctattattgtcttaaacaggac

SEQ ID NO: 199615 - DNA, 1029 bp, Cannabis indica
cgatcatctatccccaatacgtacgaattgcaattaacactgtcatttatgagtagtcattacttcctagcaaaagaacaggttccgcgagcttcatagtcgaatcctgagaccatcttcttaattaaatttgagcattcagtttgtgaaagtttccttaaacaaataggcaccctaggtactcaaatggaagttgacttcgttcaaagctagaggaatccatcactcgttgaacctctgtttgattcatgcctgagcagtatatagaagatttctcaacactaggtttcaaacctaaggtttccgaaaacatttttagcccttgaagcatcaaataaaattgacttgaaatctccatgacaaaaaagtagtacatcgtccgcaaagcataaatggttgagcttgagtcccttgcatcttccatgaaacttgaattcctttttccttcccactttatccatgatcctcgataagtattccataccaaggttaaagataagtggagacattggactccctagtgaagttccctttttgcttcaaaaaaaccatggagttccccattaatcattaggttgtacctcggggtctttatgcacgtcatcactagatgtataaattcttgtggaaagtcaaaagcttggagaacctcttcaataaaatctcattccatagtgtcatatgccttcctaatatcaagcttgatcatacaattaggactcgagcttgctcttctgtagtgtctaacatgatcttggcaaactaatatgttatatgcaatgtaacgtccttgtacaaaaccactctgattttgtgaaatcaaatccgacaacacagttctcaatcgagagcaaataagctttgttgtaattttataaagaacattacaacatgcaattggacgatactcacttacattagcagggcatacagtcttgggcacgagagtaagcactgttgtgtccagttcttttagaagtttccctgtgtgtagaaaatcaatcctttccttgctcacttccttcccta

SEQ ID NO: 199616 - DNA, 1367 bp, Cannabis indica
tatatatttttaataaatattaatggtagtatttatttttatatctaatttgcactgtgtattggagtacaaataaaaaaacaggactaaatataactttataatatattttaagtcaaatttaacttgatatatatgtatatagggcaagattatgataggacttagcaaaagttccttaccggtagagtactttttttaaccattaattttagatcgtgtggttattatagtgtaagatatatactcttatgatacagtgtatacaataaaaactttttactttctaaataacatttattttaaaaataaataatattaatatttagaaaaagaacctttaattttctctctattacaatattgttcatcgatctttacatcaaactcacgccctctctccatcaagactatttctctgcagctagcccaggaaatcggacggcgaccccacagcgacccacgacaaaccaacggagaccccatagctaacccattccgaatccatgaacctggtgtatagttttgatgcgtcttcaactaattttgtcttgtaatcactctatttgctcttatgaaacacttatgagtggcttctgcaaatgaatctgcgtgggtaggattgaaatctctgcaaacatatttctctgttactttatttaaaaaaaactcgaaccaccatttgcactctatccttgtttttgccttggccactctcattctacactaatcgtgtagcctcgcgagaacataaccactccctttcgtgagttgcgccatctgagtttagcctacgatgccattttcttaaaccaaatgtaagtgtgttagaatataaagtaatgaattctgcaaccatttctaaactatcatatacatgatcaaccaaatcttcagttttgagagcaaaaaaatttatgaagataccaaactttgaaaaaggagagctcaaatctttcaaaaatacaagtgcatctcacaccaattccttggccaaatgtgtgcctcacctacctttgtgcgcatcagaaagattgaaaagcaattacggtccccagctactacatgtggataatctgctacctatgttccataaaaatatatatactattaaaatttcttgacttgtgattgaacaattttcttccgtatatcatggggtaagaactacttgtcctacagtaaagttttcctatatatatttataccacatccattagagatagtcgttttaacattgcaatttagtaattagagataccaggagattttgataatttgcttaacatatcgtatatttcaaataatttcaacaattggtatgtattatttaggaaagagattatttcacaattatacaaaaataa

SEQ ID NO: 199617 - DNA, 1965 bp, Cannabis indica
gtgacttcgtaccagattccgtacagttttgatccttgtaagtatcaaaggattcgcttggctgctccgtagtgaacatgacttggatcatgcatgaatcttgatagaagactaaatgcatacattatgtcagctcctatagtagttagatagagtaggttgtcaattagacttcaaaattttgatccatcaactttcagtgagccatcttccttcttgagagctttattgttgtctaatggagttgatacgtacagtcttgcattcctccattttaaatttcttcaatagtgtcttcgtatacttcttttgtgagatgaagatcccatcttctttttgagttatttcgatcccgagaaagtagtgcattaagcccaagtcggtcatctcaaaactcttcatcatgtcttctttaaacttctttatcatcttctcactattgcatgtgtagatcatgagatcatcaacatataaggagacaataagtgtttcatttctaccttgagtcttgatgtagagtgtcggctcactcttgctcctcctgaactcttgcttagtgaagtaactgttaattctactgtaccaagcttgcggaattttctttaggccatacaaagcttttttcaatctgagaactttattttcttgtccttgcaccacgaacctttgaggttgctccacatagatttcttcttcaagatagccattgagaaatgctgactttacatcgagttaaaaaatcttccatttcttgtgtgcaactagagctatcaatgcccttatcgtatcgaggcgagaaactggagcaaatatttcattgtagtcaactccatataatattattgagagtatcctttcgcaactaatcttgctttgtacttttggatagagccatttgagttgagctttgtcttgtatacccacttgactcctacaatgtctttgtcttgtgattgatctataagctcccaagtctcattcttttcaatcatctttatctcttcattcatggcttgtctccataattcttgttgttgagctacttcaaaactttctggctccataagcactaggttacatgtctcatagatctcagtaagtggtcttgttcgccttattagcgagtctggcaggattctatgacttgtgtcagttcctctgtggttggctgagtcggaacttcattttaattaatttcttgtcttggcggtagaagaatattgactgtctttctttcaacttcttgtgtctcccagttgtatgtagcatcttcgtcaaattttacgtctcggctaattattagtttatttgattctaagctataaaatcgataaccttttgattgagtactatagcctaagaaaattcccttttcagtcttctcattaagcttacctcttttcttttggaatgtgagagtaacatatccagctgaagactttgagatgctttgttgatggcttacgtccactccaagcttcgatcagtgtcttactctgcacaactttggttagacgtaggaatgtcagtcgggcccggcccggcccgacccgactccttcttttggcctagcgggcccggcccgagataatcgggccgggttaggcccgacccgttttttttttttttaagaatacttattattttgttttgtttcatttggtaaagtgaatggtatttaattttggtggtggttgagacaattcattatagacaccttttttatttattatgttattttagagagagagaaaatttgatgagaaaatagataatgcatcaaaacccaccattgattattattattatttgccctcttttcttgttatcttctttctaaaaattattattattattagaaggtggttagttataactattacactattacaatatgacatgccttattaaaagagaatttcttttttctttggttttgtcttgttttgagtcatgggtaatgag

SEQ ID NO: 199618 - DNA, 2291 bp, Cannabis indica
tacttccatgttacactcaatctgggctttgaacattctgttgactagccttttgtaggttgccccaacattcttgcgtccaaatggcataactttataacaatacaagccaacatccgttgaaagctggtgtgttcttggtcgggaagatgcattcttatttgatcatacccctagtaggcatccatgaaacttaggatctcatgacctactgtagcatacccaccactttgttgttcaagtttgggcaccggtatggggttgactacccaggtaaggcaaaaaacctcaattatgaatctatttgcttggagtcgttctacttattctattaatgcctatgggagctctttatctagtagtttccttttatgatgtaacgggaaaaaattagtatggatactgaggtcatgagaaatgacagttgggtcaattgcgatcatgtcttcatgcgacaaagaaaatatgtcaagatttgctcttagaaattttatcaaatctaatttcattttgagcaagaaagttttgccaattttgagtttccaggttggcatagcaggataaatttcaacttcttctagctctacgaccgacccaacatccgtacttggttccataaggtcgggatccatgtcttcatccccgccttgggaggatccttatttagcaatacttttacctttctatgaactctagccaaatgtctcttcttatttagccttagtcaaggctaggttacggcatacttgtgaagtcctttgactatcttttagacaacctactctaaatctggttggaaatttgatgcacaggtgataaattgaggttactaccttcaaatcatataaggctagtcaacccaacatgacattgaatgcagaaggtacatcaattacaaaaaactgtgccacgttggcatttggagcttttcctactgtgagcaaaaggtgattgtgtcctagaggaactatactttggccagataaaccatgtatgagccatgtccaacgaaccaggtcattgagtcaaagccctatcttttcatttgtagtttacaaaaaatgtttgaagaagctcaattatcgatcattatttgagcaactgtcatatttgcactttgtacttcaatgacaaggggatcgttgtgcggatggtaagaatcttcttgactaaatgagatgactagttcttctctacgcaactattttggttttctttcttccacaacaagtatttcaactttttgctcgtactgcaaggtccgagcataccttcctctagctttgtttgagtctctagcaatataaggacccccaataatcacttttagatttccgtccacaggtgggggcatcaactggttttgattattatatggctgggcagccctttagtccttgtcgaattttatgtacctttgtaagtgctcgttattctttttaacgaggaattgtatttcttgtttttgattattgcactcgttggtatcatggcgatagtctccatgaaagcgattgtacttagtagtgtctatcttgcttatgtccttcttgatcggagggggtctcttctacgacaccacgaactggcgctctatgaaaatggtttctatttcttcaataaggatagtgaaggcggtgaactttggagctctctctcgagaatactattgcttggacttattacttaattttcctttcttccaattacctttattattgtcgttattgtatctttttccactttgacccaaagttctattgttttgatgctaggacttctgattatgttggatagatgtatttgctggagttgtgtgactcttattggtctttttcttaccaattgtgtctactcactgaactggttcttcaagcttgatgaatccatctgctcagtctagaaactctcctattgaccccacattaagtcttttgatatcattctataattctcctaggggttctataactcgtaggacagatatcagttttccttcctcgattaatgccttcacttttgtagccaaagtcatgaaactaatgatgtagtctcttaaaggatcccatgctatttgttttactttgaccaggtcttctaagtgagctaggagttgccatgaagatgagaactgtgcgtgaatctctaccatgaaagaattccatgaactaaactttcccaatgctaacttaaagtacaaatgctaggcaccctccacgaaggtagctggaaagccgtacatcaccctttaaaacctgcaagttcatctgcatttcaaattacttaatgtg

SEQ ID NO: 199619 - DNA, 1403 bp, Cannabis indica
tgataaatttttaatacaattacatataacgttgattatttggaaataattgacgacataagagcactcattagctgacgtgtttccttatggcgttagttattaccaaataacgacaccatagggtttatataaccctaatcagaccttcatcttctctccaaacaaaataacttgcaaactactgcaccgcagtttgacaaaatacaaaattataattgcaccgcaaaatatttcaaattgcatttattgtggtgcggacagtttgtgcagtgtgagtggtttaacacccgtatttatgttctatttccttctaataccccaaccaaaggaatgatatacactgtctttcagcaattctaataattaaaacaaggtgttgatagattttatatattttcttatttatcaatttaaaatgatagattcgatatgttaaaaatggattttttttagtgtaatagtataataattaattattaggggttttcactaagctatagtagtcttggtggcttgttaaaaacgtgtgttagttataccgaacaaaacacgtacatattacataaatttgaaatttgttaaggaccaaccaggcagatgtttcatatataatattagtgtttgataaatattctcaaaagtaccaactaagcacacgtgtcccggacccatatacctagctatctagagaaataagtcctatataaagcaacatatgtttcgatcttgtaaatatatacatacaatacaactcttttcttttcttgtgtagctttgtgttaaatatggctatacaagtccccaacatcagcggaaactatacgaggaaggctgtggtggcagtcaagtccaaacttgttgaggttgaatggacgaaagagcaactaaggagtaagttcataagtgaggacatggatggagatggaaagctgtccaagaatgagatcaagaaagtgttcaaagatctcggttcctctagcggcttttacagagccaagaaagctctgtggcgtgccgatgccgatgataacggttatattaatatcaatgatcacgaattcgaagacctcctccagtatgcttatgattgtggctataaaattaaaccttaaactatctctatatatggtatgtatgtgtacatgtatttatatatttcaatattgtcatcccttttcaagaattttaatttaagtactaattatatatgcattactaatacaattatacaaatatatctattgtaagtattttgtattagctgttgtgctgagcagtcttgattactctaagtatatacatatataataaaagaaggtgggcttactcctacctttaattcttctttcttagtttattactaaatatggtgtaattacaaatgggaaatttgatttttt

SEQ ID NO: 199620 - DNA, 1549 bp, Cannabis indica
gagaggaagctttcgaatttggttaatctttgacttctgtataaattttctgtacatttcaggtaaatgggtttatggacaatacttgaggggtttctgctaattgcaaatgcattggctatattaaacgaagaccgttttcttgcaccgaagggactgagcttctctgagttttcagtagggaagacaaagtcattgaagggacagtttataggtctcatttatgcaactcagtacttaagatttcctctcattttgcttaactccatgtttgtatttgtcaagttagtatcagggtgatgttgttagatattgagtatgagaactgagttgtggtgttgaacaagatgtaattttttaattttggttgaaaccatgtaatggttgagatttagttgtcaaacctcagatatatcatgttgtaaagcattttttaatttttaacaaactttagccattattatttattattctctctcattttagagattttttttcaaatgactttattatgtcttaataattgttttacaaaaataaaaatgcttttcttttaagagcattgctattgggtaccagtggtgctcaacacttttcataagtagtgactacgattaattaacaatattctttaaattttttttccttaagttacatgagatttgaatttctttgtgtcttatgagtttactagccttttgactcacacaatggttagaacttgttgagacagtgcccacacaaatacaagttttaagagttctggttaattattgcattttaagcaacataaaatcttaattggactatgttttttaagtggatgctctatttttgtttagggtttttgagaattctttgttcaaatgccctagaaaggctaatcatgcactcctctatgttatagaaactctaatcaagactccaaatcttcatcttgactactctttgtggctcactcgaaatgctttcaagagcccttttcattttcaattgcggtctttgcccattttggtttcttatcatgcttaaaactatgttttctcttttaagtagacactctattttctctttaagggttctcaaatctatgcataaacactagtcgaggttagagatgttacatcttctgactattcttcaaaaaaatattggaatatacacagtctaatcattttatgttttgtatccaacttaaaccttgaaattataagtacattttgacagttgactttgaatcatacatagtctcaaagctccatgtaccaaatttccattaattctacattccaattgttaatttactcaaaaacctaatttactcacttaaaataaactaaattaaaaaaagagaataattgttatgatggaaagtcagaagtagctggttggaatatcataataaaattgatcaattggaatccgaacgatttctttcatcacccaaatccatcataacctttaatccccttttttaatttcaaaaattgcacttcttaaataaataatactattcaaaactaaaaaaatatataatactaattaaatt

SEQ ID NO: 199621 - DNA, 2081 bp, Cannabis indica
ccattgtagttggaaacgaatacctaactaccaccgacgacggcgtacccgatccagcctccctcctccgtgcgatcaagaatcttcactccgttctcgtttcccgaggcctcaataggaagatcaaagtcacaactcctcacagcatggccgtactcgcctcctccttcccgccttcgtcttccaccttcgccccaaacctagctcagtcaatggagtctctgctcgatttcttggccgatactaactcccctttcatggtcaatgcgtatccatacttcgcttaccgagacaacccggagaccgtggatctacagtacgcactgctcggaaactcaagcggcggcggcgttcgcgatcccaaaggctatatatactacaacatgttggatgctcaaattgacgccgtcagatcggccattaacgctttaggattcgggaaccgtacgatcaaaatcacagtatcggagtctggttggccgtcgaagggagacgccggagatatagcggcgacgaaggagaacgcgaagatttacaacacgagattgatcgagcgagctcagtcgagcaaggggactccaatgaagccgagggacaaaatcgacattttcgtgtttgctctgttcaacgaaaacaagaagaaaggagggaccacagagaggaacttcgggatgtttaatggtgacgggtcgaaggtgtacgacatggatttgagctgtgagttttgtagtagtagcaatggagatgaaacggcgtcgtttggatttggtgagaaaatgaatactgagttgatgagaaggggtccttcggtttggtgtgtggcaaaaccacatgcaaacgacaaggttcttcagggcgttttggacttctgttgtgggcctggtggagtggactgtagagagatttataatgacagtgggccttgttttgagcccaacaagcttcttgctcatgcttcttatgccatgaattcttactatcaaatgcatggaaggaatttctggaattgtgacttcaagggcattggccttgttactttcagtgatccaagtaagtcgtaatatatttcatcaactatttttattatttattcaaatatgtttcgtatcattctttcatggaaaaaaaatcaacaaagaattatacttagcaagaaggaagataacttacaaattgtattttttaaagaaaaaataataataattttttctttgatttcaggttatgggccttgccggtattctcaaatgtgagcaattaattttgcttaatagtattgtatttgtaaggtatatttgaatttatttctatgatggaccaagtagggttaaaagaaaggtatcatatttgttcacttttttttttggaaatatatttgttcacatttccaaatcaatgttctactagaagagaaatccggctctcgtttgatatctagacagttctagccgtaggcatccaactccaacctggttgtgctattttgtagtgtatgcaatatccaataagtacatttttttttatttggatacaatttaatcagtaggatagttaaattcaatctaatccaaaatattataaattgaatcaattattgtagattgattatttttaaatatagatagtgtttggtaatatttttattttttaattttttaatcacaaaaataaaagtaaaatttttgttttaaaattttatttttgaaaaataaaaatgtgttctataactattttttgttttcattttttaaaaacaaaaaataaaagtgtgttctgtaaattttattttcattttcatttgttgattttattaaaatcgagattgggtccgaggtaagggatggccaaattcaggtcccggtttggtttttaaagtctaagttggggtcgaaatctaaaatattggttaaaaaaaactgtttaaaaattaaaaaaataaaaaggaaaaatatttttatagaagaggattttaaaaaatattttctttttctaattttaaaaataaaaaactgattaaaaaagtattaccaaatgcacctattattttatggtgaatttctccaaatactattttttaactt

SEQ ID NO: 199622 - DNA, 1758 bp, Cannabis indica
ctagattggagggtccagcccagagatggttaaactttcctgctggtggatttttcagcattaagattccctttcgctaccatgttttgtagctgtaagaaagtttatattgaatctggcatgtagcttcttcttgcttcaccatttacctttgttggtctaagactacttgtcttaacctcaccacctttgggtcctcctcatagcacttctcgtattcttttgtcattatattttttttttgtagccatctctttggtccctgtcttggctttcttagtaatcttcgtcgatgggagtctcaccaatgtatttttcttggtgttggattttttgaggtggacggtaatctactttcgacactttcactaccccccacgtcatcggcctgaacatctactggaaggggccgatttaaattgtcaattgtagcaattcattgtcattgcgaatggatgtctttcccggccacatttctatatgcaatcatggttgtagaagacaaaaatggtaaagacttcctttcaagttcttaattaaaacaccaaaatgctaatcaagattctcaaaaactgaattagtaatagattaagcttgaagaaaaaagattataagtaaagaatacaaatatttttacgtgatttgagcgataatgagccttagtccacgagtcaatattattaagctctttggaaattaaaagactcagtacaaaatttttcactgaattatttatttatttatttatttgatagaatcatatcatcaaatatatagtattatatatattttttattttaatgattaaattaaaataatatagcatttaataatatctatgcacaaaataacaatttcgcatgtgtatctttagtgtgaaaattagttgtatgtacaaaatgataattgtgtgtaggttgtctaaattctaatttgaggatcctaaatgtgtttttacactaacaaagctactattttttctcttttacaatcctacttttttttttcaattaaagttaatttcaccaaaaataaacaataaaaaatatctgattatgatactaaaatcatgtcttaattgtacaactcattaattagctaggctgaagaatattaattttcacactattatatgtacctcaaacacaaaaactaaaagtaaaaagtatttcaaaataattactataaaacacatccaaatataaatcatgatatatagtactattctttaatttggatttttttttggtaagatatatgaagtctaattttagtaattaatgccaagattaaactaattaaagtagtatatatcaacagtggaattaaaaaaaaaaaatcaaaattcttaatcacaaatacctatttcgaccattttctttttttgttcattattaatatcttcattcactcattaattatgccaatttgttttcacttaccctttccaacctatatatatttaagtcatatttatactgtcgagtttctttttttgtccattattgaagacaaagctaatccccaatttagagtataataaaactcaggaataactaaaatttaatggaaacaaatttattattcctttataagtttaaagataaaatatattttgcaaatttttttagtagaacatttgtaaatttacggttaaaatagttaattatatatatttggtgtttatgtaaatacaacttgcaaacatgtatagatgtttataaatataaaagtttttgtgagaaaattacgactaat

SEQ ID NO: 199623 - DNA, 2243 bp, Cannabis indica
gaactgttcgtacaacaactccaaacgatttccctacatcttgtgcacaaccaaaggtgttagaagaatagaacatgggcatgccgacctgctgctctctcaactttctaatatgatccccttgttgtttgaattgtctctttcattgtggcatacatttactctgaattctaaggtggtacgggattcacatcctcaccgtcaaccccgagcccagaaagcttacggatggtaagcctattagatcgcctcgggtgcattgcttaataaacctgtgaccaatgactttcaacgatagaacatctagtcaaatatcatgctaataagcatttccactcatataataatatctcacataattacacatattccaaacatgtttttctagtatcacattaacaattaatcaaatagtagataaacagataacacttactataacatgtgtcatactagtcttcacagcaaatatacatattcaactagtttcaaggacctttaaaactatgatcgctctgataccattttataatatcctaatccgtagagatgccatgtatgtgcttttataaattagtttataataacaaactaactatttaaataaaattgtgatttaattaaactttaataattaattttaaaatataaatccataatatttaaagcttttgggttcgaggatcccctttagaatttcacaaaagagttgttataacattttttttaccaaaaaacatttaaagatcaagcgccataaaataacgcctgacaactcaacactgctagctggatgagctgatatatacatttgttggagaaggctgctaacttatggctgtcctattttgcccttttccttacttataccacaaaatacccgtgagtcacaaagactcaacaagaaaagcaataacacaacatcatatatcatccacagacataaccaattacacacatgtaatcaaaatcaagtaatcacatattttatttcataagcaggtagacattatactcaaactaaacaatagttaatatcaagtatttttctaataagacaaactaatactattactttataaagtaaccatctatatcgttgcctaatgagacaacctttactttattgcctaatgagacaacttttataagaaacctaactaagatttcaatgatatagtaataactctttcttacaaacattaattaccgtatcgcattttacatgctaagtggtacaattgtatttttcttatctcaagtccaaatttaagtgtgtcggccaacttgaatggaaaaatactagacgattcggggccctatgtcacgatagcgataaaacgataaataattcaattaaacccgttctaggacataaactcaaaatcaaaagtttttctattgataaataatgtgatgataccctaaatattgataaaaagtaaaaattgagattcccgagaatgtccccaatcagatcaccggattcccaaacagttaactattttttgggaccctgcttggggaaaagttcattgtttctctgtagaaaccacaaactcaaatttttacttctcaaacctactactgtcttgtccaatatctatcaaactctctagaatagtcttaatattagttctaatcacaaaccacaactcaaaaactgtaattgcaccaaaattaacaatacaccattaaagctcaagcttggatttcaaaatctccaacttgaagcttgcaaccaaaacaacaactaacaaccgtaaattatacccaaactactaatatttaagcttagaaacttaacctaacacatacaacttcatacagaaccaaaaccattaaattcaacttaaaatcaaattttttcttcacaaattcacaaagaaaagggagaactaggttactttgatccttccttccacttcaacactaactctagaaaaattctttagttagtttgatgtgaaatggttttaaaaatttctgatttagggtgagggtttcttatggtggttctagccgagagaaagagaggagaatggaggagggttttttttaaagataatttaattaatacttatctattcaactctaaaaattagtctagaataaatccacttacaaaccaacattaaggataaacttaagtgacaaaagactaaactacctcttcacttttaagtagtctttcatactgtgagtaaaattgtcataacccgaaatatcacggtaattctaat

SEQ ID NO: 199624 - DNA, 881 bp, Cannabis indica
aaaaataaaaaaatcttaatttatagaaaatacaactttaacatattcagttaccttttttgtaaactaataaacacacattaaaccaaagtgcgcaacttgtaaaataaggcatgtagccatgtacattaattttggcaaaaaaaatttaactaattaaatatatgaaattttattgaaaataaaaaaaaaattattattttattagaaataaaaattgtaaaatttttgggaacataaataaatatatgagaataagaataaaaataaaagaaatatattttataggaataatataaaaatatgcgaaaataaaaataaaaattattaaatttataaggacgaaaaaaaaaattataatagcaaaaatgaacattttattttgtggggaaaaatatataaaacaaaattataccaaaaataatttattaaaagttgaattgggtgatgtgccctaatataactcctaatataggtgataatattgataagttgatatttataattgaaggtgttgatatgttatgacaattaaataagttgttagctgtttttagtagtgaaaccattctttgagtttatctctttctctgttcttactctctcttagtttgaagttgttattattgggatttatctttgtttgagactcgtaactaaataattgttatatgcttagagattaaatctagggatttcataatagtttttaggggaaatatatatgtttttaattacctattcctcattttgatttaccattagcattattggattatagactagtattattgtcacatagggcccaataggagtcctccaaatttttgaattttacacttttacttttttactatgaggtaggatttttaaaaaataag

SEQ ID NO: 199625 - DNA, 1085 bp, Cannabis indica
cctcaaataattgattcaccagttccaaatccatagcaacacatgagagggacgatcacactcaagaaaacttcacccttctaacgaacactacaagaatatacatttttacaggtgcaattaatatattatgctggcaaaagtgcacaattgccggtgcaagtcaacaaatgcgccaacaaaaggtgtcaacaaaatggatccacctccatgttttgccagtgctttttcttgccagtaatagtcacttttgccggtgaagtaccttaaattcgtcggcaaatattggcaattcaaccgccaaaaaatggaaatttttggcggttcgaagggtctttttcttctcaattagtttctatagagaaaaatttattacagagaaactttttaattactatatttatttaaccaagaattttatattatttttttaagtatcacttgctctattttattattcaaaatatttaatcaaaattatttttttttattttatctcacatttttacatgacatcatatgtcaaattttaaatataattaattttacatcatttaaatattatattttcaaatacttattgattaaaatattaaaaaatataataatatttaaattggagtaaaacaaataaaattgattaaaatatatttcttttagcttacttgggtattccatctctatattttagttttaagggtttaggtaaaatagatgtggagctagcttaaacatatacctcaagtatttggttcatttgagctatttatatacattttagctattatatatatatatactaggtgaatatacgtgccgagccacgtattgctagttttatttaagatttttggtctttttaagattttgaatatattttatttttaaagatttacaaattttttatttgaaaaaaattaaatatttatatttgaaatattatttaataatgtattaaaaataatattagtgtaattataaaattgtaaaataaatttattattagagtagtagatttattttatttagtttttttttttaactaatagtcattgtaatgtaagtttatatctataaatattctc

SEQ ID NO: 199626 - DNA, 1335 bp, Cannabis indica
gtcatatttagggtttcatccgactgcatagcaaaacctgttggcactatttcctttgcccaatctccgctcaatctctctatcggtaggaggaattccgttcgagtatagtctgttggattgtcgaataaattcggattcaggtacggttttgaggctgctaatgaggattgtaatcacaatccatggtggaagtattattattattattgtgaagtaaaaacatttttggctccactacggacaccttttcaactcacagtttatgtcgtttatatttattgatgatttggtaaataatgattacatgtgtttatactaatttgtatgtattgtatcttcttcacaaaaaattcctaattcaaagaatttatggctgttctgctttctttagttaatataggtttagaaggtttttaattttgtgttgttctttagtctatttttacataatgtggtatgtcctgtattttcttctcattctagtccttctataggttccttttgtttttactggtttggtacggtatgtaatgcacttgttttaatgctatctgacactgacatagataatatagcttaggagtttgtcttatttatgcttcgtaagtaagataattaatggtgtgaactattttggagtagtgtcttctgcttccatacttgaacaccttgctgaaatgtgcactatgataattgagtggagcaagcaagactgctttccctttttttgttccttagtttcaggcgataaagcagctaacccagtgatgtgctatgctcatcatatactttgagattagaatgtgtatgatgtattatatttgctgataattacatgtggaatatacatgaattatttattttcactaaattttaactcttcaatcaacagaattagattcattcatggatcctccaccacctgaaccggtcagctatatttgtggtggtatgctttccttcatctattttgttttgtttttttaatttaataatacagtgtgagagagtagttgagattttgatattgtggttatgtagattgtggaatggagaatactctgaaaccaggagatgtgatacagtgtcgtgagtgtggctaccgtatcttgtacaagaaacgcacccgtcgcagtatgtttactaatccccacaagttttttgtagttcttattcaaaacaaaatgtgttggtttgatctcttcataaatgaagaaaagaaacatgaatatttttagtgaagaagtatgagcatataattgaaattaattataagcaaaccacattttaattgcaaaagaactattgaatatgcatatatgtatatatata

SEQ ID NO: 199627 - DNA, 591 bp, Cannabis indica
acatttttaatatcatttttttcttttttgtttgtgttttgtcaacataaattacgatttgacttctttcttgtgatttttaaagacctcttttcttgtactacttttatgtaccaaatgccaatcatcgagggttggggagacaatactaggcctactaaggaatctatcttttttcttaattacgtacactaatcatcttctcattataaaccttttctttgcttttacaactttttttaattccttttttacattgtggacatatagaaaaggacatatttcaatgcctcagtgatcatcatcagtaaagtattccaattccaaggcaaaacatcctgaaatcatattattcattttctagggaagaaagattgagcttcactatgctccatttcataacaataagagcaaaaaccatgggaaatgaatacccatgcatgaacattattcattactaaaaaccaagtaatgacaatcaccaatctgagatgattgtttgtgttctggtccatgcaaattaatgaatgaaaaaaaaactaacaattttgatcactactattaaatcattctatatatatatacatatat

SEQ ID NO: 199628 - DNA, 1023 bp, Cannabis indica
ttttttcttttaatttttaaaatatttgaacttctgtggatgatgagatcaaaaatttacagttatccctgtctgacttaagtgctgataacttcataatctgacacagttcttgctctttttgatgtaatcatatattttgcatcttcaaagttttcttttgttttagtttttaattcaattatttttttcaacaacatggccagtgatgcgattcaatattgagactgaaagtgcagagtgacaaactttgtataaatgtcgatgtttatgaactaggacggtctgaggctttttgttgttcatttcatctgatagtgtaattttttttttaatattttggtttcggggatttaattttattcttgaaaatttgtattgctgtgggtgatgagactattaaatttacagttatccctgtctgacttagtgctgacaatttgtagtctgacacagttcttgttcatctatctttttaaagctttttctatactaacaaatccgttaagtcaatcaaatcttctatagaatgatgatactgggaaaagccacagcgactcttaaataatagcaaaatcttcaatgtaaagagaaaactagagtcttggtatcttccatatcctcataaattgagcccaatgtgggattgggtaaacaaatggattattggtattgtttttcttagaaaaatggtggattggtaatttggtattggaactggtataatgaagttcgattgaccaaaagagtaaaggaataagtcaataaattgctaaggagactggcttctctatttataatattttttttcaaccattattcatatcattgaagatagcgaaagaactaaaacaaatgggaattgcaaaggaggattgattaaagccaagacgacaaaaccaagttaaagaaccaagccatgataatcacacaatactaaaagaaacacaaaagaaaaaaattaaccacctaaactatcacaccaatcaaaggaagtaacactgtcattcttaatatgagaaa

SEQ ID NO: 199629 - DNA, 1693 bp, Cannabis indica
cttccattttttaaattatttattaatgtgatagttatttaagagaatatattacaaatagatcacaacaaaaaaagaatattgggttttagactatagtagtattttattttgtcactctatagggaaacaaaatctataaaaaaaaatcatgcataaaaaagaaaaatatattctttgaggttaaaactcatgtaaaattcagaggacaaacatgtttttgttcttctctttatcccactgttttagatgaaaaatgtcttaaatttccacatgtcattacaaatcaacagtaattaattatttaatcccatttacaaataatcaatttcataaattaccaaaccagaaaactaaactagaataaaaagaacaaaaaaaagttaataatatgatcttaagaaataaacactcaaaaaaaaaagtgtcttattattattattattattattattattattaggctaattagaatttttacctcctgaactttgacatgtatcaaatcatgtgttctgaacttttaaagtcgttaaaaatgccccaactattgagattgttagatttaagaactaattccaattttagtaaaaaaaattagcatggatgaaagttcaggagtcataatttaatacatgtcaaagttcgagggacatgatttggtagatattaaaatctgggaagcatggtttagtaccttaacaatcactgaaatagtaaaattgaataaaattaaacaaaaatccttaaatttaacaatctccataatttaggggacattattaacgatcttaaaggtttttcggcaaaaatcctaattatttttattattatagttacatgtgaagggaatcattgcacatcagaaaacgccaaataagtagagaaaataagaggaaaaaattagaaagaagggaagggatggttttgattttgaaaatgtgtatatatgtatttatgtatatatgtactactactgtagtacacacttctactgttactatactattactactatatttaaataactaagtagggaaacaaaaatgaaattgtcagtgattatgggcgaccgaataagcagagtatatagtagtagtagaccgattaagaactgagttttttcacttctttttttttcgtagtgactcgaggaatggaatatggtatcatggatagtgaccttttttttaataagaaaagaaaaaacaaaagaattggagaaaattgggttgatgaaagcgacctatgatgagttagttttggccgaaggagaaaaaggcagagtgttaagtgatgttgttgtaggatggccactgagcgcgcgcgtgcctcgtctcggccattcccttggtcttggtcaccgacagtagccggtctcttactgacactttgttactgtttttgaccatcagacaacgccaagagaatatatataatatatctattatatataaaatatatactcactcacaccacactcatatattatacccccattcattcattcattcccatggcactcgttttcgtttgcctattatagtacaacatattgtacattaatactcatgcttttttttgttctcatgaatccttattgctttaatcttaattagataatggattatgtattaccaatgtagcaccgaataattagttcacaaattataataataatgaatagaatgag

SEQ ID NO: 199630 - DNA, 531 bp, Cannabis indica
caatggcattcatttttaatgcatagaacttctactttagaaaatctggttgcattcaattttatcatatacatttatcgaatttattctagattcctagggtagtagttttctcactaattacttgcataaaaaagattcatgataatgtttgatcgagcatgtttcatcacagttttagcattacttttcctggttgcatccgaatatttcttctagtgtttaatcgagtttctaatagattaacacaaccatcatcttctccttccatagattaaagtctccatatccatcaaatctctcaaaataaaatctggttaaggatgaggccattgaagctgtttccttgaattcttgataccttcaaacaaattctttaacatacaaaaccttgctctgataccactatagtaatcgtactacacaagtctaaaaaaattaaaaggttaatcgaacgtaagactaataaaaatataggatgtaaaatcagaacaatacaagagtagaaaagtaaaacaaagagaacaaaat

SEQ ID NO: 199631 - DNA, 1393 bp, Cannabis indica
tatataacaattaaatttaaaattatttgatactaattttccgctaacctgttttctagtgatacaaataagccatcaaaatttaaccatttaatgtttttttagaaaaattttaaacgtaagtaatttatcatggcaaacattggtaataatgacaaagactttaattgctatatataatccacctctctttgggtaggtcccaaatctcaaataactcaatatgttatttcccaaaaagagaaagtggaaagattttcttagtgtccccaatcatttgacatttgttagtgccaattaggaacccaaatcaaagtaaaaagggcattgataagagtttcaattgtggggtttattattttgacaaattaaaacgaatgttaagacatataatatgaaagactaaaaaaaagtgtataatatatattttttaacaagtcattataatgctcaactgaccccattacataacatgatatttataattttatttcgacatgaatttaaccaatccaaattgagattagcggaatccaataattaacccacaattactagctatagaaaaattaaccatttttgcacattacttgagattgtgtctcgacatctcacatgagttaattaatattattgttttattttttattttgtcaaaagttaattaattactttgattgttaagaagatgtttaactttgtattgcctttgcaaaatttagtctacatgcttatcattgtatttatgatcattgcttaatttagtttacaagatatttaagcttttaaatatttatagggaatagagcaatcacaaacaaagattcatcattaaaacaaagcagacgcgtcttctttcatgaacacgattttgcatcttatcttctcaccaaaatcactttaacttttttttttttaattaattctttcatttacatttaacggtttaaacaatgaatttatatacaactaaattaaaagaaatacaacaataaaaccaagtatttaatttacactagtattgaagataaaatacatcgcaataacaataaaaatatgtattaataacatgaattaagaaactttttttgtaaagaataacaattcatttattcaacattccaattatatatcacagagtttttgaggaaatcatgtttgggattaaggttgtacatgcttacaaggccttgacaaaactcttgtcgaggtcaaaagagaacaaaaacttggccacctgcttggaacctaggccttggccatccagagctcccaaactgagagagggccggccagggttccatgacctagccaaggaccggccagggaccccaagcctaggcatgggttggccaaacgataaggtacacccttatggccgaccaactcccat

SEQ ID NO: 199632 - DNA, 568 bp, Cannabis indica
agtaaaagattttacattaaattggtataaattttataccaaattaatgtaactattggagatgatcttaggcaccacctttacttgtctaacactacaaaatatgtagtataatgttttatgagcggttagcaatttctatattacttattaaattaaaatgtatacaagactcgatattatgtgaactgacatttactatattaggtacattaaataaaaatgtactttagcatatctctttctttagtctctactatatgtatagggcagttttatggtaagaatgtgtgttttgcctctgctgacacgtaaaaaaaattataatttaatatttttatatattaatatatattgtaattatttaagatataattgtagtatttaaagtattatttttttagggggcgacaataattctatatgtttctcttttattgcaaattagtccttaactattttcgccaaaaaaaataataaaggtacaatttaaattgtataaaaaggtaaactgagaatttaggcaccaatctttttataacttaaatatcttttaatcaaaaaaaaa

SEQ ID NO: 199633 - DNA, 495 bp, Cannabis indica
aatggggaagagaggcagtaataagagaccttgcactctgcttcgattcatatttatatgcaaaattttggtatccttgcggtccttcgactctgttgggctatgggcccacttatttccgtcactttagtggggcccattttgcttgatacgcgccacttgggtggtgtttcgataagctgcgtttggcttcatgttatgagaagtggaattcattgtagatcaacggtgaatgttaatcctttcaaatccaaaagaaaaaacggtgaattctgattacgatggatttgggttgtggtggtagagtcgtattaaatatggcttttagtcatttttttctattaatttttccaactaattttttgtcttggtcaactaaataaaatttctatttattaggatgggaaaatccatacatgacaatgataatagacatttagcaaaaaaatagataaataaataatttttcagataaaaaatacacatttatttatt

SEQ ID NO: 199634 - DNA, 1389 bp, Cannabis indica
ctgagaagttgcttgatgtgaggagtgaaggagagagatgaagtggttgagttcaagcttaaggcactcataacggttgggatattgttcttccagcatacgaagctccttcttcgcctcttcttccatactcgtctcttctttgacaactacaacttctcttcgccagaagaagaaaagcaatggtacaacaacaagtggtctttcttattatattccaagtttttttttttaaaataaattggactgtccattgtcacatataacgcaatccaataaagtggaagaaataaggggattgtatttattgggcctatctgtttctctgtctgctgtaggactctttcatattcctatatgtttttattttattattaattttattttgctgagaaaactttattattcaagacgtcataaaagcactgaaaggttattattataaaactacaactatgtttaggtttttttcttttttgaaagctacctacaactacgtgtttagattttttcttttaattttttttcatagaaaactacatgtttaataaagctattgtttttttctttccaattcgtaaaagggacgttcgacgaacttagctttcaaaaaaagaaaaattagctttcatgtcttaggaaaaaaaaaagaacatagcttttatgcaaatgtttttcagtatataaaataaaaaggaggctcataacgggcgagaagcaccagaacaggattcaaatttccgattcattgctttgtgcctttcgagaaaaagtaggagcggaaaaaggaaatgatgcaaccctcttaattgatttggctcagataacttttcccatcaaattaattcatatttgggttatttatacagcagctctttcaacaaatataggttttgatagtttagtcctctaatataatttcttttttgtaaaataatctctaaaatatataaattttggcaaggtactctctcttttttatttttttttaaaatgaacttcgaacattttttttttggtaacattaagtttccattcttaaataatgatatttatgttaatttttatttaattttttttatcaataaagattaatcaaactaaacatttacaatcaaatggccaagaaactccaccaaattcacttaaagttccattatatttttaaggatcaatctattataacttgataattttctcttaaacaagactcaatctaactttgagattctctttgatgattctatctatataaattggagctatatattttttctcaaatatacacaagttctgatttagcccaatgccataaatggcacctactagaacaacataaaaaacatcaaccaaaattcttcttggtccctttactttcagccagctgat

SEQ ID NO: 199635 - DNA, 2441 bp, Cannabis indica
aaaaaatattgctgaccaatcgtaagcactactaatactcggattttcataattatattaatcaatgtcattcaatgactagttgggtcattccttaaatatgctaatattattatgttatctatctaattaaatccccataatttctagccattggttcaataaagtgatcatcaagataatcaatagttgactatattgtgaatgtgaaccaactaattaaataaaataaaacaataagaataagaataagatgaaatattctaattaattaaattaaaccaatattaattattaatgataatggtttgactggaaaatccaactaaattataaaaacatattatgcattttactttcagtgttccatatacataatcaatgaaatattcttgttcatgaaaatgaaccaatcatatgaaaagttatagtgattgtaatattaggcattccacttaatttgatctactaaacatcaaaaaactttagtaaagagaaaaaatatttttcttaataaataaattatctaaactaatttaaacaaacaaaagaattgattataagtttgtgtgaattggagtagagaaaattataacaatattacatctaatataaattaattttcagtgtaaatattttaagtttaatttttaattgctgataaatatctaagtttaatttttgtacagtaataatacttaagtatatatttttgaaacttccgtaagtacttcactgttgttaagatccacatatcatttttgttattagaaatatttttaaataaaaaaatgaaatgatttagactaattatagccagggactgttatattggctattgacttaatactttccagtcaggtatctacttaaattgttgattagttatggtcattaaatttttgttttatttaaaaaataatttaaatataccaataagaaatgacacgtgaataatgattttatacttaacggcagatacctacgaaaatttttagttattaatattaccgtaaaaaattaaatttaggtatttatttgcaaacatgaattaaacttagttattataatttatactgcaaattactttacaatatatacggacccataatttttacttcatgaggacttatttattatttaaaaaatatttatacttatattataatcactcttactagatttatttaattttatgaaaatttttctactattttaatttataattatccaattaaaaaatttacatttaatttttttaaagataatatttttgttaataggagctataacccctacattagtactagtaggttatgtgtgtatactatttattagcatattgttgtttgaattaaattgaagtatagtactatatctatatactatagctacgtcatttaatttcccaaccccacattttaaaatgagtattgttattgggtactattagtatatagtattttttaaacgtgttaccttacaattagttatcgatatttcttaaaagttattatattaaattatataagactcgatcgatacttaattgaatcaatataatattaacacgtaggcagggccgaccctaatttaaagtgagctataggcaaaaaaaaattttgagcccttattataaaataaatggttttttacaaatcattaaaaaaaaaaaaattatttgagcccctacaataagtgggccctaaacacgagcctaacccgcctatacctaagtccgtcctacacataagagaatactaagcactaaaaatgctctttaacatttctcttttaaaaatgtcaaaaaatgagaatttgattcaaaaatataataataagaataatcaattaccattaaatattaggtcatactattcttgttggaagacacgaggaatatgttcctatatattaagatacatacatacatgcatatataatatttataatttcttttgtcatttacattatatttttttttcatatatatagtacgtagggacatgaatttacatttattattgttgtttttgttatatgccactaaatattattattgatattccttttgaggatatatatatacgtacgtacatgatcaaccaacctataggagatgaagatcacacacacacatatatatatatatatccaaaaataaatgtttttacttccacaaaagtatcatatataatataaaagaaagaaaaaaaaataaagtttgtgtcatttttagtatatatttttttggaaaaggaaaatgacctatatatatattactttattatatcacttattacttattagtactagtgtatatatattctatatatatagacgtttgaaaatcacacatgaattatagttttatgatgatgctttgtctctaaaattaaatataactgaggaaaattatatggtgcacgacccacctaaaa

SEQ ID NO: 199636 - DNA, 1570 bp, Cannabis indica
aattacacttgattctcatggaggcattgtaagaattgaagagtacacaaatgaaacccctcaattacacattgtaattactcgaaatttttcaatgagactaagttaccctgtactaggggataaattagttgtttgattatttttcttctttttctcttcattttcattacacaattatatgataaaaacaaattaatactataaaattcaatcgaacattccaaacatgacctacgtgttgaaaattggaaactcgattttttttcttgccccccggagaacaattagatgatttctatgtttggaataccgtacaactaaacttgacacagttagtttcacgagcacctataaacggaccaaaatagtcccaaaccagtttttcttacagaaaataaaattaatttcaggttcaaatacagagcttctctcccttctatgctgaaggctttatacaagactcagaagacagcaaggattccagcacaaacaaaatgcataaaataaataattaacattataatgaactaaagactaagtccatatccatttgaaggaatttaagaacttctaaaatatgatctttcttgtaaacacaataccaaccacaaattagaaacagccttttgattcagcattctaattcacccaaactatgactttttatctcaattttcagcaagaaaataccaaatagaatcccagcaaagcttatgactccataatctctttaaattgccattaatgttatttaaagcttcgaaggaaatgaatacagatgaagaaagaattactacctgaaagacatctaagcagcagcctccagcaattcccgctctgcacgctgcctgatccttctctcaagctctggcctaaaatgcctaataagaccttgcacgggccaagcagcagcatcacccaaggcacagatagtgtgcccttcaatctgcttggtcagctcctgaagcatgtcaatttcttccaactttgcatttccaactttcattctttccataatcatccagagccatcctgttccctctctgcatggtgtgcactgtccacaactctcgtgcttgtaaaagtaagagagcctagcaattgcatccacgacatcagtcgacttatccattacaataacagcagcagtccctaatcctgattgaactgctttgagtgcatcataatccataaggacatcatcacaaatgttcttaggaagcagtgggacagatgaaccacctggaataatagcaagtaaattgtcccatccacctctaactcccccacagtgcctttcaatcaactctttcaaaggtatactcatttcctcttccacagtgcaaggcttatttacatgcccagacacacaaaacaattttgtccctgagttattcttcctcccaaagctggcgaaccactctggtccacgccttaaaatggtgggagaaacagctacagtttcaacatttgtaacagtggtagggcagccatataaacctgcatttgctgggaaaggaggcttcaatcttggcttcccttgcttcccttcaaggctctccaaaag

SEQ ID NO: 199637 - DNA, 879 bp, Cannabis indica
gtttctttaaatgcactctccccgccacaaatgcatctgcccgtggattctttcgttttaggctgtcattaataagataattaaactttaaaatattcaatgcttttctagtccttgccatttggtggtgtgaaagacagtggatttggaagatttgctggcgtagaaggattgcgtgcttgctgtcttgtgaaagcagttgccgaggatagattctggccgtacatcaaaacaaagatacctaagcctattcaggtcagaattgaaaactactaaactttatcatccaaaaagactcagaaactcattacattgttcttttttctttccaacaacagtatccgatttcagagaatgctttcgagttccaagagtcgctcatagaagcactctatggcatgaacatatgggaccgattgagagcattgatgaatgttttaaagattgtttcggagcaacaaaaccctcctaataacaccaccaccaccaccaacaacaacaatagcagaagaagaaatgactgaggaagcaagatggtccaaaagttataccttggccactattgtcaacaattaccagcagcagatctaacccatatttgagcacattttgggaattttggttttggctttgctttagatagatctcacatcaaaatgtatgttgaggttgagaaatcaaatcaactcacatcatcatcatcatcctaatgtggttttcttttgttttgcttctatgcctgttttggtaaattttcagttggtatacatatacatggtctcttaaaattccatgttctattttctgaggaaacgattgcttcaatcaaacgccacaaatccgaattgacaggaggaaatcagctgtgtcataattcat

SEQ ID NO: 199638 - DNA, 1532 bp, Cannabis indica
caacaggttgttcattaacaatcatcgatcgattagaaacacattaaccaatccaccaaacggtgagattttttttttttaaacattgggctcaattacacattaagcaaccaatcgtgtgtagcaatcccaattaaccacacgtacacaagcttaattataaacaaaaaccaatgacctttgctaattttattatcgcttatacgtttctcatacaggttgccaaaagcttttgcagatatactatttatatgtatatgtatttgttcaaaatatatacaattatatgacccacatccttttatattatataattatttgttgttggatttggcatggaaatgtccctttctaggtacataaatttggcactattactatcactatcagtatcatctcatcctttgataacaaaagtagctaggtggccaaaaacagagcaatatatatttatatatataaaaaaagaagtgagagagatagagagagaggagaattcaggatctacagttctccatgtctatatactgtgtgttaattgtcatctttgtacatacatatacataatcatatatatgcatctctgtatcagtggtctcgatggaattgattatttttggactgattataagagaaagaaaaaaagagagaaagaggactcagtagtaaataacggcagaggagaaattatttaaaaagaaagaaagagagaaataacactgcatgcagtgatcgagatagagagagaaggaattagtttttggtgtgtatatacattgtgggtacgctattctatgcattttcaatattgcccccaccacacccttatgacctccctcctttgccggttccttgtctcctccattcctaaacatgccaaaaatcccaataaaccccacttatattactccatcatcatcatcaacaacaacaatcttcattcatctctttatcatatatagataaattaaaacatttctttccttcctgcactactccacgtgcaacctcatcagcttatgtatgaaccacatagtaaagctccctattagtttaaatatatttttttttttggaaaaagagtttaaatataataatgaattaatgagtcgtccaaacactattatttatagttctctgtggtggtccacaccatataaaaacacacacacatatatatataaatttacatatacatatacattatatttatttaattagatagttttgatccctatagaaaaaaaaaaatagatagttttgaaaatataagatatggtgtttagaacagaaagtgaaaattggcttattagtgccctgtgtcccttgtcatgaattattcaatcatatttaataatgcctgtggacgttacattaattattaatacgatacatctcttccacatattattattaagtaattaaaacggaaattgtaacagtgttcactttcttgggtctccaacaaaaatccaagtataaatgaaggccacaaaaagtagtacataacaacacatattctctctctctct

SEQ ID NO: 199639 - DNA, 1437 bp, Cannabis indica
tttacagcttgatagctgttacagatctcactcagaaaactcaacagaaaaaaacggttgaaaaagaagaaaatcgtgctaaaatttcccaaggtttatcaaactcataaggttgccataacgtattaaagaaagaacagaagactagaatcgcaaccacagcccaaatgatcaatgacaaggaataatattagagaacaacagtatacgcaatcggcaactgaaataagtattaactaccctccagagtgggaaacaggagtagtctcaaagtgaccatccttaaatagataagccatgtgatagaagctggtcatggataagattcagcccaaaaggcattccagttcctggtaaagatgtataggcagtattcaagaatgtcaagtaacagaaaagcatcaggttcatatattctagaatcaaagagaatattccagttatgcactatacctctacaaaatccatcaagtagtcaaaaacaagatattagaatgtcatacaaaacaagaaacatacccaatcaccgtccagctcagaattgatctcacttgacttggcagttgttattgataaccccaagagaatctttgcttagattaattggcagccttctgtattgtgaactgaaattgttggagctgatccgtacagagcataaatacatataaataagaaaatgcatttattaacattttaggaatatacttgcaactgattctcaacataatataaggcctctggaccaaaccttgtgaatcataacgtttaaaagcacaaaaggtccaaattcaaccattaaatcattaagttagttgagggaaagataaatagataactgacattgcacctccaccccattgtagtttacaatctcaaaagcattatagtacaaaaagcattgatgagcatgcattccacatcacaacagattgtttcttgcacaaaagatattctacttaccctaaatacaactcccatcttagtacatttgtcaatagagatgttatttactttacctgaaaatgagaaattatgataaactaaatgcgacttcttatgtaagacagaaactataaaccgtgtaaatacacataaattaccttgaaacctgcaaaatagtcttttcatccaaaaatatgtaccgattgttttgaatcacaattatcaatcactaagcttttctttacaatttgattctcaacaacccacctacaaaataaacatccatttgaaaacatcacaaactggcacaatccctatacaaaataaatcaccatgtagatgtaataatactcacttatgacccatttcaagttctagctttgaggccctgccttaaaaaatgaaggtgcactggtgcgagtctctttttcaccagaaccaacaacaccagttcttcctgcacagttcttcatcttcatatcatcagtaacc

SEQ ID NO: 199640 - DNA, 1651 bp, Cannabis indica
tttttattccttattatcttcttagtgttttattatttattaaagtctaactttgcgctggtcaacactgtagagtgtgaatttataaaaatactcttataattaaacacacactatttttaatttaagattgaaagtttacatgtataataattattattgaagagtgatttttttgatacacaagtttgtactttatgtttaattagatgcacaagtaaaatacattgatgatgatagtttgaatataataaatttatttttctaagtaatacaaaaatgaaagtatagtaaaatacttattatataattattttaaaatatgtatatcaaaattttaaatttaatacaaattaacgattaaattatcactaaacaatatatcaaaaaaaattaacaccaaacaaaatacaacttcacgcgaaacgcagtttgtttcctaatgatattatatcattattcatttatatatattaaatgattaaattttcttactttattacgattttgtctcgtaatgtacttttacagaatgtattccgtggtacattagatgggtcttaaggtacattagatgggtctcaggatatacgttactattttttaaccctaattaccctagatgtacctcaactctcagatcaaataactcctccagctaacgactgtcgtacatcacaaaatacattctgtaaaagtacatcacgagataaaattgtgtcccaaataaatataatagtaaatgaaagaaagagaggatactaagaatgtcttttttatatgcagacattttttttactcactctaatgataagcatttgttaaaaaataccaaaaatatttacatgtagtattctttaaactattcccatgggagatacttgtatatcaaaggatttaaaacagacccacacctattttgtaattaaaattgaaaataaatatgcattatagttttagtttgagtcatatatatgccagcagtgttgcataaaaatcattaatatcattttaaatatacaatataaatactccttttggcattaactttgatttttcttttgttgtatgtataataataacaaggcaataatgtgaccaaacgtagttggcattattcacaagtgtggtctatgaatcttcgtagcaagagtaatggaccaccctacctatatatatattctaaataacaataacaacaatgatatgcatacaaaatatttaacatttactgttcttattagctaatgatgttttttccacttccagattttaaggttctaatatattttgataataatcaaagtgtctctttattaccaatcattaattaatttgatcagacagaaaagcttgtcccagcaactttagttgttttgacattttacaagtacactaactcagaattaaacagaatctcttttgtcaaatttatgaaatacaaaaatcaaaaaaaaaattacagcataaatcaaaaaggggagtacaaaaaaataaaaataataaaaacccaaaaaaaaaaaaaaaataaaaaaatactagtactttaaatctactctcatcctctggaaactctctggtactgtatcatgtcttacactataatccaaactttgtctaacattgacagtgttctagaatgaaactgaga

SEQ ID NO: 199641 - DNA, 1398 bp, Cannabis indica
tggatacataataataataataataatcatttctactcatcatcatcatcatctcataatcataatcataatcataatcatgatcatgatgatgatgagcctaattcatcagtgacctgtaaaaaacagagcaatactactgaaagtagtattagtggtgagcaagtcacacaaaaaatctcccaaacaagagaaaaatcagaaataataataatgcttcattctcaaattccactactcattccaaggtaattaacccttttttattttaattttttgtttgtgttttttctaattttttttattatattaatgttgtaattattattgtttatatgtaggataataataataataataataataatgatcatggaagaagtggtactagaggaaaaaggcagaaaaattgcagtggtgattctgggaaattattaggaaaaaaagaagaaaattctaataataataataaaataataataagaagaaaaaaatgtgaagagcaagaaactcctccaagtggctacattcatgttagagcaaggaggggccaagcaactgatagccacagccttgcagaaagggtatatatatataatttttatataatattctcattttgtcctttacaaaaattaaaataatttcattttaattttttattaatatatattactgggtatttttttcaggttagaagagagaaaattagtgagaggatgaagatgttgcaaaagcttgttcctggctgtgaaaaggtaataataataataataaacataaaaggtaattttaatatttttattattattatttatttatttttggtgacaagttcatgtgattatgttcaattataggtaactggaaaggcccttatgttggatgaaattatcaattatgttcagtccctacagaatcaagtagaggtatatatatacataaatgttataaatatatatatagtttttaacataaattttattactgtacatatgtatataaatatactactaattaattaccaatatattaataatgttttgtttatcactatatttttcagttcctttcaatgaaacttgcttctttaaatcccatgttctatgattttggaatggacctcgaaacatttctggtcagaccagaggtaataataataacaataataataattcttttctattattattattatttttcataatatttgtggtttttaattaaattttggttatatatagggattgaacagcaataataataacaatatgggttcagagattccttctgtgcctccaccaccatgcaaccaatcacaactcacagccttttcattatctgataacatcaccgccacaaccaccaactttcccaatcacagccaataataactat

SEQ ID NO: 199642 - DNA, 626 bp, Cannabis indica
ttattattaagttgttgactgagtaaatgagtcatttctcatcagtttattcagagagcttagattaatgatgatgatgatgactgtgtttgttttcgttttgggtttcttctaattttctcacttttctgtgagaaaataaatatcttctgaatagatagatctccagctccggcattccatagtttcaccggtaaatctcccaaaataattttactctgtaaattattattattattattattaagtggcattatttgagggaatctctggttttctgttctgccatttttcttttttctttttacagtcataagatcagtgagtaatagcctatatgatatgtagctctgtatgtattttccgatgagaaatagttacatttttaattttaaaattaagctttaaatttgtattttttggaattggatgaatctggttctcagttttcctttaacttattttgttttatttagctttttgtgttcagaacgaatcttggtcggaaaagtcggaaaagttgccctccgacgaagcttacacgccggaaaagagctggatatcaaggttaaagaggtaattttcgagattcaaaagaagctaaggaatggatgatgttaacagtg

SEQ ID NO: 199643 - DNA, 1038 bp, Cannabis indica
ttcatgatcattgtcaaagtattcaatattgatatcattgtccttagagtctggcagaataccagaaaaaacagctagttttgcaataataataataataataataaaggaaagacaagacagagacaccaaggaatagaaagagagaaggaaattgttaagaaaagcgtggtgacctatccgaaattcaaagacaaaaaatgacatccacctaatgttcatgcatatgttactttttactatgtgcacaagtatgttactctaaaacatttaccaagatcaaactaattcataatgggtacatcaagcacgtttttcccctcttaacatctaaattctgccaagcgtttggtaagaaatatatacaaaccaaatggtttaaaataataataattaagaaaaataatatattttttttctttctttggcgggtatggttacttggaaaaaattaagcagtccttcataatcatacctattcatttgtatgctcaattattgttcatggttttgattcttctcgtgcatcaagcctaacaaacatttgctcaaattgatgaggagctaatattatatttctttccataatgtgaagtacaatcaaagcataagatatccactaccacaaaatgagaaataaaattgtgctctttgtcaaattttctatttatgggggacaaatgaggaccaaaaaagttcaggacaacaagaaagcactttggtaacaattgtattgtaatacttaatattccatccagaaggaagactggaaaaatttcaagtcaattagatatcacgagataatcacatttcccagcccacaattcacacaccctactactcttctttgttgtcaaaatagaaagcacctcagggactagatgtattaaaaacctacaaattataactggagataaaactgagcacattttgaaccagtaaacaacattagatggatcacatatttaccatctatcttagacaaaagatgcatatgatgcactaaatttcatgcatcaaaaaacagtacttcactaa

SEQ ID NO: 199644 - DNA, 571 bp, Cannabis indica
aaatacaaaaaatgtaaacagttttgtcatagcacttttaaatcggattataattaaactttattttgacaaaaaatcaattcaggatcctatttgtactattttagaaaatacagggtctattttgtcatttaacaaaagacagagaccaattagtaacttttgtaaaacacagggtccaaaatagtattaacctttttttttttcttcagtagcttttttagtttagatatgcaattgggtgaaagttccttccgttgtaattttttttttgtgtattgagatcactttacataaataaatatatatataaattaaataataataattgaaaaatataggagaccaccgacccagaacgaagccatcattttatagaaatttaaatatcatttttagagattatttaaatatcctccataataattcaatcttgtatttttattttatatatatagatgtgtatgtatttgctgataataatgtttgtcgttttgtaaaaaagatggcgtaagctgccagagaagaagggattagttaaatcatacattgttgattgtactaattaaga

SEQ ID NO: 199645 - DNA, 2504 bp, Cannabis indica
agaggggaggaaagaattatggaaagacttactgcagatagcaagatcaaatggttagtcatggaggacttcaatgacatccttgccaaggaggaaagaatagggaataaagtgaaatgtcatccttcacaggattttattgactgtgtttctagctgtcatttggaggatgcaatgcttgtggaaactttttcacttggagcaataaacagcagggagaagaaagaatcttttcgaagattgacagggctatggcaaatcagagttggatggataaattcactaatgctgaggttaatttcatgaatgaaggattaatggaccatagactagctgttttgacattccataataaagtttctagtggcaagaagccatttaggtactttcaaatgtggaatacacacccagaatatgcagcccaagttgcagaatcttggaatcaataaacatagggactcaaaatgtttcaagtggtgacaaagcttaaaagattaataggggtactaaaggagttgaacaagtaggctttttcagacattcaaatgtctacacagtaggcaaaagatgaactatctgagatgcaggaaaagttgcagcaagatcctttaaatcacctgctgcagcatgatgaacttgaagctaggaagaaatatacagtcttgttgaagaattatcaatcttatctgcaacaaaaagcaaagattacatggattaaaaatggagatgaaaacacagtcttattccatgcgagtattaaagccagaaggagacaaaatagggtgccttcaaaggtctgctaggcactaaaatggaggggagaagaattgtgttaacaagctcagtgcaatcaggggctgtgctttcagatcagcttgctagttggctctgttagagttacacttatgaagaaataaatgctgctatttttggaataccaggaatcaaggcaccaggtcttgatgggtattcaagctactttttcaggataattgagagctcatttaaggagatgtatgtgctgtagttcagaattttttgcactcgggactgattttaaaggagattaattccattgtgcttactctcattccaaaagttaaatgcccaaatactgtatgtgatttcagacctattgcttgttgcaatgtgatttacaaaattgcaactaagttgatatgttcaatgttgaaacatgtgctccctaaattagtggctcagaatcagggtggatttgtacaggaaagatttataacacataatattatgatttaagatttaattaggcactatgggaggaaaaacacaaagcctagttgcatgatcaaattggatttgccaaaggcgtatgataccattgattgggagttcttagaagagatgttgatggcctttaaattttctatcaattcataaagcttattatgaattgtgttaggactcctaggttctcactgatgttcaatggaacaatgcacgtgttttttgagtctaagaaaggtttaaggtagggggatccactatctcctctcctttttgtgcttggaatggagtacctctcaaggatcatgaaccagattgtgcaaaagcaagaatttcaattccatgacagatatgaaaacttacgactcaatcacttgagctttgcagatgatgtactcctcttctgtcatggtgatttcaagagtgtgtacttcatgttgcaaggtttaaaactgttttctctcacatctgggcttcaaccgaacccaacaaaatctgcattttactttagtggtatgcaagaggctgaaattcagagaataatggatgcaactgggttcagcaggcaataccttcctttcaaatagttgggcataccaatatgtgctaaaaagatatttggaaaagaatgtgttttactagcagagaagatggcagacagaatcaagacctagagttctagaaacatctcatttgcagggagagcgattctaatcaactcggtattactttttatacacacttattggagtcaaattatgaagttaccaaagaaagtaatttcaaaactggaagcaatctgtcgagctttcctatggaagggtcaaagtatgatgcaaggggcaggactcatagcatgggagaaggtgtgtttatcacaaaagtaagggggagttggctttagaagaatattagaaaggaaccaagctgccctcttcaagtatgtgtgggcaataacaaataaagaaaataatttgtgggttggatgggtacatagtgtgtatcttaaacagagtgataggtgggaatataaattaccacaaaatgccagttggtactggaaacaggtggtagctgctaaggatcaaatcaaaagcaaaagggatattcaggtcattgctaggactcgatatgtcattgctgaagggtataactcctttgccctgtacacagaagttaattgggataggaggtatgggaaggctcaatgtacctaagcattgttacattttatggctagc

SEQ ID NO: 199646 - DNA, 1149 bp, Cannabis indica
tttaggttgctctattagttgcagtatgagttgtttcgttggttgcgatgtggattgtgatttgaattagattttgatttaagttgctccatgggttacagtgtatattccataaaaatgcaaaaaaaaaaaaaattactttgaaatgtataaatgaaaaaactcctaaatataacataatgacctttgattctacaactcatgactcacaaaaactgaatcaaaagaaagctactattattctattcattattttcaaaattcttatagtttttactcaaaaatttcatgctcctcaatgttgacagattgcctacacaattcaaagcaatacttagatttctaatgtaaggatctttatatccttttacgtgtttacattattattttagaaagtctgtatttaggatgttagattagtgctaatcaacatacttaaatagtaaattaagatcattgttaaagatcttccaacaaaatcttcttgcaacatgtcagcttgtcaggtgccgtgtcatcaatgcgaattttggaataacattttctttaaagttcatgtgggaaattctagtcgtacggggactttctaggctccacacgttgcatggctaggtaacacgcatttgtacccacgattatgatatcagttcttcccgaaatgtgtgaatcttttcctatcccttcaatttttcacattaattactcttttttgaaaactgcaaatcttgtattgacgttacataatccttataatgattaccttttaacttttttttaggggaatagaatatttttaaatagtaatcctataaatgggatttataatattcatttataattttgtagccatttgaaaatattaagaggaagaagagagtgttgttttttagcaataggcccttttcaaatttgattttagatatttggatactttaaaattaaaaaaaaaaaaagggttttttctacaaatttcttattagagttatttttcaaatttgtacatatttaaattaatttaaatattatatgaaatgttatttgatattgaaataatagttaaatttagaaaattaatctaaatcctcaccatattttcaacttttaaatttttattattttatcatactttattaatttaaattataaaat

SEQ ID NO: 199647 - DNA, 877 bp, Cannabis indica
ctgcattaattaaagcttgaacccgagtaagaactgtgttggaagatcttccggtcagtttcgtggtatcacttccaataatgatggatctttccaagggggtaacactccatgcgacaaattctgaaagcatttacacgaacacgatacccgtcagaaaattgaatgatattgaattacattaatcacgaatcgcaattatttaaattggaactttatttatcaaaaacgaaatgatgacttttatcatgaaacaaaaattttgcaaattgttttgacttagcattcattggggcaaatgactgggtatagtgtctaagatcaagcaaatgctcatttagtactctgggttttatcaaaatactgacttaataccctatatttttaagtttgatcacaaatacaaacttagtactttgtacccaaatttaatcaataaaatttataaatatgagtgaactttactatttatgtgagtgtcaaattaaagtttaataactaaattacatataaattaaggcagattagtcatattaataaaatctgtttaccaaatttggactcagggtaccaagtatgtataaataaggaacacaacctttcacaaaattaataaagtaaatggaaaacttgccttcaaccagtaaaagaatccccttagtagatttagtgttttaagatcatcatacttggctagctccatctgctctgcaaaatctgcataaatataaaattaattcataattttcttttcttttttggaaagaaaagtggtgagtatttgaccaggcaggagcagcctttgcaacattaaagaaatgcacaagaaagcaacacttatgacatattgtataaaaccttaagcatgagcaaacat

SEQ ID NO: 199648 - DNA, 878 bp, Cannabis indica
cccacaagtactttgtttctcatcctcgctttaatcaaaggttagagattaattttctaaacaataattatatagagcattcttattagatcattaacgatggaagcaacgtgccatttaatttcacaaaattttcaccgcctcactcacacttagccctacaccctgacaagcaccctctctaactgctctaatcgagcttatcattaggcatcagtagtgtccagcaccacttaccttaccaatggttaacaattttttgatttgagtattgctataaggtttcaatggtgcttgctcgaggtggtgttttacaatttgttatcgatattctataaaagattacgttaagtcatgtgaaaccagatatttaattgcactaagagcgatatgacactttatgtagtgttaaacggcgctagtccttttagaatttctcaataaaatagtagtatgccacctcaagagtgtgttctttagcattttctcataattattacttaaactaataagttaagtgtattttttttttccaaccaaatgcgatgaattgattagtttttgatttggtaacaaaaatattaccacaaaggtgaaagaggtgaatacccaaataaaagaattggatttgtacacattgatgatgtggttggtgctcatattttggctatggagaataacaaggcatcaggaaggcttatctgctcaactcatgtagctcatttgtctcagattattgagatgcttagagcaaaatacccatcttacccttttgaaaacaagtaagtgaatggtattattgtaattaaataaattgaattgtattaagggtacttaattaatcatgaattgatgattaatgtgcaggtgtagtagcc

SEQ ID NO: 199649 - DNA, 1744 bp, Cannabis indica
atttttaacgtatcaactaatcaataaacgcacgcgatacatttgaattattttgtcactcatgctaacaatgatatactgcacttaaaattcttttctgatatatcttacttttcacattatactttatatttgtcataaatatctttatggttttacaaaagcttttctaagaattgaacctcattcaattcttatagaagtggctcatcttttctttcacatatttaatttttttaattagaagcaacaagtaataatttgcacaaattcatgatgcacaagaaattatcaaaaataacttaacatttttgttatgagcatcactatttgatcatataaatggatgaggatgagacgtaaacccctcatgataacctaacacggtttttatagtttagttgtccactttgaacttatattttgaaatcgctagtacattagattttgtatccattgtgttgatttattcatacataagtcttattcttattcctcttaattattttttaatcaactctcaattttaactatttagtgaatagagataacttcaactaagagtacgtaagaattttctaatgaatatatgaaacatatatgtgaatgattatatgaatgcagaataaaatatagatcgaatatacattttattttaactctcttccacattatgtagttttcttaattgtagatgaaaaaatcaattacaattgatacattctttaaaagaaaaaatgttgaagtttcaacatctgatgtctcatcaaatccatcagtgaatataaatcatgaaaattcgaaaaattgcccaacaaagtctttaagacttgacattaaagaagggtttgatattaatttattagaacgtgatccaagaatactcctgctaatataagagtatctacctgagaatcgtgaggaaatttgtagagcatatattaaagttggtccatatcagattatactttctagctataaaaaatcagaaaaagctccttcgcgttctttttcatcatcttggtttaagcttttccatcttagttggaatattctcctaaagtacatgttgtattttgtctaccatgctttttatttcacactaaagatgcacatcttagattagatgtatttactattaatggatttcaatcatggaaaaaggtgaggaaaaattgtgtatttttagcacatattggaaaccatataacttcacctcatagaaatactaagaaagcagttgtagatcacaccacaagaaattgctgacaatagacttcgtttgaaaatatcaattgaggggattaggtggctcacatttcaagcatgcccttctaaaggtcacaataaatctaacacatcaattaattggggaaattttttaaaagttattgagtttcataacttcctataatgataaggtagcaaaagttttgggtaaagctctacgaaatgccacatatacatcaccaacaacgtaaaaacaagttttgcatgtcttgagaaataaagtgaggaacacgattcgtgaagaaattggtgatgcaaaatttttagtaatagttgatgaagcacgagatgaatctaagaaagagcaaatgacaattgttttgagagttgttgataaagatggttgtgtgcaagaacatttttttcggacttattcatgtcaaagacactgctgctttaacattgatggaatgtattttctctatactctttaattatagtcttgatgttcaat

SEQ ID NO: 199650 - DNA, 748 bp, Cannabis indica
aaaaaaaaaaaagaaggaaaaaatgtagtgtaaacattcaatgctactatagtgtttttgtgctccttttaggagtcaaattatgctttcaacatctaagaaatccatgtggactggaaccacaatattgtaagcttttaattagtgaccattatagatagcaatgttataactgaaattgatgaaatttgggagaaaattaaaaagattcaaacatatatatgacaatatgccatacacatgcatgacatacatactttctcttaacatattgaaacttagaagtgtgattaagaaaatattacatggtaagataaataaagttttatctctaaataaattgaaataagaagaataatatatgtattttatataatattaaatttttacgcactttcaatgtgggataatttaacaaaagtttaaaaatcaacttgattttgatttatttttcttttttttctaatgatttgatttctttttatccttttgcaatataacagctctttcactactaaaaaaaacgttctatagctctttttgtattggacacactgtatcaatattgctctttgtcgtcggtctaaaaccgacttttaaacctttatcgttggttgctaaaattgacatgtatactaccgatgcaaaattgtataattttagcgtcaactctaaattttcggtaccacaaagctagtgtcggtttagaaccgacaataatagcgtaaaattagatttttacactatt

SEQ ID NO: 199651 - DNA, 1855 bp, Cannabis indica
ttttgttaaagttaacggaaaaaattaaaaatactattaaaccaacaaaatctattagataattatttttaatatataaagatacattatattttgagcattgctacgagcactcatagtgcctatcaccatgttgaagtatcgttttataattagttagtgatttcttatagtatttattaaagtaaataagcaaaacctgatattgagttgcactaataataatattacacctcacaaaagtactaggcactataggtgcactttaatatttctcttattttttagttacacacataaatgaccccacacacgcattcctggataaccttatataaccacttgagctaacttcaagtgttaactcaatttaacactcgatttgagtcaatatatcattttatttatttagaaaaattataacaaatgaccctacatctcatactaaagaaggttaatatccatttattaaaaataaataagcaaatggtcttttatattttttagtacctaaaatatccttcattatacaagtgtattattcatgttatattcattctaaacaatatgtgacaaacgaaaccaaagactctgctccaaacggcgaaccctctcctccatttttttcgattcgtttggatttttcaactgttttcttataattcttcttgattgaaggcgacgaagttcttctcattttttttcatcgaatttcctcatggctctaaattacaacgattgctcccaaataacgaccaaagcttcatctctctcacatttttctatttagttagtcggaattctttgataatttcctcctaattccttgatctactctcttctactttttcaaatttaaaatttttgtattttgtaattgccaacttattatttaattaatcaattaatcaaatgcagcataataaagttgatactgaaacatatattttgtagctatagaccacgatcttgcaacaacagaccagaaaacctacaaagaataaaagtgtagaaaaataaaaacacacaaactttttatatgtggtatcaataattcttgctgattgttactagtctacgagaccacacctagggataagattcattagtaagatctaaaaaatacaaagtatttgacttatgcgtaaataaactttctcttagtatatgccggaagcttgatctagtccaccttaacaaatgaaccctactgaaacttcaagtgttcgaactccccttgatttgcttgaagagtgcatgcttcttcctgaggcaacacttgaaacactttctcctgaaagtttgcacttttgttcttattctttgttgacttatttatagactcaaaaaaattacaaagatatataaactgtggtagagtctaacacactctcctctacaaaacaaagacacttttttttttacaaaataagagttaagtacaaatgaatgaaagagataggaaacctagttgccaatgtgagtatttatagacaatatactcatattggtattgttgacctcaaaaagtggccaatcgacagcagggtcgtattaatctgatgtttgccacatgttacacaataagaacaatgaagtaaataagacaaggatttttatagaggttcgacccccttagatagcagataatgacctactccccttttagttgtattgatacctagagataatactatttaaatcactataggtgggatttgatataactctcgttaaggttacaaagtatgagtcaataggtagatctctaatgagagtgagatgaagccttggaggcgtgtgtgagagagagaggggcagagagccctttgggcgtgtataagagagagagaga

SEQ ID NO: 199652 - DNA, 911 bp, Cannabis indica
ttcttggcagcaggttcctgtcccagacaaggagaaagcttaagatcgcgtggctcgggcataatacctccagaacactgcccctcgggaagtcgaagaaggagcatcctgaggtaattaatgtggttggtcacccacagtgcttagggctgagcgtaacacactagtttcatttcgagatagtcgttataacttttacacctggaatcccctcttcatagatcatattacacataggtttgatagttggtatccgaggttccacgtccaaattaacaatactgagtcgtactacgggatagtcgagtagtacgagaccttgatggatagggcaagtcacttagacacgagctgggatttaggaccaattaatccctatgatatattcaggatcacgggttgtagggattttagtggatattatagtccttctacctcatcttctagtgattatggtaaattccttaggcaggaaattatgccccaatctccccttttacttgtttttcaataaatgctaacactttatcttgtctcgcaaaaatgaatttcgagggcctcatccacaaaaagggaaagaagaggttgactatctcagaagctccagcagacatcgatgtggagcccccagaaaggcccaaaaagactattgctaataagaagtgagcctcccagaccgctagtctcgaggtccctaaaactaagactcaggatccaaatcctcctccggccctgcacgtattgacgagccaaatcccaagacgactcaagtttccgcctcctcgagccaagccctcgaaactctacccgtcgaggctgggaaagctggcccagaatacactacaaaatttggtgcaacatgctgacgtcatttcaaggctctcctctcccatgaatgggatttaatcaat

SEQ ID NO: 199653 - DNA, 976 bp, Cannabis indica
gagagagagagagagagaattcgactggactcgacgatctgaaaacgaaacgagatgaaggctttttacaggcagaggaagaagagaggctccaccgccaactccaaaactaagtcaccttcttccttctctcccaagacacctggctccgacgtcacccaggcccctgcctctcttcaccttcaaggtactattttagtattatcatgaatctcataagccccttcttagaattcttattagggttagggtttggtatgggttgatttgatttatttgatctgttatttttaaaaaaaataaaaataaatagaggattatgataaggatgaagaggtgttaaggcaattcgacctggacatggcgtacggaccatgctccggaatgaccaggatggctcggtgggaacgtgcatctcgtctcggattgaatccacctaaagaacttgagcaactcctcaactctcccaatgttcgcccccattgcatttgggactctcgcatttagaatcaacttacttattttgtttttgtttagttatctaatgcttggcgccactgaatgttatccaaaccaaactcaacccttttggcctattggttttgagtttggatgtcaaatattatgtaaaaactgaaatctatgaagtgtttcagcctctgcctcagaggctgatgcttttaaaaagatgtttctatgtgtggtttcacttttatgaatttattttttggataattacttgccatgatccatgaccggtgaagatatttattgtttttctttataatttatcattattatacgctaaatttgttaacagaaatattcaagcaggcaaaatgaaattaattctttagtacagataggtatattatcttttgtttcttcttgttctggttaagtgtgcaattgtattctgtgcttctattcttgagtcttgatgttccttggttttgagatggtattttgttgagca

SEQ ID NO: 199654 - DNA, 1193 bp, Cannabis indica
attcaaattcaacaagtttttgaatagacattggagagccttcttgtataagcaaactatgttagctttgtatgtttcttacaagtttcaaattcaaatgttcagaaagagcataagaatttaaaattattagctttaaatattcttcaaaaaggccagacaccaatcaaagcaaaaatatacttaccaacctattaaagacttattgtgattataataattacacatagaagagagaaagagaaaagcaaaaagggtgaattgttgttgtcgtccgtgttacattaattttgatgttttgaacaaccaagaacatgttaattaagtgacagcactctcggtaattatgacctttactatttatctttttcccaatttatacttcatttctatcacgattaatattattttggaacttctttttaaaaaaatgttttgaaacttatatttttataaaaattactaattaaacttcctattttatcaaataacaaataagaataaattctgtttttttttaaaaaaaaaaaaatagtacaaatagtactttaaattcaattttcgataacttttttaatataaccaacttatagataattcctaacacaaatagatgcagaaaacgtaaccagttaaattataacacttctaaattagatgattgttaagttttattttgacaaaaaattagttcaatgtactatttagtactattttaaaaaaaatatacacaattcaatttatcatttaacaaagtaaaaagtctaactagtagcttttgcaaaataaaaggtacaagatgctattaaccctttctaatatgtatatatataaaaggtacaagatgctattaaccctttctaatatgtatatatataaaaggtacaagatgctattaaccctttctaatatgtatactaaagatcgttttggtatttagagaaaaaatttagtccaattattttttataattgtgtatgttgtagctatttaggacaactagttaatatttcaaaaaattcagaatagtttataatgccaaaaaataaatttatacaagttacttaaccacgcgtataaaaaaataaatcgtaacgcgttacaaaataaatatataatttagtttttacgttcgtaattgttaataaatttcgtattttttttaaatttttttaacttataatctacactat

SEQ ID NO: 199655 - DNA, 678 bp, Cannabis indica
gacaccagtctaaaaaaccagttttaggagtcacatccgtgcctatgccaacccgattccaacactgtttgataacacgacaggtcaccaaacaatgcaagatactctcttcttcctccatacagataggacatagcacattaacatctactctctttgttcggagctatagcaccgttgggaggcactgagtacaagctctccatagcaagttactgatttttgaaggaagtttcagcttccaaagcttgcaccagaaagcatcagtctcatcatcaaagcagttggttttttgtttttgcaagaagttgtaggtagatttaactgtgtatatgtccgagtttttgaatgaccaaaaaagttggtccgttgctgcagaaaaggacaaaggaatgctacagattaatgtctgatccctgacctcaaatagatcagcaatgatctcatagtcccaactagagccatccatagatagtaaattagccacagtaacatcaacaagagcaggatgggttgaaataacccatggattggactccttagacagccactgatccttcaaaactgagattgattgcccattaccaacacaccaacgggcccctgcccgaaccagatcttgagattccaccatgctctgccaaataaagcttgaattagagccaagttgagcattac

SEQ ID NO: 199656 - DNA, 534 bp, Cannabis indica
aagactgactagaagataaattaattatacattttctctgttattaaactagctagcttgatacatgtctcaacctacctcacatctcaacataggaacaaggatggttcttcgagttgggtagtagaactagcagtatgatattaacaaaattgagtacaactataccacatgtaaggtaataaatatatacataatgatggaatgagattgacaaatcatgatcattaattagggtactatcagttcattttgggtaatcaataagaaaaaaaaaatactgtgttaattaattaaagatcatcagcaacaaaatgtgaagaggttttgctttaaaaaaaaaaagaaaaaattaaatcatcaaatgatcactaaatatttagggaattatctttttctttccctagttctagatctcaatgaaaattaaggaaggatagaattcaacacaattcttaccacggttctccaagatgagatctcccaaaatgaatctgtaaatgaaatacattaataaacattttttttttcaat

SEQ ID NO: 199657 - DNA, 593 bp, Cannabis indica
gtagattgttagatttaggacttttgtctaatttcattcaatttactgtttcagtgattgtttatgtactaaccatgctgcccatactttaatatctactaaatcatgcctctcaaactttgatatgtactaaatcatgtcccctgaactttcatccatgttaaattttttttactaaaattagaaaaattccttaaatctaaccatcttaataattcagggggaatttctaacagcaaaaaaagttcagggggcatgatttagtacatgtcaaagttcgggggaaaaaattcaaaaaaaaaaaaaatctactcattcaattaaattaaaaaatatagccatacaatagaaaagccatggaaaaattaaatcaattagtaaaaaatatatgttattcttgcatctatactttggttcatttaatgagtcattagattatgttaggaaatagattttcatattttattacatatatttctttttttttttttttgtacaaatattacatagatttctaataagagaaatataaactcttgattaattaataataattacacccaatggcgaacccagaatttaattagagggtg

SEQ ID NO: 199658 - DNA, 1048 bp, Cannabis indica
ttgaggaaaagagagggccggggatgatacggtgggcaagcatctataaaagttaatagaagagtagagagagaagcttgtaagagataattgtctgcttacaaaactctcttttttgcacacgcacacccatgcatgtaaaatgtaaatcacatcacaaacacaaccccacaccacatcacctcttcttccatcctttctaattttacttttcttaaccatttgcattggatgcccacatggtttttggctttgccctcttcacataccattccactatttatttctcattattataaaattcttttacttctttctttttctctttattaattaatttacacctccttataataactacttttctcgctttttactaatttatcaaaactagctagctagctacatccgttatagttgtaaatacacacctagctagtagctacatgtgctggaaatacatataatatattaatttctatgtaaaagaaattattggatatatgtataattggaaaacaaagcaagtacggttgcattgcatgtatctaaaattgaatatgtttaattatatgggagagaaaaggattagaatttttgagagcatcttcaaaaatcttttgagacatttcttcgctactaaggaaatatatatatatatatgatcaattaaatttaacaagaagattcgaatattggaatacgtgtttcgatcgagtaaattaccttaggattgtaaaatacctctagaaactgtgtgtgtgatagcgatggggatagggatgcatgtacatatattatcaaataaaatagaaaatatatatttgtgtaacacacatgtgtataatatatattatgagtgaaagtatggaatacgattcttataacataattgacctcttgttttgaattattgaatgatttcacttggttgatcttaaatatccctatctgatgaagagtgggtaatcattggatcatagttattaataaagcactttttaatatactctttaaccgtgcatgcaaagagtgctttatcactata

SEQ ID NO: 199659 - DNA, 1496 bp, Cannabis indica
catcacaggaggctgagaggcagcagaaagaggtccacctgaaattatattaaataaaaaatttcatcaattccatgaagagagtagcaaaatttgatgttctggaaatgttgtaataaatatttagataataccctttatctacccttttgatagtcttcccatctcaattcttcatggcttttatccttgtaaacagccatagcggatattgactctaatttcccaacagttgcattggtaccactaccgccagaatctggttcaggtgttggtgtataaggtgcaactctatccccacttgctgaccaccaaaggctggttgctgcccgaagctagtgctcccaaatgttggtgtggttgactgggatcctgtatcacataacactagtaaataccataatccaaaatatatttattatataagtaggaatctagaacaaagaaaaggcataactggccgagacatcaaagcctactcaccaaaggttgaactctgggcaccaaaaggagaagaagacgcaccaaaagggctgctgccaaaggcagaagttgattggccaaaagcaggtgaggatgcaaagctgaaggactgaccactagaagccccaaaggcaggagtggttgaagcaccaaaggctggagtgcttgaggcaccaaatgcaggagtgctcgaggcaccaaaggcaggagtgcttgaagcaccaaaggcacccccagagccaaacaaaggcgtacttgaaacgccaaatgtagacccagtgctaccaaaagctggagtagatgtcgcaccaaatgctggggaacttgtagcaccaaacgcttgggtgcttgtagcgccgaaggctggtgaactagtagcaccaaaggctggggtgctactagtggcaccaaaagcaggtgtactagtagcaccaaaagcaggagtgctcgtagcaccaaaagcaggtgtgctagagccaaaggcaggggtgctcgtagaaccgaacgcaggttgactggaaccaccaaaaggtgtggaggaaccaaataaactgctcccaaatgcaggctgtgatggttgagctgtgcttccaaaaggacttgttggagtaggagtggacccaaatgctccaaaagcaggcttttgaccaaatacagaagatcctgttaaaacagtataggaaatcaaggaacaagattaattagatacttgacatctctgcaacttaaaaaaaaaaggtcatctacaacacgcacattgcaaagaacccaggaaacaagtcttcctaggcatcacataagctgccaaaaaaataagcccatacttatgacatgacataggcagtgggtcaagaataaataccatatattaacaataacacattctgttaaggaaacattatatccaaataagaatttccaaatcagcacagaaaaaaaaaatgacggctgagaaaaagaaaatcaatatgcccggtgaagcaacccaacatcacccacaccaaactccaatt

SEQ ID NO: 199660 - DNA, 1841 bp, Cannabis indica
  modified_base (5)..(5): a, c, t, g, unknown or other
ggggngggggaaggatttttgtgaactaaaattttaaaaatattttttcctaattgcgtacaactgtcgagtatacgtaattttcccaaacgttatacaccgtcaggtatactttttgctttcaaaaaatttcatttagtattactcacggttctccaccattagaaataattatcccaacagtttcttttcttctgggctaagtcaaatctctgctttgcaattctggtggtttccataattgaacctctttttgagtgacaagaattaatatcccattctttagtagtgcagggctttcaattcatggactatggagccatgccccattcctctacaattccaagctaaggcaattatcaatcctgaaggggagccaatggagcaaccttctcaagagaaaattcattgaataaaaagttaccaggggctgccaagataagggaaaaataggttgcaatcatcctagaagaaactaacaagggaccgaagttcgagtgctacccaagaaagccagcctaagaagctctgaagaagaaggcaacatagacatgaaacacaaactcgagtctcaaacgcagagtgacctcaagcacaagaaaatgtacctccttaatcgcaaaaagtagcacataacctcaagttttcttcctagtgacctaaccttggaaacccttaagttagaagtgggaaactcaaatctagatgagggaagctcgaaaaccaagcaacaaatcaaaatttggaccctcacacaacgggttgaaaggaaagacgtttacttacagcatattgaaacatagacaacactgtgcctcaagaatcgaacccaaataatagagttgtaaagaaactagggcagagctgcaagaaaactcttagaataaaaaaaacaaacaagatctacaaactaatgtgcgtgtccattaatggagctccacaaaccgacgtagaagcaaacctaggcaaaggaacagtcagagacgcctcaatgaacgaacaataaccacacaaaggaacaaccgcaagaaagaaatggcgtagaggaattgcactgtcaatttcaaaatcacacgtggtacgaattttttttttttttatcatcactaatatatatatatatatagtaaaatgtttgtgtttgctctcttgattttatttttttttactaatatttgctattaaaattatatgtaaataaatttcaaatttttgaaagaattctaaatattggaacataataaaattttaataattttgatatttatgataatatttttataattaatataaatatatatatatatatatatgaaaaattaatttagatatattttgtgttagatttttaatcaaataacaaaagttttgatattgattacgcattataattttttttactaatatatataaactaagtgaatattacgtatttaatatatttttagattttttttggatatgtatatttttagttgtataattaggttattttttttaatattattcaattaaacaaaattattttttgttaaaaatatttattttaagtgatatttatataataatatataaaatttgttgttaattataattttagtattgtcctaataattttaatttttataattcttttcattttttagaagcatcacacaatttttcaaattttttaacaataatactaaaaagatatatttttggttattgcaaaagataacatcagtcattttttaagaatcatgacactttttttattttattcttttgaaaaaaataattatagaaatatatttgtttagatatgtggatgagtacaaattgataatagaaagatattt

SEQ ID NO: 199661 - DNA, 1355 bp, Cannabis indica
agagcatgcctcatcagtggcttctcgatcttcttttctgaagacagctcagagaactctctctctcaacataaatctctttctctctgtgtgtctctttatctctttgattacaactcacatttctacctaacatgatcctcaaaatattaatatatagctggtaataccaactaactaacattaacagaaaaacccaaataagggaaaaaaaagaaataaaacagttactaccaaggctaacacactaaaaatgaaatcaattacggtggcatgaacatgtggcaaagttggctaagggaatgagctgactcaatactttccgccgcaaatcaaatttcttgcaagttctggcacgttgtttcttgcattgcctatcattcattctgaacatggaatttctaattccttcaattggacaagttaatttagccattgctaaatatcactttgccatatttttggactctcgggtctcttatccaagttttattgttttccatgttgaagttacttcctgaatcaatgatccactcattcttctaaggcacttcatttgtgaccaatgcttctgttgcagactttcccatgaacacctcaccatcttcacaatgctctccataattggttgttgtttcttgttctttattgttttgattgtcaattctttgccctcttggcttttccttcagttcatgtcaatcttttttgatgtgacctattttgtcacagtgatatcatttactttttttatgacccctagattgagaccttcctcttttcttgacgttctgacttcttcctcttcctttgggtggatgatgtcccttgtgttgatctcttcctctcgagtacatagcctctaagttgcttcttgaaacctttcctcaatgatttagggacagttccttcgattaaatggcacctataatttcttcaagaattaatgtgcccttcgagtggatgatagtgtctttgaactggtcctattgagctggcaaggaattctacaagtagattttcttgtcttcttcctcaaacttcacttccaagctgtaaagaacaattgtgtaatggcgaaagtggtaaaaattgagattattctgtctaagaaagattgactttaaaggttaactttatactaattaaaaaaatgaatgaagaagatcaacgccgatttgaatatttgtatccattatatatagcttcattaaacaatggaaatcctagtgctattgaacgtactatttattttatcgaaccagaattcagtaacggggagaaagctttccaatattattatttgtacaagaatgcgaatgccaaaaaatggaatgtttggtccaataaatatg

SEQ ID NO: 199662 - DNA, 736 bp, Cannabis indica
agttggaaagagtagtttagtctgttacattttcggttatagctgttagtgagctgttagttagttaagctcatttgtcctttaactgattcatatataaagctgtaatctgtacattgtcttcaataatgaataatacatattctttcttctctatgtttctctctattctctctttgtaaaatggtattagagccacgatgatcatgctcatctcttctacttcttcttccttgctgatccgtgtccatggctcgtggaagagttaatacttgaagccagacctcacaagaggtgctggctgagatttctcggccaaatccttcctagatgtgcaaggccgagtacatgagcgggttccctcgattgaagctccttagatgcacgctcaagccccgagcttctagcgagaattctcgacactgatgcttccttccacgagcgccagtatggcctttacaccctaactcgcgcgcttgatgccctactacctgaagggtaacaagtgtggttacaagttttcaaaaaattaagaattttttaaataaaaatgaaaaaaaaaaaaaaaaagccttcccaacatcaatattttgattcaaaaattaaatatgagacctaacatttaataaaattgatcattttattaaaattttagatatttttacttaaaatattaatatttgtatttagcttaataatttaaatttaaaattgctaacaaatttattaattttat

SEQ ID NO: 199663 - DNA, 1940 bp, Cannabis indica
tttacgatttttttgacagccctaaaggtgacatgctgttgtatgtctcggctaaattttcattggttttttttcgatgcaatgatgcacccattaaagttggcgtattttttttgcaggtaaaggttttaccaacgcaaattggcatcgacataacttgtacccatgtaatgtaatttggcagataacagttatgttgacaaaaaagttttgccggtaaaattgttacccgccaaattacattatgcgggtacaagtaatggtacaagatgatatcgctataagggtagatgaaatagttgaaagcccgatcagaaagatgaagcaaaaggctacaagatgatattcaagaaaatacaaaatatatcaaacgatccagaagagatgttagatttgcatttaatgggttgtttggaatctcaatattcaagtgatgatattttcctcgagtcactcactcacatgatcaaccatcatttcacaaatcaatattgcacacgctccactaattaaagtaatccccacaacccaaacaaataattccacgcgtcgcttcctttcaaaaaccaagaagttgtcaaccacaagtaaatttatttggaattcaaaaaagtttccacttttttaacgtccacatgccctcatgccatctggaagattgaatacaagcctctgaaaacccttaagtttccaaagcttgggggtaaatgttagagtaatttgcggtataaatacctaaggttatcttccaattgtagataatacctaagtaaaaattttggcagtaaaaataccttatgtttgggtcttggaacttctgtaggtacctggccgttaagtgtcaggtcactacacacgtgttaatattttattagtccacatcatttatttatttattttttatttaatttttttagaaataatttaaagattaaaaaaattagtaaaaacttaatttaaataaaaacgtaattttttaatgaaataaaaacataaattaataaaatgcaagatttagaaaactgaattaaaaaataaactaaacctaaattaaaaaaccctatcgttaactcagatgcacccacccttttttttcttccttttccttcctcatcttcagcccagatctaccccgatcacatcatttgtctcgatgggtcctcgaatgtgaaattctgagctgtctccggtgggttgcagcgcattttgcctttttctgctgtgcaaaaggtctatcgtgaataaaaattttaggattgtgctagatgggttttgttttctcattagagttggtaacgagatctggtgtttgtatggctgacatgggcggcaacagcaacagtggcaacaatatcatagaaagaggctcgagactagagggttaagcttcgtggggagggagagtggttggccgaaaccaccaacggtacccagaacgatgactttacgttccagtatcgatttggagaaaaattcacggcaaaggacttggcctctagcaacagaggaggttgaggagaaatctcgacatggattttttattgtaccgaaaagaaaaagatgggttgatacattaagattatggggtatatttagatctgaaattttttagtgaactttgtttgttggatagatctaaattatactggtcctcttgatttttatttcctttttttttctcttttatttatttatgactgatcttgtataattaatatgtatttgtagattgatgggtttgaattaaaggagtagggttaggatgttgatttttgtgctagatttgtgtatgactttaatatatacgttgatgttgtatttataaggttttttttttttcaggggatatttgtatggcttcagtgttcattagtggagcttattttgttggactgagtagatgagtcttctcttagtgagaaatttttaggttttaagtg

SEQ ID NO: 199664 - DNA, 708 bp, Cannabis indica
ggtaagaatggattggggtgggcggcgttggagatgaataagtttgtggcttcgcatacctcggaaaaggcccaaaagtacttgaagaattgggtggaagccccagtgaaaataaaaataaagaaagagttagggtgtgaactaagtactggtagttcaccacggttcaatgtttatgggaatgattttggttggggaagaccagttactgtgagaagtggtcctgggaacaagtatgatggaaagttgactgtttttcctggctctgaacagggaagcattgactttgaggcttgtcttcgagccgagacacttgaatctatgttactagataaagagttcatggagactctaacagtatgattattattattattattattatctgttttttaaatagagtttaaaaaatattgtatgatatatcgactgtgtgttttggttgaacatatcattacttttttattatcattgaaatattttatttttggtatgacaaaattaaaattgatgtatgatttgtgagatttacttattatgaactgttgatgagtttgatgtaaaagatagagccctaattattgttgattttcatgcacagttgcccccaattccaattatagctcaagatgcatcaaaagcagcatttattattatatgcatcaaaaggttccatccttaggggtgcttttaaatcacttaattttg

SEQ ID NO: 199665 - DNA, 539 bp, Cannabis indica
gagatactaatcaagttttttgctattttgggtatatgtagcatgtcatttaaatatagtacattaccacaatcagactataaggtgccagatccaatatgagaaataacaagttggttaccatcaccaactgtcaaccgatctttaccattgtaagcagccttgttgctcatgttatcttggtcagaagtgagatggttgcttgcccctgaatcaacataccaaccctcattatccacaacttcaggtgtggctatgtaagcacttgggtctttcttctcttgctgggaattgttgctacctggggtgaagcccattaaggattcatcatatttgttataacaaaaggctacagaatgtccatatcatccacaaacttgacatgtaggcttaaagtttcttcctcctcttcacgtccacggcctgagtttccaccacgatatagtgacatctaccacctcttccactagagttgttgttgtaatggttgttgtagttgggatttccacgaccaggagggtagttttgttgtttgttag

SEQ ID NO: 199666 - DNA, 669 bp, Cannabis indica
catagacgtatgttcttatttgcttataaaataaaatcaccaaaagacataagcttcctgcccacagataattgaaattggtcaaagacatatactagaagtagaagtatgtatcttagaagtacaaggtgaccaaaagtatgcaagacatacacatcatggcaaacaaaacatttagaggatgttggagaaccttttcatatagttcatattagatagttgagcttagtaaaagcacccctagagtattttcaaactgtaggaagaaacctacaacatttaactcccatttaagtgattaaaaacaaacccaaattcctttagaattcaacaaactgaagcattttaggaggcattaatcacattattgctgtggttgaacttcaattaaaatcttattcaaacttgagcttttattgagtgttgttattatgatttttatgcaggatttattgcctttaatggtcaatgcttgatattcagaagtttaattgttttacattctaaagatatgaatctattgcctcatcatcacccccatccttgataaaacacttagtaccaaagctagcctttaaattcagtggacagatacaataataatggggaaaaaagtttcaaatgttggatagaataaaacaaaacaaactttcaaatacaaccaaaaaa

SEQ ID NO: 199667 - DNA, 672 bp, Cannabis indica
ataagttccatataaaaatatataacttaaaagttactctttgataagaaaagatgtgtttgaaatagaacaccactacaaacctaaccaagttctgttttccttcaatatgaacattttctactttatattatataataatataaatgcaattatttacaagatgtatgtgctcttaaatgtcattagccaactcaatatatattaatttcacttttctgacaattaaactatcatataattgtgttatgtcaactgcattatcttattacttgcaactctatatatatatagctctataatactaatcaatgtatagtctattttggacctctcctttaacatggactaagttttcatttgcagtgtcaaaattagttatatatactatattaatattaatactatagtaatattacaattcgcacgtgatgacaaaatctaattagactggtgtttttttaattgattatattagaaaacgatatacacttgtatatatatatataaagcatgtgacaaattgaattgtgtttcttcaggaaattaaactgagatttttatgtataattaatagtgatccacttgcagatatattgaattaaattatatgccgttgttgtggtggtatatatagtcaataattttacgtccatatatatatatatatat

SEQ ID NO: 199668 - DNA, 639 bp, Cannabis indica
aaaaaaaaatatgtaggatttaccagaatgaagaagaaagaggagaatgaaaacattgtgtgaagaaaacataatttacacaataattatatggaatatcataaaaaaaaaatttaaaaagaagaaaactatttggttttcgttttatcttttcttccggcaagaatcataaaaatttggaggtgtctactgaaagcttggttaaagagcaagcgagtctggaactctgatacaataggaaccatgacaaaattgctgtaggaatgaagattatgagtcccattatgtattcataaactcttactggttccttcctttattaaaatttgaaaaacatgacatgaaaaaggtacttacaagaacaatggcctaccctgtgggcaagaaagaaaggatagcagcaaataaatctgaaagagtaaggccacgtactacaaataagacagtcatgactgaaataaaaccaagaaacaaaagtgccatgagaattctaatcatgagctggaaatgtttccgaaatcgttttctgcccagggacatcatctgataaaaccaaagatcaaatattgcatttagaaaatgattaattgtccattttacacaatatttatttccagtgttgaagacagttaaaactgt

SEQ ID NO: 199669 - DNA, 1503 bp, Cannabis indica
tggcattgagtagagaggtctacatgggctgagtttctagcaacattttccaagctattgttagcaatagcatggttggcagtagtagtttttcctttgtttgattttttttatctccatagccaggagaaaaaccatgaatgaagtagcacttgtaagcatagtggcatggtttgccacaattggtgcatgagggtcttaatttctttgagcgtggagggttgttggaagaaaagggccgaatagaagaatccaaggaggacagatcagaggagccaagagtttgttgcctctcctcttgaacaatcatagcaaacaccctagagagattggggttaggttcattgagaagaatttaagcccatactaaagcatacaactcattcaaaccagttaagaactgtacaactttattttgattgtcatagtcaaggaacagtttcatggcaccacaggtgcaagtagtgtttggttggaattcctttaattcatcctaaattgatttaagtttggtgaagtaagaggtgacgaattaattaccttgttgcaaatgtgtgagttgagtttacagctaaaagattcgaggtccattaccctcattgaatctttcttgaagatcatgccacatgtttgtggcaagatcgaagtacatgatactctatgctatctcagaagaaacagagttgacgagccaagacattaccatgttgttacaacgaagccaagaattgagaagaggattaccagttgctggtcgaggaaggtgccatcaacgaatgttgatttgttctttgatgtaagcgcaattatgatcccttgtttccaatattgatagttagcaccattaagaatggtagaaaccagaattaagctagggtgatctgctgtggtgagaaagaaagggctcgagacatcttgatgagccagatgattgagagtcgaagggtgacgtataggaatagaaggttgaggaagatcaccgactagaggatctgaagaagaatgagctagttcgaggatgtcattgtcgatctgagatcgcgatctagaattgtgaatttgtcgtggagcaacagaggtattgactacaggtgcagaaaaggcatcaggattagactccgattgattgtgctcagttgtggatggaggaacaccctcttgagagagtgtggaggttctccccattgatgcagtggtcaaggtttctattaataccatatgaaaaaaatagagtgcaatagagaaaaatcttaaagcttgtattattattattatgtgtattgatttacaggtacatgcatatatataggcatacattaactgagttagttagaggaataactaacttagcttagtgaataacctaactaactgagtcaagaatggtttaactgtatcgtaactaacacaaggataagggtaatctcataatatctcttgctactttacatttgaataataagtagtcactattttgtttattttaaattcatgaatttttat

SEQ ID NO: 199670 - DNA, 1572 bp, Cannabis indica
atactcatcccaatgatttagtctagttattaaaatcttgtttccaatttcccttagagtaaggtctttaatgttttggcctaatttactctatcggtggatagagatttttctgattgaaggattgtctaccttcaattttatctgttgtattacattttgtttgaatgattaatataacagtactttttctacaaaaaaaaaataaaataaaaaagcttatttttaaatattatattttataaaagttattgaatgaactatttattttgatacaaaataatttagactatatattttttaaaatagtatcttgaactgattttctattaaaataaaatttagagtaattggcagctaaactctctaaactttcatcacacttgcattgaaccctccaaatttaaattttggtggaaaaacctaccaaactcatattctatttgtattttgaaggtgtcgttccacaatctttgttagtttgtcattttatctacgtggctagtgacacatcactactagaatctaacgtgattgccaaattgtacatatttatacaaatgtccaattgatttaattaatttatattattttaaaattaaaaatttattaaaactaagaaacattttaatttttgtattaacttttaataataataataataattgggaagacataataattaataacaaataaattttcaagataaagctaaacatgctcccttccttcttaagctatgaaaaatgttactctcatttccaaacaaaattccaatagagaacaaaataaataaaattgtgtttaaaagcaaaataatgagtgatatcctacaatttttaggttttatattctcctaaaactatgatacaacaattactaacttccaaacaactccctcccgaaatattaaaaaattatatatattataatgtcttgaggtcataattataatatttttaaaaaatattatccgtatttttagaagtaaaagtgaaaaaaatattatgaaaaaaaataaaatataatattatatatttgaatgatgtatagatatataaaattttcaaaagatgctatcatttaagatgctcttagtagtagttccttcatatttaaaacaccacttaaatattattgtaattaaatattcaaattcatataatttaatttaataattattataacatattattagatgatgcaagttaagcatcagtccagtaatacttatgactaatatcattattattataattaaatagcgtatttcttttaatttaataacttttaaaaaatatctcttaactaattaggaacatgcctaaaaagaggtgctaatgctccgaggactacttatgaagccacaagtctaaaaatgagaaaggtcaactctttctcattaggcagataataacttttcaaattttagattaaaattctatgacttaatcatatcaataatagtaaatttgtagtttaacattgttaataagcaattgaagaatcaacaacaaaccctaaccaaacagagaattagcaaattttttcttgccattacagaatccctta

SEQ ID NO: 199671 - DNA, 596 bp, Cannabis indica
cctcaatgttttgcatcatcacatgtgatgagtgtacgacgaatgaggagcgaaagtggcataaaacttagtcttttttttttcagttcaatcgctagggtgacatgtattatgggtgacatgttgctaactttttattcaaatttttttcacgtatttcacaaatcttggactaaataaaataacaaaataaaaaaaaataaaacttggttcgaatatgtaaactaaaaactttaaaacgaaagaaaaaaataataaaagatgtatcagttgcctctcataaaaggctttgtatgggttgcctctgataaagcgctttgttatcatctttaactagatgttattgttactttaaatttttttattacagagatatttaatcaacgctctactatcatggatgcccacctttagtttaaatctaaaaaaaaaaaaatctgaaagtacgattttaattgtgtaaaatctcttctctaaatttgttccattcaatttagaagaagagcaatatcatcatcaaattacaaattataaatctaaaaacccatatgattcgaaaattctcgtttttaatattaacggtgttacactttatt

SEQ ID NO: 199672 - DNA, 546 bp, Cannabis indica
gatctcatgatcagatctctctaggctattcaaatagtgcatatatatataaatggaatctacgtatgattatatataaattctcaatctcataatcataacatctttgaaaccaaaatatattgatgccatttctatacattaggcctttcaaacatttttgtgtggtacacttcacttgacatccgccgcaatacaagaaaatttaggagagagaaacaaaatatataatatatttaggagatttttaatttttacattttaaaatattttttttttgtatttttatggaattttacataaaaactcctattgcaactagcgttgcaattactttagaaactcaaaccgtaaattaaaaaaaaatctgatatgaaaaaaaaaaaagataattcacaataaaaatatcttttttgtattgacatttaattatatacgttaatataaaaattattcaaaaaaattaactttcatacagattagttcccaatttcaaaaaataacagtaatagtccccaagtttgagattcttataagtctgttggt

SEQ ID NO: 199673 - DNA, 1145 bp, Cannabis indica
aataaataaaaaaaaaaatactagagtaattaatggaaaagtatgtagaagagtactttggagccgtcaacatggactaactaaactataaattaatgatccttgatccttctattctactcaaaatgtaggatattatattttattttatgttaaaaacgtataaaaatacaccgacacatataagaaagaaaattccttatacacaagcttctcatttataatatctattatcagaaatgttaaagggcacctaacacttacttatatgttaatatcgatattagtctaattaagtatcgagtctcatataatttaatataataatttttagtgagtattgttagtcaatcgcaacacaacatgtagaaaaagtactaatcaccagtgatacctaatgacaatgctcatcttttatatatgttacttcttgatttctattacactgatttatgttaattaccttgaacaaaggcacagctaattatcatgtcattgtgaatcttttgtttatttttaaattttacttttttattttaaattcaaacaaatatgaatttacttctattttcgtgtttgtaaattatgttgagtaataatatattattctcccaacgttttttttttatctttactgatatatgtcaacgacaaacaaactaaggtagaacatgtgttttccgttttttttttctctttctatttttttttcttaaaaaaacgtgccttttttaataatattgagaaataataaaagtcatcaataatatctagcactcttatgtgttattatcgttattggttcaattaagtatcgggtctcatataatttaatataataatttttagaaagtatcgttagctaatcacaaaacgacatatgtaggggtgctagacattactgatgcctagcaatactctaataataataataatgctttaaaattaaccgcatattgtgtagtgtagtaatatgaatgcttttactatcatctttttttgtttgggctaagggttcgaaccccaccatagtctctcatgagaaggattatgcttggccttttgagagactagcttactgtagcggtgacatccttaatgggatgagaatactctccaagtgcataccgattagggttgggtat

SEQ ID NO: 199674 - DNA, 1416 bp, Cannabis indica
tgaaaattacttaatttaagttacactacaagaatgtgcactttttccggcgcaatttgttagttgccttggcaaaagtgaaccattgccggcacacgtcaataagtgcgccagcaaaagaggtcaacaaactggatccactgcaatttagtcggcacctattctcgctggtaataggaagttgtgccggcgaagaaccttaactttgccggcaaatgttggcaatcgaaccgccaaaaggtgaaaatttttggcggttgggattaactgttttggcgaaactaattgctccggcaaaagttaatgaatgttatttacttttgccgacgcatttaagcaccgaaaaaagtgttaaaaaaaggcggtcaatttttctcacagtgaaaaaacgtgtgcgtaaaagtaggtgaatcttttgccgacgaatttaatcgcgtcggcaaaagtattcaccatttaaccaatggacacgttgcatcagggtttgccttttgccggtgcaatttgcttaccggcaaaagctctgatttttttggcagtcaacttcccgcccaaatgaaaaagtggggggaaatttttttggtggggacttttgcttaccggcaaaagttcttacataatttaaacgttgcgttttgttagcgtcaactttcgccggcgagccttagtacgctggcaaaagtccaggctgaataaaagcctgggacgaacccccatcccccattttcctctttcttctctttctttctctgcaaatctccattccccaccgtcagcagtcacctctcttccccaccaaccaccattttcaccatcccgaagccttattttctctaacaaatcattgattctctatttttctttcttttttttttcatttttattctaaaaaaattctgtaccgggactccaacgaggacgtgccgccgcactttcggcaaccgctgcccgagccgccaattgttcttcgcctttcgtcatttaagtcaaggtaatctatattttatttattttattttttatttgtgtatatatagcaattgtagtttatttgtgtataaaattgtgttttattttttgagtttatatatgtgtgtaaatttatatagtttttcgtgtatttttataaatatgtgtatatatgtataatagtttatatatgtgtatatgtatatatatatatgtaaatgtatatatatgtgtgtaatatgtatatatatgtgagtatatgtatatatatgtaaaagtaggcaaaggattcggacccgcttgtactacctgcggaagaagtgatgcaatgtcacacataataaacataatacttttccttttcacttttatatattctgacccattttaactcattaatacaacctataccgactttagccggtttatttacttttttatttttat

SEQ ID NO: 199675 - DNA, 1581 bp, Cannabis indica
aataatgtaaaatttagtaaaattttataaaacataataattggtttatagaataaaaaaaatatatatttattgtgagctaaatttagcatagcactatatcttgtgcagaatttgactaaacttttagcatgtgtcaaatttatcacactttttagaacatcattgcaggagtagtttttcataagtgtgctaaaatataacactacactatttttttagcactccattagagatattcttaggaaaaaatatactcaaattatagtgtgccaaaaaataatacaaatttgacacatagtaaatgatggaaaatttggcataacattatcatcataagtgcacaactttattattgatttttatgtcacttttattattttattagtatatttagatatcatataacattgaactatctatattctttttcataagcattgctattgggcactaatagtgtctagcaccttctataagtaacacccgatgattaaatagcaatattccataaaagttattttcttaacttatatggaacatgctatttaattacaccaataaatgtatgtcgtgaagaagggtgctaagtaccaatggtgccttttagcattttttttttttattttacataataaaaaaataataatattaattaatgataaagttattacttttttttatacttttaataaaaatattaaagtttgtatcaaattctgtaatttgtgctaaatataagacaatttttgtatattccttgggagaatttgaagaatactttctttttttatacattaatcaaatttatctttaaataaaatttaattcaaatatacctcttttttttgagtattgtactcaaattatatatcctcacacactcacataactaagacataatttcaaacataatatatttgttgtagatgaatgtgtaagtttggacaaaattttgattatagaagaataaaaactatagtgaagtataggactaaaattggtagaataattgaaaaaaaaaaaataaacataaaattttttaaaagaaagaataaaaattaaagacatcaagttaaaaaagctatctattgtaatttctttcactaaaagtggtcttattctttataaaaatattcattgttgcatgaagtttccccattaattttcaagataataataacaataaccaaattaagtactctttattaattattagagcattccgagtggtttggagaatagtaaatgaaaactattgcaagaccaaccgaaagacataaatgaaaaagtgcctcaaaaaaattacataataaaagctgtagaactcgtttgttatgccatataagagtcctattatattaaataataaataacacactatgtttgaatattaagcaatgtaatgtattaattattacgaccaaatattttaatacaatgtatgttatattatttcatacataataaatggttcgtattagcttctattataatatttataaaaaatttggagtaacactaatctccgactcggaccccaaatccggacccgaacccgtagttagtgttgagatcgag

SEQ ID NO: 199676 - DNA, 844 bp, Cannabis indica
attaaaaataaaagaagaagaaaacaaaatagaaaaaaccaaattcattacttgtgatgatggtgctttttccaatcaaagtatctagttgaagttacaagctagctaaatgatacatgaatatgaatatgaataggacatcaaatataataattaaggtaactttcaatgtcccatttgaatatttaatttaaattcactattgattatttgtccttattgaaaatgagtactactctcaacactaacctccagctacaagtttcaacaaaattatataatcaaacaaactttttttactttaaacatatctaaaggaatacatacatacataaaataaataaataaataatacaaatatagtaattattaaaaaactcaattatgaaaatatgtattcactattcatataacgtgcatataatgtcatctaattaataacgttactcatatatgaaattgacacgttattttacatatggtttaataatttggccaaatgtcaccaaaacttttaattatagcaacaataacttgtccaattatagattatttaacattgcacgtacgttttgactaatccttttatattcaattgattaatccttttgactaagcttcattgcaaatcctcttatttttaatagcaataataactatttatatatattataaaaatattgcttcccacaaacctaagttatataaaaaataaataaattccacttaaatttcattttcaaaagatggtcatttgttaccattagcaacaatgtttttcttctttacttaattttagaaatgaagtaaaacctaaaataaaataaattataatatgtaatat

SEQ ID NO: 199677 - DNA, 1518 bp, Cannabis indica
aaggacaagcatcatcgcaacaactctaaaagtcaaagcaatgatattgaggaggtgtatccggtgttagacggcaatagcggaagtctctctacaaatgatcttggaagaagactaaatgagaaaaaagagaaagcaagaatagagaaagctagaccacgcgagaatgattcgagaaaccacgtcaatgatcatgttcgtagaagggaatcttcaagcgacaaaactcaatgcttagaaagcaaagttgaagagttgatgaagctcaaagagaagatatataaaaaaaaatggtactttatcagactcagaagaagaagacacagaaccgtgtgtgaagagaatcatagatgcaccactgtcgaagcactttagaatgctacaaatggagttgtacgaaggcatgatggatccgaggataacttgtccaagtacaatcacatgatgcaagtcgccaaggccagtgatgatgcaaaatgattttgtttttcactaactttaagcaagttcatggaagattggtggaagagattatctctgggattgatccaatgttggaaggatctacaagcgatgtttagaaaacagtttgttgtagcaaaggactttgatttggagggcagttctctaacaagtgtcaaatagcaactagtggtgtaatatctgaataagcctaatagttaataattaaggtttatatttatattatcagttaactagataataagtgggattatgatcctaatgatctacttcaacataaaaatttaaattggctataagtgagtaaataggcgtaatttatgaattacggagatttatatagcatgtgtgagtgtaatatgaactatatgtggaataaaaatattttcaggattggcgaccatagagactcgatcgggggccagaaatatcataacatatttaattgatagaattgatgagaatattgtgataagttgatagtatcagtattagggtaattatgagtatgtggaatttgatgtagcaccctagaagtagaagtttcttagtagctaagaaatgataagataattattaataataaagtttttattaatattattatattattataatattaattttttttataaaaagttatcgttcagaaagttgatatatatattataagttatatcaaaaaacagtacacgaacgaacgaaactcttgttctcctccattcgacaaaaccttctcatcctatatcaatttttttcaattttcaacccaaaacctagtgatctaagctccggtagtagcacgatagataattcttggagcgggatagtttaagggcccaatattatcgatcgttctctaagcaggtcagctaacatacctgaaccgtgacttgaggtaagaaaatataatgtaccacatggcatgactagctctgaaattattgattgtttgattaggtaatgataatgtgatgataatatggacataatataggggctcacttgatttatgcaatatgtcgggcattgtac

SEQ ID NO: 199678 - DNA, 1664 bp, Cannabis indica
gtctccacatttttggtatcctatccttagaaaacccatttatggtatatctacaccctgccgaaaatggctaccttaaacaatgattccctaaacctcctcactcttagtcttttacagaagaagaaagccttattcacgacttcaatcatatctccataaggtctagctctaactctgaaaactgctgtcttattgtcaagagattttcttcaaatgctctgaaacccaactggattgagaaagcaatgaaggaagcctggaccctccgtttcctagtaaacttcactaattaccactttggcctcttccttgccaactttggctgtgaatgagattactaaagggttctcgaagaacaaccgttgcactttgatcataacttaatggtctttgccaaccctaagggacttgactctctcttacttgaccaactttgctatgtccccttctgggttcaagcgcataatataccttttggccaaaaatctacccaactggcttaatttgtagccactaacgttagggatcttattgaagtctataacttatccctgtgtgagagtttcgacccttatctctggcttaaaatcttacttgatatcactaagcccctacgaagaggaatgactatccacttctaaaaaatccccaccaccaaatggttgtgtttcaagtacgagggattgcaaaatttttgctaccattgtggcagacttgatcacacacataccaagtgtggaaagtacctccagaattgtgatgaaaacatctctccacctctcttaggatacaaggaagccttcgagtcccaaccacatcaaaattcaagaaaaaccctttcaaaatctccaactcagtgcccttagaggaaatttggactcacggaagctccagtaatcaagggctacaagaggctgtcaaccgattcttcccttcaagcaccacccatatgaccaatatgtttgatcaggttactttaggaactgccatggaaagtagggagacaattatttcttccactgccaccgaatgcactcagactcaaacctctttgattagagcccaaaatgcagttgctcaaatctcctctagtcgagtcatggtaacttctgttatctctcactacaacaaaggcaaaggcattgccactttggactgcccaagtgtcagacccccagtgatccccaggcctcctactagaggcatccacattagagacccaaaccccactcctgttgctccaactgtgggagtcaaaagaccctttgtcaggcaaaacgtctaagttaaaggctccatgaggaacatgctgaagtgtgctcgtgttgttccaaatgaagacattgtggttctcgttctttcaccacctattgatcaggcgagtgtttctcaacaaccctgctaggaaaaatgagtcttataagcttgaatgcccgagggttggggagtcctcgtgtattcagaaatctctcctttttggtgaagcagcacaaaccaccgttcctttttgtgatggagccgaagcttcagtttaatcctggtagtggccttaggaataggctttcttttgataatatttttgaggtcccttacataggtttaggagggggcttgattctcttttggatgaatgtaattaatgttagtatcatttctttttc

SEQ ID NO: 199679 - DNA, 988 bp, Cannabis indica
tttcttttgctaatttaggagggtgatcaaaatcaaaatagtaaaatagagaagaggagagaacaatatgaattgcagactgcaaattctcaaggtgcaatcatggttcttctttttaaacttgaattacatcattttattacaactttattatgtgacattaaattcggtttgattaggtaacactaatgaggaaagaaaaagtaccccttttgtgaaaagatcaaatgtttgggaaatggtcgaatcgtttgaagtgttccgaaaactaccacagaagcctcattttcatccattgttgaatgaggaagacgatgaattcgaacgagaagcattagctttgagttatatggtcaagtttgctgttttgattgagaaggttttcaatttaggaaaagatgttagtatggctgagattgattatttaatagcacaattatttgaaatgggaaaattgggatttgaggtgaatgtagtaaagaataatttgaatgagtggaaaatgaagaaagttgagttggaagagttgaaaattcagatcacattgcataatgagaaaaaggcgaaaattgatgaggagttgaagatacttgaaaagaaacaatctttgcttatgtctcaaagtgcttatgaagaagaacaagtgagtaagttgattgcagaagcaactatgattaatgaagctttttcttctataatggaaagctccaacttctgctatcatcaatgaagccattttcgatgtaatcttcaagactgataaatattttgtgttttgtttcaactgtgaagactggttgagttttgtttatagataagatgatggtggtggtggtggtggtggtctgttggtgtttttttgactttagcattcgtgtgctcaagtaagttaatgtacttagttacttagttttcatatgaacaagttctaatgtatgttacttttttgggggttcaaatggaaatatgaacaagttctaaattatag

SEQ ID NO: 199680 - DNA, 1385 bp, Cannabis indica
aacaatacctattaaatgtatatggaacctttttttttctgtataatcaaactctggtgcaggcgctttttgaacaatattctcctcattggatgcttcattacactttcaacagggtcctctcaatggctgagaataggagtgcggtggtgtgttgaactcctcggattaataatatggcagcccatgctcttgcgagatgggatttgtctcatgtttgtaatggtttgcttcggttttgagaagtgagtccccatgtgcttactaaacttctagtttcggtttaatgaagttatgtttttcagcaaaaaaaaaaaaaataaaataaaataaataataacaatacctatttctcaaagataaaacataaacatttcaattggctagtgccaaatgatacacataagtaaactaaagtggtgtccacatcatgtgacaagtcgatacgcaaaccacaattcaaatcaaaatttgttttaattaatctaccaataactgaagtgtgtgagcaactgatattagagaatccaataaatatatttatatacgttgtaattgtatataaaagaaattagagcataatccctaaatcttaaaagtaaaaaatcgactttaattaaagcttaaactaataaatttttcttcattgtattagacaataaacatattacactaattacattttactactcagagtcagaactgtaatgatactataaaaatgttgtccatcaggtggttacagttttaagtgtaaatgacactttactggcaacccttcactattacatatatccatatcacttattgaatcatatactttgtggatttctactgctatagattctgccacatttgatttgtcttgctttcaagatttaatttcaaaagttgttatatcaagatttaatttggtttatattttttattttttttttatttatttaaagttgttatttctcatattaagagaagtaccaataaaactgctaaggtgacaaaacatactacagagctggatatggtaattaattttggtctgggaatttttccattctcattttataaaggaacaatgttgatttataataacaatgttcattttatctgttagtttaggtcttattgtttaaactatacaaagagaggaaattaatacaattaaaacaaaccattttctctccatggtctttctctttaataataaaagcacatgaaggaagttttactgttacagctatttggactacattttctctatagatttgagtcataattagtgttcataattcttgattcttatggtatgtaaataaatgaataagttaaaatcaagggatacaagattgacgattgtacctccctccacaatacaattactttcc

SEQ ID NO: 199681 - DNA, 1511 bp, Cannabis indica
tttatattgaataacatgtaaattataaatttatgtttactaaataaaaatgaaaaattaaataaatacaatttattgatcaaaactaacaaaaataaggaaattaattaatatttcaaataaatgaaaatttaattaaaaaattcaaaatttttcattttttttgaaaattctacttctgaaaatgacatgtcatttttcacggtatgtggaaaatgacttgttgtatgaactgttctccttcctctgtaatggcttgtcttgacccgattttctgcaagtaggtcaaacggacccgtttcaaaactcagcctaaaacaccgcttttgacactaattttcatgtttttcaacccaaattgatgaaaaatgaatatatgaagagattcaacacatttttaagctaaataaacatgttaaatttaattttaattttaaaaaaaataactctcattttaactacgtatacctagattcagaagctcaattttcatgtattttgaacctagttactcatgcataaacatgagaacaataacttaaggaattttaatgttattaatatgataaaaataaataaaatcaaaacttcaaaatcttaaaatacaaatgtatattataggattattaatgtgatatataatttgaaaaataacttttaataatgaagatggcaaataaaaaaaaaatttgccaaactagtacatcaaccaaaatatgaaatctcaaaatattgaacatatttatttattatgttctcaaagatttattttccatatagaataagaaaattatactatttctaatgatgaatatacattgaaaaaatattaacaactagcaaaattttgaacaattgactataaataagatttcattaattaaacactaataattaaatgtatgtaaataaatcaaaatagagataaaacactaataattaaatgtatgtaaataaatcaaaatagagataaaatttgctctgataccaactgtaagatattttatgaaaaaaatacaacacatgaatgtgtatattaaatgtaaaattaaacgaatatgtacacgatataactaaatgatcgaaatacatccagtcattaattctttgagcttcaattccacacaagctttagatctgcaaaagaaaagaaaattaattagtgtgggtaatcgaacgtccaaactttctctgctctctttagatagatttactattttcacaaaatgagtagtgagcttgaggaccgacaccctattttagtatattttataagtaagacattctatcaaaatttctgataaatttaattgtcaatgatcatatttaaaatatttattcttatcacattttaatttgtgatgatagagtcagtgaaataaaacaaaatcgatttaaatgattttgtaccaatattaaaaatattctaatatacacttcctattttaataaggcaaactaatattcttcttttatctatatgatagaggattataaaataatttatattc

SEQ ID NO: 199682 - DNA, 993 bp, Cannabis indica
ttgatcctcaacatgaaattgatagtttggtaacggtctaggcattacaaaattagattcatatgtcatccccttttagttgagttaaagtctgtttagatttattttgttaagcaatctgtaataaagtcgttcattgtgttgcttgtgtctctagtttctatcctagctcgtgtgtttagtgaggatgatgctcctgttgaacttctttctattgtaatagtttattattattattttaaaaaaaatagaaaaagaaaattaaaccttattcagtatatatcattaaatttttttgccataattgttgataacttgtaaagttattgctttgttggttgtcaccgttaattaggacgttttattatttttagatttccaataatagatttcatatgacttgcaataattgcaaggtaaacaagatacttactagaattataatgtaaattgttatataaaaaatctttctaattattaatatataaaatatcctttatagtaaaatcaaaagtgaggtaagagtatataatgccttatatatcaccactattgctcccacattgtatctacaatataatgttataactttagtacaagttataataacaccaatttttttaatattaaccaaacttgtctacccatataataaattaataatggcttggttgcaagtttagtaggttattctctaatcttgaatggattataataattataatttaggggtgaaagagaggagtaccttactaactttgtatgagatgaaagtagggtaatatttgcaagaaacacaagtagagtgaaacagaaataaagtaatatttgtatgaaacagaaggaaaacaagacgagcgatgacatgaggtaaaaaaaagtaataaaatgagtgtagagagtgtaatgatcatttacaataacagccatgcaataccaagagcagcaaaaagactttactctattgaataaaattacacaaatgcctctaaa

SEQ ID NO: 199683 - DNA, 702 bp, Cannabis indica
agcattaaccacagcatttatacatttatgccggctcgttgagggtgctcttagcatttctctaaccaaatgcttatttattttccgttttaaagaaaatataggtataagaaataaaagctgtcatgcatccaagttttcttgaaaaggtctttcaactagtatctcccatcgttttcgcaatagcccaactttgtcaatgccattagaaaaaatgtgccccctgcacatcagcattacttctttattattatttatttatttcttaatgtaatttagtggggttcacgttcacgtgataatagtcacagattttacaaacatacccaacaaagtttaatatttttctttactctttccaaaaaaaaaaaaaaaaaaaaagaaaaattctatactttgtatgagagcgagtactcagtaggagtcacggacggacttatttacctcaacaaatagtgttgtactcaatttattcatttatttcataacttggttacgaaagagacaataaaaacacattttaacgaattgatgtcatagtaatccaaacagctcaaaaagtaaaaggtggttgaattgcattaacaattcaggcaattggaaaaccaattgaataatcctctcttcaattattattattagtattattttttttgtaaagcattattatttatttttagtttgtccataaagtcactttaa

SEQ ID NO: 199684 - DNA, 1542 bp, Cannabis indica
taaatagaaagtgatggctcagtcaaatcacaagttttcagatcaactttctgacagaatttctctcttcaaaaaactgacgccttcctcactctctgagtggaaggagactatttattcagctgcatcaatgttaaggttttcttaactttatatgtgtttattttatcgttttagaaagttcatatttaggatgttaataaacatacttgtgagtagatctaagatcctggtaaaataattcccaacacataataggcttcctactcccttattccccaacaaatcaccattagaaaccttgttccacactaagcctgattacacaacttttagaacctttgggtgtaaatgctatcctaatatcaggccatataacaagcacaagcttgaattcagatcagctccttgtacatttatgggttatagtcttaaccataaaggttacaagtgtcttgataccaagggtaggttatacatttcgagagatgtggtttttgatgagttttcctttccttttgagaaagatctcagccaacatactgctaggaaaaccactgaactcccttcctatgtttcagcattaatccctgtgtgtcctcactcaaaatagctttatacaaatgcagaccttgtttccccaggtttgaacccgaatgatgattttcctaatgcttcagctcacattgaccataatgctttatttgattttcctgtgcctaatcctatttcttgtgataatgctgctaacaacttgtgcacagaccagccatctctttttgctgcaggtgaatcttctggttcaggtgatgctgatatttcagtggagttacctgctgcaactcaaacaagtgaacttcctactgtgcaagaagcttcaccacttgaacctactgtgactgctggttcaccatcacggagagcatctgttgctccagataccaggtctacaccagacactagacttgcaccagatacaagaccagcaccatctttttcctctccagcagccttacccttctagctggttgtttaaatgctcctggtagaaacaactctcacaaaatgacaacaaggtctaaacttggactttttaaacctaaagcatttatggctttgagagaaccaacatccctaaaagaggcattgcaacaagatcattggaacaatgctatgggtgatgagattcttgccttggcaagaaataaaacttgggtccttgttagattactagaagggagacaagccataggatgcaagtggggttataagaggaaggaaaatccagatggtagtgtgctcaaacataacgcaagattggttgccaagggattccatcaataagcaggttttgacttcacagaaaccttcagcccggttgtcaaacctgttacaataagagttgtgttaactttagctctatccaaaggttggtctgtgagacaactggatgtcaataatgcatttctcaatggtgatttacaagaggaagtttacatgactcaaccaccaggctttgagattcctggtcaagaacattta

SEQ ID NO: 199685 - DNA, 1103 bp, Cannabis indica
gtagtgattgattgtgttcatctacgtctcaacccaacaaatcagatccatctcctactatattagtaggaaacaaagctataaaaagagaatgttaggtatttctccattgcacaaggtattgcatagctgaagtgctcctttcaatttttatttcatagctattttaaaccgacaaaaatagtttaaaatttacaggtattctccattataggcattaattttaaactctcacttaattttattagaagaactccaactagttttgtggggtattaatttcttttgtaaaactttgtatatggttcacactattggactttaaggatattgtaaccatctaatgagaagattccttaaggggagagtaactgggaagtaggccattgtttggctgaattaatataaactttgtctcttttactattatgttttggaaaatactaaaagacattttaggtatcaaatatcacaagaagtgatatattgttattagtataaatcaatatcaaatttcacatattttaatttaataaataataaaaaaaattgttaaccactcacaatgttttacatcaatattatagtgttgaaaacaattaaaaatacctaatagtaatattgttattatgttttgaaccttacttattttttaggtttatgattttgttatatgatagtgtctattgagttttgtcaaccatattttggtaaaaattaatatatagaaacttccccagagatcgatatgatccaagtgacatcgctatgatagccacactttgcttgcaagtccctataatatttaagttaatagatcaatttccctacgtactattaataaatatgtactttagcctacgtactattcttttttacgtagctagcatgtgttagttattatgggccaaatatattaattcaaaccaactaagtaattgtgagttaattcatttaatccggccaacccatttcttagccaaagctgctatattattcgttttagtctggagtctgttctaacaactttgctacattatttagtagcagaaatcgttatttaattaataaaaatcaaacttttattcaacaaaaaaaaaaaa

SEQ ID NO: 199686 - DNA, 816 bp, Cannabis indica
aagccttagcggcatagtcaaatcgatcgagacgggttagaccttccacctccgctgatctcccatggttccttaaatccacaagcaccgactctccatgacttccaataaaaaataataagcacaaatgagctccagttcgtatcactttcaaaataaaaaatccagagagagagagagagataccagatggatttgagattgtggagaggagattacgagagaaagttttccaatttcggccagatcccaaaaggccatggataatgagagcagtacggtggtagggttggtcagttgatactcggacctcttcgaaggctagggttcctttggatctttgtggtgtggtgagaaaacgagttagaagtgtgttaaagataacagatttctttctgaggagactcgtcgccatggctggctgctacatcagaataataataaatttaaaagaagaatatgaagtagaaaaaggaagaaacgatcgaacagaataaaaaaaaaatgaaaaaaaatgacagctgtgggatttgaacccacgccctttcggaccagagcctaaatctggcgccttagaccactcggccaaactgtcttctatgcaattgttagttacatacaactcatatcatttccttaaccaactacttaataaactcttcattgcaaaaaaaaaaaaaaaaaaaaaaaaaaaactaacttaataaactgtatttatttatttatttattttaaaagaccactacagtaaatatgggggacgaacatcactgattgttatcaatgtcttgtgtcgctttacgattagctaacgat

SEQ ID NO: 199687 - DNA, 975 bp, Cannabis indica
ggagtgatccaccgtgaaatggcacctacgaaactctttgcacagtggattaagcagaccgtgatctgtctaaaccactataatcctttgtctcattgttatttccagttttctgttaacgatttctcattcccagtttgagtactcgccactctaggttgaatactcgcacttgttcttcatatagatttctttctgttatcaataatatcatataaaattggtgttgcgaaattcacacgacaacattttgtatcatccctaataataagaactcgtgaagtatgtagattttaactacaaaatcacgtaaaatatttattatcatacaattatgtagtatatttattgctaaaaatgctatttatttaattaacaaaaatctgcattaacaaaaactaaattacattactaccaaaacaaatagatgttaatcataatatttgagattattattatatatatatatatattactgtcacacattttaacaaaagtgccaacacatatactatagtcattttgttttgatagttaaattccaaattagaaacttatattataaaagaaaagaaaaacgaaatcaaaaaattgtcgttagtataaactacaccaagcctatacatattcatacgaattgtactaaagattaaataatcataaaataatatgtaatggcacatatatattaatacaaaaaatctcaataggcaaagtattcaaacattgaacaaaagtcacaatatattcaaatttatatatatatatatgtatataaatataataggatgaaaaaaacctaattttcaaaatctctaaatttcatgaataataaaattatcaaatactcaatcaatttagcaaaaggtggcactgataacactttgttatgatttataaaacacttaagacacacatatatatcacagatttaaatatactcctaaaagttctttaatatataaaatcctaaat

SEQ ID NO: 199688 - DNA, 540 bp, Cannabis indica
aaaatgtatgttgtacatgttattgtaaatagaattaagaaataaattatatgtatatataatatatattatatgtatatatataatataaatatacacctcaattgattaaaaacaacatgaaatatataattaagcttatgtacgtactcccatataatataagctatataacttttctcaatatatatatatataattaagctttggaaagtttttgttgttttgatgaaagttctaaataaaatacatgcattttatataattaatattctagtctattaattaattactatcttcaactatttttcatttgatcaaaatctaattaagtatagatagtttaatataataatgtttaaaaaatattactaactaatcataaaatgacacgttaatattggccagtatatgttaagtaaagctagtcacatatatattcaactatatcattttcacacagaagaaaatcaataacactatacatttatagagttaagtaatatgaacataaagatatgaaataacgtactcacagtt

SEQ ID NO: 199689 - DNA, 1549 bp, Cannabis indica
gaactactttcgcttgcaaagacggtaatcgacaagttcagttgaattggttattttttgcttgggggcgaatcttagcttcgtctgaccccgactcatcttcttttgctccctcaatcaaattcaagcctattgataaaaacgctactgggtacttatatatatgtatatacatatgattgtttctttttccatttgcaatttggcgacttgggtttcttttgttagtgaatttttcattgtattgaataaatgtcttcaaatgacgtgcttcccaatccaaatacaggttctgcatcatccaggggcctgagatagtggaagactttgccaatatgaaattacaagaaatttaggacaatatacgaagtcgtaggaacaaaataattttgcatatgaaagaggtgggcaagttaaactgatttctctcttggcacatgcattttcttacttggtaataatagactactagtgttggtgtactggttttggttgtgattagtattagcctatgttttaatgagtaggaaccaatagtagcttatgaagagagtccatcaatatgttaaatgaatcaattattggatggctctattgtcaccattgcagatgaaaattttcgtcaaagggtgtatgaaactagatttgtcttttggtcttactttgtatcgacttagttttccagcttggcttttcaacatgtattgtcagatggactcttctcctagtagtagaagtatcttcatgttttcttttattgcttaatctatgggccatatatttatttagaaggtgttaataaatgtagctgatgacccttttatgctttaattctcagtttctcacggctggattaattgcaggtcaattaattagcaagtgcaagtggattaaacccaacatcagtattagtaaaggttaaggtaaatggataattttttatttttctaataaaagttaaatctgtggctctaatttgattcattcaatagtaactgaattttgttttatttcatttttaatcatgaaaatttgcctataactgacaacgtcctatatgcttataattttgagcttttctcacaaaacaaaaattacaaggtaattgtggacaacttgttatttgagagattttcacaaggtaaatttgaaattttgtaggaataatttttaactacaaagaagaaccgggaaatttgtggctatataaatatttatatatatggaatcttagttggtttgaaacagttgatgaatcttaaatggaggtcaaagatcaataggtaaaagcttaatattgcccacttgatacaaatttagaaaattgtggagaaaatcaattggtggtacactggtactaattaaagtatgtcattcttatgtaaaactgaccttgtcctatatgcttataataataatctataattggttagaactatatttattttaggagaatatggataatgttgacctcgcttttagccaacgacagtgagtctaatttagtaagcggcaagtaatttataactattgatatgtagtaaagcaa

SEQ ID NO: 199690 - DNA, 1304 bp, Cannabis indica
cttggcatggagagtatcaatggcctaattctattgaggatttgttggaaaggtatagaaacaggatgaagaatctccaaaatcggatcacaatgcaatcttggctgagactttatagaatctgtggaagaataggaatagatgtattttttatttgtgttgtactgctccaagtcatttgagcttgaatattaggaaagaggttcagttgagaatcttgagcaaggggccttttaaagcttgccaaaagaagaattatttacttaatgtaattaataggttgtagcttttcttgtgggctgctggctgtagcagctgccactggattgttgttgtggccttgtgcctttgtgtgtaatttgcttgtttttttttaataaagatttcctctttttttttttttttttaaaaaaaaaaacacgaaaacaacagatcaacaagaaaaaaaaaacaaaaaaaatacaaaaatacaaaaatacctttctaggacgaacaacaatgaaatcatcctcattatcatttctcttcctcttagctttcttggcatcaccagatgaaggctcaccaacatctaccacaactttggatttctgattagggggtttcgaagtaatttgagcaactgatttgaatttagattgtttaatagatttttttttgagtttcttaggagaaggggacaatgaactcgaacgagatcgagtaacagccattactcgaaaacaaaggaaaaacacagaaacaacagtcagaaaacaaaaagaaaaaaaagtaagaactcgatgatccatatgaagaagaagaggaagatgagaatgatgaagaataggaaattcaaaatatattgataataacgagggtgtgggttagatagtggtaactggcagggaagtgattgaaaattgacagatgggaggaaaacgtgtaggcaattaagtgaagtaatcaaaaaccgtatatgatgtaaagttttaaatagtaaccgtataagagtttaaaaaatggtaaaaatgaaaaatgaaactatgttactgtaagaatgtttaaaaacacaaaaaatagcattttatgtaaaaattcctttctttttcgtggatacaatctgggtggatgatgtattattgtttgcaattgtatagttaaaatgagaaattttaaaaaatactattttttatgttttatttacaataatacgaactaaaatttttatttatagaaatatgacttttaaaattttaaaattactaaaatacgcttttcttaacaaaaagcaaaaattaattaagaaacaataagaaatcaac

SEQ ID NO: 199691 - DNA, 1784 bp, Cannabis indica
tctttattaagactgatcaatttcacaagacaatggacatattggtcggtttcgtccagaatattcactttaacaaacttattcctccaaataactaacatcctgccctcaatcacaagattgtgtggagctccagccactaaatttagagttcatgacctgagctactttattccccctcatttttgtttctaacacaactcctactccaatatttctcaaacaccataaatctaacactgcctcttgcttcttattactattaaggccccttatgttccaacttcagatattattacaatccatagatagtagaaatattaccttcttcactttgaccaccccctgttgagtatgtagaacctcaaatgagttcaaatgttgagtttgtgctgttattgggtttcccatactcctgttatgagcagctcttctaggagtttgccaagttccagcagattctttaatctgaccattttttcctttttccacctctcctttattgtaatcaattctcttcattgtaggcttatcatgtttattagaatcattgaaattctcgactgacttctcacctccagtaccctatttttcctccttccctgcatctggtttaacatcttttgcgccttctttttcaaccttattttctagttatttttagctttcctacaatctgccatggcatacccatatcattgacaaactttacacgtggtgggcagccattcatattcgatactttgttcaataagttgcccatactcattaaagaagtgagtgactctcgtcggtttatccgtaatctccatttcaaccaagaccctcgcaaatttaatcattgatctctccttcgtgatcttatcaaccattataagagtcccgattgtgctaacaatagcactcaaactcgtgtttccccaatagtgcaatcctaggtcatgaagcctaatccaaagtggaacagacttgatcaattgaagagcagtgagatcagttgaccaaggacaaactatgacgggttggcgatcaaattgtaccactccttcctctagtttaagatcccgagttgtaacatcattgaatttaacaatggtacaacttccattcattctcataatctgtgaaattcccaggttcccccattttctcttaataaatccctcaaacatttaagatgaggattaactcctaaaatgatacacacaacaattgcgttccagttagcagcttcttcctagacttcttcaatatcgacctggggcactttaatcccatccttcgtaatgggtgctatgtatgacaatttagcatcaaggtttagggttttacctgcatcaaatcgcttcctctgctattgtgatttagtaacgaagtcctcgtgttcaacttcatctgcccaattcgatgtctcccttgttcctcgctgccatcgcatacttcttttctagcctcttgatcaatctttggaatgcatcctgactgtaaagcttgagcaataagttctaggccttccgaatctagcacctcttcttggatctcatcttggattgaagggggttcctccacattcagcttgaccacaggctttcgaatcaccctttccttcttcaccatggaagagagaagatgagaactcacgccttaattatttttattcttctctataattttgtttactattaattatgttgttttataacattttattgaatcattagattaataatatatttttacaagaatatattttatttaatttatcataatcattcatataatat

SEQ ID NO: 199692 - DNA, 1457 bp, Cannabis indica
ctataaaaatacaaggaaacaataagaaatccacataaaagtagccagaaaataacaacaaaacaacataaaaaaaataatatacaaataaaaaaatcaacaataaaataacaaaagtataacataaaaatacatcaaaagatcatattttctgtaaataaattttataaaccgtaaaaatgtttaaaattatgtacgatcatttttttataatttatttgttgtttttgtgtatttatgaaattattcctaaaaaaatttataactgaaagtttaggaatgtattttaaaaaaaaaattgtaatggaattgtggtcttaatatacactacttttttttttctcttctttttttttttataaaaatctaattttaatctttcgcacaaggcttttaaaatgtttaggccgaccctgataataataatcatacaataataaatataaaaattaataataagataattataattataattatgaaagtcagcaaatgaacatgctaactaaattttagtaatataatattaaaaatagcataacggtaagagaaaatgctaaggggcatcattggtgtttagcaccctcctacgcgtcaatatcactattggtgcaattaagtatcagatcccatatagtttagagaaatgctaaagggcaccagtggtgcctagcaccctcctatgtgtcaatatcgttattggttcaactaagtatcgggtctcatataatttaatataatagctttatgggagtatcactagccaatcgcaacgcgacatgtcgagaagatgctaggcaccactggtgcctaatagcaatgttctatggtttaatataataatttttataaagtatcgctaaccaatcgcaaagtaacacgttttaagaaggttctaggcaccactagtgcctaatagcaatgctgtaatggtaaatataaaatcatagcatttaatgtaatgtaaattttatattatgctatactgtgatccaaatttaaattactttttgttatgtaagatatttacatcacaatttaagacactattagaatagactttctgataaaataaattatattttacatttaaatttcttatttgcatttttattgaagacgctgcctcaaaaaattcaaagcatttgtagaaagcaatatttaaagcattttgagtacatgtaagttataaaacctccatcatctattttatttaaaaataaacaaataaatattattttatttattatcattgttttgtgtcttaatttaaaatgtacttaagaatcattacacttaaatatataaaataaaaacccatgatataaagtttgtactaaatttgtatatgtatatgtatagatttgttggaattaaaatatagagagttattggtttgttgaaatatatattaatattatcattatggctaattttgttttgataagacattgctc

SEQ ID NO: 199693 - DNA, 1537 bp, Cannabis indica
gtattaaatacaattgtagaggtttaaaaaactaaaaaatgaaagaccactattgagcatggtattcacaattactgtatattattatttttacgccatacaaaattggtacaaattcagaagacatgagtatgattagacacgaaaaaatatgaatttagacataatatgacacaatactacgaattggcacaacataacacgaaaaatatatctttaatagcacgagacaacacaaaaagcacgaaataagggctagcatgttaagaaataagggccaatatgagcaaaatacggtacaaaaatattaggtttatggattgtgtcccgggacggacacacttacagatttgtgggggctaaaaaaaattaaatatttttcttttttttttaataattatagcacaaaaaattaaacccacataataaaaattatgtgtccgtcactggtcgtattgggcttactttttaaaattttgattcggcacaacttatatttttctgcagcacacagcacggcccattttttaaaaatcataaataaatacagataggaccagtacagcacgcacgaacttacatctgtatattagaaaaagcataattttattaataaaatttcttagacaaaccatacacaaatagttaacatgatcatattacaaacttaagccaccagaaagacctaattaaagcaactacatatataatggaaacgatatatatcttagttctctcacttttaatttgtaatattactaatattaactacatcataaagtagatcggataatattgagattctgatgaaagagcttctcaaacattttcatgtgttgtggctggagagctatgcccactaataaactcccatcattagttggacaaggtataacatatgattttccctcgtacataatcccaccaggtccaatataaataggttgaccccaaccaaagtcaacctcataatttatcaatctaacccaactagtaatcccaagatttggattcctatatgtgtgggccccacgtctaatggatgacaaattaggatgaagttccaaataatcaatacttgataataagtaatcattatccattctcttcacacttccattgatgcaatttacagcataagaaagtggctttgttttgagatcacttaccttagccattgctacagttgcaaatatcaccttaccaaagtaaccaactggaattttgggttgtaataatcttctagagaatcttccattgactgggaggaatagagtactgattttgttgttatcactatcacgtgctaggcaaacacatttccaaatatgagctgataaagtcacataactactagctttgatcatcatcatattattattattattattagtactatctttttcttctgccttggctttaagggtgtttagttgctcttttgtgattttcaaagtggaaactttaggtgcattagaaagattattactagtatcagtagtagtactatttttgtcttggtggttgttgttgtggt

SEQ ID NO: 199694 - DNA, 1501 bp, Cannabis indica
aactttagagagggaaaaaaaacctgaaatctccatatacttttatttatagagtgtgataaaattttgagtatttataagtatttaaattcttattatttattgatatttttaaaaaccgatttaaagaagagcttaataaattaattaaataaatataaaaatagagatagagagttttatgtagttcgagtgttaattaattctatttcacgagtcaatctattaagctgaatggcttgaatgtattacaataggatcttacaagcttaagaaccttaccttcttgctatttgtcctcacttaggttattctagcttagagaagaagaagcctaagaagatgtgaagtgaattaatcattccccttgcatgaaggtataaataggtatttataggctaggatctagattcagcatacttgtgatccggtagggtttctatgtaaaactaggcttactattggggtaaatacatgaaatacatgactttgggcccactagcaagattctggctcatgggacaaaggcttccgtatgtctagggaccacgcggtctgggatagatgtcctacatgcgccgcatatatgtactatattgtcaaaggtgtgtcgtgggacaaaagggaggttttctttttggtggtgcatgcattatcatgctctgattaggggacaagatctaatacggtgggaccaggtgtcagagggtagccacgtcatcctattaggcttctcaggtgcctcttggaataccctctccaaatgcgtcccaatgttcatccggagggcttcgtatattctttctcaagaatactggagaccctttaagattcggatgagcctccttctagaagcgagatttttgggctttagaggggctcgggcccatctttcgtctgggctagacttatctttagaaagggctttactccaagtcattccgagttaatcttactttgtaaacgccacgtgtcatccttacgaaaacatgaataatatttacccccgaagcttctggaatttgaagatggcagaagttcgcagtcttctttctagtttaccatgaacatgtggataatcttgaaaacgaagagaccttttcgccttttatgttttcgaatggagaaggttggggacctttggattacaactagcatcgtacacacaaccttagcttcttagttcgtgaatcctacacgtattgagaaagcgcgtgatgcttggaatattatgaaagatgactaattcatgtacagacacgtatcgaggcaaatgttatgataaaaaatgcctcaatcccaatgaaggacattaattactgacgtggtagattacctttgataaggtagatgagattgtaaggagtctaatgttggtttttagggttaatatcagaatcatagcgaaagcataaaataaaatttcggttttgaaaaaaaaattgttgaatcttataagaatcttaaaccttggatcccaatacaatataacataaattaa

SEQ ID NO: 199695 - DNA, 2188 bp, Cannabis indica
cgtgggaaattcaaaacctactgttgggatctcaggaagagaggaaggccactggcacaacaaccaaaacgagtgatggaggttgttgttgcggttggtactagcgtagatattgttgatatatttgtggggcagagggtgacgagtcaagtggggctagattgttggcttgttgagagtcgatgtctagcctcctcctcttccccagggaatttccttcgcacccaaagcttgtcgagctagattccttccaggacttaacatttcaactgttgagaaggtacctacagacataattaacatgggatgttacctggcatgtaataataaacccttaagcaggcgcacgtgaggggatgaggtatccttctaaaaaagatccacctcttatccctattaaaaagtgaagggagtgggtcagtctaataatttcctagcctcggagtcatacaagcttattcagaattacaacatgaccatactcgatccattcgaataagacctgtaagataaaggcatagagatacacatgcaatacaatcttaacaatgcacatctatgaacaagtgtcctataagtctgacacgcaataagtatcgaatccagcttgaatttagcatttctacctcaaacgcgagattatgcaaaggtcagcagaacgtgggcttgcttatagaattataaggcaggtaaaggaagggtgttggactctaagcctaagtgtgcaaggcttacccaaatgtccagctgcaacaacgtgaatggcctaagtcttcgtcgaacagggggtaaggtgagttgagatttatgagctttgagttctaagaagatagaagaaacttgctaaggttgaagaaaaataaaccttcaaaatttacttatgcatcgattgatgtccttaccctttgaactggacgaccctgattatctcaaatacagagtatcatccaatcgaatgacagagaagttaaaaagttatcatttaatgttcagccctaacacttgacgttcatcattgcctgctttgagtaatgtgttcattaaaagaagagttgttttaatcattcagctgtcactatgactacccttgagggacacgctcccacacgcccgtgacgctactaatcacatttaaggaactgcctacatgccacgttaacaatgcatacatccagtgacttattaactacaacaactcttggaatagaaaaggtcttagatagtcacacgtgccattggtttatttcgaaaaattgataagggttgcaagctctcggaccggccgtgtcacgtcctgaaagctttgggtaaatattatctgtgttgtacacaagacatagcacttggcatttagatggaaaacgctcaatcgaactttcatgattagagtcttttaaagacacacagactttaaaagatcttcccaagcctagggccaaacatgaggaagcttacttacggtatcatatacttctcgaagagcaggataggagcgtcctacctggatctagaagggcctaacgaggaggcccattttgagaaggtctcgaatacgttctagtgagaccaaacatggacactaaccctcatgggtgaatgcaaatgtcaaccttttccatataacatgtcatcaagtgatggttacacttttcctgacataatttgatctcgttccccacgatcaagcatggtagtgcgcgcatcactaccatctctttaccaggtgaacaatacagacttctacgtaaaaaggaaccaactttgatagacatgtgtcctttcattttaaaggttaaacctttaagagacacgtgtctgaagcggtacaaggtggtgtccattatctagttgctacacgcacaggcatgatgctacccacgagatcaaccagttagctctacattatatataatttaccccaatagtgggatcgaagcagaaactctaggtgggtttaaggcgacccacacccatcacttaagcctataatacctcattccttttaatgcaaagggacaagccaaccaaacacatagtaaaaactctgcaaaaaatcatcattgatcttctttttcttcttagaaaataaattaagtgaaaagagttaaggtttcctgcataatattaaattcatcaaattgctgaacgaggctaatagactgacttatcactactacaatattagcct

SEQ ID NO: 199696 - DNA, 637 bp, Cannabis indica
aaattatatacatgggcatacatatatatcggaaacagcatgctatgctatcataaataactaacattatattaatataattttgaatatatatttatatagatcaagtggtttgtaatttattaaaagaatatgatattaatggagtattattattgtacactagtgacgaactcagaatttttattttgtgtggcttattttatcataaaaaatatttacacttacattataatcactattattatatttatttaattttgtaggaaattttcttctattttggtccataattatcaaataaaaaaaattacatttaattttttaaaaggcaatatttttgttactaatatgagtggattcgtccttggtagtagcacctttaggcttgtcgccttgcgattcgctatcgatactccctaaaagttattatattaaattatacgagacccaatacttagttggaccaatagcaatattaacacattatttctctaatcaaaagtatattaattggacgaataaagaatataatgatgcaagcatatatatatatatatataaatattatttgctctgtaaaatatagatgcatggaccataacttactaactagtattatagtaacaaaaagcat

SEQ ID NO: 199697 - DNA, 728 bp, Cannabis indica
ttaatgtgctaaataacaataacacaattaatactcataattaagtaatcatattatatatatatagattagtgaaggtacctctagagacaacacatggatcatgtcgaccgcgagtgatcaactctgtctctgttttatctcgtgtcactgtaagttgttttttctgaacatatatgaagatgatcatgatcaaccattattttatacttgccacaattgaatttttttgaatattaatttactgaaattaataaaaaataacactagtagtactaatgttaatgatttgatgagatttctttgaatctaataatgatttattacgagacttacagcaatagtagcagttggcttgacagcaactctcatgtttatgatttctccattggatactcctccctacttatacaatgtaattttaatacaaatattaggtttcttcttattattattattgaattttagttacctgtattccacctgatcgatttgtctttgttctgattctattatgttcatccacaaagaactcgtcattatgttcacttccagtcaaatatgtgcctgttatgaataccatttccaaacaattaactactctcaatacttaaaacaaaaaggcaaacccatgtacttaaaaaattgtccttttctaccttaattagttaccatatcacatgtgcgtaactaaggcctgtttgacattattttttgttttttgtttt

SEQ ID NO: 199698 - DNA, 588 bp, Cannabis indica
atctctataaatttttaaatattctcagtaatttatagttccgaacacagagttcttgatactctaatttacctcgcgtgtttagaaaacttaaaacatattttcgacattataaactattagaaatttttcaaaaacttataggaatgatgttgtaactgtaaaaaaaattgaagaaaaaaattcgatatgtattttcaggcacaaaagttgactaaaaagttataataagaagctgacggtagcagtcctcttttttaaaacacataagagttgtgttctatttatttcattatacttttttgtaattatattatgatgactttctccatccctcttgaccaggggttaggtttttttttcttttgttgttcttttcaatgttagagatggcatcgactttatcgtgcgaatctctagtgctctggccaagagggcggtgatgggtttcagcatttgtgtgttcaatgtttgttgggggttttttgactccatcattcccaagtttggctttgttataggtagtgaccaacctactccatgggggtatcgctcgcgttttggcgaggtggtctccagaatcattgt

SEQ ID NO: 199699 - DNA, 629 bp, Cannabis indica
tacttttattgtgggctccctaaaatacgcagcatcatcacctccatattatgtctgttagggaccaacacattcaccacatttcaatgactttcatcttttaattttatttatcacttgaacttttagtcaaaccatttaaaagcagggattcactaaaatattcattagaaaagaaaaaaaaaattgtttggtgaaaagctcacatcctctcctcctccttaatcttactttgatgattatgactcaaatagttgtttcctttatgaaaatgagttcaattctgatcagtgcacagagctaacggtttgaagcttacaattcatgaaagtcccaactcaaaaaatttatttgcccacaaaagatttttcaaatcaaacaattatacattattaactcatcattgcttttgagtaaccaatgctttattttagccatattcagtagtttctaaatattcactataaattaaaaaaaaaaaaaccaaatattcactataaatgagtctctaatttgtattagttgtatgctggccactaaaagggctgatattttaaattctatattgacaaaaatttctttagcttgtgccaatggttgtgcccaaacaataaaattagaaaaaagtc

SEQ ID NO: 199700 - DNA, 1602 bp, Cannabis indica
actcgaaacacccggaatcgactatgaagaaacattttagccagttgttaaacctacacagtgagagttgtcttaagtcttgtgttagatgcattggccggcaaacaacttgacgttagaatgcttttcttcatggaactcttcaaaacggtatatatgcagcaacctaaaggattcattgatcctacaaaaccaactcatgtttgtcaagtacacaaagctatctacggtttaaacaagctccccgggcatggaatgaaaagctcaagaatacattatactagtggggttttcaattgtccaaatcagataactccctttttgtctatggcacaagtgcttcactagtctatttattagtatatgttgatgatatactaataacaggcacaagcaccaaactaatatctcaattaatttctgatttgaacaaagtcttttccctaaaagacttggggccaattcactatttccttggtgtcgagatttatagggatgcaacaggtatgtatctctctcagacaaaatacatcactgatctcctcacacgattgcatatggaaggagccaagagctgtccaaatcccaccaactcagccacaaaacttagtcttacagagggtgagccattccaagacataacactctataggagcactttaggtgcttttcaatatctgagtttgacacggccggatgtggcattcatcatcaacaaacttagtcaattcatttatgctcccaccactattcattgggaggcatgtaaaaaattactgcggtatctaaagggcaccattcatgatggcttgtggctgcgctcatcagattctctatctttacaagggtatagtgatgctgatcgggccagctgtattgacgataggagatcgactggtggatatgttatgttccttggctgcaatctcatttcgtggtctgcaaagaagcaacaggtggttgctcgatcgagtactgagagtgagtttcgtgcgctcgccaatgctactgctgaacttcggtggcttacttctctgctcacagaattgcaggttcctttggctaaaactcccgtcctttgggttgacaatcaatctgcaacaaccttagctgctaatcaagtcttccatgctcgctgcaaacatatagaattcgatctccactttgtcgagaacaaattttagctcatcaactggtcgttcaatatgtcccatcacttgatcaagttgctgatgttttaactaagtctttaacaactgacagatttaactatcttaaaagcaaacttcaaatggcttcttcaccatttcgtttgaggggggatgttacacatactgttaaatctgttagttagttactgtatcagttagttagtttttacagtttctgttgttttcttgcaacttgtcttgtactcaaaatccgtatataaataacagtgttagccaactataatgttaagctcttttggcatttctttcttcttgtttctctgttggtttttacatctggtttgtaccacttatgttcttgcctttgctctgtttacagtctggatgtattttactcctaaatagtgatgtatatacatataatatatat

SEQ ID NO: 199701 - DNA, 2708 bp, Cannabis indica
gttaatctaggtttctttggtgcaaatttatgcaggacttttcttacgtgcatacatttgagggccatgaacataaagttatggctatagtttatgtggatcaagaacaacccttgtgcataagtggcgatagtggtggtggagtatttgtatggagtatcaataccacacttaggcgtgaaccattgaaaaaatggtacgagctgaaggattggcgctatagtggtatacatgccttgtgcttttcaaatggatatgtttatactggaagcggagacaagtcaattaaagcatggttattacaggtaatggcttaacatagtctcctttagttgcctttgcttattcccaactgtatagtcatctttcttctaatgttaatttaggatggctccctgcaatgcactatgaacggtcatgcatcagtagtttccacactcgcagtatgtgatgaggttctctacagtggtagttgggatggtaccatcagattatggagtcttagtgatcacactgcgttgactgtagtgggggaagactcatctgcactgatctccatcttgtctctagctgttgacaggcacaacctcattgcagcttatgaaaatggaagcataaaggtttaaatttccttgaacctcactttatttgggcttataatttgtttcttctggggttggggtccaccattcttcttttaatctttagtacattgttatataaattataatgtaagacaattcagtacaatgtaccaagcagttcatcactgaaacgtgttcggtttgctcttataggtttggaggaacgaggtgcttatgaaatcgatgcaactgcatgaaggtgccatttttgctactggaatggaaggaaaatggctgtttagtggtggatgggacaaaactattaatatacaggtacacctgtgaaatatatattctttcggaacaatgagattgatttgtttacgtatcccatttcagaatcaaaagttttgatagtagttaatgatgtgcaggaattctctggggatgaatttcatgtcgatcccagacaaattggatccattccgtgcagttctgtcataactgccgtattattttggcaaggaaaactttttgttgggtatgctgacaggcttgttaaggtatgctttacgttatattcttccactatgtccactaatggcaccactcgtctatttctcaatgcttgatatgtctgctttaatattagtatgaaaatgaataaaggtctaatgttggacttatttgttcatactactatatgagtgttatataatagcattttaacagaaacattttgctgtaaaggcttttctttggaacacataaaaaactaagtttaccctacatgagtctagctcaattaattgtgtgtgtaagactgagattcaaactcttatctgcgttaatttaacaaattggtacccactaatagtttcttactgaaatgaatgaaggggagaggaagaaagtgagtctacatcagaggaatatggtttctactttgcttggatatagtgttttctttttgttttgtctgctattgattctaaatattgtatatatattcatgtgaatcgtgtaggtttactactatggaaaatgagtcaattctagcaaacgaatagggttacttccttatctgcatcaagtgtctggccaactccaagtatgaaaaattcaatattgaagaatggtctgcattggattcggctaaatcagagcttttcatagttgtaagtaaaaaaatttgttcataaaacaaacaaactctcatcaaaaaaatatacaaaagtcaaaagtgtgacatcgtaaatataacaaactaagatatattactctaatttgtgataatacataaatgaatggtttatgacattcagcctaacaatatagaagatattatagttatagattgggcatttaaataagcacaagataatttttcactactctacttgaaattgtatttatttttcgttatagaacaagccacaaataaataatatttaatatttatttacttattttttgtatataagatcagtcccttcatataaaagtctgatcgtattaattattttgtaattaaaatgtgtatataatatgtagtttatttattaattagtttgtacacgtgggttttgttttatcaatctcaaaatttgaaagagcattgctatgaggtataactctataattaattagtggttttttataatttattaatgtaaaataagtggaatttattattaaattatactaattgtaatattataactttataagggtattaggcaccaggtgcctttagcattttcaatattccaaaagtcattagtttaagagtgaagggcaaatgtgaaatcacattattaatattagaactagattaaatatgtattgaagaaatcccttgcaattttttgatgaagttgtagttctaatattcacattatgtatatattgtagtttgatctttgatgaaattccatacttgcaaatttttgttcagacccaataatgggtacttaaaagcaatgacgcaatattgattgcacatgattttttcagaactttttttttttttttttatgtagtcgggttggatgtgctataatttttataacccatctttgctagttgaattttttttttttattattattatgtaatttgcca

SEQ ID NO: 199702 - DNA, 1352 bp, Cannabis indica
tcatatggagttcaaatgggtactgggcaagcggttaaaggagcgggagtttgtgtaggagtgcccatctctttacaaacggtagaaatcattgatgattttctacccttagctttgggaagcaccgatgtaatattgggtgttcaatggttggaaactttgggtgacacttaccataattggaaggaaggggtcatgagattcaagaggggtggccaaaccgtggagttgcgtggtaatccggccctccacaagactcgtgtttcactaaagaccatgatcaagtcaattaaggaagaacatgaaggtttatgggtggagcttggtcacactaccaccgtgggggttgaggatgacattccagccgctatttcggagctattgcagcagttctcgagtgtctttgacatgccaaaccaattgccaccccctcggcaccgagatcatgctatttgccttcgccccggagtagccccgatcagtatacggccctatcgttaccctcatgtgcaaaaggatgagattgagaaactagtgagtgagatgttgcaaggaggaatttgtcaacccagtacgagtccattctcgagccccgtcttgttggtgaagaagaaggatgggagttggcgtttctgtgtggactaccgggcgcttaacaaggaaactattgctgacaagtttccaataccggtcattgatgagctccttgacgagttgtatggcgctaaggtcttttcgaagctggatttgaaatcggggtatcatcaaatacgggtgcgacctgaggatgtgcctaagaccgcttttcggactcatgagggacactacgagttcttggttatgccgttcggactcaccaatgcgccagcaacatttcaggccaacatgaatgaaatctttaggccatatctgcgtcggtttgtgcttgtgttcttcgacgacatattggtttacagtccaaccatggaggcccatctttcacacttacaggtagtcctggataccttggctaaaaaccaattttatgctaacaagaagaaatgttgttttgctcaacagcaattggaatacttgggtcacattatatctgcttctggggtttcggtggactccaacaaggtccaagcaatgttaaattggccgctgcccacaagtttgaaatgtctccgcgggttcttgggtcttacaagttactaccgcaagtttgtaaaggggtatgggtccattgcaaggtctctcacggagcaattgaagaaagatcgattctgttggaatgatgaagctactgctacctttgaagctctcaaacatgccatggtcaccgttccagttttagctcttccggatttttc

SEQ ID NO: 199703 - DNA, 1418 bp, Cannabis indica
ggttttttttgcaaggataaccgttataggttagagaataaaatgtcgaaagacaaaagtaaaaagattcatgtcatccaaaaagcttactatctattttaatgacatgctaaaccaattaatgggccacaacattaacactgtatcttacataaaaaagagataccatcagaaagttaggcaataaaattttaatataaaaaaaaaaaccggctcaaccaacatatttacaaaagaaaaaattgatcaatattgaatcaagtaaataataaacatattaaaaattgggaaacttacaaaaatactaaaatttgggttaaattttacaaaaatactgtcacacggaaaagttttcaaaaatactgtgtttttataaaacactagtagaacacaaaacagaacagctcaaaacaacagtaaaacaactaaaaaacactagtagaaagggtttgtgtgtgtgtgtgtgtggtttttttttttttttcttttcacttgctcaaattcaactaattcccttgtttttccaacaacaaaactaaaaaaagtttggccttaacaaaaactaaaaatgtttggagttgtgaatcataagatgaatgaggttctatctcaaaatcaattgacaaggggaggagtagccaattcctcttatatattctattatctttaaccatctcaaaacaactaattgataatgggaggagtagctcattcctcttatatattctattatctttctacacattggcaatgtgagattctctaacaaaaaccatggtacgctaaactcatgaaaactaattttttgatggtaaaatcgattaaaaattattccgcttattttctttagttgactactcatgtgtgtacatatgccatgttttaaatgattcaacccgttctaattattttaaaattttaaaaataattaaaaaattaaaaataattaaaatggtaaacaagttttattaaaattaagttagaattaggttcactgataactgtaataaccgaaagttaagcatataaactaacaaggggactgaagatacatattggaaggaaaatagggtcaaatcacaaccaaacaaccctcaaccattctagtcttcggccaaaaccaacctcaagggctcgataatctctttattgctctctctatttcgagtaccaactgtcataactgaattttgaatcgtcggttataagggtccaataatagtttaacatagtctttttagattgtactaaaaatcagtacttaaatgaaactctaaatgattcacttttttttagcaaagggaaaaatttgttctagtttgacagactcacaaacagctctaaccgagttacaagcaagatcaaaaacacactcatttcaatttcaccaaatagcataggtggcgtttggtaacatt

SEQ ID NO: 199704 - DNA, 543 bp, Cannabis indica
ctttattatcctattattaattcaaaccggataatacaaatgaatctttcattctttttccaatttcttagttgctcatttttcatttggaagagggaactaaaaactctttataataaaaatattcagactgccaaatagtattaaaaaaaaaatacatttataaataggaaaatttatagctttaaatccataattattattatgaaatactaactcgtcttctccagtgccagatgaaggaacattaagagagtcatcaactttaattaccgttcatgttccatactaaattttaccaactacccatcctatctcctttatattcttcacaacccatctttgtctcattagaatttttagtgtcatgtttgggtgcccagttcaggtacatgatactatcattttaccgccttgacaattagacacccaaataataatcgcaacaacccaattgcaagcaccgagctcgactaactgagctatatcccccgagccaagtggaacatgcacgaaggaatcaaatgcttcttctattctttt

SEQ ID NO: 199705 - DNA, 627 bp, Cannabis indica
actactgcatctttccatattctgcgcacaaagccatcaagaatgttgattggagggttagctccaattacgtaacatactatagacggctgccaatattgaacctcctcagcaatatcatcaaaatcaatcttcaccttcgtatcccttctcgcaccagcatcagcatccctcgactgtgattcagcagccttcaattcagttttctcaaaacaagattccaagtttcgtgcgatattggatctgagaattggaggagaaggattcttccccaaactcacatcctgagaagcacgatttgcccccgaaagccagtcggagaaatccagatgaatctcactagcaggtgacggtacaacatccgagtactgttccattgcctctgggcaatgttccattgcatcaacctcctcaatttcctcagtaatctctaaatcttgaatcccaatcaaagcatccatggacctagtcttgattaccctgtccgaagacgtcggaccagctttcttccccttcgatttggctttcccggccattttccccctttttgccatagcaccggcgaatcacggaaagagagagaaaaccagagaaaaacccttgctaatggtactaattattggttgg

SEQ ID NO: 199706 - DNA, 1010 bp, Cannabis indica
aaaaaaacatgtcacattagtaacattacacgtgtaagagactacactgtgcgtttcgtgttcgtcttcgccgatttggacggacgacgacgacgacgacgaaaaagaaagaacgagaatcgcagagcaatgatagtctgcagagccctcttcaggtatgcccctcccctgaaatttacttcaattactcaccatttttctttctttcttttcttaacttatcactccctcaactttgaactgtttcttctctttccttcgttctgtaatttatattcgcaaaacccgcttaatttttttattgttggtcaaattagaatcaagcagttacaaacacttacatactatcacccttgacttatctgaagatacctactatgctttatcgtgttaacatattttttcaggtcaaattacatatttttttaataaatatatgtggattttgatattgttgcagagcggaccgtgttctgaaattaaccaattcctgtagtgcattgaagccagtagttcatgttcaggttggattatttatttatttatttgttttatagcaagaatttagtggaggtactttgggtttttgtttaataattttgtagtaaacagagaaataagattttagaaaagaggaactttgtagtttactgaagcttattgcacttttctgtttcgtagcaaaaaaaatttagaaattaagaacatttattactaaaaggataatttttatcctttttcttctatacagattgtcaagaattacattgtcaatgaaactgaacttctgatcgaattcaaagttgcctgttagttttgacatttgtgacatcgaatcgtgcgacagggatatggaacttgtgatattttgaactataaaattaaaatgaccgatagaaaggataagcaccatcaaggagaaaggagtaaaaagctcaagcatattaatcttgcttggagaccagtaaatactcaagccacttcgtatcaaggtttagttttactttgac

SEQ ID NO: 199707 - DNA, 1579 bp, Cannabis indica
ggtacaacaatgatcaattatatatataatcaactttttatttattaattaaataattttatttttatattaatgtaaaaaaagtcaattttaatttttattattgtaattaattttgtaatccacatttaatttcttcacaacccatcatatcatatatgcaacaaacaacaacatcaccatttgatttgattaaaatattacatgcacgtacgtacgtacatttctatatatttacatataatataattaaattatgtacgaaatatatatatagttggatcaattaaataatattatttgtaactaaatatagtaattaaagagtcaatatcaccaagctaatctgtctttgtttgaataatttacttctactatacgtttataaactttttagggttatttattacttattaattgagtttattggtcaagaccaagttaaatgaaggtgatatatgaccatgtatggtataataatcagtcattaacatatatatatatattggcttttttaatttatttattatattattacaaatatttttcaaaaataacattttgaacaaatgttaaaaaaaaaaaaaaaaaaaaaaagcaaatactttttacacacaaacttagtctctatgattctaagaaaagtatttgtaaagattgttatgattttagctacttaattaattaattattattattttgtaacaaattttctttaaatatttttagtagttggcttttttgataatttataatgtacttagaaattatttagtttttgttattttatgttctctatatataatatatgtttaatatattaaattttataatatatttatactatatgtattaatatttttacatttactatttttttcttactttaaattatttatatataatttttttaaaatataattaaatagatgcaaataaaattagattaaatatatatatgtgaatcaatatttaatataattaaatccacacaaatatatatattgcactttgtgaattagattacatattttataaatatctctattattacataacatttaattacatattacttagttgatttgtatagtgagatattgatagttcaaagtgattattattgaaaaattccttgtgtgccgtttagtcatttttagtgatcataaagtacttgttcattaataattaaaaaatacataaatgcatgtttgatatatatatatgattaattataaacctttctacttataaaatcataattaataaatcaataaacttattcaatattaaggctagttattacttgatcctttcttaaaatggttttttaaaacaataatacataattataaaattttgaggcatattaagccggcaagtagtgttattagatcattgacataatcaaagactccattccatatctatgaattagtcatatatatactttttccattactattttttatatatatatatatatatatatatatttttattgccacgatttagtaattttaattttgaacaattacaattatcaaattgcatcctttatttttttttttgttaatta

SEQ ID NO: 199708 - DNA, 545 bp, Cannabis indica
aaaaaaaaaaaatcaaaacaaccttgagcataacgctgttgccataacgattgcaataaacatatactcaaaaatataacctcaaaaaacgagatttgatctatattttaccttgtcagtcagcaaaattttagaacttccaaaaattattttagaatctccaaatgccaaggaacctataggacaaataaaaatacatttcatcatatatgaccgaagagctatatattcattgtcattgtgtaccaaatgacaatcacaatttattataaccaaaatgaattccctaacataggaaacgtttattataatttaaagtgaacaaaaaaataaaatttgaatatatgaacttttaagtaatgtgtttaatatatatatatttacttcttgacaatggcttatatatccacattccacattaaataatagttgattagtttaacgtttatatatcacctaaacacctatacataattcaattcaaatcccacatgtataacggtaactgtaatttaaatataataaggaaattttttctataagaa

SEQ ID NO: 199709 - DNA, 2960 bp, Cannabis indica
tatatatttataatatatatcatgttaccactaatgttgttttaatattgagtggtgcagttacttaatttgttgatacgtcacaattcatgacttaattatactatagttaatggttcaattaattgaacatgcacacgtgtggtgtgtgtaaatatatgacttttcttatcgatataaatacctaattaataaaactgtaattattgtttaatttcatcagtatgaatttcgttagtgtttaaatttataatcacacttaaagattgtttagctgtatttttagttttcaatttttaaaattgtattttcaaaagtaacaataaaaaacaactttttatcattttaaaaatttaaaggtatttggtacaaattttttaaaattattttttagattttttcttattaagaaatttaatattctacatcattccatgacatgaacccatcctacccaagacccgaccccgacttgaacccagacccagcccggacccggacattggacaccgaacctgaactcggacaccggaacccggacaccgaacaccgaattcggactcaaacctggactcagacccgaacattagaccctggacccataccctgaccttaaatcccagaccctaactccagacccgaacccgaacctaaacccagggctaggtttgaggtccttggcgggctccgagtttgaggtccaagttctctggggttcgagtcggggtccggggtcgtggtttggtgttcgggtctggagttcgagtatggggtttaggtccgggtcctagtctgagtttatagtctgacttcaggatctaggtccagtgtttgggtccaagtccaggtccaatcgacccatatatattattttttaaaaaatgttttttgttttttaaaattgaaaataatttttaagttatgaagccaaataaccctttgctttttgaatttgttgaaagaagatttagaagtaattgatacttcacatgcacattttcgtccaaacctaatgtctagataatgggtctacatgcatgtgtcctatttaagatactaacagagtctatattgacgaaattggacgaatattacagtttcactaaggccaactctaatgggggtatctaaagtttttaagcctatccagatctgatccaatccaatccgatctatttaatttcaatcattcaatcgatccaacatctattgaatattggattggatcggttctatccattggatatttttcatgtatatttattggtttaatttagatttatcaaatagtttaaacctaatattttttggattcgatggaattcatctaatattttaaattagttatgtattagattagattggatccatccaatctaaaaaaattagagtaaaattttagtacatatatataccttatgtataataacataaaatttaattactcatccaaattaaatgaaaatactagttagttcgattggatgttagaagtattgaatttttagacaccacacatccaacattcgatctaattcaattggatatttaaaaataacaataatcaatatgatccgatcacaattggatatccaatatttagtggtcgattataattgaatcaatcagttattattggatcgatacatagacctctaagatcagtggcctatataattgactaaaattaattagtggtccacattgtattaagagagcatgataataaggttccaaaaggggtactgatatgccccttaatatttttaattaaaaaaaattagaaaaaaagtgtaatttgctaagtgtatcaggtggaaaccaataatatggcaactatttttattgacctggtctattgaagatgccctaatattaagtacttataccgctataaaaaatcattaatttcagttacaaactgatcaaaattgaatttaagatacttaggtgcaaatatatatattttttaattagttcataacctacaaatgttaatgtaattaattagaaggtattatgaaactcatactgttgttcatcaaaatataatatataacacatatttttacctaaaaaaaattaaattatagacttttttgtagcacataattaattaatagactttatgcatttattatttacacataagttatactactcgtcaaagttttttaattaagattaatttcaacctatgaatatttaaattatacattttcacccatttaaaaaaatatattttttcattttatttatttgaaaaattaattagcttaaagctcttgacttatttttttctttaaaaaaaattacaaatgcattaattattacatgagacattttgcacgagaggttagaataatacactttcttgtcttctttttttggttcttatttccacttttttggcgacaacttttttaactcacattcaactaatcatataattaagtaagtaattaattaataattctttagaataataactttttattatttgtttaattaattagtagtgcaactaatggactccaatgagggaaatgtatttttatatatactactaaaatttattaaaaaggatttaataataacatttttgtttaattattaattaatggtaaatagtatatatgaaagtatattagtagtggttaataattagtacttaattgattattaattaagccgcttgaccaaataaaaactaatatagtccttcaaaaaaaaaaaataaataaataaataaataaataaaaactaatatagaataagtttttgtgccacacactcacaacatgccacaaattgaatacttcaatgtctctcatcactatatatttatttatatttattttggttgaaataatcctttttttttttcttaagtactattttgtatttaattacaaaatgaattagtcccctaaaaaaaagtgtctttttgccaaaagact

SEQ ID NO: 199710 - DNA, 2903 bp, Cannabis indica
  modified_base (36)..(36): a, c, t, g, unknown or other
catttttttgaggtgctcctctcaatatgctactcngttgactgaccccaacccagagaccctcttgtgcctgaaatcgctcacatgtacaagactgacagagccaagtacgaagccacagctcgcagctggacacagaagtatgcaatgggatgatgattcaaggtgaaagaagtctcagcatttgtagaagacccacaaatgcatcatggtttccatctcctttttaggtctttaaggaagaggaaatattggaagtgtattttcattttctgtttttcttcttttcttttatctctttcttcagttgaaatcggcaaggaacttggatatcttttttgtgaatatcattttcagatattggagatggaaaacaaaacaaaacaaaaaaaaaaaaaaaccaaaaaaaattgtattgtatcgttactaatgttcttgtcaactgaatggtcttgttgatgtgtaactcttaaatgtttaagaaataatcctttgtgggactattacatttttattaatttattattaattcccttcgctcagttaaaactgctattacaatatacgagttgaattaaactaaataattatgtcttattacataatgaatacaaattcgtacgtttgttcacatactttgtacaacatttcaaagtgagtcatcacatgttaatgctgggttcgatatggggtatattatcaaatggaaaatttggtgatatgattaaagtctaacaaaatagtagagagaaagacttcaaagttcagaggtcattcatcaccgtatatgttatgtatttcttaaacaggttaattcattttatatttgaatttaaatttgtaatttacctctcaatctatttttttttataattattaaattatatgtatattttatagttttaattatatttatataattttttaaccatattttataaataatcatataattaaaaaaattgttaatattaatggaatttgaatatttacttatgaatacttaaaatttttatatcaaccctataaataagttaatgtataattttagtttttcatatttcaatagttttaatcatataattataatatctaatatgatatttaagttttattattattttaattttttgataattgataaattcatatcttattaataatatctaataataaattataataagaatttttaatatgtcatgtcctacttttcgagctagttagtctattcgtacttacatgtcatgcttaaggacatatttttcgtactctgtcgtgacaatttgtagcatcgtaccatgtcgtacccatactcgtatcaaaaagcccagcctatatttaggacacttcatgtttaattataaggccaatacttattaggaaaaagagaaaccaatactaattcttcgtaattgaaaaaatgaaattgagccaattagctcaattaatcacttataaacaaagttaattgttttgtatgtaacttgagacttcattttttaaacagtatatacgatacaaataattggtttaagatgctgaattattaatgagttagacaaagaagcttggaaatatgaatgagattgcataaccaatgtagaaaacaggtgagtcctctatacacaaaatgtttctttgactacttattacgagatttgatgttttcttttgtacaacgcataaaatacatcacgcaaacaattttgacctatagtgcacatgttaccatgctttgaccaaaaaccgactaactatatatatagattaatcctctctctatgtaataaaatccctttctagaggtagacttttctttatcttatatttaatattttatatataaaaatataaatggaaggtactggatttgttatatggaagctgaaagacacaatactaataaagtattgttagttgttagaacatgtaagataatgaaatatttaatatgaaatgtctttgttatgtacgtataattttgctagattcctacttaattagacaccttcaagtatgacattgtatagtatgaatagtatatatacatacatatatacatatatctatattctatagtataagtatagacttttatagaatgaattgaaacctatcgcttgattgagaagcaacgattggggggtcaatcagtgagtcctactctctggctcccgaaacactcttattagttaaaaaaaatacatcattgctcacgtgcttggtgaaatgccctttgcttctttgccaagcattaaccaactctcaatctactttttctctttagagattttctatagttgtctatattcaaaccattccatgttaataatatcatccttttgtcacctaaaaaatcttttaattcataaaaaaccaaaatgcgctttctttgtttctatcctaccaagtattatatgaacctcaaatattttatatatccttaattattggatgttctccagttctaaattaattgagatttttgccttttaaattttaatatatattaaattttgctttagaaaaattttaggccattagatttttttttcttcaaattattgagattattaaatttaagggggcacgattttaattatagctgataaataatatttttggtatatgtcaaagtttatgagatacaatttgatatgtcaaaagttcaaaggacatttagttgaaagaaaacaaaagaagaagaaagtttgagagaatctcagttaaccacgcttcttttatacacttttgattcagtttgaaagaaatctcagtgtgattaatgagctataagaactttatttatacacttttcatttagtataaaacaaaaaatttctgttataacaagattattatagttagcacaagtgaacaactaatactaactaactaca

SEQ ID NO: 199711 - DNA, 2249 bp, Cannabis indica
tttttttaaaaaaattttaaattaggtttgttgcttgttttctgaattagggttgttgtacgaattggttaggtgtgttagagttttttgaagtttgtgtatgatggttttagtgattttaacctgaattgggtgctttttattgtgtttgaacaaagtttgagctttagagctcaaactttgctttttcatagtaatttgtgtttatgagattattgttcagttcttttgcatgaattatgttcctaatgaattaaatatgtggtctagagagttggaatcgaattggggttcttgcactgaaccagtcgaccagtttagttttgcactgtagaaccggtctaccagttccctttaagcataccccatagaacttgtttactgattgggattcggtttaccggttgaggtaattttgggcatcctagattttcatgttttagcgatatttagggtattgccatgttatttatcgatagggaaaattttagttttaattttaagtcttcgaaaagtgatttagcgtatcactcatcaattttatgaatattgtgacttaggggcctgtaaatcatcgagcagcagttctactcaggttgaccgacacacctaaatttaggatcaaggtaagattagtataataatatgcatatgtgattacatgttttgtatacatgtttatgatttcctgttagattacattaaaatagtggtattagtatacatagagttatattggataccgatgaatgtatatttggcataagtactgattaatgttatcacatcggtacaactagagtaccgagtataggctgatattatggtcaatagtactgtcgtacgaacgttctagactcaatacgcgtgggacgcgggatagttatgattaggtgtatgggcgcttaattataatttgttttatatttatttatgattatacttttcttactaagtctgttgactcactgtttacatatgtaggtatgggcaaagctaaggctgagcaacagtaagtgcgagcagatgaagattgtttatatcggagcggttagacctggagcatgcgattttcgagacagtatgttgcattttgaataatcgctaggcgacaacttttgtattttatattttgtcatacggttgtaaatattttaaatatgggatcccagtttatgcaaaagatatttgtttaatttaaagggtaatccagtaaaattttaattaattatgatttttaacaaacccgttgattagcaacatattgcacaattaatataaaattttgataacatgcctaaactagtagggtgttacattggtggtggaagggatttgttggatatcgtttgaagtagtgttggatctcggtttggttgccagaggtgggtggctttggggtttagtggtggcttctttgagatggttgcagtggtcgtgactttacactttggggatctcttccttccatgatcgtggactgtggtatgtctttttttttttttttgataaatcagcaagttttattattaatccacaatactttgtacaatcatttacaatggcttacaatgaagagcatctttgattcaaagatcttatgtacaatatcacccttttttctccattttttttttacaaagaatgaaacctatctctatcttgttgaccaatcttttgtggccaaaacaattctattctatgttttacactatttttgactctttgtacaattgcctctttactttctagatgagtattccaaatttggtcatttctagcatgccaaatggaataaaccaagcttgcaacaacagctgccatagttttcttcctaaacttgctgatttttgccttatgaatccactatggtatgtctttgggatcctttcttgcatttccaaccttgggcactccttggaggttaaaatcggaaagggtaaaatgtgggtctggccctcagggaagtgcaccctcgtgttattctgtctcttgctcccgggggttccgatttggtattgtgttattgtctcgatcattttgtttggttgtttgaggccttctctaggtgcaagtagtcgggtgttttttattccgtgttataatggtgttttgcactatatcctttgttggctttgtgcctttttttgttaggatttcctatttttgtcggtatggtatgctattgttttggtcatttccttgtaagatctatgcagttttattttttcccaacttggtaaaactta

SEQ ID NO: 199712 - DNA, 1204 bp, Cannabis indica
acatgattagagagacaatatgatggctgaaacccattcaatgtaactttgcttctgaaaattcccaaccaactcgatcatatgccttactcatgtcgagtttaagagccataaatccttccatccccacccttttcctcttcaaataatgcataatctcaaaagaagccatgatattatccgatatcaattggccaggtaagaaagcactttgagtgttagagattacatcaggcaaagccactttcaacctgttagcaagaactttagagataatcttaaaaagaacattacacagggaaataggtcgaagatcactcattttttccgacatttttttcttagggattaaaacaatttttgtatcatttagagcatttagaaagaatccaatagtgaagaaagactgtaccaaagtaacaatgtcatcacccacaatgtgccaaaatttttagcaaaaccccggggtcattccgtcaggtccaagagatttttcaggatgcatttgaaacaatgctttcttttttatcttctctaatgtaacatccccaagcatttgttcattttgttcctctgttattttcagttaaatgcattccaccacaactctatactccacggcttcatagttgaaaagttggttaaaataatcggccaccacggtaggtagttcatcctcccaaccgacccaaactcccacattattcttgagcttctgaattaaattgttacgccttctcgaagtagccttggcatggaaaatttttgaattttgatccccttcacgaagccacaattgtttgcttctttgcttccaaaatattttgcgttgcagcgaaatgttgttaagatttatatgggctgctttgtagttactaatagccacagtatctctccctttcttccaatggcaaatttcaactttacactcttggattctttttttaaaattgcccgtataatcctttccccattcgagaagcacctcaccacaatttttaaccttatccataattgggctacctacagcttgagcccatgtatccttgaccacctttaagcacaaaggttccctcaaccacgagttttcgaacctgaaaactcttctaccagcgagagcacttgtatttacagggacaaagagtagaggacagtgatcagaaattgagacctcgaaatcgaacaattttacagtaggaaacat

SEQ ID NO: 199713 - DNA, 562 bp, Cannabis indica
attgtatagttttatgccatttcattgttgcttttaacgaggtttgatgttgaattttggtcctcgtggttcaattattttgacccttttctgtactgttaaagatgaactgggttttttttgtcaaaaaacaaagactagggttggattgttttctttgaatttgagttgttgtatgaaattcaagtcttttaatatgtgtttctcttccaagtttttctccattatgcaagtgaaatttaaaactcgtttagaaagcctttgagtttgttgattgagctactcataattttgaatccatggctttctttatgctggtttgactttggtagcctaggttcactattcaatttggtaatatgtttctcaattcaaacatataaaatataaaatgaaagaattttcaggactggttatgggtttgtttactttatgacccattttgtaaatcgactctctagttgtttttatatcggatttttctttggagaagctaacatttgaagttgagatatgttgccgactataaatttcatattttgccaaggatctcatatagttt

SEQ ID NO: 199714 - DNA, 828 bp, Cannabis indica
aatgagctagaatatcttgacaggttaaatggcatcgtttgactagggtcgatcttgtagtaggctcgcatacatcggcaagggtaattacatgtggaatatctttagggatactttttttatttattaattaaacccctattttaattggatttatacacgcaaattatgtagtataggaaaatatataagtttcccattttacttcttaatggtttcaggaaaccaattagatgtaattcttccctataaatagtggagtcatttcactatttagggatccgaaatgattcatttaaaagagcacctacgctactaaaatctctataaaagctcaaagaaaatcatgaacttctttcttattttctcacaagtaaatacaagtgaaaggggattaggctattaccattatctcgtggtcgaacatctataacaactttgtgttcatattgcttaattagtacaatttattacttcttagtcgctttaattgactcattgtcattggctaaaagcgaggtcaacaagtgcgtagttaaatgatgttgctcgggccaagctgctcttataaataacgacatttacccttaaatatctcatctataaaatgtcaatagcgagagaatacatctacctttatcaatctcttagtatgttctctaattatctcatcattttcctccagttgttttctaaatactaagtgatttggtttgaaaggtaaagtaggtaataagtgaatttcttgatctaaaaattttaggttttcatagtcaaaatcatacattgacatttaaatgtcatgtaaactctataaaatttgaaaaa

SEQ ID NO: 199715 - DNA, 545 bp, Cannabis indica
ctaggtgttaagtaccaatatcacagtgctaattaatattaatgctttttgtaagttatttaaagagaaagtgtttgagatttgatctcctccacagaatatttagttatatttattaccattaatagaatgggtagtttgcaattagtaactaaatcataataaatttattttaataaataacctttgattcaaatcaatattaatgtgaaatttctgtatacgtaatttgaagattaaattctctcattttattagaagattcttaactaatagcaactgataaattgtgtcatctgttcattcgtgttagaaatctagcactattcatacttttgatgcttcaatattagtagcttatttagcttttagttgaaagtattattagaatttttttttctttatctttgtaaacgggttagcttatttttgtgactttgctcgatcgatgagtaatttcttcaatcttatttccgattccatttacctttcaaaaaaaaaaaaaaaaaacaaaaaaaacctactacacatttattctattagtt

SEQ ID NO: 199716 - DNA, 2148 bp, Cannabis indica
agatctcaacaaatgatggcctcactatcttcatcaaccttatgatttgtattagtcaatcctataataatcttattaaacttgttaagagtatcatctaaagaaagagaagaaatcattctaaagtcatataacctttctagcaaattaatctttctagaaattaatggcttcatgttcttcaagcttgtttgaaatccctttacccatctttttctaccacaagctttctcctcgcactattggacaaatacatgatgatcgtgtagtaagccatctcatccatttgtgctttttcttctagtttcttttcaggtagtaatttctcatttccaagaactttgaagaccttttggtgcactaggatccctttcaaactttctctccatagtgcaaaatcccgtgttccataacacttctccaactcgaatctttccattgatatctttaattgttccttcaagaagtgcatcggaaagaatcttgattttgcgttcttgatcgattacaaagctctaatttgtgggaaatttataactaatgtgtagaatcaaatcaaccaaaacttaatcagcaaacaattagtaatacaagatttataaaccacacacaataacaagagattaaaacatggatgaatagagtattaaaactagaaataataaagtaataaaatcaacataaagatatatactggttcaagtcctatagatggatgtgatctatggttctactccagttctggaacaccaccaaaatcttctttattgattgagcaagaacaaggtacaatatagttgagaatgattctcggttggattctcaaaaattgtttaactctcaaactcttacctaagaatattttaatctacagaagagtccttataaaaagtccaaacctaatctctatcatttctctgtaactctgtctatctacctctcaatctttctctctcatgatcagctctcgagactcttttggtcttgttctttcctgaaatgctaagtgttggtggtatttatagatttatgatatagatcccaaggttgctggttgcaagagctaagttgttaagttagttacgacttaacaaacttagcaaactccttgtagtgaaatctccatgtcaacttaagttatagtgctcctggatgaaacgaccacttttgggactatgaactgaaacacaagctgaaaggtcttcctggataggaaaagtaatagctagagtcgactatccggaactcccttcaaggagggaacaaatagccatccaaaaccccctttccaaaggaagactagcttccttgaagacttcttccagatggacaagttagatttctgggaatgcccttcaggatgtcatctaactttccataaacagaacaaatttttgaaatatttacattttgataaaactataccacaaggatgatgagaaggttacaactcaaaactataactataagcaataaataaaacacaatatataaataacatatatttatatatacatatatgatacgtgagatcgatttcaacaacatatacactacaagtgtataatatgagaattaccaaacttgaacaaagttttatacctatatctaaaagttatcccctaccacaagcacttagaaaaaagagaggaatagaaatagctttttagatttatcaaggataaactagggtgttcataaaatactcaatgcaattcgattcacactatctaatctaatacaatccataaagtgcaaatatatacacttgtgcagaatggatgggattggaaaatctaaaatttttactttgtgggttggatgtttattgacatgtaaaagtaactgatccaatcaaattcgcatatatttatagatattttttaaaaaattatgtatacacctaattttataatgtaaaaaatagtaatttaaaaatataatacatatgatacaaatatatttcaaaacatagtagattaaatgtatatgctattcttatttgtaagaaaatataatctaaaaaaaaattaaatatttctcaacacatacaatttttttttcttgctttgaatttgttatttgttattttattaaatttaatttatttttggatacataaaacaactataatttgttttattttat

SEQ ID NO: 199717 - DNA, 638 bp, Cannabis indica
caactgatggaggagtacaaaaaattttaggaattatgtggcaccggagatcatttcttggggcatcaacatcgcaaagtgtggatggcttcgaagcttggagttgggcccatatctcttgcgaagctcaccacccacctaggacttattttgttgaattttgcatcaaggctggatcactcccttgcagctcttgccggttgcatacaagctatttattgggtggtttgtattttttaggtccctgggacaaactactctaaccctgagagatatactacatttctatgaattaaaactccaacccatgcatgaatatcctacaaaaattgggttttactgtttctagaaatacaaacatgcaaagtgtcccacgaaaacttcttctcattgcccagaccattgcgagtattgattttgcacaacagggtttcccataaggcgtgttgcaatactctccttggactttaaatttccaagtataatctttcactcctttttatttttatttccttgattgacttgaaagatgaccctattacaagatctaactcggatttgtttcttgcagagtcttttcccagaatagagctcacggatgagttaaggcaacaaatcactttctatgagcctttctc

SEQ ID NO: 199718 - DNA, 1144 bp, Cannabis indica
atgattaacattaatatctgatccgcttcattaattacaaacatatacctataagtatatattgttcaatttaatttgtctgcaatcaagatagtccttttcaacaacaaatttaaatacaagaacatctgaaagagtcactgtaaagagtcagagttaatagaacacaaaccacagactcatctcaacacatctaccacagtcttgccacttgaacagaccatgatgtgccaaggatcttgcgatttgaacgaaaaaccaaattttacggtagtcattaagaccatcgctatacataatcagatcaatatatgtaatccatagtccacatttcctaaacctgcaaacactatatatcgaacgtagagttattattagaatgtatgcccccaaacttgtagccctgaacagttgtggctagattgtttaaagagcttgggatcaattggtgtatggacagcaatggggataagaggagttctagattatggacagcagccattctggccattttttaggctatttggctagaaagaaatagtagaatttttgaaggcatatataaggaagttgatgtcctttagaagaaggttaaagtatgtactgcaaaatgggtctacaagacaaaaagctttcagggcctatcttttcaagacctgactagggaatggtgttctattttgtattagtgccttggtatggggatatagacataggcctaaatgtatccggttttgagcttattttgcattttatgcttttaaattttcatgtctgttataatgttaccacggtttccctcccccataagtgaggctctctaataaatttgggaggtcactctatcaaaaaaaaaagaaaaaaaaagtgataatgtatgattcttttgaatctttaataagtagacctcgattcactgcaaaactatcaaaatttagctaataataattttgatcatatatgtaccactgatggctattaaaatttattactattgtactgttaaaacacaaacaaattctgttaaaagacttggacttatttgtgtgaataaattgtaaatgtttgtttctttctgcgggaggatgcaactattaaaacttctgataaagttaacttttaataggaatatgttaaaagcaca

SEQ ID NO: 199719 - DNA, 2456 bp, Cannabis indica
tttttatttattatatcatgtcatactacatccaatcacactcctccacccactccaacctcgacttccctaacccggtcaagatttggagcccaaaactaccttgactgcgattagaactgatcacaacacaaactcgaacgggtaagaaccatagactactcgaacttgtacctagacctatgatgtaaactcaaaattggatcctgacctactcgacctcagacccaatctcgagagtcggaccccaaccttgaccagaactctaacacctgaatttggacctgggatcctggccattacacaaaactgactcctagctcgatcttaacccaacctaggatccaaatcgtactagacctagattcgaccttggaagctgactataaccttaaccccaatcccaacctcgagcctacatcagggatcaggaccccaaccttagacactggcctcgataaagattgttagcttgcagctagaccctaatcctgacccgaccccgaccccaaccttaatcaattaactcgaacacggaccttgactttaggtcctaccacaatatataatacaatctaagttcagaaatactacaatataatatattaatatatactatttctcatatattgaataatatgatttgtatagtattaaaatttgtgattgtattaattttttttctcaaatatatgtatcgctcaacaaacttcaattacatcttgtaaggacttacaaacgaagcttgaataaattctaacattacaagctttcaaactatataaaatcatctttactacatctcttaagaaaacattaatttattataattctatactttatcacaacttttaaactttgtacgataacaatctttgtagctacataattatgattccacaaagcctcattcctagcactccataattcgtagaccaggcatgttgtaactataggaaaaatttatttccttagcttgtcaatctgggctcgatcaatcctatgaagcagtgtgaataattgagtagtttttacccgccagcccagccagttcttaacttcaataaggcaacttttacttagatgacaatcaaaaaataaatgctcaattatttatatagagcacccacaaatcaaacagtcactatcttgactaatatgttaaacatgtacagtctatatttggcgagtaatttgtttagaaccgcaagccacacaataatattgtgcttgggtatatgttcaaacgacttcaaatcacatcattaattatctcaattatttataattaggttcaagtaaggttgtataactcttaggtattgtatatgtacctgtcattagagtgtggaaatgagcattggttctcaatttgtcacaaccaccactttatgccaatatcaactataagtgggagcttcataatcccactagtttttatccctatctatttgacctacaaattgtcttacttagttgttattacccaaacatatttttttattgcagcattattccattggacagttctcctaaagtccaaacctccttcactattaggcttataaattcctcctaaaaaacatatccaggaccatcaaacatggaatctccattccataaaaaatcttagaaaataacattaattttgtgaagtattatcttagacaaaatcataatttgcaccaataagcatgaatggagatgagtaccgagttggttgatgtaacacgctaggactatattcataaagtatctgatccgatcaaatccgcaccatccaatctgcacgatccaatccaatccaatccaatattagtcagtgttcattgctctgtattatttctatttatgaaattgaaatcttgttgttgatgttgttatcattttttgtgatatgttattatagtttttcagtcttagttttttgtgatctgttgttagttttttattctcaaaatctcacattttccttatgttataagttaattgttatcccattctgggctaagctaaaatctattctcactttaaacccttcagtttgtgaatcagatccgataatggctagagagagaaagagagagtttggagaggaacgaagccctatgctgctggtggtgttattcggggggaagttttgggttggggtttgtttgagcgatgttgttgtgtggaggagagagacttttttatgcttataccccattgttgaatttgaaccgattccttcttttgagtaagaaaacaaaactaaaaaaaggctacctttaatctgagaggacatggtgaaaacacatacaaaaaataaaggataaatactcaaataaaatgtttatgagccactcaatataaacacaacctcttttaaaataataataataaatattaattattaataatattgattcaatttttaggattcgcccatattttttgctcatgtttccaatatg

SEQ ID NO: 199720 - DNA, 2018 bp, Cannabis indica
gttagtttgctctaagtgagctaccaacggactttacttgactgtggttagttctctcgaatacccagcaaccttgttcttttatctcctaatatcaatatatcatctttattatatctattttgctactgtttgtaccgaaatgataggaaattcctatcatttttctcttcatctcgtttggcacttggtagaagttgtgaagatttgctgaagacctggacatatttgatttcaaggcttctttttttgtaagattcatgtttaaatattagtgtttctttgtattataaacaagtgttctttcttttttcttttattttttatggtaattaatttatatatttggaccctgtttatagattaagaaggtttgactcttcatttatatcattgattttattgattcttaaataccttgtgattgacctaaactgatcttgacatcttgtggtatatttgttatgaacattttgtttcccttctatatatatatatatattctgaaatgatctctgtttatattaattcaattttatttttaacaaattcttttatttctcttctcatatgcaacatgtatatttataataataataatatatattatcactgttattgtagatatataattattttttaagtgtttatacatatatgtggtaattttatttagattatttaattattgaagttttggtatgtttataactgtgatgaataaatttgttcttgtcttatgcttttttatttttaataatttgagtaactttttgttttgaattgttggcagtaaacttgaggcaaggaatcactaaaggaagaagactattagatgttattttggtcaagtttgtaatcactatttaattagtattgtattatagacatttttatttataattttaagactttaaattactgtaatgatattttcatacttaagaatgatgcgttttagatctaaaaaatttaatgtaaaaaataaaggttgtaacccaacccataatgtattgggttcggttgggttgtgcataaaatatgatatgaatgggttagaattttctaggccgatctaattgggttgacctgttgaaataccatcaacccggccaacccaacccgtgcacagcaaggtgatttccctaaaaataatataaactatctatattttatttttatagttaaatatattaataaaataataaaactaaataaaaaataatgcatttatagtaacataaattttgtatcatgaaaaatatttaaatttatttctacagcaggttcttaaattatataggtttcggcaagttgatccttaaactttattttttaataaattgattcctaaactatatacgttttggccttatcccaaactttaatttttgataaattggtccttaaacatttattttttagcaacattaaatcttcactcttaaatattaatatttttattatttttctatatatttttcttactttaatttattttttgttaaattcaaataattttattttttttaattttaatattttgataaaataattattattaatatattttatttattcattttcatattttacgtattcatatcatatttaattttttatcaaaatatttaaaatatactttctttatatatagtattaataagaaaaaagtaaacactggcgaatccatataaaacctaaaagaaattttagtcccctcacgtttttatattttagcattgatagtatattttattactgatttataaatatatagtatattaattttcataattttttaattgtatgtattaattatttaaactttgtatcaacgctggcaaaattttataagtttgtcgttgagtataatttatttggtaatttatgtataaaaaaatattttggctacaaaatgaaagtcaccaccaactcttttgaaaaatctagaaaaatcaagatatactatgtgctttctagcacttgagggaactatacgaattagcagtttttga

SEQ ID NO: 199721 - DNA, 2398 bp, Cannabis indica
tcggatgacacaagtggtggtgataaattgtctgtgattcccatagtggggatgggcggtattggaaagactacacttgctcaactcgtatacaaggatgacagagttgaaaatttttttgataccaaagtatggattacggtgggagatgacaaagttgactgcatgaaagtaatgaaactaattgtcgagaaggtcacttctttaaaatgtgaaattgaggagtcgtatgatcttcaagaagaagtaaagaaggctctgagtacaaagaagtttctgtttgttgttgatgatgtttgggatgaggatccttccaagtgggatgtcttaaacagttgtttcaaatcagggttgcatggaagcaggatcattgtgacgacacgtagcaataaggttgcatcaattatgggaaataagtcgtcaacttactccctaagcactatctctactgacaaaggttggcagttgtttgttagatgtgctacaatcgatgtcaacatgcacgagtacactgatttacaagtaattggtcgaaaaattgttgaaaagtgtaatgggcttcctttagctattaaatcacttggggttcttttacgtggtaaacagaataaggaggattgggatgacatattaaacaacgatatatggggtttgtatgagagtgagagtattggtattcttccagctttatggctgagctatttttatttaccttcacatttgaagtcttgtttctcctattgtgctatatttcctaaagattatgaatacaatgaagaagagatgatcttattgtggatggctgaaggtcttttacttcctaataagaaagacagaattgaagatatcggaaagaaatacttcaaagatttgatctcattgtcatttttccaaccatcaaatagcgatgcaaaggagcctacttttctcatgcacgatcttatacatgatttggcaatctttgtttctggtgagttttctttaacgatgaataatatcagtaaacattctcacatggttcgtcatttttcgtacctacaaggatgtgtgaaagacaatgaccttaaggaatttgaggagttatttaaagctaagtgcttgcgcaccatattgtggaaacaacgtcgaaccgttgatcagctaaagattgagcagttggacaagtcattcccgggcttgagagttctatcattaaacaatgatgagatcaccgagcttcccgattcaatagggaatttgaagtatttaagatatttgaagttagattgttataatcttggagagatacctaatacaatatgtaagctgtataatttggagacactattgttgcagcatacatgtgttactagactaccaactgacataggaaatttaatcaagttgcggcatcttagtgttcgtgagtttttcttagagatgccacaacaattggggaagctacaaaatcttcaaacacttaatgcatttgttgtgggaagaaatagagattctggtggcattgagttgttgaaagagtttcaatatctacagaagaatctttatattagaggactagaaaatgtgagtagctttgaggatgtttcagatgcagcaactccattattaaagagtaagaagtttcttagtcagctatgtttggaatgggaatatggtcgtgaagctgaacttgatgacttgcaaaaagaaagagagctactcaatgccctccagcctcatccaaacctgaaggaacttgagattaaatgctacaaaggcaacagtttcccaaattggatgggagaccatcaatgcttgtctaatttagtaagcttgacgatttttgattgtaataattgtagttttttgccgtcgttgggacaactgccatgtctcaaagaccttaaaattatgcgttataatggtttggtgagaatagattcagagttttattactctactagtcttgtttcttcttctttttcttcttctgttgtaatacaaacaaagtcattctttagatctctggagaccttggaattttacagtttgcctgaattcgaagaatggtcatttattgaaggcggagtttttcctcggcttaagaatcttcattttgaagaatgtgagagactcaaagtgacattgttaggagattattttccttcattgacaaacctttcaatatatagcagcgaggtactattaccattattactcccaagaccgcaactcatgcaggcccctttgatcagtttaaagaagattacatttggcagatgtaaaaagttgatgcactttgatgaagtggcctttcagcacctcacctcccttgagatgttggatatttattcttgtgatgttctccaatgcttgcccaaagaactacccacttctcttactgatcttcacatcagtt

SEQ ID NO: 199722 - DNA, 2172 bp, Cannabis indica
tggtggtagtatctccattatcttgatttcattaggtacattccatgttgcatgatctccaactgggagtacagagtctttgtatgttgcaacgaatgcttcttttgtgtagtaataagaacaaaaaccataacagttaagagatctcttacctaaaacagccattgcgtgcgaacacagcatttcgtcatattgaaatttatcacatgaacatgttttattttgtaagtccacaatgaataatttcctaccatcaagtactgtgtaaatgactaggtttgatgtctcaacctatccaaaaaaatgtgatttgttagataaatgaaatccatatcattcaaagggataataatggtttattttaccttcagttttctagacatatttctgtaagtttttgaattagcttcaacttcagttgataggtgtgtgaatgttgatgatgctttgtctttgtttgccaaatgccatctttgtaccaggcatcttagagcttcaaccaaagttcctactggtaactctcttgcagccatgagtgcagaatttattgactctgcaatgttgatgtcatagtcgaataacgcttgtttgggctgaagactcttatccatttttcatacccaacttcattttgcaaatatggacggattcgatcataaattttgtccaagtcagacatatatttttcaaattcaatcaggttgtaagctttacttgcaccattgaatgcatctttcaatgccttcccaccatttctaaatttcgttttgatgttttgaaaaaggtggaaagaacaaaaaccatgcataagtgttggataaactttagtctcatcgcgatcagattttatacatttgccttctctttcccatatgcatttttcattttactcatgaaccactcccaataagcatcatttcctgaatcaacaatagcaaaatccagtggaaatatccctctgtttgcattttgtgagcttgcaattaatagtgttcccccataagctgactttaagaatgtgccatccacaacaattataggtgtacaatgtttccaattttctataaatatccctattgcaaaaaacatgtacttgaatcgaaattcactatcagttccaaaatctgtaattgttcctgcaatcattatcataacattaaaagtcatatttttttttccaaatgactatatactatttagtatttaacaacatacataatatagttaaaacaatcactgtatataatgtattaatataccaatcaatataacctgttggaatgtaaaaggtattagaatttttttttacttcttagtaaattaagcaacttaattttaattttaaaataagaaacaaactagtaggaacaaatatacggtacaatatgattattaatttttttgatattaaatctaatacttaaaataaatgtacctggattagtcaattgaagcatgtataaaaatgatggaagagtactatatgactcatcagctctcccccttagcaaatccaatgctttttctttccctctctaagctttttgataagaaacacatgcactaagatcgtttatcatgtcatccactatgtcgtttggcctataccccttttttggattcatcagtttgttttttatgtaatcccttactacattgcttgttgcttgtcgatgatcaccagatataatgttcaaggaacaattatgtgcttcatcaaactttctaactttaaacatactagtttttccatataccgaagcacgaaaataccaatgacacttgtcatccaaacatcttaacacataatcttgtgttgagaagcgcttaactttatgatggtaattatttttcattgagtacatactcattgcattgacaagaacttgtttgctatcaaacacctgatcgacactaatagtatctgcacaaggatccgtaattattctataagcaattgctttatcttttttactcattctagcagcttcttcttctatgatgttgtctactatgctgctcgccattacacaccatgatggagattcaccacgtccttcatcattaatatcttgattattaatattagaaatggtgcctctaagcgattgataatctgatagtatttctgtgcagttgactaataggggataaattgtttcatcttgattt

SEQ ID NO: 199723 - DNA, 1176 bp, Cannabis indica
acgccccatacctggctcgtgtgaagtggcatgggggacttactagcttatgctttttttcattgagtagtcatttcgttgtttgaattaaatggtgatgaatcaacaagtgagcaaaatggaaaacagaagaaggcaataagtggcagctgtatatatacatgtttaaatcaacgtacatatatatatatatatatatttatttaatatatgtattttgagattcgtttcataataaatatatctttatgcatgtgtatctttatcttaaaaggatatgggacaagagatcccatttcgtctttttcatcatgagtttgattttcattgctattaatgcttttgtcttgtcaaatattgccatgcatttgaattattaatactattcatgactcctatgtatatatatgtactgatctctgatctcatctatctgcatgcaccagtggtctatgctcctaatgcttttattagtttaataattatgattattaatataaggagcaaataatgagattatcatctaaagtagtacttaatgatatatacaaacagttaattataaccttttattataatttattagttaatttttactttcgaaattatatattggaatatttttttttctatattttttatagtagtatttgttagagtcacaatattattcttgtaaattttttaaaaatttcgaatagtttacatcactgaaaataaagttcttgatattccaatctataacacgtgtgtttaaaaaatttcaaacttattattttttaaaaacatttaccaagatgatgttgtaattatataatgaataccgacataaaaaaaatattaatttaacatgtatttttggacacaaaaattaactaagagattataatatataagaagttaagggtagaactttatgtgggttatggtaatggtaatgttactattaatctcaatacatgtgtcttagtttgaatttaaaagatataaaatacaatggcacgaaatataatttattagatcaccatgatttatggaaatagctgtgaaatgatgaatattttcacagttttagaatacgtttcttcttactttaaagtgaagtagggggtatacgtgtgaatatatgtatggtacgaatatagtgtagcattatacgatgaataattaatcagt

SEQ ID NO: 199724 - DNA, 2950 bp, Cannabis indica
acgctggaacaaaactcatttcaggaatcttaagttgcaaatccttgaagccacttcttctctaaaagacttggaactaagggacccggataacgtaactcaattagaagctgcaaaaaagaaattggatgaagcacttcttagagatgaaatccattggcgccaaaaatctcggattcaatggctttcggaaggtgacatgtgctctaaatttttcatggcttctactatcgttagaagaaggagaaattacatacaaagcattaagaatcctgaaggtggcgactggattagagatcattctgaaattgccaaatgcttcctgaaccattataaagacctattttccaagcaaactaccatccaacagccgaatttaaatgaaatctatacccagcaggatctctctgatgtggataactttctcctaaatgccatccccaaccatgaagaaattactatggcaatctcgagcatgggtaaagacaaggcaccagggccggatggccttcctccgagtttttactcgcaccactggaaaacagtcaaagaggatgtttgcgaaatggtaacccacttcttctctcatttggagcttcccaattttatcaatgatacttcccttgtcctaataccaaagaatgaagctccgatgactcctaaagattaccgcccaattgcactctgcaatgtctcttacaaaatcatctcgaaaatccttgcctcgagactaagagagctactgccaaacatcatctccccaaatcaagcggcttttattaaaggaaggaacatagcgggaaactctatgatcgctagagagatagtccactccatgaaaagaagaagaggtaatagaggcttcatgatgatcaaacttgaccttgagaaagcctacgacaaaatggactgggatttcattcttctagttctgtcgaatatgggtttcacaaatcttttcctcggatggatccgagcctgcatatcgttacatgaaatcaagctccttctaaatggatccatagcggacaaagttaaaccagagcgaggtcttcgacaaggtgatccgctatccccctctctatttatccttgcggctgaaactctctcgcgtcttcttcaggataaggaaaggaaaggtcaaataaaaggcatcaagattggccgtcagggaccgttcattcaccatctcatgtttgttgatgatataatgctttttggtcaagccaccactaaagaaaccaaggccttcaaggaatgcttagccacttactgtgattggtctggtcaatcaattagcttccagaaatcttcggtctttttctccaagggggtgcctcgggggcggatccaggaagttactgaaattctgggaatgaagaaaatgaatgagaaggctccctatttgggactgcctttattcaccaactcaagaagaacggataactacaatcacttggtagaccgtgtcctgtcgcgtatcaagggttggaaagccaaactactatccagtgcgggaagagcctgcctcatcaaatccgtaggctccactttatccaactatgtagcatcctcagatgtcatccccatatccactgccaatagaattgacaaagcccttagagacttttggtggggagatacggaagaaaagcgagtcctacattgtgttgcttgggagaaactttgcaaaccaaaatcgtttggtggcctgggattcagaacaacggaggcaactaaccaagctttccttacaaagtgggcttggaaggcgctaacagatgactcaagcctttggaatcaagtaatgggagctaagtatctcaagcataacaacttcctagatcttgaagttcaaccttctgactccttaatttggaaggctatcctcaaagctaggactcatctccaaaaaggcgtttgcaggaaaattggaaatggggaatcaacctccatctggtttcacccgtgggttcccttaggcacccttcagcctcgaccaaaacttgacgcaactcacggtatcagccttgtctccaactttatacttaataattcttagaacgaagatcttctcctccattggttccaagaagatgatgcaagaagaatcatgaacatcaccattccgaaccatcctttggaggattcctggctttggacaccagaaagcaatgggaaattctccatccgatcagcctatcgtactatcaagaaccttgatcatggagatagcaataatgaaaaatgggggataatctggggagctaagatgcattctagaccaaaaatgctctggtggaaaatcctttcaaattgtttgctgacgagaggtaaactccaactttttactggattaattgacccctattgccctttgtgttccaaggtcgttgaagactcgtttcatattttttgggaatgccctatggctcgatctatatggtttggctgttattggagcataaggacggactccttcagtttctctaattgggaggaatggttaattggattcaaaaacactgctaacagaccaaatgatcttagtttccatgctttccttgagggtgctgcattaatcttcgagaagatttggaaggagagaaacatggtgatccaccatggtcacggcacccccataaggaccattactcagcttgttgataaccggctcctggaggctctccaatcccatcaaaatggtgatgctgcaatgtcacaatggctgccccccccccctgagggatggcacatatgcaacacagatgtggcaattggccaaacacactcggtaggtgcaactatattcagaaatgacagaggggagattactagtattcacacttcccgcattcaatactgcgaaccgctagctggggagttagccactctttgctggggagctgaaatggcatctacccttggccataaaaacttaatccttcaa

SEQ ID NO: 199725 - DNA, 576 bp, Cannabis indica
cagttctattcgtagttactttcttttcttttttttttttttttctttttttttcatttaagtcataatctgatgtttttattgtaggaaatatataaacttggaggaaggaaatttgggtttttaaatttgtggcctttagcttgtgtaccatacatgagagtaattgaagttgacaaaaatggtgcttgttttgatcaaattacaccatatatacaactacacaacaaagaaatttccaagctccttcacaacctacaatatgagctccatggtttcaaatattcttatatcgacttctactcatttctcaaggaaagaatggatcacccatctaaatatggtacttaattaataatcttgttatattactactacttgatctttgtcttaaatattttaatttggtcaactaataacaagaatttaaaatgaataatacatttgaaggtttcaaagaaggaatggtggcttgttgtggcagtgggccgtacagaggagttttgagctgtggagggaagagaggtgtgaaagagtatgatctgtgtgagaatcctagtcaatatcttttctttg

SEQ ID NO: 199726 - DNA, 1183 bp, Cannabis indica
attgcttggttggttagaccaagcacatgaccttttagatgagatggtattggctggtgtcaacattgcttcttcagtatattcttctcttttaaaagcatattgtcaagcaaaccgagcaggagatgttgcagcacttcttcgcgatgctcgtagagcaggaatacagctagattccagctcttaccaggcattgattcagtcaaagttggtggaagaagatacacaaggagctctccatctattcaaagagatgaaagttgcaaagataccgaaaaccggtcatcaagaatttgagaagttggttaagggatgtgaagagggaagtgaagctaagttaatgggaaagcttttacacgaaatcaaagaagggcaaagagtagattccggggttcatgattggaacaatgtaatccactttttctctaagaagagattgatgcaggatgccgagaaggctctaaagaaaatgaggagtcttgggcatacgccaaatgctcaaacattccattccatggtgacggcatatgcagctattggcggaaactatatagaagtgacagaactgtggggggagatgaaatctcttgcttctgcaaccccaatgaagtttgatcaggaactcttggattctgttctttacacatttgtgagaggcgggtttttcagccgagcaaatgaagtagttgagatgatggagagaggttatatgtttgtggacaagtacaaatacaggactctcttcttgaagtaccacaaaactctttacagaggcaaaactcccaaattccaaactgaaggccaacacagaaagagggaggaaggattgatttttaagaagtgggtaggattgaattgataatatattggtgtacacatatccatatatactcttattagttttttatttgtcaattggagatttcttccaacataaaatgaaatgaccaaactgaagttttggactggttgagcaattggaaaggctgcttagcagaagaatgttacatctcttaatcgaaaatttcagagctttcagtgacccctaagaatcctgatcttcctgggcaggaaatattattacttgactcaagtttgaccaagaagggagtgttcttctgccattattggacattactatatttctgcagtagtttgtaactttgtcaactatactttttga

SEQ ID NO: 199727 - DNA, 1197 bp, Cannabis indica
tttagagttatatttggttaatggataataaaaaaggataggtttcaacttatcccatttttttttactatgttgatattccaaatggacaccgtatgcagggctgggcttgggctaggcacgggcccaaccagaaccaaaacaatatttaaaaaaaaaaaaaactatattcttttattggttttcaaaaatattatatattttttttaataaaggttcaataattctcttctgttaatattctaagactacataatcctatttttcaaatttacctttgaataataaagaaatgttatttgaaaacatactgttaattaattattaattaacgttatttcagagtaaattgttctcagtgtggctctggatctttaaaatgagaaactcaattatggaaaagaaaatagaggtgcagagggttaaacatgagatcaagttgtatcagattttgaatcctcaagttttgcacctcaatgagtgggccaaattggagaaaagaaatcaagaatctgtgggaaagttggccacaaaattgtcagccatttctattcaacttcctttgatcaatggtgctaaggtacatgcatatttaattaattaagattatccctatctaattttcatgtaaatctaataaataaatgaacatgtatattaatattgatatttgtgcacaggctgatgttatgtcaatttacgaagccatgtacacagccattgatgccatggatggcattgaatcaattattactaaatattttattgaggtaattattagttaaggtaggggggaaacaatattaatttagcatacttgataaataatataataatatttatgttcttattaggttgagagaattctttacatggttacagagcttcttattacgacaaaacaacaaatagaaaatcttgaggagctggagaaaactgttacacttgctactacactactggtgagtatcattcttatttctattcaggatttttatcattcttaaaaaagaaataccagaatttcccattagaaattgaattttatcaaaaattaatattaaggggttttttttatgcaataatattaacggtcttaatggctactattgccaacttcttttttcttttttttttttaattatttgtcaaaacattgtttattattaatatgagcccaccacccagacaaaggta

SEQ ID NO: 199728 - DNA, 1617 bp, Cannabis indica
ttagcttactatatagttacatacgtttatagtgattatcgctttgaaaaaatgacctttaaacaaatccttcaatcaatagtttttttagcccttttatagtatattttccttattagctaaattattacatttggtatcattatactattggtttattggtttattattaataacaatttacatatcataaatttgtagaaacaactatcttacactaaccaaatacactgacacaaatttaatttttataaaaacaagtcgttcatataatcatttccttagttacataaacaaaaataaaaaaaaaaactataaaaaccaacccttaaataaaattaacatttacgtggctcggcacgtaactctcaactagtatatatatgtgtgtgtgtatgaaaagattataaaatttagacaacaccgcgcaaagcgcggcttagttccctagtaaatatatattttaaatatactcaaatcaattaaaaaaaaaaaaacaacataaacatttggctatatacatctctcataaatattagacaaaagacaacaataacatttcatcacaatcaattttcacaaccatggccaaaagtccccaaaacctcaccactctactcctcataacactaactattttctccttcttcattagccttagcactgcacaactctttctcgaaagacctatctgccgagaaggaattaaaacataaaaaacagaaactatttttttcctatttattacattaaagtaggtaccccattttgaggcatgagtcttgagcttataaggataacaacataataatacttcttcctctctctccaaaatctccatataaaaatagagattcactctcacatatatattgatcatgaatgaatgaataaatataaacaaaatttcttcttttacgtactcttatagtctcttgggcatatacatatacccatatacatacatatatatatatattacattatattagtgagatatgggaagaggcagagcaccttgttgtggtaagagccaagtggaaagaagtccatggagccctgttgaggatttgagactcatcacttttataaaaaaaaatggccatgaaaatggagagctctccccaaacaagctgataatattaattacttctttttatatattttcaatttaatatttatatcatggcacacaaaatctctgttttggtacttaaattctttccaattttcatcatgttcttattctaattccaaatggtttattttattagttgatattcatacatgatcaacataaatatacagtgcaatatatattggaaattatttattcaactttgaaaagtcttcttcatatttttatattaataaaagaaatctaaatataccaaattctcttctatatatatacatatatgttaggccaaaatcatattatatattatatattttaaaaaatcaaagtgtggttaccaattatttctttataccaaattaataatgatttctttctctataaatatatattaaaatatttgattatatatatatacctctggaggagcagaggtcggcaaacgaagaggacaccaaggaggtattgttgggtcgtcg

SEQ ID NO: 199729 - DNA, 829 bp, Cannabis indica
ccaatttaatcaacttcatctctaaaaacatgacacaatctattttttttaacttcaccatgttctttcatacagctattatataagcaatatatctttcaagattttactaagctaagcagacaagaagctgaaacattaaattatgacttcagatggctccttgggaaaaatttgtaataaaaatataattaataatcatcttaccattctgccattggcagtgcataatgggcaagcagatgagtattcaaaactggtttgaggaagtatgactggctgctcaccaataacaccagtccccctgcaattagccagataacaatttcactgggtgtaaagaatttgatacctggaaactagaagctgaaaaatacacgacattaatagcagatggcatgaaaaaaggaagaaataactaaccagacattctcagtttttccatgggcatcagttatgatccaatgtcttctaagaagttggacagggcgttctgagttattggttattcgtattctgtatgcaaagaaatagcgaccctttgaaggttgactccggccctcaatatacacactcctcacttgaaccctgattccctgaaaaatcataggtttcaaatttaatattaaccattgatgaaataatctgatcacttatattagaagattatcaagtctaattataggagtaattcattagaaaacaaacatcactttgacttgctccaacatccaaaagcataaatatatatcttcttgaaaaatatttcacaaactaagaaaaattcaaattttgaaactaaaatccaaaaataatgtttatattattt

SEQ ID NO: 199730 - DNA, 1449 bp, Cannabis indica
aaaaaaaagagagagagagaaaagttaagattacgaagtaagatcaacacgttaaggaaaacttaagctcaaaaaacaaaaagaagatgtatgcgaatgagatatcgagtaaaaagagttttgtcaatcaagaaattcagcactagagtgcaaaatgcaatgtttccttgatccaccaacttataagagtgagttattaaaattgattaaggaaactaaagaggggaaccgaaaaataagtggaaaaggcaaaggtcttttggctcgagtctatagtagtcgtggtagtaatgtcccgaaaattattttttcctaaaaaatatttagatacaagttttagtttaaagttatgactataaatatatttagtgataattaattgtaatttcacgtcaaaaaaaaattataatttttgtgacttaaatttgtaattaaaaataagattttttaggggaaactaattcgggtgcactaactaattattaatgtcgagatcaaactgttagtccacttaaccagaattaaagaattacatttataatttcccttatgtataaatcacagattttgtttaaccaaatccaattaaacttttaagtagtgtataataattctacggcaattgattataaacgaaacgaaaaaaatgcaaataaaataaactaaaaaactaatatattaatataaaaaaagaaaaaaccagtacgtaacaataataattgagtaaaaaataaatagaaaaaaataactaaaaaagctaatttgtgtctaaattaatatatctaaatattaatgcccaaatataaaagggttgaattgaatgaattaatcaaactctgtcagcggcagagagctcgacttcaccacttcccttcttaggagttgtaccatagtagcatgcgtacaagatgagttgaacagccccagaaattgcacccaacccattgcttaccaagacatagatatccaacttgattagggcataagcagtccagcaagaaccgttgaggaaattggtcaaagataagtaaaagggcatgtactccacgctctttgttttgataacttttgactgtacgtacgtgtaattaattcagtcacttatatatatatatatgtatagatagatatgataaagagagagaaaagggtgtgtttgttaccatgatagtgagtggagaagtgtacataatgatgttgaaaatatcacaaagaatcccaacaaagagagaccttcttgtagtgccatggaaaaccaagagtcctaaggcaaccacccctccgaaaaagacaagctcaaaaaataaccatctcactacctttctctgaaatatatatataaatattagtacttattataaacttcacatggcaataatatgacatgatgtatgttaataatgttatatactacttacacgtccttcagtggtagcatagatgaaaaaa

SEQ ID NO: 199731 - DNA, 909 bp, Cannabis indica
taatggggttacagtaggatgttcttacaagggattagtcttcggcctcagggcgaagagccaaaggatggaaagtgaagtcaggtctccctctctccatgtgcatctttgggtatttataggccaatcccctcgcatgggccacccttgatggatcttcatgcagataaacccccaccgttggattggtaggtggcattttttccatgtggtctttactgatgtcagattgtactggctacatacctaatggtaaagctcttcatgcggataaacccccacctaatggatcttctgcgggtaaaaggcgcactccagaccggtgtatcttggttgaagatccatgttacttgcgggagcatagggtctcgatttctagagtggattgagtcgctggctcacgagcatctctcttgtggcccgcgtctgggaagacttatctcgccgaaactcgttccgcaagattagggctcttaccctcctagagcacgaagcaaggcatttgggcggccttaatgatctcttgactttttcttgattattttccacgtggcacgctcgcaaaaatacgaataaaatttaccccaagcttccaggatatgccatggtctgggagcttgcagtgccttctcctgggcgatctttcacacacgtggaattttttacaagtcttttaatgctatatgtcatcagccgtcaaaccaaaacgtcatttgtgggaggcatgatttctcccattttcttgtcagagtttaaaatgctgacttatggacttcttcgcacgtgtcgagcgcgtatctctagggaactcgaaatggcggtgattagacatgggcagtttttcctcgagtgttttttacgatgcatgtaatgatgggagtcacccgttgggaagtgaggcatccttta

SEQ ID NO: 199732 - DNA, 554 bp, Cannabis indica
aacagatgctccatagattcagctcccgaaccacacaggggacagctctcatcctctaaaggaaatctccttcgaaggactgagcggactgggagggccttggacagaatacaccaccaaagaaccttgagccgctcagggattttaatattccaaagtttgttccacatggaaggggccacctctgactcgcttgatctattctcagccaggaccctatacgcagatttgcacgagaatcgcccattactttccaacgtccagaaccagctatccttgccaataccagaaggagcaccccctttcaaaatagcggcgatactttcgtggtcgaacaaactgttaagcttttggaagtcccacctgccattgtctagcaggagctcagctacctttaaccctcttctcaaacccctcccatttggtgtaggaatgaaaccttttaggtgcgcaatccaagggtcagaccaaatgaaagtctcctgaccattagctactcgcttacaggcaccctgacgaatgatggatctggatttagtcacattcttccaaaa

SEQ ID NO: 199733 - DNA, 521 bp, Cannabis indica
tcaaaaactccatcaatgcttggcctgcccgaagtaaaaagctccttaaaatgatgattgattacttctgcaacatgttttctgtccttccatactttaccacaactatccttaatcgcccaaatattattccttcgtttccttatgactgttgcggcatgaaaaaccctggtatttcgatctcccaatgacagccaagtctccctcaacttctgtctccacatgctctcgagttttgaccaagaggcagccatctttgcatgaatagctaactcttcttccctgaaaacttccggccatggctggttctggatccaagccaatctactctccatctttttaatgtcactctcatttgcttctctgtgagtcttcttccaagcttgtaaagcaactttagcattatggacattacggattagagaattagtagcattatcgcccgaataaagccatgttttttcaatttcctgcttacaagattcttcccacgaccaagcttcatagaatcgaaatggaat

SEQ ID NO: 199734 - DNA, 604 bp, Cannabis indica
tcaatcaacatccaatccgcacgagtgctgattttgaattttccaatccaatctacacaagtgcagatatccgcactttacggattggattagattggatcgtgcgaattggattggatcgggtattttatgaacactcttaccaagtgccaaagttgcactttatacagaggcagaactatgtgtatttatgttggggccatggcccccttaacttcaattttgtggtttatctataattaaatatatgtggtattctttcaagcaaaaaaatatatatgacattaattagtatacatatagttaaaagttaattatttgaagttcttactttattctttctaaaattttggcagatttgaatgggtcagtgggtatttgaattttcttagactagctcattttgttatgtaatgtgactttgaaaaaaaatactattgtttgtttgtttttttaaaataataaaaataaaggttctttctttttctttttaattttaattttaagtatctctaaaacaaatcaaaactaaaaattactactatataattataagaataagtactgagacattcttaaagggggtattttggtagacccctta

SEQ ID NO: 199735 - DNA, 1407 bp, Cannabis indica
agagagagagagagatttatgagttcatttgatttgagtcactttccaaaactttaaacttggaagaaacaaaacatacaatttttttgtgtctttctgcttgtaagacataaaattttcacttataaaaacttcaaattaactaagaaaaagaaaacattgaaataaattttcacggcttcgtttagttgaagtcacttattattttcgtggaaaaaatagaaggtgtttgatcatgaggttcccttaaaagaccgcaactagttaaaatcattcgcattccactatttcaggtcatatcaagaaagatgatgatgaagacgtatttaatcattatttacaatactttattatcattttcatataataaattattacgtataggagtacgtaggagctagcgcgcgctactgtggtcatgttcatattcataatagatagatagtgttgtccatatatcgtgtctctctcaatctctttgtattaagagtccaacaaaaaataacacggtcgagttttaaatcgcatcatagtattaattaattaataaatacatatatatttaggagaaagtcaataatcttaataaattattaagaccatccaatgaattgaaaagaaaagtaatgtatatattgtattgttatgtttttacatatattttaaaaacattattattttaacagtgttttaaaaagtgtgttaaatttaatacatgttaaaagttgtactaaatttagtacaaaatatttagtacataataaatattattttttatttactataataccactggttattatgataaattaattttattaaacttcatatttttatttgaaaaacttacataataaatcaaaaaatttaaaaattataaaatacatcaacagggaaaattatttatttttacttttatttataaaaatactttttcttttagttgttttatggtttatttatagttattatgagtttatatttctggttattttttgtttgtataatttatttataattgaattatagttatcgcaaccttactggttgttttttaattgtcttttttagtttttgccgaacaaaatgtatttatgtaattttataactttacaaatgtatttttataattaaaaattttaacagtaaattcgtaaataaaacataaaaaaaatatttttatttaccatattaccattatttaaataataaaaaataaatagtaataatttttcatattcttaataaaattttattaaataatgactattaatataaccaatatttttttcttatttgtatattgtctctaatgagcacaattgtaaatagtagggtaaatatatataagacaatcaaagggattgataatgtggtgtgtaatattaatattaattttaataataa

SEQ ID NO: 199736 - DNA, 555 bp, Cannabis indica
tatgttctttaaaaaaaaaaaaaaaaaaagatacagattaggatgaagagaaccatcttcaagaataaaatcaatacttacttcaggaataacccagagcgacagtttagcatagagtaaatctatggaaaccccaccaaacttgaacctcataactggaacgtgagcatcaggcactgggtgcaactctgtaacttcaggcatctcagctaacattctatgtagttcaccaaagaaatcttcctgcatccaattgataggtgcaattttatgctcaagttaaaaaagttaaagaagtaaaattaattgagctgcattataaaagaggaacgtagaacacacttctcttgttgcatgtctaggtccaacgcagagcgtgtctatatctgcacctggcccatgcacctgcgaaaaaagacaaataagtgtacaggtatggaagatgaatatcataaataagttagtgacaagagtaatctaaataacaatattgaagaagaataagtgtaatcttgtagaagatacagcttactactattagggctcgtttggaac

SEQ ID NO: 199737 - DNA, 872 bp, Cannabis indica
cttggcggtggattttattgaatatattacaatgttgacaatggcatttttttttgtcagagcgttgttcgacaatgatattgaatggtaaccactcgtgcgaaatttttggggtagattgttaccaatttaaaaaatgtgatatgaattccattccgttattaaataatgatgtgtcacgataaatgtgttaagtgtatatatttaaaattttccattataaaaatgtattagataaggaggtattttttttatatggcactaagctttgtatgtgggctatattattaggatatcacaaactctcttggtgacttcaagttagaccactatataataaaaaattaattcatactgatggtatttacaaaaatgattaataatttgtcattttttctatctgtctgttaaattatttcatgtatttctccctgtttcctcttctcttgtgctagcataaaactcaggttctttgtcatattctattgttgaaacagttaaaactcaagttctttgtcatattctattgttgtaacaattattatgttttggtcgtaattgtatatttttctaagatgaagaatctgcacaaatacgtaatgctttggggtaatagtaggccattattctatttatataatcttatgcattaatatatattgagaatgactaaaatgaacaccaagacaaaccaataattaactaaaatatttgaaaagatatcgaacaagaagcattgatttttgcatattgtgcaggaattgtggttataagaaaaagtagactcaatatagaaataataataagaatttcaaaataaaataaaaacataaactcttaacagaaattactacaaattcaaagataggcat

SEQ ID NO: 199738 - DNA, 1168 bp, Cannabis indica
catcattactcaatttttattagaagatatttggcatatggtcactgcactactaatgtaaattaagtctattttttagtaatttaagtcaaaatattttttatttattatgtgattttcttgtgcaattaaactattttgttcactttgctcctttctttcaaaggaaatatttctcattttcttgttttgaaaactttttgtaagaaatatttctcttaaagaaagttgattttatttggtaagttaattttatttggaaattatgttttgtatagaaaagaaaaggacataaaatataataggaaagactatatgttgctgaactggaggctatacgggatggtcgacttgctgagttcaaagccggttggtacaattcaagcttgaagcagactatgggatgaagataacaatactagaactatatggattgaggttaattccccttatgttcctcatgcaacttgccattttttttgtaatgatgttttatgtatgaacaaaaaaaagagagagagaaaaatgtattggtaattttcttccttggaaaatctttaattaattcattttttttacattgaaatctttatttaaatagttgatcgattggtacttgacgtacgtttgatatttaagaatcatttgctaataaaaattcaaactataagaatgagttaatcataaattaaaacatgtacaatttattattgtaacaaatacttgtacatatagacacctagacagtttatttattttaagaatggccagtgataatatatataatctttactgaaatttcagatttaacaaatatactattaacgaatatataaagtccactattatttacatctaaatctattaacattttactggtttttattatacataaaattgcgctacacgatacctgcctacagagttgtctttaagtttaattatatggtcagttatataatttatattatccaaccaaatattcgtctgtctgccttacgatggcctatgtattttaatcaattatgtatgtatataattataaattttatgtaaaattattaactattcgaatagataaagatcaatgaaagcaatacctagaatatttgtgcaaattagttaactatttatgaaaagtcaaccttaattaagattatatgagatg

SEQ ID NO: 199739 - DNA, 480 bp, Cannabis indica
atgtttttctttctttctaaatgaaaggaatcgagtttgagcttgagagaatgagaagtagttttggtttttgatgttgtgtagtattggggttagaggtatatatatgtagtgtatagcattactttttagctagtggatacgacatatttggaagattatattataacaaaacaatccaagtggatatcccttctatttccctaggctttatcttagttgcatttttataatgttatgttgaatatgaagtgaatcaatgtaagattgagtgggggttgtggagggatttgattgatattaataaaagagtctcttagattctttgaaaagctagattttcataaatggctcttctagtttttccaaaagttgaaacacaatattctactggctggctgctgttttagagtatttttcttagttgtttcaagtatgtggttggtgataatatgcagtttgataaatggggcatccact

SEQ ID NO: 199740 - DNA, 1024 bp, Cannabis indica
aaacacaacgtaatctgctttatcaaaatcttattggtccacgtcttttgagaccacgaatgaatgatctccgtttcaccgaaccttgcgttaaacgaattccctttcgcaggtgattaaaaatcaacccttccagaatccaaaactgcatattccagattcccaaaatgacggcgggtcccatcggatacagacccattatcgacgactgtactacacgcgccatccgaagcgagtggcgtgaaaaacgatggcgtggcagatcgtagtagactcgagtggattaggacgaaggtgggagaatttggagccagaactaaatggctcttagagagtgtgaagagccacccttgttagagaaactttacccctcacaactcacgcgaccattctatgcgtgttcacgcgctcaagattcctcttctctttggagtacccaggtatattcgaatgaaaaaaaatatttaaaataaagtctttgatcttatctgaaaaaaaaaaaaaattaattagattagattagaagcgtttggatggtgacgtcattgccagcccacagagagaagacgaaaagcgaatcaactcctcgaatattcaacctaagaaagcccactcatatattttaattaattctataattactgagaaaataaataatttaattttaaaatactaaaaatccaatcaaagattcgtctagtacgcgacgacccaccttgatgtctctctcactctctctctcgttttcaatttttttctttttcttattttctctctcactagaatatttctcattttgatttatttgtttttaaaagtagttgggttatgcaatatgcttggttggcaagattattccgttttctgattctacttagatcccatatgcgtctctaactctaaacgagtccattaaccatttctccttgttcggatctatctactatgccccttcttctttctcatcataaatattttaattttatataataattttaaataaacaacacgcatctctctctct

SEQ ID NO: 199741 - DNA, 1542 bp, Cannabis indica
tccgagcctcttttttggctgtgtttaattactcaacataatgcattttagaacaatttataaaattaaacctaaatatagcattaacttattcttttagtcaaattttacaccattcatcaaagatagtctcatgactgataacatttattatcaatttctctttaattcctcatgaagcattttttttttaatttatttattatttatttatatatatatataaatatataacccttaaatattgttttcctataaggcacaacatcacatgtgacctcttatgtttagtttaaggtttctaaactaacaatgataaaaacaataaactggacttatttagtaggcctttttttttttgctagcaatgtatgtagtgttaagttgctttcaatcattaatcatatttatatattgtttaacaatatatattgtgcatagggcatgatgcaaattaagttatatattataatttatgaatgttaatcaatgtttttttttattctgttagcaataaaattatatttttttttctcgtaattcaaattatatgctgtacgcacatgtattattttttgctaggttgatgaaaatttagaattgagaaataattaatatgtaatgaaatattctgaggccgtgtttgttttggaggtcctgacttcaagtcctaattaaaacattattgtaatatataaacgcttaaaataataaaatattctgagagcagtaatatatatatatatatatatatatgagtaatcgtaattttattgtaagtatttctctattagcacatctaataattaatttgcaacaaaaaggatcttctaaaataatatatcatcaaacacaaactacagctctagctagttgtacttctagccaaattatgaaaagagagagagagagagagaaaagagatacccagcaactacagtttcgtctatatagtgacaatatttaagtactactactgtcgatgaagaacatggtgagagagaggagaagaagtacatggttttttttttttaattgaaagaagaaataagtagatggtctattacattattaattttgtaggtagtagtgcaatatttctaataattaatatattttagctaggtacatgataaattgatatatctctagctcttaaatgatgatgatgatgatgatgatgatctattgggagagtaaactcctaataattgcagcttgagcagtgtctgttgttgctaatagctcagaaagtctctcacttagatcatcaacctctctgtgcaagcttcttatgtagttgcatgtctcctgtaatacattagctgctgaaacctgttcacatacatacataataaacctatatcaatcaaacaattcaatccaatatcaaaaattataataattgatactcaattacagtagaccatcattatacatattaataagaaaaaaaatctaaacaagattttaattttcctttaacactctatgcacccaagaaaattgtttgcttctactaatttttcaatatatatatat

SEQ ID NO: 199742 - DNA, 806 bp, Cannabis indica
ataatcttaccctatatatataaaattgtgcccaacataatgaaaataaactaataggaatggcaaactaataaagttgtgctgaacatatactttcatttatatattattcacctattaaaattaatttatttacataagattcgtgaaactaaagaatattgtaattttatattattatcaattttgaatgtttttttaagataaatatttaagtaatcttataaagaacttttggtatgcagtaagtgaattattaaaaaatttatggagaacaaaaaattacatgttcagaactcaaatttttttaaaaattattgaaatttatgattatgatcttataattttactagtgaaatttttgtcacatatgactgtaaaattagaaatgttattgaaaattattaaaaatatactttgtgacaataaatcaatcaggttacatttatgtaacaatatatgctctaggtcaaagacatattgactttgaactaattattaaaatgaagttcacattaataaggtgtctatagaacatataaggacaaactctatattttcgaattcggattattaaggatatgctacttaagacttttcggtttagtgagagtttgtatttggaatgctctatcaaactgacacatatttatagtttaattctgcagataaagtatgaacttaagttttgagtactctgaatgttttctttctatattgatgtttaagcataaggttagaaaggattaataaatgattgatcttaaggaggaccaattggagataggcacgttaagatcacattt

SEQ ID NO: 199743 - DNA, 1132 bp, Cannabis indica
atgaaatgggggattgagacaacctgtcatattcctctgattcaatccgatgactgtagagattgccttcgtgtttgggcttcacgataccattcttaagtagtcaggtctttgtacacaactcgaagaactaacctcattctttgctcggataatctgccatttactctgctcggataagcagactttgtgcgtgcacactactagaaaaatgtgttttagtgatacacattgagtgactctaaaattatttagtgacactttaccgcgcgtcactaatgaggataactggaaagaaaatttttagggacacttcacgcgtgtcacttaacccttttacagtcactcactgcgcgtcactataggcgtttaaagtcaagtttgtcacactgaaaaagtaataactacacacaaaaactgtcacgatatcttttttttttttattcttcattattatttttagaggtatagtgacacacaaaaagtgccactatattaaatatttttctaaaaaaaattatataattttctcaaaataatttttataattatattttttgaaaattaataattttttaattaggaaagtaatatcatatttttagattttttattattctaaaccaaaaaatatatattatattttaaatactatattttaataatactattttcctaagttatatctaaaaaaaaaaatcaaatcattcaaaaaaaatctgaaataatactatatagcttaaatgttgtattcatacttatacttgcatgaaatacaatacaatatttaaaataaaaatactaaaattagtcatcaacaatgggtattatgaacttaaattctaaacccaaatagcaagaataaaatacacaccaagaacttgaatacacatcccaaattactgtaacaaaaaatattctaaaaaaattcacatccaaaagaatgccaagatacacacattcttgcaccaagatcatcgtcggccatgattcccagctcaaaacattgtcaaccacgaacccaaacaccataaaaatcatggtccacaaagaggatcaaattccatcaaccacgaactcggaagacgaacatcgagatcatgcatatatgagagagggagagagagaaaga

SEQ ID NO: 199744 - DNA, 3325 bp, Cannabis indica
ccatatgtgctaattttcactctatttttatcaatttttattcttataatttcaatcatagtgtgtaagacagtgaagaatccaaattcaagagaaggagaatcgggcttagatcttggtgatactctgctatagaaaggatacaagggttagagatctgagcggaaggagtcatttaattccgctacaaccactgtaaggtttctcaaatttatatgtgtttaaattacattgtttttagaaattcatatttaggatgttaaataacatacattattgtaaatctagatcctcgtaaaatataatccaacaataacttcattatatcagattgttcatatttcactatctcacacgtgtcatcctttaaagccaaatttcgggtataacacgaggtattgtcataatatgataattacgagatgaattatattgtatgtagttcccttagcctttcaacatactcacgagtatgtgggtcactaagctacaagctcttaaagaattcattatctacatttttcaactgattactgttcttttgtatattatgtgtatcccgagatggaccttctacgttggttgttcatctcgctggtcttataaaatggtagttattattcaaagctcgcctttttctttgaaagaataaattcgaatatttctaccaattgtattttccaaggtgagtttattgaacgtatttattgctttacaacacgagctagtttattttgtagccttttcatacgtatcatcaccatattgtttgctcaaaatatggtataacaattactaagagtttaattccatatttatagtgaagtaatcattgaattaacaaatagaattatttgattgatgagattcaataaataaatctagtttattgaagcttagtgttataggtctatggtcctcaaatcatcaccttaacactttttaaggggagggataaaagttgtctatgaaagttcgaaaaatctatttttatttgttaaaatagtagttatttattttataataaataaataatatttttaattttattaattaaaaacattaagggaaagatacaaattgtctggacaaaagacactactaatgtcttaattacgacataggtggtgacactctcactatggcctaaaatactaatagggacctataagatacggttgtgcctacaacatttgttttccagttaattaattaattaatttaaaagataaatatttatttgaatttgaatttaagaagtagttatagatatttctaatagttgagagatttccttaatcggttattaaatatttagtctaaactgaaaatttaaatttgaagtaaatatatattacagaatttggttatattatttattcaaataattaaatattatttaataaaaaatttgaactaaaataattgattaagtaaaatgtttattaggtttatttaaatatattgtataacaaaattctaatacagaattttaacatatttaatagttttagttacttgaaaaaggattaatctaaataatctattttcttcataatttctacaaaatgattcttgcttatgtgttgagaattcaacaataactttgcatacaatttatcctactaacccacactagtccttgtgtgtggtaaaagatctgaaagatcaaggtgtgaggttgacatcatcgttctaaggatacaatatacaaaaatactcgaggataacatgatacgctttgagagctaaataaacttctcatctattttactttcagatttagtatatatacatatggtgttcctgatgatgtggtacaatgataattagatgctttaattctgaagcgtacctgatttagtactataaaattaataagaaaaatcttactttttcttttttatagaaacttgtgcttgaataataaatatgttttcaaaaatgtagtatgatttattttaactatatctacaacatgggaatcattatacttatatgtattattgaacttgcattttgtggattgtaatgacttaatcactatccatctcctgtcttggtatcatattgtctgttttgggtataagccctcactgttttattcttaggcaccttcccaaaaaacctcataccaatagagatagtgtccatccttatatatccacaatctttctaatttataacaaatatgggactttggttggttgcacacccaacatcttcctttacacatcttatttgtaaattattttttgttcatcatctttcatattaaatctcttattacttgtcttttaaaaccaaaactcatcacatatttgaaactaaattagaatttatttactttgtttgaaatactttctctttgatgatagtcaactcgttcggttttaatctcgtacttatatgaatattatattttgaaacgattcgtgcacttgcaaatgtaaatattaagttaaccattttcaggttcaacacctattaaaaatattttttcttttttataattttttattttaacaacgagacataatattgcatacttttctacataattgcgaaacgatatgatattcagaacatgttcgttgttatcaacaatgctaattcatagtactttcaaccaaattaagaatagccatcaattgaagttggatttagaaagcgtatcgttgttcgtggagctctgcctaattaattatgtgttcctttctttccattgagtcattgacatatgtgattggtggtaacacaatacagctttaattgtagagaaaagtcttcagccctaatagggctaataagacctgaaaggacgttttcctatggacaaggtcacctctctaatccatttaattaggccaactagtcaaggtcatctaatacaattccaacttgtataaaaattcacttttgtttttcttttttctctttaaaaaaacaaaagttaaaaaaaaaatatatatttagaagcatatcattgccgtgtggacccagtaagttaccaaccattgggcttgggctcctcctaatattctttcttgctttttggatttcatactgaatttagttttgtgacttataggtttgctgtctagtcacccacagaattagatggaaaaatagctatttttcttacttatcaaatggtttccatatattttttttctgtttgataattgtacaagatagcacatacatgattacaagtctacacatttgaataatgaaatacaaacataaaaagctcattttatacaaattaagcatactgattatcagtacttgtgaccactttgttatagtgagattactctca

SEQ ID NO: 199745 - DNA, 1952 bp, Cannabis indica
aatgttaattaacacagtttagtctttaaacagattttatgaaaataaaaattaaatattgtattgtgaagaaacatgattacactaaaaaaaaaacataataaattcaattattaaaatatataaaattcctttaaaaagaaattatgtctgaattttttgtttacatatttgttataaatggatggttgagaagtatctttgctgatggtcttttagaaagattaagatttgtgcatttcaatataaaatcgatagcttcgttggagatacagtagtatagattgttattccaatttaggtctttggttagcatgaataaaaccatgacaccaattgcccaaatgtctgaaaactgtccttgaattcggttttcacctcgacactcgggagctaaatatgctttagtacctctaacacgagtcgtcgagtcatcaaccatctttgccaatccaaaatcagaaattttagccataaagaaaaagttttcttctcttatttctttcactaataatacgttctcaggtttcaaatcacagtgtacaaatcccttctcatgaatataatcaacgcctttcagaatttgttgaaggaactgtttaacttgtttagattcattataaagaggagaatttaagatgaaatcaaacaatgtccccccgacagcgtattccaagaagacattataaaatacttcttctccaccatcaattatattaagagtagtgtcatgaccaaaacacttaataatataagggcaatcatcaaaatattcaataaattttttctcattttctaattcttcaccctttgcaagacgtgaaagttttgacagccataattggatgaaagccacgaacaagcgtagttccatacaaatggcgatggttccttaaccattctcgccatgtaaacagaaccaaatccaccttttccaagcatcgaacccctaatccaatatggagaagaatgcaaactctcttctaaatctccttcttcatatttatccatgttgaaattttctaaattttatttctctcaatctcttatctaatattactaatgttactaatatttcttcacttttatttaataaaaatgtaatgtaatataatatatataaacacaagtacgaatcactatatctaatcctaatcaaaatagtattattatagattttaaattttctaatcctaatcaaattacctttataaattttaacttattcttttccaaattatccttttacttttttaacgctaacccttattgtaaaatttaaaatatatatctttttttttgcaaaaatttagtacgtaatatttaaatacaattacagtattattatctaattaaatttataaaacataaaaataaaaattattattattattattttatcagtgaacaaataacagatttaactatactctatcaaaattggcttcttcaaaagaatctctgaatctgtttaatcatggacactttcataatgttcttggcagtgtcaacagttggtttcgacgaatcggcttctatctctgaccactatttccaatccataaaccttagaaataagcttcatcatcacaacatgacaatctctacaaattcttcacaattcgtagtaacaacatttccttgtcttaatcgagctatacatcccaaaagctacacctagctagtttctcactatgcctactcatcactgaatcttccttctcccctcttcttctaaccgaagcaacatcttcccatttggcatatacatacattcgacaaaataagaacatgatcaccattcaccacctctagaattgtcaagatcgaattaccatgcccctaaaaaagtcctccaaatgatgtcattcggtgaaattggcatatcacaaccaaacttaccagctctctcatgcataaagatcaattaccatacaaccataatgttcaat

SEQ ID NO: 199746 - DNA, 2350 bp, Cannabis indica
ggaatcatcactggtttgttagctatgctagtttcaagcagtagataagaaacttgagctgcggtgccatggaagggtttcagcaaggatacatagaaagtaggataaatcttactctcgagtggtagtcccagcgtgtatgctaccggaccccggcaggcaaccactggaaatggtccaaaataacgccaataaagctttgtattgaggcgtttagcaactattgattgacattaaggctagagtttgaccaacactaagtcaccaacttggaattcgatatctctgcgtttctttttagcttgttaaaccattttgatctgagcttgttgcaagttaaccttgagtctctgtagaatgtcgtctcttgagagaaaattgtcttccaccatttgtatggaagtggagcctcgagtataggctggaattgttggtggagatctcccatacacatttttgaaaggagtcatgtcgatggctgaatgaaagctcttattgtaatgaaattcagcccaagaaaggtacttgctccattttttggggttctcagcggcaaaagctcaaagatattgctccacatatctatcggtaacctccgtctgaccatcggttcgaggatgataggccgaattcatcttcaatgttgtacccataaattcaaacaactttttccaaaaattactggtgaaaattggatcacgatccgaaacaattgttcggggtaccccatgcaaacaaatcaccatgttggtgaaaagttcagctaccttagcggctgagtagtgatctaaaagagcaccggaatgagcatacttggtaaacctctcaatgaccattaaaatattagtgaccccattagaatttggtaggcccacaataaaatccattacaagatcctcccaaaccctttttggcatttcaagtggctgcatcaaaccataaggagttgtaggggagtatttgatgatttggcaaactaaacattgtctcacatagttgtacacatcttgtttcattccatgccagaaaaaattagcgcttaggcgaagaaaagtttgttggctgccagcatggccaccgataggcgaatcatgaaattctcgtagtaattgcctcttgagatgagagtgtttgttgaccaccaacttatgttggaagtaaagtaacccatctctgacctcgtaccctgatagagtagttgaatcttccttcaactgttcatgaataagtctcaaatttgggttggtaatgttttcttggtttagttcttccaaaaattcaaaacatccagaagtgatggtagttttaagagatgaaagtgagtgctcatgctgtctagacagagcatccgctactttattctcctttcctgccttgtattggatagagaattgaaactccatcagcttttgaaggaagaattgttggtctggagtttgtatgacttgattaaggagttcttttaagcttttgtgatcagtacggatcacaaaatgacaaccaagaaggtattgtccccactttgtgactgctgtgataatagcttgtaactctcgcttatatgttgatgtgccaaggaattgaggtcctaaattttttgctgaaaaaagtaattggatgtccctcctacataaggatgcccccaattcttgtgtgagatgcatccgtttctacaatgaattccttatagaaatcgggcaaagctaaaactagcgtcattgttatcgcatttttcaattgttgaaaagtcgttgccatttgttcagaacatttgaaattatccttcttgagtagttctattaacggggcagcaatggttgcataatgagccacgaagcaccgataataccccgttagcccgagaaaaccccaaagctgctttagattttttggttggggccattcaacaattgttgtgatctttgttgggtcagcttgaactcccttagctggtactacatgacccaagtagtcaatggtggtttggaaaaaatgacactttcttccgttagcatagaccttgttttctcgaagtagttgtaagacctttcgcaaatggatcatgtgttcttgaacatccttgctataaaccaatatatcatcaaaaaaaaaaaaacaaattacacaacttctgataacaggtttgaagagtttattcatagcagcttgaaaagtggagggtgcattagtgaggccaaaaggcattaccaaaaactcgtagtgcccttcgtgcattcaaaacgttgtcttgtgaatgtcacgccgatccattcgtatttgatgataacctgctcgaagatcaagtttagagaacactactgcgccaccccaattcatctagcaactcatc

SEQ ID NO: 199747 - DNA, 1542 bp, Cannabis indica
gttccatggccatacgaggattagaaaaagaaaaaagaagtgaagaagattgggggtcgagtgtggctggctagaggtagaagacaaaggagaaaaaaagaaaaaaaaatatatttttaatgttttattttttaattattatttagaacaataatagttcaacacttgacacttataaataacttaacagatctgttaaatttaggactaacaaacctacaaaaatgtaaccttaaggactattgccgctatttctcgaggtgggggactaatttggatcaaaacaaactttttagaattatactgtaaattttccccaaaaaataaactttagtacttctgtgcatttatttagtattacttgaatacttttaatcaaatatgtgaagaaaaaagtgtaaaatggggaaagagagttgataagtctttagtagctgtggttcaaaattttaatttgaaattaaattttactgatgctttaaactttaattgtattgttaaaattaaatgttaggatatttttagcctaacttttggatcactttttagagttgttttttttctttgttgttactttctagacggttttacgcttgtttttctcagttataggtttcacgagattttcaagggcaaaatctgttaaatatcaaaaggacaagacgagttagaaatcgaagaaaatatagtaaaaattcttgaagctactcatggcgaggctgcaatcggttgcaactaattgtcactgcgacgagatcattcacagaaataataatttttgacttaacacaattgtcgtgactaggctatttgtggtcgcagcgaggtgctctgtatgggattaggggtagttttagaatttcgttattttgagttttaaaactaattgttattagagggtttcaaatttttagatcattcattcacaaatagaaccctagaaacaaaagaagaagattcttggagcgagcgtggcaatctgatcgagttctccacctagtttctttcttttccctttgatttctcatgttgatttctgtttttagtttaaacatagatttaattattgaagttatgaattaatttttcagtttagggatatgatgaatgttcattgatgttacttcaatttgttaatgtgattttctatttattctttctggatctgggtgatttgttcatatttattttaatacatgttttagattgaccaccttcaacatgatttaagatcctaatatgaaatttagaaagtgaatattaggaatgctctaattgaataaacataggttttgatgtgaaatgagagtattcacataacttgtgtgaccttttagatcattactcaatgcaaattatatgttattctatctcaaagatgtaatagataatatgtagtttatgaccttaatgatatgaaaaatagtttatgttatttttaaagtctgtcatcaatttttatttcttgttgctttcgacctcacctgtgtgagtactgcttgatacgtgcactttcgtgtttacattttcgtaataagtttt

SEQ ID NO: 199748 - DNA, 972 bp, Cannabis indica
gggcaataccattttcccacaaccacactttcattagtactcgaatcagacaagattttcagatcaggaagctgcgaacgcagcgaggagttgaggcctggggcttcgtctaattggtaatggcgaggcgtccccatgcagagctgccatattttctcctcaaaaacgtaggtggaaagccattttcggcaacagatgctgccgtgaatcgtccactacgcttttggatgatctcaacttgttgaaagatatctaaaggatcgaaaggtctcggctttacatctctaatgtatgtgaagcaaaagcatgttcccatgtcattttctgttgaactagcactagcttcactgcacccaaaaaagaaaaagaaaacatgttagttttatgtaaacaaaaagagtatggcacggtccgctaattgtgttgctcattgcttagctagagtctcatagttagatgctgatcgtagctactcacgacttctatcccgagtattcttgatgtaattgctcaagagatgatataaatttacatcttttattcaaaaaaataaaaaagagtatgacaccataaactcttaacaatatagcgattgatactcaataattaattagcagtttttcatatctaaatatattagacccgatattaaaacgcataaataaaaatatattagttcttgttgtgcttgatatgccctttattatttctcaaacagaaatagtactagttgctagagcaaaaacaaataatattacttctaaataataattaattgttaagtgtcatataaatatgagacaacttttaattagtttctctgttgatatgctagcaaattggcaagtaggcagttgattgattaatatcttcatcttggataaatagatcaaagaaaaaaaaaactataatttaagtgtttgtaactaactttttatgatatgggataatgggagtcaaataataaacaca

SEQ ID NO: 199749 - DNA, 1415 bp, Cannabis indica
aaaaatcctaattaacatttttttaaatgatgattaaagcggaggcccatgataatattgatctcctcctccttgaagcttctaatccttcccataaaaactcgactcaagaaaatatatgtgtttatatataaatatatatatatttctcttgagcaaattagtaaatacacacatgtatatattcaccaagcaaactaatgaataataaacccaaagttgttgtcgattcctttctctagtgtttttcagcaagtaaaccagcgaaaaatgaaggtatttatattattttttttagttattttacgttttattttttcttttttgctgtagacatttggattttttttttctctaatctatgtcttttgtttattttaatttttttgttgttgttatgtaattcatattttttttttgtttcttattgtatttatattttttaacggttattcttttgttgttctaacttattcttttaagttacttttaatttttttttaaaaaaaaattgagcatacgttttcccaaactcattacttattgctcttctcatctccatcatcttcaaaactttctttagtttcttaggcttctttttcattttctttttaatgtttagtgtcagatattattttgagattttgttcatcactctctaattttgttaaatttacaagttttgttgttcagtatgtactattcggtgttaagtattatatatttcatttttatattttttaacagtttttttgttgttgttctgaattgtattgcttaaggaaatcagtatttttataagtttatcttttaagaaaattattacatctacatgtatatttatatagagacaatgaatttcaatagtttcactaaatatttaaaaatttaagatggtggtatagtaatatactttactagtaaaactaaaaatgcctaactcataaagatttccttaaaaaaaaatacaataaaataaaaatattgccaactcagtataacaaacttcaaagaggatacattcaacaaatatgagttttgacaaatttgccccactataaaaacaaatcaaataaaaaactatattaaatataaacattgtacaattaaaaaagtatcaatttctttcgtattttttctaagtaaaagtaacaaaaattacttgttgcaatagtaaattagttttttgtcttatttgaagtatgcaacacctcaaatgcaagtgaggtactaaataagttcccatttatatatatcatagaactcaaaaatcttatacaattttgtttttatataattactggcaccatggtcggtccaagggtggggcaaccgggggccttgggcctcaggccccgtaagtttgggacccccaaaattaaagaaaatgacatatatacatacaataacaaaag

SEQ ID NO: 199750 - DNA, 1477 bp, Cannabis indica
ctagaaatatcacagtacattaaacattgtagaaaatatatatttatcagtatatgtataaggttataaaaaattaatgttgatattttgagtcaaagtgagaaaagcatggtgtataaaagaattcatttttacacaaaaagccattgaaaattaaaagataaaacatcagtaaagattacagaaattaatccattgaatgaacaaaaaattgatactttatttgaattggactaatgaacaaataaaaattgaaggaaaagaaaactcgaacctcggcttcggaggctctatggaagaagggtttcaaggaatctccaagaccagtttgcttctcagaatccgccattgttggaaactcactgtaagtttcctgggttttgggagttgcagattggaggagaaaactttggttttttgattctttgaattaaaaacgagagctttggaaaaggtaaggtcattagcctcctaaacacgtatttttttgtcgttttttatattttcatgtcgtttaacacgaacgacatgttaacttctgattaatgctcgtcgttttggttaattaactcacaaaaataattggatttttttaaatgaaatatatgtatatgctcagttgtccatatattttgtggtctaaaaaaatatcttatttatttatttatttaaattgtagaaagtaacatctgtcactttgttaattctttctcaacacattcattcttatcaaaattttcttgttgaggaaagtgttgactattgagaaagaattaacaaagtaacaatctcatacatagtatttaccaaacaaaaaaaaggagtcatcatactttgcattcaatataattatattcccaaagaccttgtttttggatggaaataaaaaacttaacaagtgaaataatattaaattgaaaattattatatggtaccagtagtgtctaatacattttgtaaatgacacataacaattggttaacgatattttttaaaaactattagacctcaataacaatttgacactaaaaatatgcgttttaacaattctctattaaattctgacaaccttgttttggaaaactcaaaaagaaaacaatgaaataatattaagataaaaataagataaattatgcatcaaaacaatgattttcaatcaatgaacatcacaattagtcaaaccttgttttgggaagttcacaactatagttacataattcttgaactcaattgttcccaatcccaacattaatgaccagaactagcatgaaagttcatttcaattggagatcaatctcatcaacttatatttcaaattattgaaagtacacactacacttgacttgaggaaacccctacatttctcttcaatcatttaatacaagtatacatacttctatatagctttatatataaataaaataaaaataaatatatgttactaaaactagtcaaggttgtccaagaagtgatggcc

SEQ ID NO: 199751 - DNA, 1242 bp, Cannabis indica
ttaatctaatctaaattcactttttatatgtataattcaaatatgtgtagtaattaatattgttatatactgaaatttaattcaaaaaaaatatttaatatggatacacagggatgctttctcgttctacagtcatatttccagtattttcataacttgtcacacaaggctgaccaaggacatgcgatgcactcactaattgaagccactggtaataaagaaattaatcacttattataatttagtatttcaatattttatcattactacagtggtatataaatatcaaagagatatatataccatcagatttttttttcaagtttgcttatacaatatgtaacatttatatgcagatatgttcatagtaggaatggccatgcttatgttcggatttgggctatatactatgtttgttggctcaaagtctgtgaaagaaaaagggccatggcttgctggctctaacttgtttggtctattctatatgaaggtacgtacttttcgattaacatatatacaaagtcttcaaaaatgtgtctaccaatatattttttgagtttttgtaatataattagttattatctgacattaattaaaatatgttaataatactgtatataattttgcagagtcttccaagttgggttgaaatgcaatcggtttcacaggcaaaatcaaaattaggacatgctgtgatgatgctactccaagtaggagtgttggagaaatttcagagtattcctttggttactggactcgatcttgcttgttttgctgcaactgtttttatttcctctgcttgtattttccttctctccaaactctctgttacaaaactccaagattagatatttataggaaaaaaaaaaaaaaaaacagaagatatttatagattattggcctaagccttaggtaaatgtaattcttctgaacaccacacagaactacatggttagaaattctttttattaaaataagggtctttttgtaatgtgtaatataacttagttaatcattctttatattaattggtatacctccaaagaggaaagaagtagatgtcaagttgtgatataattaatgtgtagatttgtattgtacataaacattaattagagaaatatcatttctttcgttctcttaattttctagtaatatacataaatttatttacattatgttcattgttctatttaaataataattacataaaagctatttttattttgaattttttcatat

SEQ ID NO: 199752 - DNA, 1599 bp, Cannabis indica
tattaattgcacttaataataatcattgctattttataggaaatttttagaaagaatttaaaaaatatagaaaaaaacagcgtaagttaccaggttatttttttatggtaactaattactcttctggctaccataagggtatctagttaccataaagatacctagttacccttaattgattttctcattaaataatattttttgaaaaaagtcaactttacacaaaaagtataaaaatccataaaatttataatctcctcaaaaagttaattattgggccctagtgtttaagaatatgtgatatttttttgaaaatatcaaaaataaaatgggatacttacaaaaatatcgaaatttgagttgacttttacaaaaatactgtcacacggaaaagttttcaaaaatactagtgtttttataaaacactagtaaaacacaaaacagaacaaactcaaaacaacagtaaaaccactaaaaaacaccagtagaacaccagtaaaaaacttaacatagtatactgcagtatgaaacttataaaaatacacagtaaaaaagtaaaaaataccgcttgacagtatttttgtaaaaaagttgcaaaaaattagtataccatgtaaatttcccaataaattgtatactttttaaaggaaattttattagagactcctgagctgagtgggccctaagcgcaggcctacctcaccttagcacaaggtaggcctagcttggagttaatgcatgacacttgaatgtgttcttttagaaaagtttacaataatatatattttttgcatctaatttacaataataacattattactattactacgtcagccaaatttgacgcatctgacgtttttcgattttttttatttattttcttgcatttttaaaagtaactttttggttactaatagtgttgataaaaatccaattagttacctataaaaaaatttatttttatatataatacttatttatatatatcttaacaattagttcattatttttaaggtacattatggttgattataatttaaagcacatttagctaactttaaaaattattttcgaaactaatgagttgtaatttaatataacaagctagctaccattttatatacttttttgttattttgaaagctaattaattatcatgtaatataatataattcaattaacataattccaaaattaatgctaactaattaagatttaaaaaaaaattataaaacagtaattaatcactatattaataacggaatggttttttttttcctgaaaataacgaaaaaatatatacttctcacattttgaaatgttcatgacattgaagatctagtagatttcaattatattttttttaagagagagagatgtataaatgagagtattaaaacatacttaaataaataaaaatgttaatttgatacatgaccaaattattttggacaattagatcaaagataagtataaaattctctttttattatttatttagtgtatagttttcaatttaatactttatacgcttattttaatatttatctgtttatattttgctactagctagtattttctagttatacttgttataat

SEQ ID NO: 199753 - DNA, 1947 bp, Cannabis indica
ccacttttatctatggtgctaacactatagataatagaagtgatctctggctagctttatctaagattaatgttgctaaagcttggcttattcttagtgacttcaatgttgtatttcatcacaaagataggaatggggaaaccctattactgttgttgaacttgttgattccacaagctgggttgctcaagcttctgtaggttctatgaaacgctctggctctacatttacttggacgaataagcaagataccataatattctctcatattgaccatgtcttttataatgaggctagggctgatgattttacaaatacattggctcatttcttgtgggaaacatgttcaaaccactgcctctgcactgtacatttagttgctatagagaacataggcagcaaacttttctgattctattatttctgggtagaccacaaggagtacaaactggtggtcctagaaagttggagcaatcctttgagatgtcaaaggttaaaagggatttatctcaagaccatcagacttaaacacaagctcaaaatcttcaataggcactcaattgaagatgttggagaggcttttgagaaagccaaagaatactttaaagaagcttagctcaaatttcaagctaatcccctcgacagaactctccaagacagagaaaaacatttggtgttcttcattatcatttgccaggaaaaaatgtatctaaacttcttgagtcaaagaagtcaaataagatggatttaaaagggggatgccaactcaggttactctcatgccatgctcaaaaagagaaaggaggacaacatgattgcgtcttttgttactgaacaaggcaccctaaatgacaacttcccagatgttgttcaacactttcttggtcatttttcaagtattatgggtagagctagcaccacatcaatgtaaatacaataggattgcattgctatgggttccaaactcaaccttgaccaacaggtatacctcttaaaacctttttctcttaaagaagttagggctgtgatatttagtattcctagtactaaatctacaggccttgatgggtttggatctagattttttaaatctatttggtctgaggtggggaaggacatccacaaagctatcactcattttttttgaaactaatcaattttttgttgaacttcataacactactttgtctttaataccaaaaatagataatccctctagagttatagattatcgacctattggttactgctcaacattatacaaatgtgtttctaaactcatgtgctctcgattggctaaaattcttatgagtttagttaatcaaaatcaaggtgcttttgtcaaggttcgatctattgcatataaaatattgattctccaagacattttgaagaactataaaaggaagaatttctctccaagatgtacaattaaattttgagaagtctcaaatatattttggtggtgtgtttcatcctgaagttattgctcaaaaaataaagctgtctattggagaatttccccttaaataattggggatacctcttagacaacccaaatggaggttagaggactgtggaataatcttgaaaaaaaatgaaacaactctcatttgttggaagaattcaacttattaaatctactttaattggcctaaggaactactggatgagtgtgtttcttttgcctcatagtgtgataaaagaaatgagaagttatgtcgaggatttctgtggggactgaaacagaatcgtactgttgggaatattttacctagatctagatttactaacaagtatgttgattaacatcctaaaatatgaatatttctaaagcaatgaaataaacaacataagggtttaagaaaaccttacattagttgcggcggaagtataaatgactccttccgttcaagaatctctagcccttgatttctttttgttagc

SEQ ID NO: 199754 - DNA, 350 bp, Cannabis indica
gcagcacactccattcctatgtagccaccaccaataacaacagcatttccaccagagcaagatttcataaggccaacaagcgttgttgcatctgacaatttcgtaaataacacacattttcagcatctgatcctttcaccccaaactcctctagcttcagcgcctacttccaacacatgcaaaattcattataacaacaggaaattcattcttgcagcattaatttttttttatcactgcctacttcaaacaattgcaaaattcattacaaccagaaaatcattttttggaaaggaaaaaaaaacaatcataataagttaatggaaaacaagtatgtcatatcgtatgta

SEQ ID NO: 199755 - DNA, 502 bp, Cannabis indica
ttaaaattttattatctagttatctttcagtattttaaatgctttttggaatgacgataatattaattgtttggaagagattctctcttcctttttcattctacatgagtagttctaataaaaataaaatatctagtgggtgtaccaaaaaatcactaaaaataaataaataataattttatatgcactaactcatgataagcaaataaagtacaacaaaaatcattaccattaaataaatgcttaaaattatgtcctcacatttaaggacaaaagtttcaattacctcaaacaatcaatatttatatggaagaaaagtaagaggagagagagcgagtgagagaaaaaaggtaaaagaaaatatacatatattattattgtttcaaaattaactatgatatttcttaatttgtaattttcattctttatacaaataatttttgttctttttcttggtgatatataataattggtagcgagaactttacatatatattattaa

SEQ ID NO: 199756 - DNA, 1714 bp, Cannabis indica
tttcaacgagatggtatccccaagtcaacattcgattgagagtgtcctcggagcagtaagattctctatacttttcatactaaactaatatgttgatggttgtaaattgataaattttacaaattatgatgcaaattacaagtgagaatcagtgataacaacgactttaatagagcgatgacaataattttaaaattatttgataagttttattgatttataataaattatatatattccagatttttattttgtgtgaggattcttagattctcttttcttcactatattctttgatgtttccttttttttttagataaaatttataattaagatttttgacccctgaactttgacatgtactaaatcatctcctaaactttttaagctaaaaattctcccgaactaataaaattaaggaattatttttaattttattcaattctgctaatgcaaaaattattcatgtactaaattatacccacaaacttagatatttactgaatcatactcccaaaatttgacatgacactctaaaataactttattccactttattcttttttcttatttttttcacattttttaaataatattaaatattaatataaaaaaaaaacttaaaaaaaataatcacacgttatatcatttttaaaaaataataacttaagaaatatcattaatgcttagtgatatttttgtctctaaagtaaatatcacattttttaaaaatttaaaaaaaaaaataaaagaaaataaaaaacaacccccaacaattaaaaaaaaaaaaatatcattttttttttaatattttgttattttaatttattacttaacttttttcaatttaatttctctctttttctcttatgaaagtaatctcttcttacctacttaaatagtgatacaaatataaaatttttttgtgtagtaaagggatcaacacatcagtatgttatatcttcacaaaaaaaaaaaaataataataaaataaaaaaatatatatgttatatcatatatgctcaaatgcttggttggatgagaaaagatttacactagagaagaaaaaaagataattgtagagaattaagtcaaactgctgggttggatgagaaaagatttacactagagaagaaaaaaagataattgtagagaattaagtcatggttgaaaatagttacatcccagcgaaagtttttcatgacctaggaaagagcgccgccagccagcacgtacaatcgtccttcctagcgagtcgcgttgaacgtcgtccgctcccagcagtcgccccggtgtacgtcgtctgctccgagaagtccccatcgcacgtcgtccatcccagcacgtcgcccattcagcagtcgccgtccgccttcatcccgtccttgtgatcgtaggcttcggaatgttcctggtctgagagtttctctggtggacctgcacactccggccatcccttcatggttgtccttgcacatcaacatatgtaggggttgaataagtcttttagcagagacgttttacaaataaaaaaaaaagaggaaaaaaagtcagcagtcggaggttaggtcttgtcgtatgacatggtttctttgtttctatggttctatgttgttttgttaatgttcaggtgttaaggttgtgtggtgatagttcggaggtttctaagttgccgggtttcttaattgtcgggtttcgtggttgttggttcttt

SEQ ID NO: 199757 - DNA, 941 bp, Cannabis indica
atcatttaactaagagaataaaactagaatttctgaaattagataatcgagtagagagttatgaccgttttagttaaaaaaaaaaatagactttttgccactgtatggatacggttaaccgtttcctaaatggtgaaacatttcttcgagaaactagtttaccaattgggaaacggtgaactgaatcgcctagtggcaatcttgttttttgtgtctaacagctacatttcactccaatgcaatataaacttgattttaactcaaaaattcaagttagctgagaattatttcatataccaaacctattcaagtgattttaatgagctcccaagtttaaaatctaacaaacacttttcatacactttgagccaaaatttgtatttattcctctaagtgtgcttgctaatcactcgagatttttcattgtttcatcatacttcttgagtgagtttgcttataattctaaattgtaattttagtttgagaattaacagataattaggatttaattttgaattagactttcaattattatttataaatttatgaagacatatttggaatttaggtatattattggaaaatttacatccaagtacataaattataatttaatttcaaaaatacggtgggtccattataatactaaaaatgtaccgttttataccgtttttaatttaattggtttttattttatgtttctgacatcaacccttcatgtccattatgtccattatgtccatcatgtctacaaggaatcacgtgctacaattctgtaggctttttgttttataaaaaattagttgtttagttttgtatgagtaagtaatggtttataatcaaattttttatataaagtaagggagagtagagtatttatagaggttaatatcattcattgtgctttttattttctcattttttagtttttttctttttct

SEQ ID NO: 199758 - DNA, 676 bp, Cannabis indica
ctaaccaccacacaaacacaagtcacatacaacaacaacatggatgatcatcataatatgcatgatattatctatattgatcaaaatcaagatcttatgatttgataatattaacaatgataatcaatagtgcaaaacaaaaacattgtactcaacaatggcatctccactagatggagtgaattgatgagtcctagcctgaacataacctctagcaaacctaaacatgccacttcctccaatcacaggcatctctcttaccttagaaaaaacagtgttcctaccaagaatagttatggtacttccattatattttccttcactaaaagcaaaattcatggccataataaggccaacctcttcttgtgatgctgacccataaaacccttgtgcctttcccacaatcttggagctcagctcgggcccttcggttagaggatcgtcgatcatcgccaccatcccgaaactcgttgaggagtagttggcttgaggtgggattaccatcactgaacttggcttcttaccactcactatgtcatgccaatagaagtggaattgtgtgagcttttgttgcttattgaggtttagtgtgttagggtctagggttttggcaaagcttttgttgttttggtcttctttgatgattagggctatgcttaatatgcataatgaagag

SEQ ID NO: 199759 - DNA, 1541 bp, Cannabis indica
gtaaaaatcaacttcgttggcctatgattattaatacatcaaaagtgagttactttttagtagtagagggcaacatgaagaacattttctactaggtattaataaactcaatactagtacgaggagatttcattgtaaatggttaataattttctgcaagaattattacataaaaatatgtggacagagtacataactacactaatagtagtatgagacgtgatgtcgtatcttatctgaaatttttgttggaatttctagacattcgatcaagaatttcaaacatatttcgaacaatttccatttcgtaaaatattatcgaaacaaaatatttagtaatttttgtgtgtacgaactcttaatattacatacctcaagaataggaagaagttgctctatgagttcttttgtatccccatgatgtccaacacttctaattgcatgatgaccaaccactatcttccacgtggcacgtgattcctttaaaatcttctcaacattaccttttaaaatttacaagaatgcagttaattagggcaagattaaaaaagaaaatagttccggacattatttgtaacaaaatttattatattatttatttttgttatatttcataattataaattagggttttttggaaaaatatctttctttttctgtcatttttgttttgataattatttcataaaattgtcttgcaaacactctaacagtctaacactcttcgatactctaccgaaattttacgatactcggtagagaattccaaacatatgtcggaaattcttcacattctatccgatgagtagttcgaagaaaaaataaattattaaaagtctatttttataattattgcataattaaatatgataatttaccattaataaggaagaaatgtaatcctttcgtgaagaaatggcacgccaatcataagtatgaccttctgggtttgagaaatacatatcaacaaatggagttgtgtccaaaaatataatatctgccaattctacaaataaataaaaattatgttagataaattctattttatatgcaaacaaaatttaaataattaaaaaaaaaaatcaaataacataaatgaatcttcctacaaagtgaaaattgagtgatttaaataaagaaaaatgtactaataataagggaaattttctctctttttttggtttatagacaaaatttacaaaaatatggcgtttttttaaatgaaaaaaattataagaaaaagttaaaaagatatagaaaaagaaaatagtagcactatgttttccatatattttttttaattctgttcttgaatttttttctttaaaataattttattattgcacacattgtataaaaattatgaaaacgatggttaatactattttgtattttgtattttacaaaaattattatttattttttgttatattaaatgataaattgaactctgtattttttcaaatagtaccctaagtttaactttccgcaatttttttaaatacaacaaacttaaatataatttctagcacgaacaaata

SEQ ID NO: 199760 - DNA, 696 bp, Cannabis indica
tataatgaagtaccaattgctcttcaaaatctaaacattttgttactgtataaaattcattgcaactatatctttttaaaactcaagggcttcacttcactgcagaatacaaattctcaagaacaaggtagcaaacaaacgaaaaatttagtggcattttaagatgtgagtaaaaataaattgtgacatttttgaaatgttaggtattaaaaaatgtaattaataattaaaacttaatatttataatttgtttgaatttatttatttggaaaatataccagccagccacatatccctctttctctctcaagtctcaactccctaaccctaacttatctgcgcaatggcgaaagagaaatgaaaaacgtgaggttgttttcggggtcgttggaatcggcttctaccctcgatctcacttttaaatctgggtatggacactacataactttatattctaatttttatttaattttccaaaagctctgataaaaactatagactaatttcattttactgaaagtttgttttgataaatttagaatttttgtctgatgagaagaagagaaagtttgaaaatttttcaactttgagagaaatggtggctgccgagtagtgagaattcgggattagaaaattaccttccatattagggtttggcatcctaaggttactattttgtcttcttgggttgttgat

SEQ ID NO: 199761 - DNA, 2268 bp, Cannabis indica
atcgactgcctgcatatcctgcacaatcgaaatcatgatgatgaatttttttattttttatttttgaaatgtaatgatcatgcatgtatatatttaggtataattaatgcatacatgttgtcttagccattgttgattgtaatattagagtttatatttgtacagttatggtagggagatgagatcaatattagtttcattctgtcttttggctaacatagaaatgaattgctcattttgtgtgaatgtattttatgagtatatgtagatatattatatacatatataaacatatacggtttttactaattaattaacattaccaagaaaaaaagatcaaaaccctatgtttgcctcttctaaatctttatatataattgtgaaaattcacgatttgaagttgagatgattaacattttatcgatagaaagaaagcaaaaaaacgtcaatagtcatagatcttgataatcaatctatcgagtttttgaccaagtctcccccataatctcaagtcccaacaatatcatgttaaattaattaataaaaataatgtgtacgggttagtattctctatgctatatattgctattaatgtatcaagtctcatgtacataaaattttgtaataatttttaaggaatattattaactaatggtctaaaatgacagcttgaaaaatattagctaccactgataatgaataacaatgcttataatgatatcaataattgtggtaataacagatcaataatataacaatatacactgcgctagtgctatatagtatatacatacaccgtataccacgtactatataatttcttgtttttggaagcattccaattaatattaataaaaatacacaaatacaatattcaatgattcttgcatcaagttctctcttgcataacttttttgcagaacacagcttaggtgacccttcaagccctgataactaggtagagaaagaaaggtctctagcttgtgttggctatatatctatacatatatacatagagagagacacacacaaatatatataaacatggaacattttcttctttattttctattttttgcaacaacagaaccctccatgccaccttgtctggtctaactttaaacttatataattggacctaattggaccttatttattgatgatgatgatctatctatatacctctctatttaatatttattctccattttaattactgggtatatatatatatatatataatgaactttctatatgtaatatatgtgtattattgcccgaatgaacaagccaaccccagtttacggggtatgtacattaattgtaacattaggtttttattaattttttcttctaagtacgcacttgtatatgatatacatattctacaccctaaatagacctataatgatatttggtaacaatataattatagcatacgtattattcatataaatatatatactaatttctcatttgtccttacgagtaattaatatgtctaatacacattttatacaaattattagtgtaattaattattaggtgaaaagtaatttatttatatttaataattattataaaataataccatatacaatctcaggtggtgctagacattaattgttgagcttgaaaactaaatgctcttattgaaaacattgttcacttgaaaagccaaatgaaaataaacaattaataaaaaaataaaaaagaaaagaaaagttgtccatgaagagccagctgcaaaaacttaacgttgtacggtagtacttgtgaaaattgcccaattaaaaggatcggaatattattattattattattattattattattattattttgatgaataatataggatctgagtatattgctccaatagtccaatgtatatcatcattcatttctttttccttggcatatatatatatatatcatatgaattatatataataatctatgttatatatatatatatatttctatagttgtagaattgtgacaattaatttcacctgtataataattcaacagagacatataaaagatcaagttgaattattattgattgtttgtttgggtaataaaaggtatttgattgaaccaaaaaaagacaaggggtgtatatatatatatatatttaatatattgttccaattaaaacaaaaaaaaaaaaaaaaaaatacaacgtgaacaaataaatagaacagaagaaaaatacgaataattgttggatcagtgagatacgtacttctttattaattatta

SEQ ID NO: 199762 - DNA, 1543 bp, Cannabis indica
tttttactttaaaagacttgggtaaatcaagtacttcattgacattgaagtcacttaaacaagtcaaggcctctatctctctcagactaaatatcttaaggacccgttgtgtagagcaaaaatgcagtttgccaagccaaactccactcctatgaaatctggtctaagactatcagcacaaggcagtgatcccataaaaagtgatcaattctatagatcaatcgttggtggcctgcaatatctcattgtaactagaccttatataacctatagtgtcaacaaggtgtgccaatttgtgcacaactctctgcaatctcactagtgtgcagtgaagagaattctcaagtacctattgggcaccttacactttggtctccacatcagaatatctaacacattggacttgtggggttttgtgatatagattgggcagctgacccggatgataggagatcaactagtagattctgcatttattttggattgaatcttgttgcttagcaatcaaagaaacaacagaaaatttcaagatcatccacagaagcagaattgggaagcttggcgagtgttatagctcctacatgcttgaaccaaaacacattaaaattagacttgtactttgtacgtgaaaaaagtcttaaaagaaagagcttgaagtgagacatgttttggactttgataaaaattgcagattgcttgataggagatcaatgttccagtcttaaacaatacacttctctttttattgtggaataatccacacacatgcacatcttaaaacttgaaagaaaaaaggcagaaatgtaaagaaaacttggcattttcagtcatgaaaaaataataggaatcttccatttatttcttactttgaattttacatattgaataaggaagaagctgacttcaatccacaaaagaaacaagtatatatttatatggccaaataatcccccacaaattgtactccaaccagcacaaaaagaatatgaatgaaaaaaatcatggatacacaataaaaaaaaaaaagtgtttcagcaacaaagagggcatataatcaatccattctcattacagttgggacacacatggtactgacaaacatcatcatcttcagcaatgaccttatgactgccattgcaattgaagcaaagcacaaaccttattcctccacacccttcacaagggccatcactcctatcaatagggacagttttaaagagtggcctaagctttccttgctcatgtagccccaacacctcctctgctccaccaatgtatctccctctaatgaaaagcttaggaggaactgcttttccatccaacatcattctcaactcttccctaaattctaagtgcatcgaaacatctctttcgaaatacagtacccgaaagctctcgagaagaaagcggatgctgctgcagccttcgaaagtctttcgaatccctctcagtgttgttgtgtagaggattactgagtctgaaccacccggaggacatttctcttcgaattcttctaaagggtcataatcatcatcatcatcat

SEQ ID NO: 199763 - DNA, 1154 bp, Cannabis indica
ataataaagctattgaatcaactttggtctctatttgttaaacaacacaaaaacctgtagcatcaagtattaaattatccagcaaataaaaccaggaaacagaggcatacactagaatttcacaaatattgaaatgcttttattcatttcatttttttgttctttctttctaatctttgttatgaattactgttgaatatttatgtatatgtatatattcaccgaataatataagatcatagatatattcaatccttcttattagaaacaaaattcttataaaagcaacatagaagataaagaaattataataaccatttcaaaaaaaaaaaaaaaccttcccaaagattgaaaagttaagtgatgaatagatattggaagaaaaatacctacaaataaaaatcacccctaataattaataaaataagtggatatttaaagaaaagattttctggaaaagaattttctaaaaaacaaaagcccagtttttaataaacgaagtcaaatagaagaagaattaggtaaaaatgcctgattaatttagtattctcaccagaaattctatttgactgctttagtggataaattgaaaaacaatggcacccttttttaccaatgcaaggtaacagaagtaaaatcccaaagaaaattcatagggttttatgtatgtatatataacattaattttgagaaaatccctaaattttttatgtatcaagtttggccggaattccttctccatagaaaattcatgggcttttatgcctcctacttacagattggatgagaaataaagcaaaaaaacaaaaaaaaagtaccatttttatttaccttattacaaacaaaacacatagatagtccaaactaacgaatcataaatcaatgatttgaactatgattatagatatggaagataaaataacaatctagataacaatgaacaatatcaagacaatggaaaaaatacataagttaaaaaggacatacaaagatgaagatgttggtgctgggtgtagcctttttcgaagcctgagcgaaagtaggggactatggaggaacgaaatgagatgaagaaattgttgagttcagcggctgtgctaaaatcaaaatgagtttcgactggatgtaagctctgggcgatccttcacaatgta

SEQ ID NO: 199764 - DNA, 1461 bp, Cannabis indica
tttaggaatttttattttataaatcatatgctgtctaacattaattattgtagcatacggtagttgttgcaatttaacatcgggttatacatattctaatttgtggcacctaatattaaattgcactaataaacatgtgttgtatgaagtggtgttagacatcatatagtgtcccatagcaagtacgtactatctgagacatttcctgtggttggccattgtacttgatcctcttacactatatcttagggcatccctttctaataaagactctgtatggtgtttgtacaggtcgaaatgatcctccaagctttggaatatgaagaaggtatttttaattgtcgtttttgtttttctctattatgaatacacatgagaaaactggtcttcagtcattgatatcataaaaatgggcattacagaacatgggaaagtgctggatgagttcttcctttcaacagcaggtagacactgaagtttatttatttcttattttgaatgctgattagaaaaagtttttttttttttgtgtgtggtgtttttttaacaggaaaattccaaaccgagattggaaaaagtttggcctctgagatcaatagtagaagaaattcaacatagcctcagccaaataataatctcatttttcaaacaattgaatggttgagtcgtttgcattcttcacacaacactttttgttttctaatgttttaaatataaaatgaaatgagattattgctttgagggtaacttatagaatctgttgttttgctttcttgttgacacttgcatataggtgtttgaactttaaatttcaaagggatgtaggggtcatctattttacaatgtcttctggcccactacggttggcgctcttctaacttcaatttctttggtgctttttattgaattcaaatccatggcaaaattttccaaaaggaaagtcacaaaaatattcttcatgtcaaagtgatcaactcctttgaattggatgaataacatctcttgtccaaagttgttttaattaattgacgcatcatttgaaatcataattaaaataaattttcttttcaacctgctttttcatatttatatttaataattttggtaaaagttatgacaaaattttagtagttagatataatttgaggataattgagtgaatgtgacaaaaaaagaacaatacatactgcagtatatgataagaaaaggaaaaggtaaaaaagtgtttattattcccaatttattcgggttgcataatattatgagacattatctctcatttcctattgtttttattttgtctttagttcaagttatgtttctcgtgtctttgttttcgacgtgatgtttctcgtgtctttatgaagcaacccataataaaacataacataagctctgaagtgagaccaccatgtagaaatttgaggatgatggtattaacattatcatttgtacaatttc

SEQ ID NO: 199765 - DNA, 1376 bp, Cannabis indica
taatacttgtgtttgttgttgttattttgattgtgtaggaaaaaagtagaaggttgtgggcatttcttgtaggtgtgtactgcgtttcatttgttatttattacttgttgtggaaggcatacaaacatgttggtgggttgagagtgaaggcattaatgtcatcatcacaagtgaagcctgaacaatatgcagttcttgttagagacattcctctacacaaaactaaatctacaaaacaacaggttgatgctttttttaaggacatttatcctaatacattttacaaatcaatggtcgccactaacaatattcaggtatgtatatatattattctttaattatatatatttaagtatgtattctgtaattatttttgtttttatttttgtttttatgtaagtaaagaataagaaattgaggttatcaaaaaagtaggtcggggttcgggcctaagtctagatcttggaacgaaacgagatctaggttcgaaattaggtctagatctgattctaaaatattaataattgaaaatataaataaattttataaaatatcttaaataattacaacgtacatcctcataaaaaaataatttaaattatatattattcacgtatcaaaaacatgataagaatgcagttatacaccaaataattttccaaaagtatatatttcctcaactcattttctagcaagcaagttgagtttgttgaactcatcacaaaaacattaattcaatcttatatatatatatacataatatataggtgaatattctttggaaaagattagaaaagcaaagaaaaaaccttgcacaagctgaaacaatatatgaggagtcaaaaacaaaaggcaaaaaatcaccatcatcatctgaagtagccaaaagacctactcacaaattaggctttcttggactatgtggaagagaagtagacagcattgaacactacacaaacaaagtcaaagaacttgaatccaaacatgaagaagaaagaacaaaaacacttaaagataagcaattaaatgctgcattagttttcttcacaaacagagtatctgcagccttagcagctcaaagcctccatgacaaattggtagatgaatggacagtaaccgaagcccccgaaccatcgcaactcctatggaacaatcttcgaatgaagttcttcgaaagacaactaaggaaatatgttgtttacttcattgttgctctaacaattttattttacatgatcccaattggggttgtgtctgctttcacaactttgaagaatttgatgaagcttctcccatttttgaagttggttttgaaaatgaggattgtgaggacagtgctcgaagcttatttgccacaacttgtgttgattgtgttt

SEQ ID NO: 199766 - DNA, 547 bp, Cannabis indica
gtagtataataaaatttaattttcttaatgtataatgttcatgaggtagtacaaagagtagttatgtgagaatatatttcatgttattccaatgtatactatatgtatatgtatgtacatctgtgtagatctttgttgactataatatatataaatagatataatattgaaactcgtattatatatatatatatgtaattatttatgttatgaatttataatgttttttttttaaataagaaatgaatttatatggtagctttgcttgtgtttggttaatttagcgcatattaaggtcgcagggaatcatgtgcaacggggaagccaatggaatccaaattatattttgtgtccaacctaactaaccatatcttttcttagtacgatgattcattttattaattacttaatatattcacaggaatattttgctctttcattagttaaactatcgcttctatatacactaataaatttattattataattgtgtcttatttttttttttttaccaaagttatcttaaaatgttaacaagtcctcttat

SEQ ID NO: 199767 - DNA, 646 bp, Cannabis indica
aaaaaaaaatacaaacatacggttataaggaattttaaatatttttaaaattttatttacataaattacgatcttttaatgtatttttatattgtacttgttatgtttatatttcgagcagcaatatggtcacaacacgtgtacaagagctgaataataaaccaactcgaatattaaaaaattaaatacactatttatatcgcctcgaaaaaatattagtcacggttttaaattaaagtctttccttatgtgactaaggataagtcaaaataatagatcattagtagaccagcaggatcaataataaccatctcaagaactacagagtgcagaaaaaacaagacaagagactttgttggtcgaacaagacagtataaaagagttcgacctaaggagcataaacaatacaatttgaaaaagaagtttatataagaattattgaaaaacttcatcatggatgatcaatgcgagatgaatgtccaaacatgtgattcccatatgttatcttgtcactatataatgagagacacaacaaatacattatctcggtaaaataactatttcagataaggataactagtgattttcagcggaaaagcaatttatcccacatatagtagatcaaatgaaatgtggggattgtcca

SEQ ID NO: 199768 - DNA, 839 bp, Cannabis indica
aacttttaaaaaatattgctaaataatcacgaagcaccacctataaaaaagacaccactactctaatgaccaaaagcaatattttttaaataattttaaggtacatttatacgatgctaaaatagattagaatgttaaaatttttcttataatattttattctaaaagtaataaataaagcaaaaatttgtttcattaaacaaaaaaaaatatgcaaaaagtctgaggaaaaggaggggaatcctaatagttatggccccaccacaataattatacctataaaagcataagtaataagaggtcttgtcaaaagtagaccatcttggccatattttattcgaatcagatggcctaaaaagcaaaactttgaagcaccattgaaccgataataatgtattgaaaaaacaaaaacaaagtttggtttctgctgtgaagtgcttatatacatgcatagtactgtagataatgcatcctcagtgatcaaattcaaatctggccgtttatttacgaagcagatttatatggactattcaaaggacgaggaaagcagtattatgcgccccttgaccgtgcccacttgtcaaacttctaaaattctcccttgaataataatcccctctggccagtttcatgctctctactgtgcatctccaattgatgattaaggatggttgctaaaattgcaatggactgcccaaagtcatttcttttttttttaacgagaataatagtaatgttgagtaataaagctaattttgagaagattaaaagcttcattactaaaaaaataaactagggatgtaatgaagctcggtattaagactgatgtagattatcta

SEQ ID NO: 199769 - DNA, 1481 bp, Cannabis indica
ctatatatttcaaacttagatgtgttatagtttttctttaaaatagataggataactaatattttttttatatgataattatgctccaacatagcaaaaatcctaagtgtcactgtttgtgactcatagtcacgttagtatataattttgaaaagaatattgttattggacaccagtagtgtctagagcctctagacatatatcttcttacgattagctagcaatattccttaaaagttattacattaaactatatgagacctgatacttagttggactaatagcgatattgacacataggggagtgctaggtaccactggtgccttttagcatatttctcttttaaaaaaatgaaagaatacaaaagaaaagtcatattttcaataattactacattacttttttttttctttcacaaaggaggattaaaactctataatttcacagtttgtttgatgggtgaaaattatattatttttttacaaaatacaacaacttttatgcccatttgaaaatgtcattttttaggatgtaagattagaacttcatagttttaactattttatttgaaaaatatacttcattaacaaaagttaatacatcaataagaaatagatagaaaatcattcatctaagtcagtttaccatctacactaagtacatgcacaactaacccatgcataaatttattacctcaactaagaatgcctcataaaacttgaaagcaaactggcaatatcctctagtaaagatcctatttcataagcaaactggtacgattcaacttgcttcgaagagagtggaggtaaatgtcttatcatctgtcatatgaaggagcaaaccatcgtccattgccttgtgacgtgtcaagttgcccaactttgttggaactaggtggggattgaaactcactcatactgctgcaggtagtttctttgactggtttgtatcatctttcaaggctttggattggataatgataagaggtgtttattggctgttgtttgttgggcaaaatggggagctaggagtgatatggtttggaataaaaaaagtaaaaaggggcttttgagattattacatctgccacaaggtatcttcaacaatggaaaaatgctcaaaattctagattgcaaacatcttggtctggtttgacagcttaagatgattggtggggtttggttttggggtagccgctagagaccacagagggtttttgatagaagcttgcaccagatttttcagtgttcgagttgcaccagaagttgctgaagctgtgggagttcgggaagcactaagccggatcaaacaactaacaatggcagcaggtattgttagagacagacaacttagttttagtgcaagctttggggagctctgtgagaatttggttaaagattgtaaagatttggttgttgatttgagaaatgtttatatggtgtttaataagcgtctgcaaatgtagttgctcatgagtttg

SEQ ID NO: 199770 - DNA, 2428 bp, Cannabis indica
aaaagataatgttacatttttacacacgtgaagaacccattaaaatcttatttatatgcgatgagtttgatgtagctaaaaagtggatttttcggaacaggtatacacttgacaatccaacctattggccaagacatggcagcgagtccaacacacgcaccccattgtgcccagttcaacctctccgtatcagcaaatttcttcaaaaactcaaccatcaatacttgaagaacgatggttatggcgatgattcccaagaacagtttgttcctatgaattcctttgaacacgtttctcttctctaatttccttgcgttgaactcgttgaagacttggcatagaacaaaagtattgaagattaaagtgtctttcaccttctcatctacgttgaatatcgatttgcctttaaattgtagtgtgagaagaattgatatttgataaaatgcttgagtcaagagatttctccacatgatgttggtaatgagtggcgatgttcgacccactggtggattttccatgagctcatctgtgggcttctctgtggccaaagccaaagctcctaaggtatccatgatcaaatttacccataatagctgaacagctgttaatggaacttctcctgctgaaattgcagctacaaagttgattacaagtgcagcaacattcactgttagctggaattggatgaacttttggatgttgttgtaaacacatctaccccactttagaaccgtagccactgaagcgaaattgtcatccaagatgacaatatctgagctctctttggccacttcagtaccttggattcccatggcgagtccgatatcagcttctttcaatgctggagcatcatttgtgccatctcctgtaactgctacaacatggcctttttgcttcaagcattgtaccattaagagtttatcgaaaggagatgaccttgccatgacacagattttgtcaaccttctccattctctcttcgggtgtgtaatttcgaaactctacaccttctataactgctccagtcatgtcttggcctagtttaaggattccacactccgtggctatggctcttgcggtgaatacattgtctcctgtgatcattttgacgtgaactccagcattttgacaagcttcaacagctttctttactcctggacgacaaggatccttaatgccaaccatgcccagtagagtcaagccatcttcttgtaatgtttcatttccttctaagccttcatgctctgtaatttcaacttgtttgtgtgcaaaagctatacacctaaggctgctggctgccatagcttgaataattttctcaaactcaagtttttcattttcaccaaaatctttaacgattccagaagcatcatagtagcttgtacacttggccaaaaccatttctgcagctcctttccaatgaatccatattgtgttatctgtctttcttctcaacgaaaccccacttcgtttcttttgggaattgaacgcttcaacttgaacaatggcacaacttttcttcacttcctccgtatccatattcaactctagaacagcccaagaaagaattgccttttctgttggactacctgaaatttcaaattctgatcctaaatttggcctatatatactaccagttgtattaagagctattccttcacggaataactctacaacatatggtgcaatttttgagtaagaattttcaatgacagattctttaccaacccaaaaatttgtgaccttcatttggttcatagtaagagtacctgttttgtctgtacatatggtggttgcagatcccatggtctcacaagcagagagcttcctcaccattgcattatccaccatcattctcttcatagaatatgcaagtgtaagcgtcacagcaagtggcaaaccttctggaattgcaaccaccacgattgtgactgcagctgctataatctccaccgcagcattcactatgtcatcgatctttgtcttgctaccgttaaattttttatctccattctcatctttggtagttcccgtgaagtaacgaacaaacaagactatgagaacaaggagagcaatcgttaaaccaaccttaccaatggcagaagtaagcttgtcaagacgagcttgcaagggtgtttgctcattcttatcgctgctaatttggctcatcatttgtccccatgttgtgttcattccaactgaagtcacaagcatttttgcatagccatcaactactttggtgccagaaaacaagaaaggattttgtttgtggttaacttctacgtggtcgctctcccctgtcatactagattcatcaacttgtaaagaatgcccttctaagaacaaaccatcggctgaaacttggtctccaatttttaagcaaactacatctccaacaatgatttcgaatatcgaaatcttctggcgtc

SEQ ID NO: 199771 - DNA, 652 bp, Cannabis indica
ggccaacaagaaacttgaaggggtcgagcagaatgccatagctagagttaactcgatggctaaacggtctatctatgatgcctggatggccaatccaaacatggatctaagctttttgggagaaggagtcatggagatgctggcctttttttagcaaaccgagaaagacgaggttgcggatgccgaggaagaagaagaagaagaacttaccaagtctctaactacgtagacttggttatttatatttttttttgaataatggtcttttagccgagaccttggttgccctttgtggctttttttaaaaacttttgctttgttggatggccaacatagctaatttaaatatatttttatgcctttatccttctttttttgagttatatatgtttgttaattgcgttccaattcacaatctaaacattttttctctcgatttagcttaggacactctttgggttacatgcatttcaatgtcatcttctttgagttacacgagtagttaataatctaccacgttttcacgagcagttcacaatctgacatgttatacgcgaggagtttataacttgctatgttatacgggagcattttataatgtgctatgttatatgcgagcaccttttgtacaatttttagttattaaactaac

SEQ ID NO: 199772 - DNA, 534 bp, Cannabis indica
aagagggaaggcacatttactagtatggaggtgaagatatggaatcaataaacccacgaccatactagccacatcttccgagtaagcgttcccaacattggccaccgaaacccgtcggcgacggcactcgaccaagttgacctgattgacgcccgcactggaagtcaccaccattcgcaacgctagaagcagttggagtaggtcggcgttgacggaggtggcgtggctggcaatcatcgctcggactgagtttgcatgcatttctcttcaaaaactggtccataggtagctccgactccaacgctttcgccaatcggaacttttgaatatcaaacatgatgagaaaatagtgggtagcgtctttacaatcagtaggagatggggccgagatggtttagaaaagccactgaatttgaagaggaaggagaagagtaaaacaaaatgtaaaaatgaatttaaaaagtcagttaaaaaatatttatgtaaataaatatttatagaattgaattttttttaaaaaaaagaacgtaaaag

SEQ ID NO: 199773 - DNA, 530 bp, Cannabis indica
aaaaagtaaatattggacaagacactatagtaattatgtatatgttgaaaggatataataatatcatttaacttattcttttacccttttgctagctaataataagtaacaataagcaaatgcaaacaatatataatcattctcatgcatgaaaaatcaattaccttgttggcaatattgttttacttttacccccctacctatatacctttttcattaattattattataattcattggttaatattaaattttgtaataaataattttgaaattaattgagaaaagaagcaattaggcaatgatcaagtctttaattaaagtcacaaattaattaagatgttgcatgtgtatgtgtatagtcaaatttctaagagtaattataactaattaattgttcattttcaaacataatatttttatgcacgtactatatatatatcttaaaccccatctaatcatatacacacaaatttttaaatttattttatatataacatctttatacgtgttataaatattaataaatt

SEQ ID NO: 199774 - DNA, 514 bp, Cannabis indica
tgcatctctaattccactggaaatcatataataaaaactcccacaatagcctgtttgcatgctatacatccactgctgctgttcatattgtcaagagagaacgttcacttccttttgggacactgcaagactgtatagtgcctgaagtgaacttatggtctattaaacaatactcggtaaaacgtcttgtaaatgcaagtttcaatatgttaaaatggaatgaatgaacttcctgctaattttttttataatactcggactagatgatcggtttggtagggagtaagtgtagttgatgagggttcaagtctcgcaaatgtctcctaaaacaaataaatacaatgagatacatacccataacaaaatgctctgtttttgtcctttacaataaagtaatgttactcacatatcatctaacaaattatagaacaattttagttttattagccaatgctgttccatcagtttttttattaatggttttccattatatggtagggagagctttgaattt

SEQ ID NO: 199775 - DNA, 1297 bp, Cannabis indica
caaaccagatttttcatcttagggggacttatctaaagttatttattatttttgtttgaaggttatttaaagttatcttgaaaaaaagtatttacacatgtagaagtcatattagtgaaattaaatcttttaaatattactttataaaataatttttcgtttgaaaaacgtttttatagagaattatcagacacatgttatacaaaacccaaagaactgaagagtactattttatttttttcatcgaaaatatgatagaaattctttagcgataaaagtctttcaaggtgaggtggcctaatactagccttttcaccaaccttcattccaacacgcaccaccaataaatgtgacatttttttttcttttattctttacaatccaaaaaaattaaaaaacaaataaagctgtctctgctgaaatgtggagcacgcattatttgggtatatatgaaataatttatatatctcaattcagactgaataaaaataattgtgataaaaaagagacgcaattttcatgttaaataaagttcccaatcaaaatcggcgaaggtatatactaaagataacgtaatccctataaaaataaaaaaaaaaaatatcagaacaaaaacattcatacttacaaacaattaaggaagaatctttcgtattgatcaattgaggaagaatctttcgtattaattttattatattgttattaatattaaccaagtcaaataccggttccaatccattgctatttgctttaacgtactattaataatgcgtgtctttatttaacttagacgttctcttctttttaatttatatctcctacttgttaaacacaatttttttaatacaaaacattttaatagacgacgacttgatttttattttttttcctttactgaaccgacgacttgattaatatcgtgatgtttaatcccatatcaatttttttgactataatttttggcgtattttatgaacaaagatgggaagaaatccattataaatgaaagcgattacgagaacatgacaaaattaattctttcacaacttaaatctcaaatatacaaaaacacaatcaagataataaactaattgattaataccgtagtgactcagatttctagctaggaaaatttctacaaacataaatacatacgtgaaataagacaagcccatgaattccccgaaacaaataacaaaacttttgagaaagaacattattattattactaattacttgagaaaatttattgtgatatcacttcaaatctcatcatcagttgaaggctaataaagtg

SEQ ID NO: 199776 - DNA, 1023 bp, Cannabis indica
taataaggtagtctcggactagtataatcagaattatttgtggtatgttctctcagaactctcaaaccttttctgaacatcttcttatcaatttaatttggctgagaatgcaactgatcacatcttgaatgtgaatatcaattgagtttgttccaaaatcaaatattggttcttgttatttgctgtccgtgatattgaaagagagaactaacaaccctgtccctctttttaacaagttttgttcaaattttaaaaaacaaaaaaaaaatggtgattacgtaatatgcgtatgtttcatatcttcacgaagataagaaaaaggttagaatcttacattagggagagcaactttattctcattggctaattaggatttttgcgaattttgacatgtactaaattatgccttttgaactttgaagaccgttaaaaattcttattaaactattgaaattgttagatttaagaacttttatctaattttaataagaaaagtctaatatgaataaatatttaaggggcatgatttggtacttgttaaaattttaaaagtatgatttgataaatatcaaagtttaagaagcatgatttagttcatgaacaataacccaattagtaaaattacatgaaattggataaaaattcttaaatttgataaactcaataattcaagaaaaattttaacgacccaaaaaatccaaaaaatataatttgatacaaattaaatttcaagagataaaaattctaactagtcattctcattctagtataacctataaagtagaatgagtgtaatagagaataaagaatatattattagtgttactctgaaaaagattacatcatactagtcacatggcaaacaaaatgagagagagagagagcataacttataattattgaagaaaatttgttctcaagaacaaaactgctcgacctagcactgatacaaaacaaaattagtagctctaaaatactgtttggatgaatacaatctaaatttacacattatcaaactaatgg

SEQ ID NO: 199777 - DNA, 1806 bp, Cannabis indica
gcagtttgtgaaggaaaaagtggtgaggaatgcaacaaataaacaaacctgggcaaatgtagtaaagaactcaatgaagaatgctcccaaacatgaccatcgcagcagagattgcaaggaaatagaacaaggcaattttgaaggtaatagggccactgtgaaacaccctagcaggaagctcaaggggttgggatcatgggattttctgcctaaagcaaatggaagcttcagaccacaaaatgaattcccgattagaagaatggagcagaagaacttccatgagtatatgcaagcaaaacactgtgaaaaagactggaagaaggcggtcatcatgttcagagataatagtgggctatcgtggagctgcatcttttataatctttcaagagagttgggtaggaaattgcaagtgagccaaatgtttgatgatcgaataattatctggtgtcaaagcgagaccaaagtggaaaagtttttggagattggaaattggattatcccaggtacaggagatgtcaaagtatcctttaagagatggtctgctgaggagcaaaatagggacatcaaagttgagtgtagagattcttggattggtgtcaaaggactacctctgaatttatggaacatgaaagcaatgagaaaaattggagccttgtgtggaggattgatagatgtagagaaggatacagcagaaatgaatttccttcatcacctgagaatcaaactcgaaggggacagcaaaggctttgtgccagaattgttgaatctcgaactcgagaaatctgtaattaaactagagttatttaagctcaatgatttgggatataagttcagtggatacttcaacacatgttggcatcaagattttgagattggtaagatgatcgaagaagaggaagaggtgactgggcttacaaaatccaagggggatcctggtgttagggagattggcattcctgaggcaatcgaagaagaagaaaggattcaagaaagtggtaacgaggctccagtgggatggaggcggtcgggttgcgaagaggcgacggaggtattgacagaagaagaaacgcaggtgaaacacagggaagtcgaacagccttgggcgttggaggtagtatcggtgccggagaagatggttttttcaggaactctagaggcggcagtggaagtcgtacagcctcgggctcttcgcccaataaaatctttatcgtcctttgctgatggtgcggcggccgagaatgtgtattgtcacttctgtatcaattcacgagaaggtatggcttccaatctttgcgtacgtgagcaaggaaaggtggcgagactccatactgtattcgaccgacttttgagaagtttgagggtgccacgtgtatacagaaatcccagttcaaaggttttcctcattcccgataatagctgccagatagttgattatggtctatccaaaatgggcaggagggagctgggccgaattgctagagtcccagtaaagttgggcctgcacaatactgggccacttaagcattatcctattcatgatggtatatcgggctgtgagtttttttctgggagtgggccggtcaaacaatttaatatgaggaatttatggtattaccgaagggggccttttaatattacattggaccagaatttcggagcccaagatcttttattaaaagggcaaagagtttggtgataagtgatcatagtgagcccagaagagaactgatggttgtggccaagaaaaggaacccagtacaaataataaaggagttttttgatggcatacttcgagcgattaatcct

SEQ ID NO: 199778 - DNA, 704 bp, Cannabis indica
caactatgcacactttacgaaaaaccaaggtttgggttttcttttttgtaatataaacttaagattgacataatcactcttttagctctgctaaaagtttttagatccatgcgtgttgaattgacttgatcatcttgattgataaaaatataaaatataggcatattgaaagtcaattagtagaaatatttgacatttttttagcactacatagataactaaatcatacgctgctaattatctacgtgtatataagctttacttaattatctttgtaatactttcttggaaaattcaaggagctttgtacacaaaatcttgtgcacctcaattgtgcttgtccataaaactagacatgagtggttgaaactgagtgcaaaaacatatataattaaaataaatatgtataattggaaaatagtaaactaagccaaagagagtaaacataatcactcatgccagccgtcttaataattaatagatgatttcatatgtgcataaacttattttagataaataatatattttaaattaggtaaataatatattttattgggtaaataacatgtcttactttaggtaaatgttatgcaattttaggtaaataatgtgccttaaaataaagtaaacaacatgcctaaaataaggtaaatgacatgccttaaacaaaaattactacattataataaggtaaacaacatgct

SEQ ID NO: 199779 - DNA, 892 bp, Cannabis indica
tcatgcaaaagcacgatgttcttcgggtcaagtgggtcaacatagtctacttgaaaagggaagacacatggagttataagctgccaattaacaccgcctggtattggaggaagtttagcaggttgagaacaattttagctccaacaacctacatgaaaattcaaagcttctcgcttgtataatagtttgcttaagatagatttgttcttgaacactagagctgttaggtgcaagttatccttgcccaaacatagatttctcctctggcaggtagtgaacagctagcttctcacaaaggatcagctatctcgatttaacatctttgtaatagattctagctgtcctgtttgtggtttgcagtaggaaagccataagcgtctttactttgattgttgttattcaaagaaaattgttgctgggatattcagctggttaggattcaatgcttggcctcttgattttgtttgttggctgaattggttaaaaaccagaataagaagcttgaaggaggacatcatgtatgccacgactgctgcaacagtttattgtttatgaaaaaatagaaataattgtgtctataaagattactgttttttagtggttgtaactgtaaaggaaggtcaaagtgttgttaaatgtaggctttatagtcttaaagatagaaaattaaaaggttgtaattataaattacttataggctgctgatgtgattttgtagctcgtgtgagcagtgttttgtagcaggtttctgctggtgtagcttatgtgttcaagtgattaatgaaatttcatttttttgataaaaaataaaaataattaatacaattaatatgattctataagatagtaataaatatagtttttgaaatataatttatatgactttacatat

SEQ ID NO: 199780 - DNA, 864 bp, Cannabis indica
aataatacttaattgtcccatatatagtcagacacagagaggtcattcattatattaattaaatatttgtacaatattcgattgttgcaagttggttttaaacaaccaagatgataatttatattaatttaacgtcggtggacatgatacatcaaaaaaacttaataataataatttattattaattattaattttttgtttcaaataatgatgctgttttcatgcacatgtttcatcgatttgattagaaaaagaccttaaacgttttcttaaacttttgctttttgaattaaaaataaataattatgtttttgtggaagccgcgtatagcgagcaaaattaatgtagtatacatatatatatatatatatatatattatataattaatctaattaaaaattcttctaacgtggagagagatggataacttccaaattgataaagagataaaagaaaaataaacaataaagagaagcgatttggtatattataatgataattatatggttaacactctcccacacatatatatatatagttataccccaaagatatatgtacatataaatgactaaaaaatattataagtctatcatttctcaataccatattataattgattggtataattaaatattaagtcttatataacttgaaaataaattttaacaatattactaattaattatagatgccaaatatagaactaggcactatacccaataaatactcatatatatatatatatatatatatatgaatcatttctcaaagatttaccccaaatctagtaatattcttaaattgttgcccgattaattggctatatacatatatagtggttaatttttttctttttatt

SEQ ID NO: 199781 - DNA, 759 bp, Cannabis indica
aaaaaagctaactcctttcactacacaaactgtttcccaaattctcaaaactcaattttgggacactgattcacctgagaaaatggcttccatgcccgttgttgaagatcgactcgaacccgaatcaaaggtatcatctttttcctcttctgaacttttccctttcatttctcaattttggggttttgttatttttctatataccaatactaagaacactctcttttactttcaggagaagaattcggcaactgataaagctgtggatgataaatacaatgttgaagctgctgagcttagagctaatgaggccatggtttgttcaaatttctcttcttttttatgtttcacttatcttttttggttattgggttcaattgaaaattttaacttgttatgctttttgtttgttttttgtagcgtttgcctattttggaggctattccaatttatgaacagctccttactctctttcctactgctgtaagcttcttttttagctttctttggcctaattccttttgcatatttttgtaaattttatttaactgtaagtgttttggtatgagctttgatggagttgttataccttagattgttttttcatgggttgcttcaaagtttatttcttttgggggtcttagctacactatgaccgaatgtagagttatgttacaaccacttcgctagaactcactccaaaagctagctagcttaagaggggagggtgctgaaatagttatataccaccaaccaatt

SEQ ID NO: 199782 - DNA, 608 bp, Cannabis indica
tgggagtttgttgggttttatgccctaaataaaactcatttcaatataatcagatttacttattaatatagatcagaaataacatttaatgttgcatggttcacatgatttatttcatgattatatgtacataatgtatgaattcatctgaaacccttttcacatacttgatcctgtttattgtgctgtcaacacattggaaagtaaacatgactatgtgaataaagtttcctagatttatcagacacagggttttactgatatgataatctacaacagagtttacttgaatttggagaaatgctatgttcttccagagcactagtttaaggttaaaagtaacgtctacggttagggttaggtagtcgactaggtagggtaagttagtcgactacggtaacgggggaaaccggggaaccgtaatttagttaacgtttaacgtttacgttaacgttaagtttaatttttaaaacttttaaaacccgtttaaaccgttaaattacttactttacttaacgtaacgtaactaaattaagtcccgtaccgtttaggttagtaccttaccgtaagtactaaactaaagtagtactttaactttaaccttccgt

SEQ ID NO: 199783 - DNA, 590 bp, Cannabis indica
attggagaacttggtaatattaatttgtagtaaaatttattgaaaagaaattaaatggcccagtagagtgattccaaattttagaagtacgaagaaaggtttggaacttgagtgatgtaggacttttgattttgtttgaaggaattttatgacaaaaacaagattggtgtatcagtcagataaggatattgaatagaaggttctaaatgagtttcatactacaccatattctttatactcaaaagtaactaagatatataagattagtacaatttatttatcaaaatggaatatgtttgtgacagattaatgtgctaatctatttatcaagggcatagttcaaccctgtgatgctccgaaggtaattatctcagattgagatttaaagttacatccaaatgctgagtaagcctgtaacaagcacgtgtaatagattttgacagttcttgaaataagcataatctgctgaatgagttttcatataataacagttattagagtattcttaatgtggtactgatgcagcttaaagatacaagtttgtatattttttatatataatggatggaagagttatgttgatccaaagt

SEQ ID NO: 199784 - DNA, 1703 bp, Cannabis indica
taacaaaatattaacttttacatatttttaatataaaataagaaaattgccaaaacaatactattaatttaatataacattcttatatattttaaactaggcaatatagccgctcttcgcacggttaatttaattttataatattatagtataaggcacggtttaaaaccgtcgcctataccctgttataggcgacggttttaaaccctcacaaagttcacattaatgatggtttttaaccgtcgcctattttgcccgttttacgacgagatcgtataggcgacggttatagaaatcgacgaaaatactttaaacgactatttaaaaatatcgagaaaaacaatttttgtagtagtgtttattagttacatactaaatttttttaaaagaaattagaaaaataagaaggttaagcataccgtatcaactcattaaaaccaaccttttatatatattaattaatttatgaacgtacttaaataatttgaaaaagcttcaaaaagtgtgtctttttcaaaaagcttgtatttcacattttctaagcttctagaacagattgtgaggttgcgatcactgatatagaagagcagggattgctttattaattgttgctccaaaatttcactctcctagatgtggcgtgctgtcccatatggcacactcacaatagggccattttgtaacatgagcatgccttggtgcttgatcattagtcaagtcttgcaccaaacacctcattggggtggagagtcttttgttgtttagctttctttcttttgtatttccactcaaatatatatagagagctataatcatgtatgttcatagaaattcctttaaaccccaataagctcgtttaaggggggggggggggggtgacctggtgacttatgaaacaccttgtcaccagcatatgataggggcccaactgtgtactcctttgccctatcaaggtcatataataataaagcgatgtttatccatgcttcttgtgtatgcttcagtatggtctttgtgatgcctatttgttgcctttgttgggccattgcgtgccatttgtctatatgtttgcttgtgggttgtgtgagattggtcattggggacgctttgtgtttgcttattcatgcttcttgtttgcactcaacatgtgcgagacatatgtatcgtgcctaaacctttgaacttgtttgcatgcatgcgcgcttaggctgacttgctagctcggtgtaccagcaagtgccgcacgtttcgcctatgtgggagtgtccaaataggcagcccgtgacactagacatagcaatatggctgccgttggttttgctctttctcatctttataatcaaacatggctttggaattttttcctcttttccatatgctcttttagcatattggcttgtgttagtgtacgtagttaatttttgtattattactggtttgcttttaaaaaaataataaaagaaagaagtgaaaaaaaaataataaaagtaaagagttgtattagtgtggcctaagaaagttagcaaaaaagaggaagattggtttcattcattatgaattgtatagaaaaataaaggctacgacatgattgtcatggtgcttttaggtttgtaaaacttaatttacatgtaataacactcactgattcaataaaaaaaaaaaaaaaaaaaaaaaaaaaaaaaaaaaaaactaaaaaaacgtac

SEQ ID NO: 199785 - DNA, 869 bp, Cannabis indica
atctcaattcttttttatttttcttttttatttttattaataaattaagtaatttgaatcataataaaataaatatagaagccgattacataatttaaattattattaggaaaattgttccatatacaactttttaatatatttttttaaaatttacagtttgggttgcttcggtggtttctccggcgacttctatttaagttgctatatatgtgaattttggttgcgatttaggttgctccgttagttgctatgagaatttctatatcgaattccgtaaaaaaacaaaaaaaaaaaaaaaaaaccattttgaagtgtaaaaattaaaaaatttaaatttttaacaagttttgagttttccagtttggattttacaggtttgagtttgaggaaacaattacataaactcgtcctaattacatttgtgttttcatttttttttcctaaaatatattattacatgttcttaatctttacattgtaccacataatatgataattaattatatcctcatcaaatctaataatctatttataatttccaatccagctcactaagagtactcatgaaaaattaatttgaaatctctttataattaaaaggatagaaactacaacacgactatcctactaattcataagtgatgtagttttactagatcatttcttaaggtgtcaaagccaaagatagtataataatatattggtataatttaatattacctcctacatattttaatttaattaataatatataaaattataaattacttataataggctgctttagtataatattgaacactttaaggtacatataataaaaaaaaatattagtatagggtaatagtggtacctagcatttttta

SEQ ID NO: 199786 - DNA, 769 bp, Cannabis indica
cacacctatctacgacggttccaaaaaacccgggggggaagcccctattacaaggatgtgccaagttatggttgcatcttccgaaaatggacttggaggtacctaaagacagtactctcctatttgaaacacaagataaaaaactctgccattgaaggaagtcgtaaactggagcacaccaatgagctaacgtaatttcttcttagaaatttctattgaatttattagtgaatgtctatatttataagttagtgactctttgcccctcccaccccaccccaccccacccagccgaaaaataaaataaaaaagtgtgttatttaacattcttagattgaattatgtaggcgtagttagtagcaacttcatctgagttttttctacaaaacttgatcatttgtgcttttagttccactgccggtttattatcttcttagctgcgaaaacacttgttctttattgtgccttagatggtctacattttggtaatttattgaggtgcatatgttgtgacttgtgggatgatagctcttcatattacttttattaccacttgtgtatatactactaatgtgggatcctaactgtatacagtgcatatctgatagggagagagtgtggacatttatgaaatttgtgttaattttcttgcagaagctgctggtgatcatagtattttcaacatttattttagccaatgatcaatattctgtctttattgcctgtgtagacaattgcccccttcgaagtttgaacttatttatgtgtg

SEQ ID NO: 199787 - DNA, 1951 bp, Cannabis indica
aaattaaaaaaaaaaataactatttcaatatagataatttttagtccacgacaatggcgccaaaaacttgttgcaaaaattatagctatgcaaatatacacatttacttgtagtttttttcgataagactgatatcgttcccatgagtattgactatcaagttccaatagcctattttattttctatttggttattgataatagagtttttaaaactaggaataaaaattgcacaatttatgagaagaaacactaaagaacaattgattgaattcaatatttatgaaaataagattcctaatcttctcactatgcactctattattctataatggaacaactaacaaatttttctaaactaaaatgatagacatacaaaagtgtcaactatttgggttaggaaatagaaaacccgacttacaaattctctatatctctatgagaaatttaaacaaaaatgaagtaataaattcaactcaaatcacttagaccaatttgatactcccattctaaattgaaatctacgtcttctcctttttaacataatcaaatcttacttctcagattttgattcaattttatagatcgtatgtaagagatgcgcaatcaatcacatacataaacatgaaataaataaatattagttgaaaaataaatataaaattgaattaaatcataatagagtttcaagagagtcaattaaaaaacttaatgaactctaggtttgtctttttcaacctcctcctctgtattctcttctccaagtaccattattattaacctataaacatttaaaacctaatttccctataattttagaacaaaaattaccctaaacaaatgtctgaacgcgtcgacgcactatagcaccacttaactcatttctttaaattggtagtgttgtagcacatcaaaggggcactggagcacctggatagttttcttgtctttaaaatcttgttacaataattgatggtattcttgcaataactctctcagtataacttagaattagacgattcaagatatttttgaaagttgaaagaaatatctaaaatttaatttattcataatatttttcgtgaaagtgaatgttgttggaaactcattttactaggattagatttactaacatttatgttgattataactttataatctaacatcctaaatatgaaattcctaaaaaacgataaataaacacattaaggtatgtaaatccttatattaatggcagtaaaataaaatgactccttccgtttaaatctctcgcccttgattcttgtctgtagcagagcattattaagatatgaacctggatcttctcctccttcgatggtgttcattacagtcttacacaagggcctaagtatcaccttgaatagagtggattgatggatcgatatgatgtgagtatctaataaacccaaaaggattcaactaacaagaagtttcgaggataccctgatagtcctcaagaggtatatattcctgtcctataatttgtgttttgatttaatgttcatacatctagggatccattggagatatggtacaacaataatcaaatatacaaatcttccgttgcatacctaatttagtaccataaaataaacatgtatttcatcttattaaagagacttttctttgtatttcaaaaatacatattcattatattgagaggtgaggttgacaacggtagaaaaataattcagttgtaggtatggttgacaccggtcttttaaacaaccatagaagagtgagattgtgactacaataatctaagagtgagattggaattttaaaaattcgaacagattgataatcctttcgaaaactattagttgaagtgaagttgacacccttagaaaaataacttggttagttagattggaacttcaacaatcttgtgaggttgataatacttagaagataattattgtgagaggtt

SEQ ID NO: 199788 - DNA, 636 bp, Cannabis indica
  modified_base (575)..(575): a, c, t, g, unknown or other
gctgcttagatgatttcctcctgcccagagttgttcatgtctttctatttttttttttttttcatttttttgtagagagtgatcttaaagttatcgtgaaatcagtctattctttttctgacactgtcttcgagtgggattgttttattaaatctattaagttcttgttatctatctttttaagtgtatatcttcaacatgtaatgtgaaataataatattgtagcacatcataaatttatggtaatacgaaattttttggttaattttttttttctttatttaataactaatttaataactaatgtattatttaacttttactaataaaattaattattttatttaaaaaaaaatgttagatctttacattgtcattttgagatatttaatatggcaataaattggctaataagtaacgttacaatcatacacgtgtgtgtgatattggtcacttctattgtacaattacaatcatacacgtggctaaataaaataacgttaatcacatggttattttagttcacatgttgcatatttataaaatcaaaactgacaaagatcacaggtgaaccnttttaaaaaaaaaaaaaaaaaaaaaaaaaaaacgaaagaatacacaattgtagaaataatt

SEQ ID NO: 199789 - DNA, 1245 bp, Cannabis indica
gaggaaattgcgtactatacccactttagcttaaccattttaatttttaccttctgtttcttattctttcatttatacccacatttataagtattgttcccattataccctttattcattatttaggttaataaaattgcaaagccacacacactgtctcccgctctatcaaggtaccttcttttacgatcttcgctgaccagtccaccattccttcacatactccgttcgctacgccctcattgacctcgactctgcctcctccgctaattcactcactccccaaccacctctatactgacgaattgcttgcactaatgaccctgtgtaacactttcgacaatacctgaaagtgttggatgtgaacaactgcattgccaaggttaattttctatttattgaataattgaattcagtttctcccgtttcttagcttaaggagaaatattgtggctttaaagctttgtaagatgcaatactaaattatagtatgttggttaagcttaatgttcacaaaattctatttggtagttgggttttaattgattctgcatttcttttccaaattaaaaaaaaggtagagatttgggaaagagatttaggaaggtaatttctcttatttgttttctgttttattttatttatacattgggttttaattcttcagcatccagcttcttggtggccatgaaagtaatcattactatgttttcttaatttttataagaaaaacatttcttttgtttcttcttctttggtgttcatacagacgtatagaaaagtgaaaagcactaacaaagcagcaggtataattggatttttcttcttccttctatttcatatcagtttatttagttactagattttacattagctgctcaaattactttgttcgatttttaaaagctttgtcattttcttatctaatttgttctccaaatctcctactagaaattgctttagtcaccaagttcattgtcattaaagaagtgaatttaccacttataatggttgtaatggaggaacatgaagtcttcacattctcatctgatgtttttcattgtactggcatcgttcacatgtttgataagtattcttatatattgtgtattttgctcttctcaaattcaagtttttttagacatggattgatggtgtcttgtgaatttaggtctctagaagttcaagctatagattcatttgtatatttttaaaattgaggactcttaaattttgaactgttat

SEQ ID NO: 199790 - DNA, 1462 bp, Cannabis indica
ccaactcagttgccaagagaagtgagcgggcatagagaagaaagagaagcaaccagcaagtgatggagagagagtgcaagcacgtgaagcgtgagtgcgcgtacgaccccgatggctcaaggaatttgtaggctagagcaaagagagaggagcggctgggagtattcagttgtatttattttcttttattttcattggaatttcagaacagagggtatataaagacccttagaaaaatttgtgtttttgggtgttgaatgaaattgctgaaaacggctggagattggccttgtctcgaagaagacgtatcctatcaataaccatccattgcaacattcgttatgcattgttaaaaaaatgatttaaaatgttgaattaagagcataaaaggattagtccgacacatattacttctgaacaattatttacaagtgtatatatatttatatatatacaatatataaatgagcaaattaggttagaccataaagggtacctacttttgtgaaataaagaagagccacttaaagactcacctaaacaccacacgtatgtggtcgttcgaccaaccgaattgaactggttggtgtggtgtacaccttattttttggagtgttttattagctggtaaaagagatattttctccttaaaatttttagacacaatccaacttttcacgattaaaaaaaacggttttcttcctattttatttttcccattcaatttatttttgaacaataatattattgaaggtatacatttaacggtttgctaaagtacagtagtatttcgatacattgtacattgtcacaaccctcttaaaaagagtgatttaatccaccactcaactcaaaatatttattcaataatattgttcctcttttattaattaatttatattaacagtgtttacaacaccttcaattatttattactttttttgggtctacaattaaaaagaaccacaacaaaattagatgccaataaaaaaaatgttatttataaggttgaacatttacattatgcatcaataatgcatatttattcttttttttaaaagaaacctcagatcaaattaaaccaaaaaaaggtttttaggatccatatagcgaaaaatccctccccttgacagttcagtaagctaaggaagacaacctggcatctttagagagtttatcaacacaattgacaaaagcaaaagaaacactaataaaactcctttgaagatccaagaccaaggaaaacaggggccacatcttccaattcaattcagggacctttccatattgagagagttaagaaccaattgagaatcaaataagatagtaacctcctcccaatgattctctctctcccaaagcaacgctaatttgatagcttacaactcagcagtaatagcactaattgcagccaatttatggtcctgacaaaccaattttggttgtcaaaatcagcagccaa

SEQ ID NO: 199791 - DNA, 1036 bp, Cannabis indica
tttttttaaaaaaaaaaaacgtgtatctaatttaaaaacaaatgacacacgatgcactgtcgtttctaggaattaataaataatgttctctatttataatcaagtgtgagtatggctataatatttatatagacaatgtttgaaaagttacattatgtaactataataattatattaattttaattaggaaattattattgaacacttacacgattaatttgaaaattaattactaaaataattagtaaattattacctataaacttatattaaaatttagttgattggtaatttaaaaacaaatttagtaatttagtctttgagaaagaaaagatataattttgttaatgttagcgcaattttttgttaattaataaatgaatcttgattgataattaaataatattgaaagatgactgtaaataatatagacaaataaattttacataattttgaagttaaatttttataatctcacgagtgtattttatttttgagtttttgtgtatacatagtacaagtattatacaaactattgatcataagaatctttagtatctccaaattggttgtccttttgtctattgatttctacccctatttataagaatcaagaaatttgattaattatatatttattgggccaaaattatatttttaaacctaagctattggtagaatatattattttttcttaaaatctcattctactccttccatttgaacaatcttctctctctgtaaacacgcacgtcacaatcggactacccacacgacccacgactcatggaccacctcgacctcacgatcacacgacctagggtccaccgcgaccgccacccaacactgataatattttcgtcaaaggtaatctctaattttttcatgaatttttaactgtaatcaatgacatatggaatatctccatgtcgagtgttaaacacttttgttttagtggaaatatattaaagtggctaattaaaaaatcctaaattatggtgataaatggacttaggttcaccatgccatgtgcta

SEQ ID NO: 199792 - DNA, 1270 bp, Cannabis indica
aataataaggagaagaaaatctttgacaatctcaaaatcagatgcatgtttgcttccctgatctgtagaccattgcattgcattgcattgactcaaatcaaatcaaatctcatctccaagtcttgactttcttttttctttttctttttttcccttcttcttaattgattggcacagcacagcctatttcaaaaagaaaaataacaaaggtcagttcaaatgagatactctgttttgtagatatggtttccatttacggaaacagtttccatttatgcctaccctcatcactgaagatgaacagagttgtaacttttgtcttgttaagaaaaataaaatatgataatagcaatgataaatgttgttttcattttctttccagagaaacaaacagcagaagtaagtaagaaaagttgggagtgtacgtggtttcttacctattgagttaaatgaaaaatggaaaatcccaacactgttgttggtggaatcaatggtgggtagagtttggagaagacgaagatgagggcctctccgaaacgacaccgccaccttgatcgttgtcattttggccatcctcgccgtgaattctggccggaatgcagaacgccgacaagccatccgatacgaaacgtgttccgaaaatggaggaagaagattggtgaatgggttgtgatctttgggaagccatagctagatgatgatcgtcccaagcccgaaccaatggtgaaaaactggactgaagggttcccctctggttaccaaacgacgccgttgagccctgacccagcaaagctgccggggctaacgattgcgacccgaaatcgtatccgcctcctctgttgtcgcccgcttcgctaccccacggaaccattctctggtaactcgacccgaacccggccgcgaagagagcgtgttgttggtggtggtggtcattttgaggagcgtggtcagcaccgccttgggaagactggtcatgatgagccataccgtggtcatggaaggagtggagggaaaggccgagatcttgggtcgggttagctgttctctggataatgtcttgtgggtatgtcgggaaattattcatggcggaagtagctgagctcgtggggaagaaagatttcatggtgtctgctatggaatcggaatccaacggctgatgttgatgaggaatgaatccggacccgttatgatgatctgcgttcgagtgctcatggcccaactgtctatgcagctgaaaattatagccggaagactccgactgctctaccgt

SEQ ID NO: 199793 - DNA, 503 bp, Cannabis indica
gcgaaccatttctaatagttcattgatatttgccagcacaattacgtgccgacaaaaagctcttaaaaaatggaggaatttttccacgtgaaaaaattggttgggggaaaaacttttgtcgatgcatatttgcgccgacaaaaggttaccgaaaagcaatttttaattattagcaagaaaattacacttttgccaatgcacatatgcgttagctaaagttttcaaaaaattagtgggaaaattctcgcgtaaaaatgtagttggtggaaagacttttgttgggacaaatgtgcaccggcaaaattatttcataaaagtttcgtttcaatataggataagttttgagactttgtccaacacaatatagattgttatcggcataacaaaatgagctagtaaaagtctcttaatataacatggtcgaagctattccccttgccattttcttcttcttcctcttcaacccaccaccaccaccttcccttctctctctctctttctct

SEQ ID NO: 199794 - DNA, 2557 bp, Cannabis indica
gacaattccatccaaaatcagaattgcaaagcaaataatttcatttcctttctttttcattgaaaaaaaaaacccaaatttagagtcaacgagattggcataatttacatcaaattcaaaacccaattcagatccatattaaagaacaacaatatcaaataaaagaagaaaattaatgaccttgatgagcagtggcaagattctgatggtccaagaaacagaaaatcttgagatgaagctcaaccggtaatctctccattaaaaagacaagaataaatagataaacaaataaaaatggtgactttagagcgttggagaagaagatgaggcggggaagagaagagaagagtagttataactttatagaagtagggaggggggttgccattgattggatttgggaccaacagttttcatttttctatctccattacacaaattaaataaaataaaaacaaaaagaatttgcagatatgttactataaagaaacattattaagatcttacaaaaaaaaaaaaacattattaacagattataggaaggttaatgattgtctgtaacccctcaaattaaaaaattgaaaatgatggttaggtagtatatatatttttattttaaatttgtttatcattttcattacattaatattttatagaataaactattattaccactctcaaatcattaaaaaaaaaatccaaacatatttttttttatataattttagattaaccagagctcttattctataaatttattcgaaattcatgaaacaattattctattttcatttagatgaaaatatttttttattgttgttgaattattatttggtcattttagttttacatacttaacaaatttcttatacagtatttgttggtgctaaagtggcatgttatgtaacgttctataatttaattaaaattttttattgattgttatttttaattattgaatttaataatttttaaattatttaatttaaaaataatattttattttatttatacacgtgatattgacgtgataatgtcacattaacatttacagtgtcaactcaatttttgttaatcaagtaagattgaaatagaaaaaaagaacataactaagaataatttaagagaatttttaataagtgaaaaatttcagagaatattatttaaaaatagtaatattgagaagacaaattttttttagatatatattatactctcccaacaagaggtcctaagttcaacattttttagagcaatgtcaaccaaaaaaaattataaaccttctctcaatgtcaacaaaaataaaataaaaaaaaaaaaaactaaaaaattataaacctatattaatactttttaattatactacattacttttttttaaaaaaaaaaactatactacattacaagtttgttaaaaaaaattatattacatttgtaacatacaaatcttaatgttttcaaattttatatattttatttcctttctatatctaaaataatataatatcatgatgatatttctagtaattcccacccactatattaattaagaatgtgcaaaaaagtcattcaatctaattacaaccgattgatctaattacaacctatctaataaaattagatatccaatcataactagatagattaaatacaaatttttgaaaaatctatatagatcgaatcagttattagatgggacattcggtccaatggacaatccaacccaactgattcaattgttatccaattatatttatatatttttaaaatatatttaattatttttaaaaacatattaattaattttatttaatatacacctgcacacatgagattacacataaaaaaaaaaccataaatctaaaatatcgcatatcattttcctaaaagaataaacttaagagtgatatattttataatttataattttatatgatatttttatttgatgtattgaacttgtctattaagaattaagacttatgcttattaagttggattggatttgtgttgtgctgttatattttaattatggtatcatacaaattaagttggactaaattaactaataattgttgtatatgttggcttgtattttattactatgagaatgaggctttaaattacgtgttatatttttttataatgaaattcaccttaatgatggctaaaaaagattggatgaattcaatcaaattaaatagaaaaccagttaatatatccaatggttaaaactaattttgattagattcggttaggtctaaatttattgaatgtaattcaataaatacccctaaattattgattttgcagattatttgaattcatctaaatttaatgagcattgctattaggcaccagtggtgcctagcaccttctggacatgtcgcgctgcgattggctagcgatactccctaaaagctattatattaaactatatgagacccgatacttagttggaccaatagcaatattaacacatatgagggtgctaggcaccactggtgccctttagcatttctcaaatttaataattataacaatctctctaactttc

SEQ ID NO: 199795 - DNA, 1310 bp, Cannabis indica
cataaatattaaaatttctctttcattattcgatattggatcaaaatttaataatttaatatttttaaaattaatacttatagttagatttgtttagtaaccatcaatgagtaatacccattgagaagtgtaaggaccgtcagacaccatctattttaccattggtatgataatgtctgatttgggcgtaagaccccacagatttgttttccggcaccttcctaaaacgcctcattccaatggagatagtgttcatcttacatacccaagatcctttccatttctagctaatatgggactttagttgtacacccaacaatcctcccctcaaacaaaggaccatcttgcctaccctcagacgattacagatctgaacctgaatccctcgattccaacactcacaatccccttgattaatatagatgaatccattcactagctaaattcgaaatccctttcaatacctgaatccctcgattccaacactcaagatcccctttgattaagctagatgaatcccttcaccagcacgattcgaaatccctttgaaccaaatctgaacttttgacggctctaatagcaagcttcacctcctttgattggaaaattcgaggatacattcacatggctaatttttggaattttgctctgataccactgtaaggaccgtcggacaccatctatttctccattggtatgatatttccgctttgagcctaagccctcacggattttgtaaagaccgcttaactttaatttggaaattagtagataattagggtttaattatgaaacttgcatattagcttggaattattaaattatgataatttatttaaattcagaatgcattttatatgtcatatataaaatttcataatcttgcatgttttgtgcctgacaatattggaacgcggtgtttggctattagaatcatgtcctagtgtttttagtatagcggagtaatatagttagacattgggaatatcgcgaatagtcaaaattttagagttgacaaaaatacccctaagtgaccttttatgacttttagtgtgggaaaggcaaaatagtcttttcgcccattggtgttttatcttttaatgggtttatattatgtttaataatctgattttgattaatgcttttaggctcatatttgtaataaacaaaaccattttttcactaaatcatttttgaaaaattagaaaaaagtaagaaaaaaggtctatatttcaactctctctttttctctctcgaaatctctagaaccagctaaggtttggtgtgtttctcttgttgggttttatgcc

SEQ ID NO: 199796 - DNA, 1303 bp, Cannabis indica
attaatttggggcccattctcgaacatccgaaaaaatgttgacatccatggatcccaagtcaagaacaccagtagcattgactgcagcagcccacttagcggaattatgagccaaaaaattgaaattcctatcaacctttctcagctttgagtcttccaataaccgaaccgcgcttttgaatcgatcagccactcccttaatgtccaaaacctgattcgtattgcaaatggtagaacaatttgccaccaccacatcattatcacagtaaaagactacctttcccttcagatttcccatagcatactctgcagcactagctagcatggaagcttctgcaagcgttggatccgtagccgagaatctctccgagtaaatcaacacaattctgtcatatgatctctaaacaccgctgccccgaacgaatgatttggttgaattgagacatcagtacagcagttccaccaacctgcatcagtgattctcttatgcacactctttccagctttggaattccatctggatcgatgatcattgtatagtcgattcactaaattgatggcctccattatagggcgaatactcgatccgtgaatcacttcatttcgtgcttcccagatcactttgaagatgcagagggcccctgtcatgaactcatcaaacgaaaggagttgtggtctatggttcttgtcgagaaaccaagccatccagcttgtccagttagtgcagtgtaattgatcagatcgcactccccacagatcgacttccaaaccaaattgtcgatgcatagtggcattcccagaacaagtgtaaagtagtctcctctcccgtttcgcaaataggacactcgtgagactgtagaggtatagcaataccaatctttttccttgttgggagaacatctcgcattagttgccaccaaaggaactttagccttccatggattggtgaattccatagaatcttccagtcccaagtggattggtcttgcaacgccgagtgtgtcaccaacttatacgctgatttaaccgagaaagtgccccgaggatcacctaaccatctccaggcatcaggttgggtttgagcaggcagcccaatgttgagaatatttcgagaatccctgtcgttgaaccataatctcactcttccttcattccaagacatgttctccttactagattagctccttgagttgcgtccagcagaggctgcggcatgtgttctccattcggcacccaagcatcaaaccaaattgaagtagtagtgccatctccaatttttctacaaagaccttctttcaataac

SEQ ID NO: 199797 - DNA, 763 bp, Cannabis indica
agaaacaccgaaaaagggaaccggtagagaaatgctcgggaaaaggcacttcatgcgtgtggacgcgccgacgcgtggttgttgttgttgaagcttcaggcggcgcttgtggctcatgtgcaacggttccgaccaccaaattttggggttctgcaaatcagcagctgggctgtccgttggagctagcgatgcgaggtcacgtgctctctaaatgcgttttctgaaaaataaaccttaagatagatgaaaaacaaaccataattgcaaaccttaattttgggatacaccctaattttgaatttcaaatttcgaattttgctctgataccatgtagaaaatggtgaatgaattgtatgttttattcaatagaatactatatatttatatataaaattagagagagtaaataggaaactaacaaaatttgataggaaactaactaaatattaattaatatagctaaaatattatatcatgaaccaaaataaatgcagtgattactcagaaacataacacgacccgatcatcaaaccagtaacaattaaggttgttctaaccattgctttcacaaaggggtggcccataagacattagatgttaataatgcattcttgaatggaaatcttcaagaagaaatctacatgtcgcatcctcctggctttgttgatccaaatttctttaatggtttgaagcaagcacttagggtttggtttgacaagctttctgaggtattaaactcaacattgttttacttcatccaagg

SEQ ID NO: 199798 - DNA, 508 bp, Cannabis indica
aaaaaaaaacataacaaatatctaaaatgaggatattaactaaaatagaaacaacatccagaaaaataacaataatatcgaccaaattgttaagtatatgtatttatatatacattaaagactttatatatatatccaaaataaaaggagagaaaaatctaaaatacatttgatacaaacataatactgccaatcaaggttataacacaacataagtagtttggtaaaaggataatctatttcaatttcattaaaaaaaaattatgaatttgatttacaaaatccttttgaatgaaccatatatattaccaaaaaattcactagatacacacaattagatactggcagtcaaaggatcttttataagtagttttggtaaaaggatatgacaaaatccttttgaaatcaacacctagtatttttacttatataagtagaattttcattaaaattagattgtatactaaataagttaaattcatttagatttcctgcagttcatagatct

SEQ ID NO: 199799 - DNA, 1634 bp, Cannabis indica
cctcatcctcctccgcccttttctatcttagacccgttttttcttacgctcctccttctcgcctctctactcagcttcttcttcttcttccccaggttagtgttcttctctctctctctctctctctctctgtatttattaattaatctatttatgtttatgcaaagacgaaaataattgcataaccactttcaacgtcttagagttaatttcttatgctttatccatcaatcacttttggtttgtctaaatttgaggggattataattgttattttgttcaattttcaaattcttatgtttgtgtttagcttgttttaataattacaaggaaaagaactagaggtaaattttgtagggaagaagttagaagataatatcacaatctagctaggaggggaaaatggagaatttagtctttctaatttgtagttggagggatttgaaatgaattaaacctctcatcatattgtatcacttattttgattactaaaaatgaactttgcaatgtatttatgctgactcttattgtgtttttgatgacacaaattagacaagtttgcacgcattttttcatcaagcagtagtactcaacaaacatcttccgttggtgttacgccgcaacctttgcctcccagctcttcttcttcacaattgtaatcacattttaccctttttattgctgtttatattgttgttaagactgttattttaaaaaattcaagctgtgatgagaggttaatttatttcattagcttagcgtttgagtgtttatattaatttaatttaaatttcatttttctttttcaatttttggtagaggatcacctctcttctggattggagttggtgttggtctttcagcactattttcatgggtgagagaatagcttctttgttttaattcattttagacattcctttttttaactacaccatgtttgacaagttgattgctatggcaggtggcagggaacttaaaggttagtgttatcctccgtaagttggcaattctttatatgattttgcttgcttagagtgcattaaagaattccttacccaaatagttacaagatgagagtttagggacatttctttaagtatgattttatcaagttgaacagaaagtttccttctctgattgttcaagtctttgttttttcaagcggtccttcttgatcttttgttgttttacgctaataatagttttttagttttctgaaaagaagggctctgtggaactcatgggagtttttgtcacttgaagaataataatttaataaattccttccagtccatttatggccgttttcttgttaatctcctcatggaggttaaacaaaagaaatatgcaaaattaaagtatatgggtacttggccaatgccattatgtttatgtctatttttttcataattttgtttgtttataattatattctgacagaagtatgcaatgcaacaagctcttaagactatgatgggtcaaatggatagacaaaatagcccattcagcaatcctgcattttctccaggtgcaggaacacctttcccatttccatcagctgcaccaccgcgacctgccacctcccctccaacttcttctcaaccttcagtgacagttgatgtggctgcaa

SEQ ID NO: 199800 - DNA, 797 bp, Cannabis indica
tttcctcaaattttatcaataaagactccgttttgcatttcttaaaagaacatttagaagtaactaattctacatatttctatctagacctaataatctagaatttgagccttatatgtgccctgtttaagacaataacatagtctgtactgacgaaattataaaaaaattataattttataaacattgagtacttgtgctcctaaaaacactacatcaatttgagatattataggggtgacaaaagagtgtcgcctccaagaaacataattaattttttaatcgatacaacattatgggcgacatttgtcgtcccaaaagtattagacgcgacaagttactagtaggggcgacaaaagttgcaaaaattgcccctaataaatttaaaactatccactgcccaagggtgaaattttcctgcttacactatcaggggcgacaaaagtcgcccctaataccctatcacctaacacaatcaaagtattaagtcacccctaataccctcccacctaacacagtcaaattattaggggcgactttatcgcccctaatggtcgctcctaatagttttgcatttaaatctagatccccttcttcctcgacccattctcttccctttcccattttttttttatctaaaaaacctccattaacaaccctgatcccatgaccacgaacaagatgaagaggaagatgagggagcagccattaacgaccccaactccgagaccacgaacaagaagaagaggaagaggagagaacgaccattaacgactcgagaacaaggtttgttttta

SEQ ID NO: 199801 - DNA, 1651 bp, Cannabis indica
agtgggtatagagtagagagagatggtgaagaggataagaagccagccacagcatgaagtagtagaggtggcttctagtgaagaggcaagccctattgaagagcatgcctacctacaaccatgccttagatggaatgctcgaggtcttgggagtgattaagcattcctcaacctctccctgctggtcaagatgtacaagccttccttgttttttgttatggaatctaaactttgtaaaggatctattgatagacttgggaataagctaggttttgctagtggttttgagtttccccgtgttggtttaggggtggcctcttaattttcaagattttggatattgatgtttttattttcaattattatataaaccatgttcattgttatgtcttcagtgctaatctttctgcttttcattttattggtttttatggagcccctactccttcgaattgaacttacacatggcaactcttgcataaaattgctcattcgtgtgcccttttatcgtggctcattatgaaggattttaatagttttttaacttgggaagataaaagtagttacaacattcgtaatggcccctctgaccattttatagatttcatagattaatttaactttgaggttattgattttaaagggcctcgtatgacttggaataacaacaatgccaatgatcgtaatgctcaggaaaggttagactaggtcattagcaataagcgttggattaaccttttccctaatgtttgcctcaaccaccttgacttttttggatctgaccatagagccatctgtttaaatttagaaaagtcctcccaccttcattctgaccaagtcaaacagagattcctctttgagaatgtctggttgactgagcccaattgggataatgtgcttctaaaatgctgaactcacaaccctgctcttaattcccctaccaaaaacattacctctgcccaagaagcttgtgcacaatttctctcaaattggaagcataaggctttttttggcttcaagcaaaaattcatcaaagcccaaaaggaccttgaagttgctagaaactctttagacaactcatctgagtcccttcttagaattaaaaagcttcaatcaaatttagatattctttcattcaaagaagaaacttattggagacaaaggtctagagttaactagctcgaagctggggataaagacactcgactttttcatagttttgcctctgacaggaacgaaaaccaataggatcaaccaccttattcttgaacgactcgggactagagttaaaaatgttgatgagtatccttacgcaaagtagaaaggttctacacgggcctcttcacttcccagcatccccaagaaaccaccattaaggctgttctctagtgcccctcccccatctcactcctaatcagtgttttttcctcaagaaaagcttctctctagaagaagttaagaaagccctcttccaaatgccccctgacaaggcccctattgttgatggattcaactacaaactctatcaaaagaactggaatccggtttggagacatggttatagaagcagttcttagtgtttaaaccagggcactcgatccattttatttgaataccaccctcattactcttatccctatgttgagggatt

SEQ ID NO: 199802 - DNA, 562 bp, Cannabis indica
aaatatagatatactaaacaaaaaaaaaaaacagaatcatacaataatattctcatcgtggaaatgataaaaaattttgtacttattaccaaaaattaaaataataatataatattaaaaatttgtacttattttggtgattgtttttgtaagaaatttacccttttatcctacaccaaacagaaaattaaacaagttatcaaggtcaaaatcgaccttacacagagtcaaaactcagttgactccctgaagttaacaaaaaacgacagtcttttattccctagactacaagtcgttttgcaataaccctaattaacctccccaagaaatatctagaatcaattcatttgcacacacacacgaaacccaaatatgaaaccctagcagagcttcgagtttcttctctagaaactcgaagtctgctcacaacccagaaaaaccaattaatcccttcacggatcaaaatcaactcccaaatccatacacaacacagagaaatatctaaaaataaagcaagtgaaattagaaagagtgtaccataaattttatagaggttccccaa

SEQ ID NO: 199803 - DNA, 1733 bp, Cannabis indica
caacttaaatgaaatataaggttcgctagctatggaaattacatatctctttactcacttatttatgcatattcgttccaaatatgatatttatataatttatatgagtagatgaaaaaatttcttgatacttgacctatatgaactatacttggtgaaaactcaaaattataggtcattgtgtcaattttcggtgaactttagacttattgtcaaacaagtgaacatgtgaatttttgcatatttgactagcttgtgtgtttatatgtttgaagatgtcaaattaagtgtatttattgtgcctataggtttgctttaactgaaatatgcattgaacaaatttttagtacgctacttgttgattttattggttattaggcctaaaagagtgttttttttttgccaaactttatcattttttaacattttttgattccataagtttgtacacctcacatttcacatcatcaaactactggaaaaagaatttttaaattttgttgcataaaactcatttttggtaatattctaggtttcttggcaatttttgaaaagcttaccgtaaattgtcaattttcaacatttttctaattttcttgtttgagcggttttgttttgtcatatttaaagttttagaaaatatttggggtcaaatggttggatgaaacatgttttgaagctttttttgagaaaactatcagctacaggaaacagttaatcatttcttgcatacttgacaaaacggttaaccgtttcgtagcaggtagcgatcccaaggcccctttagtcatttcaaactcgcattttttttctataaaaccctacctaaaccttttttaaccccattaagatattctaaccctaattagaagccctttccccctcttctctcaaaaacccactctctaaacctaaccctcctatttccattcttcatcttcaccatggatgcttcttcttcaagatcaaagaggcaaagatcctcgatgcaatgaagggaacaaaggtccaaggtaaggaataaccttttctcccatggaaaatatgcaagaaaattcaatgaagacttctccacaagggatattattaatggtaagcaatgtgatctcaaagctcttgagtatgtcaagttcaattctctttttgaagatattgaatgggaaacattgctagaaactcataccactatctatcctatgctagttagagcttttatgcttgcattgaaactccctgtgtgatccatatagtgttaagggaatcctcaaaggggtagcatttgagttaactgtagataagcttaatgatattctaaatgcacccaacaaagacctcttgcttaaccataaactttgtcttaagaatgatgacaccttcagctatagcctcttcaacaataatgtttgtgtaggtgacaactttcgcgcaaaaccaagacgaactttccttaccctttaaggtaaaatcctccatgcttttatatgctctaaccttgttcctataaaagaccatcaagatgaagtgaatgcacttgatcaaataattctttacaaaatcattttgaaagacaaccaaatcaacctaggttactttatccttaaaaccatcaatgaagtgtacaagcctaaccaaagaaaagccttaccctatggttatcttcttaggtactagttcccacttttaggaatcccaatcgaagatgaaactgagatttatgaacccaaggattctga

SEQ ID NO: 199804 - DNA, 1014 bp, Cannabis indica
agaaaagaaagaaacctgctcttttcaaatccagcctttgatagatcacccttttctaaggcatatctatcaggacgcaaacgtgagtctgatgccaacaacttctttggagcagtgtcaaagctatttactttgtgcgcaaaatgtgtgtactgatatttgtcattttctggacccttgataactctccaggcctgtaatgcaacacgagaatattttcatgagcttattttgaaagaaaaagacccatctgagaggctatcacgaacgaacaacaaaacaaggaagaaaaaaaggatgtaagtgtgtcaatcttctccagttttcttactttaggggaaacacaaaacgatgccatttagagtaccagaagagaacagtttttatcatcaaaaaaaataaataaataaagaagagaacagctctttcagccttcatatgacagctatcataaacctgatatcgttttatcaaacaaacatgacagagaactttatacaaaaagacagccagaagttgaatcttaagttgactgtgaaacagttgaaggtttggatttgcattcacaaacaagagggcaccagaaaatggctatggacatggtattaattatcaagcagaatgctaaaaagcaaaaaatcccttctggtaatcagtcctcacttggagaagctagcaagtcaaaggatactaaaccggaggccgtggaggaaaaaactactttatgatggtggtggtttatggtagttgtcatttcaggttgctgccatattaattgagatgggttttggaacagaagttcaatggcagttaagtttacattttttttaaatatatattagcctttagatattagataggctttttcccaatctatattttgtgacagtagcagtatcatgttgaaagtagtatatcgatatcacttcatttgttcatttgttactggccatcaatagaattttgctggtactttttctttttttcaaataatagaaaaaaaaaaaaaaaaaa

SEQ ID NO: 199805 - DNA, 684 bp, Cannabis indica
gaagcttattataagtattagtaatactaatcagagtgatttagaagaaaaacaaaataattttcctctgcaacgtgagaagtacgtagatatatagctttcactacaatcaatatatattatttaaacagaaaatggagaagccatcttccatgcaaacctacgtaagtaaaatatatatgttcttttagtgaaatagtgagagagtaataaaaatgctcgtttaattttactatataaacttttgtgagtgaaatatattaattattacatattagataaatatataggtttaattatgtgtttttatatggcaatatttaattagtgtacttgttttgagtgatgttaattaattacatgaatatcgctaggaagagaaaaaaagagaagaatactactagaaaaattaatgaattattttaataaatttaccattttcaaatatatatttaaaaccttaagaacattaatcaattctcatcagttagttattttaacgtttttgtttgttcatctatttttcctttaattagttatcatatcaaaattcataaacagtactagctagctaaataacattcacatatttctgtttaacacattttatacatttatgaataagttttaaagtacatataatttattcatggatccttggtatattatgatcacaggagccaa

SEQ ID NO: 199806 - DNA, 682 bp, Cannabis indica
tttttagcatgtgacacgtggcaaataagggatgggattaatcataatttccctaattgaagtccttcattataaccctgtcacggagaagcttcacggagtcaagataagtcaagcctaaaagatatgtggaagtccactttgccccatccaagcttctcggacacggaaggtatgttgtctctctcggagggacctaaatatggaagcctgctcagctaatacccggatgggtactcgaagaacctaatgtgaatgtccgccacctagagtgttgcggacgtattcctttggtgtgagccaagtcaccaagtgatggttatgctttttctgatacaagatcaaatcttgtctcttgtatccaggcatggtagtgcgcacacctccaccacctttttgctagatgaatattacaaacctctgctttaaaaggtgaaagctttcggcaacacgtgaactctacttttaaaaattaaacatttgagtgccacatgtccacaatgtacaaatgatccccaattatccagctgcagcacgcatgggtacaattatttccaagggatccaatagtcagctctctctttcacatgtaatttaccccattagtgagcttttagcaaaaatcctaggcgggtcatgggcatgtccatacacgccacttagcctataaatacctttctat

SEQ ID NO: 199807 - DNA, 1864 bp, Cannabis indica
gagagagaggagagagagagagagaggaggggctggggttcgagaggagggcgtgggtcgtgcgtggtcggacggtggtgcgagtcggggtggtgggtagtcgtcggtggccgggcgtggtggtcggaatgaggcagccatgggagagagaggttcgggatgaggcatccatggctgatttattttttgatttttttcaaatgggaggggtatttgtgggatatggaaaatgtggtcatatattaccaatattattaagtatgtatttagggaaaaattttaagattttctaagtatagaaaatcaaatttcccttccaaaatgatctaaatgtttattaaatgtactaatactacaataaaagtagaataaatattattacaccaatttggttgacacaaatcacactactcgcaaaaaaaaaaaaaaaaaaaaaaaaaattgaattatatttggaagtttaattttaatgaaagaaaaataaggaaaatatagaagaaaagaaatgagaaataaaaatcaataaatttttatatctaataagaaaagaaaaattgtataaaaaaatacttaatttaacaaaaaaattattatcaaatttaaaaaattaatttatatttttttttgttctcttcacttttttttttttctatatttttcttacattttccttttctcaccaaaatccaattttaaaaatcacaatgcaaattaattttgtcttcctagctttattaatgagtttatcactttatcaaaagtttggtctattagatttttctttatgcctcggtagtgctggatacgatttggcggcccaaaacgataaagtacataataattagttgaataacatcacactttatattgattctattactcactgttatgcaaattatgactcttgtttattcccttccccgtctgttacagttatgcttgcttggtctcctctccctgaagattggataaagattatttgtgatgttaaagtagggacttagactatgtgtgtggtggctttggatagaaactttatgagaagagttttgtggattgctactgatattttggaattcactaatccccttatcggtgaagttacaacgtgcttacttgccctgaagacgacagacattttgaagtatcattttgtgattattgagagcgactctaagattgttattaattccctaaaggggacttcttctgattagagaattgataattacgtgcaccatttaatagactctcttctttgtttgtgggttgtaatttttctttcgttttgagactgtataattttacggcccacaatgtggctaatagggctttttctcataacttaactagtatgttagagatatctactatttctaaagatattatttgaaatgaccatgaggtctaatttttcttatcaattgacgcagtttatcaaataataataataataataataataataataataataataataataataataataataacaataataataagtttggtctactaagaattttgaattctttcttgtggtttcctatctcaaagttgtcgcaatgttgatttctcgctatattttagttattttcttactttttattgtagcaaagtgtatttttatagttttaaaattttacaatatatttttgtaagggaagttctatttccaccctataaaataataattacactccttattaaaaaatcttaaatagttttaaaaattactattattatttttaaaattttcccctcacattattttatgttaatttcaatacttatttcagttttattttatattttttttataaaccgtaaaaaatcaaataatttttattttaatttt

SEQ ID NO: 199808 - DNA, 999 bp, Cannabis indica
acgcgtactctaagttcttatcctaaccaccattttttcaattagaatactacaatcagctgctgaaatcctctttggacagattggaattcctaagtacttgaagggaggatcatgcttttggaaacgcgaagcatcaagtactcttttaatatcattatctctcatgttattgcaatagaaggcagttttggagggattaggaaatgcttttgaaatctccgttgtaaaagagaagcacatcatctgcaaaactcaaatggtttagctccgattctctgcacctctcatgaaaaataaagtcttgcctctttccaattttcgaaaaagatactccatgcctaagacaaaaagaagtggggacataggatccccttgtctcaatccacgcctagattcaaagaacccatgtaaagaggcattcaacatcaatgagaactttggagttcacacacaaatcataacaagctcaatgaacttttgagggaattgaaaggcatgtaacatttcttcaatgaaatcccattcaatggtgtcataagctttctgaagatccagcttaaacatacacttcgctttctttgttttcctttcataatgacggatgaggtcttgacatatcataatgttgtgaccaataagccataaacaaatctgccttggttttgagcaattaaatatggaagtacagctttgagccttgcacaaattagcttagttgtcaccttgtaaatcacattgtcacacacaataggtctataatcactcactaggttaggacacttaattttagggataagagtcaaaatcgtggtgttgatctccttcaaaagctgacgtgtagaaagaaaatattttcttaacttgtgatagattgattttgtaagccaaaagtatatatgtaagttaactatttgcttaaatgactgcacgattgaaactctatctccgaagtgagagcttagacaaaagaatctattatctacttatttatatggg

SEQ ID NO: 199809 - DNA, 584 bp, Cannabis indica
gatattttgtattccaaatgctaaatttaatgaagtttctatttcataaaaaaaaaaaacttccgaagatagttttttgtcttgttttctcttttccaaaaattctaaaatataaaattaaaagtacaaaacaaattaaccagcgggccaataaatttatctaattcttgttagttttaaaaccattaatacaaatttgtatgttttaggtaaacaatgccgcaacggtagtgataaatagtgctacaaactatggtgttgaagagtactcaaatatgatgaacaccaatgttgaatctccatatcatctttctcaacttgctcatcctcttctcaaggcttcaacaaaagcaagcattgtttttatatcatccattgctggtgtcatcgctctacctaaactctctgcctatgccgcaaccaaaggcatgacaacttttcactagttattattattaaatatatgatataaactgcatgttttccatgctaatcattctttttttcttaaataataataataatatactgcctatgttaatatgtgctatctattataacttatcatctatttatattaattc

SEQ ID NO: 199810 - DNA, 573 bp, Cannabis indica
ctaattcttgttagttttaaaacaattaatacaaatttgtacgttttaggtaaacaacgcggcaacggtagtgataagtagtgctacaaactacggtgttgaagagtactcaaatatgatgagcaccaatgttgaatctccatatcatctttctcaacttgctcatcctcttctcaaggcttcaacaaaagcaagcattgtttttatatcctccattgctggtgtcatcgctctacctaaactctctgcctatgccgcaaccaaaggcatgacagctttattatcaaatatatgatataaactgcatttccatgctaattattctttttttttttaaaataataataataatgcctatgttaatatgtggtatctattataatttatcatctatttatattaattcatttgatattaatactttgaacaggagcaatcaaccaaattactaagaattttgcttgtgaatgggctaaggacggcattcgcaccaacagtgtggcaccatggggagttagaacccgagtcatggaagttgtaactatatataaatacatttattctcagaattta

SEQ ID NO: 199811 - DNA, 853 bp, Cannabis indica
tttttaattatttgtttattctttaagcaaacatagaatgaaaacacattaaagttttataagtaggctttccacattttcagttttgtctttattaatttatctctgtctaaaggctaaaatgattttgctttcttacaagcaggactgtagtaaataaataataaataaaatatacttcatcacgtggacaaatttgcactctttcgaacgcacccatataatactttcctcttttttacatccctatttgttttttttctcgaactttatataatacgaaacaaatgtgaagagtcttatatatttcacacaaaacccttttcatgaaaaaagtcccatcctgattgaagatattaaaaagataacttagttatgaactaatgatcaaagttgtaagggaatttattagtaggggccagaataaattcttgggagggccaattatgaaaagataaatatggataaaaaaaattaacacttgtttagcaattataatcaacacgtgatcaaaattttaagggacaattaattaattaaaataatagaataagtactccttttgaaaaaggttttttgacacacttccaaaggagagtttttaattttttttttcatttataattatttatgatcaattataaatttttaaaatattttaaatactttgtagtgtcaaaaataagatttaaaaaaattactttgctgaaaaagaaaagtagtcatttgtgtataaaatatttaaattttaattttggtaatatgaactattttaaaaatttacaaattattttaaataacaataatatatattattacaaaaaaaaaaaaagattaaaaaactcttctagat

SEQ ID NO: 199812 - DNA, 2982 bp, Cannabis indica
tagtattttgtaccatgaggacatggagaaaacaattccaggcccggggagctgaaaatgcatgaaccaacacctcaaaagtttacctgggcacctagggtttcacccagcgaccaagttgacaacttcaactagagttttagtttccaggaccgccttagtgaaaataggtcaaactttccattgagacatgaactagacatacaataaacatatttgaggcgtcacaatcagatttggagaaacttttacttttgagcacccgaacacccaatgcccggaaaccccagtacccaggttgacaactatcaaaataggccacttcaagcatcaaataaaaaatcaactcatgcatcttgttcgtcttcataaaaaacaaggaaacaagtactttcatggaagaaacaacacatcctaggtgtaagaaccaaggctcagtgcccacgttgatattttgttaacctataccaattccaaggggttcttctgagaagtcctctgggcatattctctgttttcaacaaagattaggattaaactattttctggggactaaacaaaacttccaaatggcctgaaactggacccagtgcctaggttgacacttggtgttgggcccaacgcccaggttgatatattgtcaaaatgggtcgtttccaataagtttctcgaaataatgtttcaggcattttttatagtcatcagaaataacaaggatacaaataaactcagggagaaaccataattctaagggcatcaaaattgagcccagcacctaggctggcctggtgttaggcccaacacttaggatgacattcaacttggtgctctagttttgatcatctaaattcatatttttctccaagaaatatctccaaaattatcaaaaacatggtaagagacctcctcctcaagttctagatacttggaagtatcaaaacgacatctcagaatctctgaaataagcacccagcgcccaggttgacaaatggcctggtgtgttgggttctgcttatctgatattgattttgtcttgactgtttgtctattttttcataataaccgagagccatgaagtcagaatagtcaaattcataacttcatattttcacttttctgacaaggtgatttattgagaaattgggtagtttcgagtctcccatttctgtagaacaacaacatcttcgagaactggtgaccagcttcactagaacacagaaatggactaagtgatgttaaattatcactttggcattaaataagtacatccctgacatgttctcccactcacccagtgactaggttgaaataacatgtcaacctgggcattgagatgtgaacctggttactgggtcctaaataacattttgtaaaaaatggtcataactcactcaatattgatctaattgatgagttaaacttaatttttcaagctaattcaatgcttaatcaagtgatgtctcacacttcaatcgtaattttgaagccatcggctccaaatttcacccctaatggagttacgaatttatgctacaacttacatgtagcaggtcacgccatcgcgactcgagctgtgaaaattgatgaccaacctcagaagttattttcatcattagatcattatttatagtcaaaaatagtttaaatatattttttatatgttttggattattttattcatatttaataggacttccttcacctataaaaggagatctccactagctcatgtattatattcagaaaagtagccacaaagtcagaacatctctctttagtttctttctctagaaattaaagaatctagacttagctatttttttagtcatccatctcgtgagaataaaacctcaaagtagaccgttccccgttactatcgcaatacagggagtgaactaatacaaattgttgtgtctttctatttatacttgacatatattttattctcaccaatctagcaagcaggtgtgtcttagaagtttatgtccaaatttttatgtcaatattttggtgctttcattgagagctacaactcaaggaagtcacttacaagatggttgtaacatgctcctcaagcgtcgatagaggagctccaacaactagccagcagattgggggcacgctagttactgaagcttgaactaggactattcctacacctcagctgttaggaggaggccccaaaactagctccatagcttgtccctcaaggccactaaacactcttggtactggaattgacgagtagattctatctagagagccacacatggagttggaagaccccaaggaggctgatcctcgagttgaatagcttagccaaattgtggttgatctacaacaactgtgagactctctcgacagacaacactagtagtttcaaaattagttcatggaaaactggtggaacattaagagccaacaagttaagcaggaacaaaagagaactaacctatctcaacgaatcaaagaagactatcactctggtcacagaactaccccatgcagaggtctttctgagttggtaagagagattccacatcgatcaactggtcacgtgggaactattactcaagggaaaaccctcaacgcaatgaacactactaccatgcttggtaaccgtatgagtactaagtaaacagcagttgctaaggcccccaaagggaagaaaacttcgagcacgtttttaaaggactcaaactcacaggcaccaaccgataggcaacctcaaaataccgagagatccaacaagactcctccactaggttcttctcaatgctctcatgacactaggccttaagaccctacaaagggaaaggggcctgccactcaaaatgaagggggtaattgaagactttactttgaaaccagaggctatgaacgagtaaggaccaatgaaccacttcatactcaaaaatacttccgagatgaaaggggctattacttggaatgttgccgtaatggccagcagtatgagtactt

SEQ ID NO: 199813 - DNA, 1336 bp, Cannabis indica
tcttctttaatttttataattttttacacatataatacttaataaaaaaaaagttacagcaaaaagtatattatcttacgattttattgcagacgtatcatttttcagtcattaaattaattttaagaattttaatataagataaatataattgtgtaaacataaaataattgaataaaataataaaaataagtgataatgtagtatagattttaaactttaacttcaatatccaaatacactaaaacttattaactataaaatctaaattttaagttaaaaattaaaatgtacaaactttaaatacaaaatagcttaactaataaatttaatttatataatataagatatacacttttattaaaaaaatatataaatcggtttaattcggtttatttgagttaatcgggcggtttagaataatttgtaaaccatccaatatattcattgggcagtttggattttcattgtattatttcgggttgtattttttgttcagtttggtttgggcggtttattcgggttgggcggtttgtaaattttattgaacacccctttaaaaaacaagtaatgtaatgcatctctcttagtttttttaaaaaataagtagtatttaattttttatattaagaatattaaattttaaaataaaataaatgtaatgcatttgagtcatcataacattaattatttttatctctaaaaataaatattaaatatttaagtgtataaaatttaaaatattagatatttatattgcaatttacctttaaaagaatgtactacatatttgtagatttttttttggataatatttatggtcaaaattttagttgttaagtttttttttaatataccctttattaaaggttgatatcctcatattaaatttgtagtgatatgataaaatagttatggagtgcagaggtatcagtctcaaaatgccgaaagagtacagagatgccgaaatgtgtcagaattttaagaagaatttttattttttctaaaataaatattgtcttttttgtaaatttcacaacatttttcttttcctccaactaccaaaaattatatataaaaatattaatttttttttgtagtacaatgttttggtagattctagttttgttatttaagatatttttttaatctaattttgtattttataatagtgtgcattataattatttaaaattatttataaattttaaaattaaaaatttacaaataatcttgaataactattataaaaaatttattaaatgtcaaaaaatataaatgccttttaaaagagtgtattataatagatttactcttaaaattatcaattattaga

SEQ ID NO: 199814 - DNA, 3455 bp, Cannabis indica
gcctgggattgagaaagtttgaaatgaggtactaaaggtgtggtgactggttttgattcactcatgcagaacttgtctaatacctcttgaatataatctttttgagatagggtattttggtaggtctttctcttttgatatcaatctctcggattcttttagcctcccccatgtctttcatttcgaattttgcacttagttgctgttttagcttgttgatctcgtctttccttaccaatggtgagaatgtcatcaacatatagtaataaccagattggtgtgctgttatagtatacacaaggatcatagttgctccttgagtaaccagtttctgtcatgaattcatggaatcttaaattccattgtctaggtgcttgcttaagcccatatagagacttcttcaaaaggcaagcttggtttggcttgttacccttgtagccatctggttaagccatgtagatttcttcttaaagctttccatgcaagaaagctgtttttacatccatttgatccatttattaaattttgctacttttgccatcatgattctaatggaggtctgttttactactggagagaatatgttattgaaatctatgccttctctttggctgtaaccttttgctactaaccttgctttgtacctgatctcttcacccaacagttctttttccttaaaaatccatttgtagccaattagtttttgtcctgttggccttgtaacagtcttccaggttttatttttcttgagtgatgtcatttcttcatcaataacagcaagccattggtccttattcttgcagttgatagcttcatagtaggtgcttggaactgaggattctacttcctttgcagaagcaagagcaaatgcagtacagtctacaaaaccaaatttttctagaggtttgatcaccctcctttctttgtttctaacaagttgatacccctgagatccaccttgatctttttcatcatgcctgtcatcatcttgagtcttttcaagttgaacctgcacactttctgtgatttttgtctaagtgttctttttgtgtatgattctttcataggcatttcattctcattgaaaatcacatccctacttatgatgcactttttgaaaccatcttccaaacaccatagcttgtacccttttaccccatctggatatccaatgaaacatcatttcagagcccttggctctagtttatcctatctaatgtgtgcatatgcagtgcacccaaaaactcataagtggtcaactcctggtgcatggcctgtccactgttcttgaggtgttttgaaattcagtgttgcagggacacctgttgatgagatagcaagcagttttcaaggcttctacccaaaactgttttcccaaaccagcagttgtcaacatacatctcactctttcaattaaggttctattcattctctcagctattccattctgctgaggtgtcttgataacagttttgtgccttcttattccagtttcttgacagctgttaaacacatcaaaacaaaactccaagccattgttaattctcaacattttaattttattgtttgtctggttttctatcaaagttttccaattgacaaaggtgttaaatgagtcatttttgttacagagtaagaaaacccaagcctttcttgtatagtcattaactatacttagaatatagcttgctccaccaattgtttttgttctggatgcacccctgatatcagaatgtaggtagtccaatttttcttttgttgtgtgcctggcttttgtgaatttcaacatgcagcttttaccataaacacagttttcacaaaaatctagtttcttaccaagtttacctttcagtatgccttgtttctcaagctcatgtagacctctctcactgacatgtccaaacctcatatgctacaattttgtctgatccattctttcatttttaactgctgttgcaaccctaccaattactgttctaccagctaggtagtaaatcccaattcggagattccctttcatcacttttgtagagtcttttaggactctaagtgaactgtcaatcttgatgctgcagcctttaagagttagtgcaccaatagataacaaatttcttttgaggtcagggacatacttcacatctctaatggttctttctaaaccattgtgcattttgattagtactaaaccaatatctgcaatcttgcaggctttgttatcacctaacaagactgagccattgtcttgttcttgaaagctgcaaaagaagtgtttgttaggagtcatatgaaaagaacaacctgaatccaaaatccactcatcaccagtggcttgacttgatgcaaccagggcatcagcagactcatatccatcaagaacacaacttgcatctccagaatccttcttcttttctttgctaagctttgctttgagagctctgtactcatctctgaaatgaccctccttacaatagtagcattgttttcctgcctttgaatttgtgctggaactcgatcttggtctttgaccattgctactacccttggaatagttacctttgttatttgacttgtgatttccattcttggtatctcttgattttgatttgcttcttgcaaatattcccacaccgctgtccaatctttcctctaattttttttttgaatttcttttgaattcagagcaacttcaacctctgacattatcaagatttctttcccatatagtatggtatccaccaaatgttcataacattttggcaaatagctcaacaacagaatcccttgatcctcatcctcaatcttaacacctatgttgtcgagatcaaggatgattctcttgaattcatcaagatggtttatgagattctttgtatcatccatcttcaaggtatacaacttcttcttcaaatagagtttgttggccaaggacttctttagattgaagcaagtttctcccataaccctattgttgtcccttcatctgaaacttctctaagaacatcatctcccaagcttagaagtatggcactatgtgctttaatctcaatcttctttttatcttcatccaattcttttaattcttctttgtctatagcttgatgtatgccttgataaaccagtagagctttcattttaattttccatagtccaaagtcatttgtgcctctacctcaaaacgtgctgaagtcattgttgtccagaaatcttgatcttgttaagaatcttgagttgttcttggtgaactcgtacctggagctctgataccaattattgaggatgactcgacaaagaacacaattacaatcacaaaaacaaagtagaacaatgagcacaaaatagaacacaacacacaacaatcaataagaaccaaaacaatcaagcacaaaatagtaaatgaagagagagattacatgcttcgaacaagaataacaatatgttatcctgcctactccacg

SEQ ID NO: 199815 - DNA, 1048 bp, Cannabis indica
ttattagtgtctaacatcctcttcagtgtcatatcgtaattagtgtaattaaatatcgtgtctcacatagttttaaaaaataatttttaacgaatattgataatgaatcacggagtgtcacttataaaaattgatggacaccactagtaccaaagataactgctaaagagtaccagtggtgcctagcaccctcctatgtgttaatatcgctattggtccaactaagtatcgtgtctcatataatttaatataataacttttatggagtatcgctagtcaatcgcaacgcgacatgtcgagaaaatactaggcaccactggtgcctaataacaatgcttagtaccgaataacaatgttttttaaagtgcacaatggagtaaagtgattcattaagattgctatacattaatatatattgtttgaaactcatccttgaatctgttttcaaaaaaaaggttcatccttgaatattttggtcacccatttcaaaataaataaacaaaaaaatatttttgtcactaattttaaacattaaaaataggcattaaattcatataatatatgcgtgggatctaattaagaatctgtatcatgtacacgtttaatgattgtgttaattaaacttgatgttaattatgatatgttcaactgtcaaacggctcatctcttaacctttaaattaattataaacactactatacttctcttttaatattctttcctcttcatcaagccaattatcatttttattgaatacgaaccacttcaaacccgacaaggtaagaaccacgaatttattttgaccaaaagcaccgccctgcaactaaagtaatcaatctttataaacaacaatcataaatattttatttacaatattgccctttcatttattgaaaatgtcacttactaccgtatgaataatggaactgcttaatataacagaaaaaaaaagggccaacctaattcgggggaatgagacgactcagcttttatgtctaaccatcaatcatttaatttttagcctctgccaactgctatgaagaaattt

SEQ ID NO: 199816 - DNA, 1512 bp, Cannabis indica
ttttcaactaaccttgatttatatgtggaaatggagccatcgggattgggttcaaacttataaactcattttcacctattgattttctcccatgaggcaatggaaccaaggtccaggctttattctttatgagggtcatgatctcattattcatagcattattccattgaggagagtttagggcttttgcaagagtgagaggttcttcagaaaaaattcaaacccttggtttataagtacaaatttggccctagtaaccaggggtgattgttaaatggtggaggaggaatgatggtaaggtaactggattatgtggagacatttggtaagaaggaagatgaggattgagaagaagatgtggtgggagaagaaagagatggaggaggagaaggagaggtggaacctgactcactagatgactaagaaaagaatggggtctgtataggagtagtaggaggagtataagtactcaggggtattacactagaagataaaccaaatgagacataacctatagttttaaaaacagattgagctaatggagaagaaaattcatataaaaaattacatctcgggagatgtatattctaccatttccagccaagcacttgtaccctttatgcttaagactataatccaaaaaagtgtacttaacagacttgaactgaagcttattacggttataggtctggtgtttggataacaagcacatccaaaaaatctaagagtagactaatctgactcctttgaaaacaaaacttgaagaggggtttgattgttgagaataggtgtatgcaacctattaatgacataatttaaggttctaactgcctcatcccaataagaaagagtcatggaagcttgggaaagtagagtaagagcagacttgagtagatgtatgtgttccctctcagtgtcgccatttctttggtgtgtagttgggcaagacagtttgtgactaatgccatgttgcaacaaatatggttcaaaactttgatattctccccccaatctgattgaacaataagaataggacaattaaattctttttcaatttgagttctaatattaatgaatgtgggaagtgtctcagacttggcttttagtagaaagaattaagtgtatctagaataagaatcaataaaatgggtgtaatacttataactactaaatagcagataaggagaaggcccccacaaatcagtgtgcagaacctaaaacagtttgctataaattgtaccagatttgagtaaagaaaacttatgtattttacccttgcagcaaccttcatacaaattgataggcattttattactatttgaaattttacaagagtttattatttgtaccacggttctagcagaggggtgaacaagcctcttatgccatagagaaaaattactaaagtttgaaacaacaaatacatgaggagaatctagagtaacagtattggtggaataggctacaagagaggaagtggatgacacaaactcttgaaacttgatctgagag

SEQ ID NO: 199817 - DNA, 788 bp, Cannabis indica
tttctcaattttcttaactttgtttcttttcatcatgatcatcatcccatcctatctcataataaccttatcaattcaaagaagagttccaaaaccaaagtcaaaattacatcaacaccaaagttaccaccagggccaaagaagctacctctaattggaaatctacacaaccttataggctcttctctccctcatcgccggttgagcgatttggctaagaaatatggaccgttgatgcaccttcaactcggtgaagttcctcatatcattgtctcctcacccgagattgcgaaagagatgatgaaaactcatgatgtcaacttttctcaaaggccttttctcctcattgcaagtaagtattatggtatagacattgcatttgcacattatggtgattattggagacaaatgaggaagatttgctcagaagaattgttaagccctagacgagtccaatcttttcgatcaattcgagaagaagaagtgtttgatttagttcaatttgtacattcaaaagtagttagtcatgatcatgatcatcatcaacaacaaccctttaatcttagtgaaaaaatattctcattgacatataatatcactgcaagagctgcttttggtaagaagtgtaaagaacaaagagcttttatattagctgtggaagaaggcctaaagattgcttctggatttagtgtcactgaggcattcccttcacaaacatggctaaattggattagtcacataaagaagaattttgagaagaatattgaaacagttgagatcacccttga

SEQ ID NO: 199818 - DNA, 1597 bp, Cannabis indica
agaaaaggttttggttccacacagataatttggaactggctttttgaaggagaaaaaggaaggatgattttttggagcgtgaaaaacattaagggacacctaagtatttatcgatgaaaggcttattatccatattcaggaaattaagaaaaaaagatcgagagtcagaattagtattgagagagagaaggatggaagacttttggagattgaccgattgaccgccttctgataaatgagcagaatgtctttgatttcagtgcaagaagaatcagagactctagtgaaaagaagactgtcatcatcaaacagaagatgggatatgggaggaggagacctacaaatggtaatacaatgaaaaagatttgaaaaagtcttataattaatgatcccagaaaggccttcagcaaccagaaggaaaagatagggggagagagggtcaccctgtctaattccacgagaagggaaaatttgggaagatagattattattgatacggagacgaaaagaaactgaagaaagacaccgaagaatgaaagaatgaaatgggaaggaaaaccaaagtgatgaaggatgtaacggatgaaatcccattccactttgtcaaaagccttttccttatcaagtttaagagaagcccaacccactttcccagttttacgattagtgatagcatggatgacttcattagcgataatgatgttatcaaaaattatccgatcgctaaggaaagcaccttgattatgggatataagatcacagaggatagatttgagacgattagcaatagccttagagacgaccttataaatagtggagcaaagactaataggccagaaatccttgatacgacaagcattcttaaccttggggataaggacgagaatagtctcattgacctgggcaatgtcagcattggtgttaagaacatgaagggcatcattacagagatcaatgcaaacgatgttccaatttttctgatagaaactagggttcaaaccatccggtccaggagctttgtccccaggaagctggaagagagctcgtttgacttcagcaaaatcaaattggctgtccaggaaatcatgatgattaggggtgatagttttgttaatcccttgaaggatcagggcaatggcatcagcatccgtacctcggatagtaaaaagattagagtaaaactgaacaaaagagttggtaatatcatgaaggctggagacactggaattgtcatttaaagtaagggacttgatgaagttattgcgttttctagtagaagccctgctgtgaaaatattttgtatttttatcactcgctttaagccaattggccctcgacctttgcttccaaaaaacttcttctttaagcaagagattgtcaagagaatgttgaagtgtgttagccgtttgaacatcagagggggaaataaaagggccagtaagaatgttatcaatttcagattgaattcttttgatttctcctttgaatttatttttatcccttcccaagaaaccatagaagcaatgcaattatcttattttgaaagaaaagattgaagaggggaattagtggtatccagagagtctttaagggtcca

SEQ ID NO: 199819 - DNA, 640 bp, Cannabis indica
agcatttttacaatttaactaagattgttttttccttgaaaaatgaaattggttttaaaacaaatatactttatatagtagagttttaaaaaaaatttaagcttattttaaaagaaatatttaaactccatataggattttctcctctttcttcatcttagttttttttttcttcagctctcaatgctcccatgagtgtcgccgaccaaatctaggctgatggctcccgagagccatgcctctggctgcctctctgcaaggcggaggtcccctttggtgggttcaagtaggtgtcggaccttgttcctgggggacagtgtcgtggtccctgagctttcaggcggggcggggtggccgccattcttggtggctgggcatctctattgagatgctcctctcctttggctgggggttgcaattggagtcatcctcttgggccgcgagtcggcgatggtggtgggcttcttgtggatctccttctctcgttttttagaatggcatttttcgaaggcccttttcagtgtgagcttggactgttgagtggtgttgtttttacatttttttttttcagatcatgatgtgtgcccttgggttactatccaggggtcttggctccagtgcgcaatgggaggctaagcat

SEQ ID NO: 199820 - DNA, 4910 bp, Cannabis indica
tccctgttcaaacatctggtcggctagggactttccaactcttctcttgcttgtagtagcttctgtcgagtagccttatctcgcaaagtgttggttttttgcatgagatgcttttagatcattgatcttctctctccatatatgccccatcttctcttctttgaaccttccattgataagtttcaagctctttaagcttttacttactttttgattctcatgttagattgtaatctttttggtattttgatccacatgacaattttagaatgtataatttgtgatttcctgatggaaaagattctattttggccttggttgtgattcttgactctttgagtcatcaagaacatgaggcacatagtctagttttgagaaaaacacacattttgattcaaaactaaccttggtcgaccctaggggtcttgtttgagacctagctgaccctaagatttaatcatgggaattagccaactctggggtttcaccctaggaagttagtcgattcatgttcaggtttggtgaccctagtcaattcttcactgagtcatgggaccctagccgacactctcaaggcttgggaaccttagccaacctaggccatggttccaagcaggtggccagttttatatcctctttttaccttggcaagaatcttgtcatggcttcgtaggcatatacaaccttagtctcatacgtggttacctttgaaactctgtataaaacttaatggtgagtctattatagtcgaatgctcaacttaagactcaatatttgtccaagctattatacttgagactatacttcactgatactcagccttgtacaatgacattatctagcaagtacccttgggtacggctgcccagatttttgtgtatggcttgggaccagcaaggaactaccttttggcttggaacataccaggaactctgccttgccttggagatttagcccagtacatggttcctatgggaactttgttcggttcttctctagctgtatagttctcacggggcctcaaccttatgcattttgaactatacagttcttctgtggccccgaccttatgcatttgaaccagttttttatttatatttggccttaaggctttcatgttcttgattttggcttataggcactctattttcgaacactacttttgttcaaccttaaagcatttcactatggacattgattatcctggctatcttcttattgtcttgacatgtaaatatctaaatttacttttcttatgccaagctaaagtatgtctgcacttgacttaaaggcaggtttagtagcttattctaagcgtttaaatttctctgcataagttctttatgttagtttgatgcattgtacggtgtaggtgcccgcaagtgagcatgcatgcttacaatctcttggtcacttgcattcagttaagtttcatagaccttgcctgagaattttcttggggtgctattgggttatacgcatgtggaactgaaaaagaataactttaagaagttatctttgttagcaagtggcttagacacatttggtcttacgtgtaacaaaagcttacaacttggtgtttgcttttgaaatcacgttgtggctacccctgcttgagatgtcaggcagaggccattgttaaagagcgatgggaggccatgctgaaaagaaatgggtactaactcttttatatttggctacctctacacgacttaccgtgcaaaggccatcactgaagaatgatgggaggccatcgctggagggcaatgggtactagctcttttatggattcctgcaaggtgaaacattaaagggaaccattatacaagttagctagtgagagcacttaccgagatgttctctattctagtattttggtaaaagaaccaactctaagttgtcattgtactcgacaggcttgtatggaccttttcttcttatcttgtaacttggtgcggaccttttcagttgggtccaaacatgcttgctccaggatctttggtatcaaggagtattcttcggagcactgggtcttttatgaagaatttctttccttgatttgtatgtcaaagggcatggtaactctttgtgggcagacatgctgctttgagttggcttggtctcttcttattcccttttgccaagggattctactagcaaaatgtggtttacttcttggtcaaagtagaccagaagtgtgagagtagactattggcggatcgggccagctaggatataaaccaggtggccagccacgttggagcatttcccgatcatttggatgaggctctgaccagcgagcctgtggaggtagtggtcggctaggttattgactctatggccgaccagcctactgaggtcatggtcagccagccttttggaggcagtcgatgttgtagtttgatcccatctacactcggatggctttgctcccagcgtgattgttggagtccaagtcaataccagttcaacttctttcttggtaacacttcttagaggtgttattagggtaccacagggtaccatatctataagttatgctatccaggattggccacctagcagctatcccctttacccctactttctagcaaggtttttgtttggaggtatgctgctataagtgtatccatgttggttgtctagtatgtcttttccttttaaagaactgggtgggtaccaagtttgccttggttgtcaaagtgtagctggctagttgagcgagtgtgtcggctattgcgttgtctttgaggacttgccttttagtacaacctttgagctgacttgacaggtcatagctcaaataggccatcatcttttttcattgacctgtatattcacctaggacatgacctacgactttttgagaatcgtggtgtatgtttaggtgttcatcccgcgcttcgtgtgctagcctgaggccagcattcagagcttcatgttcagcctcgttcttagaagctttgaaactgacctttgttgcctcatgcagccattgcccccaggtgttctgagggccaggcctatatcgagcaagtgatcaagcaccttttaggttgagtcatcttgctcttactctcacttcatctctggcttttgcttttctcccgaaccttgcaagatttagggagatatgcttctatgtttagccatgaagctgacgagagcttggactttgatggccatgtttagttgataggtggccttatatcagctgagcctcagtggttcacttgagtggttggtcaggtgctttaggttttgaagacacctgtcgccatagctggttggcatgcatttctttgggagttttggcaggagagtgaagcatgcacacttcttctccttctcccttagatgtcattttcccttttttgccattattttggtcaaagctgtcgtggttgcatcgcctccaattctcattattggaggaattggtggagatcgtctgcactggttggcatgtcaggcaacacttatggcaatatgatgtcatgtgtttgttgtttttgtgggagtcatcacgtcccatatagtgaccgggtaggacttgtacatcaacagggagcgagctattgttgttgcggggaaccttattggagggatgactcctagccctctcttggttctttgcgcgttcttcaggtccgtagaccaccctctcccattggtttctcggggtagggacttcctatgtataggttcagttgtcttgaggtatctgttggttgtgggcgtagtacccaacccttgtgtgtttttgttaaagtagcttcgtgttaagtcaacaacctcttgagtgcgacggtcgtggtcgtcttggcgcctcctcatttctcgagcatgatcttccagccaagattagaattctctcctttgttagcaagacttattgcaattgacctttcattcggcctatcacatctcgtaattgatccatctcttggtcaattccttcgatatccacatggggttcattatgtggcctaaacacgccagggcctcgacctatttgtgcttggcccgtgccatcattaggtgggacaaaatttctagtattaccccttctggtggcgccatcagtagggccgcctctaacagtggtggaattggtggtacgcccaacagttgtctccccagcagaagtagtttcgccagttgtcccatgacaagcagtagtctggacagtggtgtgggtggtggctgcaccaccattaccaggatgcgggggtcgctatccattgtttccggcaagattacttgctgatggaacttgctgggcattatccatctcctcatcaggtcgttcttgtgatcttctggttagcatcatttttttcgataaaaaacttgaagattttggtgaaagctctcaatgaaagcactaaaatattgaatggatttttttccaatcgacgtgtagtcataataaatgaaattaaactaaaatcatcacaataaatgtaattaatgacactaaaatttgcaataaatgtaaagaaagacaataaaatttaaagagattcggcccccgacgtcggtaatagcctactccctttgggttttattaatcagagttgcaaaagtcaagaacaggctcttgaatgcaaagaataaaagagttttttctctaagtgctcaaaatcttagacccctttcccaggtcatgagtgatcccttatatacgggaaaaagtcagtgcttctcgtttcaggagacgcgaccaatgcagagctatctcaaccgtctctttgattttcggaggtagttgaagtctgatttttatgataatattctgctatttttgtgggttgataactatctttgagctttttgtgggatttgaatatttgaactagtcattcacaatgaaggtctcccaatggtgtgacacggtcgttgaccac

SEQ ID NO: 199821 - DNA, 794 bp, Cannabis indica
attattattattataattatggagagttgatttaaagaaacataaaccagtatcatcatcgcccatagtttcttatgccatccatggtttttattcatgtgtatatatttttgaagtaatgacaaagtagtacacaaatatagtactgttacaaattgtacagcttaaaacaataataatgtatgtcataaaacattttaagtaatttaaattgtttttttgggttatgttcagagagctcagatcacatgtcttaattgaattttaacggttttaagttaacaaaaataaaaataaaatgcttacatctttaagtaatatttaactaaaaatgacttattaaattagtactgtgatcaaggtcctttttccttataaatcactttctttcatttttatactaaaaatttccctacaaaatcacagcttaataaacaaaaaaaaatagtttattattgtatgtgataatgatgttagcacaaagcttaataataatttttgttaagaaaaaatagttatgagaatgtaacaaacaagaatgccctctaaaaattcttagaaaatgatatggaaagtgatgtaaagggggggatttatttggacaggaatgtttatgacagaaatatcagtatttttatttatttatttatttattatttttggagaggatttgaaatttaattggttgatgatgagagtagtgagatgaggtagttaaagtaatatatatatgataaggtgagacagagaggaatgagatgaatttgtatcaaagtattttctgtggctataag

SEQ ID NO: 199822 - DNA, 1421 bp, Cannabis indica
atatttatttttaatttttttagatttggaataaacattttgtgcggtttctgagacattattctgcttgaattggtattgttcacaaatttaggtaaaatactattgttatatacttatgtgtatcaagtatatttagttatatttttattgtttattttaaaaaaattggtgcatgtgtatgtactttctattttgtgcagaagaaaaggtgaccatacaggtggcgtactgattgaagtggagcaaaattctagaaagtagatgaaaatgatatggtggaaataggactattaatgtcgattaaagtcccattaatacccccagcaaaagaaaaagaaaaaaaagtcccattaatagaaacgtcccccgtctgcgtcttttctgccaactacaatttgggctacgttttagtttttacccctcgaggcagccacggactacatgtggaatcgtgaattgtgaattgtgaactgtgaagccagccactttggaaaatatgtttctttggaaaatatgtttcttctagaatctcaagttcaaataaaaataataacaacgagaaataaaaagtggtcgttggtgattgatacaattatccaattctgaaatgtactttaatcaaaacaaattaatgtcataattgagcaattactttttagtgatgatttgtccataatttcaaacttcattttatagttcacttgttcaaatgagctcagtataaaagagagaatgctctcttatgtgctttcaaatctctcttatgattttttataagtaagggtgtgtgtaaattgacccaactgttaagtattgaatatttaattgagatcaaaaataataaaaaaaaaacaatgttcttctgaggaaagaagtgccatgatttaattgatcacatgtcattcaatctagaagaaaaactcacatgtttgcactatcgcatgttggctgctggtgactgatctacatatattaaaaatcaactagatgtaaaatattaaacatataatatctatatcactttttttttttctttttcttttgtggctcaaataagtatataatgctatatgattgacaaaaatagtattatatactacaaaataatagcatttgagaaaaataaaataataataatcagataaaaaaaacaaaaatagagtgatgctacggcggccaactatagtcagtatgacagtatctcgcaagaatattccacccgaagaaagttcgggccataactgtcgttttccgggttatatatattttatatttgaaaaaagagaaggaaattactcaacaagacatgttttgattgaaccatatctctgattttgattattcaaatttcttttctctcaagctccggtccaagacatcaaaagttattttattttcagatagacaaatattttttt

SEQ ID NO: 199823 - DNA, 1348 bp, Cannabis indica
actcctttctcctcaaaatccttattgggtaatactaatactactcaacaaaattcaactccactatttggggtgtggctttaactttcgtagtagtagtactagtccttctcatggtcatggtcaaccatttttcttcaatggtcaacatcccatgcccatacaacattttactcaagattggcccttccctttctcctcctccaaaccctttggtactactactcaacaaaactcaactccactacaatttgggtgtggctttaactttcgtagtagtagtactagtcctaattatcatggtcatggtcaaccacttttcttcaatagtcaacattctcaacatctagatcaccccatgagttccatgcccatacaacatttttgcaataggtgtggacacaaatctttcttggagcttaaagagatagatggaccaaattgttttgaagtaaaagagcttcttaactcaatatcaagcatgcctttttaccaacataagtctcatgaggaatttagatgggaagactacaaccaaaaaaaaggtacctcactcactcactcacttatcaagtcaattttattatttttttttaagaagaaataaatcactattattgatttagaaatgtctttatgagttcatttatttattcattttattatgtgtaggaaaatgccatgtaaagaagggtacaactacaagtgaggtcctcataaaagtgaggcatcgaagccgtttttacatcttactaaagaaagtcttatcatttgtggccattttagtcattgctcgactacttgtgctttatctcgaggaatgacttctttcttgcattgccacgtgtccaatcaaatgatttatctaccaatttcaagttaccatttttccaattgggttgtttttttttttctttctagattttatttatttttatttaagaaaaacaagttaatgtaataaagttcccgatttcagatctttgtgtatgtcttagtctttgtgattttctatttcggattttgttttggatgaatgtaataatatctcaacaatttttctagccacagaaaataatagtagaaaacaaagaagtctattctagagttggaatatttataaccagaaaaattggttttgcataaaaaatctttgttaccatgggacctggtgacatatgatgagtcatgggtcattttgagcagagtcttcatataattgcataaattaaactcaagaatagttaaagatgaattgttaatgtatgacatgttaattctgcaccagaactttgttgtatgattattgcttgctaacactacactaaaccaaatttattgacaaata

SEQ ID NO: 199824 - DNA, 1222 bp, Cannabis indica
gcttctagcattacaatgttatataatgttagacaatagggtgcttgtttcatcagcacctaagttggaattacttaatcagaataataaagcctaaggcatctcaatgggaagaaaatagtttcttgttgtattcttcttcagagttcactctttttctcatttggtttgataacaaaagttaatataagggtcgacttagttaaaaccagctatttattatacagtacataacaaatttggaatttcacttcccattgtggaatgtttttggctctgatagtttcttgtagggctttacattcaattcattctaacatttttttcctaattcaatcgccccaagtttgtctaacctatatttgtcatatttggattgattttatcttgatttatgctttaatattaaaaaaaaaaaaatcaacgattcaacaccaaaaatttacaagcttaacctggcgtaaacacattctaagtagctagtgcttggattctccaaaccaggtaataatcttcactatatcaaaaaatatttgtacactaaccaattcaaattacaacagaaaaacaaaccaatctttacagtagtgaacttttaccctacataaccaaatcccttcattatgaatgcaagatcctcttgctttactcgttgaaatccctccaacgaaaactatacctgaacacctttcggatttataatgccaagtctcagctaaaatcccttcagctatcacagtttgaattcagagcttgcaatgaaaccttgaacaaccttcaatgggatttcttgcaagaacctgcaaaagataacaaagcagaaaaagaagagtaatacaatacacaatattgatatatgatctaaaaggttagaaaaagcaataaaaatagtatttgtacccagctaaataatgaaactcgaaatggacagctataaccaactggacaattaaacacccaaaatatctttgcagacgtgtaatatcactaacaacacaaatcgtagacttcatatcaaccattccagacacaactggatctaatctatcactacagaaaatactagttattaaataatcaaatctaatatttttctactaatccgatccaaacttattagtaattggatttggaatatcatcatctgatctaatttaattagactgcaatatccaatccaattaaatttctaattgaactggatcaattttttaattagata

SEQ ID NO: 199825 - DNA, 2687 bp, Cannabis indica
tttagtcacaatttattttaacatttttcgtttttatagtttaacgaatgatttgtttaatcatttggatttatgtctctactttggatttgaaatattttttttatcgaatgggtgaaaaaaaaaaagttagagcgagttaatcgggttaacccgttgattcggcacactcgatcaaccgaacccgcggacacgcaaacccgggagctcgaaacccgtgaacttaaatcctttgaatgggtaggttcgagttccatttttagacctgaaacccgtgaacctgaaatctagtcacccgcccaatgttaagccctacccgatggatgacacctacacttccaagacccaaaatcaactcacgggcccatttgttagacctaaacaaaggaatgggtcagcccataagcaaagtcggactacgactctaggtcagctataaccatgtctcgataaagtcagacatctttgttcctggaaggatgactctcgttagagagggagagactcagagaaacacaactggatacccttaagggtattcctgaaggagtagtcgaagaggtatccggatgcagtcctacgtggcacccctttgataccagatcccacacaatgaggagtttatccttgtgttaaacttgggaaaggcgcacagcgcaaaaacaacatacattttgtccaacgtccactactttgacatttgttgtaagggatcggtggcacatggccacctgtcaatatcaaacaatactatgttatacgtttgacagtcacccctcaattgggcctcatatacccagcacaaagtcaatattataatatgttttactccatctatgagcttattttcatgtacaaaaccctaatcggtctgggttcacctgagaacccagttttagcctataagatagggtgttatcccttcatataaagggttacaaattttggctagaaactctgcaaaaatttggcaagcactcttgtgcaaaatactccatagccgaaaagagtagtaatattgactcgtggactaaggcgcattaatgctccaacctcataaaaatcattttcttctttatttattaaaaaaatttcttagcttaatctattattaatttgatttttaaaaatctctgtaaatattttagtgcttttattgacagctgaggaaagtattatacattgttatcatctaaaacattggttacaactagaaacttggtattcaagccaaacgctcatcaagatcgtgacgatgctattgatgacgacctaaattgtcccctctggtggacactcagacaggcgtcgcaggggatggtgaagcgtcagaagtagctacttgtctacctcgaaaaggccaacaccaagaaaaatacgttgaagagactcccatcaacccagatgaataagaaggctaagatgagggcccaaaggatgactacgacaaaagccctaataaagattatgaggagtattatgaggaagacccagaggtggtgagattaaggcaagtagttgcagaccaacagaggaagatggcggagtaagaagaagcaacatgccagatacaagctactctcttacagttgcaaaacatggcagcaaaagggaaccttaacgtcgaaaacccacaagtgagaaagtttaaccatcctagggttggaccctctaattcaaaaaatgacaaggggaaggccaaaatggcatagccccagaagaagaaatatcgaccaaggcttgcatatgacgctcctaaggacgacaaaaataaagtcaacccacttgtgcagaaagaaagggtcgtccatgcccaagggctagaccttttaatcgatctgcataccagagcttagtggaacgataggcacagtgcttaggtaccggagcctaacattgggggaaggaaaaaccacccccaatatttctattcactagatcccaaagatagcatgtcaatgaccaaggctcttggattttcccatcaacactcaaatctcgggcatttgaagtattcatctgattcaaaagtttagttgaaaagcaattcaacttaccaataaaggttgtccaagcggatgaaggaggtgaatatagaccatttgaaagatttctcaatgaccaaggcatcaaattttaggttgtcttgtccacacacacacaaatgagcaaaatggaagagtggaaaagaagcatagacatgtcactgaaaccggtttaactttgcttgctcattctggacttgacatgacttattagtggcatgcattccaatgtgctgtctattctattaacagaatgccaacttctgtcattggcaacattagcccttatgagtgtctgttcttgcagcaacctgactacaaaattcaaaagccatttggatgctcttgttttcctcacttaaggccttattctcttcataaaatggagtacagatcagaggagtgtatctttcttggatactctcccaaacataaaggctatttgtgtgaaaataaagatggtaggatctttgtggctcgaaatgtggtgttcaatgaatctcattttcctgcatttcacaccaacaacacaacacaggtaaattccaatgcttctcttttttcctattgcttaaatttttactcaatctgaacagtatttacctcatactaatattccatctgttgctgtcattgagcaca

SEQ ID NO: 199826 - DNA, 2621 bp, Cannabis indica
ttcaaatactcagttgcagcaagatgagcaagaaaagtatggtgagttagtcatagcccagcgaaactactcaagctttattcaacagctgagtaaaataacatggcttcaatttggggatgacaactctcatattttcttgcttagcttaaaaaaaggagaactgaaaaataaataacatcatttatcaaagatggtgagattattgatgattatgattgtcttgtccatcatttttgcagctttttaggcaacaaaagtgctgctaagaaggagatagatctggatttccttaattggggtcacaaattgagcattcagtagcaagtaaacatgataagacctttcacaaagaaagatgtcaaggctgctttgtttcatatatactctttgaaaagcgcaggaccagatgggtttgggtcgtgattctttaaagatttatggaatgagataggagatgagataacggaggcaattttcaatttttttcatgatgggaagctgcctagtgacctcaatgaaatggttatctctcttatacctaagaaaggtaatcaggaaaaagctgctgattataggcccatttcttattgtaataccttatacaaatgaatttccaaaatgctttgttctcgtcttttagatgtgctcccttcgctaatccacaacaactaaggagtgtttatcaaagacacattactggctcataatatcttgatttttcaagacattcttaagggtatacaagaaaaaaatatctttgcaaggtgcttcctcaaaatatacctttgtaaagcttatgacacgttggattggcgctttgttttggatttacttaagggtttttgtcttccagcgcaattcatcagctgggttctggattgtttaaagggtacttcttactcgctcatgatcaatggcatgcttcacggaacgtttaaaggagagaaaggtcttcgccaaggtgaccctatatctcctttgctcttttttttttctttattatggaatatctaacttggctgctcctccaagcttcagagactaaaggctttggctttcgtcctctatgtaaagatgtgaagctaaccattaatctttgcttcgctgatgactttattatcttttgcaaaggcaatatcgattttgtccaaattattaatcaaactattattaggttttgtgtagcaataggtctggctataaacaagaacaagtctcaagcctattttaatggtatcaaggaggattacaagactcttctcttagacttgatcaagatggaagaaggattgtttcccctaaatatttaggggttcacttgagaccaacaaaatggaaagtagctaactgtggtgagattctaaataggatccagaggaggcttcataagtgggcgagtagaaacctctcttttgctcggagagctcagcttattcattcagttttactgggtattagaaacttttggatgagtatattttttctccctcaaaaatttgttgcaaccattgataaatactggagggacattccatggggtatgaaggggaatcgtagcgaacttcatcttgtttcttgagaaaagtttgtcttcccaagagttatggcggtattgtgttttatgaagggagaaaaaggaacacttcattgatggctaagtttatttaggctgcctccagtaaaaaagacattttgtgggttaagtggatcaattcggtctatttgaagggtaaagatttctagcaggcttcgtttaaattggacgccagttggtacttccgaaaactcttgaaacttagagaaaaaattgtcaaagaggatgtttatgctattgttccgaagggtaagtttaaagctaaaattttctctacttactaattgctgctaataaagtagattatgctaataatatttggcatagaatgtgtgttcccaaacaccatttcattgcttggcaagcgttgaactaccaacttttgacccgggcaacttgtccaaaatcattgtgctcccctcgagcaactgttccgtgtgtgatgctaaacccgaaacacctaacacctcttctttgtgtgtcaattcacataaaagttgcttctgagaataaaatgtggttcagccagttcatgtggcctgccattttggaggattggagttgccggtgaaataagaatcaacatgatttaatgtccacaattaataatgctataatttctgtcttgatttactatgagtggtgtaattgtaatcaatggttatttgaattagcttgttattccctcaagatggttagtttatccattcaactaggcattaaagctagaacaagaaagttaaatccttgtaattttaaaaatagggacaaaagcacttggaatgtaatatgtaacttgtaattcttgtttcgttaggggtgcactgcctatttttcagctgccttttgtttgtattttgccttgcattaaatgaattcatcctcctttcaaaaaataaataaataaaataaataaaaaataaatcgattttaagactaaatgtttctaatcaatagatataatatatatatgattaattagtggattagtgaatacatagtgtaggaaatttagctctgatac

SEQ ID NO: 199827 - DNA, 1310 bp, Cannabis indica
tgtagtagttagttttggtcaatgcatatgtactcaaaatgtctcccacctaaccttgtttgatcttttccgggttagtttagtctttttcataattaatatataaaatttctatgtaaatttgaaaaaattgaccacataaataaattggtgagtttatttatcataattatatacatatatatatatatatttaataataagtagtagtatgtaccaggtatgaattccaaatagacggcagaactatttaactttattaacctaattaataattatatatagaatatatcatcttttgtgttgtatttaagatatattaattcaaattagtttacttaatctatataataatagaattaattatttttcttcttttcgagaaaattaactaatttgtatttatatatagttatttaagatttttatccccaaatattattttgtctcatgatttgatttttccagtaaaattagttatttaagatttttttttactcaaattttgatttataaattattgtgtccctaataatttcgttagaagtagctctcaaattatttacagtgatatataatgtgactttctttctaattctaatgtcaaagttaatcctctaaaataataacaaacatatatgtatattattgtaaatacatttcaatcaagatatatataaataatataaatatttgtattaattaaatatgactaaaataaagataaacaatattcattattagcaaaataaccaaatatcacttttaataacaagtatattattgtaaataaaagttactaagatgttgtatattttcttttagtggtacaacatacaacatatatgtataaaagtagtgatgagttgtagatctatcaaagtgtatgattagtggtcgggaccgctcaataatttaatctcaaattaataataatgtttagatctaaaacatagttagaatatatattgtttctcttattaattataactgtttttttaggaataactagttaataattaaattaaaccactatagaaacacttgtacaatattataattggaagatatgattaattcaaaatttaataataatccaaaatcacagcgaatagaaccaattaataatagcctctgaattacattaggtagagacacaacccaaaaaaaaaaaaaaaaaagcaagtatgattccagatggtcagctcaataatcttccatatattttatatataatgtttatgtatgtacatacatatatattctttaacctttcagacaaacacttataattatactaatatatatat

SEQ ID NO: 199828 - DNA, 946 bp, Cannabis indica
ttaatttttgtttttgtttttctgtggtcaactatgtagatgaattcccggaaacatgcgtcggtccccatccctgccccgattttgctacgagtgaggcagttggctgagatgcactcccagatgcctccaaatcttggctcaaacagcagcttgggtggagtaagtgggaggagtagtgtgcatgaaacacggtcagggtacttgtaacattgtaaataactgccattctaactgtctaaataggaaataaagctatcaaaattggaacccatgataatcaaaatatgctgttgatgcgttgtatggtttatatgatgatgcttactagtcctaaaccaaatcgttgtttcaccagtgtgtaatgatgattgatgccttcttttttagtctcatatgtaggcacgtgcatttcttttattgggttaattggagatcgtattatctccatgcacttttggtctgccacttaataaacaatgtcgttcttaatgaatctacgaatccgcagtatacagaaaaattagttaagagtccaatttttatatctgaaaagttatttaattttattgatagacaaataaataaaaagaagaaaaagaaaacgctaattagtagcaaaaaaagaaataaaattttattgtgtcgaattcagcttatgttatatttagtcggcatatattttttagtgatagtatactgtatactggtgttggcactttcgttgcaatacttctatattttacaattatttttttttcttccaaaagtggtgctaacaatgtccccttttataatcgtggttgaattttccaatagagaacaaaaagaagggttaatgttattgtatgatatatatatacccaaaaaattattgggttagaaagaatgaaaaggagaatagaaattatatttaaaacgtataagaaataataataaatattat

SEQ ID NO: 199829 - DNA, 1038 bp, Cannabis indica
acatcaacatgtttggttcgtagttaaaccatagttggaagatagactgtacaggcataccacatcagattctgaattttagaagataattttaaaccccatagaatgtgccagaagtgcgagtctttatcaccatatcagcgacccttcaggctttgcaacaaagcatatgcactcttaacagtatagatgcctaaattgtccttcgaccaaatatgatggtcgtctgctgaagctacctgcaaaggtatgttcttgataagcctccaatctctctccacaaacatgtcatgcgtcaaatcctcatcccaactacgctccctaggtttcatcaagttgcaaactcgtgttccaactagtcttggatggtcagaaaccacctgtgggttcaacaactcagggagccaaggttcacccagaacagaaatgttgcagccgctacctacaaaccaagaaacacctttctccactaaactgtgtgactccaaaatacttcttcaaacgaagcttgagttagactaagtaatctcactaaatattgttttcataattattgaatttttgtgaacatctaaactaaaatatgtatatatttaattatttgactaaaagttgaaactcacattatgtaaatatattataaaataaatataggatccaacacaaagtttacattgttcatcatcattttaaaattcccatacataaaccattggaaattatcaagtggtctcctttggttttgcagtggggtggaaaagttataatcctacataacaaacatgttacaactcactcaaatagaaaaacatataacaaaaatctaataaatttttaaataatacataattcaaacgagctagttattgcacatatgcttatttttttttcattctcacgtgaataaggaatttacccttcccttttgtacaataaattatttttctaatataggccaatggaaaaattaaatttcgttttttatattgaaggaatacatgggtatagtaggcaccacaatttttttttttaaaaaaa

SEQ ID NO: 199830 - DNA, 526 bp, Cannabis indica
ttaattagttaagtacaaaagaatgtataagagatatttgtcagaaaattgaatgagaaaaatgaaaagcactaatatgatatgctaacctttgtaagatatttcaatttattattattcttataataataataataataatatctaaatcatgtagttgaagccaagtagaaacacaacttacatcctctttttaaaaatcaatataagcatcccatgatttcattagcactatcggtttcctatccaaaaacaagaatccaccatttaaaatttcatctatggtttgaacagagataaatcgaacagtaaacactctcccactttatccatccctttttctttccaaacaagaagatcaaatctctcaaaaaattactggtggattaacacctaggacataacaaaccagaacaaaattctacttgatttgatctaagcttcattccaggaaactcacaaaatcagacttgatgctttttttgttaaagatgacgcgcagagcttgtcgtcatcttacccctat

SEQ ID NO: 199831 - DNA, 3040 bp, Cannabis indica
gggattgatgctgagtacaccgataatgggatcgtgtgtgtgccacatccacgtaagttgatatctgagttgtagggattgcgctggtgattcatgatgtgttaagctgaattcgctaagtgttgatcattcgacaaggctcgttgagtattccattctagatgtgccagcaaggaatcctgctcggcatatcgttccgaacagatgctcgaagtggagtccacgtgtcaccattctcgtgatgccacgtcaaagtgtcaattttgggataacacacttttatatatatatatatatatatacaattttctttctatactaaatacaataaatttatatattgtcttagagttcatgagggggcgtgagagagagagaggagccttggccatgtgagacttagagttctggcctttttcatcttacctaatttcatttatataatgtaaggttacaaaatatcataatacaaatagaaaaatactcctaactaaataaagtaaaaaataaattactttatattctttaatttaaattaacaaaaaaaaaagtaatatctctagagaataggcagatactagtttgaggaagaactatcttcatgggcagttatggttgttttgtaactaaaatttagcttgcgacctcaccattaatccagtctctcttcgaggctatttgcacgtgctagccagccaaccctatttttaaggcctagccagcacataagacttcattggtcggccagggttccctagctcatgaccattttttccttgctagatcttgcttgatttcctaagaaatcgtgacaattgacatgccgtgcaaggggacattgtctggttattgacaaattgtattcaacgtggttttagttttttctatgtggacatgccacatcaggtgagcaaaaattaggataataatgccttactaaattaaatttaatattatcttaattcaataaatatcataaatcatatttttgactttgctatccgcattttcaacattggacacgtggactcaagatcaacattcaagacccattagtggaaccctcattaacgaaaaatgggccaggcccatctaggtgttaccttctaggaacatattctggttttgccctcgcaaagtcttccgcctttacttaactgagcccaaaagacatgttcggtaccacgagaccagagaggcaaggcatcacattcccaaaagacccttccggtttccctttatatgcctgaacataaataagaaaactccacttgtcaaatcgcaacatgcatcgaatcaagattaaagggaaaacttcctataacaaagattatgcaattaaatcagattaattgcccacaatttatgcatgcgatgttgacaaattcaattccaatctgatctgcctagtcaacagatcgtcttctccatgggctgaatctcatgagaaagcccacgaatattctttactgtaaactccccagtagtgggaacagggaaatctaatgtaatactcaaactattataaataccccattaatctcatggattaagggttgaactttctaacctattttgctaaggcaaatttaagaacatacattctgtgtattttctttaggcatttacaaccataagcttattgaataagattcacttgtggactaaggctagttaacgccccaaccatgttaaaaattgtttgtctcacttcatactttctttatttattatttattctttagtttatattatttttaatctgttattgaaaatctcggtaaacatttattggattatattttaccaggacctagatttactaacaagtatatttttagcatcctaaatatgaatatctagaacaatgaaacttaaacacataagtgtatgagaaatcttacattgattgaatcggaattaaatgactccttccacttagatctctaacccttgtttctttctgtctctttttcattatgagccttattacatctgtccctctcgtttctctatctatatatttctctctctctcttgttggctggttgaatggttatagtaaggctggttatgaaaattctcatgttatattgtttatgactagatttgctatgagatttgagggcttccatttggctgtttatatacactcattgtagtattcaagtttgttttccaattcattatataattctcttttaattgtctcactttataacttgattaatttgcctcgtatattagaaaatagaagatgatactataaggatatatatatatatcaatgatggcagtgaataatatttttattttaaatatgtgcattactttttcataagcatttactctattcatactcatgtgtcatatggtgctttaggttggtctttgatgctcaagtcaccatttatcaaaacttttggtatgtaattatgtaaaaaaagtctttccctcacaattgttcttatttagtattcatctaatttcaaaattgtattttgtttgggacttgattgtgttaagacaaaaaaaaaatatttcttggactttgatgtttgtctagaaatttatgtcttggtaaaaataagttacttaagattactattattatttggccaaaatggtgtatagctcaaatactagttttgctaaactttgactattatattaatttgtatgtatgtatatcagtaatatactagttttgttgcaagttccatgtcgataaaatgtcttctgcccatgtttattttcgactgcataaagggcaaaccattgatgatataagtgaaggattactagaatactttggtcagcttgtcaaaacaaattccatacaaggtaaaatcttggcttgtttttctttcttgtaatttgattaatgaatgcttgtttaaagtttttttcccttttgaaattataagagaattaattgtcttgttcaataaaaaatccatctattctgatttgagtttcctttgcacgtaacaaagtgaacaatcttgaggttgtttcaccccatggtccaatttgaaga

SEQ ID NO: 199832 - DNA, 1053 bp, Cannabis indica
actcagcttcaccgccgcctccaccgcctagtttgaacccatcagtgcggtcatcgtcgttggaaactgcatcgtttggcacagtcatggttcggttggtttgtttgttttcgactctctctcttctctccctgattcgatgagtgggagtgaaaatgttattttatcattacctacccgcctaagcctaactgcaaattgaggggtattttgggaaacaaagcttgcaactatttcgacttccccacttttggccccttaagcaagtcgtttatttcattgtaaatgaccgagatgtccttttcatggtacactgtttgagctgtttgaatgagtccaacgacatcgttttgcggctgttgagattctccttttcggaatagagaaatgaggtgagaggactttggttgacatgggcattgggcgctttaatattgattaatatccgtaattacgggtttgggacagtttgtggggtagagctgtattttaaatggttactttatttgtttacgtacgggaggagaatattttgcaaccacacctcacattttaataattttaatttaaaaacaaaaattaaagttaaatttttgtttttaaaatttgttttagaaaacaaaatgcgttctacaaccacttttgttttaaattttaaaaacaaaaataaaagtgtgttctgcaatcacttttgttttctgtttttaaaaacaaaaacaaaaatgtgttctgtaactatttttattttttaattttaaaaacaaaaaacataaattttgattttttttaattaaaaaaattatgaatatcatttatttttatttttaaataaatatatagttataaaaaattaaataaaaaatactcattaacatcttaaaaaaattcaagtaatttgaaatcacgaaactcattatctataacacaaaactgacaaaatcataataaaatatgaactaataattgtccaatcttgaaaaaaaaaatatttaaaaagttttaattattaataaacgtcactcattatcttcatcatcgatttgctctccatat

SEQ ID NO: 199833 - DNA, 2600 bp, Cannabis indica
ctttaagactagttggaaaattttccaatatatgttagtctatttcccaatccataaagtagcctaaaagattcttcaccatgtggctctataataaaggaaaggaaggcttgctttagatttggatcatcaatgccacctatttggtagaattgtttagtcattgttttgtaatgcttttccaagtctcttttgtccattgaacaacacttgagcttgaaaaactcttgtctaagtctttcagttacttgtgcattttggccacaaaactcgacatagagatggcttagggcatttgcgacagatgggagttgtaagaaagtcatctatttgtattcacctaagcttgtccaccaatcttacaaagttctggtgaatcttgagacaaaattcaagaggattgtccttgtctgtgcctgcggtttttgtgtttccaagctaagccaagcttgaaattcttggaatctttctcgccatttagatgggggaatgtcatcaagagtaaaagtttaaaatatagaatatttaatcttttgatgattattggattctgttttcattgtagttgcttcttcctcttcactttcatcctcacttttgacaataggctcagtttgagagtatccttcttctacaggttgaaccatataatgtgggggtacatcgtcttcggaagtatatgaatcttggtatggatatcaattgaattatttgtaattttttttcattttaatataaattattttttgcgattttttatgggaaattttcaaaaccctttttatgttttatttactactttacgacctaagtttttatttaccaaaatacactctcaaaattttaaaattataaaaatacactttgttcagtaaaaaataagaaaacaactaaaaaacagcagaaatcaatcccacgacaattataaatgaactataaataaactataaaatctctaaaaaaataacctcatcacaactttaatacaactataattgtttttattaaaaatttattattgtaaataaaatggttcaaagggtaaagataaaattttttctctgttaaaatatttttgtaattttttttcaaatttttggccgtattttttttttattatttatgaattttatttattgtaaagaatattatttgtggactttatatcaagtatattaatattttaatttcttagacaaagaaattaatttattttaatcaaaggatataatgtaaatggaatgtgatttatgaagattattattattattattattattattattattattattattattattattattaaaataagatgtgataattacatagataatatttacaataaataaaccaaataataatttttaaaaaattataagtaaaaactctaaaatatttgataattaaattttagaatcattcttgggttagaaagaaagcaaggaatcaattattaaaaccaaacatatatttaaataaaaattactatccatacaacaaatcaccaacaagttatttatttattttgtatttttaaaaaaactaataatttattgtatttaatgtttttgtacataatattaactattaaattaagatttaaaggctataaataaattactacaagtagatcactattatacaagaactctttatttatatatatgtatatttaaattcgtttaaagaagtgtaagcttgaagtaaaagattctaaagttatatatagagaaagattaggaatatcatttatgtagccgactgatatctggaaaattcaattattattattatttataaagttattgagctggagaaaataattgaagccgtaaattaaattatagacttaattggtcagatacataagacaaaagaaggggtccgacaagccaagttatgtttcaagaaagctatatcattttatgattgtgatcttttatcatgaaataagtagcgatttgcatttaaatttttttccattattatattatgttcttttattaataatatcccttcaaatataactttgagattaatttggtcattgcatcacactatattaattttttataataagtaatataaaagagatagtagttgataaataaatgtaaattatataatttttactcttttcatagtaatgaatattagaatagtagactttatcttttttataaaaattaatatttttatttttattttttcaactattaaagtataaaattaaaaagtggaaagtatataatttgtatccatttgtcaattatcatctattgtgtccctcatttctcaaaaaaaaaaaaaaaattaaataaaaataggatggagagactatattaatataaaagttatattctgagggatattattaacaagttgtataacttaaaagacacaatttaatagtgtaaaaagttataagagtataatttactaactatttttatcattaaattatcatttataaccaaataaatatgtatcaattggtgattctataatgcacctacattgaagcattctatttgtttcatattaaggcaaaacttttaatctaattttttttattaattgtgtatgttatatta

SEQ ID NO: 199834 - DNA, 1017 bp, Cannabis indica
aaataataaggcataatgaaaagagttttttcatttttacacttcaaaacaagtttttttgcatttttacggaattagacatagaaacccctattgcaactagcgctgcaacttaaattacaacaaaaaatcgtacagaaacccctattgcaactagcgctgcaaccactttagaaatccaaaccgtaaatttgaaaaagaaaaaaggttaaaaaaaataatatatagaataattccccataaaaataacacaaataaaaattaattataaaaaaattaaatttaaacaaaaatataaatgcaagaataaataaaataataacataatagtgaaggaaacaatattcaacaaaattactttattgatttatattattaatttttattaacgtattattatactttttatttatttatagctttgtaattgttgaaaacatatataaataaattagtacataaatacacatgtatatataaatgcatgtaataaaataaattaaagcattattaaatttttttaaaaaaatataaaaaatacaaatttatgtaataaattaagaaaaagttttaatataatcgataaaataatacagttattttttttttatttacttgcacatttatggagtacttatttatttaagtatttcaataaaaataaaatgacaaaaagaaaaaaaaactaataaaattataaaaaattgacacatacaataggtttaaattaataagtaattagtataataatcaattctataaagttgtttgtatttattagttataatattaatttaattaatatttatgaaatcaaaattaaaaggtcataaccttttcgtgtctccaatactaaaattaaaaaaaatctatatctacatagtaaatatttataaatataattattattacaattattcctatataataaaaatatatcaatcaagtaaaaataaaaattgattatattcatatatgtatattagaaccaggcccagccctgggcataagcgggct

SEQ ID NO: 199835 - DNA, 1142 bp, Cannabis indica
tttaacacaatttttaaaaaaaaaaaattactactaataatgttactaaataatgtgttaaaatttgtcaaattactaaaagttatataaaaatttagcacaaaatttagccaataaatattatttttttcatttactataatattactaattattataattcattactttacaaaaattacctaatttatttaccatattgctattatgtaaacataaaaaattattcactcacatcaaattttttttgtgactacaataaaaaaaaattacttgtgagtaaatatagtatttagatatcagttgtcattaatttaattttagtcactatgagtattgtaactaaaaatatatttagtcacaataaattgtgattttcatgactaatatttttagtcacaatgtaataataataatttgtaattaattataatacttttttactttcaatcataaattttgttgtgactacaaataaaattcttatagtaattaaaaaataatttttttttatattatcaccaagatattgaatcacctttaataataataggttatgacacaaacttttttttcttatgtataaatttaggaatgaactaaataagttattagaaaccatagatatgattagtgtttaataaagtgataatgtggtgtgtagtgtagtgtagtgggaaagaagaatatgaggagtagtgtagagatgagactagtagaatatgaattaattctatttcgagttgtcttctctttattacttgtcttatatatttatgcagctttttgtttggcacatatgcaaataaagctggtgtatgttctttcccaaactccttgagatgaaccaaaagattttgttgggcagtctatatatcttattatcctcctatatctgcaactctaagtaccattcaatattcatgcatgtcttgtgttatcacatattctacatatataagacaaaactaaactaatttaactatttcccttttttcaacctttgaaccccatttgcttgcttggtttggtttaactctttacctttgtcactaaaaattagagtatgcatgtactaaagggtaccctcctaattcatgtttgttagatttaactcttgacttaataatctcaatagcttc

SEQ ID NO: 199836 - DNA, 578 bp, Cannabis indica
ggttgatcactttgaagaacccccactttctgcatgcgcaacctatctccctcgcgaggtcatcgatgggcctggccgaaaggtcaatcactggtgttccttgggcctcgacgactgtgggcttgggcctgtgctctggcacttgaatgaatgtggggtcgaattccgttcccatggccagcctgagcttgttaccttgtttacacaaacttagatttagacaaagatcaacgatgagtgtggaatgtggtatttctgattttgtttagatatattgataggacaactacaatgtaaaatatgtaagtttaaatccctgctttttatccttcccactttgttattatcatctataattctatataatatatatagacatataagacagcaaacaatgaatgaaccaaaattagagtattaaatttacgtaggtgcactcattttaaaacttgtagaaaactattgatcgttaaattctcttttgcaatataaaaattttatgttgccaatgttcaattaattttcttttgactttttttctacctaactttattatttttttaagatttaaaaataaa

SEQ ID NO: 199837 - DNA, 1099 bp, Cannabis indica
atttaattaatgtgacagttaatcgttagtttgtggttggttttttatggagtttttgttttaagattttttattggataggattttggcgccagaattgtgccacgtgtagatgcttgaattgactttttatttggcagaggatgaaaatatatagccagatttagtaaaagttaagggtataattgtaaagtgcaataggataggatttttttttctgttattgttttttctaaagcattaattaacaaattcttgtgatgatttaatgtttaaaatttgaggtgagttttgtattacttttttaattaacttttttaatgtggtaaatagagttatacatattttaataatgtagcaaatatgaattgggtcccaaactcagcttataaaatcaataaataaaaataaaaataaaatagtgcctcatcatatttattaaatcaaaagtaaagtacaccttatcatattttaaagaaaactgccaactcagttaaaaaagattgattcttaaaacttattaatgccttagagcattactagcaagtagacaacactaaaagtttcaaaatattccacatcaattaaaatataatttttattttcttctaatcaacatcattttagctaacgttttttttttctaaaaataactccaatactaagtaaagttgtatattcgggcagcccggcccggcccatttttataaaaacctaattttttatgtagacccaatctaacccatattataaaacgagttagactggacttgacccatatttttaaagtaagtccagcctgacccataaacatatattatttatattgggccaaacctgtggacctaaacgggccaacccattattttttttatgaaatagttgacccatatttatcaaatagtccctaaacactgttgtgtacaattgccatttttgtacttatcaaattagtttctaattttaaaacacaaataaatttttttaattaaaattagcttcaaaatcaccgaaaataaactataattacaattacatgtttaataatcaacattatatcaccataatagtagtccattaataaattttcacataaaat

SEQ ID NO: 199838 - DNA, 1375 bp, Cannabis indica
aagtaacaataggatgaaaaaaactgtgtttggttgccaagaagacagaaggaaaagggaacgaaagagaagaaaataatttaaagggagatgaatgaaggtgtaagtcaaacagagaatttctttatttttttcaaaccagaaaaagtttgttctttctcggcggccaacaaaaacaaaaaccagaccaaagtgaatacacttttaggagatggaaatatttatgggattgctaagattaacgtcaacaaacactttaatgggaactgaactgaactgaaaagaattttatttcttttcaatttaaattagtaaaagaggaaagaaagaatcacagagaacgagaacgagaatcgagctatataaataattataattaaaaaaaaaaaaaggaaccgtaattttaccgaatcgagaaaaaagccaatgagcgaatgagaatgagagagagagagagagagaaaaatcctcaaaactagagctgtcgtatttaaagagccaagtgattgcgcgggaggacgcgcatcccacgccgtgtaaaacacgtgtcaacctaccagttagtgacgttcacgaaacaatcatgcgcgtggatcggaatgacgtttattcggtttgaatacattttttttttccaaaattaaatttataatttattaacagaaggaacgagactctaaagaaaagtgcctggaccagaaagtttttttttcttattaataaaaaaactatatttatttataataataataataatggttggtgagagagagttgagaattgggagcatggttgtaataattcttcaatttttttttttaattattttcattttaggaatgggttaaacaattatagaacagtgaaagaccggaaagcgttaaagatggggccagggggatctgaagaggagtgacacgtggcggagagagtgaagaaaggcaaagcgcgtgaagacacctgtgagtgacgtggccacgttgtggggaagggggtgtggggcccatgactaggttctggaggattgcgaacgtgtcgtcgctttcggtaacaagtgggtggtggtctcgtcggtgacggttggtgtgtcagcatctgaaggatatctacgaccctcctctctctctctctctatatagtctatactattaccatcttatatgtgggccaccccatccacgtggccaccacaaaattgccttcctacgaactgacacttcagtttcacacgtggcgccaccgtattgccttttcatcacttgttatatttttcttgtgttaaatatttctccactttttttttttaaatgagaatatttctccacttacttccacaaataaacaaataaataattaattttttattttcgtcaag

SEQ ID NO: 199839 - DNA, 1174 bp, Cannabis indica
agcacaatgcattggataagatgtatgatttggagtagtaaattataagagaatgcgccacatgacatgttatgttatggtgggtatgtgcttttttagatttttttttattataacaatactaatattaatatataaatgtactctatatttatttccaggccaagagaaatatctctagcactcttttatttagtttgttctttccttttgtcactttttcattagtgagtctattcaaggaaggatcacatgatcacattatatatagcatacgtgggtcaaaattctcttaaaagtattttgcttcttgatttatatatacatataaatttatattatatatatacattttttttttgtgttatttcacgaccatgtacttgctaacaatcatgcaaaagttaacccataaggatgtttgaggtaaatattcctctcttggaaaattgatgaaagtggaaaatacagtccatgtctttagttattgtatgtattacgcccatggaatcgatctaaaaagatattaaaagaaagataaacatcatttgtcactcaatataactacacgagctaaatgacaaaaacaataggaaattgagtatttgagttcgatagctcactcaaaatctattcaaaatataccaccgacttcgaacaaaattttgaataataaaaaaagaaaacaacatgcacatacataaaactcacatgtagttgtacatatatataagaaatgaaaggaaaaaaaaacataagaacagtaaaatgaaataatttttcgtttggggttgggttatttggtaactcatctatatgaacttgaaaccggtaaaacaaaaaggtgaaagtaactgatggatatatctaaaacatatcttacaagttgcaacaaaatctatattttcttttactttttcctgtttatagaaagaaaatatgtcataagttacttactcaatctcaattgctatctactcaatgacaatataataacagatattgtcattgataatagtgaccacataaccattcactgaaaaactatgctatacaataataataaatcaacagatattaattgtcatattgataaaagagtataataatgagttaattgccattataatcttctgacggcatcccttttcatttatggattcactaagtatat

SEQ ID NO: 199840 - DNA, 821 bp, Cannabis indica
ctagattaaaacctaaactgatagtcttgtggtagttcaagctttacgtagctcaatggatatgatttatttatttggtttagtcattaaagattgtaagaatttgcttgctactatgcgtaatgtttctgttttctttgttaaacggtcagcgaactcagttgctcatgcttttgctagagcttctagttcttatcctgattgtacttttaatttggggatgtcccaactattttgttacctatgttggtagctgaagttcaagtttaataaagatgaatttcattaaaaaaaataataataaataagatgttgtgacacatctaaagtagaaagtacatatcttggaaaatccaatgaggaattcttaaaaatgatagttagtaaaatgtcaagttcatgtatatttttttcttacaaagaaaataaagagatgaatattatgatgttagttagtgcattttcatttgaaagtgcttcatttgaatttggatgaaattaaattaatgctaatgtttattattattattattactgaaatgtcaaatgtttgctaatgtcaaatgattaagtcaaattttggggttgagtgtacaatactataaaaaatgtcaaagttattggctattatcgattccaacttaaaaataaaaacattttccgagaatgattaatcgattgaaaattattaaatttggagacgatccttaatatatatatttatcatgtttatgaaacatgggaaccgtacccaaatcaagagttgaatgtttctctctcgtcctaaataattataataataaagtacatatatatatata

SEQ ID NO: 199841 - DNA, 1465 bp, Cannabis indica
tttatataattacgggatagcatatctagaatatggtaatctgcgccactcatttttataaaaaaaaaaaatagagtgacatcataagcagataatttataaaccttcttatccaatgatataccatcttaagcaatttcttaatgaaaaagctaagaggaaaactaaagaacaattttgattaaaataagaatccaacgattttattcttattttatgaacttcattattgtttcagcattgcaaacactagtctaagttatcattgtagggatgtgtcaactagattttgtatttacaaaatacttatctcaggagatctaacactattatgttgtctaacggatgataatctattagggattatcccattgaaaataacaagccaagttagactaacaatagagattcgaaattgatactacataattaataacataaaagaatacatgttcaatataaattcatacacaatttaggtgagagtagttggctaatctaaaatggacactattttagtaaccttttattcgatcaaaacatgaatctaacgttgtctcgtttatgtgagagtcaaggtcattcttatttcatgagcttctaccattgtttaaatatttgctaaaccatattttgagtagtcactatttgggtaatcgttactaagaataaaaaatgtacaaaagtatttattttttagaattctattgtgttagattgtttaaatggttatatctatgggggatgtatcccattaaaaataaatcaaccatgtagaatcaacaatagagattgaatatcttaaaaatatagctcattattttaaaaagaatgtattttcactttgatatctattttaaatatatttactttaatatttatatacttatttaattaaaattactaatttagataaatctaaatataaatttaatttaattttttcccctcatttgtcccaatatacgtggcagtctcaaagttgtccatgtggcaagtgggtataaagatcaggaaatacttaagacaaaccccaaaagaattttcctagatttgatagtcatatccggaaggtccctccaagagcttcaactgcatcttaatgccaagatattttgttcatcttcgggagctaggcaaggcctccagtaacttatataagcgcattaaatgcaacatggaggaagcgtttgtgaatggatctgaaaagacatgtcagagctattaaacccattgtttggtgattacactaatatatgagttttatgatagttgcataatgaactatcatatcaatcaagaaaggctaagggcttatcttacctaatatctagctaaaacctatgcaacctactatacatacatacattccctattatttgaacctatgaacttatgcaagccatgctttaacacttgcaacaatattgacctttttactctctatatgaagctataaataccc

SEQ ID NO: 199842 - DNA, 1250 bp, Cannabis indica
aacagataagatctaataatggagtttttgagtgtttatgtagtctttatgatatttaaaaagaaataataggtagagcttgttaagcaaatcatgtgtgatttaattaaacaatgtggggtcaatgttgagctgtgtaggaatttcattcttatacatcactactacttcgctctatataaatatatatgtatatataaattgcttgtatatattttgcaaacaataatttcaaattatcaaattagaaattaaagatttgttgaatttttattctttcttaaataacaataaataatacacaatattttctgagtataaaaggctttgatgacaaacagaaccggctaatttatcatgactactgaagataattttatcaatggcagcaagacattattgttaagttatgtatttaatatatatgagagttttatatatatctaactatggtctatacatgagctttcatatgtcaatttttttatgagtgccaaagttgatgattgaaggtggatgagtgattaatgtcgtcattaatccacaaaagagcactttatgaattaaaccagctaataaaccaaaagtggttgctcgtggctacttgatcttctgtaaaaggcttattcttttttgatttgagcaactagtttaaagcatgcaatggccaaaatatataacacaaatgtgcacgtacgattatggcaaacatgttttggtcaaagcaatatatatataatcagattgtagaagataatattatcctttcatcacaactagaatatgatactgagtaaagcagcagtacaagactgacctactctacatatatgcattttataaagctacttaatcatagtcatatatatatatacatatgtttcatgaggacaaaagtattaagagtgacatactgcaccgtgaaaaaatagtctgttttttgcatattgcacacatatcattaattactggaatattaaatctcataattaaagcaagaaaagaaaaaaaaaggaattgaaggagcttaggatttggcataaaatatcaaccagcaataacgtcatgatcaacttctatctatctatctacacatataaactatataaggcaagacaaaatattatatttatgcattaatttttatatgtatttattaaatggaatggatataaagttcaaattaatatatatatatatatatatatatatagctatgctatctacttcatcagctagcacgacactcc

SEQ ID NO: 199843 - DNA, 1004 bp, Cannabis indica
agagcctaactaacactacataagtaatttttttcagtattgttattgagcattaatagtgaatcaataccttctataaatggtgtctcagttaatgatatttcttaaaaattattttcttaagttatatgagacttatacttaattaattatactaataacagtataacaccaaaatagatgttaagtgatactttttagccattctttttttattattattttattttcaattattgagcataaataattttcaactaaattgtattaatattgatatgctaccttatgatagtgttaaacaccattgtagcaattcttgtacatttcatatgtttggataccatatgaaacacaacagaatatatctactacacattttctctattctttattcttttcagtttcatcccataatatggtgcaaccacttttgtttagaacacgttcatcgggagaattttgttggtttagtaaattttcatgagccgtgatgaggctgtctgatctggcctggttagaagtaactgattgacacaatagaaaagttgtaatggaaatcaagacctgcaagaagatataaattttgaatgcagagagcaagactacctacatatgtcttgattgaattaaataacatcttctatcatggataaggatctctttttgacagtttgaagttgtcacaaaaatttgcattattcaagctttggatgcaccagtatttgtgatgaaaggcactcgtctgtcgccgctactaatgaagaccttcagttctcaagatatctcatataggcaagagcagaggaaaatatcagatttatcccaagagaagcaagagaaaaaataatatttataatgctacaatgacagcaaaatcatacgaaaagaaatagaaagaaaattaactatagtggagactggagaagcaattgctgaggtagaaaattatattatttgtgacatgattttaagaataaggaggataatcaaattgaggatga

SEQ ID NO: 199844 - DNA, 1936 bp, Cannabis indica
tactagctttcattgtcttcgtctccatcctctacggcgaggacgttgcctgcgtcttcaaccagcagattcaattcagttccgactcaacccgatcctttacaggaactcgtgagctctcttctcttaactcgtttgtgcttctcttcctttctttgtttatttatatagtttttgattagaaaccgtggtttactgaagcgagtttagttttcggggtagagaagaagagagagaaggtccttcccttcgccatcggtaaaactgacccaggttgcgacattttcagcgggcgttgggtttatgacgagtctcgaccgctttacgaagagtcggattgtccttatatacaacctcagttgacccgccttgaacacggtcgaccggagacgaattatcaacaccggagatggcaacctaacggctgtgatctacccaaactcagtctcgatttttattctcgagttctcggcatgtcgtaagttgatgtattctattgattggtcaattttgacataaatggaggtagttagtttcaagattttctaatttgaatgaaattaacaaattacctgtgctattatattgatttttgggtactttttggtgtttagatttaggttaatttcactatatctgccacatccagaactttcctcttcgtggattttttctcgttaggcattttcctcttcaatccatctaccgttgagcttgatctgaccagagcacaagtagtgctattatccactgcattttctgtttcatttccttggtcatttccttaatgagctcaaccttttcttctggagcttccgtttcatcatctagagattctatttgaggcatagcattatcttgagatctattagcatgttctgccactgcttttgtaggtgcttcattgttgacaataggagaagatagttgagtcatcttcatctctttatttattgatttttgggttatggaattcatttctctatttttatcgtaatttcaacatagttacatagttagtttgctggaacatagttagttcattaattgaaaagaaaaattaaacccgttcatttatttattttcttacagtcagttgatatcaagcctcattttgctagaaataatcttatagttttctgaagcatttcaatacagcaaacttaatgtatttgacattgaccatgatgatgcttctcttatttacacttagtaccttattagacttttaaaattcatgaaattcagttactacacaaacaaataaataaatgtttttgttgttgggtctctaattaaactttcatgtattgcttttcggaggttggattactggttgggcctggcttgggggcaggggttggattactggttgggcctggcttgggggcaggggtggaaagtccaagtagtagttctgattaagaaattgtggttcaggttcagcaactccagcagtttcctcctcaactggttgaggaaaaatatcctcctgatgaggaataacagtttcctcttcttgtagtttagccgaactgtcctgatgaggaattggaattggaggttcagaagatgaagaattgccctcagcaacagatcccttggtcagtggtgggaattcgggagtgtcgtttacattaagcggagaaaactgtggttcagacggagaatttccctcagtaactccattgccttcagataaggaattgttctcagcaacagatctctcttgtggttggttgttgtgatggagatgatgatgatcatgattaggattgtgatcatgatgatgaagagaaatggtggagaaaaaaactccacttgcttgtctcgtaacagtgcttggaaaaccaggagattgggagagaattcgtgaaaagattgtattctttaaaatcatctccattccccttttttagatttcaagctctcatca

SEQ ID NO: 199845 - DNA, 1755 bp, Cannabis indica
atgcatttggggcaacccccaatgctgtccaagccaatgcctagagaagttttgtcaatctacctagcagtgtccgaatatgcgattagttcagtactaaccaacgaagaccaaggtagacaacacccagtatactacatgagcaagcaccttttggattctaaaacctagggatgtacataaatttttgtaaaccgcccaaacccaaaaaacccacccaaaccaaatcgagataacccgacgaaaaatataaactaaaaaacgtgatgaaaatataacccgcccaatctttatattgggcgtgttgaaaataatactaacccgttcaattaacccgagctaagccgatcaacccgattaagatagtttttttatatatatttatatactatataatttatatgattatattaaaaatataaatttcaaactaatatattttttatggtggttgatttgaacattaaattcaatctatatatatttgtctgattattacaattaactaaaatataataattgtatgtaaaaaaaaaaaaatattagttgtcagtttggacgggttaacccgaccaaaccgacaaatttcattgggcaggttgctattttcttttttcttaattgggggggggggttgcacttagatttttataacccgatctttacattggattgaataaaatatagaataaactgactaaaccgaccgacgtacacccctaccgaaacctgttatccacaaatggaacgtttagcatttccacttgtggttgcatcccaaaagttacaaccttattttaaagcacacaacattgaggtattaacaaactatcctttgcaacaagtgttagcaaaaccagaagcatcaagaaggttactcaaatggtcagtagaactaagtcaatttgacattagatacaagccaagatcggcaatcaagggacaagccctcactgattatattctcaagtttgcaagttacgaggtggcaataattacaaaagagcaagtcgaccccgatgtaccaccaagcgaaggttggactttgtaagttgatggggcatccaatagcgagggatcaggtgttagaatatttcttataagccccaataaattcaaggtgcacgttgccctgaggttgaatttcctgcatcgaataacgaagccgaatatgaagccttgatcgcaaggttaaagcttgctctcaaaatgaaagttgaatacctcgaagcattgagcgactcgcaaatcgtagtttgccaagtcaacggaaaatatctggctagaggaggaaatttggccaaataactttcctacacttgtgagttattacacaaatttaaaaagataattgttagtagaatacctcgtgcttacaattgtcatgcagatgctttggcccgattggcctcgacaagagaagcaaaatttctagatgtaattcctgttgatgtcttaacccatccaactattcatcaagaagaggtgatggaggtcgatacgatcaagaaggtcacccggatgaccccaatcgttaactacttaacaacaggagtgctccttgatgataagaccaaagctaaaaaaactgtgatatcgagctgcctgatatgtcatttatgatgacaagctatatcgcagaagtttttatcaactgttactcaaatgcatcgatggaagtgaatgctactttatactccacgaagtgcatggtgggatacgctgcaaccacaccggaggtaattcccttacttt

SEQ ID NO: 199846 - DNA, 690 bp, Cannabis indica
ggactcattcctatgactttcgacaaatgataatactaatttatatagttttttgaaatcatactaatttatatagttaaatacactacacactaactagccgtacgtactaccttattttttattcattaaggatgtatacttgattaattactacagttaattacgattacgatacgactgattacataaacttacatactctgagagggacattcattattatttgtattttatttttgaacaaaagaaacttaagatcacaaaatgacctatcttgttcaaaacgtttccattttcatttgattacactgattaatgtcaaccttcacatataaaaatccccatttatcgaaatcatgtgtacttaattaatacgtgcttattcactagctctttcagtctttgtttaatttcttttacaaaattatatgtttacctacctgccataatgtattactgattttatttccttttcttttttatggcaatgtcatatcaaattaggtgaacaaggtttgtacatactccgaagataacgatcaaccatattataaggagagaacctcatcatgctacttaatttccctcagcaagggaggaaaaatacattataactaactctaggtctatttggcactaaaattttatattaactctttttcgactcagcccaaaatataaaatatt

SEQ ID NO: 199847 - DNA, 1825 bp, Cannabis indica
ttacataataaaattaataataatagacatattaaactgtttacaataacctcaactaacggtttaataagctttcggcaatcaagaatgttcaaaatcaagtgactcaactaaaaaaaactatcttgaattacaatattttagttttaacataattttttttataagaaagacttttagtcacaacaaaaagttttataactaaagtatagtatttgaacacaattttcactaatttaattttaattacaataagtattgttattaaaaataaaattagtcacaataaatcataatttttgtaactaatattttagccacaatataataattatattttacaattataataatttttttttttttgtagtgacctttaaatctccctaaaattacgtcctttgaattaataaaaaaattgaaaaaaatctttctaaaatttttaataatgtgacctgtccatatatatgaagaccaaccataccaagttttctcaataatttcaatatatctagagatacataagtaatttggaagttgtgaaattttttaaatattattatttttttaaactaattaaaaaaacagaaaataaaagaaattgtgaatcaaataataataataataataataataataatggtgagagtgtttacgaccatttctactgattcaatttgtctggttgcataaataaacagtaaaatgataatgtattgtctactgctaaagtttcagtggcagaaattaattagccagaaacttattcaagtgaggggaccagattaatcagctacattacaacatatataccttttattactcttacctagctagattcccttcttataaagaatatatattatctaaaataaataatatgaaaaatccaattttcattcatgtgtaaaatggatgatatatgataaagttggttttaaaaattctcagcaaaaaattatgacaaaaattagtacatgtgttaggccaaaaaagaatgacaaaaatagtattttattttgttttttgatgaaaaactaaaaattagtatttgggatagggtattatggagatgcttttcttgaggtttgggtttgaaccaaagagataataggtgggccataagcgttagtggtagtcagtatttttgggccttttggtttcatatgcccatggatgataaactgggcttttctttggaaattagcaaatgggttatcatctttttactcaacttttttttattgaaatttacactcagtttttatacaatttgtgtaaatatatgtccttttttaaaatgatattttatgggaaaaattaaacaaaaagaaaaaagaaaaaacagtatgaaataatgattgccctagcccctaaggaagaacttgttactctctcgtaccctaaaattacattttatatttcatttattttacctgtattaatatttatttttatttctgtattttttttttaagatatacctatttttatagtaatatttctattatactctttaggtttatgtaaattatgtgttagacttaagtggaaggtgaaagtatattgggcaacccattcaaaaaaaataaatatattttaataaaatataatataagtgtatttttaattaatggatacaagaaaaagatacttctcaatttattccttcctggtattttatttttacaaaaaaaaaaaaaagttatggtagttttgacatttaaaataacttttgaaagggttagacacttgtttattatattggttaaccattaaaaacgttttcttaagataccagaattgtcttttttttttctttttt

SEQ ID NO: 199848 - DNA, 624 bp, Cannabis indica
gaagagtatatgtacatgtcaaaaagattacaaataatgtgcctaatttaatagttggtaaatatttttctatttccttttccaactcttacaaaactaaatcaaaatggacacattctcatcttccctgccataattatatgtaaacacccagatatatatatgtatgtatatgcatcttaaacgattccaaacaagggaaagatatttataattaaacaatcttgtatcatcatagatatataccataacatgagcatgcaccacatctaaaatcattacctccatagattaagcgaacagaaacaaaaaaaaaagtaaaaaaaaatgaagagaaaaaaagagtgagtgccttgaacgtaagggttcgaaagtaagagagagcttgagagagtcagagtaagaagtaggatttggaaccaaagaaaggtagttgaatcggagtgaagaagtaggggttcgtctaaatggaggctcgaacgcaggaaatgaagtcgttgccgaacgagagagggggagagagtggatggagagaacgaggagcggttgctcatggtggctcgatcacggaggaggacgaggcacaactgtaaagagagagaaagacatttgaaattaaagaaa

SEQ ID NO: 199849 - DNA, 957 bp, Cannabis indica
ggatggtcatgagccattcaaaaaattattagcttgagacgtgtacaaatgcagatttccgtgcacaaaatatagaattaaacaattggggcagagaccctggttagtacccaaacataaaaaaacacacatctatagattttagagaacgaaagacagaaaggactacttttatgctcctctagctctctccctctcataattatttacttttgaaaaagtcggaaacagattgagaagaagtgcatttgatggaaactcactctgtaagcagagtcagcccagctgccatctgatggtttatatggtgtgtattgaataaacaagttgatcacatgcttacctacaaccataaagttagacttaaacttataattggcactgctaaagtagaatctaagtgcacgagcctttttatttacttggcattctcatgacttggattggccttgacataatgtaataactgttcacaaaaaagaaaaaagcaagacagttgtcctacgcatttcatttgataatttaaaaaaaaacacggataatttgatgaaagcacatatatttaaaaagagagacgtaataaaaaaccaaggggagatatagtcttgtccaagacagatggaattgtcatctcaataactggtcttcgtgatggtaatccatttccagcagaatcatgacaggctgaatgaatctcttccatgcttcaaaaagtgacaattacaataatcaggatcatcatccatttgggatcacatatagttaggaaaaacacttatggggtgtttggtgatggtgcgttaggtgatgagtaggaatgtgtattatataccatgttatgtttggtaagtttttagatgggaaagtgtaactcttttttgggtcctacatagcttttagagtattaatgtcaaactatcagagtttcatattaccctccatcttaactctttccac

SEQ ID NO: 199850 - DNA, 705 bp, Cannabis indica
aacaatcatctactatggtgatgaaatacttaaaaacctcatgtgtcatggtgtggtaagctctccaaatgtcaatatgaatcaattcaaaacaagttgcaacaatgtgatgatagggaataaaaggaaatttcttttgcttagcataatgacaagtagaacaatgaaaacccagacaattattatctttcaaatgtaactttttattcaaagggaaattttcgatacaagaaggagaacccaattgaaaatgtcacagggtatccacatttatttttgaatctgaaattaaaaatacagtaggactattagacacttttagaaaatatagattcccaaatctttcacacgttccaatctacttggtcgcattagtatcttgaatagcacaagaattagttaagaatctaaagtcacaatctgtagacattgttagaacactaaatgaaagaaaattatatttgaagttgagaacatgaagaacattggatggcatgatttaaggtgaaatgtaaatgtcaccaatgcaagaaatattttgattggtgtcatatggtaatatgaaaagttgtgtctagtattatggaaaagagcaagattaggatagatgatgtgttgtcccggtatcaataatccaatgagatttgagaataagatttatcttaccagagaattatgacaaaagtggttgatctgtggtgatag

SEQ ID NO: 199851 - DNA, 956 bp, Cannabis indica
gggtgagtgtgttttgggaaggaggtgcgaggataagggaaagagcgaatggatgatgataagaatgacattggaaaggaatccaaggacaaggtgtgcaagggaagagcgtacagccacgccttctaaagactgagagcaaggagatacaagtagcgccgacaataaacctgcaaggcccgacgacacgaccaagggtatactgcaaccattctcctacaacctgtacccgaggaccacctcgcatgtaactggggaccacatgcgtgtacccggggaccactctccagcaattgcggaccacctaacaccagacaagggtacaaggtgccagactgcccccagcacctgcaacacgcagcaggaaagcaacattttatccctgcgggaccactttttacacctggccattaaagcctataaatacccccccatctcagatgtgagggggttggaaaatcatttggtgtaactcaaatattgaattcaatagaaagaggaatattcaaacatcttttcacctttatctttatctttatcacgtttctgggtaactttacatttcccgaccactaacttagttgacgagttctcaccatttatagtttggcatcatttgtgggaacgaaaagctcaagacaagtcactcttttacacacaatcgttacaaaatgaccagacactctcgtcgtcatctgtacatggaaactcaccttgacgaagaactgctagttgcaccggagcaagacctaccgttgtccaccgccggcaagggagaggcgaacatcaagatggcatggacaaataaagaacactgacaaagagtgcccaatggagtccctaaagcagtggaagacgtcagaacagtcataggagggccttgtgtaggaggaaaaactcgaaggaggagagacaggtacgcccgtgaggcaagtcgagaaccgtcactcctagaa

SEQ ID NO: 199852 - DNA, 949 bp, Cannabis indica
agtgtactaattattatgtacagattttctttacaaaaaaaataaatgtacataattcatcaaattacaaagtaacaaattaatggatcaatattatattaaaaatataaagtaagagccagtgaaagatatactattataataatttttattatcaaattaattaagatgaataattatttaatattatactttatatatattctttacaaacacttttatagtgtcagtttgacaaatttttagatacttttataaaataacataatacactatatgatggatcaagtggtgtatgacattattttaaggtaaaactattgatgcatgaatcacatttcaatatcataatcaatatgaagtagctaggtttacacacctgtaaggccagcaaagggattgaagaaatttcggtagagtaatagtctgaggccggaggactgagcttggagagatctgacgaggaagtaaaatctccaagctcgtggatgtgagagctggtctcggccacaacaaacaacacaccgtcgtcattacagttaatctgaagacgatggttgtggtcatggccgagacggcctgcaacaggataaaatagattgagaacctcagcaagagaatttttgaggagagatgagtcaaagaagttgtgagtagatgttggaacttcttgattagggttattatagaaatagaggcctgtgctcttgctgccctttctcacttcttcatataataagtctaagttggataatggaatactaattggccgacaaaggccattctcaaggggcttcactagactcctctccttcacctttacttccataacattaatattatttcctcacacaatgctttattattatatctatgctctatttatataaataggtccaaacttcaataaaataattggtacacttcaatgtgtccaatattttcatat

SEQ ID NO: 199853 - DNA, 1420 bp, Cannabis indica
acttgatgttttattttaatttaagagtgaattttaacacaaaagcaaaaagactaaaacactatatttgtacttttccttatatcttttttgccactattaatccaagaaagttaattatatttgctataattaaataattgttaacaggaaaattaagtaaatgcaggaagattcaatgaaataacatatataacatgaatatataatatatattatttcaacatagttttaaaattgatagtgataattgatataatgttgacaaattaaatgtaatcctaattaattgaagccaagccaacacatgggttgaatttaaggcaagaatagatttgtcgtaatcatacatagtcctacacacttactcatgagtgtaccctattaattaattaatttaataatggtgggaattttccacaatttccttgctatttcactctctcgattgaccaccttaattaattcattaaagatcatatgatccaggtttggaagattcacacaactgatatcaaattggggccaacaatttattattttttattaattattatgttaattataattacaattgtatgcactgacgtagtagtgtgtatgtatattaatggttttattacgaaattttattaatttatcctttgaaattaagttaactaattaaatctaccagtggtactggtggccgtggcaattggcaaatagtgacttatattatccaagctttcctttcgattaagagtacatcaaaccgttcacattgtataaatttctcgtctctcactatattgtataaaaaatgtagtttaaaattttttatagtgcgattgtagtttgtatttttgctaaactgtacgctacaacgtaatttgtaattttgaataatttaataattacgactcaaaatgtatcatactatatattataaaattattaatttttacaatgtaattgttatataagaataatgatgataaagtaaccttttctattttacattatgagatgatattttagcttttgacatgtgaaattagttttattgaagagtgacaggtattacttttccgaaagtagtcaacacatgccgtagtcttcccgaaatagagctacttagtcttgttatcttcacgaggtggaaaactattccattgggaattttggaacctacgtcttctagatttagcttactctatctccaattgtcaatgaaactcaattttgatgttaattcaacataaagaaaattaaaaaaaaagtactattttaatgctacatttatgtttaatttcaatcaaaataccataaattacattaaaaaatatatatttactattatagttgtagggattttatcaatttgccctacacacaacaaagtgaataattaaattcccaaggtcaaaactgacttttt

SEQ ID NO: 199854 - DNA, 1979 bp, Cannabis indica
tttttaaactaaaaaaaaaaaaagatttggtgtatttttattttaatatattttgtcttagtgcttaatttttttttcttactttaattatgtttttttttttaaaaaaaaaatataagaaaaaagaaaaaatgagtataaatttaaaaatatatttaagacaaaataaaaataatgtagtgtttttctataagatcttagggtacaaataagcctaatgactatatttctataccttttaacaattttaggtacagagatatataggaatacctacggtgaaaatcttagctacacaaaatatcaaatagggatggtcctatttgtgttaaaattaagtaactaaaaatttatgtttttttttaattaacaaacctaaattattatggttttttttgaatgaatgaatgaatttctcattaggtctacgagcataaaaatttcggtattaatttcttgctaaataaataattgaagtatttaaatataatatgattgtaatttaaatatttttactgctaaaaaagtaaatttacttaagtactagtgagtgaggactataatttccattttgtacccatatgatgcaatgataaatgtgatatcatatggccacataaaaagtgtaacacagtgaaatgaatcagatcaattgataataaatattatatttaattaatacacgttgttatcttctcatcatctgtacatattgtattgtattgtacaggacacaatgtaagtatcctggtaaaaacgtggccttccatgtgaatgaaggttcaacaaattattggctatcacttttggtcgagtttgaggatggagatggagatgttgggtcaatgcatataaaacaagtaagtaaacaatttctttttctttgtactcattttttattcttttttactttccgactaatttaaagcccatgttaacttgaaaagagaaagtaaaactttagtacatttaagttaagatgatattagtgttatgcatgcctgcctagtcaacaatagcataaaaaagaaaattgttattggaataatgcgcttttctttttcttttcttatcttgtagtcaaaagtgaatcatatctaccttttctttttattattttagcaccaaataaaataaaataaagaactaaaaagcctaaacgtgcccacaaagatcacaaaagttattatagggagttagttttaaatgaaagaaagtacagtattattaattatgaattgagtttgtatatgaggattgtcgagtctaaatgcaattcctaatattctggatgtctctctagttagactctgtcgatataaatagcccaaaattaattgctgtctatatgttaaaaataaccttttttttaattggcgcctagtttttctttatattgttttttcttttgttttgtttttttttttttcacttttaattttttttaattaatattcatttgctaatggagtggagccaatgtgttactcctcccccagaaagcacttttagtaattgcttataacatttggtgcatgtgatagaataggccccactatgaaaagtagtctaattcagaacatgtgcagtagaatactatatattcttttgcttttaattaattccttctattcttactctactgaattatttacttttactcttacaaaattaaaaatgatgagagatgttattatttgcaggcaaactctaatgaatggctacaaatgagccatctatggggagctaattggtgtttcgtcggaggacctttaagaggacctttttcagtgaagttaacgacattgtcaactggaaaagctctctctgccagagacgtcattccaaccaattggtctcctaaggcaacttacacttcccgcttaaacttcttctaatactaaccctaaaaccgtaattaacgactatacaaatagagaaggagaataaaacaattaatctcttcttcatctatgcca

SEQ ID NO: 199855 - DNA, 630 bp, Cannabis indica
aaaaacaaaaaaaaaaaacacatctatgtatgtgtgatttgtgatataaaattatatgttgtttacattttgtttgtgttgtgggtatatatagtattttatattagttgatgacgtacgatgtactgtgtatgccaccactattaattaactttataataataacttaactggggtcttttggttgttgcaaaaagacgatataaaacaaaatcagggtcatactctgtttcatatgcactcatcaatcaaaccaacttatattcttaattttgggatgacacatctaccacctggaattatttgggctttttttttttgcaatataatatactccttaacttacattagggtatgttcagaaaaaaaaattacattatagtaaaatgaaattttccaataaggcaaaatatatgtgtgtatgtgtgacaataactcaactaaatatgcccactagtgcctacataacccttatatatgaataggaaaaaaaagttgatttgactcttttatatatatatatatatatataaataaatatggtacttaaaataagttagatgctaaaatgcactaagtgtttaacatcctcctgaatatcatatggctcataaaatgccacctctaaat

SEQ ID NO: 199856 - DNA, 912 bp, Cannabis indica
gattatattagatgtgtctatataataaaattgctattttttttaaatattatatttaaattcattatatatttctcttatcttttatgaaaataaataacataaagagtattcacttcgcttttaatcaataacaataaatcaaatcaaagcgacttaagaataactaaagtaagaaatatgaataatgtaagtaaaaaaaatactaaaattatagaagttcgaccccttgatgatggtaacagcctattctctttagttgtattaacttgtgagtaaatgaacaagaaggctttgatctctctcgaaagctcttataatgatttttgagttcttacactcttaaatttagatttctcccgtgtgttttctctgaatgaatttcgtatcccccaaatagtgaaaaaatttcactatttatagggagtaattacattaattgatttttcaaaactaataggaaataaaataatgaaactatttattttctataattacaatgagcaaaatagtaaactaggaaggtttcccttttcttccttaatactgcatatccatcccatgaaattagagaaattgtcgtgtcttgcaagtatgaagatatgtgagatatcttttttgaaaatatttaaatcacaccctctggtcagctcatgcgagctgctcacatgatagaagctggtctggtgttctcacacaccttattcgaacgttccagcttttgcagacttcgagtatctaatctccctacacagctctcaagtagaatctttcatctaggtcatgaaatttgtcatgtgtcacccaagtggatgccacactaccttgttataaattagatagcatttgtctcccaaattcatgtaggagctttttggtcgcacgtgttgacttatcaatcatgatctgatc

SEQ ID NO: 199857 - DNA, 626 bp, Cannabis indica
aaatgtgtggtatttctaaaaattactgaaaaaagttagtatatttttatggagaaaattatttttttaggtactcttgaagagtgattctatacacaagtctgaccgtcttaacccataaatagctgccctgattgagttttataaaaaacatgttcaaatataggactattttgtagatgactttgttataaattaaaaaaaaataaaaataaaaaattctctgttattaggtggtcgttgattggaaagaatgaaaatattcgttgattggaaacaatgaaaatattagaacaggaatgaaaatgagaattagaataaaaatagaataaaattattaatttttttaaaatcttgcattagaatgatcttttttctattcgaaggatattccaatagtttaaaatacaaccaaacaaaataataagatgaaaaattatttcttttccatttcattaccttcaaccaaatgccacctcagtttttacaaagttaggtcgcgaaaattttattataatttatttatttatttttctgagaaaatcaaagatatatgagatatttgatcatgctcaaattataggtacaatattttaaatttcaaaatatagattttttattttatt

SEQ ID NO: 199858 - DNA, 664 bp, Cannabis indica
aatggttatgtgtttggtgaggagctcaatttgttatggttagggttatggctttttggtgtatattctcatgttacctatattacacacgcccatttttaattttgctttgttttttattaagtaatttatggtaaaagtacttaagttgttctttgttacggttaaatttaagtataactgggaattaaatttaagtatttttgccttaaaaatgtgataaatttgatcggctttctaaacgtttcgaccacctcttggaaatggaattattgaaactagggcaaaataaggccatttgtctattttaagatgtgctattcttgaatcaaattgctaattttaattccattatcttccctttaagataatattatcctttacaaaatctactctagaaaataacaaaaggagaacccataatttattctagagaatctactaattgttccagaacaacttcaaagagattctttaagaattttctttcattagcataaaatcttaggtgcaataatgggttcacaaacaaaatctatctttctcaaagataacacttttattaataataattatacaaaaatgtaagtacccaaaatcaacttatacttcggaacatgtgaaattgtgaattataacacaagtataaaatatctaattaaaa

SEQ ID NO: 199859 - DNA, 735 bp, Cannabis indica
ttataattatattttttttcttacaaaaagaaagtcttcttaaaaagaaaaagactgttaattatgacattatatcatgtgtttgacaaattgacataactcaatagcaaaggtgagaagattgtaagtaacaaatttgtctctaaagaacgtagaaaagctaaggtaaattacatcataaagtagaggatttcctagacctacaatgcaattaacacatcacacgtttttatgttgacaaaatggtttataacctttcaaaggtctaaggatatagcttcccattaagtccttcattacaagagttgcctttttcacaaacattaccaaaaaaattaagtaaataataataataataatttttttaagggtaccgttataggttaaaaaaaaaatcgaacgacaaagtgaagagatttcttttatccataaaagtttactatctattctaaggacatgttaaattaatttatgagcttcaacattaacgttgcaacttacataaaaaagagatgccctcgaaaagctagacaataacacttaaatatcataaaaaaaatctttgagatttgtttttaatttgtcccccaatatatctgtaagaaaaaatgattagtatcaaatcaagtaaatataataaaaaatttaagaaagaaaattataataaaatttttctttttcaagttcttgtatctcacaaagtaagtgagatagaatctacctatatatatatat

SEQ ID NO: 199860 - DNA, 690 bp, Cannabis indica
tatatatatatatattgatgaaagtaggtgtctcacaggaagacatatattgagttgttaattttattttagaattaatctaattttttacttgggtaactataacttaatttatctgcaatagaacatatgtctataattttatttgcaacgaagatatgacataattttctcgttgagaaaaaggtcgccgcgaggcaaatcccacatttccaaatcacaacatgcggagaaatttttttttagtagtccaaaaaaaaaaggacaagagaagaaaaattaagtcgtaaagataaagtcactaaatttaggctacaagaacccttaaaagaatttttatagactagtgccatattgtgagcttgagatatagtgggagaaataccatatgaatataaaataaatgacaagtacatcaggttgccctccatcagctggtcatccctcctcagttgcacgtttgttagcttgtcgtccctcagctggttttccgttagctggtcatctgtcagctggtcgtccgtcaattggtcgtccattagctagtctccccttaactagttctccatcagctagttatccctcagctagccttctgacaactggtcgtcactcaactggccctccgtcagttagtcgtctgtcaactagtcgccccttagctggccgtccctcaactggttgtccctc

SEQ ID NO: 199861 - DNA, 1462 bp, Cannabis indica
gttggtgtgtcttcttatcactcgagcctttttgatgttattgatgtttatactggtttgtcagggatatatatatatatatatgatttgtggagtgcatgaaaatatgagcatcatttgttgcgaaacttcgtatttaatcaatagaataaaattcaaagaaataggaagaaatattaactatttgttcttatgttgtgaaatagcttaaaaattgcggatgtgatcggtatttacattttgtgggctaccatttttttttgctccaccgacttagtttggtcaaaatatgtttagggtttaatattggcaaagattttcaggagtggacatagcatctggacctgtgtggatggaatacatcactttcttaaagtcattgccggttcgttcttctctctctgatttctgactttaattatggacctcacaagattgaacatgatacatatcttgcttatattaatcaattttgatgttcgaatgagacgattgcaggcatcacatccacaggaagagtcattacgaatgattgctgtacggaaagtatatcaaaaggccattgttactcctgtgcatcacattgaacaaatttggagggactatgagaattttgaaaattctgttagccgacaactggtaatttgttggtttctatagcatatatgtattcgtgtgtttttctattgcccgaagtatgtattcatgttgtctgaattctatatattttagatgacaaatttgatttttatgtgtggagcaggcaaaaggattgatatctgaatatcaaccgaaatttaacagtgctagggctgtctatcgagagcgaaagaaatatatcgatgaaattgattggaatatgcttgctgtaccaccaactggctcttacaaggtagttttccacttttctctattgtattgtcatttcttttagcactggtcatttgtgattttgatagaactctcaaaatctcagccacgaacacttgcacacaccagaaatcttcctcttatttctcaaagtctggtctcgattagagactaagtcgaacacaataaaaagaatcataacagtagctaattcaagctagccaatctcccaagaatctaaactgattagtttcaaacaatcaacttacattgaaactattaagacaaccgagctaagtacaacaaccaagcttattattcctcttgttgtgcctcacataagtgaaccttatgggaggtttttttcagatttatcttctttctcattgtccaaacatgaatcattcacttgggtttgtaagaagctttttacttaaatgtttaataaatttaatttgatgttttcctctcttttttattgtgttattgtaggaagaaatgcaatggatggcatggaaaaagttgttagaatttgaaaagtaagaatctatactatatttttggtaaaacttcattaataattttcgattat

SEQ ID NO: 199862 - DNA, 955 bp, Cannabis indica
ctcttagctcataatgtcgaagagtattgtcacatcccaaaccccaagggtgggttcagttatgatctttgcagaagaaatgctatgctttcggagaaaggtttagagccaccgccttttcgaaagactggtactaccattgttggtctagtttttcaggtacacactcatttttaagactaattggttttgatttgtagcttagctagctagggtttatgcttgaacttccatgccattgttatttttcttgaacaatatttcattgataataatcaaagttgagaacatcaaaatggtggaaaaaatctaaccaaactagtttaccatattcaccttaaatacacaacgaccatgaaatagggacgtttcaggaaaactggagagtaaacgttatttttgtgcttttgaatggtaataatttgacttgattttttgttttttttttctttgatcaggatggtgtcattcttggtgcagatacaagggccactgaaggtcccatagtttgtgataagaactgtgaaaaaattcattatatggctcctgaaatttactgttgtggtgccggaattgctgctgatactgaggcggtaacaggtatatatgtggctctgtatgaagaacatcttacaatgtgatttagtatgttagagcatttttaatggatatgcaaataagtaatgaaaaattaaaatattgctcatttaaggaaaaaaaaaaaattctccaatgattattcaaaaatgatgtaaatttgacacaacatttgctatgatgcaatatttatattattatagatgtattatttttttatttacatatgtatttatattttttttattattttatatataaaaataataataaaattttgattataaaattattagtttttatatttttgataaaaaatattaattgagattaacttttacatcaagttttataattg

SEQ ID NO: 199863 - DNA, 809 bp, Cannabis indica
ttcaaggtccaggtccaagccggatctaggttccagttggttttggtgtaggatttgggtatgtggctaaaaatgttttttgattgcttttactattttctagttactaaaaaacttcaaatttttaaaaactatttttaaaaatttgaatcaaaaccctattagcttttaaaagcttaattttttgttttaaaaactaaaacaattcttaagttataaaatcaaacatttcaatgagatatggacaatttcagaccaaggtatttaaaactctaaaaataaagcatatacatgtcaaattgtaaattgttattctcatttgtcctatgaatgatttggagagataagcaactcatctcagcctggcctaaatctcaacataaatcaatgaaagcctaacttaaatcaatgggtcaatcctttaatggctgaagacaaacaaagtagaaatttgaataaaggtgaatgagaagttggctaaatagcttaagacaagcccatagataatccgacaaattaggttctcagacaaattaggttccttctactacttataagcacttagaagtaggtttcaaataatttttcagcaattcaacaaacatgattatgattctcacgaaaagctttcaattggtgcaaaattgagaacgagaaatcagagcagagtattataaactggaacaactagcaaaactcatagtacattcatataataaattataaaaatgccaaagcaaagctaagatggcataaagcaaaaaaaatattttagctcaacagtaatttccaacaaaagcaaaacaata

SEQ ID NO: 199864 - DNA, 692 bp, Cannabis indica
gtgcaacttcagccctccctcttggaagaaggaaccgcttaaagctcaccatccaacttggtttccacctacaatcccacaaattttccccgcaggagccaggaggttactgtcgagtctagtgtagcctctctaaacttttgggaaaattcccttccaagtgatcatggaggggaaaggcacgacctggatgattagcgtaatctatacttcccgaaacaagggttggctaaaaaatatgcactaggacctcctcctcgagaataagaaagggtacatcttggatttcaagaaaatgactgagaattcagaggactccaaacctctcagctcatttgggggtatgatatgccgactaccgacgaccgcaatttgttacactcatttgccaaagttattagcttgacgtgcatatacaaccaaaagcaagatacatcttcaaccaagttttcctgagggaaacacgcttgaattgtttctttagaactaaacttagtgtaaatctaggtatgagatgtttattcggccaaaattcttgaaaagaaaaatttgcccgaatcccttcttacagatctcagtagatttcctaaaagtttagtttgtctagttttgcaaaaagctaaaacttcatgatggcacatatcaaaaaaaaatgtcaaaagtctagtaccggcacgggcgttactttcaga

SEQ ID NO: 199865 - DNA, 1077 bp, Cannabis indica
caaaacaggctcttagtggccttggtatccaaggatcctctaaaactcgaactgagtttccattcccaaccctccatcgatattctttaagaaggagcttcttaccccacaccaaacttctccacacaaatgacccatgtgacccacattttgcttccaagatacctctattcgtgaagtaactagcttttaaaaccctactgcacaaggatgaaggagatctaatacaacgccatatttgctttgcaagaagtgcttgattaaagagacctaaatttcgaaagcctatgcctcctttagccttaggtattttttgatttttgtcagatgaaccccaccaaaatctcgccgccattcgatgtaagctattacttaggctcttagatagcttatacatagtcatgttatagattggcatagcttggataatagccttaacaagaacttatttaccagccaccgaaacaatttccaccctttcaccttgttccaaaccttatttttaatttcatcaaccactattacatccaacatcgctgtaacaatgtcttagagactccctcatcgtttgaccaaaaacataattcacacttatgaaagttcaccgcctgccccgaatcaactgtatatttcctcaatacctccataaaactctaacattcatcctcattagctgaaatgaacacaagtaatcattggcaaaaaaaaaggtgtgagaatgagagcccacaattaccaaaagctaaccctataaatctcccttgatcttcttcaaattgtatcagataagaaaaagcttttgcacaagccatgattttttgaaccctaaaatctgcatatcccaacttcaacatcatagcctgaatgaatcgccaatcagctcattaaattttattagcgacggtcctcgaaaaaaggtattttgaggatggacgagaatgcctagttttgtagtagtgtgggttgaaattgggtcgaacccgaatgacacgattatttatttggtttgggttagggttaatgcatgtgacacaaaatcgacacgaattgacctacttattgttgtgatattttgca

SEQ ID NO: 199866 - DNA, 540 bp, Cannabis indica
tatgaggaccctgatgagatcccaactataaaactcaacattgaacagttcacacaaaccttacaaaactacatgcaaaagaacatggagctccaagagggcgacatgtccaaggctttagttgccttgaatccagaagccacctccattcctatacctaaactgaagaatgtcagtagacttcgaactgaacaccaagtgtaagtatatttttacacaaacatactaagtgagttttcagtgctgtaaagtttaaaccagtaatgatctctaatcttgaattagtattaataaccactacccaattaatatcctcaaaagttgtgttatgaaaactatactagcaacacaatcagtctaattcttaagagatgtaatacaattttagattctcaacaaactgatctgatgcaggtatgaactaccagactcacatcctttattggaacgggttagttaatttctatctttggacttgttaatcgaactatatcaatcatactactcacttcatttcagctgagcatttacattgaattt

SEQ ID NO: 199867 - DNA, 1153 bp, Cannabis indica
aagaagaagaagaagatgaaacatacttgtctctctctccatatagctataagtagtcttaaaggcagagttatcagtttccagaataagttacaatggaagaagatggctgccttgaccagctcagtccaagtgaaaaacaaaataaaaagcaaacttcaaaagggtgaaaggtctgctaacaagattttttatataattactctttaacatcatcatagaaagagagatagatgagatgagatggtgcaaagaaggaaaaagtgttgatggatttgaaatttggaatgaaatgataattaaaaattaaagttaatagtttggttgcatgagtggcagaaccccatattattcagaggctgacacgtttaaaaccttcaaattctcatctttgcaggaaatgtggcacaccgtcgcagccaaatgtctttctctggcagatgcaccttattactttgctgactcactttcatttatcagatgtttatcttttctcagtcaaccttcttattttaaaggtacaaatccatatataatttaacgacattatttaattagtgtctcacgatttccatgctcaattatactttacatttcaaacaggaaactgcgagtgatctccagaagtataaagaataaagaggagtagatttacacgcataaaaatacaatacaaactacttgcataaaggttaaaagggtaatgaaaaagcaagttgttttatttttcttacttactaaatgaatgttgtcacaaggaaaggtggctttcattattaccattataataagtaatgtgcttaggtgatcttgctccctcaacatgcatacgggtttgattgcaccctttgtttatttttgtaacaattatgtaatcaaaaaagaagaatttatagaaaaaaaactaaagacacataaattccaatgaaggtctgtataatttctgcaagatgattataattgacattattcttctgtaatgtatgactaatttaaactaattaatgattgatgaagattgaattaagaagactaaggaaagaagaagaagaaatttaattaagaatgtacacaaagggcaaaaggttattaggagctcatttgttgcacatacgtacatagaaacataactagttataatatataataaaat

SEQ ID NO: 199868 - DNA, 1149 bp, Cannabis indica
aaaaaaaattccatcatcaaatcaataatcaacaatatgtgtgtaatgctgcggctgatttgcaaactttttttttttttgtgtttgagaaaaaactactatattaaaaccaagaattataatacaatggacaatagtggatgtggaaattcttccaaccataaacaatgagtatctaccgaaagagcaaatttagagtatgagcagcactatttgcgcctttcttgacatgagaaatttgaactctaagaaaatcggacactaaaagtaaaatattagacaaaaaacaatgaaaattcgagattggggcttgttaggatttcaaaccattaataactacaactgagtgagactctatggatttacaaacttttatgtatttacaatgttaaattttgaagaagttgatattttattttcaaaaaaatatatatatgtaatgctgctacgtggcaaataagaaccgacgggaggttttgaaaagaaaaaaagggtggttaattatgaatcgtgtggccgaccaagcaagatcggtgagaatacgtgacctcattgtcatacacgtgtcaatttctccttttctgatacgtagagttgtggccctcttgtgagttgtatgtaaagcccgacacaattattgcttgcttctttaattatatttagttcgatagctaataaaagttaatttaattggttattgagatactaattaagatattaattaagatatatttagacaataaatttgatttttcatttttgattgtgtgttttgttgttttcaaaattagttttgggaattagaatggtgataaccaaaaattaatactaataagtacacccacctataataacagcatgaaataacaatacatatcgacaaagctttttcaatatataattccgaattgtaaacagtcgaaaggggtgaagaaagaactggtaccgcccacttttcatttttttttgcaaaatatataggccatttttgccaaaagaatttatgattatgaatagtactatataccttctccaatgtgagtctaattaatcaggtatattgcctagcttaatttgaacactacctacccacctaaagctggaatatataatatatagttctctggttatatatatatatatagctaa

SEQ ID NO: 199869 - DNA, 583 bp, Cannabis indica
tatatatatataaaaaagaaaaccattttaattttctccacgctctacttaattaattaaaataatgtagatattattggttaaaattatttcacaaatatagacaagcaattacataacagttgtcgttaaacaacaagaaattatctattttggtgtttaattatatatggaaaatttacatttagggaaatttaaagggtggcatatattatacataaaagtgtttgtcagatgaagataatgataatggattctatttaattaaatattattactgccatgcatgcatgcatgcaatcaatatatatatagatagagatagagagatatatataagcatgcatgcatgataaagcagggatttatggattaggagagtttaattatattaattaatgagatgatcagagaggggtcatatatatgtccttttaaaaatgcagagttgggcagaaggagacaaattaattaaaagggtaaataataagtaatcagaaatgctaaaggtactaatggttcctagcaccctcgatcatatgtgaatatcgctattggtccaactaagtattggatcccatat

SEQ ID NO: 199870 - DNA, 698 bp, Cannabis indica
atctttacctcactaattcatttcctatattgcagatctaaagatctacatcttagtagaaacttacatttatcaatagttgaagacacacatattcgatcatctcatcatatatacgttgaatctattgttctgcatttatataggattgttcatatatgtctatattttcattttaatataacacaccttgtatcgatgcattccatttgttgtatattttaattatttaagatgtttagaataatatataataaaaaataatatttaaatattttactttatatgcatataaaataaaataagtttgttttcaacaaaattattttaaattttaaaatttttgttaaatgtcttagatgtacactattatataaaaaactaagatcaaaattatttaaattttaaaaacatgaatgagatgtatcgatacctaattgttaggatgtattatagaatttcaataatattttatcaactaactttaattatattttaaaattttaaattagcttactatacttttgatagggttggcaatttgtgtcgtgtttcaggtcgacacgattatacttaacataaacattatgtgattaaataatatatcgtaaaatgtaaatacaaatacgatacacttataaataacttaactcgtgacataacataattaatacgatatttaaatatgttatattaat

SEQ ID NO: 199871 - DNA, 1439 bp, Cannabis indica
atcactcttaatattttttttttctcataatatcttgtgttaatttgaatactcgttttaattttatttttataattttttttttaaaaaatcaagtatatcttttttatttttttaataaaatttcacatttttttgttttaataatatttgaaatataatttagttttgtttgataggtatattttttaagaatatgaattggagaaaaatttaatataattagagatattttttttatgtaaaataaaaattattaaaataaagtgtatttaaagtgaagatttgtgaatattaaaataacaaataattatgtgctcccactatgatcataatcatgtgttgattaagaaatattcaaactgatataataaagtgacgaaatactcgagcatctagagtaatcatctatgaaagtgattgtttacccaaaaagttggcttgatggcgtggacattgtttttgacacgtgacacgaaggaaacaacgttagggcctgcatcccaagatagagcagtgttacctacacactggggggacccaagtaagcatcaagatcaagcgaagtcatttctgagtgctatccttcaacaaacaggttgccatgaccctaaaatgaagaacatgaagctaaggatgtctagtggacatcccagggctcaacctgggtccaactttagtgttggcgcccaagttaacattgtgcgcacggtctcacatcagtgttggttcctatcatcttcttatgggcaatctgctagccattatcctaaaatatatgagagacatgcctcaaccaagtttcaaactttggaggtaagtctacgagaaacgacacccgagcactataaagccctaatgggcatttaggttgacattcagtcaatctgggcacaccgtggctagggtttaagtttttagggacatctttggaccctgattccttaaatccatcaaggaacaattccaagacctaatatttcatcaatgtcatcctgaaaagagcccatttccaactataggctccccgttgacattttaacctgtgcaccgcttttattttactgagtgacgcttttgcaaatctaaagaaattgaaattcatggagtagttttcatcaaaaagaagtttaaacataattgagacaaattttggagttgttgccccccaattgggtgcccaggttgatgtattcaacttggggcactccgagacatctttccgaagaagtcttatgagaatttcccttatttttgtccacgaggtagatacaagtgcttttgggaagcaaacaaagccatctaagcaccagatgaaaagctgggcgcccaagttgacataaccacccccgttggtggtttcatcgatcggattatgattccttctcaagcattattcttgtttaactccaaaaataagacatgataagtggagtcgc

SEQ ID NO: 199872 - DNA, 714 bp, Cannabis indica
cgtaagtaagggcgttacaattaaaaaaaaactatttattaatatataaattcattcatttgctcttttagtgaaatatttttttgaaaaaatcactattggattcataacaaaggaaaataagacaattaatggagttgggagggtgtctctttctacattcattaagcattctcctctctgtcctgcatcttgccttctctccttcgtccctttttaaactagtctatgtgaagtctccttttcaaatgtctcccttccttataacctttgcttgtcgcctgtgtctcgtgcgaatcttttgtttgacctttttccttatttctttcctctcttaaccatttcttaattttttttcttgttgtgtctgttgggttttgtgccctaaataaaatcaatttcaatatataatcagatttactaattaataaaagattagaaattgcattatatgttctatgtttcacataatttatttcatgattatacttaatgtataaattctaataagtccagaacatatataaatatatgtatatatatatttgttcatgattatagtgtcgtcagaacagtggaatatattatatgctcaaaagtttaattcccgtgatttgtcagttcactggttttagactggcatgataatcggcgaggtatacttacaccttggataagtgtttttcagagtattggtaaagcttaccagtatcg

SEQ ID NO: 199873 - DNA, 995 bp, Cannabis indica
gtctttgtatttttgcctatgggaagtcaaacacacaaaagtggatctttaggatccctcactctaattttatatgattgcgagcatgaagtgtttttttattattattattacttttgttgttaaaaaaatgaaagcttaatttataaattatcaagcaataatatatctttatagggactttcttctatgggattgaagaagtactgaaagttgaagccatatggaatgatttgtagcagatataacaattgattttttaaaaaacaaattaatttatgtcgcgttttggtaatttttttattttttatttttttaatcatataaataaaagtaaaatttgtgtttttaaaaaaataaaaatgtgttctataaatatttttgttttttaattttaaaaataaaaaacaaaagtgtgttttataattttcatttttattttaagtttttttccattttagtttaagtaggggtgggggtcggagttcaggtctaaggtttgggttggggtgtataaaatattgattaagaaaaaatattgtttaaaaaatttttggaaattattttttttaaattttgagtctcaattacaaagttataaaatgaaaataattttgtagaatatgtttttaaaaaatattcactttttttggattccaattcaagaataattctatggagcatttttattttgcaaccttaagagcatcttcaatagaaaagtaaattagtcatgcaaaattaaactacagctgatttatcaaaaaattgtattccaataacgtgttaaaaggtaatgtaaatttattataacaatatttgttatcatacaaaccataaatactctaggtatattattttttttattactttatacaataaaattaataaaaaagttattttcttttatattttattaacaatattaaaattctaaaaaatactgttttttatttataattttaccacataaaaattttaatttataaaaatat

SEQ ID NO: 199874 - DNA, 414 bp, Cannabis indica
gtttacataatttcccctaattactggtgatttcctcctttgtctcttgttcccgaactaagataatatgttgaggatgtattctggtagagttttgactagtctggtgtgataaaaaattcttcgtcttttagaatggcggggtctcctatttatatgcgagaattaatgtagaattgccctcttctttcgatcaaaatgctttgcacgaacttgttcttctcgcttctttgagatcttccttttccattctgcttattatcctctattctttttgatgttcagctttgatctattgtttttgccttttttttatagtgaaacggttggttttttttgttattcttgcaacatcaccttattagttctattgttgttataagagtaaaattatttttatatccttgggattat

SEQ ID NO: 199875 - DNA, 1964 bp, Cannabis indica
aaaagaaaaattgaattgaatttttatgtactttttttaaaaaattaataacaaataatgtatttatttgtttaaaaagtgattgatgatccataaaaatacaattaaaaattaattttgctttttctttctaaaaattagtaacctaatgataagtctcacccaagagtcttctgaattttttgcaaactattcctaatattgtgtacaaatgcaactaaaaataaaattttacattacaaattaaatcattaaaattggattagttttttggaatgaatgaattttttgttagacctaagccaaaacaagtctgaagacttacatacatttaagtaatcttagccaccaaactctcttgagcgattacaaaataaaaacttagaaacattaaatcaaataaatatcttataaaattaaactataaactgtgaaacacgacttgttcttattacacaatttagaaacaatttgagaatctgtttcgactttaacattgacatagtctagccaatgtcaacaaatgccacaatgataatttgttacaaatacaacttattaattaaaaaatgataaaattttattacaagcttaagcataattgttggtaataatgatctaatttagaaaaacaaaaagaatgtcatgagagagggttatcatatggtagcattgaatacatcccaatcagattggcacatactcaaaaccaccattcatttttattacatatttatctatctcatttctcaaaccctaaccctaactctagctataataatgtatgtacttttcattgactaataattcttgcaacaataacagttatgtcatcgaactttcctccagtgtaggaacgcccagccttggtagctgcttcagagaaatgactttttcgatctttcatcaaagagtaacgacgagagaactctgccaaccaaaaagcactacccatactagaaaacatcttctatatccgaaacaaacatattatcaaatagcccatcagtttccaaaacaataacatcttttggaacaactgtgatttccattgtccctgcagagtcaggagtatcataaccctcagagtttcccaactgataaggcacgttgaattccaccagctgagtctttgatctgtaaactaacttatcatttctaaagataatgaatccactatctccaacgttaacactttgcaaaatgccattattatggcagagtatgcatgcagtggaggagccttgaatctcggccttagcattagctgcaaaagcttcttttaaaatactcttgggatcagtgttgttgttcttgacgatggattcgatagagttgctcatgagttggcgagcatatactcaccggcgtcgatgcctttaccagcccaactgcctaccccgtcagccactccaataatttcttgttttgcacaaatgaagtgtgcatcttctccaataatatcatccttaggaaggtaatgatattcacaaaccattttcattgccataatcactaatattatttccttaattatgactaattaacctatatattgttttttgtgttgagtgtattttcttgatctaaaaatatttttaatttttattgaattaatgatgatgtgcgtacttatatagaaatgtttgtttataatctaagtaatatgatttaattaatgattaatatatattttttaaaaaaatggccgttatagatatctagattaagatttttctagatagatataatatataatttgaagtaataataagaaacgtattttgtttttaaattttaatttaatttgaaatttacatgacccaatatatcttttatgatgtattaaaatataaccaatataattaaagaaaaattattttatatattttctatccatataataattaggattacaacgtctacagaaaatatatataatatttatgaaaatatcttaaaac

SEQ ID NO: 199876 - DNA, 1447 bp, Cannabis indica
tatgaagtatatttgaatcactattaattacatactttttaattgattattgtgtcattttaattattttattgttatcataagtgtctatataaaatgtagaaaaatgataaatgaaaatattttttttatatattttcaataaatatttaattagtattaaatttatttttacatcaaattttacatccttgtaaataataaagagcacaaatacaaaatttggctaaatgtatcatttattaacatggcttttgagatttttcttggtaactagctcaacaggtttttttctatctatgatgatgatactatttatcgatttattatagtttgctgaaaaaaaatcccttttatgatgaggttctcacgataaattgtgtttatcatctttatctcttggaaacattgatggtaaatattagcaatgggcaaaactgggtacaaacaacatcaagatcaatattgatgcagccttgtttcaaaaagataagttgtatggctttggaattgtgacaagagatagttcaagaatgcttttaaaacttaaaagtcgagtatcatgaaggtctgtatgcagggtgagactgttgaagctatgtagttttgtttatggtttagttatttataattgtaaacttttactttcatctctacaaaatgtcatgttacattttattagacgatcaagaaatcgagtagctcactatgtagctagacattctcgtttttctctgatcgtagcattcttgagcacaatgctccaattgattttcaagcacttctatactctaaatgctaaattttaatgaagttgctatttcatttttttatatatatatatatatgaaaaattctacaatgcatcctttaaaaggggtccaccgatgcacccatatctatttcagcattaaggaaaaaaaattagttcaatttttttcatggtcggctacgttgtagttatttaggacatcctacaaaattttgagaaattcaaacaaatttaacacgtcaaaaatagggctaaaacagtctatttcgcacgcgtataaaataaaagagtcttgcgtgcaacagactgtttgaaccctattttcggcatgtaaattttttctgaatctcttaaattttgcaggatatcttaaataattacaacgtagacgactatggaaaaaaattggactaaaaaattctctcagataccgaaataaaaaggaggtgcatcgatgaacctctttaggggtgcattgtagaagtatcctatatatatatattatacacagggatattttcggcataatatcatgagtttttcagttttatacacttaaaattccactttatttttttttaaacctgtattaaaataccttaaagtttataattttccattacttccatcaatactttttctgttaaaatcctattcaaaacatatggtatttgc

SEQ ID NO: 199877 - DNA, 1043 bp, Cannabis indica
cctccgccaattcaggagccacaatccctgccgacatctggttatagcctctacaaaatgatcattagcattcctagccacacaaacaaaactgtaagtgccattgctattaaaaattgcagtatcaatgttcacttttatcgtgtctgcagcaggtttggaccaacccgaatgcccatcatcctctgttagaaaagctgttgtaggaacgagcaaactgtcctgagctttgcaccagttcgagagtgtgttcttggccaaaaaaacaacagaagccgctgtcgattgagtgtccgaccaaaccagatcatttctagttttccatacagcctaacaaagcactgcaacatcagctctctgatctttatccaactgctggaacatggcttccaaccaaccggcaaaagaagtcacggctgggacagttttcttcaaaccagtaagctcccaacaactattagcaaaaggacaatcgaccaaacaatggtaaggagtttcagcatgattcgcacaccttggacaaccattatcaacttggacatgcctagaccgcaagcgagttttagtaggaagacaatccgaagccgctcgccaaaccagatctttaactttaggagggacatacaacttccaaatgcccttccaaatcacagaattactttgttgagactccccattctttgacaattgtaactgcttatatgttgatttaactgaaaaatgccctgttttttcccaacaccaaaaccatacatcagctctacgacttaaagataagggaatactaagaattaaattagcgtccctgtcattaaacaaatcacgaaccaagtcgacatcccaggcaacatcttcagtagacattaacacatttacagtttgatttactaacgccggatgagaggaggagactctcggatcaacttggtcaggcagccacgggtccaatagaatgttaacagttgaaccatccccaatacgacacctaaccccacttcgaaccatctcctgagtttccataatgctacgccacacaaagctcg

SEQ ID NO: 199878 - DNA, 566 bp, Cannabis indica
agagagagagagagaggaatggtggcgatacttcttatgagtgagaagtagtaaggagaggtagctgtgtcataataagccagcctttttcggtttggccgttgaaacaagcattttcatattcatctctttctatttttatttttatttttatttttcaatttacttttttttaaaaaaataaataaataaaacaaatagaaataaaaataaaaatgagagagagcttagtggaggcacgtgtgtcttctctcttgaacacgtgacttacggcttcgatatactcgatgctctcttgcctagggtttcccccactccactcctctctctctcattttattatgttcttttttattaaattaaataagaatatacaataatcatttgcttttaatgttttttcttttcaaaatttaatttagatggtttttctagtaataattgtcataaaattttagtccaaatatgtacacgtatttaacatctactaccacacatactttgtattacatacaagaaatgatttaaaaaattatgatatcttttttaactacatctgaaaaaaa

SEQ ID NO: 199879 - DNA, 603 bp, Cannabis indica
ggttgaaagttcattctaataaaatttacaattttctttcaaaaaaattgttatgagccacttctaaaaggtataataatgtaataattctctttttcattttctttgacttcatgtgtataattagttggattaattggtctaaaagaatttgcattgaatgattcaaattgtgaatttatagatatgcatattttactattcatctttaatatttctactgtgaatgtcgagtaatgacgattaaataagaattacttaaatgataataattattaatgtacttaattttgttaaagaatgagaataaattatttattagactcccactaaatttggagttatagggttggcaatttaggtgtggtcggggattattattattattattattattattattattattattattattagataaataatcacttccaacaaaatatgtattccttttggaaaagaaaaacataatatttatcctattattaaaattttaaaacttattagttgttaaatgtaatgtaaacatagtgtattaaattcttcttttttaaaataatgcaatgactcatttggcactattttcttttcttttttttt

SEQ ID NO: 199880 - DNA, 1560 bp, Cannabis indica
gaaatgacccaggttgacaaaataccaacctgggcacaggggcccaacacaagatcaccctgggcacttggtccttgtttttaccacaagatggcttcgtttgactaatgtgagcacttgtatcttaattatttatgaaaatagagaatatcctcggaagatttcgtcataattctagatgtaagtggcccatgttgacaaaatatcaacctaagcgcaggttcctaacacctatgtgaacttggcccgctggtccctatttttccctctaggttgattggttttttccctaaaagaacttgttttctcgttttggatgaaggcgaagaaaatgctcgaaaaacatctttcagtttggtgataagaggcgcccaagttgacaaaatgttaacctgggcgttgggtgcacctggtgccctaggcaccttgagcacttaagtgaattttggaagttgctccaaatcagatttcgatgcctcaaatatgttcataacatgtccaattcatgtctaagtgcaaattttgggtcatctatactaagacagtcttgaaaatcgaaagcttagccaggttgtcaacctggccgctgggtgaaaccctaggtgcctaagttagcttctaggggttcatttcgactcctttcagtttctaggcttcagacttggattcttctttattcaaaatattaaaggatgttgacttggaaacaacttgctacagcatccaaatacccatttcggagtcctcgaagtcaacttggagcagggctagggacccttttcaaatacccattctggagtcctcgaagtcaatctataattctatagtgactaatcataattctaggagtgttcataagatacgcaattcaatctaattcgcaaagtgcagatattcatacttgtgcagatttgatttgattgaaaaatctaatattcaaacttgtgtagattggatgttgattgatatgtaaaagtaaccgatcaaattcaaattttttttttctttaaatttgttatttttttgttttatttatttttatttgttggagacataaaacaataataattttattttattttgttgttagttatgtcaaaataatttatctaattcacacttttacaaatttgattggattgtatttgaattattatgccgactgaatttaaaatatgaaatctacacttagttagtacaaatcgaatatactatcaccagaataattgacgaattaataaatactactaaaaaaaaagtagagacattagataatatttgaaaaatgataaggctttgaagtaaatgaaaatgaccattattacttcaatcaatttatttttttttatgtgttttactagtgatgtatagagaagtgctcatgtatggaaataatcgaaacatgagaggtgttcttgcttgtaagttgtaacctctaacttacggcattgttttatttcccacctaaccattgtctttatatgaattcgatgatatctagtttttttttttttattggtaagcggattaatttgatgaacaaaaattaatcaaagccac

SEQ ID NO: 199881 - DNA, 1353 bp, Cannabis indica
cttagttttttacaaatcaaattaatacatcagattggatagtatgaaattgagctcgagataaatttaataataacctaaattttgtttggtataattttggacaaatataattggaaattattattttttttagagaaattattggaaatcattttagtaaaccctcttaaagagtaatttagtatattttttatttgtttaatgttttgccattcagaatttttttttttttttatagtcgcatacattgtatctatttaggattatttataaattttcaaaaaaaaaaaaatcaaataatttacacggccaaaaataagatttaaatagttacttgccacgtgtatataaaaaaacaattgtgtatacaacaaaatatataaatctatttttgtcattatagactatttgatattttttgaaaatttacaagtgatcctaaacaactataaatgattatgaaaaaaaagatggactaaaaaaacttcttaagtgatgaaacagataggaagtctaccgaaacacttatttgaggggttgtatactgtatagtaaacttatccagtattatttattcaattttaacacactcaatgtttaacaaaaaaaaaaaattaacacactcaatttttaagagaaaactatttaaaaaaatattagaaagaaggaaaaaaatgtaattttagttaaatttagcatttgttaggtagaatagaaaagtggtggaaaaaattaagagaagaaagaaagtgacgataaagtgaaatatatgtttgtttggttgaagaaaaaaaaggagatggttgagaaattatattgagtagaaacaaatcgatgtatggcctgtgaaaatggaggagaaacaaaaatattattatgaatatcaaattactttcatttatttaaagaaaataattttcaaaaacttaaatcaaaactttatatccaacctctagtatcaaatcaatcttattaacaacaaattagaaatgtataaagaaaataataattttcatgtattctattttttttactttcatctttttgaaaatagcatagattggataaatattatttggtcaattttaacacactatttcaatagaaaactatatttaaaattatttaaaaaaaaattaaggacaaaactgcaatttttgttccatgtccagtaggtaaaaaagtgagaggaaaaaaaatgaaagaaaaagtaaaaatagtgtttttagtaaggagagaaaaaaggcaaaaggttgggaaaaaagttaatatattattctccataaaatagagataatataaagataaaagaaaaatgtctaaaaatagtcataaatgaaattagtcaaa

SEQ ID NO: 199882 - DNA, 749 bp, Cannabis indica
ttcttttcttcttcttcttcctttaaacttaaaaactctaaaatcttatttaattgtgcagggtaatacctattcaagactaggccaactcaaacctccatctcatgttcctcagtctccaatgagatattctaggggtggtcatcaaaatgattgtaagttgatgcttttcacagtttgtttgatatgcattttaccaatattgtttttactttaccaagtgcacggtattaagttcttgtatgattcagttggtggtagaggaagaggtggaagaggtggaagagggcatgatggtgcaactggcaccacagtaaaaatttgcaagggtccatttaagggctatcgtgggcgtgttttagaatttaagggaccaaatgttcgtgttgaattggaatctcagatgaaggttgttacaggcaagtttacccttttcatagaaaagttttgttattggtaaatagatttctggatgggcttttacatgaaatttttccctgcagttgatcggagttgtatatctgataacttggctgttacaaccccccatcggtaattttctagattcatctatttttgccctttcacattttttagacctcttgctaaaagacctattttgctcaaaaatgtttcagcgatacgtctagatatggcatgggaagtgagacacccatgcatccttctcgaactcctctacacccatatatgacacccatgagagatgctggaggtaatttttcttctgg

SEQ ID NO: 199883 - DNA, 587 bp, Cannabis indica
tggggattgatcctcatatgtccatccataactcttaatatgttctagaaaaaagaactatacacgtagtgggatcaacacctacctggagaacttgacatacctgaccaatgatacactgtatatattgccttccaaccactactctgacctctgcagctgaggaagatacaagtactaggttgtccctttggcgaccacatgtaatatgagctaccaaagcttactaataattaggacttcatctctcattcaaattggttggaaactttgtgtaaccctagcttatgagtatcaataaaacatccatcttttcaccattatttcgctgaaattattcttaagcttttgcaagttcacttacctcctaatcttttgtcattcatacatagaaaatttggccaacaacatcattgaagaattcttaccaaaaataatttggcatagtctgtgggaaagtcaatgtccaaagatacaatttttcaaagtaatccattgtccttcaaagatgccaacgcattcccgacgtttataagatatcaaatttttcctacacaataactagttgattgctaacaggatagacc

SEQ ID NO: 199884 - DNA, 2100 bp, Cannabis indica
atacttctttctaattattatatcgaatagaatttctagatattgttgagaaattccaaataatatttgaattccccaaacaataccaaaatttgcaaatggtggtggtggcacacacttgctatgatatttcgtaatctgcaagcggtgtagcctatgcactagttaaatctcttacatcctctacatgaaagtttatttaaacatatggttctcatcgatttttatattttctcaataatcaattttctgttttaatgaaatttcttctttatagaaaaaaagaagtttttacatcacatactgaaatttctaaatttttttactttaatactgtggggtagaattttttttaaaatattgtgtactgtgttaagttttcattgttatttcacagttgttttttagttgttgcactgttgttttaattgttttgtgttattgttttacggttattttataaaaagacagtatttttataaaaaaatccgtatgacagtaaaattataaacttttacccaaaattcaatatttttttttgtaaaaattcataaaaaaaaatgaaaaaccaaaatctaagatcaccaaaaaaatttataaagtacaaaaatggtaaattttacaaatataccaactttattttgtatattaaaagttggtatttaactaaataaaatttaatttctttcccacaaattatttcatttcactttctcttctcaattttggcgcccattttcgaccatggcttctcatctggtaaggttttctcaaaaccctagattttcccactcatcgattagggctgcgatttctctaaaagttttctactttcattcgattatggtttcaatttcaggatacggactcttcgaacccagcagttttcgtcaatggcgagcttcttcgctcctacattgggaaaagggttcgggctttggttcaggttatcagatctgaaaacggagctgtgatcggaaaatcaacggatgataatcagatttttgtgaagggtactccgccgctgggttctctcacgggttttgttgaagtgattgggattgctgatgatgatagatcaattcgtgctgagatttggaacaattttggggataaaattggtatgatttattaatctctatgatgctattaaattagaaatattgttcatagttattgtaatgtctaatgttagtgttttttgtttgaaaaaattgaactttttaatgatagaattttttgattggaaggagaagaagaatcattgataattgttgattataggttcttttatagtgcttgatggttgaatagttcgtttaggttctggtgacactttgcgatgagttagcgatattcaataaaatatattttatattaaattatatgggatttgatacttgattataacaatagtgatatgacacgttgataggcaccacgggtagcaaatggatccttagtttgtagctatgccctttggcccctccctggtgtagtggttgccgttgggacgttttttctagttgttgaccgtccatctttgtagagttcgagtgtcataaatgtcgctcgttgttttgaggagttcaagtgtccttgttttaatcttagacctattgagggactggatcaagctcgagttttctaggccgatgttcgatatggaaacctgtcaagactccattcattctcactagtgcttaggattgccattacccaaagggaagcgaatatcactcgatagtgtagtcagtggtagggatggtttcctagttttctaccatctagtgttcaagctctttcgaaatattactctgttatgaaaagtttaagagtctctgctatggactgttgatgcattgggctagactatctttgctagttcttaattatgctttgcctcttagaaatggaagagtgtgtgtgtgtgaatgttgcagtaccaaaatcagtttaatatttttctttaaatgattagatgacttgataatttaacttcttatgttatacttagtactttattgcttagtaagtagttggactgtgaaattttggtctacaactgtgtgaaagtgttattatttcgactactttgtt

SEQ ID NO: 199885 - DNA, 1943 bp, Cannabis indica
ttcgattatcaacagagtggtctttggtctccaccacttcgccggaaagccttcctcgattctcccgccggtaatgtttgctccgacgtcgaccaacttttctccaacctcaaaaagcccaattggcccaaacgctttttctctttatttgttcatgtaagtattaattaattaattattaattaattaataatatatatatatgtttgaaattaaaataggtaaattaattaattttattattaatatttttttttaattattattgcaggctttttggtgcactagatgaaggttaataataataactattaactatattattattattattaattaatttatatttttgttaagctccattaatttatttataaatgcaatgtaatttttgttgcacaattaatatatattattattacatgatgaatatataattttgtacctactcttttaattaatatttaaaggaattaattattgattatttctaatttattatatatgtgtggtctatgagtattgtgtccatatatatatatacatcatgtccctatcttatctttatcaaatttatatatatcatatatgcatgcatatatatatgtatatgagctgtataaatgtgtgtatatattccatttctaaaaaataaaaaatatattcatgcatgtcatcgtaagtaaacttgatattaatattgtttttctttttttgaaacataatattaatattgttattataatagaaaataaatttatataataaaagattttgaaggacataaaaggaaggagacaaaaatagtctgcaaattagagaaaaaaagagttttggtctgtgttgtgttgtgttgtgtgtgctttatttggtcataaggaacatttgctttgattcttgtaacggttattatttactttatacattcacaaaagttataaaaagccattgttattaggtattgaaagccattgttattaggtattggtagaatttttgttaactgtctaactcgagtaatctgtctaaattaaactaagataattcgacaaaaaattcaacgtatatataatttgtccaagacagattgaaaataatatcaacccgtctaatcaatctgaactaacttaactaactaacccaattaagagaatttgtatatatatatttattatatatttatatattatataatttatatgataatttaaaaatataaaatttaaactaatatgttttttatatgatggttgatttgaataatttatatatttttctcattgttataattaattaaaatataataattgaatgtaaaattttaaaaaaataattagtggtcggttaaggtgggttaacctgaccaaaccgaccaatttcattgaacggggtgttactattttttttttcttaattggaggagttgtacttaattttttgtaacacaatttttatattgagttgaataaaatgtagcaaaaactgatcaaatcgaccgatgtacacccttaggtaccagtagtgtacaacactttctataggtggttaattttcttaagttatatgagacatgatacttaattacaccaatagcagtataacatcaaggagagtgctaggtactagtggtgtcttttaccatttttctaaaggatatctatggtgtctagcatctaatgttattattgatgcaatttaatatcgggtaccacttattttaatttaataaagattatagagaatcgctaaccaattataagacaatatgttatagaggtgtcatgcaccatggtgtcccataacaatgttgttatacataataaaaacaccataggatgcttctacaatctaccccttgaaaatggtctatcgatgcatcccctatctgtttcggcatctgagataaatttttagtctattttttttttatgttcgtctatatt

SEQ ID NO: 199886 - DNA, 3300 bp, Cannabis indica
gagccaacacgccaacgacagccgtccttctagagatcacgaccccataagatacttttccaaagaaagaagcacgctttggcacttccacagttaatagggagccattaccgaagtagaaccctttcattactctggcagccagggagtcaggcaagttatataaccgagcagcctgtttagccagaagagattgattaaacaaaaacatgtctcggaagcccataccaccatcatttttatgtcaatagagacgaggccatgtacaccaatatatctttttcttatcatcgtccccaccccaccagaaagtggcacacatacagtgaatctcattaataataccaaccggtaaacgaaacaagctcatagcataagtagtaatggcctggataaccgattttagcaacacttcacgcccaccagaggagaagagctttgacttccaaccaaaagtttattccaaatcctatctttaatcgactgaaacagaccacttttacttttacccgcaaaacaaggcaacccaagatatttgtcatgacaaggaacaagcgggaccccgagaatgtgggccaaatactcacgaaaatcaagaggaatactagaagagaagcataccgctgatttacgcaagttcacaagttgtcccgaagcattctcgtactgatgtagagtttctctaaatcgaacacaactagccaccgaggcttctagaaagaagaaactgtcatctgtaaacaaaagatgtgaaatcacaagaccccttttgccacattgaagacccgagattgtccctcgaccaatatcatgcttgatgagagaagtcaacccctcaatacacaccaaaaacaaaaaaggggagagtgggtccccttgtcgcaagcctcgagaaggcgagatatggccaataatttctccgttaatgttaatagcataagacaccgaagtaatactacacataagtaacccaacctaaccagggtgaaacccgagtttaattaacataccgcgcaggaaagaccagtcgaccctgtcataagccttagccatatcagccttgtatgccagaaaccctttccttcctctcttgtgccttttaatagcattgagacactcaaaaccaatcattgcattatcagttatcaagcgccccggtatgaatgcactttgctcctctgaaataacattccccagaacctcccgcagtcgattagtaatcatcttactaattattttatacaacacattacagaggctgattggccaaaattcactagtgagggtaggagatttgaccttaggaatcaaagtaataatagtttcattgatagaagaagcagaggccgacccatcaataaaacccaaataagccttacacacatcagttccaacaatgtccaatttttttttgataaaaaccagcattcataccatccttacccgggctcttagctggatgcatttgaaacagtgcaattcgaacatcagcttcagcaaaaggtctcattaacagatcattgagctcattagttaccctaggttgaaccgaatccaacatcatatttagaacctcatcaggaggaccatgagaggtgaacaaagagctgaaatattcctcaaacactacagcgatgccacggggcgacttaacccaaacattattcttataaaaaattccaccaatagcatttttctttttacgatgagtagcactttgatgaaagaaagctgagtttttgtcacccaatttcaaccaagagttcttagcacgagagaaccaatacttttcgtctttgtagagcagaacatcaagctctttttccagtttcttgtaagacaaccaattgctatcatttaagttagagtcaagcacctctaactccttcttcttgcggatagcctcgcttgtcctcttgaaaaccataccattccaatcattaagagcccccgaaacacccttaatcttttgttgtacaccaccaatattagtcgactcagatgacccccagtgattgcaataatttcccggcaaccaggatcattcgcccaagccatttcaaagtgaaaccggcctttttgcttagggcatctcctagatccacaagcacgaaggatacaagtcaagagaggtctatgatccgaccctagagctccaagtgtgagacataagaatttggaaacattgaatgccagctactagagcacaccatgcgatccagacgttcttgcaagaatgagccattcgtatgcttattacaccacgtgaaacgagctccttcataacccttatcaacaagaccacattttgccaaaaccatccataagactttgagcatggatcaaaccaccacttttctcataggagaaaagaatctcattaaaatcaccaccccaaaccaaggtccagaatacccatcagccaaccgctcaagaagacaccaaaattgggacctaaggtgcgcctccggttggccatagaacccagtatagagccaccataaatcaccatgcgagcacaccataacgtcgatatggttgcgagaataacccttaagcaccacagtaacattactactccagaatagacacaacccaccacttctaccgattttctcaaccactaactttccaacaaagcccaatctaactcgcatcacttcaagaaccaagtgagtcacaagcgtttccgacaaaaaaaataatgtttggctaaaactctttgacatgggaactaagaatttggaacgtccggtcattcccaagaccttgaacatttcaagccaagcaattcaattatctaattatctttttttttttgctgtaaataattgttcaattaatagaaatcaaaatgaattatcagcaaaaagcattaaacaattagaagcgagtcacgccatcaaatatttccttaatatttcctttgcctaacttgattaaggtaaacgtggatggtgctatctttgcgacggagtacaagtttagctttagttgtatggctcgaggtgctgatgggaagttaattgaggcagtctcgggtagtcggtttgaggttgtagggcctgagattgctgaggttataggggtgaaagaagcattgagttggatcaagcgcaaagggtggactgatgtggagattgagacagatgcgttggtggtggtgcatctgttccaagctcagttcaaatgtcgtctcaatttggcttgtcggttcaagattgtcgctctttactttcatgtttaaatcatgtgtctttaaattttattaaacggttaatagggctgctcattgtgttg

SEQ ID NO: 199887 - DNA, 997 bp, Cannabis indica
acgtctgcctctaccttggtttctacagaaccttttactctgtcccgaaccactagaggttggaaagatctttctcttctgatcagcatgggtatcaccaccgtccttaccataactaaaagtaggaaaggtggtggtcccacaaacacttggagaccctcagggctctttgtagaaattccattgtgtcctcagctcgaagagccttttgaaccatctcagcgtagctggtgtcgttcattgtaatcactagatcatgcctaatcttggcattcaatcctgccaagtatttcttgctaaaatatgtgggcactatgcccgaagccagcttggcaagtcaatcgaacttttttgtgtaatctgtcactgacatggcttcctcctgaacaaatttagtgaactctttccttttagcgttgcaaacaacctcattattatacttagcattaaataaatcctaaaattcttttcaagtcagtgtagtgacatcccgagtgagggataccatctcccaccacacgagtgcgtcttcttggaactaaaaggtagcacaagtcacttggtcattcccgacaacccccatgaaattcagaattctctcaattactgtgagccaccattcagctttcatcacgtctggacctcctagaaaaacttgaggcgcctgcttccaaaatctttcatacaaaggttccatacggttgccaacaacaagttgttatgcttgcaccgttggaaacaaagcagcatgcatttgtggtggaggcactggagaaggaccctgctgtctcagcctctaaatgtcttcgtctttttggtggattcaggcttttatttctgcaaacctttgctcccaatcctgaggagcttattgtggattttcatgaccacctccttgaaatctttcaaggcctctaccgcatccacagggattcggaggattttgacctccctgattgcctcctgtctcaattatattaccacgacttctcgtgtt

SEQ ID NO: 199888 - DNA, 820 bp, Cannabis indica
aaaaaaataataataaaatattcacaaaattgcacacacacatggtcttaatttgaccatatatagccaagaatcaagcataattaattaagttaattaattgctttctttatatagttccacataagtatacatatatatcttatagataaaaatttattatatattttttataaatttaatgacatagaaagctctattatatacaagttataaggttattatatagggtaattagaatttatatgtaacaagaaaaacttcattataatctgaataattatgtgaaaaataacattataattaatctggaaaatcttaatccaaaaagaaaaattatgtgcagataagaccatgttttattaatttgtaaaaagcatgtgcttagagatgagataatatatatttatattacccttacaaaaaaaaaaatatatatttatattaattaagaacaaagttagaaattagttaattaattaattaaacaatttaattatattgtagttatataatttgttatgtacgtgtcatgattaaactaaaaatttaacataaaaattgagttgacaaaaaattaaaaattaaaaacaaattaaatgttctgcaaaccctaattaaagcaaagccaaaaagcaaagtagtgcgtagtaccaaagtatgtatatatatatacatttatttatatatattataactagggttactttctagatgcccctttaatgattaattatactaataaactaaacctcaaatctaagctcatttatgtatatattataatgattattatagtaatatatttactacagtacca

SEQ ID NO: 199889 - DNA, 893 bp, Cannabis indica
cagtatcgtgcccgtaaggggtggggcaaatggagcagtgataagaataagaacaccttctttactcagtgatttgggagtcttggccaaaaaaaaaattgacattatattaacaaataaatatttgaattagcaatcagtcttagaatcgtgtattgggaccataaatttaataattaatcagtttttttacatgattcctggttactttatcctttagacccgtatgcctattccaaccatcttggtttgaaagataaaaatgtttacagtctcttttgtttggaccttaaggattgggacttgaaaatcatcgatgacttgttgtcaacctgtgactgtgatcttataatatctattcacctgagttcaaattatcatatagattgctggtcttaaaaacttgaaagtaacggcttattttctgtaaaaagtccgtacccattattgaaaaatccaagagaaaattggttggaagatgcttcctcaaatttttggaggaaaatttggaagttaaagatttctccaaaggttagcaactttatttggagaggtattctttcaacttgtttgcatcttctcaaacgttatgtggttattagtcccatttgtccgatttgtcacgaggacaaggaatctatttttcatgctctagtgggttgttcttttgctatagcctcttggaatagatctatggttagtatttctagttggtcagatgccagttttggctactggttgcaatctctttcgacagggatcaatcttcaagcattggaggaagcaccaatggtcgcttggggtatttgaaaggcctgtaacgaggttatttgacaacaaaaatctcctattgttgcatcagttgttctttcagcaagatcactccttgatca

SEQ ID NO: 199890 - DNA, 1048 bp, Cannabis indica
ttttttggttgactgtaacatacccagaaaactgagaaaattccactttgggttgaccaggaagaccaccccagattccatccaattctctttcattattattattattattattacttgctaatactaatttattataagaactaaaacacagttctgctactagtaataatgctataacatttctaacaatagcaactactaccatattctctaataatttttgtttttttctttattattatatttaaagagttgagatgagatgagagaaaagtggtagtgtgtattgattcagggtctagtacttatatatatatgtataagtaggcaaagtagttagttatataataattatgtgatgtgatgagataagaaataataaatatatgaaaatgaaaatggattaattaatatatgtatagagaaaggattgctgcattagtacacaactactacaagttgtggcagctgtggtggtagttgctagagagagctattttttgtgtatcttcatcatatatatatatatgtatatatactctctctttcctaatttagagagagaaaggtacagctggttctagctatagtacactatagagaaaagagcagagagagagagagagatggaatatatggtgaacccagaagaagtgcagctatatataaacaaataaataatgaatgcatctcacacatacatgcacacacatagtacagaaaagttttattaattgtagctacctagttctacatgtatgtacacaatttaaagttgaaatgttgatatgataaaatttattaggtttgtaatgttattcacaatttttttttttacaaattttgataatgcttttgttttttaattatttgaagggttggggtcgttagggtctggagttcgggatggggccgagggtcgaggtctgggctggagactggggccatggtattcgaggttcgagctaagggccgaggtttaggctgtgactttcatttctgaggactttttctctggtgatgtcaactgtgactactttttagt

SEQ ID NO: 199891 - DNA, 782 bp, Cannabis indica
ataagataggcaaaagacaaagaacaaaatatgacgttgtttacatgcagtcgtgaagtgtgagaaggatgccatatttggttagtgttatatttattaacaaaataatcaaacaagtaattaagtagatctatattataatacttacgtaggtttcccactcaaatcactccaacaaaagtcttctctctctctctcgatgaagtgaaagtaacaggtaaatttttttgcatacaaacacgtatcttaatatggatggtatatatatgcactataaatgtatataaatatatattaatataagttaatgttgttaactgatatatatgtagatatccaataaaaatgcaaagtggttttatatgtgagtaaacagtagtgtttcaattattagcctctcattttcttctctattaattagttgtcacatcgtagatatccaattatgatatgttaatagtacacaaatcactaataatattaatcatactaatatattattccttgtttgtatgacgtgttggtaaaatttaaattaggttaagacaagacaagagtcaatatgtgattaagattgggattgatatgttattagtgataatgtttctgtctatacaaaagaaaccaaatcgcatccactgcctattattatgattattattattttctatttctttaaaaagcatataaaattaataaaagaaaaatataattatgttccacagcaaatcagcacttggtgcctttgttggtagtggcatgttgctttggttgtttgtttg

SEQ ID NO: 199892 - DNA, 796 bp, Cannabis indica
aaaaaaaaaaacccttaaaaaggaaaaattgttgtataaattctcgaaaaatttaatttgatgcaaataaattctcaatctcaaaaattgacaataataattccaagtttccaattcttgttagtccattattagtaatcttattaaccaatttgttagagtatttaaaaagtgacacgtgttaatctatcattgattgaaatcataatttttaaaaaaataattaaaaataaaaatattattaacgttttttattttttatttttttaaaaaactcattattactgtttttttttaaaaaacattttttccattacttttatttatttattttttcattttcattttctttctttagttttttccttcagatctatctcactccaacactcttttgctcaatccgccatcaaagcttgtaaggagaagtcagaggttccaacaaaggagtctccttgattttcagcacccaagtcaggcacaagaacagtttgacatcctctttctaattagtgttgcggatttctcgtgactctagccaatgaacccaggtgcacaagtcacgcatttgaacagttccacgaaactagacccatctccatctcatcgagtcatgaacccctaattcaacctaaatgaacttcttttgccaccacgcgacccacgatttcgttgagtggatctgctacattccattgacgattacaacgaccaacgacgagatcaagtaggcagcgaggacaatgataaacttccaagtcgtcaccctattcatcttctacatctggatgtttgg

SEQ ID NO: 199893 - DNA, 1117 bp, Cannabis indica
gggtccctttttgtttttttagtgtcttaattatgtttaaaggaaaaaaaaagtagtgaagagagaagagagttattaaaaggttaatagtggttattttaataattaactttttgatatagcaacaaccaacaattaaggagcgtaccagaaagattttttcatgacataaattaaaccttaataatttgttctttttttttttaggacatcaacaaagataaattgtaagctaaaaaaaaaccatgtcatcttaataattttgtaagtaaataatattaacaatgtaggaaaaaatgaatttattcttagtagtattccttcattcagggtactatctgggactgagactgagactacgtataatatgattttttttttctgctctaagtgatccctgagatcattgtgcttggcgtagtttttaccttaaatcgatcggaggatctttttggcttttttcttttctctcccccagctcttgatgcacggatacgtttttctggtctcctcggtcttgaggactagtctttcccttaggaaatctgtccctctgtggacctttctctttacgaagattggagcaaactttatgtggatcttttaggaagatcagagcaaaattaatgtggatcttgagtctttttatttctttttcaaaatggctgtagggtttgccattgggggactttcggaagggtatcagataaggcttagttctcgattcttgtgcctctgattcttcgatggctgcagagatccttctctcgtcttgtcttgtccaagacgtcccacatttggatgcacgtgaatgcctacgacttccatcgccctttgcatggcgatcaatatctcttgaatccttctaatttgctccttttgctctgccaactcagccctcgtggtcatttggtcttaacgccatcagttcagtatagctaccatcatcatacgcctcatactcttcttagttttcttaatacttgggatcttttagtttcatcttgctcttccacatctatccgtgaaggtacttcttctctatctggacccacaagatctttaggcagatgtggtcgatgagtgcggtttcgggtcaacaccatcataccaagac

SEQ ID NO: 199894 - DNA, 818 bp, Cannabis indica
gagagagagaggtagaggaagagataggtacaaataaaatagagagattgggtttgggatttgtatgaagattaatcttctgtagatgaaaaagatttttaagtaagagtgtgaaagaaatgctttgagggaattcaacagagaatcgatcttgactgtattatactgtgctcttgctcaattaataaagaagatttcagtagtacgtgtgttccagaattggagtaaagtcatggatcacattaatttaggggacttgaactagtatatatcttagtgttgattttattattttattgctttaatcgtttctatttggagtactccgtttatttttgttttatcttcgattattatttgtaaattgttaattattgctaattgtttgttgattaaaatttttaattcttgatttgattctacaattttcacacattatatatatgatcgatcagtgtgatgtaaaaacattgaccttattaattagtactatctagttattaatgaggttgaaatggggtatatactaagagatgcttctatattatatatatgcttagctttataatcacatgatattatactatctctctgcacaaacacaatcttacattatatatagtgtttcacttcaaatatatatgtggttccactatgtaatataatatatatatatatatatatgtatagcaactggcttttgaatttaaaacatgagctggcctaaggtgaattgtgtacactttacaacaagtcataaaaaatgtaaaagtggattaaatatggatgcatatgcatataattatatttatatatat

SEQ ID NO: 199895 - DNA, 755 bp, Cannabis indica
tttcttttttcttctttggtttttgtttctctcatatttatctttcatcgacttgatctgtttattgggcattgtttgattttcaattcgtttctttaggtacctttttctgcatgtttacatcaatgctgacgttatcattttttttttcatgggttgttcttggattttcgatttatatatctgtgaaatggagttttacgtgcttaaatagtatactcatttgataatcgctttcaccatttgttttcttttcttttctttttttttttgctttatattttcttgaagtgattgcgttgactgattgatacatttatttatgagggtagtattaggtattccagtttagagtcggatggaattatgggtattctttcttttttcttgtgtttgcgaattatgtgttgttaaagtcagaagcaagatttgaggtaaagtgtttgtttatttttccaagtcaattagtaattatatcgtttaaagtagtgatatattcatttcgttgattcagaaaaagtcccttaaaggcaattcaaagtattggatagaaaattggaactcgggtgggggatatcatttttttcgtcttcttttccatgtttgttggattggatgagaacttgaaatgatcactcccatgatcttgagtgccctacactaagcaccacaatgcttccaagtgggaaatttgtgattcattatctaatgggtcccatgtaaaattgttgttgccttttatctgtgaattcatt

SEQ ID NO: 199896 - DNA, 877 bp, Cannabis indica
aaaaaataaaaattccagctttctgtgctaatgggcagggttaccctttgattccattcttatgatctaactgagtcactttgagctgacaactttgaatcaagaaaattttactctgttttcggaataaaataggtttaaacttaagaaacaatatgttttgcagtgaactagaaaaacaaccaaaacctcataaaaattgatgttatatagttttatagctcaaccactcggtcatgaaccagcatgaaatatttaagataccccatgtatattttattagttttgcattaaatgtgtacaaatataccattgaaagagtgctaataatattgttagtttaattaataataaatgagaatatccatgtagttttttatttaatttttagagaaaaggtaataaattgttttttggcagatgcttgtaagtatgaggataagatttctgtattgactaaattgagaattatttttgtatattttgttttttttctaaaaaaaagtccaaactttttcaagttttcattcaatgattctcatgacctatcagtccataaattttgttccttaccaagacattggttattaattggtattatctccaacaccacaatcactaatatagagtgtgaagcaaaagcaccactatatatatttatatacatgtattgtcatcatacactatcctctgttaccattaccaacttgctaaaacaagtgtcaatcttttgaaaagatgcacaaacatactactttaaagaaaaaaaaaaaaccaatttgatcactttaacaccttaagcttagattggttattctggctcaatatatataccaactgtagtaaattaaaaaataagaaaaaaaaaaaaaaaacg

SEQ ID NO: 199897 - DNA, 690 bp, Cannabis indica
ataatataaaataatataaagtagatgagaagaaagaagaagaagagagaaagagaaagtgaatgagaatttctgagttgtttattccaatggggtgaacccctatttatacaaatacaagagtgagatattaagaaactaagaaaaagggaaactaaggaaaagaggaatgttgattacaattcatggtaataaataaaagatttggacatccacataattattaatatttataacatgctttactattttattttattttttttttttttgtaaatcatatgctttaccaattaataatgaccatgaaagtctttcatatgtaactagataaaggaaaataactgaatggtggttggtttttatgacaaaaataattaaggaaagaattcatttgagaaaatggtattaattttgaaaaagttactatatattgtaggttaattgttttttattttcttttacaacggctaattttagaattattgtagattataataattattttgagagtaatttttcaacaataaagattagtaaaatttatatcattattagaaaatgaaaatgtacaagaataattgtcctaatgttaaaaaactccttggaaagttttgttttaaatcaaacctagctatatggagctgttacatatgtgtaagaacttcttagaaggaaaaaaatgacaaa

SEQ ID NO: 199898 - DNA, 1264 bp, Cannabis indica
attacttttactatttataaaaaaaatcttatagatatatatttattttctaatttttatatatttcttttctaatttttcaattagaagtaatgaaatcgagttttgttatatattatttttagttacattttaaagtatattgtaataatgtggtactgttggatttacctttggagaaaaaaggctataaaattcaaaggggtggtgttgcaaagagccaaagactaatgtagactggtcagttgctcgattcaaaaccccatttgtcgttagatgggataattactaaatcaatattatgcataaataatgtggattattttgatacttttttctcaaattattaaattaagctcgtcaatttacgtgttagctacacataagaaaggtggaaaagtctgtgatatatgtttttgatggtgtatttcgttaggctcctatccaattcagaatttaagaaagcttgttagtcaaatttttgttaaatgtaaactttttaagaatttaactaatttacagtaatttacatcttcattgtcttcttccctacttcatcttcttcaattcaattttagtctttaattctactattgggaacatgggtactaaaatccacacaaacagtttatcttcatcagcacatgttctcagattcataagtaagtttaagaatactgcaaagttgatggaagttcatatttggaatcacaagaaggatctacagtctacactggtaccaaacaattgcttgatcacttgggattgattttggaactattactctcaaactctcaattaagcaacaagtatgttatgacaaaaaaaataaaaacatacatataaaacaaatccatggcctatggtcaaggaaggaattgtagactaggatgaataaattttactgggcgaattcaggtctcattgtattgctattgcataaccattttataggtgttctatatagtgtcataaggtggagtttcttattaaaacgacagccttctattataatacatggtattgtaaaccacattaaattgtagtttgcttgcaaagttcgtcactaatcacaaatttaaattttgtttcttcctaaaaaactaattgccaagattgtttatcttcagttgatatcaacacaaataaagtcttgtgaacaattattatatcattaatctaagtaaacaatgaaaaacttgtacattatatatgtttttcaagactgaaaatcataacaaaacagaattactaatactaattt

SEQ ID NO: 199899 - DNA, 748 bp, Cannabis indica
attataatcttactccaattctgtataatcacatatttaataaaatatgcctaattaattagtattatatttttcgagattttacaataacggcaatcaaataatcaattaccagcggacccccgccgctaatagtccaccgctaatatggtttcaaactaaaagaagtggcaaatttacgcttattttctattttctttattagcagcgaattactccgtcggtaataactaaaagtccgccgataatactaaaaaaaaataaattttattattttactttaactattactagcgagaagcatattccactagtaatactctcattattagcaggaagcgtattctgctggtatataatactcttattattagcaacaatgttaaaaatgtagttaaaattatttataatattttaagtattttaaatttaaattaattttttttatataaaatataatatagtttttatttttaaatatatataataatattataaagttaacaaaaacatattttattaaaattaaagttaaaaaaataactaataaaataagaattttattacataaccacatttatatagaatagatatatgtattaagggatggttttacaattaatttacattatttgtcggcaaatcttgatatatgtaatatttataatggttacgtacgtccacataagatttgcgtgtaatgacctcaaaatcaaatctcaattggcatgacatctccatttttcca

SEQ ID NO: 199900 - DNA, 1659 bp, Cannabis indica
ctcatgtaatcggccagcagattgcttcttcattatcaacttatagaggatatcatgacaaagcaggaacaagaaaggcgataatgggtcgccctgcctaagacctctccttggcaagaactttttttggggcacaccattaataaggaccgagaaagaaacagaagaaacacactccatcattagctttatcacctggttatcaaacccattacctttgagaacttctctcagaaaattccactcaattctatcgtaggcctttagcatgtctaactttaaggccataagacctcctttgcctttcttcctttttatggtattaactagctcctaagtcagaatggatgattccgctatccatctccccagcacaaaagccgattggaacggacaaattaacttgttaatgacctctcttagcctggtagcaagaattttcgaaagaatcttgtacgcaaaattacacaagctaataggtctggatttgtccacggagcaagcattctcttcttttggaattaggcaaatgaatgtgtgattcagctggccttccatgtttcccgaagtgaaaattttttgcaccatgctgattacctcgatacccactatatcccaataccttcgaaaaagaatatcctggcatcccatcgggtcccggggccttgagaggatgcattgccgccaccacactccaaatttcctcattagtgggaacttttttctacctagcattctcctcctcagttaccagagggttgagaagcttgtagaagcactcatcgagctttgtatttgctgaactatacaagtcgtggaagaattcattgaaaaccctcccaatgtttttaattgatgtaacccaattcccttgatcattcttcacagcattaatctcgtttcttctccttctaacaatcgtggaagcgtgaaaaaatttagtatttctatctcccaactttaaccaaacttctcttgatttttgccgccacattccctcttttcgtatccaaagctcagctattcttttcattaaagtttcctcttcttgttgaagcaaaggcgagaggggctgaccttggatccaaccaatccgctcctccgcttctttaatgagcttatcacagtcattgaaagactctcttttccacctttggagagtagttctcgtatcgcctaaacgcgagctaagactgctacccccctgccccttagtcaagcattcttgatagtttccccacaagaattatcccttgcccaagcttcaaagaaacggaaaggtttgatccctcttcgctgcctaccagatgtatctaggaggataaacccatgatccgacaccgtgatcgaaccattcaacacttcagtcgcaggaaaggaagtcacccactcacccgaagctacagcccgatccaatctctcccttgttaaaccccccaagaacctattattttgccaagtaaacttgcaccctcggaaccccaagtcgatccccccagaattctgaaaaaaaaaatcaaaagaattcctgtatcccttaaagacactcttctaccaccactcttatcacactggtgcgcaatcacatttaaatccccgattaacaaccacggcctcaagcaactattttactctaccttccattaactcccagaaaga

SEQ ID NO: 199901 - DNA, 3089 bp, Cannabis indica
acagaagcaaaggctttgttgatattaggaaaaaggatcttgcatcaagatttgtgatctaacattgctataagactcatttaacccaattacgaattcaagaactcaatcctcattttgatattcctgaataacctttgtagcaccacaaatacaaacaggttatagtctaaactcttgaattaaattccaaaaagactttaatcgagtgaaataggtagtgacaaaatttaaagcatgcatagacctcttagcttcaaacaccctaggtgcattcttttggtgatatctctcttgaagttcagaccaaattctggctgcattatccggatacatcacactgtctgcaatctcactcaaaacagtgtgaagaatccatgagatcaccaaactattacatctgagccaagcatcatatcctcatcatcaatatctggttctggtaatcgtccatcaataatctttatcttatttctagcagcaagtgccaccatcattgatctcctccaagaactataattctcacaaccaatcaagatttttggaacaagactttcaacagattgatctccattcgatatatagtaaggacttcgaggatcatatcactagatgatcgattattaagttcgagaacagagaatttgttagaatcatcaggtgcatctccctagttccttgtacttcgagtatgagctccaccacgtgccatctccaatggcaaacaagagtattaatgtatcattgattctctgaatatggaatacaaatagtgagcctatatatagctcagcaataccgtgtacaaaaccagtaaaaagaagttacaacaacttcaactaactgtaactaactaatgacaactgacactttcacgaactactaactaattaatacttaacactttcagtttttttttgcgatttgctctttgctcttttgtgtggtgtttatgagctgatttgttctaaataaataaataatatattaattttaaaattatgaatttgttatattacttttaatattaacgatatttaaatgtcactcgtgatactcttacttttagtaaagattttacggcgttattaatagtaccgttgtgatgtccttaattcttgtagtgatatatatactatagctagtatcatagattcattattcattcttatcttttaataattaataagcaaacatgcttaacatgtttcagcgttataatatattagtcttatatatattttcaaagagagttaatgttttactatattagggtttttaacagaaagctacaatttgttttaccaacaccaactatggataaacgtacgtttcttaattttgactgttgaataaaacttacacgaaaaaatgacaaatatataataaatactatgaaagaaaaatgaaaccgttataagaaaaatatatatatatatatatgtatgtatagtatataataacaatggggggtgacaatattaccccttctaaataattgtaagaataataataaaaataaaaaaataaaaaatagtaactgtaaatatttaagacttaccatgtttgattttgttcctcccaaacatgaaagaattgtagcactatattaagtgtcaatgggtaacatcatacgtaccccaattctcttctctataccattattttgctttgcttttctaaaacccatatcaatggcaagtttgaacaaagctatgaaggacctatctcttggtcttaatcaagaccacctggtattatttctttctctacctactatttgttttaactttgtactaattgataatttagttatgcatgcttagttccaaagattattatttttctcttcttcaagatttgattgaggattttcttcctcttttattagtaaaataagagagatttatgatctctcttagttagatctatatgtttattgattatgtattatattgtacgtgtttcttttgaataaattatcaagatcctgccttgaattaatatctattagcttctttcgagtttatttatagattgtcttttaacggttttttggttgttgttgtgagatcttactttgtttaaatttaattctcttttaagcttaactatttatatttgttttggcggtttttatcgccgccatattttatgttttattaaagctaatttttgttgaatttattttaaaataacattattttaatagtttcttgttactttcatcaccgacaaatctagtagtgtagtcattttaagcattatttataacattatattactttagcgatttatcattatttttaacaacaatgtaaaatcttttagtgtattaaaggtaactcttttttaagtttattttttaattttatagttttcttattacctaattattatttattgttggttattataaatacaattacaaacaatatacatatataagagatagaatattattgaaaaattatttcaattttttaaaaattttacaggatatcttagacaataataaaaaaaaattagataccaaaacagattcgggtgcatcgatacattcatttttaataaatacattatagaaacatcttaaaatatatatataaaaaatgtaaaaataagtaaaataataaaaatctaatatacaaataccttgcttttatttttaaacttatctaactaaaaaaaacctaaacaaaaagtccttatttcttttccttaaattctccttccatattttattattattattattattattattattattattattttgggttaaggctccttccattactctaaacccaaacttgggcatgaaaattcatacctatctccatatttcttttaaaataaaaaaattaaaaaaataatccatatttataatcaacagcacatccatttccctcacactccatatataattttcacaccctaaacttcacttcacctctaaatagtatcttatttacacagtcaatattaagaaattacactttaatctcactttttattttttattttaattttttttttaactttaccttttaactttattacccattcgtcatgttctcatcgtg

SEQ ID NO: 199902 - DNA, 1219 bp, Cannabis indica
tttctcacaacacaactataactgttttttcccgcagcacagctatgctaaactaagcctacatcatttactacatctctattaaaagcaatgtccacaacatgacacaacaaaattattacatacatatgcaaatatgtattacaatagtagatatatatataattaagaaattattttgtttttcaaaccttcaaaataaggtcttttttttttctttcaaggaaaattgtaattgacaaataaagtagttatattgtatttgtatacgtgatgatgatattggtttaagaaattgtagaggagagatttgtaattggtgatataaatatcaatattggtcaaaataggaattgaattaatgccaagacaaacatctcttatataaggtcacatgaacatcacatgcaaaggtatggtcgcagctttttaccagttggaccatgaatgaaccatataatttaattaatctattgcttattatttcagtcaatatatatatatatatatatacattattttcatggaaataacaagaaagagaagtcatctaataaagagatatactaataaaatttggtgatgagggaaagtgactttcattaaagagttttttggattttcgaaacctgctcaatatgccatatcagcatatatatctcaaatactcacaagatcaagtaaaattagcttcattcatctctctcatatgtggtgggtaaaatcatatttgtctaaatataaatatcatgttaattaaatattatttttttctcttattcacataaaataacatatttttttacaaaaattatttcaatagtaggtaactctaaaaattattcaccatgatcccacataccattttttaattaaattttaaattatatatattctcttaaaaattaattagtgttaaagtaactttttttttaaataaataatatcacatgactattgctcattttagacaataatattcataaaattaatttaaaatattgatcaaagtgtacgtagcaaagactggcaaccccctattagagatgctctaagtaatcatatcctataggaaaaatgctaaaaggtactggtacttagcatcctcctcagtatcagtgtaattatgtatcagatttcatataatttaagctagtaatttttaagaaatatcgttaaccaattacaacgcgtcatctataaaaagcgctaggtacta

SEQ ID NO: 199903 - DNA, 745 bp, Cannabis indica
taaagtatgagtaatattagatacacactttaaattttattatatggttaagattaaataaatattattatgttgttttaatttacaatgtataattaccatcttaacaatttgactatatatatacttattttttttattctgtacaaaataataagagagaagttgacaaaatttaaaaaaaaaaaaaaaaaaaaaagaagaagttaaagaatactatttattttaatactttaaccaaatttatatttaaataaaatttaattcaaatatactttttttttatgaatattaagtaatttataatttcaaaattaacataaagtatttcttctaatttaagaaaataatactaatttagcctttgtgtttagcataaataagcaattgatttttgtgttttgttaaataacacattttatattgtattttacagaaagattaaattaatactcagaacttaatttttaattaataatttttcaacaagttaatacatccagctcaattttttttttaacaaaatacttaagatctatgccaaacaacgatttcaaatttaattatatcaaaaaatcgattaatcaaatattgagctcatgatatcaatttgatctatttacaaaatgggaatccaaattatcattaataaattacactaaacatgaaatccaaatttatttttaataataaaatttaaaattttctataaaattatgtatatttatttaagataatatagttt

SEQ ID NO: 199904 - DNA, 1294 bp, Cannabis indica
tagaaattaaaaaagaggaaccaccaatttatagtcactcatggacatttcatgtattgccaacgtactctacccacaattcaaaaaaataaataaacattttcatgagtttcattttattttatttttgccgaaactcaaagaaactttttttggtggttgaaaaaaatgtattagttgaatatttgagtaatgatgggaatgcatttttttccctttaatttgttcaattattattttatttattttttaaaaaaaggaaatttgttcaattgttgaaaaaaaaaaaagagggagtgcatctatctaatatacgtttgaagaataatatattttttttattaataatgtttgagaagaaaaaaataatcacttataattatttggagtaaaatagacaagtagttggaggaagaaggacacatgtttagctgctgacagacccacaaaaggggaagtgtccaccaaccaagcttctccaatggctggagtggtgttgtcgtttgttacactttgcacacattttttattttctttcattttcattgctttctcttatcgtaattttatatatagttgttagatgatactattacttcacttctagaaaaatggaaaagaaaaaagaacaagtaaatgcgtaggagaaataattatgatttaactaattgtgtacattgatgcttagttctttatttgggtaaagttgatcatcatcatgtgtaagagaattttgaaattaaataaataacgtagaaaactatatatcactcccatttttctttatgtactgtcaaattaagtttacaattgttacctttcttttattacatgtaccaaatggtaattaagctttctggtgggtgtggttttaaacgaatttgtagttaaatattttcaaacggtggatagagacttaaatgagctatatattatatattgtgtcatattaacaattaactaaaagttgggtctatgcattaaaaaattaaaaatagaaagaaaaaaaaatgtcggtcttaatgattaaacaagctcctatcctatcttgtcttggggccacatttgtgtatagttggaccaaagatgtgggtactggaacaacagcctggccaggaaaaggaaaccttaatccatctttaaattgttgtgtcaaaaacgacatcgtttgtcaaatcaattataaagaataatgtcgttcatcgactagaaatgcaccttctcttttcgctctctttcaagatcggctcaacctaaaaaaataagagaactactaaaagcaaccctaatttta

SEQ ID NO: 199905 - DNA, 685 bp, Cannabis indica
aaaaaggaagaaagagagagtctagcattcacttgtaaatcaagtcatgagtttttctcaatttaaagcttgagcttgtttggtcatgaatcctggttctgattcttctgtcattcacattcaaagacagttgataaaggaaaatactgttatatatatagaacggccatgaagtttatgtaatatatattcagctggttttgacatggtattattactaaagatccatgtagtgatgtggaaatgctaatgtgttgtcacttgtcgaaatcattattataaattggggtttcattcgcattgctacaagtcaccataggatctcaacactgcgaactttgatatgaattatgagcacttaaatttaatcattttaatattttaaattataattttcttttggtgatttgttttaaatatcattaatagggtctgattttcactcacgacaacactacttcaaatgaattacgagcacattaattagattatatcaatattttaaaatagagattacaacctcttagtcaatctttgtgctcgaaaattcatgttgaaatattttttttcaattttttttatggcagtattcattatgattacagttttatatttgtaaatttttgaaaaatttcgaatggtttaagtgctgaaaatacgtctgaagttttttgaacacgcgtaa

SEQ ID NO: 199906 - DNA, 1915 bp, Cannabis indica
ttaaagaaagtcaacgcatcgaatgaaggtttgaacaagatctacagtcaataatttaagttcattgtctagttatgtacttagccaaataatccatgtgtaaatattaaaataatatacatgacatagcacattatatagatatggctccaaaactttacacaaaaaaaaaatcacacccaaattcattaagatatatttatagtcaactatacataaattgatcttcatatatatatatatatagagccccatgaaccaatcaacttgaaatcaactctattaagtcttatatttctgaccactgttatacatatatatatatatatacgtatatatgtgtgtctgttcttcatgtttgaaagtaaaatattcttaacaatattatcatgcataattcaacttccttgggatttaagtaaaaataagatgacgcactaccttacttcatccattttcatatatactaattcatcagttttatatatgtatatatatatatatattgtacgcagtttcccagataattagcttttaattatatgtatattcaaacttcaaagcattgatgatgaaataatattattgtgttgagtaatccaaaagaaaaatggcgcaaatggtggtgggagatgatattgagtcactgagaatcgagttggctgagatcggaagaagcttaagatcttcgtttcagcgtcgaaacaattccagtttcagaagcattaattcggcgaacgacgacggcgatgttgccgaagccgaacgactagctctgcaatggaccgttattgagaagcttcccacatttaataggctgagatcttctttattcgatttgaaaaatagcaatggtgatgatgatgaggatgaagcgaagaaggtggttgatgttacgacgcttggagctcaagaacgacatcttttcattgagaaacttatcaaacacatagagagcgataatctccggctcttgagaaaaatcagaactaggattgacaagtaagtattcttgattattaattaattaattaattgtcctaattaatttgttaaaaaaatagttatcaaagttgtttgatttgtgtgatttatagggttggtgtgaaattgcccactgtagaagtaaggtataaaaatctgagagtggaagcagaatgtgaagtggttcatggaaagccattaccaactctttggaattcattcaagagcattatgctttctgtgagtagtaacttgtaattaataatttcaatggaatatgattatgctttaatgggcatcaagccaaattgatttaattagtttagactaattaatgatcttgaccaaaattatctgatcttatcttatattattatattttgttttacaggggtttgcaaaggtgccgggtttacggtcaggtaaagccaagataaacatatttaatgatgttagtggcgtcataaagcctggaaggtaagcttccagccttgtctgctttgagttttgaatttgatcacatataataatataattactctttgtccttgtctgtgtaattggaattttgtggatcaattattgattaatttttacaatatatatcggatttattataaattaacttgactgtggactaagtcagttactataatttcacttgtgtgggtgattaactttttgaaagctactcaactcctatcttggttgactattacttatcagggtccttactccttatcttaagtcttgtacttagttttgcaagatttttcttttttctttttggtttagttataaagagatatggtcaccatatatggtaggatccacagttgtgggtccaagagtaggctttcttattttccagtttcaacaagtcaacataagtacatttttctgaagttaaaacactttttttttttttttt

SEQ ID NO: 199907 - DNA, 612 bp, Cannabis indica
ctaggaaaaaagatatttttgatcttttattaaaaaaatattttagtatttttcaaaaattagtaaaaaaaaaaaagtaatattttaaaagggaaaacaattttttgagctcgtgggctaggtgtgtgtccttcctccgaagaaaaaactcaaatttgtcttaagataaagcgtgtattttctgttcaaagtttcttaaaacaagcttgcatgttttaagagactgacctctagctcgtgctgcctggtttggtagttagtttccattgttcagctccaacatccaaggtagttctatgagggattaatcagacattagagataaggtgatgacgtattgtactattgtggttgcttattcatagatatttgggatgaaagtaataagtatatgatctagggtactgaggtgaaggtggaaaacattatttcaattacttccacaaaattctcgaatattttcatgacagggaactcaatgatggattcagaattgatggctttacctatcccagttctaccagcctcagagcattatgttgagaattatgtgctattcattaatgcttcttggaaggatggagtttctggttttggtgttgtttgggttaa

SEQ ID NO: 199908 - DNA, 1243 bp, Cannabis indica
atgtattgtgtaatatataaacgacttgaatcaaaaaaataaaaaaaaaaaaaagtacatttacttatatttctctataatatatataacgatcttcatagaaaggaaaaatacatataaaacgatattcattagtgttataaaatgaggatggctttcaaatcaagaggacacttaaatttgataaaaatatttatccgtgagacaatgataaaaattgatcattgagaaggaaattaagcaataataatcacgtggaatataattaacaagtagatagattccacgtcatacgtgtttctatctctcatttaaaatgtaatgaactatacaaaacgtagttaagcacacaccaagcaaatattcacacatttcttttttcattattaattttgatgggaacttagatagtctccaacataaaatttaaatatagtgcaaagtttaatataaaaagtaaattatattttacatgacatttgtaattgtgttcacatattattgtggaagaaatttagacaacactaaaaactcacaattattcaagttaaaacaagaatactagcactcactttaaataacaaatactcaaaatagtaaagcgactaatagaatgaaaacatcaaaacatataaaaaatactgaaagattatagtggtccagtcagatcttgatttgtttaatccatttttaaaagaggtttatgattagttttattcggatggaatcactcctttgtataaaaagaaagtgatccttcgttcatacaaccagtcaaacaaggtcattattatagtaattacatttaattaagatacatttaaaaataaataataaaacagttttgaccgttcttatttaatacacaaataggtgcgactatcgaagtcgcacattgactattcatatttcgagcaacacaaactcaggggttctccgatgctactcgcatatgaggttcatgtgaacctctcgagcttctttataatacagaaagcatgcgactatactagtcgcgtattgggcattcatgctgacaacactagaatttgcgagttctaagtgagttgtcacgcacactagtcattcgaaccaaacactcataaacgatagcggtattctcattgtatgcaggggagacattttgttgttgcctataatcaatatatgcgcgacttacgttcacttttctgtcttgcttttactttgcttatgccagtgcatagtgcgtcgacctacaccg

SEQ ID NO: 199909 - DNA, 709 bp, Cannabis indica
tatatatatacaagctagtcaaagaaatgaaattaaaaaaaaaatagcattaaaatgatagaaataaataaataaaatagtaggaaggtaggtaaacaaaactttaaagactatgataaaattaaatatatcatttaatgtgtgttaggtatattaatgaattggtctagtaaatggccataattagctccatgcagcaaccattaagcacatcaattttgacaaagtgtagttgaatgatcttttcaaacatttataggacacaaccatattttttttggacatcactatatatttattttattaataattatccatatatatataccaaaaaataataaaaaataataagtatataattaaagttctatggacatgtccaaaatctactatataccctaccatgtgacatagaagaagtatacaaacttagatatatatgttatcaattaaaacactatgcatataataataataatgataataaatattacttattttgcatggctctttttatttattttatatatatatttatatatatttgtggggttcaggatctgcagatgttatatatgtatatgatcagtagaataatcacatataacaaggaggaggatgcttatatttaatgcatatcttacattatttgttttaccttaaccccatttttttttaacggatttgattagtattttttttatttatt

SEQ ID NO: 199910 - DNA, 2562 bp, Cannabis indica
cttctccggcgacgttacactgcaagagtttcgttcttttctgtctgaactctccttcgattcaagatcctctgttcttcacttggcgtttctatggctacagacgatcaaggctccactcacgacgaggacaacaatggagcacctgccatggttggcgattcatctaatccaacattgcagacttacctgaatcaacatgccattcaacagaggagtcatcttgaagatccctcacacccgtattacttacatcatggagacaatcctggtaatgttcttgtctcccaacctcttaccggccaagataattacatgtcttggagccgtgctatgattcttgccatttctgtcaaaaataaactgggttttttagatggtaccattcctaaaccttcaccttctgaaactctaatgtacaatgcttggtttagaaacaataatatagtgatttcttggatcttaaattctgtatctaaggaaatttcttcaagcattttgtacgatgaatcagctgctgctatatggtctgatcttaaggtccgttttcatcaaagaaacggccctcacatatacaatttaaggagaagtttgatgaacttaaggcaagagaaccagaccgtaagcatgtattacacgaagctgaaaactatatgggaacagttgtcgaattacaggcctgcttgtgtctgcaacggatgcacctgtggaggtgtcaagaaacttcaagaacaccaccacatggaacacatcatgtcattcctcatggggctatccgattctttctctcaaattcgtggaagcatattgattatggatcccttgcctgaaatcaatcgtgtctttcatcttgtatctcaagaagaaaatcaaaaaggaaatcctaccaacactgctgatccaaatccaggaattgcatttgcattccaaggcgataaacaaaactccaacaaatctgattcccagggaaacaagacttatccacccaaaaggaacaggcccttttgcactcactgcaatgtccttggccatacaatcgagaagtgttacaagatccatgggtaccctcctggatacaacaaaaataaaaccaaagatgctgcagcaaatcaagtgcagatcaaagaaacaggcagcactcaagaagagaatcagactttgttgcctcaattaactaatgtgcaataccagcaactcctgaatcttttagctggacagcaaactaacattcccaaatcagatgctggaaacactgcaggtaactcaggtattgtaatgtcaaacatacttgattttcctatacataactcatggattctagactcgggagccactaggcatatatgttctaacataaatctatttcgctgtgtttataatactaagcctacgagattattattgcctaatggggactgtgttgtcgttcaccaaagtggcactgttgtcattacagaggaaataacattaaacaatgttctctttgtaccaaatttcaagtacaatattatctccataagttgtctaacccgagacaattgtctcaaaatcaagtttaccactgatgcttttgtcttgcaggatctacccaacaagaggacgattggcagaggtgaatccaaggatggtctttacatactggattcaacacctgctgctgcccctattcttagtgtttctgctgatgtttggcatgctagactaggacacttatctgataaatgcttgaaattgttaggaaataaactcaattgtaacacctctgccctacataaaaactctccttgttatgtttgtcctatgactaaacaaaagagacttccctttccaaataacaataatcttgctggcaaaatttttgatcttgtgcattgtgatatttggggcccttaccatgttccttctcactcaaatttcagattttttcttacccttgtggatgaccattctagatttacttggatttatcttttaaaacataagtctgatgctttaaatatcattccacaatttctatcttatgtcaaaaatcaattcaattgcatgattaaaacttttagatctgacaatgcccccgagcttactttcaaagatcttttcttgaaaaatggaatcatgcatgacttctcttgtgttgaaactcctgaacaaaatgcggttgctgaaagaaagcaccagcacttgctcaatgttgctcgagctttgtatttccaagctcacttgcctataaaattttggggagaatgcattatgactgctgcattcttgatcaatcgaacccctactgctgttttgcacaacaaaactccctatgaattgttgtttaacaaacaacctgaatatcagcaccttaagactttcgcatgtctggtttttgcttctactcttactgctcataggacaaagtttgaacctagagcacgcacttgtgttttccttggatatcctcaaggagttaaaggatatcgtgtctatgatatcaacaaccagcagatattcatctcaaggaatgtggtgttccatgaacacatattccctttctttaaattaaataaaaccaat

SEQ ID NO: 199911 - DNA, 545 bp, Cannabis indica
ttccttcaaagaaaaagttacaaggaattctaattccccctaaataataagatttacataaagagattaacctcaattcacaaagtgttaattttaggaatttttacactaggtatcatatttagctatttttttacaaaatttcattgacatttttataattttgaaatctagggtttgtattgaagtaattgggtaattactagtaattaatttattttaaaatacaaaagtggtagattgtatatgaatttttattttcatgtttagcaaatgaattaataattatacggtttaataatgttaattaactaaaaatggtaatattttgtaataatacactcgtaataattaaagagtgtaatttaaacatctcacttactttaaattacataattattgtgcaattacttaattaaaaaaatacataaactttataattattttaaattacactcaattttctttatgtaataactttttatacgcgccttatgcaataagttactttaaatacgattatgtgataattataatatcaaaat
